United States Patent Application Publication US 2006/0134663 A1 - sequence listing, part 115

SEQ ID NO: 356478 - DNA, 2075 bp, Homo Sapiens
  misc_feature (232)..(232): n is a, c, g, or t
  misc_feature (1406)..(1406): n is a, c, g, or t
  misc_feature (1410)..(1410): n is a, c, g, or t
  misc_feature (1424)..(1424): n is a, c, g, or t
  misc_feature (1428)..(1428): n is a, c, g, or t
  misc_feature (1436)..(1436): n is a, c, g, or t
  misc_feature (1444)..(1444): n is a, c, g, or t
  misc_feature (1472)..(1472): n is a, c, g, or t
  misc_feature (1474)..(1474): n is a, c, g, or t
  misc_feature (1481)..(1481): n is a, c, g, or t
  misc_feature (1488)..(1488): n is a, c, g, or t
  misc_feature (1501)..(1502): n is a, c, g, or t
  misc_feature (1505)..(1505): n is a, c, g, or t
  misc_feature (1507)..(1508): n is a, c, g, or t
  misc_feature (1516)..(1516): n is a, c, g, or t
  misc_feature (1518)..(1519): n is a, c, g, or t
  misc_feature (1544)..(1544): n is a, c, g, or t
  misc_feature (1549)..(1549): n is a, c, g, or t
  misc_feature (1551)..(1551): n is a, c, g, or t
  misc_feature (1561)..(1561): n is a, c, g, or t
  misc_feature (1610)..(1610): n is a, c, g, or t
  misc_feature (1621)..(1621): n is a, c, g, or t
  misc_feature (1629)..(1629): n is a, c, g, or t
  misc_feature (1639)..(1639): n is a, c, g, or t
  misc_feature (1650)..(1650): n is a, c, g, or t
  misc_feature (1674)..(1674): n is a, c, g, or t
  misc_feature (1678)..(1678): n is a, c, g, or t
  misc_feature (1680)..(1681): n is a, c, g, or t
  misc_feature (1712)..(1712): n is a, c, g, or t
  misc_feature (1719)..(1719): n is a, c, g, or t
  misc_feature (1733)..(1733): n is a, c, g, or t
  misc_feature (1738)..(1739): n is a, c, g, or t
  misc_feature (1754)..(1755): n is a, c, g, or t
  misc_feature (1806)..(1806): n is a, c, g, or t
  misc_feature (1814)..(1814): n is a, c, g, or t
  misc_feature (1822)..(1822): n is a, c, g, or t
  misc_feature (1991)..(1991): n is a, c, g, or t
gctggaccggtccggaattcccgggatggcggccactgtcagggcgcgagcggctggagcgcacgcagggctggagcgagtgcagccgccgccgccgccgacaccgcggcacatgggccggccccgccgctgccgtcgcccctagccccagcagccctggtctcgcagcctcctgcggctctggtcgcccgaccagccatgtctctcggcggagcctccgagcgcagcgtcnccggccaccaagattgaaattaccgtgtcctgccggaacctgctagaccttgataccttctccaagtccgaccccatggtggtgctttacacgcagagccgggccagccaggagtggcgggagttcggacggaccgaggtgattgataacacgctgaacccagacttcgtgcgcaaattcgtcctcgactatttctttgaggaaaagcaaaatctgcgcttcgatgcgtacaacgtggactccaaaaccaacatctccaaaccgaaggatttcctgggacaagcgttcctggccctgggagaggtgattggaggccagggcagccgagtagagcgaaccctcacgggtgtaccaggcaagaagtgtgggaccatattgctgactgcagaagagcttagcaattgtcgggacattgccaccatgcagctgtgtgcaaacaagctggacaagaaggacttctttgggaaatcagaccccttccttgtgttctacaggagcaatgaggatggcacgttcaccatctgccacaagacagaggttgtgaaaaacacgctgaatcctgtgtggcagcccttcagcatccctgtgcgggctctgtgcaatggagactatgacagaacggtgaagattgatgtgtacgactgggaccgggatggaagccacgatttcattggtgagttcaccaccagctaccgggagctgagcaaggcccagaaccagttcacagtatatgaggttcttaaccctcggaagaaatgtaagaagaagaaatatgtcaactcaggaactgtgacgctgctctccttctctgtggactctgaattcacttttgttgattacatcaagggagggacacagctgaacttcacagtagccattgacttcacggcttccaatgggaatcctctgcagcctacctccctgcactacatgagtccctaccagctcagcgcctatgccatggccctcaaggcagtgggagagatcatccaggactatgacagtgataagctcttcccagcttatggctttggggccaagctgcccccagagggacggatctcccaccagttccccaaaaacaacaatgatgaggaccccaactgtgcgggcatcgagggtgtgctggagagctatttccagagcctgcacacagtgcagatctatgggcccncctnctttgcccctgtcntcanccaagtgncccgggcngcacccaagatctctgatggcacccagnantatgttntgcacancaacactgatggnntcnannctaacatnanncagaccaaggaggccatcgtcagcncctcnanattgcccatntctatcattatcgtcggtgtaggaccagccatgtttgaggcaatggaanagttggacggngatgatgngcgcgtgtcntctaggggacntacgcagagcgggacatcgttcanttcntnncattccgagattatgttgaccggtcgggganccaggtnttgagcatggcccnactgnncaaggatgtgctggnngagatcccggagcagctgctgtcctatatgcgcaccagagacatccagccncggccccnaccccctnccaaccccagcccgatcccagctccagagcagccctgaggattccacatatccaatgcctcacagtctgcaagcctgctcacccactgcttctgctttaagccagaggcacctggaaccctggacttcactgggagggccaacttggaggatcagtgctggctgacaanccctccgcctccttgcctgcagagggcctggcactatcaccacctctctgccttcatgccaataataaagctgatctttattcc

SEQ ID NO: 356479 - DNA, 1594 bp, Homo Sapiens
  misc_feature (1202)..(1202): n is a, c, g, or t
  misc_feature (1562)..(1562): n is a, c, g, or t
tggaaccactgcattgggggcaccccccgggggccaataaaaaacagggcttggggccgaagttctttctttcctccataaacccaagggaaaggaaaatgttaaaaacggccccaggtaagaggccaaacaaccccgtgaaagaagggtcaaaaggatggttccccttgggagaagggtcctcttttgcacgggacgaacttgtcccggccacgatccaagaagagcagtggttactgctgcccaccagccccccacatgcaggaaatggcgctgtgccctgcagggagatcagcagcacctcccactcgtcctcccacagttggggccccggccgacatgcgcacctccgtggaagccaggatgaccaccagcccgatcttgtgcagccagtgcaggttcatctgctgccccacggcaatgtgacatagtgccaggaccagaaggccagcgatgtatgcgaaggcagcagctgtggtcacaaggatgggtacgggccagtcgctccagtagcccatgcggttgtagaggtaccagttgaattcatcatagtcattgtggacttcccaccagaagtaaagccaggtgagcgtgaggccaaaggtgaaggtgaggagcaggaaccagaggcgctcccacggtgtggtatcatcatgggagcgctggtagcgcttccaacggcagccgtagatgcccgtgaggcaggagaggcacagctgtggctcgtagtactgcaggggctggtgtctcaccatactcgtgcccacggccctggcgcctggccctcaggcgcccatggaggcccccagcttgtcctggaagaaggtacccggtggctgtgagctgggctcctggaggtgtcttgtccacagaggcagtgatatcacttcactgggagagctgcagccttggctctcgcgggccgccgggacagaaggggacccctgtgttatcttcggggcaggcgttgaacccctcgcctgaggcgggacgaaggtgacagcctgggctcgcggcaccagcccggcggttcggtccgactgtcctgcccgcctaggacccctcacggagcgcacgacccggccagggcttcccgggcgctcgcgctgttccaagctgttccaactgaaggttggggtctcgtgaagccagaggctgggggggtccggggtcccgtgcaccggaggcgagggcctggggcnacactgcgctagccctggagctggggttccgaccctcactgacggaaaggcgcggagcgaccctgcaaccacggaccggtacggcggcgttaggagcgtcccgtcccggcgcagcgggtcagggccggggtccgcgcgtcccggccgcacgccccgaaccgcggggctgggacgggcagggcagggcaggcgccggcggggaggcgcggcggccggagccccgcggggacgtctttccaggtcccgactcggctctctctgcaaaacggggcgaacctcggcgcggcggccgactcccgagctcccggccgcggctccacttcctcctcttcccctgctccctcgccgctcgctcagcgnccgcgccgctgccacctccgctgtaatccccg

SEQ ID NO: 356480 - DNA, 1675 bp, Homo Sapiens
  misc_feature (201)..(255): n is a, c, g, or t
  misc_feature (343)..(353): n is a, c, g, or t
gccaaattgaactggataaagaaggataagttttgagtcctcaggataactgtgttgattcttccgccctttccagtaaggctggaaaagattttactcaccattattctgcatagtgggccagccagaattagaaggaccctgaccctgtcaaagattttaagagggcacattttagtcactttaaatatggtagtggtnnnnnnnnnnnnnnnnnnnnnnnnnnnnnnnnnnnnnnnnnnnnnnnnnnnnnnnagatcacgagatcaggagtttgaggttacagtaagctgatcgcaccactgcactgcagcctggatgacagagtgagactttcttgggnnnnnnnnnnntgacagtgaagcagacttttagaatccgagatgtcattgcagaattattggtataaaattcagctgcaaagtgaagaaattgaaatggcccacacgttgatatcctgtggcaggttatacccttcatgttagcaaagacgaagccacgtcgctgtgttaagagggacaggctgggccggctgcagctgtagtggaagtgagggacacagggaaggaatggggagcagcaatttggggacagtagactggagtcactttctgactcaaaaaaggtcaagtacttattaaaaactatcttggttttctgttcagacttaggctcattttgatcattttaaggtcccagttgtcaaaaatatcaagtgaatttgtctcaggttttcagaaacaaaatttacaggaaggaagcaaaagccatgtcagtagccttgagctgacagctttaaagaaactggcaaacaggtaggttgtcctcatatagatccttccagtattctgaaaaacatccttttatttcttaaaaccagtaacccttacatttttcctataggatagttatttttgttgagatcaaatagacattctataaatgttataaattatgcttgcagttactcagcctatctaggcttaaggtttatcaatatttgaagttgaaacatcatcttatgaggtttagttttaggaagataaataaatatatcaaagtatttcataaagttgtatcaatgttccttctaacattagaagacttactgactgaggccatctgtgaacgactaggtgatctcagaatccttccagctctaataccctctgactaacactcacccagaattgctgtctgtgctggctgtgatctgcctccaggagcatacgccatcctgcgtgctgtgtccatcacagtgtctgtgctcggtgccttaccactgtccgtgtccttggacgcctgactggacagagaggagccctgtcccctcagggcacatgagtccgtcgtggcaggaggagacgggcctcagtcacagtgtcacagacccttgtcacagtggacactagtcattcctgccatgtccttgcagcccaggaggactaaaaagattttaatgaagtctgtgttactcattctgaagaaaagaacttacctgagaggagtaatatttttttaatatatattgggtcagggacagggatggagtggttgttttatgtttacatttttaataagtaaaatagaagatttaagaactaatatttatggtattgaactttaagtgtgatatattccttagaaaaacacaactttaataaaaatggaaact

SEQ ID NO: 356481 - DNA, 784 bp, Homo Sapiens
  misc_feature (418)..(428): n is a, c, g, or t
  misc_feature (492)..(555): n is a, c, g, or t
  misc_feature (609)..(609): n is a, c, g, or t
tggcattttgcttccttcctgtaaattttgtttctgaaaacctgagacaaattcacttgatatttttgacactgggaccttaaaatgatcaaaatgagcctaagtctgaacagaaaaccaagatagtttttaataagtacttgaccttttttgagtcagaaagtgactccagtctactgtccccaaattgctgctccccattccttccctgtgtccctcacttccactacagctgcagccggcccagcctgtccctcttaacacagcgacgtggcttcgtctttgctaacatgaagggtataacctgccacaggatatcaacgtgtgggccatttcaatttcttcactttgcagctgaattttataccaataattctgcaatgacatctcggattctaaaagtctgcttcactgtcannnnnnnnnnncccaagaaagtctcactctgtcatccaggctgcagtgcagtggtgcgatcagctcactgtaacnnnnnnnnnnnnnnnnnnnnnnnnnnnnnnnnnnnnnnnnnnnnnnnnnnnnnnnnnnnnnnnnagtcaccgcgcccaccactaccatattcaaagtgactaaaatgtgcctcttaanatctctgacagggtcagggtccttctaagtctttgctgggtacacctttgcagaatcaatgatgagtaaatcatattcaagcctttactgagaggacggaagacattaacacagttacccttgagggaactcaagactttattccatacttttatccaagtttcaccatttggcc

SEQ ID NO: 356482 - DNA, 478 bp, Homo Sapiens
  misc_feature (19)..(19): n is a, c, g, or t
  misc_feature (30)..(30): n is a, c, g, or t
tttcctttaaaagctggtnaagctcaaggnctactggaacagggctttgggcctcccctcccctgtaaaattttggtttcctgaaaaacctgaagacaaaattcaacttgaaaattttggaacaaactggggaccttaaaaatggatcaaaatgaagcctaagtctggaacagaaaaccaagatagtttttaaataagtacttgaccttttttgagtcagaaagtgactccagtctactgtccccaaattgctgctccccattccttccctgtgtccctcacttccactacagctgcagtcggcccagcctgtccctcttaacacagcgacgtggcttcgtctttgctaacatgaagggtataacctgccacaggatatcaacgtgtgggccatttcaatttcttcactttgcagctgaattttataccaataattctgcaatgacatctcggattctaaaagtctgcttcactgtca

SEQ ID NO: 356483 - DNA, 424 bp, Homo Sapiens
  misc_feature (145)..(145): n is a, c, g, or t
  misc_feature (170)..(170): n is a, c, g, or t
ctgtgctcggtgcccttaccactgtcccgtgtcccttggacgcctgactggaacagagaggagcctgtcctcctccagggccacatgagtccgtccgtggcaggaggagacgggccctcagtccacagtgtcacagacccttgtncacagtggacactagtcattcctgnccatgtccttgcagcccaggaggactaaaaagattttaatgaagtctgtgttactcattctgaagaaaagaacttacctgagaggagtaatatttttttaatatatattgggtcagggacagggatggagtggttgttttatgtttacatttttaataagtaaaatagaagatttaagaactaatatttatggtattgaactttaagtgtgatatattccttagaaaaacacaactttaataaaaatggaaact

SEQ ID NO: 356484 - DNA, 1663 bp, Homo Sapiens
  misc_feature (144)..(154): n is a, c, g, or t
tgagcagtgaagatcaacagattcttattttcaggaatcagaagttagtaaacaagttagtgaatccgaagaatgaccagcggcccaacaacaaggtctgcaaagaagcaagagtggaagaaaatcagcgcagctataaacagnnnnnnnnnnngtcgccgtattaagggtcaagcaagattcattcagtgaaaacaagagtaattctgagcaagaagagcagcaaaaactacagcagtagtaagagcagtagcagtagtaacagcagcaggaagatgaaaatgatgattccaagtctcctggaaaaggcagaaagaaaattcggaagattcttaaagatgataaactgagaacagaaacacaaaatgctcttaaggaagaggaagagagacgaaaacgtattgctgagagggagcgtgagcgagaaaaattgagagaggtgatagaaattgaagatgcttcacccaccaagtgtccaataacaaccaagttggttttagatgaagatgaagaaaccaaagaacctttagtgcaggttcatagaaatatggttatcaaattgaaaccccatcaagtagatggtgttcagtttatgtgggattgctgctgtgagtctgtgaaaaaaacaaagaaatctccaggttcaggatgcattcttgcccactgtatgggccttggtaagactttacaggtggtaagttttcttcatacagttcttttgtgtgacaaactggatttcagcacggcgttagtggtttgtcctcttaatactgctttgaattggatgaatgaatttgagaagtggcaagagggattaaaagatgatgagaagcttgaggtttctgaattagcaactgtgaaacgtcctcaggagagaagctacatgctgcagaggtggcaagaagatggtggtgttatgatcataggctatgagatgtatagaaaatcttgctcaaggaaggaatgtgaagagtcggaaaacttaaagaaatatttaacaaagctttggttgatccaggccctgattttgttgtttgtgatgaaggccatattctaaaaaatgaagcatctgctgtttctaaagctatgaattctatacgatcaaggaggaggattattttaacaggaacaccacttcaaaataacctaattgagtatcattgtatggttaattttatcaaggaaaatttacttggatccattaaggagttcaggaatagatttataaatccaattcaaaatggtcagtgtacagattctaccatggtagatgtcagagtgatgaaaaaacgtgctcacattctctatgagatgttagctggatgtgttcagaggaaagattatacagcattaacaaaattcttgcctccaaaacacgaatatgtgttagctgtgagaatgacttctattcagtgcaagctctatcagtactacttagatcacttaacaggtgtgggcaataatagtgaaggtggaagaggaaaggcaggtgcaaagcttttccaagattttcagatgttaagtagaatatggactcatccttggtgtttgcagctagactacattagcaaagaaaataagggttattttgatgaagacagtatggatgaatttatagcctcagattctgatgaaacctccatgagtttaagctccgatgatt

SEQ ID NO: 356485 - DNA, 1513 bp, Homo Sapiens
  misc_feature (97)..(97): n is a, c, g, or t
  misc_feature (1057)..(1057): n is a, c, g, or t
  misc_feature (1059)..(1059): n is a, c, g, or t
  misc_feature (1317)..(1317): n is a, c, g, or t
  misc_feature (1494)..(1494): n is a, c, g, or t
acagccagagccttcagggggcacgaggttctttctccctccaggggccgtcctgggactggaaaggtggcaaaaggaactagcgcagcactgtggnacactagtagacgaggtggtggaacagaacgcgagggtctggggtccagtcctggctcagtgaccttggtcaagtaacatactcactgtgggctcagtttccccctcctgtaggcaggaaggtgcttactctagagagtacatagcttaagggagccattgagctactgaccttaaccaaggctctatgatcccctctgaatgccacagtgtaaacgcagaacaacgggggctatgggcccagactgagccttacctgctcagcagagacagtgatctgggggcctctcagggcctcttctgcctgcaggatgggccacagcttcactccttcttcccagagcccagcctcctgaggagctgcttccccttggagaagaaaccccacaccttctcgcttctgccctggggctccccacgttcaatcctgggggcgctgccagagctgggggtacaaggcccacctgggggccctggggacccttgtgtggtacagccccagtcatgttgctctctctacatatatctatctccatctagcactggactcttctcctcctcgttctctgactctcagcctgggtgtcctgggttccctgtccaggccgcctgcctcaggcccagggccctccaggaagttggatggaaccaggcccctttgtccatttaattccccatagtagaaaccgtcatcgtccatgcccccaaacacagtaatgacatcccctgcccggaagggcagctctgcctccacgtccatattgggggaactctccttgggggttgtagtcaaatgcagccaccatggagtggggagctttcaggtcagcagaggggaccagcttaggggggcctggacagggctgggcagggccttccgactcagctttcttggagcggcggggcttgggaggaggcccagttgtgtgggctgtggagtatctacaaacggaccattccntnatccagaaaagcagagagaaagcgaggcaggggaggtgggagagacaggactgggactctggagtttcctctcagggccgtgctaggttactgagcttgtttcgtaagggcattcatctcccatccctgacaagagccccacccaacctccaggacctcaaaattcctggctgcatggctgtattcccctctgcaacagacgcccactccacgcggccagcccacgtacagtctgaccactacgcagcagggttcaantcatggctccaaggctctgctagagtctgggtaagtgggagcaccccagacacaacaattgctcagggtcagtgtggagttggaagggggctggtgggaggtgggtgagggacagcagcaggtcattccttagccctttttgagaatatctggggacaaataaccccgctggagcanttgctgtctcccagcaggg

SEQ ID NO: 356486 - DNA, 1122 bp, Homo Sapiens
  misc_feature (1)..(1): n is a, c, g, or t
  misc_feature (7)..(7): n is a, c, g, or t
  misc_feature (13)..(13): n is a, c, g, or t
  misc_feature (19)..(19): n is a, c, g, or t
  misc_feature (21)..(22): n is a, c, g, or t
  misc_feature (29)..(29): n is a, c, g, or t
  misc_feature (35)..(35): n is a, c, g, or t
  misc_feature (39)..(39): n is a, c, g, or t
  misc_feature (45)..(45): n is a, c, g, or t
  misc_feature (56)..(57): n is a, c, g, or t
  misc_feature (64)..(64): n is a, c, g, or t
  misc_feature (70)..(70): n is a, c, g, or t
  misc_feature (82)..(82): n is a, c, g, or t
  misc_feature (95)..(96): n is a, c, g, or t
  misc_feature (137)..(137): n is a, c, g, or t
  misc_feature (143)..(143): n is a, c, g, or t
  misc_feature (147)..(147): n is a, c, g, or t
  misc_feature (161)..(161): n is a, c, g, or t
  misc_feature (167)..(167): n is a, c, g, or t
  misc_feature (191)..(191): n is a, c, g, or t
  misc_feature (193)..(193): n is a, c, g, or t
  misc_feature (231)..(231): n is a, c, g, or t
  misc_feature (271)..(271): n is a, c, g, or t
  misc_feature (291)..(350): n is a, c, g, or t
  misc_feature (377)..(377): n is a, c, g, or t
  misc_feature (391)..(391): n is a, c, g, or t
  misc_feature (399)..(399): n is a, c, g, or t
  misc_feature (401)..(401): n is a, c, g, or t
  misc_feature (411)..(411): n is a, c, g, or t
ngattanctgggncctccngnnaaaccanaaggtntggnttctcnccaagggaacnnctcctcnggaggntggctctggaanaagagtgaagctnngcccatcctgcaggcagaagagcccttagagcccccagatnactgtntctntgagcagggaaggntcagantggcccagagcccccgttcttctncntaacactttggcattcagagggaatcaaagagccttgntgaaggtcagagctaaatggctccttaaggatgaactctntagagaagcaccttcctccnnnnnnnnnnnnnnnnnnnnnnnnnnnnnnnnnnnnnnnnnnnnnnnnnnnnnnnnnnnngactggacccaggaccctcgcgtcctngtccacccacctcntctactantntcccacagtntgcgctagtcccttctgccacccttcccagtcccaggacgggccctggagggagaaaggagcctgtgccccctgatggctctggctgccctgaccctgtcttcccccccctgaaggaaagtttgcactggattttattggagccccatctccccagcgggcaggcgggcggagcctgtatatatgtatatactcagtgcctcagttcagcttcctccacctcgcttccactgcacaggcccaggaaggagaaaggccaagccaaagtgggccccaccctgcccccgtcgtgctccatccttccctgccggggcctgctggcccctgtaaggtcccgcccccaaagaccctggggccagcggggccgaaagcggagttgggtttgccttattttgctcattggattcaagttcttttgcatagttttcttctaacccctgttggagtccaggggctggagaaaaggacagatttatgcagctattttcatacattccctgttcagagtggggtaggggttctccgccgttacccgatccactccatcccccaccctctgaggggtgagtgtgtctttgcatgtttcctttgctgtggtgggagatagtttgactgaacccccaccttgaccttggtctccaggggtgtggaatggtgggggaatttgtttaaaaagacattttattataataaagtctattttcacaaaatc

SEQ ID NO: 356487 - DNA, 1797 bp, Homo Sapiens
  misc_feature (45)..(106): n is a, c, g, or t
  misc_feature (254)..(271): n is a, c, g, or t
  misc_feature (274)..(376): n is a, c, g, or t
  misc_feature (424)..(432): n is a, c, g, or t
  misc_feature (1057)..(1059): n is a, c, g, or t
  misc_feature (1062)..(1062): n is a, c, g, or t
taattttagtagagacagggtttcaccatgttagccaggatggtnnnnnnnnnnnnnnnnnnnnnnnnnnnnnnnnnnnnnnnnnnnnnnnnnnnnnnnnnnnnnntgaaccactgcacccggcccagtactgcatcttaacagcaaagccattttattctactttataactgagagacttgataccatccatctctaggttacagaggataatttgaagagaaatgttactgtagaatatatagttctgtacnnnnnnnnnnnnnnnnnnaannnnnnnnnnnnnnnnnnnnnnnnnnnnnnnnnnnnnnnnnnnnnnnnnnnnnnnnnnnnnnnnnnnnnnnnnnnnnnnnnnnnnnnnnnnnnnnnnnnnnnnagcatccagccagttctgtactttgaatatggagtagtttacagctannnnnnnnncttactggtaatcttaactaatatgattcccttgttagagagcctctcactcccccacccccaaaaatgtctactattcatgacagtaaccaattattctggacaaattgcttctttttaatttgagctatctgccatggactttctaaaatggaaacacagcctgagtgtatcttagggagagtttgattgaaaaaatccaaatcactatccatatagatcatggatataaagagatacctgatttttattaaaaagatactttttcaaatttaagagttaatcttggaaatttggaacaagtaaaggggcaagtaaaccttttgatgaaatataaaaggaactcattgcatgaagttgactatcaaattctgtgatgtgtggcttcttaaaaatattctcagtgtcttttgtgtgcgtgcagcatgtacatttgatgttatgtgaatgttgagttttttcttctaattttcacttcagcagtgtttagggctttcagatgccttattccagtgtgaacagaaaaagttcatattttatgtggttaatgctttgatgtgtcacataaagagtagtttgtagaaaatgttggcacaattttaacttcttagtggcttgtgacatnnngtnttatatatatatatgtacaaagagctttataacattcctgtgtttagtagtgtaaatgttctgggcaagttttaatattttgaatgcctttggatattccagcaataaaggcatcatgttctgcaataggatttcttactcatttacctattttaacactaaaatagaccacaactgagcacaaattccttttataaatgttatagaagcagggaagaataataaacacatttgtgaattgtggttcagtttatttatctttagggaaggctgatcatttatcttatagcagataaccccagcctcttattcattatggttaacttttataatttatcttattttataatttaagaatatagtacatatcagttgggtttggttttggtcatcgagactaaaagctccatcaaaacagaactttgtgttttctgctaacttatttaatgacacaagttttaagagaaccacaattcattgattcacttattcttttccctaattgtgaattttagtgataaatacacctgtactactgaagaaaatattctgacacttcacgtgtgcaaagtatagaactgacagtgtcagtttcagattttgtatgtacgatttctggcttatatatccaatggtgcagattttgaaatttgtaagaacaaaatttgttaagaaaaacaacttgctctagttttgtgaccttgtgtacttttgaaataaaatcaagaaagcagt

SEQ ID NO: 356488 - DNA, 1562 bp, Homo Sapiens
  misc_feature (229)..(230): n is a, c, g, or t
  misc_feature (1213)..(1253): n is a, c, g, or t
  misc_feature (1495)..(1495): n is a, c, g, or t
  misc_feature (1498)..(1514): n is a, c, g, or t
gccttcaacctccccagaaagctgggattacaggtgggtttgttcccacgccttggcgggaaatgcccatttgtaacattatatgcctaaacccctgaggcgctcggatatataaaccaatattaccaagccctatagagatataggctcaaatacaatgatagctggagtcttcaacatcccactttaaacactggacagatcttccaggcgaaaaaccaacaaagannccatccaatttaatctacactatagggcaatagatacagaacattccattcagtggctgcagaatacacattcttctcttcagcacatggatattctcaaaaacagaccatatgttcagccctacagaagtcttaaaacactcaaaaaactgaaatgacatcaagcaccttttctgaccacaatggaatgaaattagaaatcaataacaagagaaattttggaaaatgtacaaatacacggaatttaaacaatatgctcctgaatgacaagtgggtcaataaagaaattaagaaggaaattgaaaattttcttaaaacaaatgataatggaagcacaacataccaaaacctatgagatacagtgaaagcaacactaagagggacatttatagctataaatgcctacatcaaaaaagaagaaaaacttcaagtaaacaacctaacaatacatcttagctagaaaatcaagagcaaaacaacccaaaattagtagaagaaatacgatacaaacgatcaatgaaccaaaaagttggttttttgaaaacataaataaaatcgacaaaactcttgccagactaagaaaacaagagagaacaccccaataaattaaatcagagatggaaaagaagacattagaactgatactgcaaaattcaagggatcattagttgctactatggcaattacatatcaataaattagaaaatttagaagaaatggctaaattcctagacacatacaacctacccagattgaaccatgaaaaaatccaaaacctgaacagaccaataacaagctaacaagatcaaagccataataaaatgtctcccagtaaagaaaagcctgagatccaatgacttcactgatggtttctaccaacatttaaagaactaagaccaatcttactcgaactgttctgaaagatagtggaggatagaatacttccaaactcattctatcaggccagtattaatctgataccnnnnnnnnnnnnnnnnnnnnnnnnnnnnnnnnnnnnnnnnnacagggcctgatgaacactgatgcaaaaattctcaacaaaatatcagcatagtgatttcaacaacacagtaaaggatcattcatcatgaccaagtgggatttatcccagggatgcaaggatggcttaacacatgcaaatcaatcaatgtaatacatcatatcaacagaatgaagaacaaaaccatatgatcattttaattaatgccaaacaagcacgtgataaaatttaacatcccttcagnacnnnnnnnnnnnnnnnnnggagtatagaagaaacatacctcaacacaatgaaagccatgtatgaca

SEQ ID NO: 356489 - DNA, 2230 bp, Homo Sapiens
  misc_feature (19)..(19): n is a, c, g, or t
  misc_feature (26)..(26): n is a, c, g, or t
  misc_feature (30)..(31): n is a, c, g, or t
  misc_feature (33)..(33): n is a, c, g, or t
  misc_feature (131)..(177): n is a, c, g, or t
  misc_feature (708)..(709): n is a, c, g, or t
  misc_feature (1988)..(1988): n is a, c, g, or t
  misc_feature (1990)..(2018): n is a, c, g, or t
  misc_feature (2046)..(2046): n is a, c, g, or t
  misc_feature (2052)..(2052): n is a, c, g, or t
  misc_feature (2057)..(2057): n is a, c, g, or t
  misc_feature (2064)..(2064): n is a, c, g, or t
  misc_feature (2066)..(2066): n is a, c, g, or t
  misc_feature (2071)..(2087): n is a, c, g, or t
  misc_feature (2108)..(2108): n is a, c, g, or t
  misc_feature (2110)..(2111): n is a, c, g, or t
  misc_feature (2117)..(2119): n is a, c, g, or t
  misc_feature (2128)..(2128): n is a, c, g, or t
  misc_feature (2130)..(2130): n is a, c, g, or t
  misc_feature (2132)..(2132): n is a, c, g, or t
  misc_feature (2147)..(2147): n is a, c, g, or t
  misc_feature (2149)..(2150): n is a, c, g, or t
  misc_feature (2226)..(2226): n is a, c, g, or t
tccgcagcctcctcctggnacccttncccnncncccctcccatgggcacggaccccccaccgcctccacccactgccgcgggggggcccgttggggccagggctggcgggccatgtaaccagggctgctgnnnnnnnnnnnnnnnnnnnnnnnnnnnnnnnnnnnnnnnnnnnnnnnaggcccctccgcggctcccccttccactacccacctgcccggcaccccctccccagtggttgttaaccccgggactccccaagcccagcctctgtgtgcagcagccccaggcgggctaagtctccaagatgcccttggtggatttcttctgcgagacctgctctaagccttggctggtgggctggtgggaccagttcaaaaggatgttgaaccgtgagctcacacacctgtcagaaatgagcaggtccggaaaccaggtctcagagtacatttccacaacattcctgggcagtgttcacggacctggagattctcgccgccctcttcgcggctgccatccacgatgtggatcaccctggggtctccaaccagttcctcatcaacacaaattcggagctggcgctcatgtacaacgatgagtcggtgctcgagaatcaccacctggccgtgggcttcaagctgctgcagaagaacaactgcgacatcttccagaacctcagcaagcgcccagcggcagagcctacgcaaganntggtcatcgaacatggtgggcggggctggggcgggacggagcgggaaaggaagcctaggagtcgagggctttggggaggagtgggtctgagtcccagaggaaccctcaacctggacagagcgggcggcttctacctggtgaaaacttcagaggcccgggtcagtctggggggcgggtgtcagcggccccagtgacgcccccttgcccgcaggtgctggccacggacatgtccaagcacatgaccctcctggctgacctgaagaccatggtggagaccaagaaagtgaccagctcaggggtcctcctgctagataactactccgaccgcatccaggtcctccggaacatggtgcactgtgccgacctcagcaaccccaccaagccgctggagctgtaccgccagtggacagaccgcatcatggccgagttcttccagcagggtgaccgagagcgcgagcgtggcatggaaatcagccccatgtgtgacaagcacactgcctccgtggagaagtctcaggtgggttttattgactacattgtgcacccattgtgggagacctgggcggaccttgtccacccagatgcccaggagatcttggacactttggaggacaaccgggactggtactacagcgccatccggcagagcccatctccgccacccgaggaggagtcaagggggccaggccacccacccctgcctgacaagttccagtttgagctgacgctggaggaggaagaggaggaagaaatatcaatggcccagataccgtgcacagcccaagaggcattgactgcgcagggattgtcaggagtcgaggaagctctggatgcaaccatagcctgggaggcatccccggcccaggagtcgttggaagttatggcacaggaagcatccctggaggccgagctggaggcagtgtatttgacacagcaggcacagtccacaggcagtgcacctgtggctccggatgagttctcgtcccgggaggaattcgtggttgctgtaagccacagcagcccctctgccctggctcttcaaagcccccttctccctgcttggaggaccctgtctgtttcagagcatgcaccgggcctcccgggcctcccctccacggcggccgaggtggaggcccaacgagagcaccaggctgccaagagggcttgcagtgcctgcgcagggacatttggggaggacacatccgcactcccagctcctggtggcggggggtcaggtggagaccctacctgatccccagacctctgtccctgttccccncnnnnnnnnnnnnnnnnnnnnnnnnnnnnngaccacctcctccgtctgcctcaaagantcttgncaacntgtcccncntgagnnnnnnnnnnnnnnnnngtggggtttttttctgttttntnntttgcnnntttcccccngncnccaccggcggggcgntnntttggaggtgggggctggggaatgaggggctgaggtcccggaagggattttatttttttgaattttaattgtaacntttt

SEQ ID NO: 356490 - DNA, 790 bp, Homo Sapiens
  misc_feature (66)..(66): n is a, c, g, or t
  misc_feature (135)..(135): n is a, c, g, or t
  misc_feature (152)..(152): n is a, c, g, or t
  misc_feature (186)..(186): n is a, c, g, or t
  misc_feature (193)..(193): n is a, c, g, or t
  misc_feature (235)..(235): n is a, c, g, or t
agcaccgactcatcgttgtacatgagcgccagctccgaattgttgttgatgaggaactggttgganaccccagggtgatccacatcgtggatggcagccgcgaagagggcggcgagaatctccaggtccgtgaanactgcatctagtgcagncgtggccagcagtacgtgggtggactgcagcacntcagctncgtgcaggctgttatggtaggccacgtcagcgtggtagtgancctccagcgtcagcatgtatgtcaccatcgtgtccacagggatgcggaatttcttcagcaggtcccgctcctggaatatcatgtacatgatgcaggtgagtgagcggcctccagcgtaatccgacacgcaaaagatgttcaggccccacttgttcaggttctccagttcttgggccaggagctcttcttgatcggtcttcaccccaaatcggggaatgttagagttgttcaggctgttactatgcatcaactttttcaaccctgtgatttgggacatgggctgtaagtctggtacaggggacgggggcggctagggagggtcttggtcgcggcgcttgctgtttttctcgttccttcatcgtgggtgatgggatctccacttcattctgtttgtccaggaatgttgtggaaatgtactctgagacctggtttccggacctgctcatttctgacaggtgtgtgagctcacggttcaacatccttttgaactggtcccaccagcccaccagccaaggcttagagcagtctcgcagtccaaagctcgggccgacagca

SEQ ID NO: 356491 - DNA, 1090 bp, Homo Sapiens
  misc_feature (35)..(35): n is a, c, g, or t
  misc_feature (49)..(69): n is a, c, g, or t
  misc_feature (111)..(183): n is a, c, g, or t
  misc_feature (202)..(260): n is a, c, g, or t
  misc_feature (525)..(533): n is a, c, g, or t
  misc_feature (723)..(732): n is a, c, g, or t
  misc_feature (845)..(896): n is a, c, g, or t
  misc_feature (964)..(986): n is a, c, g, or t
gctgggtggcgaattcggcacgagggagagagagnaactagtctcgagnnnnnnnnnnnnnnnnnnnnngtccatcttgtttcatttgcttgccccgcccccgagacggannnnnnnnnnnnnnnnnnnnnnnnnnnnnnnnnnnnnnnnnnnnnnnnnnnnnnnnnnnnnnnnnnnnnnnnnaagcttgtccaggttgatnnnnnnnnnnnnnnnnnnnnnnnnnnnnnnnnnnnnnnnnnnnnnnnnnnnnnnnnnnngggtgagccaccgtgcccaacctcacttgcttcttatccttacactcccccagccccagagaaactgccacatacaccacaaaaaccaaacatcccccaatgaccttagccccattgctccattcactcccaggtgagaattcaggcaaacgtccacaaaggtcacaggcagcgtacatacggttctgttataccccatatattaccccttcatgtcctaaagaagacattttctcttagagattttcattttagtgtatctttnnnnnnnnntcttgtgttaacttgcctccatctttttcttgggtgaggacacccaggaatgacccttttgtgtctatgatgttgctgttcacagcttttcttgataggcctagtacaatcttgggaacagggttactgtatactgaaggtctgacagtagctcttagactcgcctatcttaggtagtcatgctgtgcannnnnnnnnncattggtgtactgtgtttgatttgtctcatatatttggagtttttctgaaaaatggagcagtaatgcagcatcaacctattaaaatacattttaagccttttaaaacacaatnnnnnnnnnnnnnnnnnnnnnnnnnnnnnnnnnnnnnnnnnnnnnnnnnnnnccccccgtctaccccggcgctaaaaagaaactattaaatggtcggccctcctgcgccctagagaaaannnnnnnnnnnnnnnnnnnnnnngggcggcggggccccccagggggaaaatgaaaaagggcgccatagtcttttctcccacagaaacattccgggccatagaagagggggctttggactcccccccc

SEQ ID NO: 356492 - DNA, 1779 bp, Homo Sapiens
aggcttgtggctccgctgcttcctctgttcctcctcgtggatcggaaagacaggccagagccaaaggcagaaaccagcttgtattggttaccaggagtgaggaaaagccgggcattacaatccgttaactgtgagcttcagtgtctccaaggagaggagatgtatattttaaagacattctttctgtctgatttcaactaaggtttgggctatacgaccagacaaacagtgtgattattcccagcttttcgtttctaaagtgagcacgcgtctttgtcttcctgcacccctcactctggcgcaggcccagcgatgctctgagctcctgcgggcggggaagtaggtttttaaaggccacgtgagctgacattagtaccttctgtgtgaatgagaacaaaacatttgggactgaatatactgcaatgtacacattcataagaaacgttctaataacaattagcgcacaaaactattggtataaacatttttccaaaaagagaaaactattgcatttcgttagaaatcgcgtcctgggccgaggctcgtctttcttctctgcagttggtttggggacagaactccagcacgcagctgtccaactgcagcggctacgtgtttccatggagacaaacttggtgtctcaagttcagggcttcgaaagtcccgaatatttgtttgtcccgagagaagagttttgactttgaagaggtccaggtgggactcgctgggggtggggtgctccgggattagttcagagggaggtgttctggaagactccgtggagcgggacgcaggcactgctgtttggacgacacgcgggatggctgcttttctgaagttgtggctgtgacactgaccctgttggacaaactccttccacagccagtggcttgatggtgacggtgaacttggacagagtcccacatccttcctgctgctgataaaacttctggttttgattttttgaaagacactgctgtgtcctggcacgagcgagcccgtttctgtggcttgttctttttcgagctgcggatctgccgggacacagcgattgtcagctgcccctcaagtcctttggcatctggagatgggttcctgcagcacagccggcctcccgcctcggggcatccggcagggaggtctggatctaaaaggccacagggcgctgcgcccagctgggtccctcccacatggtgctaccagacaagggcactccactttccattcctgaggggactccagggacgctggcgagctctgtgcctccccagcggtggcaggtaggaggggagaggccgtccctttctagtcgggctctgccaggtttttttaatttttaaaatcatggtgaaaattggttccagttgagtgcagaggccagtgctctcagcacagccctttcagctcttaaagggactggggccaaagtccagggttccagcagaggagggtttgtccagaataaggaacccatggtctggtggggccctggtggctgcgcagggacctggggacccagagcacagctacagccagtgggagccctggcctgggcttctgtagcttcaacaacaagacatttccttcttgaacactgaccccgggagcccccgcttgagtcaaagtaaacatcacatcatctaagaggcactaatttggtggagccggtgaaatccaggttcccagagtgaccaggcggcatcttttggaacctcgaggaggcgccggccggggctgctagatgccctgcagggagtggttggggtcactgcgatcccg

SEQ ID NO: 356493 - DNA, 761 bp, Homo Sapiens
agcggagtgaggagcggccgccgccgcaccgccgccgccatagagactgtagccgtggagactgttacttaccaacggggaccaacacgcagcagccgctgccgccgccgcgggagccgctgcccgaactcccggcccgaactccagacctgagcatgcagaattccgagggtggagcggattcgccagcgtccgtggctctgcgtccctcggcggcagccccgcctgtgccagcctccccgcagagggtgttggtccaggcagccagctccaatcccaaaggggcccagatgcagccgatctccctccccagagttcagcaggtaccccagcaggtgcagccggtgcagcacgtgtatcctgcccaggtgcagtacgtggaagggggagacgccgtctacaccaatggagccatacgaacagcctacacctacaaccccgagcctcagatgtacgcccccagcagcacggcttcttacttcgaggccccaggcggtgcccaggtgaccgtggcagcctcgtccccgacagcggtcccctcccacagcatggtgggcatcaccatggatgtcggggggagccccatcgtctccagcgcgggagcctatctcatccacggggggatggacagcaccagacactccctggcccaaaactcacgctcatcgaccgccacgcttgaaatggcgattgaaaacctccaaaaaagcgaaggaatcacatcacacaaaagcggtttactcaacagccatctccagtac

SEQ ID NO: 356494 - DNA, 1046 bp, Homo Sapiens
  misc_feature (20)..(21): n is a, c, g, or t
  misc_feature (38)..(38): n is a, c, g, or t
  misc_feature (40)..(40): n is a, c, g, or t
  misc_feature (46)..(46): n is a, c, g, or t
  misc_feature (50)..(50): n is a, c, g, or t
  misc_feature (56)..(56): n is a, c, g, or t
  misc_feature (58)..(58): n is a, c, g, or t
  misc_feature (74)..(74): n is a, c, g, or t
  misc_feature (95)..(95): n is a, c, g, or t
  misc_feature (116)..(116): n is a, c, g, or t
  misc_feature (131)..(131): n is a, c, g, or t
  misc_feature (149)..(149): n is a, c, g, or t
  misc_feature (168)..(168): n is a, c, g, or t
  misc_feature (268)..(268): n is a, c, g, or t
tggtgggggtcctcgttctnnccattatctcagtctcntnctatgnaagngtggtngncacgtttctccttatnccataactcagaaattacgtnatcagagcgtgcgtcctcccntctcctccacaacancacaatagtctgcagcgntctctcgtaagtgtttggngaactcgctgtgaagccatctagattgggcccagcggaagggctgagctgccaggatgaccccaaagggatgggatgttacagttgggtccttgggtccnttgaaggcctttgctgccccagggctggatggggcagaaccagattgttggggcagggaaaagaggaaaaaaatggctgctggggtggaggaaccggcatgtccagcccctgctgcttttctcaggggtcacagaggaggtggttgggtgcagagacaggccagggcctgggcgttgctggcattgaccatccctgtgtgattgacagctgtagctggaaccactataacatgcagtacgcactagcagtttccaagcagcggggcacaaaacgctccctagacccgctgggaagtgaggaggaggcagaagcatctgaagatgacagcctgcatctgcttggaggaggaggcagagactcagaagaagagatgctggcctagagccagccggttgcagcgttggattgtgccggctaagacctgccagggagatgggacccttgtgccacctgggccagcaaagaggaggggtccagagaacagctgaaatactgtcactagtggtagtgacttgcttttcctgtgcacacatgtagcccatcaggacagcgagccgacgggtcacgccaggggccggcacgcactggcacctggccccaggagcggggccgtgtgaacggtgatgaatgttgaaaatgcgtctcagagaggtattcacatgaactttgtatgagacttatttatatttttaacataaaggtttgataaagaacttagggattaaaaaaaagatggagttttctaacgtgaggatgaagtctacacttcagattaaa

SEQ ID NO: 356495 - DNA, 656 bp, Homo Sapiens
ggcaaggacccaggactaccccagccctagggttcgtgggcaactgctactcagtgcaaaccccgtgggcccaaaaccatatacctcactggccggccaccaccccaacctcgccttcccaccccatcgtctccacttcagggaaagccgcactttacacccccacctgcctcttccccctccatccctgctccccgatcctgagcggttggggtggggtccctcagcaaccccaggcgtgggtttgaggagacaggtgatttacatcccctttgctgtcctcccccggtaccaaggcagggagcctccggaggagccggccctgctggccacgcaggggccagactccagcctgtttccccagccctgcaggtcttccttctgtgggaagcttcctagcaagatggcttggagtcctggtccccctcctccctggccctctcgttcgtttctgtttctgtttacacgttggagtggggtcctccgtgggcggcggcgcgccctgccccgggtgtcgtccggcctcttgtgctcgagcccctttccgagttggactcgaccatccctcaccccaccaaggaccacactgtgaagtgataactgccttgaacccccctttgctgttttatttattaaacttgatttgaagcccaaaa

SEQ ID NO: 356496 - DNA, 1672 bp, Homo Sapiens
  misc_feature (840)..(840): n is a, c, g, or t
  misc_feature (842)..(842): n is a, c, g, or t
  misc_feature (850)..(850): n is a, c, g, or t
  misc_feature (1020)..(1020): n is a, c, g, or t
  misc_feature (1024)..(1024): n is a, c, g, or t
  misc_feature (1041)..(1041): n is a, c, g, or t
  misc_feature (1047)..(1047): n is a, c, g, or t
  misc_feature (1053)..(1053): n is a, c, g, or t
  misc_feature (1060)..(1060): n is a, c, g, or t
  misc_feature (1111)..(1111): n is a, c, g, or t
  misc_feature (1114)..(1114): n is a, c, g, or t
  misc_feature (1118)..(1119): n is a, c, g, or t
  misc_feature (1134)..(1134): n is a, c, g, or t
  misc_feature (1138)..(1139): n is a, c, g, or t
  misc_feature (1143)..(1143): n is a, c, g, or t
  misc_feature (1146)..(1146): n is a, c, g, or t
  misc_feature (1149)..(1149): n is a, c, g, or t
  misc_feature (1152)..(1152): n is a, c, g, or t
  misc_feature (1155)..(1156): n is a, c, g, or t
  misc_feature (1170)..(1170): n is a, c, g, or t
  misc_feature (1182)..(1182): n is a, c, g, or t
  misc_feature (1190)..(1190): n is a, c, g, or t
  misc_feature (1196)..(1196): n is a, c, g, or t
  misc_feature (1200)..(1200): n is a, c, g, or t
  misc_feature (1205)..(1205): n is a, c, g, or t
  misc_feature (1210)..(1210): n is a, c, g, or t
  misc_feature (1217)..(1217): n is a, c, g, or t
  misc_feature (1222)..(1222): n is a, c, g, or t
  misc_feature (1226)..(1226): n is a, c, g, or t
  misc_feature (1230)..(1230): n is a, c, g, or t
  misc_feature (1235)..(1235): n is a, c, g, or t
  misc_feature (1250)..(1251): n is a, c, g, or t
  misc_feature (1255)..(1255): n is a, c, g, or t
  misc_feature (1258)..(1258): n is a, c, g, or t
  misc_feature (1260)..(1261): n is a, c, g, or t
  misc_feature (1263)..(1263): n is a, c, g, or t
  misc_feature (1267)..(1267): n is a, c, g, or t
  misc_feature (1272)..(1272): n is a, c, g, or t
  misc_feature (1277)..(1277): n is a, c, g, or t
  misc_feature (1279)..(1279): n is a, c, g, or t
  misc_feature (1305)..(1305): n is a, c, g, or t
  misc_feature (1315)..(1315): n is a, c, g, or t
  misc_feature (1319)..(1319): n is a, c, g, or t
  misc_feature (1330)..(1330): n is a, c, g, or t
  misc_feature (1364)..(1364): n is a, c, g, or t
  misc_feature (1367)..(1367): n is a, c, g, or t
  misc_feature (1373)..(1373): n is a, c, g, or t
  misc_feature (1377)..(1377): n is a, c, g, or t
  misc_feature (1406)..(1406): n is a, c, g, or t
  misc_feature (1417)..(1417): n is a, c, g, or t
  misc_feature (1460)..(1460): n is a, c, g, or t
  misc_feature (1492)..(1492): n is a, c, g, or t
  misc_feature (1494)..(1494): n is a, c, g, or t
  misc_feature (1520)..(1520): n is a, c, g, or t
  misc_feature (1585)..(1585): n is a, c, g, or t
  misc_feature (1625)..(1626): n is a, c, g, or t
  misc_feature (1640)..(1641): n is a, c, g, or t
  misc_feature (1658)..(1658): n is a, c, g, or t
  misc_feature (1664)..(1666): n is a, c, g, or t
  misc_feature (1669)..(1669): n is a, c, g, or t
cggtccggaattcccgggatgcctgagcctgagcctgagcccgagccgggagccggtcgcgggggctccgggctgtgggaccgctgggcccccagcgatggcgaccctgtggggaggccttcttcggcttggctccttgctcagcctgtcgtgcctggcgctttccgtgctgctgctggcgcagctgtcagacgccgccaagaatttcgaggatgtcagatgtaaatgtatctgccctccctataaagaaaattctgggcatatttataataagaacatatctcagaaagattgtgattgccttcatgtcgtggagcccatgcctgtgcgggggcctgatgtagaagcatactgtctacgctgtgaatgcaaatatgaagaaagaagctctgtcacaatcaaggttaccattataatttatctctccattttgggccttctacttctgtacatggtatatcttactctggttgagcccatactgaagaggcgcctctttggacatgcacagttgatacagagtgatgatgatattggggatcaccagccttttgcaaatgcacacgatgtgctagcccgctcccgcagtcgagccaacgtgctgaacaaggtagaatatgcacagcagcgctggaagcttcaagtccaagagcagcgaaagtctgtctttgaccggcatgttgtcctcagctaattgggaattgaattcaaggtgactagaaagaaacaggcagacaactggaaagaactgactgggttttgctgggtttcattttaataccttgttgatttcaccaactgttgctggaagattcaaaactggaagcaaaacttgcttgnantttttttntttgttaacgtaataatagagacattttaaaaagcacacagctcaaagtcagccaataagtcttttcctatttgtgacttttactaataaaaataaatctgcctgtaaattatcttgaagtcctttacctggaacaagcactctcttctccaccacatagttttaacttnactntcaagataattcccagngttttngttgtngttgttntttgtttgtttgttttggtgggagaggggagggatccctgggaagtggttnacnaccnntttcaagtcactttnctanncacnccnttntanatnnccctccccctccanttcccagtcccncccccccnttgcancgtncccanccccnccaaagngcccncccncccnctccncctttccactcaccnncccnccngnncncccnccgcnccccncncctcatggtaaacgggatctaaaatncctggtggcntttnacaaaaagcanattttcttcatgtactgtgatgtctgatgcaatncancctagnacanactggccatttgctagtttactctaaagnctaaacatagncttggtgtgtgtggtcttactcatcttctagtacctttaaggncaaatcctaaggacttggagacccgcaataangnaattttattttaaacccaagcccccngggattgataatatatacacatttgtcagcatttccggtcgtggtgagaggcagctgtttgagcnccaatgtgtccagctttgaactagggctggggttgtgggnnccccttctgaaagnnctaaccattattggatncctggnnnttntct

SEQ ID NO: 356497 - DNA, 1661 bp, Homo Sapiens
  misc_feature (130)..(130): n is a, c, g, or t
  misc_feature (787)..(795): n is a, c, g, or t
  misc_feature (1018)..(1022): n is a, c, g, or t
ggtcgcgggggctccgggctgtgggaccgctgggcccccagcgatggcgaccctgtggggaggccttcttcggcttggctccttgctcagcctgtcgtgcctggcgctttccgtgctgctgctggcgcantgtcagacgccgccaagaatttcgaggatgtcagatgtaaatgtatctgccctccctataaagaaaattctgggcatatttataataagaacatatctcagaaagattgtgattgccttcatgtcgtggagcccatgcctgtgcgggggcctgatgtagaagcatactgtctacgctgtgaatgcaaatatgaagaaagaagctctgtcacaatcaaggttaccattataatttatctctccattttgggccttctacttctgtacatggtatatcttactctggttgagcccatactgaagaggcgcctctttggacatgcacagttgatacagagtgatgatgatattggggatcaccagccttttgcaaatgcacacgatgtgctagcccgctcccgcagtcgagccaacgtgctgaacaaggtagaatatgcacagcagcgctggaagcttcaagtccaagagcagcgaaagtctgtctttgaccggcatgttgtcctcagctaattgggaattgaattcaaggtgactagaaagaaacaggcagacaactggaaagaactgactgggttttgctgggtttcattttaataccttgttgatttcaccaactgttgctggaagattcaaaactggaagcaaaaacttgcttgannnnnnnnncttgttaacgtaataatagagacatttttaaaagcacacagctcaaagtcagccaataagtcttttcctatttgtgacttttactaataaaaataaatctgcctgtaaattatcttgaagtcctttacctggaacaagcactctctttttcaccacatagttttaactagactctcaagaaaatattcagggttagtaggtgtagtaaaggtcgtccgtctgnnnnngtgggagaggggagggatgcctgggaagtggttaacaacttttttcaagtcacttaactaaacaaacttttgtaaatagaccttaccttctattttcgagtttcatttatattttgcagtgtagccagcctcatcaaagagctgacttactcatttgacttttgcactgactgtattatctgggtatctgctgtgtctgcacttcatggtaaacgggatctaaaatgcctggtggcttttcacaaaaagcagattttcttcatgtactgtgatgtctgatgcaatgcatcctagaacaaactggccatttgctagtttactctaaagactaaacatagtcttggtgtgtgtggtcttactcatcttctagtacctttaaggacaaatcctaaggacttggacacttgcaataaagaaattttattttaaacccaagcctccctggattgataatatatacacatttgtcagcatttccggtcgtggtgagaggcagctgtttgagctccaatgtgtgcagctttgaactagggctggggttgtgggtgcctcttctgaaaggtctaaccattattggataactggcttttttcttccttgtctttggaatgtaacaataaaaataatttttgaaacatc

SEQ ID NO: 356498 - DNA, 918 bp, Homo Sapiens
gggacggaagtgcgggcggaggatccccagccgggtcccaagcctgtgcctgagcctgagcctgagcctgagcccgagccgggagccggtcgcgggggctccgggctgtgggaccgctgggcccccagcgatggcgaccctgtggggaggccttcttcggcttggctccttgctcagcctgtcgtgcctggcgctttccgtgctgctgctggcgcagctgtcagacgccgccaagaatttcgaggatgtcagatgtaaatgtatctgccctccctataaagaaaattctgggcatatttataataagaacatatctcagaaagattgtgattgccttcatgttgtggagcccatgcctgtgcgggggcctgatgtagaagcatactgtctacgctgtgaatgcaaatatgaagaaagaagctctgtcacaatcaaggttaccattataatttatctctccattttgggccttctacttctgtacatggtatatcttactctggttgagcccatactgaagaggcgcctctttggacatgcacagttgatacagagtgatgatgatattggggatcaccagccttttgcaaatgcacacgatgtgctagcccgctcccgcagtcgagccaacgtgctgaacaaggtagaatatgcacagcagcgctggaagcttcaagtccaagagcagcgaaagtctgtctttgaccggcatgttgtcctcagctaattggggaattgaattcaaggtgactagaaagaaacaggcagacaactgggaaagaactgactgggtttttgctggggttttcatttttaataccttggttgatttccaccaactgtttgcctggaaggattccaaaactgggaagcaaaaaccttggcctggaatttcctttttttccctgttcaaacccg

SEQ ID NO: 356499 - DNA, 655 bp, Homo Sapiens
attggtgaaatcaacaaggtattaaaatgaaacccagcaaaacccagtcagttctttccagttgtctgcctgtttctttctagtcaccttgaattcaattcccaattagctgaggacaacatgccggtcaaagacagactttcgctgctcttggacttgaagcttcccagcgctgctgtgcatattctaccttgttcagcacgttggctcgactgcgggagcgggctagcacatcgtgtgcatttgcaaaaggctggtgatccccaatatcatcatcactctgtatcaactgtgcatgtccaaagaggcgcctcttcagtatgggctcaaccagagtaagatataccatgtacagaagtagaaggcccaaaatggagagataaattataatggtaaccttgattgtgacagagcttctttcttcatatttgcattcacagcgtagacagtatgcttctacatcaggcccccgcacaggcatgggctccacgacatgaaggccatcacaatctttctgagatatgttcttattataaatatgcccagaattttctttatagggagggcagatacatttacatctgacatcctcgaaattctgccgcccacgcgcctcctgaccacagcaccccgtcggctttctaactctcccgct

SEQ ID NO: 356500 - DNA, 925 bp, Homo Sapiens
  misc_feature (84)..(84): n is a, c, g, or t
  misc_feature (891)..(891): n is a, c, g, or t
tgtctttctaagagtctaactcgatttccatgcttcggtttctgattgtttactgtcatccagtttctagtttatatctagcanagtaattctgaaggtactcgcttttcccgttaagtatgccaagcaactcggttgaaaggcttgactcaaaccagaagtcttgctggaattcgtctctgaacacttgaaaaacagaaaccctgagccgcaacaaacatgcctctgtgtgtcgggattgcctttgtctctgcttccatgtggcttttccttttgtagctatgcttagtgacataatcttccctcttctagccttctcctttcaagcctgtctgttaattaaccatgtcagtattggcaagcatttatcttcccccaccctaacatgcaatcttctaagaattttgcaaaattctaaacaaatatagagatggtatatagaattcatatctagaaaactttgattttaatgtgagcttatcaaatttgttctggcttttttggcactaaggcaaaaacatgttaaccagaaataatttattcttcatgtatgtaaaatatttgagaatgtttagccttttattagaattttatttggaaaatatttatctttctacacattttacacttatgttcctttgcttataacccaatttcttaacttttttgttacttaagcaaatatcaattatgttttattatctaataaagtgtaagattcttactatctaaaatatttaattctgtgtgactaatatacttttctgatcattcaaattgaatatgaaaagctagaataactgtattgcaactgttaattccagccaattgtataatgataacactggtgaatttctaagtaaatctaatacttaaaaatttgggtatacnatagaaaataaattttaatataatgtaaaaaaaa

SEQ ID NO: 356501 - DNA, 1177 bp, Homo Sapiens
  misc_feature (756)..(768): n is a, c, g, or t
  misc_feature (950)..(950): n is a, c, g, or t
  misc_feature (955)..(955): n is a, c, g, or t
  misc_feature (1024)..(1024): n is a, c, g, or t
  misc_feature (1045)..(1045): n is a, c, g, or t
  misc_feature (1101)..(1101): n is a, c, g, or t
  misc_feature (1116)..(1116): n is a, c, g, or t
  misc_feature (1122)..(1122): n is a, c, g, or t
catattaaaatacccaagcaggaccagaataacatacctttaacagatactgattttcttgcattcatgtaataatcatttaaaattcatatctgctttatgcgaatagatataaacatagagctaagtgctcctacaagatgaatttttagtaggctaaacagcacagctaaagtctcttatgaacttcatttttcccaacatatctttcatctctctctctttttggtttgtttcttgtttgttaagctaatgggtgtattaattccatcccaatgtgactccaaattttgaaattataaggcccaaatgaattattttttctttgctcaaataggatacatacctcatctgaagacaattcaacatataacaaaagttaatgaacggcatttcactgcagtcacaaacccattaagcatcaaatccaggcgctgtgaacatcaaagaagtcaaactgggcaactggtctctcctgtgcaatgggaaaacctcctaatgaagggccatgactttattgttgacacgcgattccacttcaaacttggcgtctgcaatctctgccagaagattttccgaggttgcttttaagccataaagttaaataacatgaaatgttgcctccatagtaaaagatgctttcctaaaactgaagggcctctagccaaaagacctacagccaaaaagcacggtttggctgtggccatctctaagaaagaaatgcagtcagatgattcaaaggaaaatgggtaaacnnnnnnnnnnnnngctgcaagtttaaaaagtcaatactcaggattgatgaaaggaaagtggccttggaacacacagaggtgaccgctccttcatgatgtgtgtgtgttttgatggaggccagtataattagggatattcatgatccctgtggtgctttggtgggaggtggaggaggacagtcagagacagatgtnttccnagtctccagtgctgagcagaggatttggtaaagcaaccggcagtggataaagtgtagaaagtacaaaantaactccagcccacaatagtnattcactttttgataccactgaaatgacgaagtcaaaagcaatcatgtttcccacntcaagaaaaataatncaggtncacaatttgtaaatcttttgtttaatttataacaatgattagcagcatttaaaaa

SEQ ID NO: 356502 - DNA, 1026 bp, Homo Sapiens
  misc_feature (18)..(18): n is a, c, g, or t
  misc_feature (29)..(29): n is a, c, g, or t
  misc_feature (37)..(37): n is a, c, g, or t
  misc_feature (44)..(45): n is a, c, g, or t
  misc_feature (54)..(54): n is a, c, g, or t
  misc_feature (70)..(70): n is a, c, g, or t
  misc_feature (83)..(83): n is a, c, g, or t
  misc_feature (94)..(94): n is a, c, g, or t
  misc_feature (96)..(96): n is a, c, g, or t
  misc_feature (100)..(100): n is a, c, g, or t
  misc_feature (130)..(130): n is a, c, g, or t
  misc_feature (132)..(132): n is a, c, g, or t
  misc_feature (134)..(134): n is a, c, g, or t
  misc_feature (159)..(159): n is a, c, g, or t
  misc_feature (189)..(189): n is a, c, g, or t
  misc_feature (192)..(192): n is a, c, g, or t
  misc_feature (218)..(218): n is a, c, g, or t
  misc_feature (390)..(390): n is a, c, g, or t
ccccacccccacccttantagcccctccncctccccnactcgtnncttggctgngctttctcctctcccnatcgggatccganactctgccagnantcanatgccactgaagcccactcagtgccctctngngnccacacataccattccccccgaacncccacccagcaggcagctgtgaccgcaganggncaggatgaagtgggccaaggtttggnacaggttgactgtgtaggtgacagggagggaaagatgatggccaggggaaagagcatcgtataggctaggggattgaactgtggactgattcagtgtaaataaaaacaaattaacagctagtagtccctgtcagttctgttggaagcagcccactccctcacttgtactccnttcctccaaccctcaatcagagctacttacagccaggcaggatggggctttccccaaagcaattggccgtttgtccagtggcagacaatggtggctacagcctttgtgcttttaagagtgggctgggattgtggagactgcccaggggcttggctttgtcagaacttgtacaatcttcttttgatgaaattatctgaactcaacatctagcacatagaatgtgttcaacaaatgcttgttgaatgaataaattatgactgcagactggctctcctgccttaaactaatttcatcccagcctagtctcctgatgtctgtgctcgttatgctatgccatgttgcttcagtcaaacaagaaacacttactgagggcatattgtttgcccatcattgtgcaatatgctgtgggacatgggatgtcgtctcagtcttcaaggaaatggaagggttaagaaatgcatatgagattattaccaatgacacctttaatttatatgatgctttaaaattatcagagcactttcatgtatttttcgtgtgactagtgaaaaagacaatgttgtacaaaattaaaatatatacagatgcaataatgtgaatagttaggatttattaaatgcattatcttcagatctt

SEQ ID NO: 356503 - DNA, 1659 bp, Homo Sapiens
aactgtttactaacaaaggtgctttaatttgaaaagcatttgaggaaataaattaaagaaataatctgaccatttgactaaccagttctacaaatttcacatatccgtcactcagatgagcatataccaagtcagaggaaacaaaacatgcacatatacaaaagtagaaagagaaaacactcatgccttcagaagttcacaaattaaaagccctttaataatataaaacagttgaacactggaatgtttttttctaggtcatgaaaaaagtgaattccaaatctatgtaataaatctaaaataatacagcatcactgtcttctgttctggtgtttatcaaacctgcacatgagtttttagaaggtgaattggggatgcttcagaatgtattttctccaaacagatggagcctgaaaactgtgtgattttccaaaccaagtggagaaaagcaggaagaaattggtgtttagctggtcagcagacggggatccccgggatgcaaacagccttggccattaggagcctcgcctggaacggggcccccacaaagctcctgagcctgggccacatcactcaggctcctgttccccatctccaggctcgcagcggacagaactccactttctggcttgtttactcgaaacacctcttcccatgtatagtcagcaagattcacaggctgtgttacccacgggtctgtcaccagcttctccaaggtggtgcgtctctcagggactggctgcagcagcccagacacaaggctcatgagttctttggacaccaggtatggcgggtgtatggcagcctccacggtctcctccagctcacagaaggggttctcctcaaagaccagcgtgtacagagtgactcccagagaccacatctccagctccggccctctgtagggattccccatgagaacttccggtgcacagtactcgatggtcccacaaaaagtataaaataattttcccctttccaagtaggcggccgagccaaagtctatcagcttgattgtgaagtcctcagcgatcacgatgttctcatccttgatgtcacggtggatgatgtccttcaagcgcaggtatcccactgctgacactagttgtcggaagatgtagctcgccaggggctcatccagcctggggtggcggtcgatgaaagcgaagaggtctaggccggagccgtgcttctccatcacaagctggaagaacccttggttttcaaatatatccaataccttgatgatattggcgtgctccaccctggatagaattgcgatctctaaagtaactttcccaagtttgggatcctcaatccaacaatcctccaagaccttctccttcttaataaacttcaccaccacctccttgtttttttccttgtccacagcagtccacacgaagccgaaggccccactgcccagcgggctcatggtactgtacttttgggagtactcgccctcacaggccgccaacccctccagttccacagtcttggggggcttctcaaaccaggttctggctctgagcactttccaccaggctggtccggtgagctaaccaccggttagatgggtggagcccggcaagctggcaagaacaggcggttcctgcggctgaatcccgtggcttgtggagaagtctttcacccaccagc

SEQ ID NO: 356504 - DNA, 685 bp, Homo Sapiens
  misc_feature (632)..(642): n is a, c, g, or t
ggggaggaggaaataaagaaagaatgtggaagttacgatgggatgggagggcgcaaaaaagagagctgaggtaatgagaaaaacatcatccccacccctcccccagcgtgggctcaccattcttagtcctttctcaagtgggaccttcaactttctgtgaacacccagtctgcgtcctgggtctgctaggttcgatgatggcgaactcgtatctgcatccggtgcaagttttagctggcagaggtgagaccggtggtgctggtctgcctttgccaactatagccagtctggagacttgataaaatacttcagtgagaccagcttctcatcaacttgggcccggcgtgctgggcctgaaagtcacactacatgcactgcctttgggagtcagctcactccctgctcccacctggaaccttgccagcgtgaaggaggcttccaggtacttcaccctgtcaaccacctctgaatccccaccaggcgccttcctgggtggattcaacaagatgattttgccctttcccagttctctccttcactttggcatcagttgttttctatgaaaacagtggattggttgggttttgtgcagggtcttgggttagagccaaaatggatttgaggatgagtannnnnnnnnnnggttttgtatattttgtacattaataataaacagtggaaagag

SEQ ID NO: 356505 - DNA, 1049 bp, Homo Sapiens
  misc_feature (21)..(21): n is a, c, g, or t
  misc_feature (75)..(75): n is a, c, g, or t
  misc_feature (80)..(80): n is a, c, g, or t
  misc_feature (371)..(431): n is a, c, g, or t
ggaccaatctgaagcactgcntgatgacagttcccacctgcaactcagcagccaggcagtgcagcggagggacangcagngccccactgatggccggggcccctgccacccctaactctcattcattccctggctgctgagttgcaggtgggaactgtcatcacgcagtgcttcagagcctcgggctcaggtggcacggtcccagggtccaggctgagggctgggagctcccttgcgcctcagcagtttgcagtggggtaaggaggccaagcccatttgtgtaatcacccaaaaccccccggcctgtgcctgttttcccttctgcgctaccttgagtagttggagcacttgatacatcacagactcatacnnnnnnnnnnnnnnnnnnnnnnnnnnnnnnnnnnnnnnnnnnnnnnnnnnnnnnnnnnnnngaggggggcgcgcgcgccccaaaaaatctctctcccgcgagggggcgcgcccacataaagcgcgcgcagcaccccgatatttttgtgtgatgaaaaagaggggggtcgccctatatagataggggggttggtcttatattatagataatcaacagcagaagaccgggaggggcacagttgatataaacaacaaagatgtgttagtgttggcgtggagaaaacaagcgagtcagcagactaaggggggaatcaatcttgtagggaaagagaggagacccatctcattttagtgggggaggggagggaacaataattgatggggaggagaagacaatctcctatcagagtagaatatattaaaagcagcctcttaagagggggagtataattatataagatcatttgatacaaggtggggtcggataaataagtgggtgtgagtaaaacaaaacaagagcgtgagatattaatatgggccgcgcagagggtgcgtagaaagaagttatttgtgcgagtaacatagagaaggatgttgattaattagtctagagacaaattttattatactacaacgcgagggggtagcgtattattttaatgaatataagacggaggaga

SEQ ID NO: 356506 - DNA, 456 bp, Homo Sapiens
ttttaacaagatattttacactttgtattttttaggttaaggaccatgcaatatatatctcctacaccgaagtgtccaagaaatgtttttggagtaaattaatgaactgctttagaatgttgctcagaaattaagctagaaattcagagcaatattctcagggcttgatttacaccaaatccaagttcgcaatgtattaacatgaaggaataggccattgctttctgaaaaccttccttttataaaagaaatactttaatattatgaattctcttggtctgcgtaaaatattatttgcattataaaaattgattttttgttataattgttcataggtcttatttttaccagtatgttttcacaagttttaatggaaggctaattattcgtggtacagtcttctatgtaatatgtcacgtttttctaagatgcataatcattttttaccctcctttt

SEQ ID NO: 356507 - DNA, 885 bp, Homo Sapiens
ccaaggcaacgtgatttttgaaacaaggacctttggtagccctaactggcagggagggaatccggaaaacttgggttccaccaaccatgatacagggggtcggactattaaacataagtacaaaataccattaaaggcagaggaccagtaacaaaataagaaaaccattgagacagtaccctgtgcgccttttacaataatatgtaaaggccggagacccacacaacctttgggctgaacactgacttgggacgttcaaagcttccattgagcaaccttctggggccaagccccatgcagaggaactctctgaaactgtgcagactgcctgtatggttcagtacaagaagtgtcttgtggcctctacagctcgaggcaaggcctggggtgcccaggcccgtgaccgcctgcggctcaagcggaccagctccatggattccccaggaggtcccctgcccctccccctgctcaaaggaggggttggcggtgcaggggcaacccctcgaaagcggggtgtcttctcttttcttgaaccttccggctgaaaccctctctgctccatatgccctaaacttatctgggaaggctggggaagtaggctctgggtccatgcctaactctgtaccgttttattcctcaaggcctatagcctgtcactccttgaagccttctctgcctgtccctccgatccttgtccaccgtctatttattgcccaatttattgtttatacggatgactgggaggcactgcaccacaacgtaggaccctggctcccctttccttgggtccttgtgttccttgcccctgtccaaccctggacagttggctctacctcagtaacactttatagcaaaatcagtgcaaataaaaatccctcagtgacc

SEQ ID NO: 356508 - DNA, 1644 bp, Homo Sapiens
  misc_feature (936)..(936): n is a, c, g, or t
  misc_feature (957)..(1076): n is a, c, g, or t
  misc_feature (1117)..(1137): n is a, c, g, or t
  misc_feature (1382)..(1434): n is a, c, g, or t
ggtggcggctgcggcaacagcggggccgatgtgtagttggtgactgcctctccagatgctgaggtgcctgtatcattggcacaggccagtgctgaaccgtaggtggagtaggctgtgccttctgaagcagtatctattcacaatgaagttgcagtctcccgaattccagtcacttttcacagaaggactgaagagtctgacaggtataaatgctttccatgagaactgaaggaagaaggaaataggagttgcctccattgtgcacgttgcaaaacctgtctggaaggagcataggaaatggctttagctaagtgcctgactccagtagcttcttgctgttgccacagtttcattagtgttgattctcaatgttgtctgctgatgttgctaaagcagccacacagtagcattacaaagcctgtgggaattttaatagcaccttcataaatatatttagtagtatatgtagaaatatgacctatacagcactggctatctattagattcacctggggagcttttaaagcacacatgctcgggttctacctgcagcctactgaattagaatctctgggtgggatgaccatctatatttttaataaaagctccacaagttaattctgatgcacagaagatagacgaaccattactttaacatgactcaccttgtattagcttattctcaaagctactttcccattcttgaaattggatgatggctttttaggtacgtgccagagataaatggcccagaatatgttgattcttttagattgttttaggcagactttaagtagagggcttaaatgcatgtttggttttgccgatgcttcactatcttttttaattggagagagtgaaaattgctaaaaattgctgtccaatagaaatttatgagcccatatgtaatataaacttttttactaaccacattanaaagatagaaatggtgaaaannnnnnnnnnnnnnnnnnnnnnnnnnnnnnnnnnnnnnnnnnnnnnnnnnnnnnnnnnnnnnnnnnnnnnnnnnnnnnnnnnnnnnnnnnnnnnnnnnnnnnnnnnnnnnnnnnnnnnnntccagcgtggttttgtgcctccccccttataacccttgggnnnnnnnnnnnnnnnnnnnnnaaaaaatttttctacaaatttctcctttttcgggcccggggccccccaagaaaaaccaaaaaaggtccccgtttccccctctttcacatatgaaaacacccttggtccccacccccgttgtctgtttctcccccccacaaaaacacattccgcggcgcgggcaccattccccgtgtttcaacaacacccccatagcgggcgttccccgggccccctttagcggcgctttttccccccggggcctnnnnnnnnnnnnnnnnnnnnnnnnnnnnnnnnnnnnnnnnnnnnnnnnnnnnntttgtttgccacaggagtgggggggaaccggataaaccccttcccttgcgcccctccggagccatccctccctcacccggtcccccacaatacaggtcctttacccgtgcctcgtggacatttccacctttccccctcgcggtttgtttccaataactacctcccccaccgggagaaacaacgggggtggcccacaaaaacacgtctcca

SEQ ID NO: 356509 - DNA, 1031 bp, Homo Sapiens
gggtccggaattcccgggatcggcggtggcggctgcggcaacagcggggccgatgtgtagttggtgactgcctctccagatgctgaggtgcctgtatcattggcacaggccagtgctgaaccgtaggtggagtaggctgtgccttctgaagcagtatctattcacaatgaagttgcagtctcccgaattccagtcacttttcacagaaggactgaagagtctgacagaattatttgtcaaagagaatcacgaattaagaatagcaggaggagcagtgagggatttattaaatggagtaaagcctcaggatatagattttgccaccactgctacccctactcaaatgaaggagatgtttcagtcggctgggattcggatgataaacaacagaggagaaaagcacggaacaattactgccaggcttcatgaagaaaattttgagattactacactacggattgatgtcaccactgatggaagacatgctgaggtagaatttacaactgactggcagaaagatgcggaacgcagagatctcactataaattctatgtttttaggttttgatggcactttatttgactactttaatggttatgaagatttaaaaaataagaaagttagatttgttggacatgctaaacagagaatacaagaggattatcttagaattttaagatacttcaggttttatgggagaattgtagacaaacctggtgaccatgatcctgagactttggaagcaattgcagaaaatgcaaaaggcttggctggaatatcaggagaaaggatttgggtggaactgaaaaaaattcttgttggtaaccatgttaaatcatttgatttcaccttatctatgatcttggatgtgggctcccttatatagggtttacctgcctaattgcaaggtttaaaaaagaattttgaacaaaagtcaggtaacaaaatggtttggatggggttttttccacccaaaagcccaaggggaaactcttttttttgggccctccctttaattttccagagataaa

SEQ ID NO: 356510 - DNA, 962 bp, Homo Sapiens
gggctgtgaccattggcttatggttggggaaaaatgtttgctccacaagcgggaacttctcaggacccagggaatggaagatcttaatgagctgagagaacacccagggcttgctgcagaagttgtagacggagtagagagagttgacagcaggcagccctccatactgcaggccgatgaccaggctgcggtagtcgtcccccagggccatgctgtaggcatgctggcggaccaggatgaagtctggcttgaaggatctgctcaccactttggtcccatttctcacgacctgcatgtccaccatgcagcccccggtcacataggcagctaggttcaactctgagaattcagcctgctccactcggatctcaatctctccattcaccttcttcccatggaaatacttcgaccagtctgtatgggcatcatcgatcaccaacaggatcctgggtctttgaacaatgggcgtggagggacctggaggctccatcagtcctgaggtggcctgaggggcctgcttcatggcactggagagggagctaaaaaggctggatcctggagaggagaaggaggcagccaggggctgggggtgcctcctctccatggcgggggaagcaggtgagctggtggagctatctgggcgttgcaggtccgtcatatagccattaggcaggttggccatgaagctgctgtcagagagacgtcgccggaggaaattcatggctgtggatggatggagatgactggctcctacccagacgtgtgtaggtgaggcccagaagacaggctgctgccaggtacagggagtggtaggactttagccagaagagccagggggattttgcgcaaccagcagtcagctttagctgcctttatttacctgcgtgcgagccgccaggaactcggcgcccggtggtgcctcggcgcggcgcccgccagtcgatccgctccgggtcccggga

SEQ ID NO: 356511 - DNA, 1037 bp, Homo Sapiens
  misc_feature (22)..(22): n is a, c, g, or t
  misc_feature (814)..(877): n is a, c, g, or t
gggatgcacaagtcctttattncctgctggcagaggaggtggtcctgtggctggcggagtgggcacctcaggctggcagctctcacctcttgctggccggcagcttcagccacttgggcaccttgcccaggctcctcttcacgggctgggccgtccctgggatgggctcaggggggaccagcgccccctcctcagcagctggctcagacttaggtgcagggtcaggggctggcaatggggaaggggacccggaagcccgggacatacacctggccaccagcacatcagccgcagatggggagacggcatgctccagcagcccaggctccagatagacacctgccggctcctcagctccaaagtgcacaagagcagcagggaagaggttcgcctgaaagagggtctgcgtgtggtcgtccaggactgtttttggaggggtgatgaacaggtaaaatgacagctcggggttccccaggtggctcctcacgaagtctcgcaagtcccccactgtctcgctggggcggaagaagccctgtaggacgtagcggtcggggaacaggaccctcagagccacctttgggtagcgctccagcttctcctttatctgcgcctccctgaaggccttggtcaccaagggggcttcttccaggcgcttccgctcactcttgagctgggccaagcgtcttctcacgtcgtccaccgtcagctcaaagaactcatcaagcagctccgctggccaggcctgcagccgctcctccaggtcggggtggcacaccaccggctcccggtccacgggctcccggtccacgggccnnnnnnnnnnnnnnnnnnnnnnnnnnnnnnnnnnnnnnnnnnnnnnnnnnnnnnnnnnnnnnnnctggcccgacttggacttctttggcttggaggggcctccagggctggagagggacttcggcacttagtctgaagatgatgtcagaggcctcgtgggcccagtagggccccgtgtctctcctcggccgattaaccaccaggcctcatacctagcctgatgt

SEQ ID NO: 356512 - DNA, 1519 bp, Homo Sapiens
gccaccatttgatggaacggtccggaattcccgggatgaaaatggcggccccggcaggcggcggaggctccgcggtgtcggtgctggccccgaacggccggcgccacacggtgaaggtgacgccgagcaccgtgctgcttcaggttctggaggacacgtgccggcggcaggacttcaacccctgtgaatatgatctgaagtttcagaggagcgtgctcgacctttctctccagtggagatttgccaacctgcccaacaatgccaagctggagatggtgcccgcttcccggagccgtgaggggcctgagaacatggttcgcatcgctttgcagctggacgatggctcgaggttgcaggactctttctgttcaggccagaccctctgggagcttctcagccattttccacagatcagggagtgcctgcagcaccccggcggggccaccccagtctgcgtgtacacgagggatgaggtgacgggtgaagctgccctgcggggcacgacgctgcagtcgctgggcctgaccgggggcagcgccaccatcaggtttgtcatgaagtgctacgaccccgtgggcaagaccccaggaagcctgggctcgtcagcgtcggctggccaggcagccgccagcgctccacttcccttggaatctggggagctcagccgcggcgacttgagccgtccggaggacgcggacacctcagggccctgctgcgagcacactcaggagaagcagagcacaagggcacccgcagctgccccctttgttcctttctcgggtgggggacagagactgggggggccctcctgggcccacgaggcctctgacatccatcttcagctaagttgccgaagtccctctccagccctggaggccctccaagccaaagaagtccaagtcgggccaggatccccagcaggagcaggagcaggagcgggagcgggatccccagaaggagcaggagcgggagcggcccgtggaccgggagcccgtggaccgggagccggtggtgtgccaccccgacctggaggagcggctgcaggcctggccagcggagctgcctgatgagttctttgagctgacggtggacgacgtgagaagacgcttggcccagctcaagagtgagcggaagcgcctggaagaagcccccttggtgaccaaggccttcagggaggcgcagataaaggagaagctggagcgctacccaaagtgggctctgagggtcctgttccccgaccgctacgtcctacagggcttcttcccgcccagcgaggaaagtggggggacttgccaagacttcgtgagggagcccctggggaaacccccgagctgtcatttttacctgttcatcaccccctccaaaaacggtccctggacgaccccacgcagaaccctctttccggcggaacctcctcccggggcgcatctgggtggcccttggggaatcccaaggaaccgggcaggtggtcaaacctgggaaacctgggcctgcctgggaacctgccctttttccccat

SEQ ID NO: 356513 - DNA, 1063 bp, Homo Sapiens
  misc_feature (853)..(853): n is a, c, g, or t
tggaccggtccggaattcccgggatgtgagcggaaaatggcggccccggcaggcggcggaggctccgcggtgtcggtgctggccccggaacggccggcgccacacggtgaaggtgacgccgagcaccgtgctgcttcaggttctggaggacacgtgccggcggcaggacttcaacccctgtgaatatgatctgaaatgcccctgggctgtctgaactctcttcactagttgtctccgacagcagcttgcatttccaaagtttcagaggagcgtgctcgacctttctctccagtggagatttgccaacctgcccaacaatgccaagctggagatggtgcccgcttcccggagccgtgaggggcctgagaacatggttcgcatcgctttgcagctggacgatggctcgaggttgcaggactctttctgttcaggccagaccctctgggagcttctcagccattttccacagatcagggagtgcctgcagcaccccggcggggccaccccagtctgcgtgtacacgagggatgaggtgacgggtgaagctgccctgcggggcacgacgctgcagtcgctgggcctgaccgggggcagcgccaccatcaggtttgtcatgaagtgctacgaccccgtgggcaagaccccaggaagcctgggctcgtcagcgtcggctggccaggcagccgccagcgctccacttcccttggaatctggggagctcagccgcggcgaccttgagccgtccggaggacgcggacacctcagggccctgctgcgagcacactcagggagaagcagagcacaaggggcacccgcagctgccccctttgttccttttctcgggtgggggaanaaaaacttgggggggccctcctggggcccacgagggcttctgaacatcattccttagctaagttggccgaaatcccctctccaacccctggaaggcccctcccaagccaagaaaggccaaggtcgggcccaggatccccaccaggaccaggaaccagggaccggaaaccggaatcccccaccagggaccaggaacggggagcgggccccg

SEQ ID NO: 356514 - DNA, 798 bp, Homo Sapiens
  misc_feature (727)..(727): n is a, c, g, or t
  misc_feature (732)..(732): n is a, c, g, or t
  misc_feature (740)..(746): n is a, c, g, or t
gggacgtgagcggaaaatggcggccccggcaggcggcggaggctccgcggtgtcggtgctggccccgaacggccggcgccacacggtgaaggtgacgccgagcaccgtgctgcttcaggttctggaggacacgtgccggcggcaggacttcaacccctgtgaatatgatctgaagtttcagaggagcgtgctcgacctttctctccagtggagatttgccaacctgcccaacaatgccaagctggagatggtgcccgcttcccggagccgtgaggggcctgagaacatggttcgcatcgctttgcagctggacgatggctcgaggttgcaggactctttctgttcaggccagaccctctgggagcttctcagccattttccacagatcagggagtgcctgcagcaccccggcggggccaccccagtctgcgtgtacacgagggatgaggtaggcggcctgctcttgctcacccagtccccgctcactttcagcccactttccaactggaaaatctgctgtcccgcagccgtctccagggcagtggcgggagactcgggctcttgaaagcacgacgtgtttcatggaaaaagagggagtggccggccctcggagcccgggctgccccgaaacctccctcggcgccctgtttgttttttcagcttctctcaaagcccaagagtcacaaaagtggtttcatttaataaatatttgctttgcccccccggnccccnccagcaannnnnnnaacatgtccggcgccttcgcccctcaaaaagctttctaacaacatttcctta

SEQ ID NO: 356515 - DNA, 1479 bp, Homo Sapiens
  misc_feature (177)..(177): n is a, c, g, or t
  misc_feature (1449)..(1449): n is a, c, g, or t
  misc_feature (1453)..(1453): n is a, c, g, or t
cctcagcatatgctctgcctcacttgcttcctcactgttaaaatgacaacgggcgccgtcttcggtgcttccaacaccctcgggtccctctcgcggcccggccttcctacgctgctacgttgtgcattacccacaacagcaaaaatgttccactggtggtttcaagattcctaaaanaatagattcaaaacatctttaatactctctgaagaagcaatacatcacaggaaaagctgtaacctttcctgttgctgatactatccagactgcgggctgatgaggacggtaactgcagccaattcgtattctgcgtggctgccgctggaggtgcacaggagctggtccacccaccctccacactcccaaccaaggaagctgctgaatttctgagtgtttgcctaatgcccttttatataacctgaaaagagtcacagtacttgaaggcagtattttccaagaaacagccttcccctattaacgcaacatccctgaaaataatactgctgtttctacggcagtgacaggccctgcatggaacgcatttttccttccttttttccccatcacagagccacgggcaagaagctgcggcgacagagcctcgtcaaagccagctggacagagggatggctacttgcattgttaagtaggagcgcttcacagtgaccatgggccagcctggaactgccttcccccaggacggggggacaggcgtgagtgggtgtgaagcacagggaagcttctctgcctggtgattccaagagggcctgcaacaggtgccctgcctggctgaaggaggaggctgccgggaaatcagacttggatttgccaggttgtttgaaggttaatgttatgggtaatcaaagggaggagacaaaagacagaaaaatggaaacccttcagaacagtgaaaggtttcatttacctttggtaaataaaagtgtgttcatattttcacaaggattcttctatttcaccagcttacaactcaaaccgggctgggcaaacacgctgcgatacggcggtcacggctgtaatccagagagaatgctcagaaatgggaaacaaaaacacaaggcaggatgcccctttgtgctggaagtcagaatctccatgtgttcttctcgctgcccgccgaggtctgagcgggtccctgctgtgaatgaccccgggaacggtgccagagtcacacagacttggtgcagacaacagagctacctttcaggggctctgtgtccttggacaggtcactagacttctctgaacccgttcgctcatttccagaaagggataagatctctcttacagttcatggggtgcgcaagaatgatgggtgccaagcccatgaccccaggttctggcaaggaatcggcctctccaaaaatgatggtttttattattctcactattctagaaaatgtctttgtgaattgtttgcttgattgaaancggntttctttttaataaaatcttgatttt

SEQ ID NO: 356516 - DNA, 619 bp, Homo Sapiens
  misc_feature (605)..(605): n is a, c, g, or t
gggggggcggggcctgagtcagtctcgccagctgccggtctttcgggggctccgtaactttctatccgtccgcgtcagcgccttgccaccctcatctccaatatgcctggtccgacccccagtggcactaacgtgggatcctcagggcgctctcccagcaaagcagtggccgcccgggcggcgggatccactgtccggcagaggaaaaatgccagctgtgggacaaggagtgcaggccgcacaacctcggcaggcaccggggggatgtggcgattctacacagaagattcacctgggctcaaagttggccctgttccagtattggttatgagtcttctgttcatcgcttctgtatttatgttgcacatttggggcaagtacactcgttcgtagattcagttacatccatctgtcatctgaagaaggaggaaaaaacccaacatttcttggaccaaaagtatagtgactatctgttcatgagagaaattttctgtaagcttgctgttttacaggggatttatcaataattgattttgaggaatcagtttttttctatggctaataaactttttaattcacttaaaaaaacaaccccacactccaanaaaaaacatgtcgg

SEQ ID NO: 356517 - DNA, 581 bp, Homo Sapiens
  misc_feature (482)..(529): n is a, c, g, or t
gcatccggctgagtcctcaccccaggcctcgctcgccgctggagaccgcgctcactatccgaggaggaccctcctctgccccgcgtccagctttagtccccgactgcgttcatcgccaagggcccgcccactgccttaggtcgcgtcgccagccttgggtcccgtcgccaaccttgggtcccgtccccggctgcactcaccgcgaggcaccaaccttaactctagtccccggtgtcgcccaccgacgaggccccgccccaaactccagtcccgggctgcgctcaccgccgtggccccgcccccaagcgcaaatactcggctgcgctcaccggtaggccccgctcgggttccgccgaagcccagcccccgcaggtcgcccctccgacgccggcgcgccgcaagggaggccagctcgctcgcagtggggaggtcgcggctccagtcctcgcgtccccgccgtggtcccggtgcctgtcccatcnnnnnnnnnnnnnnnnnnnnnnnnnnnnnnnnnnnnnnnnnnnnnnnnaatctgcggctgcgaatcggctggagcggggcctctcgagagcggcgaggcc

SEQ ID NO: 356518 - DNA, 627 bp, Homo Sapiens
  misc_feature (474)..(531): n is a, c, g, or t
  misc_feature (587)..(587): n is a, c, g, or t
cactaactcacaaaacaaacacttgcactgaattcccaatgaagtgaagatgttggaaagacagaggccagctatttaggaccatacgcacctgtaacaagggctgtgttgaccacagtcacactgtggcatgactggatacccaaactacacttctacacatgaaaagtaagaactgtctttagattttctttactttgataacttgtgattgtttagcttaagacccaagaaatgctgtttgctcatggtaaacagaaacagcatcttcgctacaaccactgacaccagctggcgtcataggtagctagatcattgcatttgttttgaaatgttaatatgttaaatactaaactgatatttcaaaaatgtgtatatatgatttctatatccttgtttttcagatagcctgcttataatttaatataaattaactgatgcattcataagatttcaataatgaaatggttcccnnnnnnnnnnnnnnnnnnnnnnnnnnnnnnnnnnnnnnnnnnnnnnnnnnnnnnnnnnttgtccacacactaggaaatagaactgtgttaatatataagaaatttggggataanttaagaatgaaggacttttctatcatttccattttataaa

SEQ ID NO: 356519 - DNA, 1307 bp, Homo Sapiens
  misc_feature (1154)..(1211): n is a, c, g, or t
  misc_feature (1286)..(1286): n is a, c, g, or t
ctcctgcccagtcccctcttgcaggggttgctatatctacttaacctgaataggtgtttcacacaggtctggtcaacagccccatgcactccctgtatcttgcactaaatttttctaacagggtcttagtggttaatgatcagaagatgtctcctgagccaactgtgaacctcacccaggcaaaatggctaccacctacttgggtccttcttcatgaaagctatagatccttttttgttctctgaggtcataatttcctcggagacctgtttaacaagcaaaaatcaaaaccctccaagattgtctcatattctacctgggactagggtttcctatgaggggacatctacttgtaatgcctggacctttgagatgctcagttctctggtgctgccaaaagatgcttccatggtccgtgctctgccagtggggttcacaacaagagacgtcatgttcagtagcaggcaaagagggagcacacagcattattctgatggaaacaagattatccagggaatggtacaacaatgaccagcccaatgcaggaaaacactacttccaaaacactgaattctctagaccagaggtgctctgaggatccagggccttgtgttcttatgtatcttctgcttcctgacagcttctttttcaaaataacatgcaaaaaaagctgaatgcactaactcacaaaacaaacacttgcactgaattcccaatgaagtgaagatgttggaaagacagaggccagctatttaggaccatacgcacctgtgacaagggctgtgttgaccacagtacacaactgtggcatgactggataaccaaactaaacttctacacatgaaaagtaagaactgtctttagattttctttactttgataacttgtgatggtatagcttaagaaccaagaaatgctgtgtgctcaatggtaaacagaaacagcatcttcgctacaaccactgacaccagctggcgtcataggtagctagatcattgcatttgttttgaaatgttaatatgttaaatactaaactgatatttcaaaaatgtgtatatatgatttctatatccttgtttttcagatagcctgcttataatttaatataaattaactgatgcattcataagatttcaataatgaaatggttcccnnnnnnnnnnnnnnnnnnnnnnnnnnnnnnnnnnnnnnnnnnnnnnnnnnnnnnnnnnttgtccacacactaggaaatagaactgtgttaatatataagaaatttggggataattaagaaatgaaggactctnttctatcatttccccatttta

SEQ ID NO: 356520 - DNA, 846 bp, Homo Sapiens
cttaagaaataaatttaattcaaggtggttagtgaatgtcaggcaatgtaatgccttcacgaaagttaaagtaatccagttacaaaagaagcactgtgtatagtctcaaatagctgaaggtacaatgggctccatattttacaaagtacaaaaattatttcatatacaaagaaaaatacaaataatgtgcaaaaaccattttcacaggtggcaatttataaaatggaaatgatagaaaagtccttcattcttaattatccccaaatttcttatatattaacacagttctatttcctagtgtgtggacaattttaaatttgaaattctgatttatttttaatctacaaagtatttttattttttaaaagggaaccatttcattattgaaatcttatgaatgcatcagttaatttatattaaattataagcaggctatctgaaaaacaaggatatagaaatcatatatacacatttttgaaatatcagtttagtatttaacatattaacatttcaaaacaaatgcaatgatctagctacctatgacgccagctggtgtcagtggttgtagcgaagatgctgtttctgtttaccatgagcaaacagcatttcttgggtcttaagctaaacaatcacaagttatcaaagtaaagaaaatctaaagacagttcttacttttcatgtgtagaagtgtagtttgggtatccagtcatgccacagtgtgactgtggtcaacacagcccttgtcacaggtgcgtatggtcctaaatagctggcctctgtctttccaacatcttcacttcattgggaatttcagggcaagtgtcttgttttgtgagttagtgattc

SEQ ID NO: 356521 - DNA, 1363 bp, Homo Sapiens
cacatcctggggctctgtctctgcacgcaggggcccagcatctctgatttagtgtctgtgcgctgctccatcctgtcctgccattggccaccactttttaatgatgccttctctcgctcacattacaccgccctgcatccttcaggggcctctcacaggctcctgagtagaggcttagaagcacaggggctgctctaggtgccctctgctcatgtgttcactggttctctccccaggggagcaggactcttgagtcctgcagcagccgaagcatctcaagcagcatctgtctcccacgcccccttcctccagccagcgtggccccgtgcagcgtgagctcctgcagggagtgtctgcagggccacagctccctcactcatccgcggccccagcaggctccattggccacggccgtccttggcacagtcagcagcaaacctggcaaggcggcaagtggggaccgatgccagccctcgtggctttcagatctccatcagccaggactccaaaatagcatcgagaagcagtggatgtgctccatttcaggagcatatcaaggactgctgctcaactgttatagggccagggtctgatcttctcccccaaaacagggaacaaggcacctcagtgatacttggtatgctgcagaggaaggtgttaaccaggctgccagaagcccacaaacatttccagaagataatggcttccgaatgcttcctccctccgtcaagccacctgcacgtgaggggtggggctgggcagaaatgttaggagggccctgcacgagcctgccagcgaggtcctcccagcaccagagcccgagcccatgtctatgattagaaaagcctgtgatttgggaactcagcatggaagagtctgtggtttagagattccatgattcagtcttccagacataatgccgagtggggaaagagttgcagaaaaagatatgcaatgtgatcctacttatgtaaagtttaaaaacgtgcacaagtgtttatatggtttgtggatacctctctatgcaggagattcactacagagtgaattcaccatggggatgggaggagggcagggctggcgaggggatttaacagaggtggtgaccctgggcttccatcatattcgtcatgttctgtttcttgtagtgggtcaggggtatatcagagttcacggtattcatctttatgccttttggcacattttaaatcttttattaaaaaattcttaatattctgggtttggtggcgcatgcctatagtcccaggctaaggcaggaagatcgctgagcccaggagtttgaggctgtagtgtgctatggttgctcccgtgaaagccacggcactccagccgggcaacatag

SEQ ID NO: 356522 - DNA, 2210 bp, Homo Sapiens
  misc_feature (1595)..(1595): n is a, c, g, or t
agcagcctcagcgtctgcctccccagcacaccctcattacatgtgtctgtctggcctgatctgtgcatctgctcggagacgctcctgacaagtcgggaatttctctatttctccactggtgcaaagagcggatttctccctgcttctcttctgtcacccccgctcctctcccccaggaggctccttgatttatggtagctttggacttgcttccccgtctgactgtccttgacttctagaatggaagaagctgagctggtgaagggaagactccaggccatcacagataaaagaaaaatacaggaagaaatctcacagaagcgtctgaaaatagaggaagacaaactaaagcaccagcatttgaagaaaaaggccttgagggagaaatggcttctagatggaatcagcagcggaaaagaacaggaagagatgaagaagcaaaatcaacaagaccagcaccagatccaggttctagaacaaagtatcctcaggcttgagaaagagatccaagatcttgaaaaagctgaactgcaaatctcaacgaaggaagaggccattttaaagaaactaaagtcaattgagcggacaacagaagacattataagatctgtgaaagtggaaagagaagaaagagcagaagagtcaattgaggacatctatgctaatatccctgaccttccaaagtcctacataccttctaggttaaggaaggagataaatgaagaaaaagaagatgatgaacaaaataggaaagctttatatgccatggaaattaaagttgaaaaagacttgaagactggagaaagtacagttctgtcttcaatacctctgccatcagatgactttaaaggtacaggaataaaagtttatgatgatgggcaaaagtcagtgtatgcagtaagttctaatcacagtgcagcatacaatggcaccgatggcctggcaccagttgaagtagaggaacttctaagacaagcctcagagagaaaactctaaatccccaacagagtatcatgagcctgtatatgccaatcccttttacaggcctacaaccccacagagagaaacggtgacccctggaccaaactttcaagaaaggataaagataaaactaatggactgggtattggtgtaaatgaatccatacacaatatgggcaatggtctttcagaggaaaggggaaacaacttcaatcacatcagtcccattccgccagtgcctcatccccgatcagtgattcaacaagcagaagagaagcttcacaccccgcaaaaaaggctaatgactccttgggaagaatcgaatgtcatgcaggacaaagatgcaccctctccaaagccaaggctgagccccagagagacaatatttgggaaatctgaacaccagaattcttcacccacttgtcaggaggacgaggaagatgtcagatataatatcgttcattccctgcctccagacataaatgatacagaaccggtgacaatgattttcatggggtatcagcaggcagaagacagtgaagaagataagaagtttctgacaggatatgatgggatcatccatgctgagctggttgtgattgatgatgaggaggnggaggatgaaggagaagcagagaaaccgtcctaccaccccatagctccccatagtcaggtgtaccagccagccaaaccaacaccacttcctagaaaaagatcagaagctagtcctcatgaaaacacaaatcataaatccccccacaaaaattccatatctctgaaagagcaagaagaaagcttaggcagccctgtccaccattccccatttgatgctcagacaactggagatgggactgaggatccatccttaacagctttaaggatgagaatggcaaagctgggaaaaaaggtgatctaagagttgtaccacctatataaacatcctttgaagaagaaactaagaagcatttgcaaatttctcttctggatattttgtttattttttctgaagtccaaaaaattatcattacagtgtaccatattaagccatgtgaataagtagtagtcattatttgtgaaaaattcccaaaaagctggggaaaacaaatgtgtaacttttccagttacttgacacgattcagtgggggaaaaccagcattttttattctattgataccaaagcatttctaataagagcttgttaaatttaagaataaagttatttaaaatata

SEQ ID NO: 356523 - DNA, 1960 bp, Homo Sapiens
  misc_feature (84)..(107): n is a, c, g, or t
  misc_feature (1245)..(1275): n is a, c, g, or t
ctgccgcttcgtttctcctccgtacgtcggccccaaatgccgctggtaccggtccgggattcccgggatcgacgcggaaccgannnnnnnnnnnnnnnnnnnnnnnnaggaaatcggggctcggccccgccggcgcgcgaccccatccccatcccggtccctgcagagcgatccccgggcccagatatggacgcagcagagccgggactccccccaggtcctgagggcaggaagaggtacagtgacatcttccggagcctggacaacctcgaaatctcactggggaacgtgacccttgagatgctggctggagaccctctactctcagaagacccagaacctgacaagacccctacagccactgttaccaacgaagccagctgttggagcggcccctccccagagggtcctgtacccctcacaggggaggaactggacttgcggctcattcggacaaaggggggtgtggacgcagccctggaatatgccaagacctggagccgctatgccaaggaactgcttgcctggactgaaaagagagccagctatgagctggagtttgctaagagcaccatgaagatcgctgaagctggcaaggtgtccattcaacagcagagccacatgcctctgcagtacatctacaccctgtttctggagcacgatctcagcctgggaaccctggccatggagacagtggcccagcagaaaagagactactaccagcccctcgccgccaaacggactgagattgagaagtggcggaaggagttcaaggagcagtggatgaaggagcagaagcggatgaatgaggcggtgcaggcactgcggcgcgcccagctgcagtatgtgcaacgcagcgaggacctgcgggcacgctcccaggggtcccctgaggactcggccccccaggcctcgccgggacctagcaagcagcaggagcggcggcggcgctcgcgagaggaggcccaggccaaggcgcaggaggccgaggcgctgtaccaggcctgtgtccgcgaggccaacgcgcggcagcaggacctggagatcgccaagcagcgaatcgtgtcgcacgtgcgcaagctggtgtttcagggggatgaagtgctgaggcgggtgacgctgagtctcttcgggctgcggggggcgcaggcagagcgtggcccccgcgccttcgccgccctggccgagtgctgtgcgccctttgagccgggccagcgctaccaggagtttgtacgggcgctgcgnnnnnnnnnnnnnnnnnnnnnnnnnnnnnnnttctccttccaggagttccttccctccttgaacagctcccctctggacatcagaaagaagctctctgggcctcttcctccaaggctggatgagaattcagctgagccaggcccttgggaggatccgggcacaggctggcgctggcaagggactcccagccccactccgggcagcgatgtggaaagcgcgggtggcggcaagaaggcctcggtccctggactcacccccgttccaccccaggggcctggacccatggccacctgcgcgaagggcttcgcccccgcgcacctgaattcctccgacccaccttccgacggatcccactgcccccgaccttccgcggcatgggctcccgtttaaccggcttccctttagccccccttcgtcccccggggaacccccatcctcagcctcgacatcccacgcccttcccgctgtctccgccatgggtccgcgccctccgactctgtgtaccccaatggccgcccccagtgtccaccccacttccattcacccactttccggcgttgcattactagtattcggcgcctcccatcgccaggacactaaatccgggtaccacggaccgcagctggtggagcaactgcccggtaccccccacctgcgtacttcatcttggttgccgacgctaagtatgcgatgggaacagaacaatgcacctcta

SEQ ID NO: 356524 - DNA, 744 bp, Homo Sapiens
cggggctcggcccgccggcgcgcgacccatccccatcccggtccctgcagagcgatccccgggcccagatatggacgcagcagagccgggactccccccaggtcctgagggcaggaagaggtacagtgacatcttccggagcctggacaacctcgaaatctcactggggaacgacccttgagatgctggctggagaccctctactctcagaagacccagaacctgacaagacccctacagccactgttaccaacgaagccagctgttggagcggcccctccccagagggtcctgtacccctcacaggggaggaactggacttgcggctcattcggacaaaggggggtgtggacgcagccctggaatatgccaagacctggagccgctatgccaaggaactgcttgcctggactgaaaagagagccagctatgagccacatgcctctgcagtacatctacaccctgtttctggagcacgatctcagcctgggaaccctggccatggagacagtggcccagcagaaaagagactactaccagcccctcgccgccaaacggactgagattgagaagtggcggaaggagttcaaggagcagtggatgaaggagcagaagcggatgaatgaggcggtgcaggcactgcggcgcgcccagctgcagtatgtgcaacgcagcgaggacctgcgggcacgctcccaggggtcccctgaggactcggccccccaggcctcgccgggactagca

SEQ ID NO: 356525 - DNA, 934 bp, Homo Sapiens
  misc_feature (3)..(3): n is a, c, g, or t
  misc_feature (38)..(38): n is a, c, g, or t
  misc_feature (72)..(72): n is a, c, g, or t
  misc_feature (220)..(220): n is a, c, g, or t
  misc_feature (718)..(799): n is a, c, g, or t
ggnccgggcgtgcccagggtgccgtagtacaggccagngagcggcgccgcggggggcgcggtcctgagcgcntccgccaggggagccccgtagcaaccgccggggtcccgcgacaactcggtgggcgcgtagggcgcgcggaagggccgcagcgcgcagtcctcggggcccggggccggtgggaagaaaaccagcctcgcccgggctccaaggccgtccnagaaggcgagcgctcgggcgtgggcagccccaggccgtcgaactcggcgcccagcgggggcagctcgcggaaggcgcgagccgagccagacgccgcggggaaaggctcgggcggtggctgcgggggcgctaatcccgggagcaggaggccgggctccagccgccgggccttgcgcgcctgcttcttgcggcgcggccggtacttgtagttggggtggtcgcgcaagtgctgcacgcgcagccgttcggcttcctccacgaagggccgcttctccgccgcgttcagctccttccacgctttgcccagcatcttgctgagcaccgcgttgtgcaggtccgggttctgctgagccagccgcttgcgctcgtcctttgcccacaccatgaaggcgttcatgggccgccggatgcgcgactcgtctgccgcctggcgttccccgcggccggccgggctgaggccatagcgccccggctcggggctgcgcgggggactgcgctnnnnnnnnnnnnnnnnnnnnnnnnnnnnnnnnnnnnnnnnnnnnnnnnnnnnnnnnnnnnnnnnnnnnnnnnnnnnnnnnnncccgtgtcccggggcccatgcacagtcgcggcgggcgggcgggtcgtcctgtgcgccgtagccgggcggcgatctctgcattccagctgggcgcggcctgggcggaaaggagcgcgggagcgcggcgggctccgg

SEQ ID NO: 356526 - DNA, 1028 bp, Homo Sapiens
gatggagaaaatgaggaagatgcacagggcgtaccagtagtagtggtcagccagccacagcgcgatgctgaaggcctggaacccatagtaggggttcagtgcctcgtccaccagcagctgggggtaggacttgaccggtatgctgatcacgttggggccgtaaatggccttcctcaccatttggtcctggaggctgaggccatggcgggagcggtggacgtcgtcacaagagcggccatggtccaggaggctgacctggtagaaggcttgctgggtctcgatccagatatagcgctggccctggaagaggtaataccgcagcacccgcttcgcctcctcgctcttggggagctgggccgtatccttccaggcaccctctggtaccgccccaactgccgcctggctccggccatcctctgcctgggactgtggggacggctccaggctgccctcgccgatggcctcagtctgcacctggacagtgaagagctgccaggaactatcctctttgtctcttatttcgataacgagtgtttcggcgtgggccaggttgcagggccggagccgcagccgcaccccccacaggggcttccaacggaagagcagcaaagggatcccagccatcatccagaccacgacgtgatagccgatgaccctccatggactgccacagtagccgctgagcctcacggatgaaactgaggagctgaggggatctattgatgtccctatcgtcagggtcccataaccggtgggcgtgctgcccacgagagggctgctgtctgcgctcatgccggctcctcgcgctcatcgccggccccggcgctgcggccctcggcctgggccccggcgtgcgcaaggccctgggcgggggcgcggtccggacggcccggggcgaggggcgctgggctagcgcggggctggagcagggctgacgcgggcggggcacctgggccaccaggctcggcgcggctccgacactgccgcagtccctccgtgcgcgcctcgtgccgaattcgccacccagc

SEQ ID NO: 356527 - DNA, 781 bp, Homo Sapiens
acgcctatttaggcggattcttggcgccggaggaagaggcagggtcaccctctctccacgtcagagacctgactgtggagatggcggctcagaagataaacgaggggctggaacacctcgccaaagcagagaaatacctgaaaactggttttttaaaatggaagccagattatgacagtgccgcttctgaatatggaaaagcagctgttgcttttaaaaatgccaaacagtttgagcaagcaaaagatgcctgcctgagggaagctgttgcccatgaaaataatagggctctttttcatgctgccaaagcttatgagcaagctggaatgatgttgaaggagatgcagaaactaccagaggccgttcagctaattgagaaggccagcatgatgtatctagaaaacggcaccccagacacagcagccatggctttggagcgagctggaaagcttatagaaaatgttgatccagagaaggctgtacagttatatcaacagacagctaatgtgtttgaaaatgaagaacgcttacgacaggcagttgaattactaggaaaagcctccagactactagtacgaggacgtaggtttgatgaggcggcactctctattcagaaagaaaaacaatatttataacggaaaattgagaacttatccaacttgtcataagaaaaacaaattgctcaagtcttagatgcatcttacacagaacatggactatgtaagctggcagaaacgatgtgtccgaggaagagctgataggcatccatgggttccactgg

SEQ ID NO: 356528 - DNA, 948 bp, Homo Sapiens
tgggtggcgaattcggcacgagggttggaagatggcgtctccccagacgggacagatctggaagcatctttgctaagttttgaaaaacttgaccgtgcctcaccagatctttggccagaacaattaccaggtgttgctgaatttgcagcttccttcaaaagtcctattactagttctccacccaaatggatggctgagatagaacgtgatgacatcgacatgttgaaagaactggggagtctcaccacggctaatttgatggagaaggttcgaggcctacagaacctagcctatcagctggggctggatgagtccagagagatgacacgggggaaattcctcaatattctagagaagcccaagaagtagcagctgcttgcggacaggatgtcctggggtccgaaaccaagctcccttcccggtgcacctctaacaatgcacacctcactgcttgcttgggagaggccagagggtgtacctccaggactgccctctcccctgctcctggcactctacacgtctgaggacattcagcagcaagagaagaatctgctctacccaaggatcattgcagttactcaatcaactttcagacttgaaccttcttagcctcggatattggtaacagctgagggcatatcattcttaaaggtcgaagtcctgctttctcatttctggaagtgattcaggagccccaggatcttacggttgatttgactcagtcatggcagtcagttgtgacatgttgattggatgggttcttttgaattgttcttgatctcttagaaagtgtttacgatgtgaggagaccagagaccaagtagattctggaccagaccatgcagcctgacctgtgaactctccagtatatacctaagtccccagaatccccagctgaagaaaccaggaatcttctcgcaaagcatatctggttttttaaaatttctt

SEQ ID NO: 356529 - DNA, 469 bp, Homo Sapiens
  misc_feature (30)..(30): n is a, c, g, or t
tcccgggatgccaaccgtggcgcaggcggngcggggaggcgtcccagagggatgctatactggacttccctactctcatctgctccagccccctgaccttatagttgcccagctttcctggcaattgactttgcccatcaatacacaggatttagcatccagggaagatgtcggagcctcagatgttaattttctaattgagaatgttggcgctgtccgaacctggagacaggaaaacaaaaagtcctttctcctgattcaccaaaaaataaaatactgactaccatcactgtgatgatgattctctatagtctcaggaactgaagtctttaaacaaccaggggaccctctgccctctagaataagaacatactagaagtcccttctgctaggacaacgaggatcatgggagaccacctggaccttctcctaggagtggtgctcatggccggtcctgtgtttggaattc

SEQ ID NO: 356530 - DNA, 1121 bp, Homo Sapiens
  misc_feature (19)..(20): n is a, c, g, or t
  misc_feature (24)..(24): n is a, c, g, or t
  misc_feature (33)..(33): n is a, c, g, or t
  misc_feature (42)..(42): n is a, c, g, or t
  misc_feature (44)..(44): n is a, c, g, or t
  misc_feature (47)..(47): n is a, c, g, or t
  misc_feature (50)..(51): n is a, c, g, or t
  misc_feature (64)..(64): n is a, c, g, or t
  misc_feature (68)..(68): n is a, c, g, or t
  misc_feature (115)..(116): n is a, c, g, or t
  misc_feature (122)..(122): n is a, c, g, or t
  misc_feature (128)..(128): n is a, c, g, or t
  misc_feature (138)..(138): n is a, c, g, or t
  misc_feature (145)..(145): n is a, c, g, or t
  misc_feature (147)..(147): n is a, c, g, or t
  misc_feature (149)..(149): n is a, c, g, or t
  misc_feature (151)..(151): n is a, c, g, or t
  misc_feature (154)..(155): n is a, c, g, or t
  misc_feature (157)..(157): n is a, c, g, or t
  misc_feature (161)..(162): n is a, c, g, or t
  misc_feature (167)..(167): n is a, c, g, or t
  misc_feature (169)..(169): n is a, c, g, or t
  misc_feature (175)..(175): n is a, c, g, or t
  misc_feature (178)..(178): n is a, c, g, or t
  misc_feature (184)..(184): n is a, c, g, or t
  misc_feature (221)..(222): n is a, c, g, or t
  misc_feature (233)..(233): n is a, c, g, or t
  misc_feature (237)..(237): n is a, c, g, or t
  misc_feature (250)..(250): n is a, c, g, or t
  misc_feature (254)..(254): n is a, c, g, or t
  misc_feature (256)..(256): n is a, c, g, or t
  misc_feature (287)..(288): n is a, c, g, or t
  misc_feature (293)..(293): n is a, c, g, or t
  misc_feature (296)..(296): n is a, c, g, or t
  misc_feature (298)..(298): n is a, c, g, or t
  misc_feature (300)..(300): n is a, c, g, or t
  misc_feature (306)..(306): n is a, c, g, or t
  misc_feature (308)..(308): n is a, c, g, or t
  misc_feature (314)..(314): n is a, c, g, or t
  misc_feature (321)..(321): n is a, c, g, or t
  misc_feature (332)..(332): n is a, c, g, or t
  misc_feature (338)..(338): n is a, c, g, or t
  misc_feature (352)..(352): n is a, c, g, or t
  misc_feature (383)..(383): n is a, c, g, or t
  misc_feature (389)..(391): n is a, c, g, or t
  misc_feature (402)..(402): n is a, c, g, or t
  misc_feature (404)..(404): n is a, c, g, or t
  misc_feature (406)..(406): n is a, c, g, or t
  misc_feature (408)..(408): n is a, c, g, or t
  misc_feature (413)..(414): n is a, c, g, or t
  misc_feature (419)..(419): n is a, c, g, or t
  misc_feature (422)..(422): n is a, c, g, or t
  misc_feature (428)..(428): n is a, c, g, or t
  misc_feature (434)..(435): n is a, c, g, or t
  misc_feature (446)..(447): n is a, c, g, or t
  misc_feature (459)..(459): n is a, c, g, or t
  misc_feature (461)..(461): n is a, c, g, or t
  misc_feature (474)..(474): n is a, c, g, or t
  misc_feature (476)..(476): n is a, c, g, or t
  misc_feature (479)..(479): n is a, c, g, or t
  misc_feature (586)..(586): n is a, c, g, or t
  misc_feature (605)..(605): n is a, c, g, or t
  misc_feature (848)..(862): n is a, c, g, or t
cataaattaattttgaganntaantttcttttnttatttaantnttntannataaaaatatatnttanttcttctaatcattcagaactaagatgacatatgaggtgtaaaattnntatttntttttnttattctcantggaagntnantnttnntntttnnttctnanaaactnttntaacantttacttcatggtacaaaattgccatagaaatttttnntggtgattggnaganggggcagctaatntttncntgcttatttctcaaatgtagaattcaaaagnnaggtnttnananataatntncctaanacctgcnatgggaatacnttaganatgtagtacttttntttttcatgatgttaatgattcttatcttantttttnnngctaatttatntntngntgttnnctctnttnctaacngatttnnttaataagttnntgttagtttttntnaactctttctctnanttnattcctttgataaatttctgtaagaaccatagattcatcagaaatgctcacaggacagatctatacatgttacaaatggacaaactaataaataaataacataaaanatagtcaagggtagatgtnctggcttcactaccaaatcatttagtagtgtcaggcttggctgtgctcactgttactgtgttactgctctttactttcaaattttttagaagagtagggatattctaactagcaaatgtcaagtcctgtaggagcgttgcttctgaactaagcttaaacaaatattcaatgcttaattttgattaggaagtgttgctgatattgtggttttgctttgtaacctgatttctaccaaaaggattnnnnnnnnnnnnnnnggtgaaagtagagaatagggatgtttgtgggtaggtattatcttcattgtgttggccagcaagcaaacttttgccttagagctaaacaaattatgctgatactcaactgtcaaattatcttgaagtgaaagatttacaatagcaaagagataattatgtgagtaaagatttgatcatcatatagcacatcagagcatttgatgcttagagttctctaacatgtttcttctttaacctgaacagccatatttagacgtat

SEQ ID NO: 356531 - DNA, 2436 bp, Homo Sapiens
cgcgcccggcaggcgttcagggaagcgcggccacgcctgggccggccaccatttcccgggcgccgcggcggcgccgactcgcgggcagcggcccctcagtgcgcccagccgggcccccgaacgccgggagcatgagcgcgggctcggagcgcggggcggcggcaacccccgggggtttgcccgcgccctgcgcctcgaaggtggagctgcggctcagctgccggcacctgctggaccgcgacccgctcaccaagtccgaccccagcgtggcgttgctgcagcaggcgcagggccagtgggtgcaggtgggcagaaccgaggtggtccggagcagcctgcatcccgtgttctccaaggtcttcacggtggactactacttcgaggaggtgcagaggctgcgctttgaggtgtacgacacgcatgggcccagcggcttcagctgtcaggaggacgatttcctggggggcatggagtgcaccctggggcagattgtggcccagaagaaggtgacccgcccgctgctgctcaagtttggcaggaacgctggcaagtccaccatcacggtgatcgccgaggacatctcggggaacaacggctacgtggagctctccttccgggccaggaagctggacgacaaggacctcttcagcaagtccgaccccttcctggagctctacagggtcaacgacgaccagggcttgcagctggtgtacaggacggaggtggtgaagaacaacctgaacccggtgtgggaggccttcaaagtctctctgagttccctctgcagctgcgaggagacaaggcctctaaagtgcctggtctgggattacgactctcgaggaaagcacgacttcatcggagaattctctaccaccttcgaggagatgcagaaggcctttgaggaggggcaggcccagtgggactgtgtgaaccccaaatacaagcagaagagacgcagttataagaactcaggagtggtcgtcctggctgacctcaagttccacagggtgtactccttcctggactatatcatgggcggctgccagatccacttcaccgtggccattgacttcaccgcctccaatggagacccgcggaacagctgctccctgcactacatcaacccctaccagccgaacgagtacctgaaggcactggtgtccgtgggcgagatctgccaggactatgacagtgacaagaggttttccgctttggggtttggagcccggatccctcccaagtatgaggtgtcccatgactttgccatcaatttcaaccctgaggacgatgagtgtgaaggcatccagggcgtggtggaggcctaccagaactgcctgcccagggtccagctctacggccccaccaacgtggcgcccatcatctccaaggtggcacgcgtggcggcggccgaggagagcaccgggaaagcctctcaatactacatcctgctgatcctgacggacggcgtggtgaccgacatggccgacacacgggaggccattgtgcgtgcctcacgcctgcccatgtccatcatcatcgtgggcgtgggcaacgccgacttcaccgacatgcaggtcctggacggcgacgacggcgtcctgcgctccccacggggtgagcccgcgctccgggacatcgtacagttcgtgcccttccgggagctcaagaacgcatcccctgcggcgctggccaagtgcgtgctggccgaggtcccgaagcaggtggtggagtactacagccacagaggcctgcccccgagaagcctgggcgtccctgccggagaggccagcccaggctgcacaccgtgaagatgtggagggcgtagggtgggggcagtgaggaatgggtccgtacagcctctgtctgcaacatgcttggggtcccttaagctccctccgacctcccagaagcctccagtccccaccaggccccactcccagtcctcctgggatcctgctggcttgggcccggctctggggcccccaaggccgaagggtgacaaaatacaggcccccatgcctggccctgcctgagccaggtgggtggagggagggagatcatgagggacttggagggagctgggaagttcatccacgggagaccctgccccgatgagaaggggcagggactgggggctctgctttgcgtctaacctttgtgggggagggccagcaaggcagtccccccacgcccgagaaagcctgggggacccagacacctgtccccacagtcaaagcctggggacccagacatcctgtccccacagtcagcctcctgtccctgctggtgcccccacacccacctaccctgtgctttttgccgtcgggcctctgcacctgggtccatggggtctgcggggtctgcggggtctgcctggcctgtgggttctgccggtggggcttcaggagtaataaagtgtcaccctatccttgtaaa

SEQ ID NO: 356532 - DNA, 841 bp, Homo Sapiens
agcgggcaagtgcacttgcgtgtcaccgttaccgtagcgactgggcttctggactgtatatcctagctgccttgtcaacatcttcgagcatcggcagctccggaggccggggtaactggcagcaggtaggaaactatgtgaaagaatctcctgatgtcataatttccgggtgtcaccggaacatttgatcatcattcctttggcaattccagccttctgtggaaaggccagtagaaagcattgatttattcacctctacaggaatcagactcagcctcttttggttttcagtgaagtatgccttttcaatttggaacccagccaaggaggtttccagtggaaggaggagattcttcaattgagctggaacctgggctgagctccagtgctgcctgtaatgggaaggagatgtcaccaaccaggcaactccggaggtgccctggaagtcattgcctgacaataactgatgttcccgtcactgtttatgcaacaacgagaaagccacctgcacaaagcagcaaggaaatgcatcctaaatagcaccattaagtcttttgtcaaggtctgactaggtcaagggtaatggaccagtatcatctggtgatctggtaaacaaataaaagtggtggcacctttagatgatgacaacagttgagctctctcacttccacgtaagaccgacagaaatgtagtcagcaaagcacatgtagtgacaggctatcaggttatgtctgatacataaggacagaataatatttcacaagccagcaaggtcccttgagaatcatcagcctcaccggtagatcctcactcttcacacttcggactcaagcctcatccc

SEQ ID NO: 356533 - DNA, 1302 bp, Homo Sapiens
gcccctttgtcccccagtagttgctgggaattgggaattgatgtacgatgcaggcgcgcagtgttttccgcaagccgttattactcgaacgtacacgtcccgggaatgtgtcgggtcagagtccaggttgtggcgcagttcctcactccacgatcgtccaccccgttggtagccggcaccttcgggaagctgcccacctcaatacccgtcaagggttcatggagggcagcagttgatccggttgtgttgaacagccgctgatcaggggttaccaagcaggtactcagagcacaggtactgggctagggtagatgagcatctcccggcccgccacctcgtgtgccatgaatgttgccgatgagcttcacctcgggctccatcagctcgtgctggccggggcggctggagaactcgatgaccaagcagctccctgccatcgaagctgcgcccgatgctgtaggtcctggccacgtgggcgcaagcggcagcccgtccgcctcagcacacgcaccatctgggcgtaggagtggtggctgaagcggatgaaggtgggcggcagccctgagggcagtgcctcgtcagcctccaggcctccccgaagcttctccagcgggtcatagcagccctcgtcctctctcgtgaagtagcggtggcagtcaaggaagtagggccaggccatgtcaatggcgtcgaaggcgggctggcagacctcccgcaggccctcgcagatgtgccggcagggtctgcgcacccagccgccctcacaccggggggccagcacagcacagcccagcagccgcaggtccgggttgcactggccttccaggagctggtgtagaacgctcagcaggatgtactcggagctggcctccaccacctcccacgaccggtgctgaagcaggttggggaaggtggtgtggttgtaggcggcatcgctgcaggtcctgagctgcaggtccacgcagttgtctggggaggcagggtcggcaggtcagtccctcccgcagtggccctgaccgtgacgcgtcagacatttacgtaggggaccccacgcagggccagggcctgcagggaggggcacccacggtctggcaggggaggaccaggacaacagctactgtgcaggaatcagagccggcggggttccgctcaaactcgcaccccggccagggcagcggcgacagaccaggactgtaaggagcagcagcaggcagcgggccggcatggtgggacgcggaccttggacggccagcgcagtgatgtggcactcggccgatcccatactccggccgtaccagcact

SEQ ID NO: 356534 - DNA, 1710 bp, Homo Sapiens
  misc_feature (229)..(229): n is a, c, g, or t
  misc_feature (1300)..(1300): n is a, c, g, or t
cggcagatcacagctctcagcagctacgtggtcaagaaggtggctgttcactcaggtggccggcacgcgacggctttaactgtcgatggaaaagtgttttcgtggggcgaaggtgacgatggaaaacttggacacttcagcagaatgaactgtgacaaaccaaggctgatcgaggccctgaaaaccaagcgtatccgggatatcgcctgtgggagctcgcacagcgcancctcacatccagcggagaactgtacacctggggcctcggcgagtacggccggctgggacatggggataatacgacacagctaaagcccaaaatggtgaaagtccttctcggtcacagagtaatccaggttgcatgtgggagtagagacgcgcagaccctggctctgaccgatgaaggtttggtattttcctggggtgatggtgactttggaaaactgggccggggcggaagtgaaggctgtaacattccccagaacattgagagactaaatggacagggggtgtgccagattgagtgtggagctcagttctccctggcgctcaccaagtctggagtggtgtggacatggggaaagggggattacttcagattgggccacggctctgacgtgcacgtgcggaaaccacaggtggtggaagggctgagagggaagaagatcgtgcatgtggctgtcggggccctgcactgcctggcggtcacggactcggggcaggtgtatgcttggggtgacaacgaccacggccagcagggcaatggcacgaccacggttaacaggaagcccacactcgtgcaaggcttagaaggccagaagatcacacgcgtggcttgtgggtcgtcccacagtgtggcgtggacaactgtggatgtggccacgccctctgtccacgagcccgtcctcttccagactgcaagggaccctttaggtgcttcctatttaggcgtgccttcagatgtcaattcttctgctgccagtaataaaataagtggtgcaagtaattctaagccatatcacccttctcttgccaagattctcttgtcattggatggaaatctggccaaacagcaggccttatcgcatattcttacagcattgcaaatcatgtatgccagagatgctgttgtcggggccctgatgccggccgccatgatcgccccggtggagtgcccctcgttctcctcggcggccccttccgacgcatctgcgatggctagtcccatgaatggagaagaatgcatgctggctgttgatatcgaagacagactgagtccaaatccatggcaagaaaagangagagattgtttcctctgaagacgcagtgaccccctctgcagtgactccgtcggccccctcagcctccgctcggccttttatcccagtgacggatgacctgggagctgcaagcatcattgcagaaaccatgaccaaaaccaaagaggatgttgaaagccaaaataaagcagcaggtccggagcctcaggccttggatgagttcaccagtctgctgattgcggatgacactcgtgtggtggtagacctgctcaagctgtcagtgtgcagccgggccggggacaggggcagggatgtgctctccgcggtgctttccggcatggggaccgcctacccacaggtggcagatatgctgttggagctctgtgtcaccgagttggaggatgtggccacagactcgcagagcggccgc

SEQ ID NO: 356535 - DNA, 1713 bp, Homo Sapiens
  misc_feature (122)..(122): n is a, c, g, or t
  misc_feature (126)..(126): n is a, c, g, or t
  misc_feature (196)..(196): n is a, c, g, or t
  misc_feature (1540)..(1540): n is a, c, g, or t
  misc_feature (1592)..(1592): n is a, c, g, or t
  misc_feature (1610)..(1610): n is a, c, g, or t
  misc_feature (1678)..(1678): n is a, c, g, or t
cccactccgggcgtgtggccgtgggcggtcgcttcctcgctcggggccaaagttcctcagccgtgaagaggggtggatgtcacaagtcaagcctccttcccagggtggccgtaaggttcggnggtngggggaggtggggatttggggtgaaactggacagaacactggcgtgctaggcaaacgggagccccgcggncggcgaactgctgactcgctctctccagagactcaagggcagggccgggctccgaagtgtgggaccccagaaggagctgctgaagacgggaccaagggccacagggaggtttgctggggtccagatggtgaaagtgggcgctgggggtcgccccaggttggccccccgccatctggagctcctttcgtcagtcagtcccctccgagttccctttctagggcaagatagcgaggtgaagcggaagtctcagtgtgacaccggcgaggttctcttcccagcagcctttgggaagcatccccctgtttcgggaatatggcattcgggccaatcatgtgggtgatggagcccgtctcagggttcggctgctaaaggccgaactcgtaacagcagtctctgtggcgggtagtcacttgcctcttactggctcacagtgcttgacttcctaattaagttttctgttgttcctgccctctattcaaatatgaatgattccggaaccagattgattaatcctgttatttgaagaagggaagctgggaaataggaataatgatccccacacctatgtaagaacgcagtttgctaaggttactttgcagcttgcctggtcactcccatgatctaaccctgtagggaggtagagtaggggatgttgctctgtttctccgcaggtttttgaggctcagagaggtttatgggacttggcaaagcaaaaatagaaactggtcccaaatgcctttcctgttaatttccttccattcatcgtatcatcccacgatccccactcccttcaccgggactgcatcctcacaacctgggatgtgctatgctgtctcccgtcagtcactcctagcaagctccctggggctgcttggggagctctgagtgacccgcagaagtgagagcacttcatgggaacaaaggaggaaggaacaaaagtgggcacctgctctgtgcaaagggctgtgctggccgggttcctattctccattatgggaggtgaggggcaggatcccagatatgttcttagcagactgcctcagggcctggagagaccagggaccacgcagcccttctccagcttgtcctttctcaacgggcagcagtcaagaccagggcatctgcctgccctcatattctctctgttttaagcatttgcaggaccagggatgctgtgctgctctcccatgagccagtcaccgagtcggtctgctgaagccctttctgaacctctggccgtctggatgctccactgtgcttgccaagatgaagtgcgtcttggtggccactgagggcgcagaggtcctcttctactggacagatcaggagtttgaagagagtctncggctgaagttcgggcagtcagagaatgaggaagaagagctccctgccctgnagaccagctcagcacctnctagccccggtcatcatctcctccatgacgatgctggagaagctctcggacacctacacctgcttctncacggaaaatgccacttccctgtatgtcccccacc

SEQ ID NO: 356536 - DNA, 1335 bp, Homo Sapiens
  misc_feature (1270)..(1278): n is a, c, g, or t
aatctccctccgggctaattgaatctgtctcaccccgcggccggtccggaattcccgggatccgggctcctgcaggcggggcgctgtgcgcgccgcgatccggtacgtgggcctccgggctgtcccctctgggggcggcgatcctccctccggagccccccttcaaccctcccggaagtgagcatttgcaggaccagggatgctgtgctgctctcccatgagccagtcaccgagtcggtctgctgaagccctttctgaacctctggccgtctggatgctccactgtgcttgccaagatgaagtgcgtcttggtggccactgagggcgcagaggtcctcttctactggacagatcaggagtttgaagagagtctccggctgaagttcgggcagtcagagaatgaggaagaagagctccctgccctggaggaccagctcagcaccctcctagccccggtcatcatctcctccatgacgatgctggagaagctctcggacacctacacctgcttctccacggaaaatggcaacttcctgtatgtccttcacctgtttggagaatgcctgttcattgccatcaatggtgaccacaccgagagcgagggggacctgcggcggaagctgtatgtgctcaagtacctgtttgaagtgcactttgggctggtgactgtggacggtcatcttatccgaaaggagctgcggcccccagacctggcgcagcgtgtccagctgtggggagcacttccagagccctgctgtggacctacagccgcctgcgggagcaggagcagtgcttcgccgtggaggccctggagcgactgattcacccccagctctgtgagctgtgcatagaggcgctggagcggcacgtcatccaggctgtcaacaccagccccgagcggggaggcgaggaggccctgcatgccttcctgcttgtgcactccaagctgctggcattctactctagccacagtgccagctccctgcgcccggccgacctgcttgccctcatcctcctggttcaggacctctaccccagcgagagcacagcagaggacgacattcagccttcccccgcggagggcccggagcagccagaacatccccgtgcagcaggcctggagccctcactccacgggccccaactggggggagctctgcagagacggagacagacagcttctccctccctgaggagtacttcacaccagctccttcccctggcgatcagagctcaggtagcacatctggggcctgggaagggggggcannnnnnnnnatgggatggccctttcagaatagccagaagggaaacccctcccaaaacacctgggtc

SEQ ID NO: 356537 - DNA, 1646 bp, Homo Sapiens
cacaagcagcagaggggaacccgcccagtgctgagttgtcttcgaggttggcgctcctccaggaaagcgattggctgcgtggagtttagaatgggaaaggaatgccatcaacccctcggtgctttcagagggaccagcggggtaggagcgggttgagaggggggctccgggacctcatggagctctgcacgtgacctccacctcgactccatgcagtgcaccagcctgcaccccccaggttgcctttgatggggaatctgccccagccgagatgtccagatgttgctttagacctgaagggcagctcgggaggtccagtaggctgggaccctctatgtccccccatgggtgcagatcctttaagaagtgggcttaaggcctagacgtgtggctgatgaacgtggcccacggtcagcagctcacaggcggaccatcaccccaagtagggccaggagccagccaaggggccgtccaggggccccagccatgcccagagtcctgttggtggtctcaggcactgaggtcgatctcgtgatgctggtagatctgtgtggggcccttaaagcaagcagcaaagaggaagcgtctgccggccatagtgatgtgggcaaaggcacggggggccaccagggccggaggccccagctcctgcagtggctccaggagccccttgtcaggctcaaggcggaggacctggctgaaggcgaagtcgctgcctaggatggccagttggtccctggcgatgagcagtggctggaagacgtgggcaccgcgcgagggaagttgctgcagcagacgaaacatggagccgtcccagcgcatgaccatggagtccccaatgtagcgtgtgaggcacaggaacacgtccccaccagcctggaagtggcgtgtggcatagacatcctcggcctcggggatgtctgtgcgtctctcgaagcggccaccggtccagtggaagagcacgggccgctgggaagccgaggccagcagcaggtggggccggccgtccagctccagggcctcagcgtccgtgtcccggtgccaggcgtgcaggctctggtgcgggtaaaagccgggcccgtcgcggcacagcagcgtggtgctgcccgccttggaggcatcggccaccacgaagcagggttgcccttccagccacaggagctcggcgtcattgggccgcagcagccgccgcggggccagggtctgcgttggggccaggcgcaggccgggactgggccgggcccacagctgtgagcccccccacaggcgggcagccagcacgaagaggctcgggcccagcaccagtggcttgcaggacaccacggaggccgctgtggggaggtggggaggcaggtcaggccagccaggcaggctgctggacaggcagaaggacggggagggggctcaccgggcagctcttcctcgggccggaagcgctgcaggctgtagtcccaggagagaatcaggcagcggccggcgaagggctgtgccagcacaatgtgaggctccccttggtaggagaagggctctacgctcagtgccgactcccccaccgtctggaaccaggacagctctatggctctgcacttgaaagtcttggggtcgaggtggtggagctgcaatcccgggaattccggaccggtacc

SEQ ID NO: 356538 - DNA, 1578 bp, Homo Sapiens
ggtccggaattctcgggatcgaacagggaggaaggccgactgaaagaaagacggagaagaggagagagaagccagggccgagcgtgccagcaggcggatggagggcggcctggtggaggaggagacgtagtggcctgggctgagctgggtgggccgggagaagcgggtgcctcagagtgggggtgggggcatgggaggggcaggcattctgctgctgctgctggctggggcgggggtggtggtggcctggagacccccaaagggaaagtgtcccctgcgctgctcctgctctaaagacagcgccctgtgtgagggctccccggacctgcccgtcagcttctctccgaccctgctgtcactctcactcgtcaggacgggagtcacccagctgaaggccggcagcttcctgagaattccgtctctgcacctgctcctcttcacctccaactccttctccgtgattgaggacgatgcatttgcgggcctgtcccacctgcagtacctcttcatcgaggacaatgagattggctccatctctaagaatgccctcagaggacttcgctcgcttacacacctaagcctggccaataaccatctggagaccctccccagattcctgttccgaggcctggacacccttactcacgtggacctccgcgggaacccgttccagtgtgactgccgcgtcctctggctcctgcagtggatgcccaccgtgaatgccagcgtggggaccggcgcctgtgcgggccccgcctccctgagccacatgcagctccaccacctcgaccccaagactttcaagtgcagagccatagagctgtcctggttccagacggtgggggagtcggcactgagcgtagagcccttctcctaccaaggggagcctcacattgtgctggcacagcccttcgccggccgctgcctgattctctcctgggactacagcctgcagcgcttccggcccgaggaagagctgcccgcggcctccgtggtgtcctgcaagccactggtgctgggcccgagcctcttcgtgctggctgcccgcctgtgggggggctcacagctgtgggcccggcccagtcccggcctgcgcctggccccaacgcagaccctggccccgcggcggctgctgcggcccaatgacgccgagctcctgtggctggaagggcaaccctgcttcgtggtggccgatgcctccaaggcgggcagcaccacgctgctgtgccgcgacgggcccggcttttacccgcaccagagcctgcacgcctggcaccgggacacggacgctgaggccctggagctggacggccggccccacctgctgctggcctcggcttcccagcggcccgtgctcttccactggaccggtggccgcttcgagagacgcacagacatccccgaggccgaagatgtctatgccacacgccacttccaggctggtggggacgtgttcctgtgcctcacacgctacattggggactccatggtcatgcggctgggacggctccatgttttcggtctggctgcagccaacttccccttcgcgccggtggcccacggtcctttccagcccat

SEQ ID NO: 356539 - DNA, 1028 bp, Homo Sapiens
  misc_feature (938)..(970): n is a, c, g, or t
aggctggtccggtccggattcccgggatccacacatagagaccaacagatagacagctacctaaagcctgaaagactgacagcaacacagaaaaaaagaaacaggcagaaagagagacaaagacagaaatagaaacagactaacacacagagtcaaaaatacagagacagaaagacagggagaaagagaaacagaaaattagacaccaaagacatacgaacagggaggaaggccgactgaaagaaagacggagaagaggagagagaagccagggccgagcgtgccagcaggcggatggagggcggcctggtggaggaggagacgtagtggcctgggctgagctgggtgggccgggagaagcgggtgcctcagagtgggggtgggggcatgggaggggcaggcattctgctgctgctgctggctggggcgggggtggtggtggcctggagacccccaaagggaaagtgtcccctgcgctgctcctgctctaaagacagcgccctgtgtgagggctccccggacctgcccgtcagcttctctccgaccctgctgtcactctcactcgtcaggacgggagtcacccagctgaaggccggcagcttcctgagaattccgtctctgcacctgctcctcttcacctccaactccttctccgtgattgaggacgatgcatttgcgggcctgtcccacctgcagtacctcttcatcgaggacaatgagattggctccatctctaagaatgccctcagaggacttcgctcgcttacacacctaagcctggccaataaccatctggagaccctccccagattcctgttccgaggcctggacacccttactcacggggaacctccgcggggaaccccgttcccagtgttgactgcccgcgtccctctgggctccctgcagtgggatgccccaccgggggaaaggccacnnnnnnnnnnnnnnnnnnnnnnnnnnnnnnnnncccccggccctcccctggggagccaccatgtgggagtttcccacccaaactttggaac

SEQ ID NO: 356540 - DNA, 1684 bp, Homo Sapiens
  misc_feature (1603)..(1603): n is a, c, g, or t
ctggtaccggtccggaattcccgggatggctgcccgcctgtgggggggctcacagctgtgggcccggcccagtcccggcctgcgcctggccccaacgcagaccctggccccgcggcggctgctgcggcccaatgacgccgagctcctgtggctggaagggcaaccctgcttcgtggtggccgatgcctccaaggcgggcagcaccacgctgctgtgccgcgacgggcccggcttttacccgcaccagagcctgcacgcctggcaccgggacacggacgctgaggccctggagctggacggccggccccacctgctgctggcctcggcttcccagcggcccgtgctcttccactggaccggtggccgcttcgagagacgcacggacatccccgaggccgaggatgtctatgccacacgccacttccaggctggtggggacgtgttcctgtgcctcacacgctacattggggactccatggtgaggctgggcctgggggcggggggctggcttttcagcactgacccaatcctgcacactaagcctctaaactctgacctaccctcacatgccgacctttgaaccaggaccccaccccacactgatgccaagactctgacccccctcaaggctggctgactcccaaccactccccagttccccgacactgatgctggccccaacatccctgattctacccccaaatgctggctctgtgactcggatgcattccagacttcaccacagccacacctgtccccaccctgacactgagcccccaaggctgacgctagggttaagcactgcccactgtttctggagtgaggtgcaggcaggggagggttctgagtctggaagggccctgatctgactcaggtgttcacaaggtctctgggtggggaacagactgggggagcagggagaggagcctagaggccagggaagaggctgccaggatggtccaatcaggaggggatggagttcagccagaggcggtgggagaaatgtacaactgtagaaggtgaaactgacagagtccatggctgagtgcttctgtgtggggcgtgagggcaagggaagggctcagaacaactccatgtgtgtggccgcaacaggtgggtggtgacttttatgaagataagaaagctatgggagttttgggaccgacaggcttctgcttccaagctgttccagggcccccagagacccccgggaccccaggccctcactggccacacccccacaggtcatgcgctgggacggctccatgtttcgtctgctgcagcaacttccctcgcgcggtgcccacgtcttccagccactgctcatcgccagggaccaattggccatcctaggcagcgacttcgccttcagccaggtcctccgccttgagcctgacaaggggctcctggagccactgcaggagctggggcctccggccctggtggcccccccgtgcctttgcccacatcactatggccggcagacgcttcctctttgctgcttgctttaagggccccacacagatctaccagcatcacgagatcgacctcagtgcctgagaccacccacaggactctggggcattggctgggggcccctggnacgggcccccttgggctgggctcctgggccctaacctttgggggtgaatgggtcccgccctggtggaagcctggctgaaac

SEQ ID NO: 356541 - DNA, 993 bp, Homo Sapiens
  misc_feature (161)..(224): n is a, c, g, or t
  misc_feature (493)..(493): n is a, c, g, or t
gaacagggaggaaggccgactgaaagaaagacggagaagaggagagagaagccagggccgagcgtgccagcaggcggatggagggcggcctggtggaggaggagacgtagtggcctgggctgagctgggtgggccgggagaagcgggtgcctcagagtggnnnnnnnnnnnnnnnnnnnnnnnnnnnnnnnnnnnnnnnnnnnnnnnnnnnnnnnnnnnnnnnngcctggagacccccaaagggaaagtgtcccctgcgctgctcctgctctaaagacagcgccctgtgtgagggctccccggacctgcccgtcagcttctctccgaccctgctgtcactctcactcgtcaggacgggagtcacccagctgaaggccggcagcttcctgagaattccgtctctgcacctgctcctcttcacctccaactccttctccgtgattgaggacgatgcattttgcgggcctgtcccacctgcagtacctcttcatcngaggacaatgagattggctccatctctaagaatgcccttcagaggacttcgctcgcttacacacctaagcctggccaataaccatctggagaccctccccagattcctgttccgaggcctggacacccttactcacgtggacctccgcgggaacccgttccagtgtgactgccgcgtcctctggctcctgcagtggatgcccaccgtgaatgccagcgtggggaccggcgcctgtgcgggccccgcctccctgagccacatgcagctccaccacctcgaccccaagactttcaagtgcagagccataggtggggggctttcccgatggggtgggaggcgggagatctgggggaaaggctgccagggccaagaggctcgtctcactccctgccctgccatttcccggagtgggaagaccctgagcaagcagcactgccttcctgagccccagttttctcatctgtaaagtgggggtaataaacagtgatataggagtgccc

SEQ ID NO: 356542 - DNA, 1027 bp, Homo Sapiens
  misc_feature (21)..(21): n is a, c, g, or t
  misc_feature (34)..(34): n is a, c, g, or t
  misc_feature (36)..(36): n is a, c, g, or t
  misc_feature (51)..(51): n is a, c, g, or t
  misc_feature (63)..(63): n is a, c, g, or t
  misc_feature (66)..(67): n is a, c, g, or t
  misc_feature (71)..(72): n is a, c, g, or t
  misc_feature (80)..(81): n is a, c, g, or t
  misc_feature (83)..(83): n is a, c, g, or t
  misc_feature (103)..(103): n is a, c, g, or t
  misc_feature (127)..(127): n is a, c, g, or t
  misc_feature (137)..(137): n is a, c, g, or t
  misc_feature (171)..(171): n is a, c, g, or t
tttccgttggcgagatttgtnaagcgtgtctcgngntggcgtcccacttgnttgggccctctngcnnagcnntctgtcannangcttgtccctctccagctgntctctcttccgctcctctgcatanatgtctcggnccttctgaagcatgctatggttcatctggaactncaggatggcctcgaagaggttccaaaatgtatacctctggccacagaacgggttggaacacccaggcaggagtgagaggtctgccatagcaagaagtcactcagccgcacttctccagaagtccgtatcaagatgtcaggatgaggagaccggttggtatagaggcacttatcaagcagagactcagagatatcactgggatccaacaggccttgctccaccccccaggccatctctctcacagcattgctgatctcatgacgggatgtgtatgcaaaacagacattcaggaaacacttgttgtagttcttcgtggcctgtacagcttgtgcaatcagctcctggagatccaagggcaacaagtgcagatcgcccaggacccggatacacaccccatgcttctgcagtttctccttttcttccatcaagcggctgaacttctgccgggccagatccataagcccgtctacctcactcttggagcgtttgaagttctcaatgctgaatgcgtagactgtcacctctaggatgcccaggttcaaacaccaccgcagagtctcagctagcttgttgaagccctgtgagtggccttcctgccgctccacctggcacttcttggcatagcgacggttcccgtccattatgaatgcaatgtgtttcggcattgggcctgcctttatgatgttggcacagaaccgctcccaaagtgacagctctccttccttgatccatgacatagttcttttccagtcagaagatcactccagaacaagcaaacaccagccaggtaatctgattagctccgctgggcgcgtccccacggcttcagtgggccggcacttcctcatgacgtccc

SEQ ID NO: 356543 - DNA, 1038 bp, Homo Sapiens
  misc_feature (5)..(5): n is a, c, g, or t
  misc_feature (9)..(9): n is a, c, g, or t
  misc_feature (15)..(15): n is a, c, g, or t
  misc_feature (19)..(19): n is a, c, g, or t
  misc_feature (22)..(22): n is a, c, g, or t
  misc_feature (34)..(34): n is a, c, g, or t
  misc_feature (48)..(48): n is a, c, g, or t
  misc_feature (50)..(50): n is a, c, g, or t
  misc_feature (67)..(67): n is a, c, g, or t
  misc_feature (73)..(73): n is a, c, g, or t
  misc_feature (81)..(81): n is a, c, g, or t
  misc_feature (88)..(88): n is a, c, g, or t
  misc_feature (90)..(90): n is a, c, g, or t
  misc_feature (102)..(102): n is a, c, g, or t
  misc_feature (128)..(128): n is a, c, g, or t
  misc_feature (192)..(192): n is a, c, g, or t
gcttntttngtttcntttnaanacgtgactcctnttggtggtttgccngnacaccaagtggctgggncctctnaggtggtnagagatngngttggctgttgnggtggctgtagatggtgaccctggtngtcccctgcctcctgccaccccttcctccccacactccactctgattcacctcttcctctggtncctttcatctctctacctccaccctgcattttcctcttgtcctggcccttcagtctgctccaccaaggggctcttgaaccccttattaaagccccagatgatcccagtcactcctctctagggcagaagactagaggccagggcagcaagggacctgctcatcatattccaacccagccacgactgccatgtaaggttgtgcagggtgtgtactgcacaaggacattgtatgcagggagcactgttcacatcatagataaagctgatttgtatatttattatgacaatttctggcagatgtaggtaaagaggaaaaggatccttttcctaattcacacaaagactccttgtggactggctgtgcccctgatgcagcctgtggcttggagtggccaaataggagggagactgtggtaggggcagggaggcaacactgctgtccacatgacctccatttcccaaagtcctctgctccagcaactgcccttccaggtgggtgtgggacacctgggagaaggtctccaagggagggtgcagccctcttgcccgcacccctccctgcttgcacacttccccatctttgatccttctgagctccacctctggtggctcctcctaggaaaccagctcgtgggctgggaatgggggagagaagggaaaagatccccaagaccccctggggtgggatctgagctcccacctcccttcccacctactgcactttcccccttcccgccttccaaaacctgcttccttcagtttgtaaagtcggtgattatatttttgggggctttccttttattttttaaatgtaaaatttatttatattccgtatttaaagttgta

SEQ ID NO: 356544 - DNA, 1101 bp, Homo Sapiens
  misc_feature (9)..(9): n is a, c, g, or t
  misc_feature (22)..(22): n is a, c, g, or t
  misc_feature (24)..(24): n is a, c, g, or t
  misc_feature (31)..(32): n is a, c, g, or t
  misc_feature (34)..(34): n is a, c, g, or t
  misc_feature (39)..(39): n is a, c, g, or t
  misc_feature (52)..(53): n is a, c, g, or t
  misc_feature (55)..(55): n is a, c, g, or t
  misc_feature (57)..(57): n is a, c, g, or t
  misc_feature (63)..(63): n is a, c, g, or t
  misc_feature (66)..(66): n is a, c, g, or t
  misc_feature (77)..(77): n is a, c, g, or t
  misc_feature (94)..(96): n is a, c, g, or t
  misc_feature (103)..(104): n is a, c, g, or t
  misc_feature (107)..(107): n is a, c, g, or t
  misc_feature (115)..(115): n is a, c, g, or t
  misc_feature (117)..(117): n is a, c, g, or t
  misc_feature (120)..(120): n is a, c, g, or t
  misc_feature (122)..(122): n is a, c, g, or t
  misc_feature (137)..(137): n is a, c, g, or t
  misc_feature (150)..(150): n is a, c, g, or t
  misc_feature (155)..(155): n is a, c, g, or t
  misc_feature (179)..(179): n is a, c, g, or t
  misc_feature (181)..(181): n is a, c, g, or t
  misc_feature (209)..(209): n is a, c, g, or t
  misc_feature (325)..(325): n is a, c, g, or t
  misc_feature (701)..(724): n is a, c, g, or t
  misc_feature (831)..(857): n is a, c, g, or t
  misc_feature (964)..(964): n is a, c, g, or t
gcgggttgntcaaagaccaggngnacacccnngnccggngtaacgctcgagnngncntccgcncanaaagtcagagnggggtaccggccgcccnnngtttttnnatntccgtgtntnttnanaagcgccgggcagcntggtacagggacnttccnacgggtcgggcccccggcgcctcncntcccccagctcccgggctctgtgaaccngccccgtccccggggactgtcagtccccaccccgtgcgggcgggcgctgggacttctcggaggcagacctagctgatcgagcctttcctgtccgcggcgccggcccgatcgcgggncagggcgcgtcgccggggctggacgttcgcagcggcgcttcggaaagggggccccgcgggagcagccgcccgcgtctcccagcagcttcccccttgcccaggcgccgcgcgcgcccggtatcccccgggtgtccacctgtgcgtggggggctgtttcccgtctgtccagccgcgcccacttctcaggcccaaaggccagcaggaagggtcccggaggtggctgggggcgtccacctgagaagtccgctctcgctcagacaccccacccggcacaccgcgcactcgcgccttcatctggagccgcggggctcggctcccgagatcgcggtccgggttccggcgccgggctgggggctcaggaccagggctggcgcannnnnnnnnnnnnnnnnnnnnnnngggctatcagagcggtcaaagcctcggaaatccctccgtccacgctcccgtggaacagagaaggaaactgaggctccgagactgcggggccgggctacagccgtggnnnnnnnnnnnnnnnnnnnnnnnnnnngcttctctggtctctgcgttctgcagcctttccctgcgcgcagccgggggctgggggtccccagccagcagggacccacgggcagtcccgggtgccgggatcgggcngtacgcccctcgggcgggagcagaggccggctcgatggagacctttttgagaaatggcggcctctacccgccccccagcccccgagcgcccgccgtctgcgttcagcatcacagcttttaagcctccctgagccggg

SEQ ID NO: 356545 - DNA, 1082 bp, Homo Sapiens
  misc_feature (937)..(938): n is a, c, g, or t
  misc_feature (948)..(948): n is a, c, g, or t
  misc_feature (978)..(978): n is a, c, g, or t
  misc_feature (984)..(984): n is a, c, g, or t
  misc_feature (1007)..(1007): n is a, c, g, or t
  misc_feature (1011)..(1011): n is a, c, g, or t
  misc_feature (1027)..(1027): n is a, c, g, or t
  misc_feature (1033)..(1033): n is a, c, g, or t
  misc_feature (1044)..(1044): n is a, c, g, or t
  misc_feature (1063)..(1063): n is a, c, g, or t
  misc_feature (1067)..(1067): n is a, c, g, or t
  misc_feature (1069)..(1069): n is a, c, g, or t
  misc_feature (1076)..(1076): n is a, c, g, or t
tccggatcgcagctctcgcggcagtcgcctgagacttaaggttattgcttggccgcggcctggtattccggcgattcgtttcttgctcggcttcctggagctgtggtccgtgtgggcttccacctcagacagttgcgctggctcagcggggccggaacatggctgcgtccggtctggatcatctcaaaaatggctacagaagaagattttgtcgaccttccagggcacgtgacattaacacagagcaaggccagaatgttctggaaatcttacaagactgttttgaagaaaaaagtcttgccaatgattttagtacaaattctacaaaatcagtgcctaattcaacacgcaaaataaaagacacttgtattcagtcaccaagcaaagagtgccagaaatcacatccaaagtcagttccagtttcttcaaagaagaaagaagcctctctacagtttgttgtagaaccaagtgaagccacaaacagatcagttcaggcccatgaagttcatcagaaaattctggcaactgatgttagttccaaaaatacacctgactcgaaaaaaatatcaagtagaaacataaatgatcatcacagtgaagctgatgaagaattttacttatccgttggctcaccttctgttcttttggatgcaaaaacatctgtatcacaaaatgttattccatctagtgcccaaaagagagagacttacacttttgaaaattcagtaaatatgctgccttcaagtacagaggtttcagtaaaaaccaaaaaaaggttaaactttgatgataaagttatgttaaagaaaatagaaatagataataaagtatcagatgaagaggataaaacatcagaaggacaagaaagaaaaccatcaggatcatctcagaatagaatacgagattcagaatatgaaattcaacgacaagctaaaannagtttttcancattgttttaagaacagtaaacgaaaaagngatccngtcccattgttaggatgcggcantgcncccctcattcgtgtcncccgtngtacgattgantagaggtgatttttatttntggntngataaanttttgc

SEQ ID NO: 356546 - DNA, 894 bp, Homo Sapiens
cataagacaacatggttgaggtctgagattttacacagagtcattcaagagttgcttgtggactactatgtgaagatacaagacacaaatgtaacttctgaggacaaaaaggattttgtgtggatgagggctcggctacagcaagaagtagaggagcagctcaaaaagaaatgtttcactctgctctgctactatgatcccaattcagatgctgacagtgaaaccgtgaaggcagcaaaggtgtggaaactcgcagaggtcctggtgggtgagcagcagcagtgccaggatgccaagagccagcagaaggagcagatgttgctgctggagaagaagagtgctgcttactcccaggtgcttctccgctgcctcactttgctgcagaggcttcttcaagaacaccggctgaagactcaatccgagctagaccgcatcaatgcccagtacctggaagtcaagtgcggtgctatgatccttaagctgaggatggaggagctaaagattttgtccgacacttacactgttgagaaagtggaagttcatcgtctgattagggaccgtttggagggagccattcacctacaggagcaggacatggagaactcaagacaggtcctgaactcctatgaggtccttggggaggagtttgacaggctggtgaaagagtacaccgtactcaagcaggcaacagagaacaagcggtgggccctccaggagttcagcaaggtctaccgttgagctctggcagggccaggagacatggcttctgcatagctgctgcctcctaatcttcctgctagtgggaccaccttcacctggggctgccttcagaacaaaggagtgtgggaaatgcttacgcttgaaacactgcagtcatttagggcactctcctgg

SEQ ID NO: 356547 - DNA, 1769 bp, Homo Sapiens
  misc_feature (1551)..(1559): n is a, c, g, or t
gggattcccgggatttcgtcgcggcctctagtgcactttcggctccttccccttcccgggcctttcagcttggtctttccgggcctcgcttcccccagcccctgcgcccggcccgaacgagaggttccggagccccggcgcgggcgggttctggggtgtagacgctgctggccagccctccccagccgaggttctcggcaccgccttgagagcttcagctgccccagggtgtgcaggtttgctttagagggtcggcgggcggagcttcggggaagaggagctctgggagagtcattccggccagtggccggagaccgtcgtcgctcttgggaatccttggccgcccagacagaagggaagtaggcgccggagagcccgttctgcattttgattcatctcgggccctattagaatcccaagaaaatcaaatggcatccggggatttctgctcacctggagaagggatggaaatacttcaacaagtgtgcagcaaacaacttcctccttgtaacctgagtaaagaggacctgttacagaacccatacttcagcaagcttctcctgaatctctcacagcatgtggatgagagtggcttaagcctcaccctagcaaaggagcaggctcaggcatggaaggaagttcgactgcataagacaacatggttgaggtctgagattttacacagagtcattcaagagttgcttgtggactactatgtgaagatacaagacacaaatgtaacttctgaggacaaaaaggtgcttctccgctgcctcactttgctgcagaggcttcttcaagaacaccggctgaagactcaatccgagctagaccgcatcaatgcccagtacctggaagtcaagtgcggtgctatgatccttaagctgaggatggaggagctaaagattttgtccgacacttacactgttgagaaagtggaagttcatcgtctgattagggaccgtttggagggagccattcacctacaggagcaggacatggagaactcaagacaggtcctgaactcctatgaggtccttggggaggagtttgacaggctggtgaaagagtacaccgtactcaagcaggcaacagagaacaagcggtgggccctccaggagttcagcaaggtctaccgttgagctctggcagggccaggagacatggcttctgcatagctgctgcctcctaatcttcctgctagtgggaccaccttcacctggggctgccttcagtacaagggagtgtggaaatgcttacgcttgaaacactgcagtcatttaggcactctcctggtttctctttattttttatgactgggcctcttctggaaaatctagcaaggagatttatataatttttatgcatagctgtgtgtcagtgtcagccctgtattgtatttgattatctcctgaataaagttatgatattatatcttaaaaacaaataacacaaccacccccgggggaacccccggggcggccccacgggcttcccggagcttatgaaaatcgaatttcccaccagcattgggggccctgttggccctcnnnnnnnnnccggtcccggcgggggctacaataatcaccccgggacaacagatctcgcggggacactgcatcgggtcagccggaatgcgttctcctccgctttatgcagcggagcaggtaaattcaccctccactccccgcgggaagagagctcaatctgcagagtatactcaagacgcgctgcgccacagggcgcgcgcccatatcacgctactaggc

SEQ ID NO: 356548 - DNA, 924 bp, Homo Sapiens
tccgctgccccagggtgtgcaggtttgctttagagggtcggcgggcggagcttcggggaagaggagctctgggagagtcattccggccagtggccggagaccgtcgtcgctcttgggaatccttggccgcccagacagaagggaagtaggcgccggagagcccgttctgcattttgattcatctcgggccctgtaagggtcatatcttgtgaaaataacctgtaaaatcaatttaacgttcagtgcagcgtgtaaagacagctctaagaatttaaaagacgcctgagtcagaacatttaaatgcttgggtccctgtagcagcgttttaacacgtctgagtgcagagggtggagaatcgagcctgattgccgttcacgccctgtaacctttaagaagggtaaagaaaggcaccctaaaaaacgcaaggggacacttaccctagggggggacgaacagctagctttttggaatttgggttggtcttcatttccaagtgcgaaatttgcctgcaaaactttttatttgcagtcatagatcaacgataaacagaattgttaaaacactgaacttaactaagtagtggcttttgttgacaagtcgattgtgttattaattcttaatgtctcatccaaggcaggaatcgttatctcagttttgcaggtgggaaaagtttggcacagaaaaaagcattttccttaagttctcagaagcaacggccggccgagctgcaaattaagtcccagcattctgcctcctcagctgcgtccccctctaaacatgttaaaaaacaatgagtagttactttgaatgttactcataaaaagaatcgagtaaaaccaaatgtttctataaaacatggaagcggttaaaatcataaatagcccttccaagggcctggttcacgcttttggggaagggcctcaa

SEQ ID NO: 356549 - DNA, 1046 bp, Homo Sapiens
aagtagcgaggcctgggtggcgaattcggcacgaggcttcgtcgcggcctctagtgcactttcggctccttccccttcccgggcctttcagcttggtctttccgggcctcgcttcccccagcccctgcgcccggcccgaacgagaggttccggagccccggcgcgggcgggttctggggtgtagacgctgctggccagccctccccagccgaggttctcggcaccgccttgagagcttcagctgccccagggtgtgcagattagaatcccaagaaaatcaaatggcatccggggatttctgctcacctggagaagggatggaaatacttcaacaagtgtgcagcaaacaacttcctccttgtaacctgagtaaagaggacctgttacagaacccatacttcagcaagcttctcctgaatctctcacagcatgtggatgagagtggcttaagcctcaccctagcaaaggagcaggctcaggcatggaaggaagttcgactgcataagacaacatggttgaggtctgagattttacacagagtcattcaagagttgcttgtggactactatgtgaagatacaagacacaaatgtaacttctgaggacaaaaagtttcatgagacccttgaacagcggctgcttgtaactgaactgatgcggctcttaggtcctagccaggagagggagatacctccactgctggggctggagaaagcggaccttctggaactcatgccactctcagaggattttgtgtggatgagggctcggctacagcaagaagtagaggagcagctcaaaaagaaatgtttcactctgctctgctactatgatcccaattcagatgctgacagtgaaaccgtgaaggcagcaaaggtgtggaaactcgcaaagggtccctggtgggtgagcagcagcagtgccaggatgccaagagccagcagaaaggagcaaatgttgctgctgggaaaaaaaaagggctggcttactcccaggtgcttctccgctgcctcactttgctgcagaagcttccttcaagaacaccgg

SEQ ID NO: 356550 - DNA, 903 bp, Homo Sapiens
ggcctgggtggcgaattcggcacgagggctccttccccttcccgggcctttcagcttggtctttccgggcctcgcttcccccagcccctgcgcccggcccgaacgagaggttccggagccccggcgcgggcgggttctggggtgtagacgctgctggccagcccgccccagccgaggttctcggcaccgccttgagagcttcagctgccccagggtgtgcaggtttgctttagagggtcggcgggcggagcttcggggaagaggagctctgggagagtcattccggccagtggccggagaccgtcgtcgctcttgggaatccttggccgcccagacagaagggaagtaggcgccggagagcccgttctgcattttgattcatctcgggccctattagaatcccaagaaaatcaaatggcatccggggatttctgctcacctggagaagggatggaaatacttcaacaagtgtgcagcaaacaacttcctccttgtaacctgagtaaagaggacctgttacagaacccatacttcagcaagcttctcctgaatctctcacagcatgtggatgagagtggcttaagcctcaccctagcaaaggagcaggctcaggcatggaaggaagttcgactgcataagacaacatggttgaggtctgagattttacacagagtcattcaagagttgcttgtggactactatgtgaagatacaagacacaaatgtaacttctgaggacaaaaagtctcatgagacccttgaacagcggctgcttgtaactgaactgatgcggctcttaggtcctagccaggagagggagatacctccactgctggggctggaaaaagcggaccttctgggactcatgccactctcagaagattttgtggtggatgagggctcg

SEQ ID NO: 356551 - DNA, 864 bp, Homo Sapiens
cgggaagatggcgggccgggcgacttgagatccgcgggtctccctcctctttttccgtctgcgtcgggagctcccgggcacgtgaggccgtgccgcgtttactggcgggcgggacggcctagccgggcggcgcctcggaggaagccgcggaccccttaggtgctgggcccttggaaatcggcgcgtggggggcggtgctcgagctgagcgcgagagggcgggagagctcgtggggtgcgaggggagcacgacgcccggccgggcagcatgagtcagcagcggccggcgaggaagttacccagtctcctcctggacccgacggaggagacggttcgccgtcggtgccgagaccccatcaacgtggagggcctgctgaaactcaaaaagtgaagagacctcgttttaatgtatcgaagatatatgtaactcgaaaatgtatcgatcatgacaaatctgctcccgggggtattcttgacttaaacaaggttgcaacgaaactgggagtccgaaagcggagagtgtatgacatcaccaatgtcttagatggaatcgacctcgttgaaaagaaatccaagaaccatattagatggataggatctgatcttagcaattttggagcagttccccaaacaaaagaagctacaggaggaactttctgacttatcagcaatggaagatgctttggatgagttaattaaagattgtgctcagcagctgtatgagttaacagatggacaaagaaaatgaaagacctagcatatgggacctatcaagacattcatagcatttcaggcccttccatgaacagaacgtcattgcagttaaaagctccagcagaaaccagattggatgttccagctccca

SEQ ID NO: 356552 - DNA, 2603 bp, Homo Sapiens
  misc_feature (48)..(48): n is a, c, g, or t
  misc_feature (71)..(71): n is a, c, g, or t
  misc_feature (136)..(137): n is a, c, g, or t
  misc_feature (2015)..(2047): n is a, c, g, or t
aagataaaaatacatatcaggtgacgacttaaaatgttagtcatgatnttaactgtgaattctgtggcacnggagatacagaaacaatgagtgctgtagaaaggcactcggttattgttgaatgaaacttctggannaagcctctttaggaaagtattagaagtagattctgctaaaacaggggctaccctcagaggtctcaggacaagggatagaaagtcaaacactgatgtttaagaagggataactatgacacatgaatcccacagccatctctccagaagagcaactattttgactgcgcatgcgggaagatggcgggccgggcgacttgagatccgcgggtctccctcctctttttccgtctgcgtcgggagctcccgggcacgtgaggccgtgccgcgtttactggcgggcgggacggcctagccgggcggcgcctcggaggaagccgcggaccccttaggtgctgggcccttggaaatcggcgcgtggggggcggtgctcgagctgagcgcgagagggcgggagagctcgtggggtgcgaggggagcaggacgcccggccgggcagcatgagtcagcagcggccggcgaggaagttacccagtctcctcctggacccgacggaggagacggttcgccgtcggtgccgagaccccatcaacgtggagggcctgctgccatcaaaaataaggattaatttagaagataatgtacaatatgtgtccatgagaaaagctctaaaagtgaagagacctcgttttgatgtatcgctggtttatttaactcgaaaatttatggatcttgtcagatctgctcccgggggtattcttgacttaaacaaggttgcaacgaaactgggagtccgaaagcggagagtgtatgacatcaccaatgtcttagatggaatcgacctcgttgaaaagaaatccaagaaccatattagatggataggatctgatcttagcaattttggagcagttccccaacaaaagaagctacaggaggaactttctgacttatcagcaatggaagatgctttggatgagttaattaaggattgtgctcagcagctgtttgagttaacagatgacaaagaaaatgaaagactagcatatgtgacctatcaagacattcatagcattcaggccttccatgaacagatcgtcattgcagttaaagctccagcagaaaccagattggatgttccagctcccagagaagactctatcacagtgcacataaggagcaccaacggacctatcgatgtctatttgtgagaagtggagcagggtcagaccagtaacaaaaggtctgaaggtgtcaggacctcttcatctgagagcactcatccagaaggccctgaggaagaagaaaatcctcagcaaagtgaagaattgcttgaagtaagcaactgatggcatttgagaatttatgtatcactgagttttttgggaatatcttcctggagaattacgcatcaaatttgattctcagagcaataaattatccatgaagtgctctcgttctcagtagcggcatcatggccagtagtgtctttgaggagtttcaccacttagattactgagtaattgtggtttccacatttgaaaacaactcctttttataataattcactgctttttgtcagtgaaatagacatcttgcctcctgaagtagcttcatcacagagtgtcatgaagacagacagtcaggctgaaatggacagttctttgtggactctacccttcccttcaaggagtatgtcatatatcacaaaagaaattgccttacactggttcacgtttgcagttactgttgtacattgcatagatgtacacacgaatttaaatgtgatgtctttgtatatatctgtataatgttgagattacttacgaaatatgtctgagtgacacttttcacccttgtacagccaaaataatgtatatatggaaagtgacagacaaattctctaatctctttggtatctataacttattagaatcctctggnnnnnnnnnnnnnnnnnnnnnnnnnnnnnnnnnacatgtagaagtatcataaatgtgctacacatttatgtttgtggatttaattaaagtattttaatatggttttcagtgctaaaattggagtcagatacttcttggttttaagctgtctacctaattgctgtctcccagcagactggtggcatgcccagtggctttgggggcaaggatagaaatgccatcaggaaatagctgaattcattgtgaaacatgaattcagtcatggtgataattggaaactcctttcaggtttttgcaagtagattttgtaatgtttgtgtatgcagccttgctgttgagtcagtccaaggggttttacttaggacaagttgtaccttgccctctctccagctctgctcccacattttcacatacctagctgtttctacctcattgggtaagtcatttaccactctgtgcctcagtttactctgtagtttaccattagactgtgagctccttgagggactttgtcataatcactgttacatcccagtgcctcacaccatgcctggcccttaagaagtgctcaataaatgtctgaacaaat

SEQ ID NO: 356553 - DNA, 1497 bp, Homo Sapiens
  misc_feature (1352)..(1363): n is a, c, g, or t
ttgccatggctctcaaaccaaagacagtagctaaagttgacctcctctcaacttaaggcaaaaggctggcatacagcacagaagcagaccaccagcttctttactccacatttccaccactggatggcagatattccccctctagaaatgcattaattttatttactaaacagggcagcagttcacaggtctcaagaccggtcactttgtgatgttttgcagccacacaacaggaggctaataattattttaatagccatactgagactcttcagtttattaagaaaaatgtatttcctcaggcattttaaaatatatatacatttaatatttttggagctgtatttgcattggatcataatagattatgtgcacatgtgcaattataaacataatgtgctaccacaggcttcaacaaagagctgttaaagatacttttttcccttctcattaatattaccttagaaaagaatccccatgcttgttttaaaaaatctaccttcactaaaacagaacagtttagaacagaacatcactatcttaaaagttgattaaaaaaaatctcaatatgtcatgtagagagaattgggcatactcttttccttttgaactacagagttatcaattagagctctgtccttttctcatatacttggagtcatgtagtgtctctctcaatccacaacgttctgagatgggttggctctttatgatttttctatcccaaacaacagaatgaatacagaggtgagtgatgagagaaagagtgagaaaaggaagaatgagaacgcatgagctggtcctggcctaaagtttgatccaaagctcaatttagaatatagacaaataattttaaaatattttcagtttttaaatggcacacaattttagctggcacatcattttcatcacaggggaagccttttccaagagagaaaattcctaaatcatcatgaaattcctcattaaaaaaagttccgtaccataatagctcgtttaaaatcacaatttaagataaaataattcagaaatcttaaattaaaaaaataaattttataatatatcttgagagatggaataaaggctttaatatgtcaaaaaaggagtgtttagtgttataataaatttttgtctctttcaaaaaagcccaacctcttctccaccaaaatatgtataataatgaaagcaaaaaatgaaaataaaattatcaataataaagaagtatggaataagatctatcgtgtcaacgctatccaaaaatattctactaaaaagtagactgaccataaatattccaagaatagtgatatgtattttccaatgctagtcgttactactatgtctgtctgagnnnnnnnnnnnnttgaatgaaaataaaaaggcatacatgccaaaaataaagaacctatttgtgtccgacacactagagaaattgcttaatgagtagttttgcccaaaaagtaatacttgtcatattgcccaagttaaccaaacatc

SEQ ID NO: 356554 - DNA, 1475 bp, Homo Sapiens
  misc_feature (830)..(831): n is a, c, g, or t
  misc_feature (837)..(838): n is a, c, g, or t
  misc_feature (843)..(843): n is a, c, g, or t
  misc_feature (846)..(846): n is a, c, g, or t
  misc_feature (849)..(850): n is a, c, g, or t
  misc_feature (859)..(859): n is a, c, g, or t
  misc_feature (863)..(865): n is a, c, g, or t
  misc_feature (869)..(870): n is a, c, g, or t
  misc_feature (875)..(875): n is a, c, g, or t
  misc_feature (881)..(881): n is a, c, g, or t
  misc_feature (885)..(886): n is a, c, g, or t
  misc_feature (896)..(897): n is a, c, g, or t
  misc_feature (902)..(903): n is a, c, g, or t
  misc_feature (909)..(910): n is a, c, g, or t
  misc_feature (913)..(913): n is a, c, g, or t
  misc_feature (950)..(950): n is a, c, g, or t
  misc_feature (955)..(956): n is a, c, g, or t
  misc_feature (968)..(969): n is a, c, g, or t
  misc_feature (973)..(973): n is a, c, g, or t
  misc_feature (975)..(976): n is a, c, g, or t
  misc_feature (981)..(981): n is a, c, g, or t
  misc_feature (985)..(986): n is a, c, g, or t
  misc_feature (990)..(990): n is a, c, g, or t
  misc_feature (1049)..(1049): n is a, c, g, or t
  misc_feature (1055)..(1056): n is a, c, g, or t
  misc_feature (1065)..(1065): n is a, c, g, or t
  misc_feature (1076)..(1076): n is a, c, g, or t
  misc_feature (1085)..(1085): n is a, c, g, or t
  misc_feature (1087)..(1087): n is a, c, g, or t
  misc_feature (1105)..(1105): n is a, c, g, or t
  misc_feature (1111)..(1111): n is a, c, g, or t
  misc_feature (1124)..(1124): n is a, c, g, or t
  misc_feature (1128)..(1128): n is a, c, g, or t
  misc_feature (1272)..(1272): n is a, c, g, or t
  misc_feature (1303)..(1303): n is a, c, g, or t
  misc_feature (1335)..(1335): n is a, c, g, or t
ggatgccactgacataataaagtaaatttatttctgaattacataaggatcatgaaacagaaacattaactctcatgttataaaaacagtagtaaaatacagtacacaggaatgtcaattgaatgacaacaatgaaagtacaatagcaaatgaaaaatagtaacttttaactttaaatacaaagtgaagcaatttaatatgaaattttgttaataagaaaaatatatgtcccatgtctttattacatactgtacaaaataaaatattgcacctttcatataataaatatatacaaagagtatgttacaaatgatctttcttttaatttaataaccttcaacaatcagatgtgattgatgattaacaactaatgggctggtgtgtcctcctcactgtcccccatccattcccaatcaccaaaccctccacatacagtagtgctcaacccagtgtcagtgaagctgaagttagaacaaaagagaccgtgtgctcagaatatggtagagaaactcagcaagcttgtccacagacacatccaaagccaaaatgcactgttcagttattactgaccaggaactaggctcagcagagcctgtggcaggtaactttgttgccaagaagatgtaggcagcaggtgtacaggcagctgagaccctgaataaagaagtatgaccacttatttggacttgtgtgccatctaaagacacaactggtagtatacaggggaaagaccccacaaccaaatcagcttcagaacttacaatttaatgctagcctgaactcacttcaagcaccaacgcttactccaaaccttacctccatcctgacanntatcanntaacnccngcnntggccccantctnnncccnntccanccctgncctnncctggtcctnnccctnncccttnnagncggctctagccttaaccttaactttctttctcacctnacccnnttctggctctanncctnannctganactnncccntacccttttcctcaaatcttaaactaaattctgattccaacccctggtccttagtgtancttctnncctaagtcnctttggatttnctgaaaaancngcccaaaacaattatttnctatanaaattattttcanctancgtgtttcttatttggattactttcttataaattttccaaaataaagttctcaggaatactactttatgcataaattaggtctaataaggctttggttttctgtttgtgtgcaatagaatagtgcttagaaaaagtttcattcncagctcttaaaagaaagctctgaatatactncgaaatcagtagaaaaggttaactttccctcntctttgacttccgagatgcctcattaggtcatagataaatttctgtagttgtataaatgacagcaatatctactctgtgttttcttccatgggtgttctaaaagcaaggacaagatgccatgcttccatgaacccttagg

SEQ ID NO: 356555 - DNA, 924 bp, Homo Sapiens
  misc_feature (121)..(121): n is a, c, g, or t
  misc_feature (154)..(154): n is a, c, g, or t
  misc_feature (157)..(157): n is a, c, g, or t
  misc_feature (170)..(170): n is a, c, g, or t
  misc_feature (174)..(174): n is a, c, g, or t
  misc_feature (178)..(178): n is a, c, g, or t
  misc_feature (202)..(202): n is a, c, g, or t
ctaaggttgatcttgggcaaagtccctagtttatggcacctcaagaagatatcgggtatgctggaaaaaaatgaatggttgtaagagcattgtctcggagatcccaaagtctgtaatttcnccaggaatttgaatgtttggtcttgaaatatgncanatgtgattctttntgcnaatncaatgtaggctaccttaggtagtnccatagaaattcgaactgtaaagttcccccagaaggttatatgacaaattgagaacttggaggttgtcaagtccgtaaaatgcttcatctgcaatcttattaatcttgttgtaggcaaggttcagaaccttcaaatccttgagtgtctcaaagactcgtgagttcagggagaagacaaacccatgtgaaagatccaggtgtctcactgaacttctggccaggccagcaaatgtgttctggtcaggatctttgatgttatggaagccaaacccggcacccatgatgtggtgggcaagaatcaaagagaaggcctggcttttgctgatggcattgctaaagtttcctgtgatgtccactgtccagccatttccagaaacatctagtatctccagcaccatgtttctgaatgggttcatacattttccccagtccactgagactctgctatacaagctattagctgcgaggctaaaaaaggagagcgttttcccttgtaggggctcgagctcatgttcacatacaaggaatatttggttggaggaaaaatctatggactttaaggaattcaacttcccaaatgaaggatgaaggtaaaggctacgaatctgatttttggatagatccaagcgagttaaagcctttaaatttctgaaataaccatctttcaatacagcatcagagagaccacagaaatacaggctaagtccaaacagaaggaacca

SEQ ID NO: 356556 - DNA, 1665 bp, Homo Sapiens
  misc_feature (129)..(129): n is a, c, g, or t
cgggttgggccaaaacccaggcattcaaaggggcacacccaggggccggtttcggcctccgcccaggttccaaaacggcactgcccgcaacggtcacagggtcctttgcgcccactggatctcccgccnagggtacaggccggggctccagctggcacgcgctgccgtatgtgacgccgtcgctgccgcacacaggatcgtagaggctcgagcacgcctgcaggcattcacacgctgcctgcccgttcttcacagcacacgtcgccccaaatgcacactgcaccccgaggcatggggacggggcctggtcacacgggccctggtgcttgctggggatggcacgctgctgccggcactcagcctgctgccgccagcaatcactgtcatacgtgcgcccgtcctgggcacacacgggcctgtaggccccgtcacaggtgacgcggtcgcaggagcagcggggacggccacggcgggacaggcacacggcattgaaccggcagggctccgggcactggtctcgaccctggcactggccggagcgcactttctgcaggaggagaccccgggcggcccccgatcggcccatgacacagtcgttttcgtaggtgactccgtcgtccccacacactggcgcctgccgggcagggcagctctcgggccgtaggagcatctcagggcgccgcgtgcgcgggttcacacggcagctgcggctcgggtcagggagggcgccctgacaggggtcacaagggccgtcgaacttcttgaagacattctcctggcgggcgcaggcgcggcgcaggagctggcactcgccggggtagtcggcgccgtcgctgccgcagacggtcccctcgggggcgccacggcaggtcgcggggcacaggcacgaggccgtcagcccgtccgccgagcagcgcacaggtgctgccgaagctgcaggtcacgttggagcaggggtcccgcgagccgcacggcccgcggctgagcaggcggatgcggcgctgctggctgcactgcgcccgctgcagctcgcattcgttgctgtaggtggaggcgtccgacccacacacaggcgccaccacgctggggcacgggctcttcttgcagacgcaggacgcccggcccggcccctccgcgttgggctcgcacacggcgccgaagccgcacagcattccccggcacgcatcaggaggcgtcggaggcactggagtgaagtgggtcccgggtttatcttccacacagaactccacctcctccaggttccgcagggtgatccgcatgaggctggagttgagcatcagctcgttcttgtgggctggccacaggtatgggggtgcagggttcacaaagaagatcctggtgtccccagtggacacctggttgtcacagatgagggggtctccaaagccgctgatcaccaccttgttgccgccgtccagcaggctctcccgggccaccaggtctttgcccttcaagtaccgccagacccgaaccttgcaggagtacgtgtgctgcaccgggtccacgttgaggatctcctccaccgtcccggtgagcaccacgttcgcctcctcctcgcgccgctccagcgcgcgctccgggcatgtcccgccggctccgggcaggacgcacgcggccaccacaaggagaggcagcagcggccgc

SEQ ID NO: 356557 - DNA, 2146 bp, Homo Sapiens
acaaaatatgcaggtataaatttcttttttaataatctgtaagatgcatcatacttctggcattttcaaaaagtgaaaactgtataaaaataaatattctatgtacaaacacacacacaggccaatccaaggttagaggcatcacttgttccagcagccttggactggtaagccatcttcgccctgcaagagaaaggaaggagagggctcagacttcctgccatggtccaccaagtgggcaggacaggggtaacaagggccacacgcattttggcagctgatcaggatgtggcccacccacgcttgtctatttcttttctctactacaggtcagaacctcagaaggaggtggaaacaaatccggctattttaccattggttaaaggtcacatgcagctatagtgcaacgtcaataggggctgtcctagcccgtgggaccagcaagcagagatgtccttccgtgccacgaagaaacagtctctgctgtggccctatggagtgccggctgctcacgggtaagccactcagcacaaggcggcctcagtttcctcctccataaaaccttggcaaggacagttgcttgatgtgaccgctaagggccttcccagccttctcattctcttatttgtctctcttcctaagcacagggaggaggacatgtagacagtccttctttgatgattaatcctggggtggggtgaggggcatgaagggacaggcaacctcatgagtattgcaggatggccctgagatgcctttggcaagaagacaagggttcctggcgaactttagaccttgctgggaatttgggggtaaagtccagtaaaaacatgggaatcaactgcaccccggcggtctcctctgttggtagcaaccatgcagctcctttagcctcaagatgttcgtgttctgcccttggtgatagaaactttcctgagtttgcttgggccctcatatcctctccttgctggcataccctatggggaatctagaaatctagagacccagtggggaaggcgaggctgggccaagggcaaaggtctggttctcagcccaagtctgctagactggcagggcagacaaggagatggacatggggcttcaggagacccggagcaagtgctcagtcctgagggagcttgtggaatgagagtcctctgctgccctggtctgacgtcatccacccacgccaggggctgaaacctctcatcacctggcattcagcagaaattggtcccaatatggagggcttaggaagtctggttatcttgtagtaaaagtcatgagcaatagctacccctgcccctcaagcccataataacacagaggaggaggcagagtgagaaacaaggggaagacacttccccagtaaaattaatagaaaattgacacattgatatgggatgttatggaagaaaatgccattttacatggagagtcaaatcagggtgaccttcattttcccctctgggttggggaggggattgcagggggaggaggtgcattccacagtttcagggtgaccctgtgccccttccccagcctgccacggtgcggtatgacacacgtcacatggatgctgggagggagaggagcctctgtgggccagagcggcattcccattggtgtgtggatggtggcagggggatatggagggcagggcaggcagagaatgaaaagtaatgtatggtgaggaacagagaggccaaggcagctgctggcagaactaaaggtgcccagattgtgggaggggattgtggctgagggaagacctggccagtgctcaagggagccctgcgggccagagcggcattcccattggtgcgtggatggtggaagtcctggttgagaaaggtggctgtgcagtctgcaagcgcagggtttggcaggaccagcagggacaggaagcatgctacccgcctgcttgctctgcactctccctttgttgcctatgctcctcctaaaaagtccctactgcccttcaaggggctctatgaccacctttcagggtcacacagcataatttcttgtatctttttctcttttgttcaaagagaattcccgtgtgaccccagggcggggatgtgagaccccaaattctcttattactggtatgataaaatagctcttgaactccaaacctatt

SEQ ID NO: 356558 - DNA, 1559 bp, Homo Sapiens
  misc_feature (7)..(7): n is a, c, g, or t
  misc_feature (12)..(12): n is a, c, g, or t
  misc_feature (1318)..(1318): n is a, c, g, or t
gtaaatnttatnaccattatataaatgggcactgatatacaaaataatgtcagttgctaaaacaagacaattcacagctggcctacatcatataatggcagaaatctttaaacacaaaatctaatgattagaaccagaagttgaaggcccactgaaggagtccttaatattatgaggcctaggtttcaaaaagctaccaattctagaatggattttactctggaactgtttcttgactatttcttgttgcatctctttcagtgtgaagtggaatctctgaaactcaggtgtggcatcaacaaagtcaagaaggtagtccaaactctctcttacagcagataatttaaattcagcagtctgcttctcagcttctcctcctttttgaacaacttcctttgttattccacctttggtttttaggagacaacccttttcttcatctccatttaaccacaccctatcatcatccaacttagtttccaactccccacatttttcaagaatttctctataatccccatgttctaagccttgaaaatcatattcaggttcctttttgtaaagaagattttcccatgcatttgctatggttatttgttttacttcttcccaactttttgcccagttaaaaattgcactttttatattgtagattttaattttggaaactcctttatctcctttctcttgctcatcatcactttcttcaaatattacaagactctcttcaagttgcttccatctatacagccgtttgcagctcaagatcacaccttgattcattggttgaatcaaggttgaagtgttatgggggaagaacatacattttattcgaccatcctcactggttagggattcagaggaaggatgagccgggcaactgtccagaagtaacaatgccctgacgtcctcgtcatgaaatcttagaacattaagttgaaaatgtcggacctcaggaacaaagttttgaaaaaaccattctgaaaacaattctctggtgaaccaaacatctttactgggtttatatatcacaggcaatgtacttgtgtcctctttcacacttttgggcagttttgattttccaataatgattgactttaatttatgagttccgtctgcatttgcacataaaaaggcagacaacctttctttgtttattttcttccctggtaggcagatatctttcctacttgcctgagaattttctggcattgacttccaaaagaggtctgtttcatccccactgtatagctgagctagacacagtttctcctctttgattatcatggacagtttttgtcgaaatggctcaacattntcagaaactgaacttaggacttgtttcccacatacttttctgtttccaattgcatgccgatttcgaaatctaaaaagccaccagtgctagctttgaaatctagttcgccaaacaacgtgcaatctttctgcagcagccctgagctcacgccttttaccggaccacggctgagcgtttttggttgttccacatgtagaccggatcatttacataaccatatttggctccggttgtcctcttt

SEQ ID NO: 356559 - DNA, 1890 bp, Homo Sapiens
aagaccttcagacagtccttttactacctcacaaagtgccatgcccgggacctcagacctcagggttgtgacgttgttgatgttgtcaggccccagtacgtctctagtgaccgaagcagacctgcctgaaagggcactccggacagtgagccctggctctaacctgtgccctcatatttctgctgcctcatatggtcttgtttgcccactctgtaggtgactgatgatcaccctaaaagggaggtaggtatctagcagtagcacagttactttgagcctgaccacttgttctgaagtgcagatgttgaaacatgcattgaggaagaacactttaaggaagcactttatgatttactcatggctggtgttggcctcaaagtaaaagaacatcttaatgcagaacagtacaataaagagcccccataggatggatgccatcatctgtcccccatggtggggattgccaaggaaaagtgccttgttctgggcatcttcagaaatcccccaggccctctcttgatcctttccatgaagtccagagcattccttctattacaggctgaagatgcattgtaaaaggtaatgctataatagtattccctcttctcaataaatgtgcaaaactggagaatctggtgctgatctgcagcatacttgacaacacagggaataccgtggatgttccacgccagccttacatccgtccccattgcctgcccatgtccagtggccctgcgcaacaaaagtaagggcttgtcttaccacactctccccagcatctagctcaaggtagatgactgactgggaaattccggttggataaaatggcttttccacattgcaactttgcatctctattaggaaaatttagattgaacctttcctctacttgatgcttagtttgagaacagttttcacaactttagagggtctctctcagagtatgttatactgtaaccttgaagtttgagatgaaacaaggtgtcagaggttttgaatctttcaaaggaattgccttttacagattttttgtttattccctaagaagggaaaaagagagggaagaactacactaatgttagagataaggtatgttttggctcaaaatgtgtcatgaacctaaaggtaacttgatgggcagaaatgtctcagccatgtgaaccaagaagtgggaccacagtgcaaggctgtgggtggcagcactagatacggtggtggcaggagtgtgacatgtaggcactccatgggggacagctggacggtgtctatcaaaagtgcaaatgcgtaagctctttgaactagcaatgctactcctaagaattgtacctgtgtacaaggtacttgtgtacaagagtttttgttgaaacattgtaatagcaaaaagttggagagtgcccaccaatacaggggaatggttaaatacattatggccagcttaaacaatggaatagtttgtagaaatttaaaacaatggatcctgtgtgtgtgtactaccatagaatgggccccaagatgcatgattaagtgaggaaaaaagcccatggtatcctaatgtttggaatggagaaagtgtgtagatgtatgtgtgtgcatatgttttcacacagacgtatacacgtgtatatcatatgtccacctgcatatgcctaggatgtctctgggaggatatctagcagcccggcagcctgaattgcctctgggaagaggggtgggaatgacttttcaatgtacaccttttgtaccttttgaattttgtaccatgtacatgtattatctattaaaaaatagttcttaatttttaatttggtatacttttcttaatagaaccaaaatggaagaaaattctgattctctaaatctgctttcttaaagataaagcctttgattcaa

SEQ ID NO: 356560 - DNA, 1163 bp, Homo Sapiens
  misc_feature (668)..(668): n is a, c, g, or t
  misc_feature (722)..(722): n is a, c, g, or t
agccgccgccgccgccgccgcttgggcgcgctcccagccggcctcgcgcgtgcgccggacgtcggggagcgcgcgctcgggcgcgaggaggtgccaccgcctccggaaagccgggccccgcccctcccgccgcggctgggcgcccaggtggagccccctcccagcttctgagcgcccagactgactgcgctctgcgcccggccggctcgcttcaggggtcccggacctgcgcccgcgagagagggctggtcggacccagtccccgccgggtctcctgggccgaagtcgcagctgtctgtcagcatttacgggtgggcaagatactcctcggggcataaaaccagtccgccctgacctttctgagagttttacattcaagaacccagtcgtgggcacaaaagagaaatggaacgagaagaaaagcctctggaaaaatctccccctcccccttcacagactccactggatctgatatgtatttggcaggttctacggcgctgactgtgtccttcattaattttttcccaaaggcccgaccgggcagtgtgattcacacccgaggaaatgcatggacactggctcttttcatagcaccgaggctcccgtggaactccctgggtcggctttgccagacactccctggacacagttgttcagctcctccccancacctgggcttcccagacctcaaaagggtggggttggggagaacatgccaaccnttcagcctggactctgcgtagagcttggtgaactgtgatgagtgtccggatgtgtaaataacaacattttgacacaagtccagatttaatttttcagttgaaagaaaatgagcaatgcactacagcagagacttctggctagaaaaacatagcaaggcagccaaagaacttccgatccccttaaaagagctctgtgaaccctcacacctgtgacaggcggcttttggaaaaactattgtgttcttcctaaaattgaagaatgtaatttacattttacaaaatgcttactgcaatcttttcaaaccatgaacgtagaaagtgcaagtcaaactttacgtgtgaggagtgttatgagggcgccccctctgtgcagcctttcctggcttctcttgggcaccttgcacaaaccaggccattaataagtgtttgcagaaagaagcg

SEQ ID NO: 356561 - DNA, 1137 bp, Homo Sapiens
  misc_feature (474)..(474): n is a, c, g, or t
  misc_feature (476)..(476): n is a, c, g, or t
  misc_feature (482)..(483): n is a, c, g, or t
  misc_feature (489)..(489): n is a, c, g, or t
  misc_feature (503)..(503): n is a, c, g, or t
  misc_feature (535)..(535): n is a, c, g, or t
  misc_feature (613)..(613): n is a, c, g, or t
  misc_feature (684)..(684): n is a, c, g, or t
  misc_feature (692)..(692): n is a, c, g, or t
  misc_feature (698)..(698): n is a, c, g, or t
  misc_feature (711)..(711): n is a, c, g, or t
  misc_feature (713)..(713): n is a, c, g, or t
  misc_feature (716)..(716): n is a, c, g, or t
  misc_feature (719)..(720): n is a, c, g, or t
  misc_feature (723)..(723): n is a, c, g, or t
  misc_feature (726)..(727): n is a, c, g, or t
  misc_feature (733)..(733): n is a, c, g, or t
  misc_feature (735)..(735): n is a, c, g, or t
  misc_feature (741)..(741): n is a, c, g, or t
  misc_feature (744)..(744): n is a, c, g, or t
  misc_feature (752)..(752): n is a, c, g, or t
  misc_feature (754)..(754): n is a, c, g, or t
  misc_feature (771)..(772): n is a, c, g, or t
  misc_feature (778)..(778): n is a, c, g, or t
  misc_feature (782)..(783): n is a, c, g, or t
  misc_feature (785)..(786): n is a, c, g, or t
  misc_feature (792)..(792): n is a, c, g, or t
  misc_feature (797)..(798): n is a, c, g, or t
  misc_feature (801)..(801): n is a, c, g, or t
  misc_feature (803)..(803): n is a, c, g, or t
  misc_feature (809)..(809): n is a, c, g, or t
  misc_feature (812)..(812): n is a, c, g, or t
  misc_feature (814)..(838): n is a, c, g, or t
  misc_feature (846)..(846): n is a, c, g, or t
  misc_feature (849)..(849): n is a, c, g, or t
  misc_feature (853)..(853): n is a, c, g, or t
  misc_feature (875)..(875): n is a, c, g, or t
  misc_feature (895)..(895): n is a, c, g, or t
  misc_feature (898)..(898): n is a, c, g, or t
  misc_feature (902)..(902): n is a, c, g, or t
  misc_feature (931)..(931): n is a, c, g, or t
  misc_feature (940)..(940): n is a, c, g, or t
  misc_feature (1130)..(1130): n is a, c, g, or t
ccgtgcccaggacaggccatgagccagagatacaaggggccccaggcaagatgcagggctctctgctcctggctctttatcgtcgtcgggacaccctttgtccaaactcaaggaatcccgggaggtctggctttgccgctttggctgggactcaggtacctgggcatacctgcatctgtgccccctcttcgtcccagtgagacggaccctcagtatcccccccaacatagaacaggaaggtctcaagccagccccctcctccagttcagtcaccctcccccacatccacccagagaggtccagacctgtggccacttccatgccctctccagaccaggagacacctgctgctgacctcgtggaaaacttagattttgacattctgatgcttcggaagtggtggctcctcctccctcacccctccgccacctgtgggcctcctctctgcatctcaagagaacaaccagatctttncncccctnnggtttnttccattcaatttngacgaagttctttgaaaatatgccattcagtntctgactaggaaaataagtctgacctgataggtctgatgtcatcagctcttcaacatgagacaaaagaggggattttnttttttgagtcattagaatgatataataattttctgaattgacatctggatgttgaaattaggatggtgcnaaaggggnccaggncctcaggctgggntntgnttnnttnttnntatttntntgatgnttntttttttncncctccaccaagaggggnncattcnattnncnnaatttngtttnnttntntttttnttntnnnnnnnnnnnnnnnnnnnnnnnnntaagttcnttnattnctggccatgaacaagcacaatngaaaaagacacagggtcctngtngctncaagtcaatgtgaattggcacatggtctngcagttttnaaatctgacagtagagtatggcaatgggcaagggccaagaagtcctgagatgggaggtcagcgctctaactgggctcagtggaggtctgtgaccagtgtctggacactagctacaggggaccgggcagaggattctgggcagaaggaaaatgtctaaaagtactttgggagggttaaggacagggccttnttttaaa

SEQ ID NO: 356562 - DNA, 884 bp, Homo Sapiens
ggcccgaggggaaaacttagattttgacattctgatgcttcggaagtggtggctcctcctccttcacccctccgccacctgtgggcctcctctctgcatctcaagagaacaaccagatctttgggctcctggggtgtgtgccatgcaatttagacgaagtgctttgaaaatatgccattcagtctctgactaggaaaataagtctgacctgataggtccgatgtcatcagctcttcaacatgagacaaaagaggggattttatgttttgagtcattagaatgatataataattttctgaattgacatctggatgttgaaattaggatggtgcaaaaggggtccagggcctcaggctgggcgcagcagccagctcccaatgacgcagaagctgcttcaaaaccccctcaacaaagaggggcacatgcaagtcaccaaagtgggaagccttcaccaaggccacacccaaagtctactgactgtctgtccaaagttcgttgattcctggccatgaacaagcacaatagaaaaagacacagggtccctagtggcctacaagtcaatgtgaattggcacatggtcctagcagttttaaaatcctgacagtagagtatggcaatgggcaagggccaagaagtcctgagatgggaggtcagcgctctaactgggctcagtggaggtctgtgaccagtgtctggacactagctacaggggaccgggcagaggattctgggcagaaggaaaatgtctaaaagtactttgggagggtaaaggacaggggccttatttaaaataaagactgaaggataataagtgtcacccaggttcgtggattattggagggggcaccatctagccattctccacttttccagtgtggagagag

SEQ ID NO: 356563 - DNA, 1234 bp, Homo Sapiens
  misc_feature (686)..(686): n is a, c, g, or t
  misc_feature (836)..(836): n is a, c, g, or t
  misc_feature (985)..(1042): n is a, c, g, or t
tgtctgcagaggccagggtgcgcctgccacgaatccccaggcaccggtggccgccgcggcccgagtagctcggcgggtaaacatggccgcactgacgacggttgtggtagcggctgcggccaccgcggtagccggggctgtggcaggggcgggcgcggccaccgggaccggcgtgggagcgacgccagcgcctcaacagagtgatggctgttttagtacttcaggtggaattcgtccttttcatcttcagaactggaagcagaaagttaatcagactaagaaagcagaatttgtacgcacagcagaaaaatttaaaaatcaagtaattaacatggaaaaagataaacacagtcatttctacaaccaaaaaagtgacttcagaattgagcatagtatgctagaagaattggaaaataaattgattcacagcaggaaaacagaaagagcaaaaatccagcaacaattggccaaaatacataataatgtaaagaaacttcagcatcaattaaaagatgtgaagcctacacctgattttgttgagaagctcagagaaatgatggaagaaattgaaaatgcaattaacacttttaaagaagagcagaggttgatatatgaagagctaattaaagaagagaagacaactaataatgagttgagtgccatatcaagaaaaattgacacatggngctttgggtaattcagaaacagagaaagctttcagagcaatctcaagcaaagttcctgtagacaaagtaacaccaagtactcttccagaagaggtactagattttgaaaaattccttcagcaaacaggagggcgacaaggtgccctgggnatgattatgatcaccagaactttgtaaaggtgagaaacaaacataaagggaagccaacatttatggaagaagttctagaacaccttcctggaaaaacacaagatgaagttcaacagcatgaaaaatggtatcaaaagtttctggctctnnnnnnnnnnnnnnnnnnnnnnnnnnnnnnnnnnnnnnnnnnnnnnnnnnnnnnnnnngaggaaattttcaagttaaaggaaaaggcagacaacacacctgtgctttttcataataaacaagaggataatcaaaagcaaaaagaggaacaaagaaagaaacagaaattggcagttgaagcttggaagaaacagaaaagtatagaaatgtcaatgaaatggcttcccagttaaagaagaagaagagaaaga

SEQ ID NO: 356564 - DNA, 1829 bp, Homo Sapiens
  misc_feature (292)..(349): n is a, c, g, or t
  misc_feature (537)..(537): n is a, c, g, or t
  misc_feature (539)..(539): n is a, c, g, or t
  misc_feature (645)..(685): n is a, c, g, or t
gggtaatttcagaaacagagaaagctttcagagcaatctcaagcaaagttcctgtagacaaagtaacaccaagtactcttccagaagaggtactagattttgaaaaattccttcagcaaacaggagggcgacaaggtgcctgggatgattatgatcaccagaactttgtaaaggtgagaaacaaacataaagggaagccaacatttatggaagaagttctagaacaccttcctggaaaaacacaagatgaagttcaacagcatgaaaaatggtatcaaaagtttctggctcnnnnnnnnnnnnnnnnnnnnnnnnnnnnnnnnnnnnnnnnnnnnnnnnnnnnnnnnnnggaggaaattttcaagttaaaggaaaaggcagacaacacacctgtgctttttcataataaacaagaggataatcaaaagcaaaaagaggaacaaagaaagaaacagaaattggcagttgaagcttggaagaaacagaaaagtatagaaatgtcaatgaaatgtgcttcccagtcacctgtgctttttnanaataaacaagaggataatcaaaagcgccagcgccagtttaagttaaaattactactagaaagttatacccagcagaagaaagaacaggaagaatttttgaggcttnnnnnnnnnnnnnnnnnnnnnnnnnnnnnnnnnnnnnnnnngccagctgctgctgatgaaatttccagatttcaagaaagagaattacagaaacttgaaaagaaaataagatagacaggcaaaggaagatgaaaagtcacaaaaacaaagaagactggcaaaattaaaagaaaaagttgaaaacaatgttagtagagatccctctaggctttacaaacccaccaaaggttgggaagaacgaaccaaaaagataggaccaacaggctctgggccacttctacatatcccacatagggctattccaacctggagacaaggaatacagagaagagtatgagataatcaaattgctactcagttgataagaatgttaacatactaagttataccagggagagagtgactaaccacattctttaaatatcaatagcttagtcagattgattattgtgctatattgtgaattgagaggtatttaagtttccatgaggctttctccattagtattcccccctctaccaagaaggtatttaatatatgtgttggcctattattgatgtaaaagttatttaaataagttaatgttagaaacattattcaatttaaatactgaaaacatttcaaagagattttgtttttgttatagcatagcaaagtaaattggaacaatcatacaatgacattttttaaaccaaaattttgtaacttttataacttggagttaagttagcttgagtaacaaaaaggtaaagtggtttttgtttagagttacgaaatgttagtactttttctatgtttaacaaattggcagtttgtcagttatgacatttttgtgtaataaatattttgtatttgtttgaagcatgctttgttttatatagagaatatttattttaaaaatatgtctctcatataccctattaattgtattattgatataatctttttggtttccttcagcaattccaaattttccttcagcctttctggatttcacagatttataaaatctttgtgtctttcacatcttcctggctaatgcagttttcttttctgcttctgtttgcctcaaaataggaaaattctttgttctgaaacatcatctgaaataagccagctttaaaatactgtgatttctcttgatggcacttaaaatgttttaggtggggcatggtggctcatgct

SEQ ID NO: 356565 - DNA, 426 bp, Homo Sapiens
  misc_feature (16)..(16): n is a, c, g, or t
  misc_feature (58)..(96): n is a, c, g, or t
  misc_feature (179)..(225): n is a, c, g, or t
  misc_feature (301)..(363): n is a, c, g, or t
tgaagcttggaagaanaaaaaaagtatagaaatgtcaatgaaatgtgcttcccagttnnnnnnnnnnnnnnnnnnnnnnnnnnnnnnnnnnnnnnnacgccagcgccagtttaagttaaaattactactagaaagttatacccagcagaagaaagaacaggaagaatttttgaggcttnnnnnnnnnnnnnnnnnnnnnnnnnnnnnnnnnnnnnnnnnnnnnnntgctgctgatgaaatttccagatttcaagaaagagatttacataaacttgaactgaaaattctagatagacaggcnnnnnnnnnnnnnnnnnnnnnnnnnnnnnnnnnnnnnnnnnnnnnnnnnnnnnnnnnnnnnnncaatgttagtagagatccctctaggcttttacaaacccaccaaaggttgggaagaacgaacca

SEQ ID NO: 356566 - DNA, 1646 bp, Homo Sapiens
  misc_feature (249)..(249): n is a, c, g, or t
  misc_feature (318)..(344): n is a, c, g, or t
  misc_feature (607)..(607): n is a, c, g, or t
ccgaggagcctgaccgggccggcggcttggtaactgggaattaggtcctaaaggatgagaaaatgggcttcaagttcctggggcaggaggcattggaggtcactctgcttcacgtgagctgggcatgcccttgccccaacgtgaccgtgagcgagatgccgctcatcatcatgggggaggtggacggcgggcatggccatgctgggccccgatagctttgtgggcgcatcgagtgcccgcgggtcaggnaagcttcgtgaggtcatgcacaagaagacctgtgacgtcctcaaggagtttcttggcttgcactgaagnnnnnnnnnnnnnnnnnnnnnnnnnnnggccttcttccacctatccaccccaatgcctctcagcaaactgggcgaggtcagattagacaggcttgggacagcagggaaacatcaaccgacgtgtcacagaaaaagccacagaaggtctcagatcagcatctattctttgggttcaataaggggttcatatcttttttagctgagggggacaagaggagaagtcagtggacacatggaagttactcgtgaccaccagcttgctcagatattctcctcctgcccctcactgngccccacacccctggctctcccagtcaccctcccctagccagtctcccagcaagggtttaagagatggccgctgtgtgctggtcacaggaagtgttgaatggattggcttgcaaagggggtaggtggggagagataggagggcccagggactcatgggacacctttcccacagcctcctcgattgctgtgagcagaggccactcggagttaggggcatgggcaatagcaagctggcggcagagtccagcccagcatatgacttgccctgaatggaagctgctgaaacgggtgcctttgggtggtggtcggcttgcctctgaggccaccacggcaccagcagaatacgtatttcttctccttggctgcattggtttgtcgatctagttcagttcaactcagtggatgttctctgaatgcttactgggtgccaggaccacagagagatgttagtcactgcccagttcttagagccccaacacagataccctcatcccagggcccccagacacacccctccgctggactcacaactgtctggagtttctgtctgatggatggtgtgctttcatatgccactggcttccttggacatagatcagacaaaagccccgggatctgtttggtagcaggagaaatgaaggaagatgaaaaagcaggcagggaagggggtagtaaaggactgagagaggagggaggtggctggagaaggaaaaggaacattgctcgatgctcccatctggtggcggcctcaggaacccacgggaacctggaaggaggctctttgtgagacctgggcaaaggatggggcagctcgtcgatgatttttttgtgtttccaggcttcctgtgtgatcctggccctccggccgctagagagaggattgggaaaccccactgtcagctctgcatctgcccccactaccctcctctgccctattctgtccctgcccctccaagctgaagaaggtccttgtggggcgtcctcatttcttcctcaaatataagggagaagataccaattaaaagctcatagtatcaa

SEQ ID NO: 356567 - DNA, 3743 bp, Homo Sapiens
  misc_feature (612)..(638): n is a, c, g, or t
  misc_feature (1930)..(1990): n is a, c, g, or t
  misc_feature (3683)..(3683): n is a, c, g, or t
accggtccggaattcccgggattgcagaaccagcctttccagcatagcaggggctgctcaggtaagggggacgctcctccttagcccgccgcactcattacattaagtggcactgctcagtggtgcgggggtgggcgtgcttccgtgggctgggcgctgggttcgcggcgcgccctcctgctgcctccccggagctcccgggccagtagcgtttagtcacatcaagaaatagaacagaattcagccatggccccaagaaagagaggtggacgaggtatttcattcatcttttgctgtttccgaaataatgatcacccagaaatcacgtatcggctgcgaaatgatagcaactttgcgcttcagaccatggaaccagcattgcccatgccccctgtggaggagctggatgtcatgttcagtgaactggtggatgaactggacctcacagacaaacacagagaagccatgtttgcacttccagctgagaaaaaatggcaaatatactgtagcaagaaaaaggaccaggaagaaaacaagggagctacaagttggcctgaattctacattgatcagctcaattccatggctgctagaaaatctctgctggctttnnnnnnnnnnnnnnnnnnnnnnnnnnntaaaactatagagagtttaaagacagcactgaggacaaaaccaatgaggtttgtaaccagattcatcgacttggatggcctatcatgtatcctcaactttctaaagaccatggactacgagacctcagagtctcgaatacatacttctctcattggctgtataaaagcgttaatgaacaactctcaaggccgggctcacgtcctggctcattctgagagtattaatgtaattgctcagagtctgagcacagagaacattaaaacgaaggtggccgtgctggaaatcttgggcgccgtgtgcctggttcccgggggccacaagaaggttctgcaggccatgctgcactaccagaagtatgccagcgaaaggacccgctttcagacattaattaacgacttggataaaagcactgggcggtatcgagatgaagtgagtctcaagactgccatcatgtccttcattaatgcagtgctcagccaaggtgcaggagtggagagtttggactttagacttcatcttcgctatgaatttctgatgttaggaattcaacctgtaatagataaattaagggaacacgaaaattcaacattagataggcatttagacttttttgaaatgctccgaaatgaagatgaactagaatttgccaaaagatttgaactggttcacatagacacaaaaagtgcaactcagatgtttgagctgaccaggaagaggctgacacatagtgaagcttacccgcatttcatgtccatcctgcaccactgcctccaaatgccttacaagaggagtggcaacactgttcagtactggctactactagatagaattatacagcagatagttatccagaatgacaaaggacaggaccctgactccacacctttggaaaactttaatattaagaatgtcgtacgaatgttggttaatgaaaatgaagttaagcagtggaaagaacaagcggaaaaaatgagaaaagagcacaatgagctacagcagaaactggaaaagaaagaacgagaatgtgatgctaagactcaagagaaggaagagatgatgcagaccttaaataaaatgaaagagaaacttgaaaaggagactactgagcataagcaagtcaagcagcaggtggcggacctcacagcacagctccatgagctcagcaggagggccgtctgtgcttcaatcccaggtggaccctcgcctggagcaccaggagggccctttccttcctctgtgcctggatctctccttcctcccccaccacccccacctctaccaggtgggatgnnnnnnnnnnnnnnnnnnnnnnnnnnnnnnnnnnnnnnnnnnnnnnnnnnnnnnnnnnnnnccttaggggcaatcatgccacctcctggtgctccaatgggcctagcactgaagaagaaaagcattcctcagcccacaaatgccctgaaatccttcaactggtctaaactgcccgagaacaaactggaaggaacagtatggaccgaaattgatgatacaaaagtcttcaaaattctagatcttgaagacctggaaagaaccttctctgcctatcaaagacagcaggatttctttgtgaacagtaactccaagcagaaagaagcagatgccattgatgacactctgagttccaaacttaaagttaaagagctttcggtgattgatggtcggagagctcagaattgcaacatccttctatcgaggttgaaattatccaatgacgaaatcaaacgggcaattctaacaatggacgaacaggaagatctgcccaaggacatgttggaacagctcttgaaatttgttcctgaaaaaagtgacattgacctattggaggaacataaacacgaactggatcggatggccaaggctgataggttcctttttgagatgagccgaattaatcactatcagcaaaggttgcaatcgctgtacttcaaaaagaagtttgcagagcgtgtggcagaagtgaaacctaaagtggaagcaattcgttctggctcagaagaggtgtttaggagtggtgccctcaagcagttgctggaggtggttttggcatttggaaattatatgaataaaggtcaaagagggaatgcatatggattcaagatatctagcctaaacaaaattgctgacacaaaatccagcatcgacaaaaacattacccttttgcactatctcatcactattgtggaaaataagtaccccagtgttctcaatctaaatgaagaattgcgagatattcctcaagctgcgaaagtaaacatgactgagctggacaaagaaataagtaccttgagaagtggcttgaaagcagtagagacagagctggaatatcagaagtctcagcccccacagcccggagataagtttgtgtctgttgtcacgccagttcatcacagtagccagcttcagcttctctgatgttgaagaccttctagcagaagctaaagacctgtttactaaagcagtgaagcactttggggaagaggctggcaaaatacaaccagatgagttctttggcatttttgatcaatttcttcaagctgtgtcagaagccaaacaagaaaacgaaaatatgagaaagaaaaaggaggaagaagaacgtcgagctcgcatggaagctcagctcaaagaacaacgtgaaagggaacgtaaaatgagaaaagctaaagagaatagtgaagaaagcggagagtttgatgaccttgtttcagctttacgctcaggagaagtgtttgacaaagacctttctaaattgaaacggaatcgcaaacgtattaccaaccagatgactgacagcagcagagagagaccaatcacaaaacttaatttctaattttccatgaatacttttttttagaaagctcattagcagccctctaaagtgactagaacgtttcattacactgccttgcaatccaaacagtggcaattttttccttcatctgtgagtgaatgtgtgaacgtgtgtatgtaaatgtatgtgtgtatatattaaaaaatgtatatagatgtctgagtgttgtctggagacnctatacgtaaggttaaaaagatttatgttaatgtatgggctccaaaaccctttcgtgtat

SEQ ID NO: 356568 - DNA, 719 bp, Homo Sapiens
gcaacctcaatgacacctttctgatggtctttacacagtctgtgatgtctggtggcccccctgccctggactcaataattgatagattttcctagagtaacagtatgagagctccagccattccattaaaagtattagttctgctttgagctgaaaccagttgagcctaatggaagactggatgtctttcttcttcatccaagcaccctaatgactgtttagttacatccatagatgcagacaacataacacctgtgacttacttgaattgggataagccattccagaagtagcttatcctagacttggaaataagatttttttcaccactaacttccatgcttcagagatgacattcaaagccagattcccaagtgcctgatcatacctcccagtctcaggaagatatttgcttaccccttagaccaagaatcttaagatcttccccagctatgaagcctatcttggaatgggaaaccatgaaatttgtcttttaaaagaaagggaagaaatagccttacagcccctgttccctccaagtgcacatttagccttaaaatcctgggagtcgggagacaccgtggagtccttacatccacagtgtctgctggtcgtggtcagaaggcagtaatgcaagagtccttttgtgaagagtgtttctatgtagagatgtttatatttaagtagttcttttataaataaaagcatttctaatggcc

SEQ ID NO: 356569 - DNA, 1603 bp, Homo Sapiens
  misc_feature (2)..(2): n is a, c, g, or t
  misc_feature (4)..(4): n is a, c, g, or t
  misc_feature (12)..(12): n is a, c, g, or t
  misc_feature (19)..(19): n is a, c, g, or t
  misc_feature (22)..(22): n is a, c, g, or t
  misc_feature (24)..(24): n is a, c, g, or t
  misc_feature (45)..(45): n is a, c, g, or t
  misc_feature (47)..(47): n is a, c, g, or t
  misc_feature (72)..(73): n is a, c, g, or t
  misc_feature (96)..(96): n is a, c, g, or t
  misc_feature (100)..(100): n is a, c, g, or t
  misc_feature (194)..(194): n is a, c, g, or t
  misc_feature (198)..(198): n is a, c, g, or t
  misc_feature (201)..(201): n is a, c, g, or t
  misc_feature (249)..(249): n is a, c, g, or t
  misc_feature (274)..(274): n is a, c, g, or t
  misc_feature (296)..(296): n is a, c, g, or t
  misc_feature (310)..(310): n is a, c, g, or t
  misc_feature (312)..(312): n is a, c, g, or t
  misc_feature (314)..(314): n is a, c, g, or t
  misc_feature (317)..(317): n is a, c, g, or t
  misc_feature (350)..(350): n is a, c, g, or t
  misc_feature (354)..(354): n is a, c, g, or t
  misc_feature (389)..(390): n is a, c, g, or t
  misc_feature (474)..(488): n is a, c, g, or t
  misc_feature (1583)..(1583): n is a, c, g, or t
  misc_feature (1592)..(1592): n is a, c, g, or t
gncnagagttancactaanccnancaaagaattacagtacacaancncagaaaccataaatgtgtacctganncacactgtaatagtacagtaganttancattaattacatacaggttttacctcaccaccatggaccgcaaaccacttggcatttctatactttcccggaaaaaaaattctgttgtaccctnttangcnggggcatattttgctggtttgaaggattatgatgcatacagttttctngcaattttctttgtttctttttacngcattgtctttgctgtactctngctgatggctgctngntnttnatttatttgtttcacctacttggtaatattcgngatnctgatttacagtttttcatttgttttgcttttgtnnttttcctcatgtaacattggtgaaggatccaggaatatgacacaaaggtggaataaacattaattttgtgcattctttggtaannnnnnnnnnnnnnngtaactacaaagctttgctacaaatttatgcatttcattcaaatcagtgatctatgtttgtgtgatttcctaaacataattgtggattataaaaaatgtaacatcataattacattcctaactagaattagtatgtctgtttttgtatctttatgctgtattttaacactttgtattacttaggttattttgctttggttaaaaatggctcaagtagaaaagcagtcccattcatattaagacagtgtacaaaactgtaaataaaatgtgtacagtgaattgtcttttagacaactagatttgtccttttatttctccatctttatagaaggaatttgtacttcttattgcaaggcagtctctatattatgtcttcttttgtggtgtcttccatgtgaacagcataagtttggagcactagtttgattattatgtttattacaatttttaataaattgaataggtagtatcatatatatggaattaaattgatgtggctatctttgtttttttataaagtaaggcacagtcattcagtcttaggtaaataatgtactctcttaatatgttaatactcatgagaattgggatctgatgcatcaccatttgattggtagcaacagtggttgtaaaacttggttgctgaattgagttgtttctatgttaagtgtcaaaatgatagtgtagggaaagtacaggtggtggggacatatgcattaagaatcttgttagtgttgcaatctaaatagaatggaataaacaggtgttaagacatatttatagtggtaaattgttgtagtatggtattctgtaaacttgaaaacttgatctactctttgtaggtatcatttgaaagcaaacttgaaaatgttttgtacatagtacatacttgtatagtcctgtgagatgaagtatggctatcagaccaaaggataagccaaactgtaggtagcagaatggaaattattattttgagaggaaaatttgtctttgaatggtgattatgacttaatcattttaaaactgataaacttgacaaaaaccctgtatgaaataaacatgaaattaatagcacctgatttcattgtaaaattntaaagcagnttaaagggtac

SEQ ID NO: 356570 - DNA, 1622 bp, Homo Sapiens
catattttctgtttccgggggaaccattcaacacacgcactgtttcccctttgaaagagggccaaggcttgggcctgttaccccagattttcccccaccaaaaggtccaaaaaggtctgaaaattgttagcccacactggccaggggggcccattatccagggattttttaagaaaaaaatgggatatggcacatggccacctaaagagtgccctccaagaactgacttcccaaaaacacgtaatgtgaaaagcccccaggtcatccccccagtggaaaatatccaaggaaaggtctcaagaatcccctgtgcaaggaaacctttcatatgtgaggagtgtgggaaatccttcagctacttttcttactatgctagacaccagagaatccacactggggagaaaccttttgagtgtagtgagtgtggaaaagccttctaatggtaattcttcgttaattcggcaccagaggattcacactggagagagaccctatcactgtgaggagtgtgggcgagcctttaatgataatgcaaatctgatcaggcatcagagaatccacagtggggacagaccctattactgtacagagtgtgggaatagtttcaccagtagttccgagtttgttatacatcagagaatccacactggggagaaaccgtatgagtgtaatgagtgtggcaaagcttttgttggtaattcacccttacttcggcatcagaaaatccacactggagagaaaccctatgagtgtaatgagtgtggcaaaagctttggaaggacttcccatctaagccaacatcagcgtattcacacaggggaaaagccttattcttgtaaagtatgtggacaagccttcaattttcatacaaaactaactcggcaccagagaattcacagtgaggagaaaccctttgactgtgtagattgtggaaaagccttcagtgctcaggaacaattaaaaaggcatctgagaattcatactcaggagtcttcctatgtaggtgaggagtgtggaaaagccttcactagcaaaagaaatcttcagcagcagcaaagaatccatactggagagaaaccctatgagtgtagcaagtatgagaaggcctttgggacttcttcccagctaggtcaccttgagcatgtctactctggagagaagcctgtgctggacatttgtcgttttggcctcccagaattttttacccccttttactggtaatagtacactccagtgaaatgtactgagtggattccgtcttctactcaggaatggaatgtgtgacacaggcctgactcagcctctgatccatccctcaagccacagttaatgattcagatgtcagtagatgaccaaagatggttcaattagagtcccaggattgcaagagctaataggaacaaatactctccccccgcccacccccattggttttaatgctgagaagaagaactagactcttacagaggtgagaatgaagtccacacagcaaaaatgcatctgagaattggagagcagtaaaagactgaagataatgtttgaacagccacatacaccatgcctgaagctaaaaatatatacgggtttttgaattgcagcagccaataaattccatttttgtt

SEQ ID NO: 356571 - DNA, 929 bp, Homo Sapiens
actgtaatcttggccagtattgagacatatcaggttcacttccgggaacttgaactggaactgacacaccaggggaaatgagtcctgttgaagtggtgcccgaggtgcccattggctgactgttcatgtgtgtctgcatatgtgggggggtgtaggtatcataactccgcccattcaccgaagggctggtgggcagcatgcaggagtatgaggaggtctggctggggactgggggttgcataggcaggttatttgccatggtgaagctgggcataggcggcagagcgctgtaggtgtttgtgagggctgtgtctgttcggcccaacatggagccagatgtgaaggaggaaaccggtgtggtgggttgtggaattggttggtagacactggtgctgaaactactgctgataggaatatgactaggtgtgttgctggcctgtcttctctgattcctcagtttttcttctcttctccatttggcccttcgattagaaaaccatacctgtattcttgcttcaggtagatctattttggctgctagtctttctcgggcaaacacatctggataatgggttctctcaaactctttctccagggcctcaatttgctcttgggtaaaggatgttctatttctttgcacttccgcttcagctgaagtcgcatttgagcctcatctgagtcttctccgttggaactgatggagttggtattctctccccctccttcctgttgctggcagccatcttgcgtaggttgccctggcaccgaagtccccggataccaaccagggcgggtgccccagcttccggtctgcccgttcaacatccttagtttatcatacatgccgtctgcgcccatctgttgcttttcgctagccaggttgcgaagaactctgtttattgatgacacgcttggtatgttatcgttgg

SEQ ID NO: 356572 - DNA, 2712 bp, Homo Sapiens
  misc_feature (27)..(27): n is a, c, g, or t
  misc_feature (31)..(32): n is a, c, g, or t
ggcctcaggcggattctccggcgcggnccgnnccgcccctcggactccccgggccgcccccggcccccattcgggccgggcctcgctgcggcggcgactgagccaggctgggccgcggccctgagtcccagagtcggcgcggcgcggcaggggcagccttccaccacggggagcccagctgtcagccgcctcacaggaagatgctgcgtcggcggggcagccctggcatgggtgtgcatgtgggtgcagccctgggagcactgtggttctgcctcacaggagccctggaggtccaggtccctgaagacccagtggtggcactggtgggcaccgatgccaccctgtgctgctccttctcccctgagcctggcttcagcctggcacagctcaacctcatctggcagctgacagataccaaacagctggtgcacagctttgctgagggccaggaccagggcagcgcctatgccaaccgcacggccctcttcccggacctgctggcacagggcaacgcatccctgaggctgcagcgcgtgcgtgtggcggacgagggcagcttcacctgcttcgtgagcatccgggatttcggcagcgctgccgtcagcctgcaggtggccgctccctactcgaagcccagcatgaccctggagcccaacaaggacctgcggccaggggacacggtgaccatcacgtgctccagctaccagggctaccctgaggctgaggtgttctggcaggatgggcagggtgtgcccctgactggcaacgtgaccacgtcgcagatggccaacgagcagggcttgtttgatgtgcacagcgtcctgcgggtggtgctgggtgcgaatggcacctacagctgcctggtgcgcaaccccgtgctgcagcaggatgcgcacggctctgtcaccatcacagggcagcctatgacattccccccagaggccctgtgggtgaccgtggggctgtctgtctgtctcattgcactgctggtggccctggctttcgtgtgctggagaaagatcaaacagagctgtgaggaggagaatgcaggagctgaggaccaggatggggagggagaaggctccaagacagccctgcagcctctgaaacactctgacagcaaagaagatgatggacaagaaatagcctgaccatgaggaccagggagctgctacccctccctacagctcctaccctctggctgcaatggggctgcactgtgagccctgcccccaacagatgcatcctgctctgacaggtgggctccttctccaaaggatgcgatacacagaccactgtgcagccttatttctccaatggacatgattcccaagtcatcctgctgccttttttcttatagacacaatgaacagaccacccacaaccttagttctctaagtcatcctgcctgctgccttatttcacagtacatacatttcttagggacacagtatactgaccacatcaccaccctcttcttccagtgctgcgtggaccatctggctgccttttttctccaaaagatgcaatattcagactgactgaccccctgccttatttcaccaaagacacgatgcatagtcaccccggccttgtttctccaatggccgtgatacactagtgatcatgttcagccctgcttccacctgcatagaatcttttcttctcagacagggacagtgcggcctcaacatctcctggagtctagaagctgtttcctttcccctccttcctcctcttgctctagccttaatactggccttttccctccctgccccaagtgaagacagggcactctgcgcccaccacatgcacagctgtgcatggagacctgcaggtgcacgtgctggaacacgtgtggttcccccctggcccagcctcctctgcagtgcccctctcccctgcccatcctccccacggaagcatgtgctggtcacactggttctccaggggtctgtgatggggcccctgggggtcagcttctgtccctctgccttctcacctctttgttcctttcttttcatgtatccattcagttgatgtttattgagcaactacagatgtcagcactgtgttaggtgctgggggccctgcgtgggaagataaagttcctccctcaaggactccccatccagctgggagacagacaactaactacactgcaccctgcggtttgcagggggctcctgcctggctccctgctccacacctcctctgtggctcaaggcttcctggatacctcacccccatcccacccataattcttacccagagcatggggttggggcggaaacctggagagagggacatagcccctcgccacggctagagaatctggtggtgtccaaaatgtctgtccaggtgtgggcaggtgggcaggcaccaaggccctctggacctttcatagcagcagaaaaggcagagcctggggcagggcagggccaggaatgctttggggacaccgaggggactgccccccacccccaccatggtgctattctggggctggggcagtcttttcctggcttgcctctggccagctcctggcctctggtagagtgagacttcagacgttctgatgccttccggatgtcatctctccctgccccaggaatggaagatgtgaggacttctaatttaaatgtgggactcggagggattttgtaaactgggggtatattttggggaaaataaatgtctttgtaaaaagct

SEQ ID NO: 356573 - DNA, 829 bp, Homo Sapiens
acccacatttgggttttaacagtccccgggttttgtcccatgcacataacgcaaaataaaagggccgttaacggggatattggtcatggaggggtaccaaatgacacaaacgcaagaaccgctgatacaaagtttaggatctaggacagaataaacggaaggtgagaatgaaagtaatgtaaggtccgcaggtatgttggggattactgtttatcaattaacgcttctatggcacgatgggttaactgtcgcaagccgctgttaggcatttttgaataaccaagagaaaagtcaagtggcgatagaatgttctacagcgttggcagacattctatagattccagcaaagggggaaaatgtatccactatctaacacttaggtagagaagggagggggtttaagcttagtgagggcaaaattactccattccaccttccgagaccagttagggttttgagagaggtttctgctcaacctgggatctggagggagagctttgatgttggtaaatctgccttgaattcattggtttaacttgcatcaaaataccatgtgagtgtgctcattctcatatatcccctaccaccatcaccaccattctgctgttcagtgtctcttgagagagcctctttgcatgttttccagaatctgtgtgtgtttttcctttcttctcctttgttctttttgctcaaaggtgtgaccagtcattgcccctctggggctttcattctccaggagaaacatcccagaacccagcactgtttagcctgatacctttctaatgtccatgtcaattttcaataaaattcaaagaaatgctaaaaaaaa

SEQ ID NO: 356574 - DNA, 958 bp, Homo Sapiens
  misc_feature (3)..(3): n is a, c, g, or t
  misc_feature (8)..(8): n is a, c, g, or t
  misc_feature (10)..(10): n is a, c, g, or t
  misc_feature (15)..(15): n is a, c, g, or t
  misc_feature (22)..(22): n is a, c, g, or t
  misc_feature (28)..(28): n is a, c, g, or t
  misc_feature (30)..(31): n is a, c, g, or t
  misc_feature (35)..(36): n is a, c, g, or t
  misc_feature (45)..(45): n is a, c, g, or t
  misc_feature (49)..(49): n is a, c, g, or t
  misc_feature (55)..(55): n is a, c, g, or t
  misc_feature (59)..(59): n is a, c, g, or t
  misc_feature (65)..(66): n is a, c, g, or t
  misc_feature (69)..(70): n is a, c, g, or t
  misc_feature (77)..(77): n is a, c, g, or t
  misc_feature (79)..(79): n is a, c, g, or t
  misc_feature (84)..(84): n is a, c, g, or t
  misc_feature (100)..(100): n is a, c, g, or t
  misc_feature (105)..(105): n is a, c, g, or t
  misc_feature (115)..(115): n is a, c, g, or t
  misc_feature (117)..(117): n is a, c, g, or t
  misc_feature (124)..(124): n is a, c, g, or t
  misc_feature (131)..(131): n is a, c, g, or t
  misc_feature (133)..(133): n is a, c, g, or t
  misc_feature (147)..(147): n is a, c, g, or t
  misc_feature (150)..(150): n is a, c, g, or t
  misc_feature (152)..(152): n is a, c, g, or t
  misc_feature (158)..(158): n is a, c, g, or t
  misc_feature (161)..(161): n is a, c, g, or t
  misc_feature (169)..(169): n is a, c, g, or t
  misc_feature (172)..(172): n is a, c, g, or t
  misc_feature (175)..(175): n is a, c, g, or t
  misc_feature (185)..(185): n is a, c, g, or t
  misc_feature (194)..(195): n is a, c, g, or t
  misc_feature (207)..(207): n is a, c, g, or t
  misc_feature (227)..(227): n is a, c, g, or t
  misc_feature (235)..(235): n is a, c, g, or t
  misc_feature (238)..(238): n is a, c, g, or t
  misc_feature (242)..(242): n is a, c, g, or t
  misc_feature (251)..(252): n is a, c, g, or t
  misc_feature (264)..(266): n is a, c, g, or t
  misc_feature (269)..(269): n is a, c, g, or t
  misc_feature (279)..(279): n is a, c, g, or t
  misc_feature (286)..(286): n is a, c, g, or t
ggnaatantnttaanaaataanaaaggngnngttnnaaaaaattnattnggtaantagnaaggannttnnttttgantntgtgnatgattgattaggatnaatangtggtgtttntntttttantgaatgntntaaatattattganaantnaatgtnaanaaaaatgnganttnaaaatatttntatttaatnntaaaaaaaatantgggaaatgggtattattanaattttanagntganaaaattgtnntttgtagaatannnatnatgtgatagnttcttgnatattatgctattcatttctcacaaccttacaaggtaaatggataatgttcctggatgagagattaaacgtactcgaagatcttatggttgtgtggctcagagactctaagcatggctttccaaatctcattctcttgtagagattttccattgtattgcattttgaccatgttcctgtttacaaaacctaagattatattctgaagtatctgtgacttgagtgatagctcaggaataatctgagggcattctattaggaaggaggactagcaaagcctatagttagcctatcctaggcatgaactattctcattttagataggatgacttgataaataggatgaagtgagcaacctgtttgtcttcggttattggtatctacaagacattctgctagtcactgtggaaaagtttccttctcttgggttttttcctcttccccttcctcttaacagtgttggttatctttattatgtttctgtgtatttgtaacagctgtttcacccttgtattgcataatggggatttttcttggaataaaaagtgaggcatgtaaattcattgagaactaaccgtagtttgtaaagaagtaaaaggcctttgtatctagttttttgcagatcacatttctttgaatgctggaaagtgaaataaactggtctaggagccaa

SEQ ID NO: 356575 - DNA, 517 bp, Homo Sapiens
  misc_feature (354)..(363): n is a, c, g, or t
gatggatttaaattaagacaaaaagaaaactctggtattatatttgagaacacgtgaaaaatcatgggtcaacataaaatcttgagaaccttctactttctccgggaaagcattatatagtggtgcattagtttagaaagtcagctatgattttgcctatagttctagttattagctttggggttttcttgtactttaagacatacctgtaaattgaacctatttgaattatattccactgtatgtgtattatggctcttttcctattagagcaacttgtgtttccctgataatgtgtacattttttaggcatgtacttaatagttcacaatgttctaaatttggaaggacttnnnnnnnnnncttgtttaaatttccatctgttttgtaatatctagctctatatgtaaatgatgggtttgttggtatttaaaatgaatacaacttgaatgtaattaaagtgctgttttttggaagcgataaactttaaatatacttattaaaatgaaattctatt

SEQ ID NO: 356576 - DNA, 613 bp, Homo Sapiens
tgtaaacacgcattctttctgaggctccggcgctgatgcgaatacagctcacagagaaacgcatgtgctattggagaacaggtctttgtggagatctaaaggcagtgattgatttcacagggagctctaatctctgtgattacatggtccttcaaactcccaaccaaagtgagaaaagcggcatgcagtgaaatgagcagtgagcagccctttagcaaaatcgccctccagtccttcctggagatgccttcagccagcatcccagactccacagttatttatgaatgatgtcgtgattctccctccacctgacagtttgtaagagtgaaagagcatctaacctgatgctcttggagagagataacctgtctgtcataacttaaaggatgagaaaatgtggtgtagctattaaagattcatgcagtcccaaaaggcactgtcctgggatgatgagagattataaggtgatttcataaaaggaatccaaccctgtgcccggccattgatgtgttgtcattgaatccaggaggatttctagggcactgaagttttgttgtttcttttgctgactttggttacagtcagaaaaaataaactagatgtttgtgtctaa

SEQ ID NO: 356577 - DNA, 1875 bp, Homo Sapiens
agcgggtcttagttcccagtcgcggccaaatcacgcctcagccacctcccgcaagcctctcactgcctcagccacgctttccaggctggtttctggtccccatccgcggctggtccggccctgggaccgaatcacttcccagcgagaggaaggtcaaatttctcgaccggctacgggaaggtcgcggccgccgccctgtcagccgcctcggcgcccccaggacccctcgggtctctttaaccggaagcggaagtgcgtgtcggcgggatcatggcgactttggtcgaactgccggactcggtcctgctcgagatcttctcttacctcccggtacgggaccggatccgcatctccagggtctgtcaccgctggaagaggctggtggacgaccggtggctgtggcgacatgtcgacctgacgctctacacgatgcgacctaaagtcatgtggcacctccttcgaaggtacatggcatcccggctccattccctgcggatgggtggctacctgttctctggctcccaggccccccagttgtcccctgctctgttgagagccctgggccagaagtgccccaacctgaagcgcctctgcctgcacgtggccgacctgagcatggtgcccatcaccagcctgcccagcaccttgaggaccctggagctgcacagctgcgagatctccatggcctggctccacaagcagcaggaccccaccgtgctgcccctgcttgaatgcatcgtgctggaccgcgtccccgccttccgtgacgagcacctgcagggcctgacgcgcttccgggccttgcgctcgctggtgctgggtggtacctaccgtgtgaccgagacagggctggatgctggcctgcaggagctcagctatctgcagaggcttgaggtgctgggctgcaccctgtctgccgacagcaccctgctggccatcagccgccacctccgagatgtgcgcaagatccggctgaccgtgaggggcctctctgcccctggcctggctgtgctggagggaatgccggccctggagagtctgtgcctgcagggtcccctcgtcaccccagaaatgccctcccccactgaaatcctctcctcctgcctcactatgcccaagctcagagtccttgagctgcaggggctggggtgggagggtcaggaggcggagaagatcctgtgtaaggggctgccccactgtatggtcatcgtcagggcttgccccaaagagtctatggactggtggatgtaactactccacctgcccttgggacccatcccagttttcatcattgagccccagaccctctgagcagcaccttgaagagggcagataatcagacttgaggaaactgaaagccccaggttgagagaacagaggcctagggacctccagaccattggaatcactgtttgccagctgtgtggccttggtcatatcatcagcctctgggaagcctagttcccacatctggaaataaggatgatcatagctacctcacggttacattgcaaagccttactctaaaagctcccagcctccagaggctctcaatgaagagtcaccttcatggtcgtcttcaggaacaggacggatgaagaaggggtggggttaagactcaggggcacctgagggtctgagcccccttatgagtacccaagaaggactgtctatgcatgcacacccacaagcctatacaccatttatatacctacacgcacgcaagagacgcggagagataggcgatgcagactcgcgattcaatgatcgatatgctcataaaagtgctcaattatattttctgtattttgtatgctgtattttccaagacgtatattattttactattaaagaaaaaaatcttttttttcccga

SEQ ID NO: 356578 - DNA, 1126 bp, Homo Sapiens
ggacatatgagcaggagagaggatttcagtgggggagggcatttcctgggtgacgagggaccctgcaggcacagactctccagggccggcattccctccagcacagccagccaggggcagagaggccccctcacggtcagccggatcttgcgcacatctcggaggtggcggctgatggccagcagggtgctgtcggcagacagggtgcagcccagcacctcaagcctctgcagatagctgagctcctgcaggccagcatccagccctgtctcggtcacacggtaggtaccacccagcaccagcgagcgcaaggcccggaagcgcgtcaggccctgcaggtgctcgtcacggaaggcggggacgcggtccagcacgatgcattcaagcaggggcagcacggtggggtcctgctgcttgtggagccaggccatggagatctcgcagctgtgcagctccagggtcctcaaggtgctgggcaggctggtgatgggcaccatgctcaggtcggccacgtgcaggcagaggcgcttcaggttggggcacttctggcccagggctctcaacagagcaggggacaactggggggcctgggagccagagaacaggtagccacccatccgcagggaatggagccgggatgccatgtaccttcgaaggaggtgccacatgactttaggtcgcatatctgccttttattgctggatttctctacttggcatcatagggccgtgtagagcgtcaggtcgacatgtcgccacagccaccggtcgtccaccagcctcttccagcggtgacagacccgggaggtaagagaagatctcgagcaggaccgagtccggcagttcgaccaaagtcgccatgatcccgccgacacgcacttccgcttccggttaaagagacccgaggggtcctgggggcgccgaggcggctgacagggcggcggccgcgaccttcccgtagccggtcgagaaatttgaccttcctctcgctgggaagtgattcggtcccagggccggaccagccgcggatggggaccagaaaccagcctggaaagcgtggctgaggcagtgagaggcttgcgggaggtggctgaggcgtgatttggccgcgactgggaactaagacc

SEQ ID NO: 356579 - DNA, 823 bp, Homo Sapiens
  misc_feature (54)..(90): n is a, c, g, or t
cgatgtatacgactcactatagggcgaactcggagctcatcgcggtggcggcgnnnnnnnnnnnnnnnnnnnnnnnnnnnnnnnnnnnnnatcaggccaaatcggccgagctcgaattcgtcgagagcgggtcgacgggatcatggcgactttggtcgaactgccggactcggtcctgctcgagatcttctcttacctcccgggtctgtcaccgctggaagaggctggtggacgaccggtggctgtggcgacatgtcgacctgacgctctacacgatgcgacctaaagtcatgtggcacctccttcgaaggtacatggcatcccggctccattccctgcggatgggtggctacctgttctctggctcccaggccccccagttgtcccctgctctgttgagagccctgggccagaagtgccccaacctgaagcgcctctgcctgcacgtggccgacctgagcatggtgcccatcaccagcctgcccagcaccttgaggaccctggagctgcacagctgcgagatctccatggcctggctccacaagcagcaggaccccaccgtgctgcccctgcttgaatgcatcgtgctggaccgcgtccccgccttccgtgacgagcacctgcagggcctgacgcgcttccgggccttgcgctcgctggtgctgggtggtacctaccgtgtgaccgagacagggctggatgctggcctgcaggagctcagctatctgcagaggcttgaggtgctgggctgcaccctgtctgccgacagcaccctgctggccatcagccgccacctccgagatgtgcgcaagatccggctgac

SEQ ID NO: 356580 - DNA, 505 bp, Homo Sapiens
  misc_feature (61)..(61): n is a, c, g, or t
  misc_feature (107)..(107): n is a, c, g, or t
  misc_feature (221)..(221): n is a, c, g, or t
atggaatcactgtttgccccagctgtgtggccctggggtcatatcatcaagccctctgggnaagccctagtccccacatctgggaaataaggatggatcatagcctncctcacgggttacattgcaaaagcccttacctcctaaaaagctcccccagccctcccagaggcccctcaatgaagagtcacccttccatgggtcgtcttcagggaacagggacnggatgaagaaggggtggggttaagactcaggggcacctgagggtctgagcccccttatgagtacccaagaaggactgtctatgcatgcacacccacaagcctatacaccatttatatacctacacgcacgcaagagacgcggagagataggcgatgcagactcgcgattcaatgatcgatatgctcataaaagtgctcaattatattttctgtattttgtatgctgtattttccaagacgtatattattttactattaaagaaaaaaatcatttttttttcccg

SEQ ID NO: 356581 - DNA, 941 bp, Homo Sapiens
  misc_feature (144)..(144): n is a, c, g, or t
acaagcaaccagcgagttggttgggcacaccactatgaggacatggccaacacaggtgagtgacaaaagcccaattgtaggggaaaaacgaagaccacatagaatgcaagaaaacaagtttaggccactggcgacggaacaacngaaaatgtaacgctaaaaggacgatgagggtaaaaaaacgatgggtaaatgttgggccaacacatcacgacgagccaagaaacttatgtattgaacccacgacattgtgcataaaaaacgcatactaggaaggagcatagttatggtgggtataacaaggtgtgtgtgtgcaagatatgttggcctgatgcaagacccaaagtgagtaggaatacactctgtgggcgtgtgttccatcatccctgcaccactggctccagatcccttcctgagcccccgtccccgctggacctctcacagcctgcagcacatcagtgcccccagctgcatgcgcctcgctgctctgtccatcagtgtgtgcttgaccaagagaaaactaagacgtctcgggggacccctgtacctggtcctctcagcccccgcccactgtgctgtgttactcgcatgggggatttcctgccccttccacaatatgctgtttccccaggagcctcaggcctgaggctctgagtggggtccccagggggccccccggggtgagccccggctccacaccctgccccatccaccctgtagggcccatgttggtgtagcagtgatggcttctgtggatattctgtgacctctgtcggtgtaacttgacaatttctaaatggaaaagggttgctgtgttttctctgtctctcttttttaatgtccttttttcttctcccccgctccctgctctctttccttttcagtttttctagccaagtgtttggggctttaataaaacttgtttctttttcctcccctgg

SEQ ID NO: 356582 - DNA, 750 bp, Homo Sapiens
  misc_feature (17)..(17): n is a, c, g, or t
  misc_feature (25)..(25): n is a, c, g, or t
  misc_feature (136)..(152): n is a, c, g, or t
  misc_feature (581)..(642): n is a, c, g, or t
gcaggctggtaccgccnggtgttantgggatatcgtcgacccgacgcgtcggcttgccccgcagactcccaccctcagccctgtgactggaatgtgtgccccaccgtcattgtcctgagttgaatgtccctttgtnnnnnnnnnnnnnnnnncagtgtccatccacgaaggggcagaaggagggagccacgtgccccgccccacccgctcgggtgaagcccagtgggatttgcatctttctttctcttttggttcctgcacatttatgggctgggaggcatccgtgtggaacttgcgtgcagcctgtgtgtgtgctggcacaagcccatgcactgtgtgtgcagacgcatggggcctgcacccacaggcatggccgagcacatgtgtgggggaaggcgtgggcacataggtgcatgtaacctgttcgggcattggcacgtgcctacctgcatgttagcgtgagaggagctttgtgtgtgagaacatgtgtaatgtgtgtgcagacatgccgagagccagagacttgtgtgtgggccacgtacatgtggatagagacgcatacatggaggtgcatgtaatcnnnnnnnnnnnnnnnnnnnnnnnnnnnnnnnnnnnnnnnnnnnnnnnnnnnnnnnnnnnnnncctctgtgtgcgtgtgttccatcatccctgcaccactggctccagatcccttcctgagcccccgtcccgctggccctctcacagcctgcaaggcacatcagtgccccc

SEQ ID NO: 356583 - DNA, 459 bp, Homo Sapiens
  misc_feature (48)..(48): n is a, c, g, or t
gaacgccagtaaatacggtcagccatgccttaaacgaaggggatacancctagaaagtgtccacctaggcaattctgtccattgtgtaaacattatagaatgtaccttaacacaaaccctagatgttaatatgtatttttatttacatgtatattttcacatgaaatacccaaatgtcacagcattattactgaatgtcagtcatttcccctacttgatcctgcaatgcccaatatcaagggcccatgtattaggtttctgtatatgttccactataatcttatgggaccatggttttaaatgtggaatcattgacagaaatgtctttatgtagcatatggctgtgtatcactagtatataatagagcaatattatggaggaatatgtagatccaatcactttacctatacaaaatgactgctatggtgggaacacaataaacaccagttttgactttt

SEQ ID NO: 356584 - DNA, 1458 bp, Homo Sapiens
  misc_feature (268)..(268): n is a, c, g, or t
atccaaggagctttgaactgttctgggttgcgtactggtgccaatattgccatggtgagctcttctttaatgtcttccagggcaccaatatctgcccatgtcacattagggacagtgacaaagccttcccttttggcagagggttggactgagaatagagcaacaatgaaatcatcaagtcaaatgcacagtccttgcatctgctcctctgagaggggatcttggtctcttagcaaccccagcaagccttgataattcatcctgtgtntcaaaagtgggctcagttcccagcctttcctcctgaactcctttagatggcaaatcttccatttcaggatttttcttctgctgttcctgtagcttcattaagactctattgactgcacacattgctgcctctcggcacagtgccatgagatcagcaccaacaaagcctggagttaggtgtgctaagtgacagaaatcaaaagcttgaggaagcctcagttttctgcacaatgtttgaagtattctttccctggatgcttcatctgggatacctaggcatatttctcggtcgaaccttcccgcacgtctcaaagcagggtctaacgagtctggtcgattagtagctccaataactaggaccccggggctgtagcagccacattattcagatcatccatgcaggttaggagttgggctacaattcttcgttccatatcttttgaagccacttctcttttgggggtaatagcatcaatttcatcaatgaaaatgatacatggtgcatttgacacagcttgctcaaatagttctctcagcttctgctcagactctccggatactccagacacaatctctggagcagccactttcaaaattggcaggtcaagttccccagcaattgcatgtgcaagtaatgtcttcccacagcctggtggtccatgaaggagaactccacgagggggcacgacgcccaggtggtggtacacctccgggtgacgcatgtgtatgagcatcttgcagacctcttttaatgtcatatcattgcctcccacatcttcaaacttcacgttggagatctggaattctaaccccctggctttagctttcttttgcaggacagcttcaatttctccatctacttcctgaagatcttctttcttccttttgcttcctttattctttagcttgcctttccgtttcatatcactctccaaaagagaagaatcttttgaatcctgtatctcagttattggcttcttaggattacttttctccacatgacaggtccaagaaaaaactgtctttctttacacttggggttttgtcaataaaccatcctccttcagaatctttggcaggggtcttcaagggaatggagcctgttttggaacttatccgtggtgtgaagaggtggtttctctttgctccatctcagcctcgtgccgaattcgccacccaggcctcgcccct

SEQ ID NO: 356585 - DNA, 862 bp, Homo Sapiens
tcccgggtgaccgcatgtgtatggagcatcttgcagaccttctttaaatgtccatatcattgcctcccacatcttcaaattccacgtgggagatctggaattctaaccccccggctttagctctctgtggtaggacagcttcaaattgctccatctacttcctgaagatcttctgtgcgtcctgttcgcttcctgtattgctctagccttgcctttccgtttcatagtcactctccaaaagagaagaatcttttgaatcctgtatctacagtgtattggcttccttaggattacttttctcacatgacaggtccaagaaaaaactgtctgttcttctacacttgggctttctagtcaataaaccatcctccttcagaatctttggcaggggtcttcaagggaatggagcctgttttggaacttattcgtggtgttgaagaggtggtttctctttgctccatctcaggagtatttgaaacagaatcaggatttccttctccgatataaagacagcagggaactgttcatgtgatttgctgactgtggatctgggtagtcttccatacttgaatcatcatcagaatagctttcagtatactcattatcctcttcaccttgtcttgccctttttgccaaatgttcatcttctaattctgttaaattcttaagttccttctcactactaattatgctaaatactttttctacctgaatcctaaaagcatttctttttcttcgaccatagtctatactggatgactcgctgcttgagtttattatccacgaaccctgcaggtctgggcttcatcgcgtcggtccttcccgctctcgacgaattcgagctcggccgatttggcctgat

SEQ ID NO: 356586 - DNA, 1149 bp, Homo Sapiens
tgatttaaacttctttattaacagaatatatgttcaaacaaagcttaaagtcccattttctttccattggcgtataggcccctattactcaactatccgttggttagggcctgcacctcaaggtaggcttaattgtaaatcaaaatatttactatccacacttagagggctatctgtaacatcgtttttatttatccccgtccattcgataatcgtctgaaatgcaagacattaagttgaacatcatccagctttctccctgtttttctaagcgcgatccaaatctgttacaacagggtagtctctcattctcttggtagctcaattctaccccctggccgacttaagaaattttgagtctaatacacccacctcatctttagtcggcctggtgcgccaacgcaaatttgtactgagtaccttcggaactgactagtaagtatatccaaaggtttagaaagggctgggttaagagctacaagaagcattaaccgcaacggccacaactaatttgtatccattcttagtaactttagggaaccagactgaatgcttctcccaccctgttggactttcctttattagttcgcaacacaagaacatacaaaagaccgtagcgacaaccatgttctgacgccttcaacttgttaaatccaaattacgtgaaaccacaaagcatcagtggtgtctccccgaggaatccaagaccccccggccggttgccaagccgccggaatttcagcaggagaggaaggctcaccctcccaccgcatggcgatgcccgggagactggagaagctcaggcaggcttggaagccaatccccggcatacagcagctctcgggaatgcagagccctagagcaagaccaagggactcggccgacactgagagcctccagggagaggtcaggtctctctttctgtcctatttctcccttcgacttccctcccagcaggctgctattgagcattcagcaatcgccagacaaagcccttctggtctgcagaacgcactccggcaagcccaccgggagaaccaaagccgcctcctcgcccctgtggggaaaatggcgctcgtcaccccggctccctcccgggtaatcacaaggaccagcctccctccctcgctacaaaatggcgcctccgct

SEQ ID NO: 356587 - DNA, 1266 bp, Homo Sapiens
  misc_feature (1218)..(1218): n is a, c, g, or t
cgaagctccgtcccgcccgcgggccggctccgccctcacctcccggccgcggctgccctctgcccgggttgtccaagatggagggcgctccaccggggttcgctcgccctccggctcctgctgttcgtggcgctacccgcctccggctggctgacgacgggcgcccccgagccgccgccgctgtccggagccccacaggacggcatcagaattaatgtaactacactgaaagatgatggggacatatctaaacagcaggttgttcttaacataacctatgagagtggacaggtgtatgtaaatgacttacctgtaaatagtggtgtaacccgaataagctgtcagactttgatagtgaagaatgaaaatcttgaaaaatttggaggaaaaagaatattttggaattgtcagtgtaaggattttagttcatgagtggcctatgacatctggttccagtttgcaactaattgtcattcaagaagaggtagtagagattgatggaaaacaagttcagcaaaaggatgtcactgaaattgatattttagttaagaaccggggagtactcagacattcaaactataccctccctttggaagaaagcatgctctactctatttctcgagacagtgacattttatttacccttcctaacctctccaaaaaagaaagtgttagttcactgcaaaccactagccagtatcttatcaggaatgtggaaaccactgtagatgaagatgttttacctggcaagttacctgaaactcctctcagagcagagccgccatcttcatataaggtaatgtgtcagtggatggaaaagtttagaaaagatctgtgtaggttctggagcaacgttttcccagtattctttcagtttttgaacatcatggtggttggaattacaggagcagctgtggtaataaccatcttaaaggtgtttttcccagtttctgaatacaaaggaattcttcagttggataaagtggacgtcatacctgtgacagctatcaacttatatccagatggtccagagaaaagagctgaaaaccttgaagataaaacatgtatttaaaacgccatctcatatcatggactccgaagtagcctgttgcctccaaatttgccacttgaatataattttctttaaatcgttaagaatcagtttatacactagagaaattgctaaactctaagactgcctgaaaattgacctttacngtgccaagttaaagtttaccttattctcggccgggtgcagtggctcat

SEQ ID NO: 356588 - DNA, 1108 bp, Homo Sapiens
  misc_feature (47)..(56): n is a, c, g, or t
  misc_feature (64)..(64): n is a, c, g, or t
  misc_feature (106)..(106): n is a, c, g, or t
cagtgagctattactccagcctgggcaacagagcgaaactcgtctcnnnnnnnnnngggggggnggacattaagagagtggtgatgacccaaatgttgaacaattnatgttttggtggtggtgttcttagctgttgaatcctgaatggtttataaagtgaactagctggcttaatgcagccagcgttctgggcagcagaacatattcattcttactgtaaattctatttgctgcttccaaaggtgatgattttcaagcagacatgttctatatggtctgtgttttaggatctggtgcccagcctctatcagagcttgcctacctggcaaagctgcctacccttcaagtgggaaaatataatccactgtttaacaaggctcaccctctccaccctgtcctaacgaccttttgtgaatgtgctgtgatattttcttgctcaatagcaaggtggtagctctgctttcattttaagaaagtggaggctgagggcattgtatcaatactgttgcaactccaagaagttttccttgtaaaattaaaggaaagatcttgttattgattaaccattttcttatgccttgctattgacatattcatgctctttctacgtctagtggctgaaaatgtttgcatttgttcatttgactaatggtgtgatttttgtttctatattattagacctgtaatgttttaaaatgtattttattaaatttggactggatgtatgtctctagcaatacgaggtactttctaaactattaagggaggggttgtatcctcatgttgagataagatgatggtcgtttaaattttgcaattttttttggcctgcagggatattttgtgtttatgtgtccaaaaaaggaataaattggcattcttgtgccaaaagttgtttttcctgtcaattgtctaataagtatgcagtacactgtaatggcaacatacatggttgctttataaaaacagtttcctcagtatgagaaattttacaaagaacagtggaaaaactttgtgtttttaactcttgggtctccctatttttaaaaattgctatttggtatacaattattatgtgtcaattaaaactaaaataaaacttttaaaa

SEQ ID NO: 356589 - DNA, 1038 bp, Homo Sapiens
  misc_feature (12)..(12): n is a, c, g, or t
  misc_feature (22)..(22): n is a, c, g, or t
  misc_feature (48)..(48): n is a, c, g, or t
  misc_feature (55)..(55): n is a, c, g, or t
  misc_feature (59)..(60): n is a, c, g, or t
  misc_feature (119)..(119): n is a, c, g, or t
  misc_feature (122)..(122): n is a, c, g, or t
ctttattttttngcacgcgttntctcggtccttcggcccccgaatganctccgcngctnntgagggcagcagcgcttgaacaccagctccgactcctctattcgtcctccccggcgctncantccgcgggtccagagcccgacagacgcagctccaggggttctcccgatccagccgctcgatgacagtccgcagcgcgcggtgccaggctcgcagctctgtctcgtggtccgactgcagcaggaactcgtggccagggatcgtgcgcatgtgcaggacgttgcgccggctggacaggtggcggccgtgcgccaaggccgccccgcgcaggtccacgctactttcgggccggctacccgctggtccccagcctgaggagggcgctgtcggcagtggctctcggtagaacaccaggctgttacccgttaacaccacccaagacgggccccagttcttcctgagcttgcgccccccttgggcaatcttggtcatgttgagcagacccgacttttccacctcatgggggtcgtccaggagctgcggcagaggtcgaggggcctgcaaggctggagggtcaagctgcgaggtgcgttggctgaggctgagtgaaccctgtgggtcaagcggttctggggtccctgtgtcagatctgaagccctttgcctgaggttgcaggacatcattgttcctcttcagggtctgtgtcccctccatggagccagggttcgtctcgctgcgactgcggcgcgggggcttccaggacttgcagccagtcagtgaatttatgtagaagcagcgtccagagttggggtccaggtgctgctcccaggcatccagcctctgcagcagggggcatgcagggcctgggggtggggaccgaggacagcggcgaaggtccaccaggttacagtacacagggggctctgacatgaggggctgggggcctgccgccagctctgggctgaggtgacccagggtactgggggagaaacctcaggccccagctgctttttaaaaattctctctctcacagttttc

SEQ ID NO: 356590 - DNA, 323 bp, Homo Sapiens
ggtggaggcccggagggaggctccggccggccgggaccaagggagtggggtaggaacgataggagtcaggagcagtgggggcagggtgggctcagtggagagccctggcctgggccgggacgtgggaccctggcagtgggtcagagtccagctagggatgcagatttctctcctctctcaccttcgacacggcccgccccgggtctaggatcgggagaaccccctggagctgcgtctgtcgggctctggacccgcggagctgagcgccggggaggacgaagaagaggagtcggagctggtgtccaagccgctgctgcgcctca

SEQ ID NO: 356591 - DNA, 1371 bp, Homo Sapiens
  misc_feature (320)..(363): n is a, c, g, or t
  misc_feature (479)..(522): n is a, c, g, or t
  misc_feature (1016)..(1016): n is a, c, g, or t
  misc_feature (1109)..(1109): n is a, c, g, or t
  misc_feature (1128)..(1128): n is a, c, g, or t
  misc_feature (1135)..(1135): n is a, c, g, or t
tattaacttgttcaaaaaagtatcaggagttgtcaaggcagagaagagagtgtttgcaaaagggggaaagtagtttgctgcctctttaagactaggactgagagaaagaagaggagagagaaagaaagggagagaagtttgagccccaggcttaagcctttccaaaaaataataataacaatcatcggcggcggcaggatcggccagaggaggagggaagcgctttttttgatcctgattccagtttgcctctctctttttttcccccaaattattcttcgcctgattttcctcgcggagccctgcagctcccgacaccnnnnnnnnnnnnnnnnnnnnnnnnnnnnnnnnnnnnnnnnnnnnaaagtcccggccgggccgagggtcggcggccgccggcgggccgggcccgcgcacagcgcccgcatgtacaacatgatggagacggagctgaagccgccgggcccgcagcaaacttnnnnnnnnnnnnnnnnnnnnnnnnnnnnnnnnnnnnnnnnnnnnaaccagaaaaacagcccggaccgcgtcaagcggcccatgaatgccttcatggtgtggtcccgcgggcagcggcgcaagatggcccaggagaaccccaagatgcacaagtcggagatcagcaaggcgcctggggcgccgagtgggaaacttttggtcggagacgggagaagcgggccgtttcatcccacgagggctaaggcgggctggcgaaggcgctggcacattgaaaggaagcccccccggaaatgaataaaaatacccgggcgcacctggccggaaaagccccgagaccgcctcccgtcggggaccaaggccattcaggtgtaccaccccctctgttctcccggggcgacgggaatctagtacttggggccacctcccgggcgggaggggccaaatatatgccccggcggcgcgcaaaaattgccgatactccgccaggcccaatgggagcacgcccactgtagcgattagttgggcacgagagaggctantaacgtaaaccgccgccgccccgcgcataatcttacgcgctaacacaccggggcacgagacaatagacacgaacggcgcgcagactgcgcacngacagaccacgacaccgcnctccgancgacaccgacatagcctgcggcaaggagagaaaccacgcgatgggggggcgacagtggtacgaccacagagcgagcgcgtgtacgagagcgcggcacaaggtactcaagcgtacccccccgtcgccgattgagtgacccctacgccacccccacgaactaggcagcgggctggtacagagggcggcggcggggagacgacgataacgcggtcgtatgagcacgggggggacgggag

SEQ ID NO: 356592 - DNA, 1127 bp, Homo Sapiens
  misc_feature (750)..(772): n is a, c, g, or t
  misc_feature (918)..(943): n is a, c, g, or t
aaaaaaaacctataataaagatgatattagttcaaatatatacatggattctcggcagactgattcaaataatacagagccgaatcttttaaaatacaactacggaaaaccccggggggaaaccttaaaatatcacaataaatttacagaaatattacaaaccataagaaaatatttcaaacacagtaattacatagaaaaccaaatataaacaaaatagaaagttgggatcgaacaaaagctattataaattaccaacggtgtcaacctgcatggccatttttccttttaacagtaagttataaaatttagtacagtctaaaacttttgccctttttaaacaagaccacagagatggttcgccagtacttattctaattttgtccttttgtacaatttttaaacaattaaaatgtccaaatttgaataattttcttcttttcacgtttgcaactgtcctaaatttcagctgcagaatcaaaattcagcaagaagcctctccttgaaaaatattggcaaattctcagcttataaacaatggacattttgattgccatgtttatctcgataaatactgtacaaaagttgcttgcaaatattaaaacatttttttcgtcgcttggagactagctctaaatattattggtaaagacttttgcaaacttcctgcaaagctcctaccgtaccactagaacttttaaacagtttttcgtagctttctttcctccagatctatacaaggtccattgnnnnnnnnnnnnnnnnnnnnnnnggttttctctgttcaagttttgttccccaaatagtagtccaggctctctctcattaccgttttcttgtcggcatcgcggcttttgcgtgcgtgtggctgggcttggtgctctcttttgcagctgtcttttgctgtgggcgctgggnnnnnnnnnnnnnnnnnnnnnnnnnngcgcgctccgggctttcttcctgccgcttcttactctcctcttttgcccccctcccttttccccgtttttccttgtacatttctccccctccgttcgccgttcggccctccctgttttggtgggccgtgtgcgcttctggcgctcgggcccgccccgctccggtagtctgggcattgagtcgcc

SEQ ID NO: 356593 - DNA, 2512 bp, Homo Sapiens
  misc_feature (100)..(136): n is a, c, g, or t
  misc_feature (1491)..(1515): n is a, c, g, or t
tattaacttgttcaaaaaagtatcaggagttgtcaaggcagagaagagagtgtttgcaaaagggggaaagtagtttgctgcctctttaagactaggactnnnnnnnnnnnnnnnnnnnnnnnnnnnnnnnnnnnnngtttgagccccaggcttaagcctttccaaaaaaataataataacaatcatcggcggcggcaggatcggccagaggaggagggaagcgcttttattgatcctgattccagtttgcctctctctttttttcccccaaattattcttcgcctgattttcctcgcggagcctgcgctcccgaaaaagcaacacgtatccactactactatacacccgcacgtgggccccccaaagtcccggccgggccgagggtcggcggccgcggcgggccgggcccgcgcacagcgcccgcatgtacaacatgatggagacggagctgaagccgccgggcccgcagcaaacttcggggggcggcggcggcaactccaccgcggcggcggccggcggcaaccagaaaaacagcccggaccgcgtcaagcggcccatgaatgccttcatggtgtggtcccgcgggcagcggcgcaagatggcccaggagaaccccaagatgcacaactcggagatcagcaagcgcctgggcgccgagtggaaacttttgtcggagacggagaagcggccgttcatcgacgaggctaagcggctgcgagcgctgcacatgaaggagcacccggattataaataccggccccggcggaaaaccaagacgctcatgaagaaggataagtacacgctgcccggcgggctgctggcccccggcggcaatagcatggcgagcggggtcggggtgggcgccggcctgggcgcgggcgtgaaccagcgcatggacagttacgcgcacatgaacggctggagcaacggcagctacagcatgatgcaggaccagctgggctacccgcagcacccgggcctcaatgcgcacggcgcagcgcagatgcagcccatgcaccgctacgacgtgagcgccctgcagtacaactccatgaccagctcgcagacctacatgaacggctcgcccacctacagcatgtcctactcgcagcagggcacccctggcatggctcttggctccatgggttcggtggtcaagtccgaggccagctccagcccccctgtggttacctcttcctcccactccagggcgccctgccaggccggggacctccgggacatgatcagcatgtatctccccggcgccgaggtgccggaacccgccgcccccagcagacttcacatgtcccagcactaccagagcggcccggtgcccggcacggccattaacggcacactgcccctctcacacatgtgagggccggacagcgaactggaggggggagaaattttcaaagaaaaacgagggaaatgggaggggtgcaaaagaggagagtaagaaacagcatggagaaaacccggtacgctcnnnnnnnnnnnnnnnnnnnnnnnnntcccatcacccacagcaaatgacagctgcaaaagagaacaccaatcccatccacactcacgcaaaaaccgcgatgccgacaagaaaacttttatgagagagatcctggacttctttttgggggactatttttgtacagagaaaacctggggagggtggggagggcgggggaatggaccttgtatagatctggaggaaagaaagctaccaaaaacctttttaaaagttctaagtggtacgggtagaaccttttgcaggaagtttgcaaaaagtcttttaccaataatattaagagctagtctccaagcgacgaaaaaaaatgttttaatatttgcaagcaacttttgtacagtatttatcgagataaacatggcaatcaaaatgtccattgtttataagctgagaatttgccaatatttttcaaggagaggcttcttgctgaattttgattctgcagctgaaatttaggacagttgcaaacgtgaaaagaagaaaattattcaaatttggacattttaattgtttaaaaattgtacaaaaggaaaaaattagaataagtactggcgaaccatctctgtggtcttgtttaaaaagggcaaaagttttagactgtactaaattttataacttactgttaaaagcaaaaatggccatgcaggttgacaccgttggtaatttataatagcttttgttcgatcccaactttccattttgttcagataaaaaaaaccatgaaattactgtgtttgaaatattttcttatggtttgtaatatttctgtaaatttattgtgatattttaaggttttcccccctttattttccgtagttgtattttaaaagattcggctctgtattatttgaatcagtctgccgagaatccatgtatatatttgaactaatatcatccttataacaggtacattttcaacttaagtttttactccattatgcacagtttgagataaataaatttttgaaatatggacactgaaatta

SEQ ID NO: 356594 - DNA, 1045 bp, Homo Sapiens
  misc_feature (530)..(554): n is a, c, g, or t
caacggcagctacagcatgatgcaggaccagctgggctacccgcagcacccgggcctcaatgcgcacggcgcagcgcagatgcagcccatgcaccgctacgacgtgagcgccctgcagtacaactccatgaccagcatgtcctactcgcagcagggcacccctggcatggctcttggctccatgggttcggtggtcaagtccgaggccagctccagcccccctgtggttacctcttcctcccactccagggcgccctgccaggccggggacctccgggacatgatcagcatgtatctccccggcgccgaggtgccggaacccgccgcccccagcagacttcacatgtcccagcactaccagagcggcccggtgcccggcacggccattaacggcacactgcccctctcacacatgtgagggccggacagcgaactggaggggggagaaattttcaaagaaaaacgagggaaatgggaggggtgcaaaagaggagagtaagaaacagcatggagaaaacccggtacgctcnnnnnnnnnnnnnnnnnnnnnnnnntcccatcacccacagcaaatgacagctgcaaaagagaacaccaatcccatccacactcacgcaaaaaccgcgatgccgacaagaaaacttttatgagagagatcctggacttcttttggggggactatttttgtacagagaaaacctggggagggtggggagggcgggggaatggaccttgtatagatctggaggaaagaaagctacgaaaaactttttaaaagtctagtggtaacggtaggagctttgcaaggaagttggcaaaagtctttaccaagtaatatttagagctagtctccaagcgacaaaaaaagtgttttaatattggcaagcaaccttttggtacagtattatcgaagataaacattggcaacccaaaatgtccatggttataagctgagaattggccattattttccaggagaaggttctgctgaatttagattcctgcagctgaaactttagggccagtgcaacgtgaaaagaagcaa

SEQ ID NO: 356595 - DNA, 405 bp, Homo Sapiens
  misc_feature (11)..(11): n is a, c, g, or t
actcaagaacnccgtagggacacccacacaagcggcgggcaccggcggccccgcagccccgggaggcgcaggcaagagtagtgcgaacgcagccggcggcgcgaactcgggcggcggcagcagcggtggtgcgagcggaggtggcgggggtacagaccaggaccgtgtgaaacggcccatgaacgccttcatggtatggtcccgcgggcagcggcgcaaaatggccctggagaaccccaagatgcacaattctgagatcagcaagcgcttgggcgccgactggaaactgctgaccgacgccgagaagcgaccattcatcgacgaggccaagcgacttcgcgccgtgcacatgaaggagtatccggactacaagtaccgaccgcgccgcaagaccaagacgctgct

SEQ ID NO: 356596 - DNA, 469 bp, Homo Sapiens
agcagcgtcttggtcttgcggcgcggtcggtacttgtagtccggatactccttcatgtgcacggcgcgaagtcgcttggcctcgtcgatgaatggtcgcttctcggcgtcggtcagcagtttccagtcggcgcccaagcgcttgctgatctcagaattgtgcatcttggggttctccagggccattttgcgcctcccggggctgcggggccgccggtgcccgccgcttgtgtgggtgtccctacggggttcttgagttcagtctccagaaggctgtacattgccggggcgggaagaaggtgcgccagcgtggcgggaggagaaggcgctcccggggctggagcggccacggtgaaaaggccctgggactccgtcggagcggagcttgggggcctgtgggccagcgagtccggcgggaagggtaggcttatcaaaatgctccgcgccaaatcagcaggaacccgcgggct

SEQ ID NO: 356597 - DNA, 458 bp, Homo Sapiens
gcggccgccttctcgggattggcgagcagcgactcaggcaccaggccgccgcccgcccccgcgtgcagcccggcgcccgccttgagcgcagggtgctcggcgtccgccacgccgcccaggccgtagggcaccgggaaggcgaacttgtccttcttgagcagcgtcttgggcttgcgccgcggccggtacttgtagtcggggtgctccttcatgtgcatggcgcgtagacgcttggcctcgtcgatgaacggccgcttctccgactctgtgagcagtttccactcggcgcccaagcgcttgctgatctccgagttgtgcatcttgggggttctcctgggccatcttgcgccgctgagcccgcgaccacaccatgaaggcgttcatgggccgcttgacgtggtccaccggcttggacatgctctcgccctgccgcggctgcagcccgccgccgcccgggc

SEQ ID NO: 356598 - DNA, 1626 bp, Homo Sapiens
  misc_feature (1104)..(1147): n is a, c, g, or t
  misc_feature (1245)..(1326): n is a, c, g, or t
  misc_feature (1490)..(1526): n is a, c, g, or t
aggtctctctcataaagcttctcttgtcgcatcccgtttttgcgtgagtgtggatgtgattgtggttctctttgcacctgtcatttgcctcgggtgatgggattttttgtgctccctttttcttcttgagcgtacccgggttttctccatgcctgttttcttactctcctcttgtgcacccctcccatgttccctcgtttttctttgaaaatgtctcccccctcccagttcgtctgcccggccctcacatgtgtgagaggggcagtgtgccgtttaatggccgtgccgggcaccgggccgctctggtagtgctgggacatgtgaagtcttgctgggggcggcgggttccggcacctcggcgccggggagatacatgctgatcatgtcccggaggtccccggcctggcagggcgcctggagtgggaggaagaggtaaccacaggggggctggagctggcctcggacttgaccaccgaacccatggagccaagagccatgccaggggtgccctgctgcgagtaggacatgctgtaggtgggcgagccgttcatgtaggtctgcgagctggtcatggagttgtactgcagggcgctcacgtcgtagcggtgcacgggctgcatctgcgctgcgccgtgcgcattgaggcccgggtgctgcgggtagcccagctggtcctgcatcatgctgtagctgccgttgctccagccgttcatgtgcgcgtaactgtccatgcgctggttcacgcccgcgcccaggccggcgcccaccccgaccccgctcgccatgctattgccgccgggggccagcagcccgccgggcagcgtgtacttatccttcttcatgagcgtcttggttttccgccggggccggtatttataatccgggtgctccttcatgtgcagcgctcgcagccgcttagcctcgtcgatgaacggccgcttctccgtctccgacaaaagtttccactcggcgcccaggcgcttgctgatctccgagttgtgcatcttggggttctcctgggccatcttgcgccgctgcccgcgggaccacaccatgaaggcattcatgggccgcttgacgcggtccgggctgtttttctggttnnnnnnnnnnnnnnnnnnnnnnnnnnnnnnnnnnnnnnnnnnnnaagtttgctgcgggcccggcggcttcagctccgtctccatcatgttgtacatgcgggcgctgtgcgcgggcccggcccgccggcggccgccgaccctnnnnnnnnnnnnnnnnnnnnnnnnnnnnnnnnnnnnnnnnnnnnnnnnnnnnnnnnnnnnnnnnnnnnnnnnnnnnnnnnnntccgcgaggaaaatcaggcgaagaataatttgggggaaaaaaagagagaggcaaactggaatcaggatcaaaaaaagcgcttccctcctcctctggccgatcctgccgccgccgatgattgttattattattttttggaaaggcttaagcctggggctcaaacnnnnnnnnnnnnnnnnnnnnnnnnnnnnnnnnnnnnnagtcctagtcttaaagaggcagcaaactactttcccccttttgcaaacactctcttctctgccttgacaactcctgatacttttttgaacaagttaatag

SEQ ID NO: 356599 - DNA, 1610 bp, Homo Sapiens
  misc_feature (18)..(18): n is a, c, g, or t
  misc_feature (34)..(34): n is a, c, g, or t
  misc_feature (490)..(490): n is a, c, g, or t
  misc_feature (563)..(563): n is a, c, g, or t
tcgcgggtctcggtcgcngggcccgtttgcagancccgcggcgccgggaggactttgttcttcttcagaagagaaaactgaagaaggaggaatggctgtggggctttgtaaagccatgtcccaggggttggtgaccttcagagatgtggcgctagacttttcccaagaagagtgggaatggctgaagccatctcagaaggatttatacagagatgtcatgttggagaactacaggaacttggactctccatttctaagcccaacatgatctccttactggagcaagggaaggaaccgtggatggtggagagaaagatgtcacagggtcactgtgcagactgggagtcttggtgtgaaattgaggaattatctccaaaatggttcattgatgaagatgaaatatcccaggagatggtaatggaaaggctagcaagtcatggccttgaatgctccagtttcagagaagcctggaaatataagggtgaatttnagctacatcagggaaatgcggagaggcatttcatgcaagtgacagctgttaaggaaatctctactgggaaaanagacaatgaatttagtaattctgggagaagcatacccctgaaatcagtatttttaacacaacagaaagttcctaccatacagcaagtacataaatttgatatttatgataaactcttcccccaaaattcagtcataattgaatataaaagactccatgctgagaaggaatctttgataggtaatgaatgtgaagaattcaaccagagtacgtaccttagtaaagatataggaattcctcctggggagaaaccttatgaaagtcatgatttttcaaagctcttaagtttccactcattatttactcaacatcagaccactcattttggaaaattaccccatggatacgatgaatgtggtgatgcctttagctgttactcattctttactcaacctcagagaattcacagtggagaaaaaccatatgcatgcaatgactgtggaaaagcctttagccacgacttctttctcagtgaacatcaaagaactcatattggggagaaaccttatgaatggaaggaatgtaacaaagctttcagacagagtgctcaccttgctcaacatcagaggatccacactggagagaaaccgtttgcgtgcaatgaatgtgggaaggcctttagccgttatgccttccttgttgaacatcagagaattcacacaggtgagaaaccatatgaatgtaaagaatgtaataaagccttcagacagagtgctcaccttaatcaacatcagaggattcacactggagagaaaccctatgaatgtaatcagtgtggaaaagccttcagcagacgcataacccttactttacatcaaagatttcacacaggagagacccctttcaaatgtatgaatgtgggaagacctttggctattgctaacacctgaatcaacattagagaattcattaccggagaaaagcccttatggatggcattaaatgttgagaagttttttaaggactgacctccacaacttatcgcacatttatagaatctccactgcggaaaagacctattgtatgccagataatgggggaaaagcct

SEQ ID NO: 356600 - DNA, 1569 bp, Homo Sapiens
  misc_feature (99)..(99): n is a, c, g, or t
  misc_feature (103)..(103): n is a, c, g, or t
  misc_feature (115)..(115): n is a, c, g, or t
  misc_feature (119)..(121): n is a, c, g, or t
  misc_feature (123)..(123): n is a, c, g, or t
  misc_feature (127)..(127): n is a, c, g, or t
  misc_feature (134)..(134): n is a, c, g, or t
  misc_feature (136)..(136): n is a, c, g, or t
  misc_feature (145)..(145): n is a, c, g, or t
  misc_feature (156)..(158): n is a, c, g, or t
  misc_feature (168)..(168): n is a, c, g, or t
  misc_feature (175)..(176): n is a, c, g, or t
  misc_feature (178)..(178): n is a, c, g, or t
  misc_feature (181)..(181): n is a, c, g, or t
  misc_feature (184)..(184): n is a, c, g, or t
  misc_feature (187)..(188): n is a, c, g, or t
  misc_feature (190)..(190): n is a, c, g, or t
  misc_feature (196)..(197): n is a, c, g, or t
  misc_feature (201)..(202): n is a, c, g, or t
  misc_feature (204)..(205): n is a, c, g, or t
  misc_feature (207)..(207): n is a, c, g, or t
  misc_feature (211)..(211): n is a, c, g, or t
  misc_feature (214)..(214): n is a, c, g, or t
  misc_feature (226)..(226): n is a, c, g, or t
  misc_feature (230)..(233): n is a, c, g, or t
  misc_feature (238)..(239): n is a, c, g, or t
  misc_feature (243)..(243): n is a, c, g, or t
  misc_feature (251)..(252): n is a, c, g, or t
  misc_feature (256)..(256): n is a, c, g, or t
  misc_feature (260)..(261): n is a, c, g, or t
  misc_feature (270)..(270): n is a, c, g, or t
  misc_feature (273)..(273): n is a, c, g, or t
  misc_feature (279)..(279): n is a, c, g, or t
  misc_feature (284)..(284): n is a, c, g, or t
  misc_feature (289)..(292): n is a, c, g, or t
  misc_feature (298)..(299): n is a, c, g, or t
  misc_feature (309)..(309): n is a, c, g, or t
  misc_feature (313)..(313): n is a, c, g, or t
  misc_feature (315)..(315): n is a, c, g, or t
  misc_feature (319)..(320): n is a, c, g, or t
  misc_feature (322)..(322): n is a, c, g, or t
  misc_feature (331)..(331): n is a, c, g, or t
  misc_feature (334)..(334): n is a, c, g, or t
  misc_feature (338)..(338): n is a, c, g, or t
  misc_feature (356)..(356): n is a, c, g, or t
  misc_feature (359)..(359): n is a, c, g, or t
  misc_feature (374)..(374): n is a, c, g, or t
  misc_feature (380)..(380): n is a, c, g, or t
  misc_feature (389)..(389): n is a, c, g, or t
  misc_feature (392)..(394): n is a, c, g, or t
  misc_feature (409)..(409): n is a, c, g, or t
  misc_feature (413)..(413): n is a, c, g, or t
  misc_feature (416)..(417): n is a, c, g, or t
  misc_feature (420)..(420): n is a, c, g, or t
  misc_feature (423)..(425): n is a, c, g, or t
  misc_feature (428)..(428): n is a, c, g, or t
  misc_feature (440)..(440): n is a, c, g, or t
  misc_feature (458)..(459): n is a, c, g, or t
  misc_feature (494)..(494): n is a, c, g, or t
  misc_feature (1443)..(1443): n is a, c, g, or t
cagtccctaggctgcgtgctatatgccatgatgtttggggaaggcccttatgacatggtgttccaaaagggtgacagtgtggcccttgctgtgcagaancaantcagcatcccanaaannncnaggnattcttnancattgcggnagctcctgaannngatgatgaangtggaanngnatnagngtnntnaaattnntctnntnntnagtnagntggaggcgctgnagcnnnnagctnntggnaaaaatannaaanaaanntgaaaaaanagnatgttnagaanatggnnnnttgtgnnttggaaaaangttnanatanntnattggaatnaanaaanattaaataaaggaattanctnaaaattgggggtagnggggtnaggaaaatnatnnnagtaatgaatatttnattntgnnttnttnnntcnaagagcaaaaantgggcaaggggaattaannagtgggggtgggtgggggttgggaaaagaggaaantggtgggaaatggaaaatggctctgagcaggactgttgagctcacatagtgttctgactccaaatctgggagcaggagaatgtgtaaacaagaataaagtggaagcaggttggtgtagatcttagtctagtgttcctggagtgagagaagaggtgcaaggggcccaaagtcaggttgccatttcaggcgaactgcctgggaaggaggaatggtgcagagtcggcaatggtgtgacttcattctacaggaggttggttagcagtggacagttctagcttgtcttagatcaaaacttaaagctgcttgggctcaagctggcatctgcctgtgtcaagaactagggccccctaaaaacactcaactagttctttccttccttcactcctggggtgagtagcttagtcaaagctgcctagccggtttgctaggcaagggcctctgggtggagacacctgaggaagctttgagacaggtagattacaggtctcccatcctcagcctaggggcgaggggagtggaggtggcagcggcagctgttttggcctgtgtctccctgatcgttcaagctcatacatggttaatgattaatgaggcagtgtggtgtggcagtatccagctgccacttcctgcctactctgctgagtaaacaggggccctgtcttagctgggcttcaaacctgttccctagggaagggctctgttccctgaatcaccagggaggaaaggcaagggcagggttggcatctcctgctcttttgtgatccaagccttcctccccgaaccatgtctaccccacagtatgacatcagcatggggcctggggcccctgttagcaaagttgaagcttttcccagggccctaacaggagtcttccactagctagcacagaggctgaggccagaaagaaatcacaaacaggagggagatgacctgacttttaatgcacagncccagcttcagcaaagcagcaagacaggaactttgcaaggttgtcaagagggcggggcaccaacacctctaggagatcccctgggtcccttcccatccccaagctatgacggggttccctgccagg

SEQ ID NO: 356601 - DNA, 900 bp, Homo Sapiens
attcctatgtttattgcaaaatcctttcgaaaaaacagtttccttgcacggtttcttgttccctctgagtgcttgagcttctgctgccttccccttcatgctgctgctgctctgtttgctgttcatgacccttatcccttccatcgctgaaggtgagacctgcaaaggggttcttgccaggcccaggaagcataaccccagggactttaaattgaagtcctagggttactcagtatagggaggaaatgaggaccaaaatccaggcacaaactgttgaaggatgagtcttcagctcctttccaagtaggagtataatccagtggtttctgtctttgaaagttagactgctaccctgttcttcctgctgcctctacatttaccaactctggaagcaaggcttggcccaggctcctctgtgcattatgagggtttgggagtggggctgggctggcccagagttcctgggcatggagccacgtcataagcttgggggatgggagggaacacaggcgatctcctagagttgtttgtgccactgcacctctgagcagctttgcatagcttcctgtcttgctgctttgctggagctggggctgtgccattaaaagtcaggtcatctcccctctgtttgtgatttctttctggcctcagcctctgtgctagctagtgggagactcctgctagggcccttggggaaagcttcaactttgctaacaggagccccaagccccatgctgatgtcatactggtgggggagacatggcttcgggggagggagccttggtttacaaaagagcagggagatggccacccttgcccttggcctttcctccctggggattcagggaacagagccctttccttaaggaacaggtttggaagcccatcttagacagggcc

SEQ ID NO: 356602 - DNA, 1139 bp, Homo Sapiens
  misc_feature (6)..(6): n is a, c, g, or t
  misc_feature (20)..(20): n is a, c, g, or t
  misc_feature (25)..(25): n is a, c, g, or t
  misc_feature (30)..(31): n is a, c, g, or t
  misc_feature (33)..(34): n is a, c, g, or t
  misc_feature (43)..(43): n is a, c, g, or t
  misc_feature (50)..(50): n is a, c, g, or t
  misc_feature (59)..(59): n is a, c, g, or t
  misc_feature (65)..(65): n is a, c, g, or t
  misc_feature (67)..(67): n is a, c, g, or t
  misc_feature (77)..(77): n is a, c, g, or t
  misc_feature (85)..(85): n is a, c, g, or t
  misc_feature (105)..(105): n is a, c, g, or t
  misc_feature (112)..(112): n is a, c, g, or t
  misc_feature (118)..(118): n is a, c, g, or t
  misc_feature (628)..(660): n is a, c, g, or t
gggcanaccctggctgaagnctcangcctnncnntccccgcancgccaangattgatcncggtcngnagtgccttgncttcagcnttctatctcattccacagcnacctctnttgagnatggtagcagcagccaggcctcatgcttagcaccccgtccctcagacagtaagccacgaggcgaaggatgttggggtgattgaagaggcgatgcatgtcggcttctcgctgggcctcctcccggtcctgctgctcgtgacacaggattcgcttcagggcgtagaagtgtccatcatgtaacccttccactaggtccacatagctgaacccactgtgggccaaaggggtcaataaagggccatggtcatcttcccacatggcttggacctagagaaatttcctggtggggagtggggtgtccttcccatttagcagaaaccttcccaagatgtggctctaagagaaatctgaagaatattacaccgtgagctcctcaggagcagagatatagaaatctttgaggtcctatggtcgtaatagagacctctgcacttgacatgatgcctaagatacaatgaatagccaacacttaatcaagtacttgtcaaccccgcattgggtgagacatcnnnnnnnnnnnnnnnnnnnnnnnnnnnnnnnnntccatcagtgagggataatcaatcatcgtccattaagctgatgagaaaaaacatggcttttatacaaggtcacacgaggtggattgtagcaggccctggctccagcaatccaccttcttgatacatgtgtagctaggttctgtcagctgagagagcacagggatagggataaaaccctagtgccccaagcatatgcacaccagctgtccttcaatgatcataaacttgaggaactagattaatctgacgttccaaacactcacccctcccccagtttgctggatgaacgaggtagcgacttagttgtcaatgatgacagttccccgagagcagacacacagcgcgtggcccataatgtctcagtcatcctcttcaaggacggtctgaggctaccgaagagctcgtccagggtgagtgggctcttccaggagatgcgctgggggcccagcggatcatgctggctcgggccagagagaagc

SEQ ID NO: 356603 - DNA, 1424 bp, Homo Sapiens
ggtccggaattccctgcatggtcggtggcgcttctctctggcccgagccagcatgatccgctgggcccccagcgcatctcctggaagagcccactcaccctggacgagctcttcggtagcctcagaccgtccttgaagaggatgactgagacattatgggccacgcgctgtgtgtctgctctcggggaactgtcatcattgacaataagcgctacctcttcatccagaaactgggggagggtgggttcagctatgtggacctagtggaagggttacatgatggacacttctacgccctgaagcgaatcctgtgtcacgagcagcaggaccgggaggaggcccagcgagaagccgacatgcatcgcctcttcaatcaccccaacatccttcgcctcgtggcttactgtctgagggaacggggtgctaagcatgaggcctggctgctgctaccattcttcaagagaggtacgctgtggaatgagatagaaaggctgaaggacaaaggcaacttcctgaccgaggatcaaatcctttggctgctgctggggatctgcagaggccttgaggccattcatgccaagggttatgcccacagagacttgaagcccaccaatatattgcttggagatgaggggcagccagttttaatggacttgggttccatgaatcaagcatgcatccatgtggagggctcccgccaggctctgaccctgcaggactgggcagcccagcggtgcaccatctcctaccgagccccagagctcttctctgtgcagagtcactgtgtcatcgatgagcggactgatgtctggtccctaggctgcgtgctatatgcccatgatgtttgggggaaaggcccttatgacatgggtgttccaaaagggtgacagtgtggcccttgctgtgcagaaccaactcagcatcccacaaagccccaggcattcttcagcattgcggcagctcctgaactcgatgatgaccgtggacccgcatcagcgtcctcacattcctctcctcctcagtcagctggaggcgctgcagcccccagctcctggccaacatactacccaaatctgaaaaagcagcatgttgagaagatggccccttgtgccttggaaagaggttcccatccctcattggaatcaccacccattccatccaggacttctcttacacttgggggtagcggggtcaggacaatcatctcagtcctgcatcttttcttctgctttcttccctccaagagcaaaacctgggcaaggggacttactgagtgggggtgggtgggggttgggaaaagggaaactggtgggatatggaacatggctctgagcaggactgttgagctcacatagtgttctgactccaaatctgggagcaggagaatgtgtaaacaagaataaagtggaagcaggttggtgtaa

SEQ ID NO: 356604 - DNA, 944 bp, Homo Sapiens
gggtggcgaattcggcacgagggtcagtccggcagtgcagatggcccatcccgggctctgggctcctagaccggggtgggccctgccaggagtgggcctgagcctcgcacgtcctctgaaactacgctatgctctgcttttgcggcgcgatgggcgtgggagcgggggctgcccaaagatgggctggggttggaggaagtggcccggtagccgctgtgtgtcctgaggccgtaaggcgcctgaccccacccctgaagctggcgacggagcagggcctgttttctctacactatagtcatgatccgctgggcccccagcgcatctcctggaagagcccactcaccctggacgagctcttcggtagcctcagaccgtccttgaagaggatgactgagacattatgggccacgcgctgtgtgtctgctctcggggaactgtcatcattgacaataagcgctacctcttcatccagaaactgggggagggtgggttcagctatgtggacctagtggaagggttacatgatggacacttctacgccctgaagcgaatcctgtgtcacgagcagcaggaccgggaggaggcccagcgagaagccgacatgcatcgcctcttcaatcaccccaacatccttcgcctcgtggcttactgtctgagggaacggggtgctaagcatgaggcctggctgctgctaccattcttcaagagaggtacgctgtggaatgagatagaaaggctgaaggacaaaggcaacttcctgaccgaggatcaaatcctttggctgctgctggggatctgcagaggccttgaggccattcatgccaagggttatgcccacagagaacttgaagcccaacaatatattgcttggagatgaaggggcagcccaggttctaatggacttggggtccatgaattcaagccttgcatccatgttgaacagg

SEQ ID NO: 356605 - DNA, 1252 bp, Homo Sapiens
caaacagctgctccacagcccattctttaaggtactggtagctcttgcttgtgacctggagctggacactctgccttgctgtgccgagacgcacaagtgggcctggttccggaggtactgcatggcctcccgtgttgctgtggcccttgacaaaagaacaccgttgccccgtctgtttcttgatgaggtggctaagaaaattcgtgaattaatggcagacagcgaaaacatggatgttctgcatgagagccatgacatttttaaaagagagcaagacgaacaacttgtgcagtggatgaacaggcgaccagatgactggactctctctgctggtggcagtggaacaatttatggatggggacataatcacaggggccagctcgggggcattgaaggcgcaaaagtcaaagttcccactccctgtgaagcccttgcaactctcagacccgtgcagttaatcggaggggaacagaccctctttgctgtgacggctgatgggaagctgtatgccactgggtatggtgcaggtggcagactaggcattggagggacagagtcggtgtccaccccaacattgcttgaatccattcagcatgtgtttattaagaaagtagctgtgaactctggaggaaagcactgccttgccctgtcttcagaaggagaagtttactcttgggggtgaggcagaagatgggaagttggggcatggcaacagaagtccgtgtgaccgccctcgtgtcatcgagtctctgagaggaattgaagtggtcgatgttgctgctggcggacccacagcgcctgtgtcacagcagccggggacctctacacatggggcaaaggccgctacggccggctggggcacagcgacagtgaggaccagctgaagccgaagctggtggaggcgctgcagggccaccgtgtggttgacatcgcctgtggcagtggagatgcccagaccctctgcctcacagatgacgacactgtctggtcctggggggacggggactacggcaagctcggccggggaggcagcgatggctgtaaagtgcctatgaagattgattctcttactggtcttggagtagttaaagtggaattgcgattccagttttctgttgcccttacaaatctgggagctgttataccctgggcaaagggcaatattcacaggttggggcctggatcaaatgaaccttgtttgaaggccctggacaggtccagaggttgacgggggagaaaaggcattccttcg

SEQ ID NO: 356606 - DNA, 1004 bp, Homo Sapiens
  misc_feature (903)..(903): n is a, c, g, or t
  misc_feature (914)..(914): n is a, c, g, or t
  misc_feature (918)..(918): n is a, c, g, or t
  misc_feature (929)..(929): n is a, c, g, or t
  misc_feature (946)..(946): n is a, c, g, or t
  misc_feature (950)..(950): n is a, c, g, or t
  misc_feature (966)..(966): n is a, c, g, or t
  misc_feature (1000)..(1000): n is a, c, g, or t
gatggcggcgccagggcggtacgtgaaacttggtggaagacgctgaccagtcgtgttggaatcaaaacagcggggaccctgcgccatgtcgcgactgatcgtgaagaatctcccgaatgggatgaaggaggagcgtttcaggcagctgtttgccgccttcggcacgctgacagactgcagcctgaagttcaccaaagatggcaagttccgcaagtttggttttattggcttcaagtccgaggaagaggcccagaaggcacagaagcatttcaacaagagcttcatcgacacatcccggatcacagtggagttctgcaagtcattcggggacccggccaaacccagagcctggagcaaacatgcccaaaaaccaagccagcccaagcagcctccaaaagactctactactccagaaattaagaaagatgagaagaagaaaaaggtggcaggtcaactggagaagctgaaggaggatacagagttccaggagtttctgtcagttcatcagaggcgggcgcaggcagccacttgggcgaatgatggcctggatgctgagccctcgaaagggaagagcaagccggccagtgactacctgaacttcgactccgattctgggcaggagagtgaggaggagggagccggggaggacctggaagaagaggcaagcctcgaaccaaaggcagctgtgcagaaggagctgtcggacatggattacctgaaatccaagatggtgaaggctgggtcgtcctcttcctcggaggaagaggaaagtgaagatgaagccgtgcactgtgatgaagggagtgaggccgaggaagaggattcctccgccaccccagtcctgcaggaaagagacagcaaaggtgcaagccaagagcaagggatgccagctgggaaaaaaanacaacaggagnccanagccgagacanagaaaccagcaaaccanaagnacccaccacctgccanaccgtgaaactgcggggagcccgttcaatgtcanagag

SEQ ID NO: 356607 - DNA, 1051 bp, Homo Sapiens
  misc_feature (372)..(448): n is a, c, g, or t
cccagaaccccactcttcaccagttcccgtaccaaccacaccaactgagtacggcaggtatcctgcagcttcaggtacttctccataagtatctggttgattttattcaggacaatattcatgccatcacgactcaccagagctaagtcccggtaacacttctgggcttgggcaggttcagtgaggatgagagtaaacaggcccaggcagatttcttcatgctgggggaggcctttgcacacatacgcattgagggcatcattggcttctctctccgagacaccagcagtcatcgatgtcacaatgctcatacacctttccaatctctcctctaactcatccttggcatccaaactggttgaaagtagcagnnnnnnnnnnnnnnnnnnnnnnnnnnnnnnnnnnnnnnnnnnnnnnnnnnnnnnnnnnnnnnnnnnnnnnnnnnnnnccgccccttttcccttctgcaactccatggctgcagccaggagccgggaaaaggtcagggagtggatggatggacagtcctagatatcgggatctctggattgccagggactggggggcaagaggaacaagttggggaggggagagcaagggcccctgtcctctccactcctccctcctctccaaaaggccgcgcctgcgttgggggcgaaggcacagtcctctgggtcctgactctggggtggcagtgctgagggaaaggcgttggctccgaagtacagtggggtaaaggcctgtgcccctatgggaagggtaggagaggcttccgcccctgaagaagtggaccctaagagcgtctgaccctaagaaaggagggaaacccctaactttctgcctcttttccccgtggggggaaaagaggagtcctgcccctgaattaggaggtaggaaaccttcctggctgatgccccaaggcttggggagtgcagcgcctttggatccggcccctagggggtgagggtgaggcaataagcgctatgggaggacggggaggaccagcgtctccccacaccacacagaagcggccaatcgatcgttgggcaga

SEQ ID NO: 356608 - DNA, 3455 bp, Homo Sapiens
  misc_feature (826)..(826): n is a, c, g, or t
  misc_feature (869)..(869): n is a, c, g, or t
gcggaagtggcgttggtctggccggagcccttgggtgaaattgttaggcgtggagagggagtgatgtcttccagactcgtagcaggacccagtgctccataaaggataatagtttccagtacactatccctcatgatgactccttaagtggttcatcgtctgcatcttcgtgtgaaccagtgagtgattttccagcatctttccgaaaatctacctactggatgaagatgagaagaatcaagccagctgctacttctcatgtcgaagggtcaggtggagtatcagccaaggggaaaaggaaacccaggcaggaagaagatgaagactatcgagaatttcctcagaagaagcataagctttatgggaggaagcaacggcctaaaactcagcccaatcccaaatcccaggcccgtcgtattcggaaggaaccaccagtttatgcagcaggcagtttggaggagcaatggtacttagaaatcgttgataaaggcagtgtctcctgccctacctgccaggcagtggggaggaagaccatagagggtttaaagaaacacatggaaaactgcaagcaggaaatgtttacttgtcatcatagtgggaaacaacttcgttcactggcagggatgaagtatcatgtcatggcaaatcataatagttggcccatttggaaagccggagatgaaatagatgagccaagtgagagggaaaggctccgaacagttctaaagagacggggaaagctcaggtgcatgcgtgagagttgctccagtagcttcaccagcatcatgggatatctctaccatgtcagaaaatgtggcaaaggggntgcagagctggaaaagatgaccctgaaatgtcaccactgtggnaaaacatataggtcgaaggctggacttgcatatcacctgaggtcagagcatggggcctatatccttctttccagagtcaggacagccagagtgcttaaaggagatgaacctagagtcaaagagtgggggccgagttcagagacgttctgccaagatagctgtataccacctacaggagctggcctctgctgaactggccaaggaatggcccaagaggaaggtgcttcaggacctggtacctgatgatcgaaagttaaaatatactcgtccagggctacctaccttcagccaggaagtactacataaatggaagacagatatcaagaaatatcatcgtattcagtgtcctaaccagggctgtgagactgtctacagcagtgtatctggccttaaagctcacctgggctcttgtacattgggaaactttgtggctggaaaatacaaatgtcttctatgtcagaaagaatttgtgtcagagagtggtgtcaagtatcacatcaactccgtccatgctgaggactggttcgttgtaaacccaacaacaaccaaaagctttgaaaagctgatgaagataaagcagcggcagcaagaagaagaaaagcggaggcagcagcacaggagcagaaggtctctaagaaggcggcagcagcctggcattgagcttcccgagacagagctgagtcttagagtagggaaggatcagaggaggaataatgaggaactggtagtgtcagcctcctgtaaggaaccagagcaggagccagtgccagcacagttccagaaagtaaagcccccaaagactaatcataaacgaggaaggaaataggcagtcagtgtaaaagtgctcctaggaaagcagatgtgatgctgttgtcacggggacctgtgctgggaggactgagtgaagattctttcagctgtttgtgtaaggctgtgactttctcagctccttcctcctgtgtaaatttcactgtcttcccttcttacattttgattcccccctccccttttagtaggttttcctgctattcctcgtcaagtcctcttgtttttttatcttgcccaaagagctccctctcaagggccaactataggctccgcttggccctgtaacaaaactaaggaaacctctttggttgtcctttccttcctggggtatagaatgttcttggaagctccattgatttagtagctgctccatcatctagcttgtgaaaccattccaaactaattttttaaaaccataactgatttgtcattttgtatttgtgatataacaagtctagaagttagaactgttgtcattcacataataagattactctgtctccttgggaaaaaaactttatggaggctgtttgtcctctcaatatggttttaagattgaaagtaagaaaacggatttaggatgaaaactctagaactaccctatgctgtttatactgggaaatgctttgtaccaagtagcagtgactagacccacagacatgaaaagcaaccttaggagtaaagtgacccaaacattaaaatgacaggaaagagaaagtagaagcagcaataaatactgccccaactttcctggagcccgaggcctcatccatagctatgatcacttgccctctgaagcttatttttgcttctttggttttaagaattgagaaatatcacattgcccctgatgttttgacagtctcctagtgctcctggtagtgccactaagggaaaaccaaggtgcgcattccttctccctggactttaccttacttgttagtctacgccccactgtttccacccatccccttagccaacctctgtctttttgaattttctgagaatattgtcctatcctcttttatatatggagttctctcctctttatatcctgagactttgacaccagatgtagatatttatctggagctggaaagaaaaattctttttctgtacctcatgcctatctggtaatgtttaatgggttatttctctttgagggtggctttctctggaacattggttagagcagctttgttgtcgtgtttctggattctcttccccattttgcgtaaatattggtcttatatattcttgcccattttgtggcatatgccacataaaaaatgaacctgatatagacaagtactaccttttcaaattctgaaaggctattacccactttaactctttgtgctcctccaaatagctttaaaatgtgggcttttgtgaagaccactttcaaacaagggagcactgaaacctgaattggatactgccagaataggtagttttgaaacaagttaaggacatggtatatgcactctgcattttcattggcagtgtgcccttaaagccctttcagtagatgagggttgtcagggaggagaaatgaagaagctatgttaatttctggtgagtaagacctggggaatgtttggcaatgacaaaagaaataaatgactctcagaaagatgtttccagtgttctttgacgccgacctgctgcatgactccttgacactgtatgggggtaagaagatggctagagatgggggtgagtttgaaataaattccacatgcagttgtctcagtg

SEQ ID NO: 356609 - DNA, 858 bp, Homo Sapiens
tctgacatgttagagatatcccatgatgctgtgaagctactggacaactctcactgcatgcacctgagctttcccagtctctttagaactgttcggagcctttcccctctcacttggctcatctatttcatctccggctttcaaaatgggcaaactatgatgatttgccaatgacatgatacttcatccctgccagtgaacgaagttgtttcccacaatgatgacaagtaaacatttcctgcttgcagttttccatgtgtttctttaaaccctctatggtcttcctccccactgcctggcaggtagggcaggagacactgcctttatcaacgatttctaagtaccattgctcctccaaactgcctgctgcataaactggtggttccttccgaatacgacgggcctgggatttgggattgggctgagttttaggccgttgcttcctcccataaagcttatgcttcttctgaggaaattctcgatagtcttcatcttcttcctgcctgggtttccttttccccttggctgatactccacctgacccttcgacatgagaagtagcagctggcttgattcttctcatcttcatccagtaggtagatctcttcggaaagatgctggaaaatcactcactggttcacacgaagatgcagacgatgaaccacttaaggagtcatcatgagggatagtgtactggaaactattatcctttatggagcactgggtcctgcctaggcgggtacagcaccgactctggaagacatcactccctctccacgcctaacaatctcaccctagggctccggccaaccctcgtgcctgaattaacacccggcccgggacctagtacatatcttg

SEQ ID NO: 356610 - DNA, 1029 bp, Homo Sapiens
ccccctcccacctccctaataaaaagaaatcacacccttagccatcctttcccactaacgtaggcagtgtgttttcagaggagactgccgaaggctatgaggagactgaaagcagaagtgatggtaggaagtgagctccatccgtgcaggctggaactggtggcatcaccatcactgaggcggccagccccggggagggagcctcccttcctccacctcgccaggcccctctgttcttgagcagactagaaaatacaatctcgggccagaggggctgctgcaacgagagggtgaagagcctgagcacctactgggagagatttcactggcacgcagaggaaggctgccaggtgctgggtggcctgagtcagagcttgtgcgtctgaaaatactggaaggagagataagacagagggagcaaacatcgacggaatcttgtaagagcactttaagagcaatcagattcctgagcagaggcagaacaggctgcggcttcagtctttgagggcagagaaggaacagtttttgataactggccttggggtgacagtggggacgagacttaggttcatccaggagggagtgtgtggatgcgtatggcgttattagcttttgtttggaaaaggacagtaaactatgaagacgacttgagtgtgagaaactttacctccccctgcctccaccggactgagtacagcttccatttgagcccttggaaatacttcttttctcttccgttagtgttaataattaaagctgctcctggattcaattagcttgtagaaataaataatttaaatgacttttctatacatatcttttgattgagggcaacaaataatagacttaagtttaacccttttcactggctaagttgatttttcttccctggagaactcacttcttttagaaagtgattagtgtctaagaagagttggactgtaatgatgcgggtttggcctcgtgggtgtggagaggaaaccccgcagcagtttggaatgtatgttaagaactgcgtggatagactca

SEQ ID NO: 356611 - DNA, 348 bp, Homo Sapiens
gtaaagtttctcacactcaagtcgtcttcatagtttactgtccttttccaaacaaaagctaataacgccatacgcatccacacactccctcctggatgaacctaagtctcgtccccactgtcaccccaaggccagttatcaaacaaaagctaataacgccatacgcatccacacactccctcctggatgaacctaagtctcgtccccactgtcaccccaaggccagttatcaaaaactgttccttctctgccctcaaagactgaagccgcagccctgttctgcctctgctcaggaatctgattgctcttaaagtgctcttacaagattccgtcgatgtttgctccctc

SEQ ID NO: 356612 - DNA, 582 bp, Homo Sapiens
tccagaccacgaggcacagccgcatcattacagtccaactcttcttagacactaatcactttctaaaagaagtgagttctccagggaagaaaaatcaacttagccagtgaaaagggttaaacttaagtctattatttgttgccctcaatcaaaagatatgtatagaaaagtcatttaaattatttatttctacaagctaattgaatccaggagcagctttaattattaacactaacggaagagaaaaggagtatttccaagggctcaaatggaagctgtactcagtccggtggaggcagggggaggtaaagtttctcacacttcaagtcgtcttcatagtttactgtccttttccaaacaaaagctaataacgccatacgcatccacacactccctcctgggatgaacctaagtctcgtccccactgttcaccccaaggccagttattcaaaaactgttccttctctggccctcaaagactggaaggccgcagccctggtttctggcctctggcttcagggaatctggattggcttttaaagtgctttttacaaggtttccgttcggatgttttgctccctc

SEQ ID NO: 356613 - DNA, 1517 bp, Homo Sapiens
aaatagaagagctatagaaaataatacataaggtgaacaggaactttgatcccctgtttcttccaaaggcagtaatgacaataaatacatatatcacttgaagcttggagtatttgcactttgcagcagtagtacccaaagggctgccttttgtaaacacgacagtcactgtaagcacagtgggttcgtttcccggaaatggtgaaactggcgtgcctctaatcatgaaatatggcattgagctgggcactcatgactcgctcatgatgtgaatggctatcgaaggacataatattgtctatggggatctcgcagcgaggggcagcggtgcctgagaagattgatccgtggctttgggcccctgccagtgtcgctgcaggatagtgcatggtaaaggcataatttttctcaaactcggcggacggttcgtgtttgaaagagaagttgccattgatgctgagcggcgggctgaggggtccatcaaaggaagggctggtgcaatcagtcagagggctttcaaagaagggctccagcgctgcgctgtaggcgtgcggcggaggcttaacgtggaagacatgggagctgtccatggtaccgtaaggcggactgggcagcccaggcgactggtaggagtaggggtgtacagggaaggaagcgctggccgtcggcaggtgggggggcatgtcctggttctgctcaggcagaaaagtccgaggattgagttgcaggcagcccgcaaccaggttggtggtgggttgggataagcccttgcaaagcgtctgaacgaaggagaccaggtctgggcttttgcctgagcgcaggatctccgacagagcccagatgtagttcttggccaagcgcagagtctcgattttggacagcttctgcgtcttagaatagcaaggcaccaccttgcgcaggttgtctagcgccgcgttcagtccgtgcatgcggttccgctcccgggcgttagccttcatgcgtctcaatttaaaacgctccaggcgagccttagtcatcttcttctttttggggccgcgtctcttgggcttttgatcgtcatcctcctcttcctcttcttcctcctcttccaggtcctcatcttcgtcctcctcctctcccccgttcctcagtgagtcctcctctgcgttcatggcttcgaggtcgtcctccttcttgtctgcctcgtgctcctcgtcctgagaactgagacactcgtctgtccagcttggaggaccttggggctgaggctcgcccatcagcccactctcgctgtacgatttggtcatgtttcgatttcctttgttgttagtaggtcctgagcagtgatagtctcataaccctggggcctccggacgccgtgcctcctgcgtgggcgaattcctcgtgtcgtggccgcgcgggcgctcaggttatatagcccagttagtgatgctaagcgcgggcggggccgctagctgaggggctagcaggtctatgcgcctgacgcctgcgcacgcgtccaggctgtgcgccgg

SEQ ID NO: 356614 - DNA, 956 bp, Homo Sapiens
gggatcaagagcagggatgggagcgagcctgcgtccgggcactggtccccatccgtgagtcccctcggtgctccctgcccgccgtggccatcctctcacatcactcacaaccccaaggcgcggcatggttgacacccccacgttaggacggagaccctgggcttagttagagggggcagtactaaccagtccctggcggaaacgctttggctgggtgaggtgagcgggatcgcccccatttctccagagaggggtcccggctcagcgagggaaagaggccgccgctggggggacggctggccggggcccctccctggagaacgagaggccgccgctggagggggatggactgtcggagcgacactcagcgaccgccctacctcctcccgccccgcagcgacacgggcgaccgcaagcagatctacaacatcctgagcacgctggggctgcgaccctcgaccaccgactgcgacatcgtgcgccgcgcctgcgagagcgtgtctacgcgcgctgcgcacatgtgctcggcggggctggcgggcgtcatcaaccgcatgcgcgagagccgcagcaaggacgtaatgcgcatcactgtgggcgtggatggctccgtgtacaagctgcaccccagcttcaaggagcggttccatgccagcgtgcgcaggctgacgcccagctgcgagatcaccttcatcgagtcggaggagggcagtggccggggcgcggcctggtctcggcggtggcctgtaagaaggcctgtatgctgggccagtgagagcagtggccgcaagcgcagggaggatgccacagccccacagcacccaggctccatggggaagtgctccccacacgtgctcgcagcctgggcggggcaggaggccgggccttgttcaggacccagggccgcctgccattaccgttgggggaacagagcgggcttttttccttcatttttt

SEQ ID NO: 356615 - DNA, 1252 bp, Homo Sapiens
ggctcacgtgttataaaaccccctttgctctgcctgtctccttgaattgtggccagtttcacatgggaagcaacgtcgagggacagggagactgcaggtgaggcctcagggctctgcattcccatccccaaaagtcaccagcgtgtggccttgtgggtgtcactcccctctgtggagtcaactttgtgcagtgacatgcagaggctggactgctgccacctcatgcctctcctggcatgatggtcgcatgaggctgagtgatttgcaggtctatggggaagtgtcccgcctcagagatgtggaggagaagccaggcagagcgctgttcattccatttctttctttttttaatctaaaggagggaaagagctttattaactcaaacaaagggatgccatacaacttcccaacgatactgtgcagtgatggtattagcttccacctgttcttccattctgggggcagggtgtgaggactggctgctctgggagacgctctgagctgagagaagaaatagctatgctaatagctgccccttactgagtgctcactctgtgtccggggctacaccgagggcttgcagcgggttctctggcgcacttagaacagcactgtgagaaaggcacttttgctgccccttgtgtacagatgaggacaaagaggggcagagaggtttagaaccttgacctatatcacacagccagtgagcagacgaccggaatttgaatcctgcaatctctctgcagagcctgcgcatttaataccacacacagttctggcctgcagtgaatttggttgttcttcctgcctggggtggtcagtttccaagcctttccagatggacttctgcagcccaaagctgcgtgctccccgtgcaggcccttgtcagagcagagaaagatggctgaagttgttgtccatctagatttttatcttcaaaacattgctgaaatcaatctctcttctaccgtctccgatttcctttgtccttatgggtggtcctacaactttaactatcattttaagtggatgtcaagaggagtggagataaacacgtgttcagcctgctgtgaatctctgcagtggctatgttgtttcttaaacagatgtaatgaggcatctattccctgtgtgccatgtgccccttgagtaggggacatctgttttgtgttgtctgtgtctccagcattagaatggaacctggcacacaatagaggctcaattagtatttgttgaataaatgaacattaag

SEQ ID NO: 356616 - DNA, 1902 bp, Homo Sapiens
cgggcgcgtggcgcggggcgcggggcgctgcggccggtacacgccggggtagggccggggtcgggttgtggtcgggccgggattgggctctcctgggccatggcagccgaggcgcgcgtgtcgcgctggtacttcggggggctggcctcctgcggggccgcctgctgcacgcacccgctggacctgctcaaggtgcatctgcagacgcagcaggaggtgaagctgcgcatgacgggcatggcgctgcgggtggtgcgtaccgacggcatcctggcactctacagcggcctgagcgcctcgctgtgcagacagatgacctactccctgactcggttcgccatctacgagactgtgcgggaccgcgtggccaagggcagccaggggcctctccccttccacgagaaggtgttgctgggctccgtcagcggtttagctggaggcttcgtggggacgcccgcagacttggtcaacgtcaggatgcagaacgacgtgaagctgccccagggtcagcggcgcaactacgcccatgcgctggatggcctgtaccgcgtagctcgtgaagagggtctcaggagactgttctcgggtgcaaccatggcatccagccgaggggccttagtcactgtgggccagctgtcctgctacgaccaggccaagcagctggtccttagcaccgggtacctctctgacaacatcttcactcactttgtcgccagctttattgcaggtggatgtgccacgttcctgtgccagcccctggatgtgctgaagactcgcctgatgaactccaagggggagtatcagggcgttttccactgcgccgtggagacagcgaagctcgggcctctggccttttacaagggcctcgtcccagctggcatccgcctcatcccccacaccgtgctcacttttgtgtttctggaacagctacgcaaaaactttggcatcaaagtgccatcctgaccagccgtgggaatggctgggctgccaggccagacacgctaggttcttccaaagagtcccaagcccagcacctgctcctggggccacgacctccctggccgtggccacccgtcctccgcagcaggcccctgctgtccccccacctgctggctgagctcctcctggcctcgtcccctctcagctgtagctgcaccacccccgctctggctaccaggctctcccggctgggcactgcgtggccttgcccctctcccgctggcagctcctcaggggaacaggggctaccagaggctgatttctcccctctcctgggccaggggaggggtattatccctgcctcctgcccccgatgcccaaagcagcatcttccagcactttccatcgaggacttgggtggcagagtgtgggtgcagcctggctgttgctcacccaagtgctagctctgcacttcgtgtctgctgagagcaaccagaccttccatgtcctcgggcagctgcaactccccgcgagaccccgcagctgggtgggatgaacaagcaacgcagaccacaagcgagtgcctgggagggagtggcccagggtggttctggagccattgtgggtgagggtcgagggccaccgaggtcccgcgcaccgctgcctgccctgcagtggctttaacagttagttttgccaaagcctctccactcaccagcaggcggtctctgtcttcagggattgtgcctgcgtccctcgggcacctgggcccccccgcttggctccctgggggaatggcccaggcgggctgcggttcctccttagggccttctccccgacaaggagtccgacggggcggatgctgcatcctctgcctccctggtcgctgggcttcaccccacctgggaagggcagtgtgctctgtgggggctgcaatcaataaatgccgggagctgccaaaaa

SEQ ID NO: 356617 - DNA, 1275 bp, Homo Sapiens
  misc_feature (309)..(323): n is a, c, g, or t
  misc_feature (471)..(538): n is a, c, g, or t
  misc_feature (1101)..(1109): n is a, c, g, or t
  misc_feature (1116)..(1116): n is a, c, g, or t
caaaaaaccgattaaccttgagatgaacaagagtcaaaaaacggtggtagaagcaagcaaattgcaactcggcagaaacaaaagcaaaatcagatgttttcaataaaatgaaaaaaatctaatagaatacttttcaaagcacatagaaatgctgaatggatatatgtatactatatatgttaaaattttgccagaagtatttagagtaatctaaatttaagacttacatataaaaactattttaacatctccaagaggaaaatggaattacaaataataagtgtagcaatatggataaagacaaatttnnnnnnnnnnnnnnntccattttctttttactattcctgttacatgtgtcatgagtcctcttaacttctcttaggataagagtccatttctttcatccactcagtcactcattcatcagtcatttaccgagaattttttatataactgataagctagtgatannnnnnnnnnnnnnnnnnnnnnnnnnnnnnnnnnnnnnnnnnnnnnnnnnnnnnnnnnnnnnnnnnnnaatatatatgtttctttgtcttttcaaataatctaaccacatatataaactcttctaaaatgacactttttcaatcttgccatactcaattccattctggtattaactgataaaaattttaaaatactaaaaaatgcttaaaataactattatttttcagtttacaaaggtggaataacatttcgttttgtgaggtacagcactgagtagctagattaggattcgggtgttcagggttttggtccctacagtagcagtgactagtgagatagccctgagtaagtcagaacccttctgtaccttcattttcccatgtggaaggtttctagagattatccaggtgccttcttaccactgtcaccactttccatgtgcccttgaccctcccatgtcagagtcaggaaagagcctttgaaacaaggcatctaaataaaacagtgctgttctaagactgtattctttgtattttaaatgaagttaaagatattaatagcagcaactaagcagaccatatactgccctcccctttatacttcaaggtagagtatgataacaaggtcagnnnnnnnnnttatttnttaatacttcctatacaagacaaccagtcactttctgttctcttacatctttcacatatagcctttgccaaattctgtcattctatctaccaaatattccattttttctcctgattatttatttggagacagggtctggctgtgtcgcctaggctactg

SEQ ID NO: 356618 - DNA, 2124 bp, Homo Sapiens
  misc_feature (30)..(30): n is a, c, g, or t
  misc_feature (40)..(40): n is a, c, g, or t
  misc_feature (67)..(67): n is a, c, g, or t
  misc_feature (78)..(78): n is a, c, g, or t
  misc_feature (89)..(89): n is a, c, g, or t
  misc_feature (145)..(145): n is a, c, g, or t
cccccctgaaccggaccaggaaaaaccccnaaaggaaacnccccccaaacccacacagaacagttgncccaaaatcgnggacctaaccnccactttcaaaactgggaacctccacggctgaaagacatttcaaacgcatgttccnaaatctggctgccttagacagtgatgggggttcctatggtacagaagaaaacaggttctggaatctcccactcccagccaataaaagtctctctgcttcattgttttgtctgtgcttcttttctccctcccgttccgctctacgagctgcagctaatgcactggacttggatgagacaatggtgtctccagtggcagtatgtttaagcccaacagtcaaagcaatgttaccagcagtcaatgaagggatttctacatgttggtcagcaaacggcaaaagcagacgacttattctctccgtgcagtttccattaatattatgaatggccaactggggttttatagtgcctgagtaaatgcgcataaaaaccagtggtcctcgctgcttgtcatggagaactttaaatgccaatgcacataagtcatccttataccactgcagaaattcatagttacgctcttcaggtgaaggtaagtacatagtaacagcatctaacaagggctgtatccctttgtttttcagggcacttccacaaagcacaggcactgctgtctgagctagtgtcactctatgtattgcagtctgtagcttttcagctggtaacaaatcaaaattctcactaaattcttctaaaaccaagtcagcaaattcatcatccaaatctgcaacttgttcaattaaggcattccttgcttcagttgtttccttcagcaattcaggatcattcatttccaagaggggctttctctcaaagtcttttccatcatttgaattgcaattccaaagaagtttttctttcattactacatccaccactcctttgaaagttttggcttcaccaattggtaactgtaaaagcaaaggctttgcctttaacttctctctgatgctttcaactgcatacttaaagcttgctccagttttgtccatcttgtttaaaaaacagattcgaggtatattgtgtttatcagcttgcctccatactgtgagagtctgggcctctacaccagcagaggcatcaaatacagccactgcaccatccaacactcttaggcaccgctcaacctccaaggtaaagtccacatgacctggtgtatcaattagattgactctataacctttccaatcaaatgtaacagcagctgattgaatagtaatgcctctttctcgctcttgggccatgaaatctgtcactgtgtctccatcatcaacatctcccagtgatcttgtatatccggaatagtacaatattctttctgtggtggtagttttgcctgcatcaatatgagccataattccaatattacggattttagctatgggaggattgatgatggaatgaagggatttgatatcatttcctattaagcctggtagagaactgcaatttcttccaagcggcacatgtggctttaatctttttaaacttgctcttattttatagcagcatatattattaatatacacactgggtattgtctgatgactcattgcaaatatcctcaagttggtcaacatcttgatcctccaaactgttactgtctggcattaggccgcgtgccgcaggccagctctcaccgctgggctcttgaagcaggaggcgcgagccgcgccaaagtctgcaacggcctcaagtctcgacgccagcctaggcaaaaggcaatgtatctaaacgaaaagaaaataggctttctccgctctaccgcctcgggcagccacacctccacacttccggcggtgtaccggccaaatgccgcctgccagcaacttccgtcctcctagctaaaagcggaaaacagaggctcggaaccgctgcgtggttcttgctcttcactcggccgttttaaagggtgactctttcctgtcccggcctgcgtggtgtgggcttgtagggtctttgagacccagaaaattgagagccctttcgcactccagcaggctgctcctgcaggctctgcggccgtcaccatggtaaggag

SEQ ID NO: 356619 - DNA, 1056 bp, Homo Sapiens
  misc_feature (150)..(189): n is a, c, g, or t
attaaacaacaaacaaaaagaaatcctgatgttgacattatagcacactgctttctccacagagatgctgatatcaaaaacttgaagatacagtgaagttctgaataatgttacaaaactggttacctgtatcaaagacccatttatgcnnnnnnnnnnnnnnnnnnnnnnnnnnnnnnnnnnnnnnnncctggacagacagcacataaacctcctgcaccatacagacatccagtggcttctcagaggaagcgttctctacaggatatttgaattgaaaggtgaattgccagagtacttacaataaaacagccagcttttgctgagtgctttggaaatgaaaaatgactacagaaagtagcctattttgcagacgtttttcatcacatgaacaaatggacaagtctctgaaaggttctggggaaaaaaatttttcttaaagcgacaagactcttagatctaaaaggaaactgacttgccaccttgccagaggaattcttgaaatgtttctgcagccacttggccttgaaaataaagggtgcaactctcaaatcttgttctaacccggctggaggaaccacaagacccaatgaaatagcattttctctccttttcccagcactagtatataacctatgaggaacccttgtctctgaatctgctcagcttgaaattttgtctctgaaggaagagaatgaactcagccctagtctgacagtcctagatttctgtgaaataagagtattcttcaacttagtgctcacactcacataccatgagggttctctgcaggggtttaggggtttcctgaatttgaaagttttttcaaggcctctttttgggtaaaacaattgaaaaggcagacaccaacaaagtctgcaaaattaactgtccagattaagaatattaaggagctgtaaaattagcttgtagaaatggacttatccttaagttttaaaaagtaggaaatcctaaaaatgtaggcttctgcacagtgctatgtcatttatggtagtgacatgggatgtattttatcctctagctggtgtctgtttg

SEQ ID NO: 356620 - DNA, 752 bp, Homo Sapiens
  misc_feature (6)..(6): n is a, c, g, or t
  misc_feature (11)..(11): n is a, c, g, or t
  misc_feature (16)..(16): n is a, c, g, or t
  misc_feature (65)..(66): n is a, c, g, or t
  misc_feature (77)..(77): n is a, c, g, or t
  misc_feature (86)..(86): n is a, c, g, or t
  misc_feature (88)..(88): n is a, c, g, or t
  misc_feature (91)..(92): n is a, c, g, or t
  misc_feature (95)..(95): n is a, c, g, or t
  misc_feature (97)..(97): n is a, c, g, or t
  misc_feature (107)..(108): n is a, c, g, or t
  misc_feature (112)..(113): n is a, c, g, or t
  misc_feature (125)..(125): n is a, c, g, or t
  misc_feature (128)..(128): n is a, c, g, or t
  misc_feature (136)..(136): n is a, c, g, or t
  misc_feature (147)..(147): n is a, c, g, or t
  misc_feature (149)..(152): n is a, c, g, or t
  misc_feature (158)..(160): n is a, c, g, or t
  misc_feature (163)..(163): n is a, c, g, or t
  misc_feature (181)..(181): n is a, c, g, or t
  misc_feature (183)..(184): n is a, c, g, or t
  misc_feature (189)..(189): n is a, c, g, or t
  misc_feature (195)..(195): n is a, c, g, or t
  misc_feature (197)..(197): n is a, c, g, or t
  misc_feature (202)..(238): n is a, c, g, or t
  misc_feature (245)..(245): n is a, c, g, or t
  misc_feature (251)..(251): n is a, c, g, or t
  misc_feature (255)..(256): n is a, c, g, or t
  misc_feature (258)..(258): n is a, c, g, or t
  misc_feature (262)..(262): n is a, c, g, or t
  misc_feature (272)..(272): n is a, c, g, or t
  misc_feature (277)..(279): n is a, c, g, or t
  misc_feature (284)..(284): n is a, c, g, or t
  misc_feature (293)..(293): n is a, c, g, or t
  misc_feature (295)..(295): n is a, c, g, or t
  misc_feature (303)..(304): n is a, c, g, or t
  misc_feature (312)..(315): n is a, c, g, or t
  misc_feature (341)..(341): n is a, c, g, or t
  misc_feature (343)..(343): n is a, c, g, or t
acattntcttnctctntcatccattttttatttcattttctctatctcttctcacttcaagcccnnccccccgggcncacaccacncnccnnccncnccccccccanncgcnnggaccacaggcnccngccaccangcctggctaantnnnngccccnnnagnagagacgaggcccaccgngnnagccnggacgncnccgcnnnnnnnnnnnnnnnnnnnnnnnnnnnnnnnnnnnnncagcgcngggacncccnncncgancccagccgangcggnnncatgngagtggagngnaggagggnncccagccnnnnaaaccccccctgacacatggcccctntnaaatgtatgttatttaattcccaaacatttggggattttgctaatctatctggtagtttctgcaataattccattgtggtcagagtacattaagacctgaattatttacatttattgagatttgctttgtggcccagaatatgggctatcttggtatgagttacatgttcacttgaaatgtatactgtactctcgtttgatgaaggggttctacaagtgttgattaggtaaaaatggttgatgttatttaagttttttctatctttattgacattctgtggttttggttctagcaattattttaagaggattgttgacatctctgaatattaaattggatttacttctctgcagttctgtcagattttgcttcacatattttggtagtttttattaggtaataataaat

SEQ ID NO: 356621 - DNA, 737 bp, Homo Sapiens
  misc_feature (31)..(31): n is a, c, g, or t
  misc_feature (74)..(74): n is a, c, g, or t
  misc_feature (131)..(131): n is a, c, g, or t
  misc_feature (615)..(655): n is a, c, g, or t
actgttggaacgagtactgagatcacccatnccaaagaggccatgcagttgccatagcatggcttcactgttantattcttcataaaggtaagagtcaaatgagtttcaaagaaaatcaagctgtcacacngagagtcaggaataatatatttaaaatgtaaaaagctcccctagatcacaatcctgtcagtatcattaataaactcagtaatattttaaattaagagatatcctgaaaaatatatataaccttgactatgaagaatatcatgaattgtagaaattctgacatctggcaccaattctcccttaggatgagatgactgtgaagcacagggttcaatatttggagtcactatagcataacgaagcagttcttcatattcttcctaagagaggccaataatcaataatgtagtgtaacagttacaatgttataatatattcaactgaatttgttttaaagaaatttaattaccataatagagtcccatgcttattatattacaaagttttaccacttattccaagcttgagttcctcgagtgcttcttgtgtgatttttatatttatgattaacagtttgaagagggctgggtgcagtgactcatgcnnnnnnnnnnnnnnnnnnnnnnnnnnnnnnnnnnnnnnnnncttgaagcctgagcaacaaagtgagaccccatctctacaataaattttttacaaaaatttgctaggtgtggtggtgtgtgcc

SEQ ID NO: 356622 - DNA, 2386 bp, Homo Sapiens
  misc_feature (1582)..(1582): n is a, c, g, or t
  misc_feature (2117)..(2178): n is a, c, g, or t
  misc_feature (2181)..(2259): n is a, c, g, or t
  misc_feature (2264)..(2264): n is a, c, g, or t
  misc_feature (2266)..(2269): n is a, c, g, or t
  misc_feature (2271)..(2276): n is a, c, g, or t
  misc_feature (2278)..(2284): n is a, c, g, or t
  misc_feature (2298)..(2313): n is a, c, g, or t
gggtccggaattcccgggattgaaacaaaggaccaatgcccagggcggtccttaattcctccctgcagtttgaaactgtcaggttgccgtctaggtagcggttgtgcttgctgaggctgcacttgctgacactgcagctgcgacgcggctaagaggcgcagagcgaggagtcgggatttggtcgcgagcggcgacgagcatttgtgcagaatgtcatcagatgaggagaaatactcacttccagttgtgcaaaatgactccagtcgaggcagttctgtctcttcgaatcttcaggaagaatatgaagaactgcttcattatgctatagtgactccaaatattgaaccctgtgcttcacagtcatctcatcctaagggagaattggtgccagatgtcagaatttctacaattcatgatattcttcatagtcaaggaaataactctgaagtaagagaaactgcaatagaagttggaaaaggatgtgatttccatatttcaagtcattcaaagacagatgagtcatcaccagtgttatcgccaaggaagccttctcacccagtcatggattttttcagttcacatcttttagctgactcttcctcaccagcaacaaattctagtcatacagatgcccatgaaatacttgtgagcgattttcttgtttctgatgaaaaccttcagaagatggaaaatgtgcttgatctttggagttcaggtcttaagacaaacatcatatctgaactaagtaaatggagacttaattttattgactggcaccgaatggaaatgagaaaagagaaagaaaaacatgcagcacatttaaaacaactgtgtaatcagatcaatgaattgaaggagctgcaaaaaacctttgaaatctccattgggagaaaagatgaggtgatttctagcttgtctcatgccataggcaagcaaaaggaaaagatagagttgatgagaacattcttccactggcgaatcggccatgtcagagccagacaggatgtttatgaaggtaaactagctgaccagtactaccagagaactttactgaagaaagtctggaaagtctggcgttccgtagtgcaaaagcagtggaaagatgtggtagaaagagcttgtcaagcaagagctgaagaaagttgtatccagatttccaatgattatgaagccaaagttgctatgttatctggagctttggaaaatgcaaaagctgagattcaaagaatgcaacatgaaaaagagcactttgaagattccatgaaaaaagctttccatgaggggggtatgtgcatttaaatcttgaagccatgactatattttcaaaaacagaaatgatgcagggatagactccacaaataataaaaaggaagagtatggtcctggtgttcaaggaaaagaacattctgctcatttggatccttcagctcctccgatgcccttaccagttacatcaccactgctgccatccccaccagccgccgtcggaggagcaagcgcgactgccgtttccctcagctgcttcgatgacttctaccagggctgcttccgcatcttctgttcacgttcctgtttctgctcnttggtgcaggatctgcagctactgctgcatcagaagaaatgtatgtgccaagagttgtaacctctgcacaacagaaagcaggaagaactattacagcccggatcacaggaagatgtgattttgcttcaaaaaatagaattagcagcagtttagctataatgggagtttctcctcccatgagctcagttgttgtggaaaaacatcatccagtcacagtgcaaaccattcctcaagcaactgcagcaaaatatccccggaccattcatcctgaaagtagtacctcagcttccagatcacttggaaccagatcagctcacacccagtctctcacaagtgttcattccataaaagtggttgactaaagtgaatatgtccatagtggggtcttttaatccctctggtcttaccaagggttagaagtcttttggttttaacttttccatattgttagaacatcatggagacatcatgttcatctgttcaaaattacaagaggctttttcaagctctaccatgctttgtaactatatgtagnnnnnnnnnnnnnnnnnnnnnnnnnnnnnnnnnnnnnnnnnnnnnnnnnnnnnnnnnnnnnngannnnnnnnnnnnnnnnnnnnnnnnnnnnnnnnnnnnnnnnnnnnnnnnnnnnnnnnnnnnnnnnnnnnnnnnnnnnnnnggaanannnnannnnnnannnnnnnaaaaattggggcgnnnnnnnnnnnnnnnnaaaagtttttcaaaactttcttttggggccggggcccccaaaaggaaaggacacagggcaaatattggttccc

SEQ ID NO: 356623 - DNA, 533 bp, Homo Sapiens
  misc_feature (399)..(423): n is a, c, g, or t
agctggtgtagtgagcctggcttggttgtcaaataaaagcttccgtagactcaagttctctgggtgaagcactcaggttcccagggcctgactacttgtggaaaaggtctgtagctcaagggggcccacagttcatcacaatttctcccttcctccaaaacaatgaccattaaaatcccatgaaactcaatgggggcgttaaatttggcagccctagaaagttgtcaggccacccctgcatgaaggctgccccaggagagcagggtgaggctgcagaggcctagcgcacaaaaagcaggaggccttttgtgggctccccaaggcctgtgtgtgcttcagaagcaactggcaggaggttctttgcaatcaaggattcttgcccttagcaagccaggctcnnnnnnnnnnnnnnnnnnnnnnnnntgtaggtgcgcacgtgcacacgtgtgtattgaaaccaaactctagcttatgtgtccatagtggaatttgaaaatggaagcctaaagttgaaaattaaaattatccatgaa

SEQ ID NO: 356624 - DNA, 1512 bp, Homo Sapiens
  misc_feature (21)..(21): n is a, c, g, or t
  misc_feature (1486)..(1486): n is a, c, g, or t
  misc_feature (1491)..(1491): n is a, c, g, or t
cttgagttgaagcactcctangccctggggactatgggggcgtggcttggagtgaggcactctgggactgggcctgtgggtgtctgggggcgtggcttagactggggcaccctgagtgggcctgtgttagtttgggggcgtggcttagagtggggtaccgtgggactgggcctgtgggagcctgggggcgtggcttagagtggggcaccctgggactggaccccgcaggtgcttgggggcgtagcctggagtgagggtttggctggtgtagcttgcgagtgaggccccctggcgtggagtcttgaggcctgctgagggcgtgagctggcatgaggcgaagagagggccatggcaccgactccgagatgggtcaaggacccgtacgggagtcgcaatcctcagaccctcccgcgctccagttccggataagcgagtataagccgctgaacatggcgggagtggagcagcccccgagccccgagctgcggcaggaaggcgtgaccgaatacgaagatggcggggccccggcgggagatggcgaggcgggcccccaacaggcggaggaccacccccagaatcctccagaagatcccaatcaggaccccccagaggatgatagcacctgtcagtgccaggcgtgcgggcctcaccaagccgcgggtccagatcttggttcctctaatgatggctgccctcagctgttccaggagcggtcagtcatagtggagaactcctcaggctctaccagcgcttctgagctcctcaaacccatgaagaagaggaagcgcagggaataccagagcccatcagaggaggagtcggagccagaggccatggagaagcaagaagaaggaaaggacccagagggtactaacccactgctagcgaccccagagagtgaggagtggagcagcaggccagcctgcaacaggtgaggacagaaggaatgctggtcgtgggagtcctacctagaggagcagaaggccataactgctccagtcagcctcttccaggactcccaggcagtcactcacaacaagaattgggttcaaactgggcattgaagttggaaggcattgaccctcaacacccgtccatgtacttcatcctcaccgtggctgaggtatgtggctatcgcctacgcctgcactttgatgggtattctgagtgccatgacttctgggtcaatgccaactcccctgacattcaccctgctggctggttcgagaagacgggccacaagctgcagcctcccaaaggttacaaggaggaggagttcagctggagccagtacctgcgcagacaagagctcaggctgcccccaagcacctgtttgtgagccagagccacagtcccccacccctgggcttccagggtgggcatgaagctggaagctgtttgaccgcatgaacccgttccttgttttgcgttggccagtgtgaccgatgtggttggacagccgttttctgggggcaattttaaaaantgggntgataattattgactaattgg

SEQ ID NO: 356625 - DNA, 776 bp, Homo Sapiens
  misc_feature (35)..(35): n is a, c, g, or t
  misc_feature (119)..(119): n is a, c, g, or t
  misc_feature (701)..(701): n is a, c, g, or t
  misc_feature (735)..(735): n is a, c, g, or t
  misc_feature (769)..(769): n is a, c, g, or t
atttgatctttgtaagaacccagtgtagaataggnatatttaaaatcaacattacccacctccaaggccaacccagagtagtcttgaacctgagtcagcctcagtattgcttgcaaggnagagggaaggggctcattaaaggcctggctcaaaccttagtcttccagactgactagggacgtaagaagacccagggacccaccatgttcctcaaaccatcctattcagtcccaggcctttccagcatagacataaagagccccacccgttactcagtcatgttgccaagtgcaaactgatttacccccagatgaatccctttactgtagcagatccctaacccctaaatttcagccaatttggtagttaattataggagtttattagccaaatgtatgttccgagtaaaagttttgactctttggggaaaatttattttgctgctagcatacaacatttgctatgtatataaacttaagtcaatgccagaaattttaaaaccagctcaaatttataatctgtaatgatcaaatcaaaacatactgtaaactcagagttggaaacgcctggtaatatggttaagtcatgtttaaatatgaatgcaatttaaatgacattggcaatgcctgagatttctttcattgtgaatgattaaaaggcagtccaatatatgaatggatttcatcttacctttctcccgntaattcactaggtgtaacatcttgagtgtaaagncattcacaggcagtttgggttgtggagctagaangagcctc

SEQ ID NO: 356626 - DNA, 1808 bp, Homo Sapiens
  misc_feature (542)..(542): n is a, c, g, or t
  misc_feature (655)..(655): n is a, c, g, or t
atggctggagcgcggcggaggtgagccggccgcccgcccgcagacgccccagcctactgcgcccgagtcccgcggccccagtggcgcctcagctctgcggttgccgaggcccaacggctcggtcgctgcccgccgccagcatgttgggcgccccggacgagagctccgtgcgggtggctgtcagaataagaccacagcttgccaaagagaagattgaaggatgccatatttgtacatctgtcacaccaggagagcctcaggtcttcctagggaaagataaggcttttacttttgactatgtatttgacattgactcccagcaagagcagatctacattcaatgtatagaaaaactaattgaaggttgctttgaaggatacaatgctacagtttttgcttatggacaaactggagctggtaaaacatacacaatgggaacaggatttgatgttaacattgttgaggaagaactgggtattatttctcgagctgttaaacacctttttaagagtattgaagaaaaaaaacacatagcaattaanaatgggcttcctgctccagattttaaagtgaatgcccaattcttagagctctataatgaagaggtccttgacttatttgataccactcgtgatattgatgcaaaaagtaaaanatcaaatataagaattcatgaagattcaactggaggaatttatactgtgggcgttacaacacgtactgtgaatacagaatcagagtccttgtttcttcccctttttcagatgatgcagtgtttgaagttgggtgctttatcccggacaactgccagtacccagatgaatgttcagagctctcgttcacatgccatttttaccattcatgtgtgtcaaaccagagtgtgtccccaaatagatgctgacaatgcaactgataataaaattatttctgaatcagcacagatgaatgaatttgaaaccctgactgcaaagttccattttgttgatctcgcaggatctgaaagactgaagcgtactggagctacaggcgagagggcaaaagaaggcatttctatcaactgtggacttttggcacttggcaatgtaataagtgccttgggagacaagagcaagagggccacacatgtcccctatagagattccaagctaacaagactactacaggattccctcgggggtaatagccaaacaatcatgatagcatgtgtcagcccttcagacagagactttatggaaacgttaaacaccctgaaatacgccaatcgagctagaaatatcaagaataaggtgatggtcaatcaggacagagctagtcagcaaatcaatgcacttcgtagtgaaatcacacgacttcagatggagctcatggagtacaaaacaggtaaaagaataattgacgaagagggtgtggaaagcatcaatgacatgtttcatgagaatgctatgctacagactgaaaataataacctgcgtgtaagaattaaagccatgcaagagacggttgatgcattgaggtccagaattacacagcttgttagtgatcaggccaaccatgttcttgccagagcaggtgaaggaaatgaggagattagtaatatgattcatagttatataaaagaaatcgaagatctcagggcaaaattattagaaagtgaagcagtgaatgagaaccttcgaaaaaacttgacaagagccacagcaagagcgccatatttcagcggatcatcaactttttctcctaccatactatcctcagacaaagaaaccattgaaattatagacctagcaaaaaaagatttagagaagttg

SEQ ID NO: 356627 - DNA, 1143 bp, Homo Sapiens
cggtccggaattctcgggatggctggagcgcggcggaggtgagccggccgcccgcccgcagacgccccagcctactgcgcccgagtcccgcggccccagtggcgcctcagctctgcggtgccgaggcccaacggctcgatcgctgcccgccgccagcatgttgggcgccccggacgagagctccgtgcgggtggctgtcagaataagaccacagcttgccaaagagaagattgaaggatgccatatttgtacatctgtcacaccaggagagcctcaggtcttcctagggaaagataaggcttttacttttgactatgtatttgacattgactcccagcaagagcagatctacattcaatgtatagaaaaactaattgaaggttgctttgaaggatacaatgctacagtttttgcttatggacaaactggagctggtaaaacatacacaatgggaacaggatttgatgttaacattgttgaggaagaactgggtattatttctcgagctgttaaacacctttttaagagtattgaagaaaaaaaacacatagcaattaaaaatgggcttcctgctccagattttaaagtgaatgcccaattcttagagctctataatgaagaggtccttgacttatttgataccactcgtgatattgatgcaaaaagtaaaaaatcaaatataagaattcatgaagattcaactggaggaatttatactgtgggcgttacaacacgtactgtgaatacagaatcagagatgatgcagtgtttgaagttgggttgctttatcccgggacactgcccgtacccagatgaatgttccgagctctccgttacatgccatttttaccattcatgtgtgccaaaccacgagtgtgtcccccaatagatgctggacaggcaactgaaaaataaaattatttctgaatccgccccagatggattggatttttgaaacccggactgcaaaggccccttttgggtgcacccccccggatctggaaaaactgcagtgcaccggggacttccgggggagagggggacaacagagcgtttcctatcccccgggggaccattcgggacctgggcaatgcaaatcagggcgcccggcgggctacaaacctaacagccccccccatttcc

SEQ ID NO: 356628 - DNA, 1078 bp, Homo Sapiens
  misc_feature (10)..(10): n is a, c, g, or t
  misc_feature (820)..(820): n is a, c, g, or t
  misc_feature (903)..(905): n is a, c, g, or t
  misc_feature (907)..(908): n is a, c, g, or t
  misc_feature (912)..(912): n is a, c, g, or t
  misc_feature (943)..(943): n is a, c, g, or t
  misc_feature (947)..(947): n is a, c, g, or t
  misc_feature (950)..(950): n is a, c, g, or t
  misc_feature (953)..(953): n is a, c, g, or t
  misc_feature (955)..(955): n is a, c, g, or t
  misc_feature (959)..(961): n is a, c, g, or t
  misc_feature (966)..(966): n is a, c, g, or t
  misc_feature (971)..(971): n is a, c, g, or t
  misc_feature (977)..(977): n is a, c, g, or t
  misc_feature (982)..(982): n is a, c, g, or t
  misc_feature (984)..(984): n is a, c, g, or t
  misc_feature (991)..(991): n is a, c, g, or t
  misc_feature (994)..(994): n is a, c, g, or t
  misc_feature (1018)..(1018): n is a, c, g, or t
  misc_feature (1021)..(1022): n is a, c, g, or t
  misc_feature (1027)..(1027): n is a, c, g, or t
  misc_feature (1035)..(1035): n is a, c, g, or t
  misc_feature (1037)..(1037): n is a, c, g, or t
  misc_feature (1040)..(1042): n is a, c, g, or t
  misc_feature (1046)..(1046): n is a, c, g, or t
  misc_feature (1052)..(1052): n is a, c, g, or t
gggcggaacnctgccaggcgtccggagcggacttccagggtctctgggtcgccagcgcgcgggcgcgcggctggagccggcgccgggcacggcatcgggggcctggactgcacggcccggcagcaggccggccatggagccaggcagcgtggagaacctgtccatcgtgtaccggagccgcgacttcctggtggtcaacaagcactgggacgttcgcattgacagcaaggcgtggcgggagactctgaccctgcagaagcagctgcggtaccgctttcccgagctggccgaccctgacacctgctacgggttcaggttctgccaccagctggatttctccaccagcggggcgctgtgcgtggccctaaacaaggcagccgccggcagcgcgtacaggtgcttcaaggagcggcgcgtgaccaaggcttacctggcattgctgcgggggcacatccaggagagccgggtaaccatcagccatgccattggcaggaacagcacggagggccgggcccacaccatgtgcatcgagggctcgcagggttgtgagaacccaaagccaagcctcacagatctcgtggttctggaacacgggctgtacgcaggcgatcctgtctccaaagtgctgctgaagccgctcacgggccggacacaccagctgcgcgtgcactgcagtgccctggggccaccccgtggtggggcgacctgacctacggagaagtctcggggccgggaggaccggccgttcagaatgatgctgcacgctttctacctgcgcatccccacggacaccgagtgtgtggaggtctgcacgcctgancccttcctgccctccctggatgcctgctggagccccacacactgctgcagtcgctggaccagctcgtgcaggccttacggggnnncnncgancctgaccccgaggataggggcccaggcaagnagcnctncgnantctnnntgggncgggngggctnttcancncaaaaanctnctgagattaggaaagcggggcctnctnngtggntgtcgggntngannnggancggaantgaaaccgtggggtggggaggggtgt

SEQ ID NO: 356629 - DNA, 956 bp, Homo Sapiens
cgctgccaggcgtgctggagcggagcttccaggtctctgggtcgccagcgcgcgggcgcgcggctggagccggcgccgggcacggcatcgggggcctggactgcacggcccggcagcaggccggccatggagccaggcagcgtggagaacctgtccatcgtgtaccggagccgcgacttcctggtggtcaacaagcactgggacgttcgcattgacagcaaggcgtggcgggagactctgaccctgcagaagcagctgcggtaccgctttcccgagctggccgaccctgacacctgctacgggttcaggttctgccaccagctggatttctccaccagcggggcgctgtgcgtggccctaaacaatggcagccgccggcagcgcgtacaggtgcttcaaggagcggcgcgtgaccaagggcttacctggcattgcttgcggggtgcacatccaggcagagcctgggtaaccatacagccatgccattggcaggaacagcacggatgggccgggcccacaccatgtgcatcgagggctcgcagggttgtgaggaacccaaagccaagcctcacagatctcgtggttctggacacacgggctgtaccgcaggcgaatcctgtctccaaagtgctgctgaaagccgatcacgggccggacacaccaggtcgcgacgtgcactggaagtgcccttggggcaccaccgtgtggggcagacctggacctacggcagaacgcatcgggaccggggaaggaaccgaggcgaaccagaatgctgctggacgcgaatgctacctgcgacattccccacgggacaaccgacgatgtgtgagacggactgcacgcgtgaccccatatacaatggccctcacatgagatgcctgttgagagcccgaaaaaagtaggtagcaagacagcatggaacaagtatcgtgaaggcatagagggacaaaaacgaa

SEQ ID NO: 356630 - DNA, 1079 bp, Homo Sapiens
  misc_feature (837)..(889): n is a, c, g, or t
cggagagcgggcgagcagagacgctttttccatgccaaaagcaggctggtaccggtccggaattcccgggatggcggaagcgctgccaggcgtccggagcggagcttccagggtctctgggtcgccagcgcgcgggcgcgcggctggagccggcgccgggcacggcatcgggggcctggactgcacggcccggcagcagcaaggcgtggcgggagactctgaccctgcagaagcagctgcggtaccgctttcccgagctggccgaccctgacacctgctacgggttcaggttctgccaccagctggatttctccaccagcggggcgctgtgcgtggccctaaacaaggcagccgccggcagcgcgtacaggtgcttcaaggagcggcgcgtgaccaaggcttacctggcattgctgcgggggcacatccaggagagccgggtaaccatcagccatgccattggcaggaacagcacggagggccgggcccacaccatgtgcatcgagggctcgcagggttgtgagaacccaaagccaagcctcacagatctcgtggttctggaacacggggctgtacgcaggccgatcctgcctccaaagtgcctgctgaagcccgctccccgggccggacacaccaggttgcgcgtggcactgcaaaggcgcctggggccacccccgtgggtggggcggacctggaccctaccgggggaagccctccggggcccgggagggaccgggccctcttcaaaatggatgctggcccgccttttctaacctgcggcagtcccccacagggacacccaaagtgcggtgggaaggtcttggcacgaccctgaannnnnnnnnnnnnnnnnnnnnnnnnnnnnnnnnnnnnnnnnnnnnnnnnnnnnaaacctggctgagcagatcgactggaaccaagcgttcctaggccgggcccatatcgggggccaagcccccccaagcccgcggagccccccgacaagataacggggctcccccgaggggactacggaagagcggcctcccccggaaaatccctggtaccagggggagcccgcgaacggggccctcccctcc

SEQ ID NO: 356631 - DNA, 1074 bp, Homo Sapiens
  misc_feature (577)..(577): n is a, c, g, or t
  misc_feature (628)..(628): n is a, c, g, or t
  misc_feature (812)..(812): n is a, c, g, or t
  misc_feature (816)..(816): n is a, c, g, or t
  misc_feature (836)..(836): n is a, c, g, or t
  misc_feature (990)..(990): n is a, c, g, or t
gggtccggaattcccgggatggcggaagcgctgccaggcgtccggagcggagcttccagggtctctgggtcgccagcgcgcgggcgcgcggctggagccggcgccgggcacggcatcgggggcctggactgcacggcccggcagcaggttctgccaccagctggatttctccaccagcggggcgctgtgcgtggccctaaacaaggcagccgccggcagcgcgtacaggtgcttcaaggagcggcgcgtgaccaaggcttacctggcattgctgcgggggcacatccaggagagccgggtaaccatcagccatgccattggcaggaacagcacggagggccgggcccacaccatgtgcatcgagggctcgcagggttgtgagaacccaaagccaagcctcacagatctcgtggttctggaacacgggctgtacgcaggcgatcctgtctccaaagtgctgctgaagccgctcacgggccggacacaccagctgcgcgtcgcactgcagtgccctgggccaccccgtggtgggcgacctgacctacggagaagtctcgggccgggaggaccggccgtntcagaatgatgctgcacgctttctacctgcgcatccccacggacaccgagntgtgtggaggtctgcacgcctgaccccttcctgccctccctgggatgcctgctggagcccccacacactgctgcagtcgctggaccagctcgtgcaggccttacgggccacccccgaccctgacccccaaggataggggccccaggccaggcagccccctccgcactcctgcctggggcccggncggnctcctccacccccaacaagnccccctgaagatgaaggcacagcggggcccctgcctgcaatgggctgcccgaattggaccctggaaaccggacgcttaaaacccctgggggctgggaacaggggggggccaactgcccaaccgggacctctagggaaaggggccaagcaaccgncctgctccctgagtctgggggcctcaagggtccaaggcataatcaggcccccccgggttttcccccagccagaccttccaaaac

SEQ ID NO: 356632 - DNA, 696 bp, Homo Sapiens
ccgggcgcgcggctggagccggcgccgggcacggcatcgggggcctggactgcacggcccggcagcagcaaggcgtggcgggagactctgaccctgcagaagcagctgcggtaccgctttcccgagctggccgaccctgacacctgctacgggttcaggttctgccaccagctggatttctccaccagcggggcgctgtgcgtggccctaaacaaggcagccgccggcagcgcgtacaggtgcttcaaggagcggcgcgtgaccaaggcttacctggcattgctgcgggggcacatccaggagagccgggtaaccatcagccatgccattggcaggaacagcacgggagggccgggccccaacaccatgttgcatcgagggctcgcaggggttgtgagaacccaaagccaagcctcacagatctcggggttctggaacacgggctgtacgcaggcgatcctgtctccaaagtgctgctgaagccgctcacaggccggacacaccagctgcgcgtgcactgcagtgccctgggccaccccgtggtgggcagacctgacctacggagaagtctcgggccgggaggaccggcgttcagaatgatgctgcacgctttctacctgcgcattccccacggacaccgagtgtgttggacgggctgccgcctgaaccttccggcctcctggatggctgctggag

SEQ ID NO: 356633 - DNA, 1216 bp, Homo Sapiens
  misc_feature (46)..(82): n is a, c, g, or t
tgatagatcatatagggcgaattggagcgcactctcggggcggcgnnnnnnnnnnnnnnnnnnnnnnnnnnnnnnnnnnnnnatcaggccaaatcggccgagctcgaattcgtcgagagcgggctggtgaccaagatggcggcggagctggtggaggccaaaaacatggtgatgagttttcgagtctccgaccttcagatgctcctgggtttcgtgggccggagtaagagtggactgaagcacgagctcgtcaccagggccctccagctggtgcagtttgactgtagccctgagctgttcaagaagatcaaggagctgtacgagacccgctacgccaagaagaactcggagcctgccccacagccgcaccggcccctggaccccctgaccatgcactccacctacgaccgggccggcgctgtgcccaggactccgctggcaggccccaatattgactaccccgtgctctacggaaagtacttaaacggactgggacggttgcccgccaagaccctcaagccagaagtccgcctggtgaagctgccgttctttaatatgctggatgagctgctgaagcccaccgaattagtcccacagaacaacgagaagcttcaggagagcccgtgcatcttcgcattgacgccaagacaggtggagttgatccggaactccagggaactgcagcccggagttaaagccgtgcaggtcgtcctgagaatctgttactcagacaccagctgccctcaggaggaccagtacccgcccaacatcgctgtgaaggtcaaccacagctactgctccgtcccgggctactacccctccaataagcccggggtggagcccaagaggccgtgccgccccatcaacctcactcacctcatgtacctgtcctcggccaccaaccgcatcactgtcacctgggggaactacggcaagagctactcggtggcactgtacctggtgcggcagctgacctcatcggagctgctgcagaggctgaagaccacttggggtaaagcacccggagctgtgcaaggcactggtcaaggagaagctgcgccttgatcctgacagcgagatcgccaccaccggtgtgcgggtgtccctcatctgtccgctggtgaagatgcggctctccgtgccctgccgggcagagacctgcgcccacctgcagtgcttgaacggcgtcttctacctgcagatgaacgagaagaaa

SEQ ID NO: 356634 - DNA, 1104 bp, Homo Sapiens
ggcctgggtggcgatttcggcacgaggtgacattgtacagagctgccagcctggtgaggtggtcattcgtgacaccctctaccgccttggggttgctcagatcaagacagagacagaggaggagggtgaagaagaggaggtggccgcagtggcagaataagccaggctgttgtacagggactacaccatctctcaagccatagtaaggcccttgcctgaggcagagctatccaggggacctgcagaagtggtctcctgtggggagggcctctgactgctgggactgaccaaagagcttccattccctgagcatggtgggacccagggtcctcagttctcaaccctccaggggtcaggagtggtaccaggaaacctcttctggccccgagagagcacttgggggacacggtatgtttaatggaggggaggctgagggaaaggctggtagctggtgggttccgaggggcctgctgtgtgggtcagggtggaggtcctgggtgggctaaggcgtaagccccagcactaggtgggaaggctgctgaggtgctctcccacccctgaggagccctggtttcagccccctcactctgatgaattgcttagcctgttgcctttgactaggggcctgggtggcctcattaactctaggggtccctttgggctcttgattctccctgaaggagggatgcatttctctcttgctcttcctgtacccacatttgggggaagctgaggagggaggaacagtcagccacagctctcttccagcactgtcctctccaccccaagctttgaggaagagcatccccttcctcctttccctggccactgctgctgcagccaatatcctctctgggcctgggaccctctccacagaggggatgtggtccctggtcatgacataacctagcagcagtaggaaaaactcccttctatgaaggggaagcagactgggccataaggaaacagcaggactggctcaagtgcccaaggtttgtttagggcctgggaattggccatgtgttaatttattgagtggagtaggtggctttttttccctccctcttcccccaacaagaataaagtttattaaattaaaaaaaa

SEQ ID NO: 356635 - DNA, 1870 bp, Homo Sapiens
  misc_feature (1849)..(1849): n is a, c, g, or t
acgagcggcacgagcacgcaggctgggccgactgaggggctcagaggccaggctctgaggcccacgcagggcctagggtgggaagatggcaggtgggggcggcgacctgagcaccaggaggctgaatgaatgtatttcaccagtagcaaatgagatgaaccatcttcctgcacacagccacgatttgcaaaggatgttcacggaagaccagggtgtagatgacaggctgctctatgacattgtattcaagcacttcaaaagaaataaggtggagatttcaaatgcaataaaaaagacatttccattcctcgagggcctccgtgatcgtgatctcatcacaaataaaatgtttgaagattctcaagattcttgtagaaacctggtccctgtacagagagtggtgtacaatgttcttagtgaactggagaagacatttaacctgccagttctggaagcactgttcagcgatgtcaacatgcaggaataccccgatttaattcacatttataaaggctttgaaaatgtaatccatgacaaattgcctctccaagaaagtgaagaagaagagagggaggagaggtctggcctccaactaagtcttgaacaaggaactggtgaaaactcttttcgaagcctgacttggccaccttcgggttccccatctcatgctggtacaaccccacctgaaaatggactctcagagcacccctgtgaaacagaacagataaatgcaaagagaaaagatacaaccagtgacaaagatgattcgctaggaagccaacaaacaaatgaacaatgtgctcaaaaggctgagccaacagagtcctgcgaacaaattgctgtccaagtgaataatggggatgctggaagggagatgccctgcccgttgccctgtgatgaagaaagcccaggcagagctacacaaccatggaatccaaattaattcctgttctgtgcgactggtggatataaacaaaggaaaagccattttctaattcaaaagttgagtgccaagcccaagcaagaactcatcataaccaggcatctgacataatagtcatcagcagtgaggactctgaaggatccactgacgttgatgagcccttagaagtcttcatctcagcaccgagaagtgagcctgtgatcaataatgacaaccctttagaatcaaatgatgaaaaggagggccaagaagccacttgctcacgaccccagattgtaccagagcccatggatttcagaaaattatctacattcagaaaaagttttaacaaaaaagctcctatgacttctagaagtacatctacttggagaatacccagcaggaagagacgtttcagcagtagtgacttttcagacctgagtaatggagaagagcttcaggaaacctgcagctcatccctaagaagagggtcaggtaaagaagattaggatgccaagacttggcctgcagaatgtcaggaatgtgaattaaaagctgctgtttccagacgctttttattctgagcaccttcactaccttgtatccagttcatctgggaactcctttttgcattttagaaaatggaaagaggcaggaaattatgataaactcatgtttaacagaaagagtttcactgactaaatgtatgtaattatattttgttgttgtagaagaaataaatagcaaatttgtggtattcttttttttaaacctgctctcattcctattaacactaagatcttagatttttatagtgataaatgggttgacatcattgtcatttgtaattgtaaagcctcaaaagacaactgttcctactatgtaattatagacagaaataacaacttctgagtctatcatcattanggccagagatctgatacatgt

SEQ ID NO: 356636 - DNA, 710 bp, Homo Sapiens
  misc_feature (341)..(365): n is a, c, g, or t
  misc_feature (484)..(502): n is a, c, g, or t
gatgtgaatgctttcaagcaaagaaagacggcggctgagctgctccagtcccagggctcccaggctggaggctcacagactctgaagagagacaaagagaagaaaaataatccatggctgtgtactgaatagtattccccgctacagctggactggactccatttagccttttaagccgaggttcctattttaactgacagctttcctttggggtgccaggcagcgaggccccccacccctatcctgccatgtacttcaagctcacttcttctttttgagttccgcaacttgctcctgcctcccagccccactggcactgaccatgaccacctacttctannnnnnnnnnnnnnnnnnnnnnnnngatcacttactttcaaagcacacagtcaaacaaggttatgccaaatttccaggcctttttgaagtattgagaaggggaaggggatttctcacttcaattatagatcataataggaagcnnnnnnnnnnnnnnnnnnngcaaacatatgcacgcacttttcttgttgacaaagcaagaatgtaggtttgctgtgtaggtttggtgctctattgatctggtgagtgaccagagcaagtatgaaggtgatgctgccaaagcacaagccagtttcttgggaaaattcaagttacagtggagtatttttttgaagaccatatgcttggaggtagaaacaaaccaacgacc

SEQ ID NO: 356637 - DNA, 652 bp, Homo Sapiens
acctgggaatgccagggatgcattctgccgagccaacatgacttgttggcttcttgacccagcgggccagacatcaccctcagattctcaggtttctataaaccttggcaggaagagaggagagggcgcgggttggattgtatgccccccaggcatgttaagggggaaattagagaaagggaggcccagctctgttgcgcaggaaaagggtgtctacaggaagcccaaacaggaccctgggtctcatgcagcatgcagcaaacagcagagttaatttttcttctctttgtctctcttcagagtctgtgagcctccagcctgggagccctgggactggagcagctcagccgccgtctttctttgcttgaaagcattcacttcatcatccagggatttcttcttatcctccagtttcttcttctcgtcctggtgcagtttcttcagacggtcaaacttctcgtgcagctctttctctgcctctttgagctccgcttctttctctttgactcgctggacgaacatctgtctcatctcctcttcttttttctggagttcccctaggaactcgttccttttggcctcatatgtctcctgtaaacctgcacagtgccccaaggatactgccgcgccctcatcatcttgttgcctatct

SEQ ID NO: 356638 - DNA, 1013 bp, Homo Sapiens
agcggggatgtgtaacactttctctttgtcggaggagctcctctgtttcctgtgcagtagctcccgttgcggcggcacccgtggcagccctggcggacgcaggagcgatggcagcgaccgatatagctcgccaggtgggtgaaggttgccgaactgtccccctggctggacatgtggggtttgacagcttgcctgaccagctggtgaataagtccgtcagccagggcttctgcttcaacatcctgtgcgtgggagagacaggtttgggcaagtccaccctcatggacaccctgttcaacaccaaattcgaaggggagccagccacccacacacagccgggtgtccagctccagtctaatacctatgacctccaagagagcaacgtgaggctaaagctcacgatcgttagcacagttggctttggggaccagatcaacaaagaggacagctacaagcctatcgtggaattcatcgatgcacaattcgaggcctacctgcaggaagagctaaagatccgaagagtgctacacacctaccatgactcccgaatccatgtctgcttgtatttcattgcccccacgggtcattccctgaagtctctggacctagtgactatgaagaagctggacagtaaggtgaacatcatccccatcattgccaaagcagatgccatttcgaagagtgagctaacaaagttcaaaatcaaaatcaccagcgagcttgtcagcaacggagtccagatctatcagtttcctacagatgatgagtccgtggcagagatcaatgggaaccatgaacgccccacctgccgtttgctgtcattggcagcacagaagaactgaagataggcaacaagatgatgaggggcgcggcagtatccttggggcactgtgcaggttgaaaacgaggcccactgcgactttgtgaagctgcgggagatgctgattcgggtcaacatggaggatctgcgggagcagacccatacccggcactatgagctgtacctcacccgt

SEQ ID NO: 356639 - DNA, 1385 bp, Homo Sapiens
  misc_feature (402)..(402): n is a, c, g, or t
  misc_feature (420)..(420): n is a, c, g, or t
  misc_feature (425)..(425): n is a, c, g, or t
  misc_feature (595)..(595): n is a, c, g, or t
  misc_feature (1015)..(1015): n is a, c, g, or t
ctggaattacagacgcgagccaccgtgcccagcaaagttgactattttaatggctttttaattaagggaatgtggggtaaactccagcaggtctcccaggttcttaagagtcagagggtttgtgaagatcatctgtcctcaccaacagtcccaactgtcttaatgtctttgctggaaccatgcaggatgttgattaagtgttcctggtatacctgtgggaaaacaaaaaacataaccgggagcagccagtacctgcttccgatttgcaaaaacttaaaatcccagttgttaatggaaatcgggcttacttatggccacaactgtgtttctttgaacaagaaccaaaaatctggcggctctatgattaatattttctggaaggaactgagactgggcttcagnttttagatcagctttcancccantcccttggcaacgccccacccctgcagccagatctctgcacctgctcctgctcctccccaggagaaaagggcaccgccttcccagacacccagctagtgctgggtagcaaggttctctccctcctcttagactggtcttgtacccgacgtcgttggcctctgcgctcagntggggctgggcagcatcagcagtgccgcttggtgtttccttcataccagtgttagagatggagcacttagggcagggagaaagccccattggtctatgaatgcagagtttagtaagagataaagggatcactctaagtaggggtcatttatgcagatgtacattttgaaattgttactgtaccatttggtgcttggtatttcggagtagtgttccagagtctcccggggctctttgggagctggggagagccaccactgggtgacacttggatctctctggctccatcccgcccactcaggcagctcccctcaggtccctccgtaggcactgctgtaggtgtgaagatgtgtgtctacttgtgccctcatgtgatgttctaagactaactgcacgctgtgtttgcacgctttctctcgtngctgttgaaacaggcaatgcttcaggaacacagaggttgcattctgctacagccaggacttactcctgctaaagtctcctgttggtgagtagggagcccacaacccctagagatggctcagaggcccagcaggagtcatcggagctgcagtgcccgactagggttgtggaccatgaaagccaggccggtttttggggaattaaaatatttttgccccaggctttccggacccattaagaactttttgtggggacaaactggtcataaagaggttagtgggcgtgctccttttttaaggagaaaaaagtgttttcacccttttttcttaaccccggaaaggctcgctctatttaatttgttcggggatgtc

SEQ ID NO: 356640 - DNA, 2820 bp, Homo Sapiens
  misc_feature (2207)..(2207): n is a, c, g, or t
  misc_feature (2236)..(2236): n is a, c, g, or t
  misc_feature (2242)..(2242): n is a, c, g, or t
  misc_feature (2244)..(2245): n is a, c, g, or t
  misc_feature (2254)..(2254): n is a, c, g, or t
  misc_feature (2258)..(2258): n is a, c, g, or t
  misc_feature (2271)..(2271): n is a, c, g, or t
  misc_feature (2279)..(2281): n is a, c, g, or t
  misc_feature (2300)..(2301): n is a, c, g, or t
  misc_feature (2318)..(2318): n is a, c, g, or t
  misc_feature (2324)..(2324): n is a, c, g, or t
  misc_feature (2327)..(2327): n is a, c, g, or t
  misc_feature (2333)..(2333): n is a, c, g, or t
  misc_feature (2339)..(2339): n is a, c, g, or t
  misc_feature (2375)..(2375): n is a, c, g, or t
  misc_feature (2454)..(2454): n is a, c, g, or t
  misc_feature (2462)..(2462): n is a, c, g, or t
  misc_feature (2466)..(2466): n is a, c, g, or t
  misc_feature (2474)..(2474): n is a, c, g, or t
  misc_feature (2488)..(2488): n is a, c, g, or t
  misc_feature (2511)..(2511): n is a, c, g, or t
  misc_feature (2520)..(2520): n is a, c, g, or t
  misc_feature (2522)..(2522): n is a, c, g, or t
  misc_feature (2531)..(2531): n is a, c, g, or t
  misc_feature (2559)..(2559): n is a, c, g, or t
  misc_feature (2598)..(2598): n is a, c, g, or t
  misc_feature (2602)..(2603): n is a, c, g, or t
  misc_feature (2608)..(2608): n is a, c, g, or t
  misc_feature (2626)..(2627): n is a, c, g, or t
  misc_feature (2642)..(2643): n is a, c, g, or t
  misc_feature (2662)..(2662): n is a, c, g, or t
  misc_feature (2666)..(2666): n is a, c, g, or t
  misc_feature (2668)..(2669): n is a, c, g, or t
  misc_feature (2675)..(2677): n is a, c, g, or t
  misc_feature (2682)..(2682): n is a, c, g, or t
  misc_feature (2689)..(2689): n is a, c, g, or t
  misc_feature (2691)..(2715): n is a, c, g, or t
  misc_feature (2727)..(2727): n is a, c, g, or t
  misc_feature (2818)..(2818): n is a, c, g, or t
ctttcagcctcttcggggacctggagcagcacatgcggaggcagcatgagctcttctgctgccgtctgtgcctccagcacctccagatcttcacatatgagcgcaagtggtactcgcgcaaggacctggcccggcatcgcatgcagggtgaccccgatgacacgtcgcaccgtgggcacccgctctgcaagttctgtgacgagcgctacctggacaatgatgagctgcttaagcacctgcgccgcgaccactacttctgccacttctgcgactcggacggggcccaggactactacagcgactatgcctacctgcgtgagcacttccgggagaagcactttctgtgtgaggaaggccgctgcagcacggagcagttcacccacgccttccgcaccgagatcgacctcaaggcccacaggacggcctgccacagtcgcagccgcgccgaggcacgccagaaccgccacatcgacctgcagttcagctacgcgccacggcactcgcgccggaacgagggggtcgttggtggcgaagactacgaggaggtggacaggtacagccgccagggccgagtggcccgggctggcactcgcggagcccagcagagccgccgaggaagctggaggtacaaaagggaagaagaggaccgagaagtagcagctgctgtccgggcctccgtggccgcacagcagcaggaggaggctcgcaggagtgaggatcaggaggaaggcggtaggcccaagaaggaggaggcagcggcgcggggacctgaggatccccgtggcccccggcgctcaccccggactcagggcgaaggcccaggccccaaggaaacctcgacaaatggtcctgtaagccaagaagccttctcggtgacaggcccagccgccccaggcgccctcccaccacccagcccgaagctcaaggacgaagacttccccagcctctctgcctccacttcctcctcctgctccactgcagcaaccccgggccctgtggggttggcgctgccgtacgccatccctgccagaggcaggagtgccttccaggaggaggacttccccgccctggtgtcctcggtgcccaagcctggcaccgcccccaccagccttgtctctgcctggaacagcagcagtagcagcaagaaggtagcacagcccccactctcggcgcaggctaccggcagcggccagcccaccaggaaggctgggaaggggagcaggggcggcaggaagggcggcccgcccttcacacaggaggaggagggaggagggacggcggcccggccctgcaggagcttctgagcacacgccccacgggctccgtctcctccacactggggctggcctccatccaaccctctaaagttgggaagaagaagaaagtgggctcggagaagccaggcaccacattgccacagcccccgcccactacctgtcccccaggggctttgcaggccccggaagctcctgccagcagagccgaggggccagttgccgtcgtcgttaatggacacacggagggcccggcccctgctcggagtgcccccaaggaaccccctgggctcccaaggcccctggggtccttcccctgccccacgccacaggaggacttcccagcgctcggcggcccctgcccaccccggatgccgccgcccccaggcttcagcgctgtggtgctcctgaagggcacgcctcccccacccccgccggggcctggtgcccccaatcagcaagccgcccccctggccttctctggcccttctgcctaacccccacccggccagtgtccccagccccgccaccaccaccaccacaaaagcacccaggctgctgcctgccccacgggcctacctagtccccgagaacttccgggagaggaaccttcagctcatccagtccatcagggacttcctgcagagcgacgaggcccgcttcagcgagttcaagagccactcaggggagttcagacagggcctgatctccgcagcccagtattacaagagttgccgggacctgctgggggagaatttccagaaagtctttaatgagctgctggtcctgctgcccgacacggccaagcagcaggagctcctgtctgcacacacggacttctgcaaccgcgagaagcctctgagcaccaagtccaagaagaacaagaagagcgcgtggcaggccaccacccagcaggcgggcctggactgcccntgtgtcccccacctccccagcaggtctanagaatngnnataccaaancaanaaacccctccatnctgcccgnnnccaccacttcccctccctnnaagccatcgccaggatnatcacntanctcccnccagcntggccagactttcgcaccgtgagcgtccttcctccntcatctccaggctgccaggcagccaggtaaggcctggtgaggccacttggcctcttggttggccaggcccaccaggaantcaccagnacantccacccnccctgttggcacantcaagcgggagtccacccctgcntcagtggtngnccaatctcngtttgcattcttgtgcttttgggaggtnccaggggagggaagggctgggaagctgggacctgttgtngctnncaaanccagaggtcacagtggcnngatctgggccctccnnaagctgagacaacagcccntgcncnncagagnnnaaagnttcggcncnnnnnnnnnnnnnnnnnnnnnnnnnagatttgttgtntaaacagttggctgtttcatgcttcaagaatgttcaggattaaaagcagacaagaaattgtgctacttgaagttgaatctttttatgaganaa

SEQ ID NO: 356641 - DNA, 463 bp, Homo Sapiens
aggaagtcaccaggacagtccacccgccctgttggcacactcaagcgggagtccacccctgcctcagtggtgggccagtctcggtttgcattcttgtgcttttgggaggtgccaggggagggaagggctgggatgctgggacctgttgttgctggcaaagccagaggtcacagtggcctgatctgggccctcccaaagctgagggctgcagcccgtggggcctcagagctgaaagctgcggcgccactggtgccagagtcagatgtcacagatgtgttgtgtaaacagttggctgtttcgtgcttcaagaatgttcaggattaaaagcagacaagaaattgtgctacttgaagttgaatctttttatgagacaagctgaatctgggatctcaaattgcctctgaccttttataagacagtttatcttcaaataaatttattttgcaataccacgcaaaaaaaa

SEQ ID NO: 356642 - DNA, 507 bp, Homo Sapiens
agcaggcgggcctggactgccgtgtgtgccccacctgccagcaggtgctcgcgcatggcgatgccagcagccaccaggcgctgcatgctgcccgggacgacgacttcccctccctgcaagccatcgccaggatcatcacgtagctcccgccagcgtggccagagctgtcgcaccgtgagcgtccttcctccttcctctccgggctgccaggcagccaggtaaggcctgatctgggccctcccaaagctgagggctgcagcccgtggggcctcagagctgaaagctgcggcgccactggtgccagagtcagatgtcacagatgtgttgtgtaaacagttggctgtttcgtgcttcaagaatgttcaggattaaaagcagacaagaaattgtgctacttgaagttgaatctttttatgagacaagctgaatctgggatctcaaattgcctctgaccttttataagacagtttatcttcaaataaatttattttgcaataccacgcaaaa

SEQ ID NO: 356643 - DNA, 549 bp, Homo Sapiens
ttgcggtggaacagaataaggttcttatcccaccaacctggaataaaacttttgcttggggctatgcagacctcagttgcagactgggaacctatgagtcagacaaggccatgactgtttatgaatgcttgtctgagtggggccagattctctgtgcaatctgccccaaccccaagctggtcatcacgggtggaacaagcacggttgtgtgtgtgtgggagatgggcacctccaaagaaaagggccaagaccgtcaccctcaaacaggccttactgggccacactgataccgtcacctgcgccacagcatcattagcctatcacataattgtcagtgggtcccgtgatcgaacctgtatcatttgggatttgaacaaactgtcatttctaacccagcttcgagggcatcgagctccagtttctgctctttgtatcaatgaattaacaggggacattgtgtcctgcgctggcacatatatccatgtgtggagcatcaatgggaaccctatcgtgagtgtcaacacgttcacaggcaggagccagcagatc

SEQ ID NO: 356644 - DNA, 764 bp, Homo Sapiens
  misc_feature (72)..(163): n is a, c, g, or t
tcattaccgatgcacagccagagaacaacacatcacacacaggaaacagttgtgctcatgtgatgggggccnnnnnnnnnnnnnnnnnnnnnnnnnnnnnnnnnnnnnnnnnnnnnnnnnnnnnnnnnnnnnnnnnnnnnnnnnnnnnnnnnnnnnnnnnnnnagtgcatgctgtgtacagagggtgtcaagaatgcctcctacgtgacggaaagcagatccgtggttgcctgcagactggcaggagcagattccaaaggcacaggaagaagcttgtgggtagaatgtgttcattaccttctgtgcattataccataaaaaagctggtcacaaaaatgcaaaccaaaaacaaaggtgaaactaggataagatttctcaactgtgtgatgggtaaacgtgcagatgcgccgtcatgctttgtttatgaagctgtgggatacaaggactctcatacgtcactgtggaatgcagaacattgcagcctcatggaagaggatttggcagcatctaacaaaacgacatggcattggcccttagactcagcaattctagaatctgcctcaaaaaaactccagcaaagaaatgaaaggattttaggcacagagttcttttcacagcctgcatgtgtttgccacaaagttcttcactggtggggtttgttaatgtgggggaaagagagatcaggctggtacttgtgtctttgtagaaaaggaggcggtaagaaactcccttttgatctgtacccgggcgatattttttccctg

SEQ ID NO: 356645 - DNA, 662 bp, Homo Sapiens
  misc_feature (72)..(163): n is a, c, g, or t
  misc_feature (567)..(567): n is a, c, g, or t
  misc_feature (571)..(572): n is a, c, g, or t
  misc_feature (574)..(574): n is a, c, g, or t
  misc_feature (577)..(577): n is a, c, g, or t
  misc_feature (593)..(593): n is a, c, g, or t
  misc_feature (609)..(610): n is a, c, g, or t
  misc_feature (619)..(619): n is a, c, g, or t
  misc_feature (626)..(626): n is a, c, g, or t
  misc_feature (628)..(628): n is a, c, g, or t
  misc_feature (637)..(640): n is a, c, g, or t
  misc_feature (644)..(644): n is a, c, g, or t
  misc_feature (652)..(654): n is a, c, g, or t
tcattaccgatgcacagccagagaacaacacatcacacacaggaaacagttgtgctcatgtgatgggggccnnnnnnnnnnnnnnnnnnnnnnnnnnnnnnnnnnnnnnnnnnnnnnnnnnnnnnnnnnnnnnnnnnnnnnnnnnnnnnnnnnnnnnnnnnnnagtgcatgctgtgtacagagggtgtcaagaatgcctcctacgtgacggaaagcagatccgtggttgcctgcagactggcaggagcagattccaaaggcacaggaagaagcttgtgggtagaatgtgttcattaccttctgtgcattataccataaaaaagctggtcacaaaaatgcaaaccaaaaacaaaggtgaaactaggataagatttctcacctgtgtgattggtaaacgtgcagatgtgccgtcatgctttgtttatgaagctgtgggatacaaggactctcatacgtcactgtggaatgcagaatattgcagcctcatggaagaggatttggcagcgtctaacaaaactacatggcatttgccctttgactcagcattctagaatctgctcaaaaaanttcnncnaanaaatgaaagactttanggacagagtttttttnnagcctgctntgtttgnanaaattcttnnnntcgngttgtaannnggggaaaa

SEQ ID NO: 356646 - DNA, 411 bp, Homo Sapiens
tgactgtgcccactgtcccccccagcccattcactcctactgatgagacaagatgcggtgattgacagaatccagcttagtgcacagcccagagaacaacacatcacacacaagaaacagttgtgctcatgtgatgggggcctcagcactaggaaggagtggactgttggcgcacgcagcagcttgaataaatctgaaagtcactacgctgcgtaagagaagccaaataaagcgcatgctgtgtacagagggtgtcgagaatgcctcctacgtgacggaaagcagatccgtggttccctgcagactggcaggagcagattccaaaggcacaggaagaagcttgcaggtagaatgtgttcattaccttctgcgcattataccacaaaaaagctgggaataaaaatgctaacc

SEQ ID NO: 356647 - DNA, 1755 bp, Homo Sapiens
  misc_feature (1046)..(1046): n is a, c, g, or t
  misc_feature (1634)..(1672): n is a, c, g, or t
agttcaggtccttgtccacaaccagaggaatacatctgcacacacagagagtgagtaaggcaaagaattttatttagcaacagaagcaaagctctcaactgcgagaggggacccttcggcagtgagtaggggcccaaaggcaggtagcccccacaggactgagtctggggtttttatgggcttagaatggaagcatgcatgctgattggtccatgggtggtctttggaaaaagcaccatttgactggttaaaaggcatcatccagaaggaaccaacagagagagaggagggtaagatgggcacagaggtcctcgctccagtcgtggactctatcgagaactggcagctctgtttttaggctttaaactgtccttggattgaaggtcaggtttcactgaggactgtccctgtctgtctatctgacagaatttgtctgtctcctgttgctatcagtaacattttgcaaaattgtaatacaatattataactaggatatggatattgattcaatcccccaatcgtattcatataacccgagtattacatgtaatcaaggtatatgtgtgagtgtccattaattacaattttatcaccacaataaagatattcaccagtttcaatgccacaaaaatttcttgtgttaaccttttataaccacacccacatcccttcaatcttcccccaactgtttcagttttcaatgtccctgttttctacatgtattggaagtccacaagagaaacagaaatgaataaatactttaaagacaaagttatacctctatggcagccttattggccatgtcagctaactaggccagatagctaccgatatgggtggtctactagcagtgggaaacatatttgcactaggtagttttccaaattctaatttaacaagcagtgatagcatgcctagtgctccaggcatggactagatgctggaaaaataaagatgaataaactacagtaacaagtgggaggcagaaaggcaaagaagcagccacaatgcaggtgatattagtttctttcaaatagcttggtttnctagtacagattaagaagcacggagttggagagatgaaaagatattttaaagagagctacaaattgccaggctctaaaaatgctttgaactggctttacctaaagccagagggattactaccaaaggaactatttaacaaacggcattcaaagaaagaaaccaaacataaaggctgtacgtgtgtgcccgtatgtgtgtgtatgttattcaacatattgaaagattaatcaggagttcagagctttatactgtagaaagaaaaaacctggacattgtataattctgaaatgaaagatgcaaatggcaaaggaagaagtagcaaagagaagttaataagtatctcaaaactgcaaatggctcagattaaaagacaaagttatctatacaaactataatgaggctagtgtatatgtatcaggtacactcctcacctaaaattaggggaaattgatatctcaatttattcaaaaatacttgttgaaaatgcatattggggccagcacctatctcctctaggtgctggacttaaaagggcaagcaagtcacacatgaaaacaatacagcccagtggggtatgcagatgaatnnnnnnnnnnnnnnnnnnnnnnnnnnnnnnnnnnnnnnnttatcaaatggtgttaaaggcaccatgatggaggaagctcagtgagttatggtgcacagaggagtggtggctaaccaagatat

SEQ ID NO: 356648 - DNA, 1436 bp, Homo Sapiens
  misc_feature (1165)..(1185): n is a, c, g, or t
caatttaacccctccctacttcctcttctcccagcatatagccgaacagttctccctggaaagctcctacagctccagtgactactacataattaacaataacttgtagtgatgcaatttaagagtccttttaatgggcagcaatggtagaatgtatagcccatctttctttgtcatctgagaaaagtggcctcatgcagagctgctggttgctgagtgacgctttgttgtttgcaccagacacagtaccagctgcactggcaggtagccgaagtgcaaggagatagctgccaaactatgctatacaaagggagcggtgccagagagaaagggacctttgcatgtgatgacctttgacccccaagccagcatggatcccatattcatcccttccagacaattgcatctttcattccaccacaaactatgattagaaagggaacatttgtgatcagggttggttagcttataagtccccaccaatagagttattggatttttcttccgttttaactgtgacaatattttccttaatctggggtaggaagagataagcaattaaaaaagggaaaattataaaagcaaaacagtaatccagccaatggtgaggggtagggattcagggaaagtgaaaagagtttagataatggccatatggcatttaaaaagtcaaacggaaattgaactctacctgatcatggggaccctcccataaggagactaatagaattgtgcatttttaaggaaattactaactttctcaatactgctatataatacttcctttattccaccagcaaagcttttgtttgggcaacttagattaatgagaaactaacagcttgcatttgaatatgttctagcaagttcacttttgttcttctttgaaaaacatcagtgatctttggaaaacggcttttattttgtgttttaaagccattctccatcaggacctgtgaaaagaagcctcaagctcaagtaaagaccacctcaaagtcacagcaacctttttgaacctaactcttcaccatcttgtctagtgggcaggggaatcagttgtcagcattacatacctaccacagctgcataccagagtgaacctaggaaacgttcccacagcggccagaatataatgatccgaagtatcaaattctacatctttccnnnnnnnnnnnnnnnnnnnnnggtctgtggtgcacgtgggggtagactttgagagcttctccagcagcagaggcgtttctggaacagcccttctttgatctgcctccctatcaaaggcaccgttcctttgaggcgggagaaaaaactgatacctgcaggccagcctgggggagccgcacctgacttcaggctcccatgtgaagccgtctgttctttattttcactccgtatgaagctaatggaatttgcagttgattaacctcaaatctgga

SEQ ID NO: 356649 - DNA, 1068 bp, Homo Sapiens
tgacttgcctaaccaccaccaccttgaatgttctacaagaaacattactgtccctttaaaagacaaaggttaagtggaaagctatttgttaattgggtaatgtgtgtgttttggggacaataaggtttttaaaaaaggcagggggaacattcttataatctttaaataagaggaagtttcttcagctatcctacttgttttgcaaggagcagtagaactactcaaataagggcaatgccacgtagattcttctagacccactgtttttactttcaaggagaagtgcaggacactagcccagaacttctgacgtcatcccccaactatttctgctgtgtgttcctttattcgagcttgtggagaggaatatttctttatgtcctggccaggaacattctaactccccactggcaggacttaagttatgtctttatattttcgcctgtcttttgtaaattgtaaacctgtcccctcataaatagggcatcttcttgtacctgccacatgtcgggccggtcagcacaggttttctgcagggcttctggctgggctggcaaaaagcagcagggagcagggcaaagctttttttctggcctgactcccccttggtgcagcccagcgctgccacctgggtggatggtccccggggccctattcccagttgctccagagccactatttaggatccaggttgtgccaccaagttcaaggctggttgtgatggtgagaacagctgctttcatagaaaaatcatcatgtcctagcacagatggccccaagcaggggaagtacaatactgcaggctgcaaatccatgtcacaggtggcaaccttggtcacagagatcgggggaagggtaatgtttacaaaggaaccttttaaaaaagattttgactggagcacattggagttctcgggagttcccaaagctaatttgtgtctcctctctgactactcacgtagttttgagcaagtgcctaccttgatttttctgtcttttaatagaattgaatcatacttgctacactttccctcatcatttagcattttgagaccttgaccttttacc

SEQ ID NO: 356650 - DNA, 938 bp, Homo Sapiens
  misc_feature (647)..(647): n is a, c, g, or t
  misc_feature (882)..(882): n is a, c, g, or t
tatcgcctgccctggatcgaagtgatgggggatgccaggaggccggagccgagggtccgccggccggggccgccgctcgaggagggctcagcctcctgtcccagggagaatccgaggaatcttctgcacagcatttgcacgccttgaagagaaaacagacttgaaactcccacctgccaactggttacgagagagtgccaaactagggccagcaggaactaccattcttggcaacagcaagaaaagcaagccattttcaagctttggcatggcatatgactttattgattcagtgggaaatgatgaggatgttgactctgactctgaaaacataaaaaaactcctgaaaattccctacagcaagtcgcacgtgagcatggcagtacaccgcataggaaggactctcttactagatgagctagatattcaagaactctgtatgagatcgtctcagactggggactggacatggttgaaagagttttatcaaagactcattgatcagaagtggtcacaggaagaaaaagagcaatacagcactggtatcaaaaggcaattctttatcaagttcttatattacagtatcaatggtgatggagccgctcagcctgtctcattcaccgcagaacagcagggaatcgtccagntcagatcagacaaatgattccgaaggggcttcatggcctgctcccttccaaatgcctttctccagtttctgaagatcccagtgcttccagtcagggtcttaaaaaatgatttggttcggatattctatggacatttggagaaattcatattgttgtgcggttcaacatgcccatattttggggaaggcagataccaaacagtcagctttacgtttaaggataaacaccaaccaantaaagggctaactggaattgactattggtttggcacatttgtatggcaaagtggcc

SEQ ID NO: 356651 - DNA, 2742 bp, Homo Sapiens
ccgggatggaaacgatcctcaggcctgacagccgtttgggtcgctcgaaatcggtttgctgtcctagatcggatgcattcgcttctgatcaagaatctgaagaatgagatcaccaaaaaggtacaggtgcccaactgtgatgagatcttctatgctggcacaggcaatctcctgcttcgagatgcggactctatcacactctttgacgtacagcagaagcggactctggcatctgtgaagatttctaaagtgaaatacgttatctggtcagcagacatgtcacatgtagcactactagccaaacacgccattgtgatctgtaaccgcaaactggatgctttatgtaacattcatgagaacattcgtgtcaagagtggggcctgggatgagagtggggtatttatctataccacaagcaaccacatcaaatatgctgtcaccactggggaccacgggatcattcgaactctggatttacccatctatgtcacacgggtgaagggcaacaatgtatactgcctagacagggagtgtcgtccccgggtactcaccattgatcccactgagttcaaattcaagctggccctgatcaacagaaaatatgatgaggtactgcacatggtgaggaatgccaaactagttggccagtctattattgcttatctccagaagaagggctatcctgaagtggcactgcattttgtcaaggatgagaaaactcgctttagtctggcactggagtgtggaaacattgagattgctctggaagcagccaaagcactggatgacaagaactgctgggaaaagctgggagaagtggccctgctgcaggggaaccaccagattgtggaaatgtgctatcagcgtaccaaaaactttgacaaactttccttcctgtatcttatcactggcaacttagaaaaacttcgcaagatgatgaagattgctgagatcagaaaggacatgagtggccactatcagaatgccctatacctgggtgatgtgtcagagcgtgtgcggatcctgaagaactgtggacagaagtccctggcctatctcacagctgctacccatggcttagatgaagaagctgagagcctaaaggagacatttgacccagagaaggagacaatcccagacattgaccctaatgccaagctgctccagccacctgcacctatcatgccattggataccaattggcctttattgactgtatccaaaggattttttgaaggcaccattgccagcaaagggaagggaggagcactggctgctgacattgacattgacactgttggtacagagggctggggagaggatgcagagctgcagttggatgaagatgggtttgtggaggctacagaaggtttgggggatgatgctcttggcaagggacaggaagaaggaggtggctgggatgtagaagaagatctggagctccctcctgagctggatatatcccctggggcagctggtggggctgaagatggtttctttgtgcccccaaccaagggaacaagtccaactcagatctggtgtaataactctcagcttccagttgatcacatcctggcaggctctttcgaaacagccatgcggctccttcatgaccaagtaggggtaatccagtttggcccctacaagcaactgttcctacagacatacgcccgaggccgcacaacctatcaggctctgccctgcctaccctccatgtatggctatcctaatcgcaactggaaggatgcagggctgaagaatggtgtaccagctgtgggcctgaagcttaatgacctcatccaacggttgcagctgtgctaccagctcaccacagttggcaaatttgaggaggctgtggaaaaattccgttccatccttctcagtgtgccacttcttgttgtggacaataaacaagagattgcagaggcccagcagctcatcaccatttgccgtgagtacattgtgggtttgtccgtggagacagaaaggaagaagctgcccaaagagactctagaacagcagaagcgcatctgtgagatggcagcctatttcacccactcaaacctgcagcctgtgcacatgatcctggtgctgcgtacagccctcaatctgttcttcaagctcaagaacttcaagacagctgccacctttgctcggcgcctactagaactcgggcccaagcctgaggtggcccaacagacccgaaaaatcctgtctgcctgtgagaagaatcccacagatgcctaccagctcaattatgacatgcacaacccctttgacatttgtgctgcatcatatcggcccatctaccgtggaaagccagtagaaaagtgtccactcagtggggcctgctattcccctgagttcaaaggtcaaatctgcagggtcaccacagtgacagagattggcaaagatgtgattggtttaaggatcagtcctctgcagtttcgctaaggccccctttgtgtgcatgggtcagtcaccatatgttccccccagagaatgtgtctatatcctccttctaacagcaccttccccctgcagctactcttcagatctggctctctgtaccctaaaacctagtatctttttctcttctatggaaaatccgaaggtctaaacttgacttttttgaggtcttctcaacttgactacagttgtgctcataattgtccttgcctttccagcttaattattttaaggaacaaatgaaaactctgggctgggtggagtggctcatac

SEQ ID NO: 356652 - DNA, 483 bp, Homo Sapiens
cgtggagacagaaaggaagaagctgcccaaagagactctagaacagcagaagcgcatctgtgagatggcagcctatttcacccactcaaacctgcagcctgtgcacatgatcctggtgctgcgtacagccctcaatctgttcttcaagctcaagaacttcaagacagctgccacctttgctcggcgcctactagaactcgggcccaagcctgaggtggcccaacagacccgaaaaatcctgtctgcctgtgagaagaatcccacagatgcctaccagctcaattatgacatgcacaacccctttgacatttgtgctgcatcatatcggcccatctaccgtgggaaagccagtaggaaaagtgttccattcagtgggggcctgctattcgccctggagtttcaaagggttcaattctggcaggggttcaccacagtggacaggagatttgggcaaagatgttggtttggttttaagggttcaat

SEQ ID NO: 356653 - DNA, 914 bp, Homo Sapiens
agtcccaccccaaatctttgtgctcatcatctgtatcccctccctgggcatcattttgcccatcaactatactggatctgttctggactggagcagtcactttgctcggaccaccattgtcaatgtctccacagagagcaagctcctgtggctgcatagcctgctgtccttcttctacttcatcaccaacttcatgttcatggctcatcactgcctggggtttgcgcccaggaatagccaaaaggtcacaaggacactaatgatcacctatgtgcccaaggacattgaagacccagaactcatcattaagcattttcacgaggcctatccaggcagtgtcgtgacaagagtccacttctgctacgacgtcaggaacctgatcgacttggacgatcagaggcgccatgccatgcggggccggctttctatacagccaaggccaagaagactgggaaggtgatgatcaggatccacccctgtgcccgactgtgcttatgcaagtgctggacctgcttcaaggaggcggatgcagagcactattacagcgagctagaggagcagctaacggacgtagttcaacgtccgagctcaaccgcgtgccgctcaagcggctggacctgatctttgtcaccttccaggactccaggatggccaaagcgtgtccgaaaggattacaagaatgtccagtgtggtgcgcaaccccagcagtcctcagtgaccaccatagttgaaacattattactgggaggggtacctatagcgcccttcatcccctaagaccatttttaggaaaccacctttttgtgccccgcttattttggacgggcccgctttatcgcatcaacacccttcctcttcttcctttgtttcagattaccactcctgcatatcgaacactatacatgcaagacctc

SEQ ID NO: 356654 - DNA, 820 bp, Homo Sapiens
  misc_feature (673)..(673): n is a, c, g, or t
  misc_feature (676)..(676): n is a, c, g, or t
  misc_feature (690)..(691): n is a, c, g, or t
gaatttctgccgaaaactgattccatcttatcggatccaacagaccacttggggattgaattcatggagagtgaagaagtttatcaaaggcaggtgctgtcaatttcatgtatcatctttggaattgtcatcgtgggcatgttctgtgcagcattctacttcaaaagcaagaaacaagctaaacaaatccaagagcagctgaaagtgccacaaaatggtaaaagctacagtctcaaagcatccagcacaatggcaaagtcagagaacttggtgaagagccatgtccagctgcaaaataaaacaaaggtggaaaggcatcctgtgactgcattggagaaaatgatggagtcaagttttgtcggcccccagtcattccctgaggtcccttctcctgacagaggaagccaggctgtcaaacaccacaggagtctatcctcttgctgcagcccaaggcaaagaagtggcatgctccataagaatgccttcagaaggacaccccccgtcaccccgaaataggctaagtgggaattgtgggaccagcatatcagcaactcgaagaatacaaggatcccagaccaggatacgataccttgccaagggtaggtcttaaaacagcagtggaatttagggagggtgtctttaatgccatagctttaaagttaaagttttaaantgnccctggggggtttnnattcattgatttattcattaactgggctatatatgcttactgccatctttgttctaccgaaaggtgaaccaactttgatgtatagttgtgatggaaaataggtatcagggaaacattagattagaaaga

SEQ ID NO: 356655 - DNA, 1698 bp, Homo Sapiens
  misc_feature (84)..(84): n is a, c, g, or t
  misc_feature (203)..(203): n is a, c, g, or t
  misc_feature (232)..(232): n is a, c, g, or t
  misc_feature (1451)..(1451): n is a, c, g, or t
ttagggcacaagccagaggcaggcaatccagcccaaagaaccagctataagcgggggcttcctccccttccttcaacacagttnggggctttgtcaccccagcacacctgggccctgcacttcagacgttgggtgtgagcttctggggaaagaagtgtggccctcagggaaggtgtaggcgctcctggctcctggcagactcntggccaaggcctggcctgtgtctgcttcnggagccatgcgctgcctgtgctgggatgaatgcatggcccctgcatccttaccccctcctcagagcccacaagcttccgagtgcgtcatcttcattattggccacaggaaacgacttcttggagtaagtgactggtgctccgaggcccatctggacaaaagcaggatccggggtggacgcagaagagcaggcccggagccctgcaccccagccttccctccccatgcgctccacatgcgtcctttgttcagcctctccatttagctctcactttctggatgcagccaggcaccaccttccttccaaaagccttgtttctcagaaaacctttctgcctcctagaaacccaggattccgaggaggaggagggctggccttcctcttgggactattgatcagggctgtcagttcccagctctgtccaatgctctgaactggggacagtccgcatgcagctctgaggacccagatgctgtcactgggtcctggtgagtctgaaaacttgggatgtcggcaccacggtgagagcagagtctgcccggtgctgtggcaggcaaaagaccgtctcggttttcactgcagggacttacccagccaggtgtgtgtgtctgagccctgccattcggaggcatcaccgagaggttctggtctcccctgcccaggccctgcctcctggccccactgcaggaagcttgagcagatctgaagctcgcctcagaggaagatcccatccaggggaggccctgtctgcagaaagcagagaacttggcttctcctcatttgttgttagggccagtccctaagggactgcctcctaggagtcggagggtccgtggaaatggtctcctcctgcacatctgtgctgctgtgactgggtgcaggtctgagcagaggctttcggagtgagctgagcaggcgagcccgagcacggcctctcagggagcgagcccataggctggggagccgtccctggagatgcccctgggctccttgcggggcatggctgagttcctgcctgtccttggcaggcccgcagtggtggggtggctcaggcagttacccttttcacaaccagtgctgctgggggtgaaggcaacgggtgggtgagcacggacagtgtgagccacgtggccgggagctgggccagcttgctgtatgtgcacatcgtttccatgtgtgcagcagaaattggcgtctctgcacaaagctgattttagtntttctcaccttttcttgctcagcttaaaataggcctctcttcagggacaaggtggccttataccaagccaaagtgctgagggcgcagggagacccgcgagacagggccccctgaagtcctggcggtttctagccagcctcttgaaattgacttgaaggtgtttaccttgcagattattttttccaacttcccacactctgcttcccgcactctgtccttcctcaaggctggcacgctcatcagttga

SEQ ID NO: 356656 - DNA, 1073 bp, Homo Sapiens
taggaaaaagagcctacatgcactaacgcccttgaaagattctatgcagcactcaacagccacccgtccgctcactctagcaatagcagctgcccaaactctcctgggagcaggagcagcacctaccctcactctgccaccagcgtagacccaggaagccctttccagatgccagctgatacgcccgcacctgcttacctgccttctgaagaccccatgacccaggatggctctcagccgatggacacaaacatgatggcgcctcccctgccctcagaaatcaacagaggagaagaccagacgggggcttactgaggaaccaaaacactggtgctcatattgtctactagtgacgctcaacaatcgtgctggggtgaagcgttcaagtgcctcctccatcaagtgtgtttcggtggatggtcttcactgatccttcctaacaataagaaccgtttctgccttgggctgctctccaatgttaaccggaattccactattgaaaacaccaggcggcataattggaaaaggagttcatctttattatgttggaggggaggtgtatgccgaatgccttagtgacagtagcatctttgtgcaaagtcggaactgcaactaccatcatggatttcatcctactactgtttgcaagatccctagtgggtgtagtctgaaaatttttaacaaccaagaatttgctcagttattggcacagtctgtgaaccatggatttgagacagtctatgagcttacaaaaatgtgtactatacgtatgagctttgtgaagggctggggagcagaataccaccgccaggatgttactagcaccccctgctggattgagatacatctgcacggccccctccagtggctggataaagttcttactcaaatgggttcacctcataatcctatttcatctgtatcttaaatggccccaggcatctgcctctggaaaactattgagccttgcatgtacttgaaggatggatgagtcagacacgattgagaactgacaaaggagccttgataatacttgacctctgtgaccaactgttggattcagaaatttaaac

SEQ ID NO: 356657 - DNA, 1615 bp, Homo Sapiens
  misc_feature (224)..(225): n is a, c, g, or t
  misc_feature (253)..(253): n is a, c, g, or t
  misc_feature (914)..(915): n is a, c, g, or t
  misc_feature (927)..(927): n is a, c, g, or t
  misc_feature (930)..(930): n is a, c, g, or t
  misc_feature (985)..(985): n is a, c, g, or t
  misc_feature (988)..(988): n is a, c, g, or t
  misc_feature (1010)..(1030): n is a, c, g, or t
  misc_feature (1093)..(1093): n is a, c, g, or t
  misc_feature (1114)..(1114): n is a, c, g, or t
  misc_feature (1123)..(1123): n is a, c, g, or t
  misc_feature (1130)..(1130): n is a, c, g, or t
  misc_feature (1140)..(1140): n is a, c, g, or t
  misc_feature (1178)..(1178): n is a, c, g, or t
  misc_feature (1182)..(1182): n is a, c, g, or t
  misc_feature (1187)..(1187): n is a, c, g, or t
  misc_feature (1192)..(1193): n is a, c, g, or t
  misc_feature (1199)..(1199): n is a, c, g, or t
  misc_feature (1210)..(1210): n is a, c, g, or t
  misc_feature (1215)..(1217): n is a, c, g, or t
  misc_feature (1225)..(1225): n is a, c, g, or t
  misc_feature (1229)..(1229): n is a, c, g, or t
  misc_feature (1232)..(1232): n is a, c, g, or t
  misc_feature (1238)..(1238): n is a, c, g, or t
  misc_feature (1242)..(1242): n is a, c, g, or t
  misc_feature (1250)..(1277): n is a, c, g, or t
  misc_feature (1283)..(1283): n is a, c, g, or t
  misc_feature (1290)..(1290): n is a, c, g, or t
  misc_feature (1296)..(1297): n is a, c, g, or t
  misc_feature (1318)..(1318): n is a, c, g, or t
  misc_feature (1332)..(1332): n is a, c, g, or t
  misc_feature (1386)..(1485): n is a, c, g, or t
  misc_feature (1584)..(1584): n is a, c, g, or t
  misc_feature (1595)..(1595): n is a, c, g, or t
  misc_feature (1601)..(1601): n is a, c, g, or t
cggtgtggggaaccgcggaaccggtattgggtttcagccccgaaacgggcgggcctcggggcgggccccgggccggccaggattatgaaccagccaaacgggctggcgcgggctgcctcctggccggccttaaaggcctgagcgtcgcggccgcgggggtggccccttttatctcaatgaagcccagtgtctgacagtatgaagtgctttccttccgctcatcnncggccctgggctgcgccaggggagttgngtgtgcaggtaaaaagtgctccctcccacccttcagacaggtccccaaaccctgcggcctgcgcggaattcctgcattgtcattgcgggcccacccactgttcaggctgagagcggtccccgccccaaaccggcgcttcgccggcgccaagatagaaatgggtcgcccggctggtaaagaggctgccctgcaaccctgggctggagtattgctgtggtcctggatttctggactttatttgcgttctcaagtggcgaagtgttcctcaacctggacccacatcagaagcaggttctccgagcccctaagcagcggcgtgacaaagtaattgtttaccctggaaatagactgttattttttaaaaattattgtcagggcttgctttaatgttcttaatgtttttgtatgagatcctccatgtgagatttgaaaagatccactatgcgggtcatctaaccggtcactagacattgatcccacacttactacgtcgagcacagtggacactgggaatacatggatggacttatactagccctaaaataactccttttctattagaactttactaggtaaaggtatttgaatgtctgaactccatgtttagaaggagtcattggttttaaggctctgccctagtacacctgtaagagcatttgcnnaaaattgcctgnccnttgtatgttatctctgtcacttcatatttgaaaatcacttgctagaatatggccngcncaatgctgttatgctcgtgcgnnnnnnnnnnnnnnnnnnnnntttgctctctattggccttccggttcgacgtctggaagcctttggcggctggcccctctgcgntccggtctcgccttcgcgttncctggctgngtccccntcggcccttnccttcccccccgtgggtctccgtttccttctctgtccnatgnggatnaaagnncttagngttgttattgngcttnnncgggctgnctcntgnccaatngccncgcatcannnnnnnnnnnnnnnnnnnnnnnnnnnnatgttnattgttntcaatnnccccctttcccgctcaccccnttaatatctgcccnccctctagaagtgatgggcctaaagaactcttggagctaaaattctttgtcccnnnnnnnnnnnnnnnnnnnnnnnnnnnnnnnnnnnnnnnnnnnnnnnnnnnnnnnnnnnnnnnnnnnnnnnnnnnnnnnnnnnnnnnnnnnnnnnnnnnnaattagccaagcgtggtggtgtgtgcctatagtcccagctatttaggaggctgaggtcggcgaggatcacctgagtccaggaggtcgaggctgcagtgnactgcgatcangccacngcccactccacgcc

SEQ ID NO: 356658 - DNA, 1637 bp, Homo Sapiens
  misc_feature (6)..(6): n is a, c, g, or t
  misc_feature (13)..(13): n is a, c, g, or t
  misc_feature (18)..(18): n is a, c, g, or t
  misc_feature (39)..(39): n is a, c, g, or t
  misc_feature (42)..(44): n is a, c, g, or t
  misc_feature (47)..(47): n is a, c, g, or t
  misc_feature (55)..(55): n is a, c, g, or t
  misc_feature (64)..(64): n is a, c, g, or t
  misc_feature (69)..(69): n is a, c, g, or t
  misc_feature (71)..(71): n is a, c, g, or t
  misc_feature (86)..(86): n is a, c, g, or t
  misc_feature (93)..(93): n is a, c, g, or t
  misc_feature (99)..(99): n is a, c, g, or t
  misc_feature (103)..(103): n is a, c, g, or t
  misc_feature (109)..(109): n is a, c, g, or t
  misc_feature (116)..(116): n is a, c, g, or t
  misc_feature (125)..(125): n is a, c, g, or t
  misc_feature (128)..(128): n is a, c, g, or t
  misc_feature (143)..(143): n is a, c, g, or t
  misc_feature (145)..(150): n is a, c, g, or t
  misc_feature (153)..(153): n is a, c, g, or t
  misc_feature (156)..(156): n is a, c, g, or t
  misc_feature (200)..(200): n is a, c, g, or t
  misc_feature (216)..(216): n is a, c, g, or t
  misc_feature (245)..(245): n is a, c, g, or t
  misc_feature (273)..(273): n is a, c, g, or t
  misc_feature (283)..(283): n is a, c, g, or t
  misc_feature (289)..(289): n is a, c, g, or t
  misc_feature (300)..(300): n is a, c, g, or t
  misc_feature (341)..(341): n is a, c, g, or t
  misc_feature (364)..(364): n is a, c, g, or t
  misc_feature (374)..(374): n is a, c, g, or t
  misc_feature (376)..(376): n is a, c, g, or t
  misc_feature (451)..(451): n is a, c, g, or t
  misc_feature (455)..(455): n is a, c, g, or t
ccaccnggggcgncggangagacgaggtggttcacgcanttnnnaanctgcaggntccaggcanagganangaggagatgtcaggnatcaganactgancctncttggngcccgcngggccaaanggngggggccagggtttntnnnnnnccnggnccctgtttacccacaagggtgcccagaggccaccctctgcatcntcctttcccctcaggntggagtccaggcccaaaggggtcagattntgcagaggccaaagaggacactcagganggtgacactncctcanccagccaaggnccccctgcctcgagaggaggcagcagaggaagagcaaacantttaacacaggctgtggcgatcngccccacagnanacacggcacacagagggcctcaggcacagctccccttctcagagcaaaacccaactagacacaaggtccagctcntgcncacagccacagaaacgcgggccacaggcttgcttgggctggcacctactggttctcttccctgctggcagcatgaagggaaaagacacaggagggctcagctgggctcttagactggcccaggctgagtcctggtcccagccaacatctgacaaaggaaacaccccaactggaggagacaaaaggggtgtggctcacatggagcacgctgtcaccgtcctgagggcttgcccatggagaagacagcaccctgggtactgaaggggaacggtggggcaggaaccaggaggtgagctgggactaggtacttgctgctggccaggtactcacagcgtctggtaggtgctgtccttggccttgaggaagtgcagcacaaagaaagccaccgcctgtaggctcaacaccagcacgacacctccgataaagctggccccgtcaaatccagggctgtgggcctcagggactggggggctccctgcaggggtgaggcagggcaggggtcatagcagtcactgtgaaccaggatcccagtcctaccctcataactggcacaagtaacctggaggccccggtcctcaatatggggtgcttaaaccctgggctccgtttagtccagatcccgcaggcagttgggaagcgcctggtgggaggaacagtggcaggggagggtggggtgctgtccagccctggctctgctcctggcttgctctgtggcttttatgccacccacattctctctgggcctcatgatcacatggtccaattggtggcttggaccagtgactgggctcccaccctccctgggcctcaccagcccaatagggtgaagacagagccagaactcagaccctgccctgctcacaattcctttcagccttggacctcagggttcagagccaagatgcagacgatataggcccttttcaggactcctaagccctaagacctcagtgtcacccaatgtcagagccctcagagagggaaagagcaggggggagaaagtgaaggccccaactggtaccctgctaagtggggtagcgaggactgcacagtgggtgtcagggggaacattgctgagggacacgctttggccaaagtcaccttcacagaacataggccagacttaacccaagggtcccctgaaccattttcttctgccccctttaaaaggtaggggctttag

SEQ ID NO: 356659 - DNA, 2237 bp, Homo Sapiens
  misc_feature (23)..(23): n is a, c, g, or t
  misc_feature (109)..(109): n is a, c, g, or t
  misc_feature (134)..(134): n is a, c, g, or t
  misc_feature (387)..(387): n is a, c, g, or t
tcttggaattgaactggaaacanttataagaactcctaacccgcctatgttgaaaaacgacccatgagggtagatcccgggaaaaaagaaccaaaaactgattggtganccttaagattgcccaacattctaanattcccactaaagctcagatctcacaaagagggaaaaacctgggtgaaaaaaaacaagcatggcacaaatatgtcatctttccagatagcaagcagcctgttcccgctgcctcctttggccacagttaatgctccacataggcctcctatgggatgggtgagccccagccgaaagctgcctgacagtgctagtgtcagacacgtacagaaggctcaggctcgttataccatatccccagccaatccagctctntctccgaaggaaaaaggatggagagaaaaaagacacatagacaagtttaactctagtacttaagaacatgtggaagaaacaattcaagttacagaccaggaatccccagtgtggggaacaggtcagagaacaccaaacatgtcaaatattaacttatttaccaaatatgggattgaaggaaggcaggttacatttttgtaaatcctggagattttgtacagaagcagagacccttccactccctcctccctagactcgaccaggtgactttccagtttgaagtattatgacacaccaaaatgggatatcagaataaccaccgagaaaaatgagcttgtactctgcctggggcttgggagagaaagggctttgccatgctcttcaaattctcgtgttctggtccctacagaaagaatagctgcttgagttacccagcttttcctgtgagatcctagttctttgttccagtggcccagaaagcttaatgttcagcactacgcagctttctttgccccaagactatccccagatcaaggtagggctggtctccttggtactgtttcccttttaaaaaatactcaaacaatcctttcccacccattccccaaagaccccaataaaataacatgggagcagcagctgcttctacagttttgttttgaaatggtgttagataaaataagggaataaatagagaatgggtaagaggcaggacctctagcgcctgtcacactgccagagggagttctaaggaagaatcttcagggggccgatcctcattctgctgggaggtcttcaccatcccacagccctcttcattgtccgtgcggaaggggaggcttgagggggaccaggaagggtggaagtcttcattttcaggctcctcagggttacaatcttcgggcaatagagcttctagggtgggtgttttccccacctctgatttacagagggcagctgggtctgtggagctacaagccacgagtgaggtaacagggagagagaagacattcagatccttctcctttgggaaagaggctgagccttcttccgtaccaggctctcctttcactcccaagactggcctctgctccacttgataatagaccaggggcccactgttcaagtaggatgggctgttcaccgttgaggcagttgggtggtctgagttctcggtaaaacacaggacagaggagcctgggggcagctgagcctggatgagaatgggggctgtaaggcctgggcacagctcttcggggacagccagaggctcctctaggatgcacacacccaggctctcgatgctcgagtccaggctggcactagagccgctggaatcttcttctgccttgagccgctccagttcctctgcactctgcaggtgcatcactgctgtctcattctcagcaatgaactcctggaagtcctgggtctcagagccctgtgctcctgtcaggctgcaactggcagtcggggagggctcctcatctggggctgctgggcggctcacctgccgcttgctctccagctccagcttcataatggcgtggaggtaatgagtccggacccggattggattaaattcaatggcgtcctgccatgttcccacagccatccctgggagcagccacattggaaaggacatgcgaaccactgacctggcatttaatcccagccttggctgcaggcacacgctttctgggtcacaattacagtgcggagttaccacccaccttcttccccgtgaacgggcggatggctcgaaagttcttggctttttttcagaatatatttccgtgggacccccaaaagcccctctacaaggggcccgttcctccttttgttgtgca

SEQ ID NO: 356660 - DNA, 1316 bp, Homo Sapiens
  misc_feature (997)..(997): n is a, c, g, or t
  misc_feature (1017)..(1017): n is a, c, g, or t
  misc_feature (1027)..(1027): n is a, c, g, or t
  misc_feature (1032)..(1032): n is a, c, g, or t
  misc_feature (1034)..(1034): n is a, c, g, or t
  misc_feature (1063)..(1063): n is a, c, g, or t
  misc_feature (1065)..(1065): n is a, c, g, or t
  misc_feature (1070)..(1071): n is a, c, g, or t
  misc_feature (1073)..(1073): n is a, c, g, or t
  misc_feature (1117)..(1117): n is a, c, g, or t
  misc_feature (1130)..(1130): n is a, c, g, or t
  misc_feature (1144)..(1144): n is a, c, g, or t
  misc_feature (1191)..(1191): n is a, c, g, or t
  misc_feature (1195)..(1219): n is a, c, g, or t
  misc_feature (1223)..(1223): n is a, c, g, or t
  misc_feature (1226)..(1226): n is a, c, g, or t
  misc_feature (1230)..(1230): n is a, c, g, or t
  misc_feature (1233)..(1233): n is a, c, g, or t
  misc_feature (1236)..(1236): n is a, c, g, or t
  misc_feature (1244)..(1244): n is a, c, g, or t
  misc_feature (1253)..(1253): n is a, c, g, or t
  misc_feature (1257)..(1257): n is a, c, g, or t
  misc_feature (1260)..(1260): n is a, c, g, or t
  misc_feature (1263)..(1263): n is a, c, g, or t
  misc_feature (1266)..(1266): n is a, c, g, or t
  misc_feature (1280)..(1280): n is a, c, g, or t
  misc_feature (1282)..(1282): n is a, c, g, or t
  misc_feature (1289)..(1289): n is a, c, g, or t
  misc_feature (1295)..(1295): n is a, c, g, or t
  misc_feature (1297)..(1297): n is a, c, g, or t
gaccatgggccaggctggttgacccgagcctcccttagttttggagacagcagacacgggtgggagagggagacagcacaatcagtcctctccctgaaggcacagaaacatctgtgaagaggacaggggacaggccctcaagcaaggccccacacagttctggcaataacatggattccaaggtggtagatgacggcacgggctcacgcccatgcgaatgggaccaattggcagaatggaataagcacagaaccacccaaaataacaaccactgcagtaacaccaaacagaactgggttgttcagaaaatgacagaagcccatgttaccaccattaattgtttgttacatgctgctgcagaaaataaaattattttggtagagggaaatattgtgtgtcccagctttcagacacagatgcagtttggcgacaaaatagagattaggtcaataaagggccctctggtcttcatgccttgtgtccagggctggccgtgtgcctgatattcttagaatgaatgctatggatgaccttcttcctttgataaatgaaattgcttggctcacacactttttaatgtggtttttatagagtctttcagaggaaaggagaaagagaaagcgcgagcgagtctgtggctgcctttcttgaaaatcactgtgggccacagcggaactctgaaagtgacagtgtgaagtcattcttgggcttgccgttttggatggcagatgggaagcaggtgcgtttctgcaggatgagctgaaaaaaaggggctttaattaaagaacacgctcacggcatccaaaagatcttgaattgccaccgtgtgggcccgcctttccccttccccacaatctttttaactcttttaatggtgggtcattgtcctccctgcagcccaaagcaatgatgccggtgctattattttcattgtggacaaattgtctgcagagatattaccatgcaaatggagccttctatggccactgtgcaattnaaatagttttcagagaaggngcctcagctnctgcntntctttaattttttctgggacccagccttntngtcanntnttgtccctgccgctgctttttacaccgactttttattcctcccngcttccagagatnaggattccttttanttcatcacattattacattttcacttcccctgcaaattctggatttnttannnnnnnnnnnnnnnnnnnnnnnnngggngcnatanatnttnctttgttnactaaatantccnaangtnagntttttacacactantntccagcntgcctntntgggttgcctcatgagctg

SEQ ID NO: 356661 - DNA, 1476 bp, Homo Sapiens
  misc_feature (99)..(145): n is a, c, g, or t
  misc_feature (610)..(610): n is a, c, g, or t
  misc_feature (1273)..(1367): n is a, c, g, or t
  misc_feature (1370)..(1386): n is a, c, g, or t
atctctttgtctctctggccgcctctgcctccatctctgtgtgtctgcgtcttcgtccctgtctctgagtttcggcttgggtgtctctctcctaccccnnnnnnnnnnnnnnnnnnnnnnnnnnnnnnnnnnnnnnnnnnnnnnngcagcgccctccccgtctctgtctctctgagtccctagctcgctccttctctaaatctgtgtccctaaagccccctgcgtctctctgactctccctgcatctccctcccctgtctgtgaatttctctgtgtccatcttctgtcctctccctccggtccctggctccctgccgtgcttcctctggtcccgagtctccccttcatctcccgcctggccctcctccctgtggccacctcctccctgcggcctctcggggcagggtgggcgcctgggcgtgctgcgcgcgccctcatgtggccggcagacgctgcgtgtgagcgccaaaaggggagtgctggggagcgggggacgctggtgttcgcggtgacactgggaaatggcgtgtgacacctggaggctgtgtgagtgtgtactgccgggagacggcgtgagacatctggagagtgtgtgagttgtgtactgccngtgatggtgtgtgactccagggagattctgtaagtgtgaactgctgtgagatggtgtacaacgccaggaaacttgtgtgagtgtcgactgccgtgagatggtgtgcagtgccagaaccaggacaccatgagtgtgtactgccatgatggtgtactggtgagatggtgtgtggtgctgggagtctgtgtgtgactgattgatatgagattatgtgcgacaaggagagactgagtgggactgcatatgtcagagatgacatgtcgctgactgtgtgtgacactgagattactggtgatgctgagagattgtgggtgactgtgtgtgctgatgaaaggttatgtgtgatcgggtgtgggagagacactctttggggctctgtatgggacattgagagaccgtatgtgggagtgagagaccgtgtgtgacggtgcgtgtgagggggcagtgtgtgtggctgtgtgcaacatggtgagcatacggtgctgtgtgtgtcacagaagtagattctgtgtgagagagagtgagactgatgactgatgtacactgagaggtggtgtgggcaggtgtcatgagaggcacatagggggcctgggtgggacagacacagtgagtgtcagtctgtgttggccactctgtgtatggcttgtgaaaaagtgcgtgatnnnnnnnnnnnnnnnnnnnnnnnnnnnnnnnnnnnnnnnnnnnnnnnnnnnnnnnnnnnnnnnnnnnnnnnnnnnnnnnnnnnnnnnnnnnnnnngtnnnnnnnnnnnnnnnnngccgtctctaccaaaataaaaataaaagaaattaaccaggtgcggttatgtacctctggtgtcccagctactggggaggcttgagggtgg

SEQ ID NO: 356662 - DNA, 2142 bp, Homo Sapiens
  misc_feature (2111)..(2111): n is a, c, g, or t
tgttcatctggaacctggatctaaggagggaagaggcgttgcccctgctggcatagtcaggtaccagcccagccaggtattgaacgggctgagcttttcatgatggttcctgctgacctggaaacatcttaaatggaagggcgtgagcgcttggtccatgcagtgaagctcttccaacctgggtcaacgaaaacggagaagaaatggcccaagaaatagatctgagtgctctcaaggagttagaacgcgaggccattctccaggtcctgtaccgagaccaggcggttcaaaacacagaggaggagaggacacggaaactgaaaacacacctgcagcatctccggtggaaaggagcgaagaacacggactgggagcacaaagagaagtgctgtgcgcgctgccagcaggtgctggggttcctgctgcaccggggcgccgtgtgccggggctgcagccaccgcgtgtgtgcccagtgccgagtgttcctgagggggacccatgcctggaagtgcacggtgtgcttcgaggacaggaatgtcaaaataaaaactggagaatggttctatgaggaacgagccaagaaatttccaactggaggcaaacatgagacagttggagggcagctcttgcaatcttatcagaagctgaacaaaatttctggggttcctcctacttccacctcctgttcagcgagagccagtgcagccgcagtcctggcaggaaggtcagtgcaccaaatattctgaaacctctcaatcaagaggatcccaaatgctctactaaccctattttgaagcaacagaatctcccatccagtccggcacccagtaccatattctctggaggttttagacacggaagtttaattagcattgacagcacctgtacagagatgggcaattttgacaatgctaatgtcactggagaaatagaatttgccattcattattgcttcaaaacccattctttagaaatatgcatcaaggcctgtaagaaccttgcctatggagaagaaaagaagaaaaagtgcaatccgtatgtgaagacctacctgttgcccgacagatcctcccagggaaagcgcaagactggagtccaaaggaacaccgtggacccgacctttcaggagaccttgaagtatcaggtggcccctgcccagctggtgacccggcagctgcaggtctcggtgtggcatctgggcacgctggcccggagagtgtttcttggagaagtgatcatttctctggccacgtgggactttgaagacagcacaacacagtccttccgctggcatccgctccgggccaaggcggagaaatacgaagacagcgttcctcagagtaatggagagctcacagtccgggctaagctggttctcccttcacggcccagaaaactccaagaggctcaagaagggacagatcagccatcacttcatggtcaactttgtttggtagtgctaggagccaagaatttacctgtgcggccagatggcaccttgaactcatttgttaagggctgtctcagctctgccagaccaacaaaaactgagactgaagtccccagtccttgagaaagcacgcttgccccccagtggaaacactcatttgtctttcagtggcgtaaccccagctcagctgaggcagtcaagcttggagttaactgtctgggatcaggccctctttggaatgaacgaccgcttgcttggaggaaccagacttggttcaaagggagacacagctgttggcggggatgcatgctcacaatcgaagctccagtggcagaaagtcctttccagccccaatctatggacagacatgactcttgtcctgcactgacatgaaggcctcaaggttccaggttgcagcaggcgtgaggcactgtgcgtctgcagaggggctacgaaccaggtgcagggtcccagctggagacccctttgaccttgagcagtctccatctgcggccctgtcccatggcttaaccgcctattggtatctgtgtatatttacgttaaacacaattatgttacctaagcctctggtgggttatctcctctttgagatgtagaaaatggccagattttaataaacgttgttacccatgtctacganaccaaaaatccagcccccaagcgatacctgt

SEQ ID NO: 356663 - DNA, 1227 bp, Homo Sapiens
  misc_feature (921)..(921): n is a, c, g, or t
  misc_feature (958)..(958): n is a, c, g, or t
tcttcaaagaggacaacatttatttagttgtatgtaaataaaaattacttggatacatgaggggaaaacgataaagcacatgatataaatatacaattaaccctttataatatcttcaaacaacggcaaataacataaacaggaaatatttgcagtaattctttacagtattctcttttactctgttgtcaacatgaatactgcaagcaggtctttattttttttgacaatgggaacttccactcattcggtagaagtcaccactttcaaaacatagtaagtcaacacacaactgtacaaactgaacgtgagcaagtctaacttagatgtaattagagttgagtcattggataaaaagttcatattgatgatacacaaccagcagtgcaagcattcaaatacattggctatagcaccatttaaaatatttaacactgcctcttgttagtttgatgttgtcggaaaatgaaagtaatgaagcaatgtagtttttaaaacatacaacatgtgtttcaatctaatcatcctaattctatggtaaattacacagagagagatagaggagggagcattgcctcagctttaagattatctttatcaaaatagagagctggattctttaacagcagccaaagctgtaatgataacacataggttgttgtgttgaaccaaatggagtatgacatgcaatctattgtctataataatttacaggcaattcccgagtcattggaggtaatattaagtatatatattaaccatgcttttgtctctcctttccattagctgccttttattattttggtggtcctttcattacacaaccactcccactatacattagagcaggaaataatggagatggaacaaaaagagaacttgtccattgaatcacttgttaacagctcagaagggcatggntgagtataactgaaactgctggctaaaattacgcttngggtggcattgtttgattccaattcctagtagcattcctgcgtctatttgtgaaggataattgagaatgggctgtattcacttttagggtaaattgacctaagaacactggcatgatattcaagggatttgtgtgtgttgggatgatcaaattggggagtagaaatttaaataggccttaaactatttggaaacaagttaggcaagccagaaatttccaatgatctggggagaactatcctgcaatctgaaaaaccgttgggcttaaaa

SEQ ID NO: 356664 - DNA, 2632 bp, Homo Sapiens
  misc_feature (515)..(515): n is a, c, g, or t
  misc_feature (2041)..(2093): n is a, c, g, or t
  misc_feature (2143)..(2143): n is a, c, g, or t
  misc_feature (2151)..(2151): n is a, c, g, or t
  misc_feature (2172)..(2172): n is a, c, g, or t
  misc_feature (2272)..(2272): n is a, c, g, or t
  misc_feature (2288)..(2288): n is a, c, g, or t
aaaaatgatggtgctttctcaccgacaccacggaccgcaaaaagaacagctggtaccggtccggaattcccgggatcgaggaggtggcagtcaaggccgcccggctggaccctgagaaggacccggcagtgacagcggagcaggtgtgccaggaagcccggctctttggagccctgcagcaccccaacataattgcccttaggggcgcctgcctcaaccccccacacctctgcctagtgatggagtatgcccggggtggtgcactgagcagggtgctggcaggtcgccgggtgccacctcacgtgctggtcaactgggctgtgcaggtggcccggggcatgaactacctacacaatgatgcccctgtgcccatcatccaccgggacctcaagtccatcaacatcctgatcctggaggccatcgagaaccacaacctcgcagacacggtgctcaagatcacggacttccggcctcgcccgcaagtggcacaagaccaccaagatgagcgctgcggnggacctacgcctggatggcaccggaggttatccgtctctccctcttctccaaaagcagcgatgtcctggaacttccgggtgctgctgtgggagctgctgaccggggaggtcccctaccgtgagatcgacgccttggccgtggcgtatggcgtggctatgaataagctgacgctgcccattccctccacgtgccccgagccctttgcccgcctcctggaggaatgctgggacccagacccccacgggcggccagatttcggtagcatcttgaagcggcttgaagtcatcgaacagtcagccctgttccagatgccactggagtccttccactcgctgcaggaagactggaagctggagattcagcacatgtttgatgaccttcggaccaaggagaaggctttgagcataagatcacagtccaggcctctccaactctggataagcggaaaggatccgatggggccagcccccctgcaagccccagcatcatcccccggctgagggccattcgcctgactcccgtggactgtggtggcagcagcagtggcagcagcagtggaggaagtgggacatggagccgcggtgggcccccaaagaaggaagaactggtcgggggcaagaagaagggacgaacgtgggggcccagctccaccctgcagaaggagcgggtgggaggagaggagaggctgaaggggctgggggaaggaagcaaacagtggtcatcaagtgcccccaacctgggcaagtcccccaaacacacacccatcgcccctggcttcgccagcctcaatgagatggaggagttcgcggaggcagaggatggaggcagcagcgtgcccccttccccctactcgaccccgtcctacctctcagtgccactgcctgccgagccctccccgggggcgcgggcgccgtgggagccgacgccgtccgcgccccccgctcggtggggacacggcgcccggcggcgctgcgacctggcgctgctaggctgcgccacgctgctgggggctgtgggcctgggcgccgacgtggccgaggcgcgcgcggccgacggtgaggagcagcggcgctggctcgacggcctcttctttccccgcgccggccgcttcccgcggggcctcagcccacccgcgcgtccccacggccgccgcgaagacgtgggccccggcctgggcctggcgccctcggccaccctcgtgtcgctgtcgtccgtgtccgactgcaactccacgcgttcatctgctgcgctctgacagtgacgaggccgcaccggccgcgccctccccaccaccctccccgcccgcgcccacacccacgccctcgcccagcaccaaccccctggtggacctggagctggagagcttcaagaaggacccccgccagtcgctcacgcccacccacgtcacggctgcatgcgctgtgagccgcgggcaccggcggacgccatcggacggggcgctggggcagcgggggccgcccgagcccgcggccatggccctggccctcgtgaccttctggacttnnnnnnnnnnnnnnnnnnnnnnnnnnnnnnnnnnnnnnnnnnnnnnnnnnnnnagttcccaggccgccccaccaccctaacctttgccccgagacctcggccngctgccantcgcccccgcttggacccctngaaactggtctcttcggccggacactcaccatctcgcctcccagcaggccagacactccggagagccctgggccccccagcgtgcagcccacactgctgnacatggacatggaggngcagaaccaagacagcacagtgcccctgtgcggggcccacggctcccactaaggcctgcccaccaccgcccgcctgggcagccatgaatgtagcgccccaggccctgccccagcccgccatgccacaaggtgggggaggccctgggcaggatgttcactctatttattggggaaggagggaggggggggacacttaacttattcctttgtaccccagggggtggagccctgtgcccaccctgcactggggggagggtgggcagggatactcagggacagggcatcatgggggatttggcacaaaatggagcattaaaggtaacccctgccccctaccgtaaaaa

SEQ ID NO: 356665 - DNA, 1157 bp, Homo Sapiens
  misc_feature (852)..(888): n is a, c, g, or t
ggtccggaattcccgggatggcgtatggcgtggctatgaataagctgacgctgcccattccctccacgtgccccgagccctttgcccgcctcctggaggaatgctgggacccagacccccacgggcggccagatttcggtagcatcttgaagcggcttgaagtcatcgaacagtcagccctgttccagatgccactggagtccttccactcgctgcaggaagactggaagctggagattcagcacatgtttgatgaccttcggaccaaggagaaggagcttcggagccgtgaggaggagctgctgcgggcggcacaggagcagcgcttccaggaggagcagctgcggcggcgggagcaggagctggcagaacgtgagatggacatcgtggaacgggagctgcacctgctcatgtgccagctgagccaggagaagccccgggtccgcaagcgcaagggcaacttcaagcgcagccgcctgctcaagctgcgggaaggcggcagccacatcagcctgccctctggctttgagcataagatcacagtccaggcctctccaactctggataagcggaaaggatccgatggggccagcccccctgcaagcccccagcatcatcccccggctgagggccattcgcctgactcccgtggactgtggtggcagcagcaattggcaacagcacgggaggaagtgggacatggaaccgccgggggcccccccaagaaggaaaaactggcccgcgggccagaagaccggaccgaacgcgggggcccagctccaccctgcataacgaccgggtgcgaggacacggaaagctgaacggggctgggggaagggaaccaacaggtgnnnnnnnnnnnnnnnnnnnnnnnnnnnnnnnnnnnnnaaatacatccactgccccctggtttttgccaacttccatgagatgggaggagatctccggaaggcccacgatgcaaggcccctaccttgtccccccttccccaatttcaaacccgctgctacccccttaacggccacttgccctgccaaatcccctccccgggggtgcgcctccattcccctttttccccgccctacccacctttctctcacatcctcctatatccttcaattttttcctcccgtttttttcgtcactccctcccctcc

SEQ ID NO: 356666 - DNA, 1701 bp, Homo Sapiens
  misc_feature (54)..(54): n is a, c, g, or t
  misc_feature (74)..(277): n is a, c, g, or t
  misc_feature (1259)..(1294): n is a, c, g, or t
atttaaaaaaaagggcccctttgcaccgagaatgaaagggaaaggggaagaaanaagcgcatggagagcccccnnnnnnnnnnnnnnnnnnnnnnnnnnnnnnnnnnnnnnnnnnnnnnnnnnnnnnnnnnnnnnnnnnnnnnnnnnnnnnnnnnnnnnnnnnnnnnnnnnnnnnnnnnnnnnnnnnnnnnnnnnnnnnnnnnnnnnnnnnnnnnnnnnnnnnnnnnnnnnnnnnnnnnnnnnnnnnnnnnnnnnnnnnnnnnnnnnnnnnnnnnnncaccccagcttaacccacattccttaaccataacttcagcttattttgagcaagcattgtgtctaaatcatagttctattcccagacacctagtatacagtatgacaaatagtaaacatacattaaacatttgttgaataagtacaaaagcagagaagtaaaatagtttatattagtaataatactggcagttgagaaacagatttcttcactgatttcctgcctaactcactaaactcaaattttatgcagcaccatttgcagaagaagtttaattttaatattgcaaaattaaagcttaacagtttctatttttaaacctacaaatggccaaaagatattttaagaaaatttagtgaagaatttggaagataaaaagattttggttgaccttgtattgaaaaaagataattgaaaagataaagtatttaaaaaggcttatcacagttcctggcatagagtaagtcctcagtggtgttaattgaacttagttgtctctcctcctcaaaaactgatttttccaaatttgcctattctctctattttcctattttgcaaaagggagggtgataaaaacccacttgccacgtacgcacacaaaaaaggaggcatggccaaacatagagacatagccctgtttagtttaatgttaaatctgaaaaacgcagcaaaatggaattagtttttattcaagtaaatataggctatgttttagaagcttggtccagaggagttagtgtaaatttctgtcatttaggtaaaacagcccctctttagaaccaggttgaactatggctagctttggcagggacaatgtaaaccaataataagaacaattagggttgtaatcaactttagaatgccaactagaggattacttgccagagtacatgcaactttacttggataccacagtgtttactcacagtgacactttcacagaaagagatcacgattcaggaagatcagtactagtacttcnnnnnnnnnnnnnnnnnnnnnnnnnnnnnnnnnnnnatgcatggctggtggaaattttatcatacaagacatagtcaaggcaaacaagtacaagtaccattagaagatgagaaagagaagatacagaaacaaaggttttatttttctgtgcaaatatgtaaaagccatagtcacacacatgcagctggaaaatacagaagaataaaaagaaaagggaaaacattttttaaagtcagataccttatgacaagaagacatttggaaaacagaaaagcaactgacaattacagtgacaacagaggcatcagaattgtacacagaaagaaattgtgagtgaatatttcttaaccacatttggtagagaacatattacatttggaacagcctgtaagtacataagtacaggtatgtctagaagggagtaaatgtgaaaactatacata

SEQ ID NO: 356667 - DNA, 1679 bp, Homo Sapiens
  misc_feature (195)..(205): n is a, c, g, or t
  misc_feature (447)..(634): n is a, c, g, or t
  misc_feature (994)..(994): n is a, c, g, or t
  misc_feature (1000)..(1000): n is a, c, g, or t
  misc_feature (1008)..(1008): n is a, c, g, or t
  misc_feature (1018)..(1018): n is a, c, g, or t
  misc_feature (1022)..(1023): n is a, c, g, or t
  misc_feature (1068)..(1068): n is a, c, g, or t
  misc_feature (1072)..(1073): n is a, c, g, or t
  misc_feature (1075)..(1076): n is a, c, g, or t
  misc_feature (1078)..(1078): n is a, c, g, or t
  misc_feature (1080)..(1080): n is a, c, g, or t
  misc_feature (1082)..(1082): n is a, c, g, or t
  misc_feature (1085)..(1085): n is a, c, g, or t
  misc_feature (1094)..(1094): n is a, c, g, or t
  misc_feature (1096)..(1097): n is a, c, g, or t
  misc_feature (1101)..(1101): n is a, c, g, or t
  misc_feature (1106)..(1106): n is a, c, g, or t
  misc_feature (1112)..(1112): n is a, c, g, or t
  misc_feature (1118)..(1118): n is a, c, g, or t
  misc_feature (1120)..(1120): n is a, c, g, or t
  misc_feature (1159)..(1159): n is a, c, g, or t
  misc_feature (1182)..(1182): n is a, c, g, or t
  misc_feature (1189)..(1189): n is a, c, g, or t
  misc_feature (1203)..(1203): n is a, c, g, or t
  misc_feature (1485)..(1541): n is a, c, g, or t
  misc_feature (1564)..(1579): n is a, c, g, or t
tccatctcacttgggcttataaagagcccattttaatatcttgtacaaaaggaaaaaaaggttcccattgttgaaaccaaaggcagaatttaggcttttcagtccctatgttctcaataagaggaagccaaagcaatgggtttgatatttaaaagtgtcatttttcatgcaaaggaactctttttcctttgtttnnnnnnnnnnncaaggttaacattctctgcacccagtaagtgaatggggggcaaaacatggctggccagtactattttagccaaataagagttcaaacctacgagctgtgagtatgtcaccagatttaacaccttacttccttatctattcactcaatattttgtgagatgctcgccaggaaacctagtttgcatagagtatgactccacttatatttttgtctatctcttcgaacttataaagtgggatttnnnnnnnnnnnnnnnnnnnnnnnnnnnnnnnnnnnnnnnnnnnnnnnnnnnnnnnnnnnnnnnnnnnnnnnnnnnnnnnnnnnnnnnnnnnnnnnnnnnnnnnnnnnnnnnnnnnnnnnnnnnnnnnnnnnnnnnnnnnnnnnnnnnnnnnnnnnnnnnnnnnnnnnnnnnnnnnnnnnnnnnnnnnntccacctcaaaaaaatatataaaataaagtgggattcatccaagagcttggacatgattaactagtgacaaggagatatgtttacgccattattatcctccttacttggtagggtacaacagaaacagaacaacaagggtgacagccttttgctcaagtcaaaaagaaaataagtccctcatcttagtttaaagttgttcattcagtagtacagacttgcatttgaagacttattcttgatcttctgtagctttgacagcaaggacatcactacaatgggtacagaaataacacattctgatccttgctgagatccttgtatgggcctatcttaaatctagcctattgtctgtcttaccnttagantgttatangtagaaaacngganntggctacccaagcaagaggaaggacatagatcacacacgccacgnccanncnngncnanagntcaaagagnannccangaccngtctgntctagncntggctaacttgaatatttagccaggtctctgcatcttantcagtcagaaaacagacacagantcagatnactcaaaggatgtnacttgcttgagtaatccatgggcctcgctttaactttgtagatccaggaacagaattaagcaaacagttcggtatacactgccaaatttcttagggaaaaagagggcaaggcagaaggaggaaattggcatttggctcaaatgaccaaattatttaaggtctctacacttcactttgcaccaagtaaacccaagaatgattataattcagctacgtgtggtggtgcagatcagtagtcctagctattcaggaggctgaggcgggtggattggttgagcccannnnnnnnnnnnnnnnnnnnnnnnnnnnnnnnnnnnnnnnnnnnnnnnnnnnnnnnngaacaaggccctgtctcaaattnnnnnnnnnnnnnnnngaagactctaattctatgagtggcagggtcctagaattatcaaaaatgggttatcaaacccatatgcagaccaaggatgtactaaggaaaaaggaagttt

SEQ ID NO: 356668 - DNA, 2037 bp, Homo Sapiens
gcggggggtcggggtccctccccctggcgctggctcaggaatccgccgaagggcgggcggaggcgccgtgggtgggccgcgccgcggcaggcgggcgggcggggtggcgcttcctggggccgcgcgtccagggagctgtgccgtccgcccgtccgtctgcccgcaggcattgcccgagccagccgagccgccagagccgcgggccgcgggggtgtcgcgggcccaaccccaggatgctcccctgcgcctcctgcctacccgggtctctactgctctgggcgctgctactgttgctcttgggatcagcttctcctcaggattctgaagagcccgacagctacacggaatgcacagatggctatgagtgggacccagacagccagcactgccgggatgtcaacgagtgtctgaccatccctgaggcctgcaagggggaaatgaagtgcatcaaccactacgggggctacttgtgcctgccccgctccgctgccgtcatcaacgacctacacggcgagggacccccgccaccagtgcctcccgctcaacaccccaacccctgcccaccaggctatgagcccgacgatcaggacagctgtgtggatgtggacgagtgtgcccaggccctgcacgactgtcgccccagccaggactgccataacttgcctggctcctatcagtgcacctgccctgatggttaccgcaagatcgggcccgagtgtgtggacatagacgagtgccgctaccgctactgccagcaccgctgcgtgaacctgcctggctccttccgctgccagtgcgagccgggcttccagctggggcctaacaaccgctcctgtgttgatgtgaacgagtgtgacatgggggccccatgcgagcagcgctgcttcaactcctatgggaccttcctgtgtcgctgccaccagggctatgagctgcatcgggatggcttctcctgcagtgatattgatgagtgtagctactccagctacctctgtcagtaccgctgcgtcaacgagccaggccgtttctcctgccactgcccacagggttaccagctgctggccacacgcctctgccaagacattgatgagtgtgagtctggtgcgcaccagtgctccgaggcccaaacctgtgtcaacttccatgggggctaccgctgcgtggacaccaaccgctgcgtggagccctacatccaggtctctgagaaccgctgtctctgcccggcctccaaccctctatgtcgagagcagccttcatccattgtgcaccgctacatgaccatcacctcggagcggagcgtgcccgctgacgtgttccagatccaggcgacctccgtctaccccggtgcctacaatgcctttcagatccgtgctggaaactcgcagggggacttttacattaggcaaatcaacaacgtcagcgccatgctggtcctcgcccggccggtgacgggcccccgggagtacgtgctggacctggagatggtcaccatgaattccctcatgagctaccgggccagctctgtactgaggctcaccgtctttgtaggggcctacaccttctgaggagcaggagggagccaccctccctgcagctaccctagctgaggagcctgttgtgaggggcagaatgagaaaggcaataaagggagaaagaaagtcctggtggctgaggtgggcgggtcacactgcaggaagcctcaggctggggcagggtggcacttgggggggcaggccaagttcacctaaatgggggtctctatatgttcaggcccaggggcccccattgacaggagctgggagctctgcaccacgagcttcagtcaccccgagaggagaggaggtaacgaggagggcggactccaggccccggcccagagatttggacttggctggcttgcaggggtcctaagaaactccactctggacagcgccaggaggccctgggttccattcctaactctgcctcaaactgtacatttggataagccctagtagttccctgggcctgtttttctataaaacgaggcaactggaa

SEQ ID NO: 356669 - DNA, 418 bp, Homo Sapiens
tccattgtgcacccgctacatgaccatcacctcggagcggagcgtgcccgctgacgtgttccagatccaggcgacctccgtctaccccggtgcctacaatgcctttcagatccgtgctggaaactcgcagggggacttttaccattttagcccaggggcccccattgacaggagctgggagctctgcaccacgagcttcagtcaccccgagaggagaggaggtaacgaggagggcggactccaggccccggcccagagatttggacttggctggcttgcaggggtcctaagaaactccactctggacagcgccaggaggccctgggttccattcctaactctgcctcaaactgtacatttggataagccctagtagttccctgggcctgtttttctataaaacgaggcaactggaaaa

SEQ ID NO: 356670 - DNA, 2019 bp, Homo Sapiens
  misc_feature (231)..(232): n is a, c, g, or t
aaggtcccaggggtgagctagtttatccccacggacgtacataggataccccaccatagggtggtggtttctgcccaggggggccccccccgcgtttcacctcaccgctgaggcgggggggcgcttcctacagatatacgcgggtgatagtgtgctcaaaggtgtgttatttttcccccccatggaggagccgcacgacacttcattcacagacccccaataggagaggcnngacgcattaacaagaggcgcgggagagagaagggcctcaatgttattgttttaccggcgggggggcccctgctgtttactagcaccaaggggggctttccccaagggtgggagtaacgccaggggtgtttaaccgcgaggggcgcccccatttcgacccttggggggctccaacggttgaggaggcagcattgtttccaggggccacctttcacccgggggggctcagggtgagagccaggcggttccgggcaccattcagccgggggttccgctgagagcaggtgttcccgggacccttcacctggggctcaggtgaagagcaggtgttcccgggccccttcacctggggctcaggtgagagcaggtgttccgggccccttcacctggggctcaggtgagagcaggtgttccgggccccttcacctggggttcaggtgagagcaggtgttcccgggccccttcacctggggctcaggtgagagcaggtgttcccgggccccttcacctggggctcaggtgagagcaggtgttctgggcccctgcatctgaggcctgggagttgaccctgacttcctggccccagaaagaaaagggaaaacacagagatcacaggagaagggacacaagcggggagggtcgcaggctgccccaaagcccagctccaggctcaggaaagcccctccccactcaccccttccggagggcctgggtctgcggaggaacggggcttagggggtctccgagggttagagtgctccaggctcgggtggggaggaggaagatgtgttcgggtgctgagggcctcctgcgttgggcccagagggccaggctgcggccactgccaggtgggcagctcatctctctggcagcagcacgaagaaggcagccttcaggaagcggccgaagctgcagagtgcagccaccagccagtgggagcggaggccagggtctgtgctgaccacacacttgaggacatcagtccatccgccgcgtctccgcagccaggttgccagggtcttgcgcacgaactcccccaggcagtccacgagggcgtggaccatggcaggctgggcctgcctcacacagtccacggccagccccgcggccaccgcatacagggacaccaccttgccccacgtgatgcctgcagagaagatgtggccagccacggccaggaacgcatcggtcaccacaggctcagactgcagggagatgtgcagctgacgcgccacgttgcggtagacgctgggccggatcatctccagctcatcgcccaggcgcagcagcaccgcgcacacctcagccaggcgtcccgggaccggcgcggcacgctcgggcgcgctccaggagaggccggcgcgcagcagccgcgcgtgcacgtactcccggcccagcgccttggcctgggccaccagctccttgtctgtgggcgagcggtcaaaggcgtccatgatctcggcggcgaagaccgaggagcgccgcagcacctccatggcggcgacgcgggtggggggcgccgcacctctcccgccgcatggcgcgggcgccggggtggagttctggcttcaggatctgctcgccgccgacgacgacctcgacccttccattcagacccgcgaggacgcgcgccccgccccggcgcccgccccgtccacgcccgagccgggagcgccaggtccacggggcttcccgcgctcttggggggctcctgccgcggcgtcgggggcctgggcagcgaggtgggcagcgcgcgactcccagctggcgagaggctgggcttggggc

SEQ ID NO: 356671 - DNA, 2030 bp, Homo Sapiens
  misc_feature (198)..(198): n is a, c, g, or t
  misc_feature (1417)..(1481): n is a, c, g, or t
  misc_feature (1889)..(1900): n is a, c, g, or t
aatacaaagggcaccgtgcgtaccagaacacgtctccagactctggaaagaacctctacgagcgaagaagacaacccaattttcaaatggaccccggggaacacccaggcggctggggctggctctactgtccccagctgcttctgtccttgcgagggagccgtctccaggccgtggtcgccttctccgggcgcatcncaggaaactcgctcggtcctccttaaagcggggaagctcggaaagcgtctcccccgactccgctccccagggtttgccttttcccgttagaaggcccaagccccaagcccagcctctcgccagctgggagtcgcgcgctgcccacctcgctgcccaggcccccgacgccgcggcaggagcccccccaagagcgcgggaagccccgtggacctggcgctcccggctcgggcgtggacggggcgggcgccggggcggggcgcgcgtcctcgcgggtctgaatggaagggtcgaggtcgtcgtcggcaggcgagcagatcctgaagccagaactccaccccaggcgcccgcgccatgcggcgggagaggtgagcgcggcgggcgtggcgtccgtgccggggtgcccggggtgccacggcgaacggcgaggccggggacacgcgcgcaggacgccagcagcggaggtgggcggccccgggccggggccgggagggccgggtcctggcagtcgccgtgggggacgcgctgggctgtgccctccgcccccgccgcccacgcactcgtcttcgagggcgggcccggcggccccggagcaaaccgccgtctccccgcggccccaccggtccctggcagcctcggggaatgtctgtagctgaattcgggctctgaaagaaggtggcgctgggtttttaaagatttggggcacaaaaaacgagagcggacccggcgccggctacggcccttcccgagggccacgcccagcccggcgccccgcgcgccccgttccccgcgccgcctccctccacccggctgagcgcttgtgcccgcaggtgcggcgccccccacccgcgtcgccgccatggaggtgctgcggcgctcctcggtcttcgccgccgagatcatggacgcctttgaccgctcgcccacagacaaggagctggtggcccaggccaaggcgctgggccgggagtacgtgcacgcgcggctgctgcgcgccggcctctcctggagcgcgcccgagcgtgccgcgccggtcccgggacgcctggctgaggtgtgcgcggtgctgctgcccctgggcgatgagctggagatgatccggcccagcgtctaccgcaacgtggcgcgtcagctgcacatctccctgcagtctgagcctgtgggtgaccgatgccttccctggccctggctgggccacatctttctctgcagggcatcaacnnnnnnnnnnnnnnnnnnnnnnnnnnnnnnnnnnnnnnnnnnnnnnnnnnnnnnnnnnnnnnnnnaaccgttggtggaggggacagaggcctccagcccctggcccaggggggtcccaacacccctcctcctttgggacaactggccccctcggggggcggagagttttccgttgtgtcgccgcacaatcaagacccccttgggggtaaacaaacggggggggccttgggcgcggaaataacacgcctcgcgtcccggaaaaaggggaacctgggaaaatggtccaccatcaaagccggaggggggtggggttcacacgacggcgaggggaccccccgtggaggacgttccccgatttaccctccaactaatggaactaggggaggtggacttgagcgacctagaggggtgaagatattctgggggcggcagctttttctttgagaaaggggttggggccctacgtcttcccnnnnnnnnnnnntggcctctaaacaagggatgtggacggggtgcccaccaccattgataagagggggggctggcccttctcttgggggtccctctgggggagcctccacaatcctgggaaggtggcccaactagagccgccg

SEQ ID NO: 356672 - DNA, 928 bp, Homo Sapiens
  misc_feature (25)..(25): n is a, c, g, or t
aacccctggtgaaggggcccggaanacttgctctaacctgaaccccaggtgaaggggcccggaaaacctgctctcacctgagccccaggtgaaggggcccggaacacctcctgtcacctgagccccaggtgaaggggcccgggaacacctctcacctgaacccgggggtcccatcccaggaagaagggccatctcaggacatgagtcctcaggggccctgcacattcaatctgaaggtgaccctggcctggctgaagctggaagagctgtggggactcagcctgtaaacagagcgtaaggttcacatgctggttgcttaatccgtttctggaggaagagtatgacacccacttgtgatggggtccttgtgcggtggggaccggggccggcgggctccaggccagcacacctaacccatggatgtggaacctacggccgagaaggaatgttgcatgagtcggatcccagtccattgtcagtggagggtgagggtgaccccatctgctatttttgtgctcatcctcatacaaccatttggggatgtgcctattagggctccgtaagaactcagatgcctgggaagcccagcccctcaggtgcccccacacacagccttcccttgacgcctacatttctaggcacatgtgaggcatctttcctggagccccgagccagccctgtccctccccagtgcagcatggcactcaggagatacaggctggacatggggcagtcgttctggggaggcctggcctagcagccacccacctgagccctcccggccaggcttcgtgctggggtgggccatgtgccaggacaggagggtcccggcggaaagccagccccggactcatcgtgacattgagatcccactggagggtaggggtggtaataaacttctccaaacgatcgttgtcattttagacag

SEQ ID NO: 356673 - DNA, 608 bp, Homo Sapiens
atgtggaaaagccattaataaccactcttttatttttttgcaataacaaggtgaaatcaatattgttgagaagattcttccatctggtaatgttgagaagacttcatttggtaggagtcccttactttacgtgtgtaaattcctaccaggaaagaatacatatccaatagattggagaaagccagagattagccctcattccgcatctgtcaaccaggacagaaagcatggacaagggatgagctttacaaagatgatgcactttggagatcagaaaattcatatttaagcaaagtgatacaaacacagtgatttgggaatgccttcatttacaatgcaatacttacattttaatactcttgtaggagaaaaagcaactgtataaatgaatgtagagtgactttctgcaatatttcaaacctatatcagagaattacactgtgggaaaactaccattgtaataagtgtagcaaaatctccttagatatctgaaaagtcatactggatggaatctgtaggaaacggttctattttgagggaagggggattcctttttgttttttaagtgaattcagaaaatgttataaataaatcttttggtttattat

SEQ ID NO: 356674 - DNA, 542 bp, Homo Sapiens
  misc_feature (56)..(56): n is a, c, g, or t
  misc_feature (98)..(98): n is a, c, g, or t
  misc_feature (131)..(131): n is a, c, g, or t
ccctgtcagcaaaattaggatatgaaaaattcattatttatttatttaagagtatnctcaatttctcccattatctgctccgcatccactttccttcntactgtttactctgtggggatgcacctcatganctatatcagaggtcatcaagctacagcccagggcccaggtatccatttacatagtttatggctccttacctctataactgaagagtttaatatacagccataaaggttaaacatttactatctagccctttacagaaaaacttggccaacccctgactacatcaaatctttgccctctagtttttgttgagtgcagccaacattgagaacgtttactttggagcaatctccaattaaccaaagtgatacaaacacagtgatttgggaatgccttcaattacaatgcaatacttaaattttaatactcttgtaggagaaaaagcaactgtataaatgaatgtagagtgaatttctgcaatatttcaaacctatatcagagaattacactgtgggaaaactaccattgtaata

SEQ ID NO: 356675 - DNA, 1072 bp, Homo Sapiens
  misc_feature (992)..(992): n is a, c, g, or t
  misc_feature (1008)..(1008): n is a, c, g, or t
  misc_feature (1031)..(1031): n is a, c, g, or t
  misc_feature (1044)..(1044): n is a, c, g, or t
  misc_feature (1059)..(1059): n is a, c, g, or t
tttatctccctttatagcctctgattactcaacagcaaatactttctgagcaccaaccatggcagggcattgttatgggcactggggacacagtagtgaacaaaatcaagtccctgcattcaaggaaatggacattctagtcaggggggtaaaggtcaagagcgccattttatatgcagaaaggaagcctctctcctctgaccagtcaccactcactccctctgctatctcttcttgccacctgggctgttcatctgacagctgagagctgccaagctcttagggctcatctccctggtcaaaacccaattccaataagaaatgctaactttaaggaactaatgacattattattaaaaatctaaagagaattactagaaaagggaaccaagtctaccacgccaggagttgggttaaacattttacatacactttacctacataccttcatttaacactcatgacaatcctgggaataggcaacaacaccactaccatcgaagaaacagactaaatatcatcgaattagttaaaagtaactactggatgcttatcataggccaggcattgtgtgtgtagagatactagctcatttatttcatcctcataatatagaagttccttgacttatgatagggttacatcctgataaacccatcttaagttcaaaatatcttaagtagaaagtgcattcaatacacctaacttactgaaccatcacttagcctagcctaccttaattgtgctcagaacacttacattagcctacagttgggcaaaatcatctaaacagcctatttcataataaagtgttgagtatctcatgtaatttattaaatattgtatggaaactgaaaaacagaatggttacgtggatactcaaagtatggtttctactgaatgcatatagttttcgcaccatcatcaaactgaaaaaatcgttaagttgaaccgtcttaaatcggggactgtctgtaactgtatattgtatnaggatccttgcactgnaggaactgaaatatttggtaccnttctcgagttacnctctagtaaatgganccccagattcagt

SEQ ID NO: 356676 - DNA, 842 bp, Homo Sapiens
gtgccagaccaatgggcaggtgtatatgccaaaaggacacttgggaccaagagtagaggacgggctaggtcccaagctggccagtggcgagccgcacacacggcgtggcacagtgggacacccaggaggcgagtctgtgccccccgagccagcaaacacaagggcaaaacgggccgtcttaacagaagcttctggcggttcccacatcagaccataagggctccctgtcctcaggcgcacatgtccgcaagcttctcaacctctctgactcctctgactgctcgctcacccgttgtctcaccatttggggtggcccagggtccctcagcctcaagcactcagcgcagagtctggcctggaaccacctgatgacacggagctgcacatctagctgtggcccaggctgggccccgacctgggatgcgcacagtgtccccaacgcaggccccactctgagcctgccctgggcagcctcggactatgactggctacggggaggccaccaccaggccccagctctccaccctgaactccccagccccctcagagtactaggaccacagaagccctgttgctcactgacctgtgaccaggtccaatgtggggagaaatatgaaggaggtagcagccctgggttctcctcagtgagggatccctgccctgcaccagcaccctgagatggagctgagactttatttattgggggtagggggatggaggaggtccctccaacatgtttggacccagctcctttgggttccactgacacccctgcccctgcccctgcccagaaccaagtgccatttctcactctggagccttaataaactgcaatttgtaaa

SEQ ID NO: 356677 - DNA, 856 bp, Homo Sapiens
  misc_feature (3)..(3): n is a, c, g, or t
  misc_feature (9)..(9): n is a, c, g, or t
  misc_feature (14)..(14): n is a, c, g, or t
  misc_feature (16)..(16): n is a, c, g, or t
  misc_feature (20)..(20): n is a, c, g, or t
  misc_feature (22)..(22): n is a, c, g, or t
  misc_feature (26)..(26): n is a, c, g, or t
  misc_feature (39)..(39): n is a, c, g, or t
  misc_feature (41)..(41): n is a, c, g, or t
  misc_feature (43)..(43): n is a, c, g, or t
  misc_feature (50)..(50): n is a, c, g, or t
  misc_feature (52)..(52): n is a, c, g, or t
  misc_feature (54)..(54): n is a, c, g, or t
  misc_feature (57)..(57): n is a, c, g, or t
  misc_feature (61)..(61): n is a, c, g, or t
  misc_feature (66)..(66): n is a, c, g, or t
  misc_feature (72)..(72): n is a, c, g, or t
  misc_feature (75)..(75): n is a, c, g, or t
  misc_feature (79)..(79): n is a, c, g, or t
  misc_feature (81)..(81): n is a, c, g, or t
  misc_feature (83)..(83): n is a, c, g, or t
  misc_feature (85)..(87): n is a, c, g, or t
  misc_feature (90)..(93): n is a, c, g, or t
  misc_feature (98)..(98): n is a, c, g, or t
  misc_feature (106)..(106): n is a, c, g, or t
  misc_feature (109)..(109): n is a, c, g, or t
  misc_feature (115)..(115): n is a, c, g, or t
  misc_feature (120)..(121): n is a, c, g, or t
  misc_feature (123)..(123): n is a, c, g, or t
  misc_feature (128)..(131): n is a, c, g, or t
  misc_feature (137)..(138): n is a, c, g, or t
  misc_feature (142)..(142): n is a, c, g, or t
  misc_feature (145)..(146): n is a, c, g, or t
  misc_feature (150)..(153): n is a, c, g, or t
  misc_feature (158)..(158): n is a, c, g, or t
  misc_feature (162)..(162): n is a, c, g, or t
  misc_feature (169)..(169): n is a, c, g, or t
  misc_feature (172)..(173): n is a, c, g, or t
  misc_feature (176)..(178): n is a, c, g, or t
  misc_feature (181)..(197): n is a, c, g, or t
  misc_feature (200)..(200): n is a, c, g, or t
  misc_feature (206)..(208): n is a, c, g, or t
  misc_feature (216)..(216): n is a, c, g, or t
  misc_feature (221)..(221): n is a, c, g, or t
  misc_feature (230)..(230): n is a, c, g, or t
  misc_feature (241)..(241): n is a, c, g, or t
  misc_feature (246)..(246): n is a, c, g, or t
  misc_feature (249)..(249): n is a, c, g, or t
  misc_feature (254)..(255): n is a, c, g, or t
  misc_feature (260)..(260): n is a, c, g, or t
  misc_feature (290)..(291): n is a, c, g, or t
  misc_feature (301)..(301): n is a, c, g, or t
  misc_feature (313)..(313): n is a, c, g, or t
  misc_feature (326)..(326): n is a, c, g, or t
  misc_feature (341)..(342): n is a, c, g, or t
  misc_feature (383)..(384): n is a, c, g, or t
  misc_feature (406)..(407): n is a, c, g, or t
  misc_feature (410)..(410): n is a, c, g, or t
  misc_feature (429)..(429): n is a, c, g, or t
  misc_feature (444)..(445): n is a, c, g, or t
  misc_feature (448)..(448): n is a, c, g, or t
  misc_feature (456)..(456): n is a, c, g, or t
  misc_feature (482)..(483): n is a, c, g, or t
  misc_feature (494)..(494): n is a, c, g, or t
  misc_feature (496)..(496): n is a, c, g, or t
ttncctttntcctntnctcntnctgncctgcagctcttncnancccccanananttncccnacctntccccnccncctntnantnnntannnnggtgntgaaaagntgntgaatnataannantttgnnnnataaannaaantgnnaaannnnaatgnaagnatatagntgnntgnnntgnnnnnnnnnnnnnnnnngtnttttgnnntagggagnagggntgggcaggnattctgggggnagggnggnccccnncccanagtatttttttcttcgtgtaaatgtaaatnnagaatctatnatgaatcgaagnccaccgtgtatanagatataaatagagnnaaaaatataagaactaaatttgctaatgacatagttttaanntaaatgctatttatctctgagnngtncccgtcctccgtgcagagnaagttgaggtcattnnttnttttcttntccgatcttttttcttggcttctgannaaaaaccaagntntaccccatccccatcccagacctgcaggagacgagcgagcgggaaggcgccgggcccgggactgtacgttctcggggccagagctgctgggggaccgagtttgtacattttccattttggaattttgagttccaattgttgtaaaacttaatttctccccagtttttatatatatattttttagagttccgtttttatttattaaaaacaaaagccccagccctgccgaggcctgggcggcagtcctcagtcgggtggtcccggggcctttagcggtcccgcccggctgagacgctcgcctcgacgcatggacccgagaggcgacgacacgagtgaataaagtgcacatggaccctgaaa

SEQ ID NO: 356678 - DNA, 500 bp, Homo Sapiens
  misc_feature (301)..(340): n is a, c, g, or t
aatttgctaatgacatagttttaacctaaatgctatttatctctgagccgtccccgtcctccgtgcagagcaagttgaggtcattccttcttttcttctccgatcttttttcttggcttttgaccaaaaaccaagctctaccccatccccatcccagacctgcaggagacgagcgagcgggaaggcgccgggcccgggactgtccgttctcggggccagagctgctgggggaccgagtttgtacattttccattttggaattttgagttccaattgttgtaaaacttaatttctccccagnnnnnnnnnnnnnnnnnnnnnnnnnnnnnnnnnnnnnnnntaaaaacaaaagccccagccctgccgaggcctgggcggcgtcctcagtcgggtggtcccggggcctttgcggtcccgcccggctgagacgctcgccccgacgcatggacccgagaggcgacgacacgagtgaataaagtgcacatggaccctgaaaaaaa

SEQ ID NO: 356679 - DNA, 2252 bp, Homo Sapiens
  misc_feature (1613)..(1648): n is a, c, g, or t
actttcatatcagtgttacagtgaactaaagctattattgatcacaaaaaacttctgttcatccccaccttgctaaatttgcttgtgttgctagttttgcaaatcgtttctctgatgaccataagcaggaggattccaccatggtcactgcccatccagtcacagggattctgtgtagggaagcaccactgattgcagttaacatctagagtgttgtttccatcccactgcccaagcattggcatggtcatgaatggtggcccagccaacaggaagcccagcctttcagaaagagcctggcaaggccctgttgactagcaatggccttagctgtcccacacaactcagtggcctgaacacacaccttcagccaccatgcctttgaccagggctcctcatctggaaacatatgagaaaggtcagcaaacagatgcaagacctataaggctagtcattgagctatattggttttttttctaaatagtagtagtgacagataacatttattgagtgcttgctgtatgccaggcgctgatgtaagcactttaggtatcattgaattctcacagcaactcctgaggaaagtgctattcttgtctccattttagtgttgaggaaaacgaggcaaagagaggttatacaacttgcctcaaatcccttgtgcactgtaactcacactgagtttcagtgtgatttcaggctgttggtctccagggcacaggatcttagctactctgggatacccagttctgttttcagtatcatctggcacacaactgtccaagctctcagccccacagggaacctgcccagagagctttacctttcccaagcatctgtggcatggacatgtcctctgtgcagtggaaggaggaggggcgaaagtacgcccttagcctttggagctagagcacccttgggacccctagttccactgcacatggccctcctccccaccctcatgactgggaaggaagcctgtgatgaggctgagataaagcacagggtggtttcactctcctctctccttctttccaaacactgaaggatttatttcaaactctctaatgcacctgcctcagagattcccctactttcaaagcaaagatcagcagaaaaattggctgtcccacctgtggcaaatgctggagcctcagttaaagtgcctcaaggggcaaatatttcaccattgccagagaagatgtgacaggccaatcagacagggcccagagcatctctttgctgctactgttttgccatccttctattcatatctgtgcagaacacggtgttttaagcttgagtgaaaggagggtgaggctgccgatgccttcctgcccagaagtggatgatgtgggagttgacaggccagggagagggtgaagcaggtatcagagtcactcctctgtaccctctccttctgtttttattttaggcacactatcttcctctctcctatctttccctcaatctcccaagttcctctaccttctttatctttgtcttttacttcttctttctgtgaccctccttttttggcctcctctttccccaagactttcttcctcctgtttctcgttgagttctccccactgaatgtgtgtatgtatgtnnnnnnnnnnnnnnnnnnnnnnnnnnnnnnnnnnnnactcctatgactggctcctacttacattcaagttaaaaaggctgatatgaacagggcaggggaaaatcttaggatggttgtacaattgactggaggattttttccccttggaagacactattgatctcaacctgctgacttttcctaatgcttacctgaaggaacccatcctggctagaaagggtgatggtactggaccggtattcaaccttgagttttcaagctgccaaacaggtcttaagggaggtgcttatatcccaccaacactctcccagctcccatgtccccaagacctctggagtttcctcttgaatgtacatgaaccactgtaatagcattagacttttaattgagtgtgcaatcgttttccatggagtttggtccgttcattattttttagttaactacacttcttgatattcaaatgttctattaaaaaaactgagtatgaagaaaaacactttactactgcagaaggaagaaagaatataatatgaccatcttcaggtataacagtgttgtttaaaagagaattattgtatgattataaaagatgaaataattaactgaataataaaacaaagctattagtaagcaaaaaaaa

SEQ ID NO: 356680 - DNA, 1126 bp, Homo Sapiens
  misc_feature (12)..(13): n is a, c, g, or t
  misc_feature (19)..(20): n is a, c, g, or t
  misc_feature (33)..(33): n is a, c, g, or t
  misc_feature (36)..(37): n is a, c, g, or t
  misc_feature (40)..(40): n is a, c, g, or t
  misc_feature (42)..(42): n is a, c, g, or t
  misc_feature (84)..(85): n is a, c, g, or t
  misc_feature (94)..(95): n is a, c, g, or t
  misc_feature (108)..(108): n is a, c, g, or t
aaacccttgatnnagcatnnggaacctttagtntgnnacncntcaaagcatgaagactcacactgagagaacccctatgaatgnngcaatgtgnnaagccttcagatnacctcggaccttcaaaggcatgaaaagacacacactgaggataaaccctatggatgtaagcagtgtggaaaaggctttagatgtgcttcacaacttcaaattcatgaaaggacgcacagtggagagaaacccccatgaatgtaaggaatgtggaaaagtattcaagtatttgtctgccttgcgtatacatgaaagaacgcacactggagagaagccccatgaatgtaagcaatgtggaaaagcattcaggtatttctcttccttgcatatacatgaaaggacacacactggagataagccatatgagtgtaaggtatgtgcaaagccttcacttgttccagttccattcgatatcatgaaagaactcacactgaagagaaaccctatgaatgtaagcactgtggtaaggcctttatttccaataacattcgatatcatgaaaggactcacactggagagaaaccctatcaatgcaagcaatgtggcaaagcctttattcgtgccagttcatgtcgagaacatgaaagaactcataccattaatagatgagaaatccttttagtggaagcaacggaagaagctttctgttgtcccacttcctttgaaacacaagaaaaaaaagtggtgaaagaacctctggataactgctttttgaattgagaagagagacttgcgataggacaataaaatctagaagaacttggatggtttcgtaatacaattcacctatagccaatcttgcatgagatttcaaaggcacagaaaaggaaggcatcagtcacatattagaggccccacacagggaaagaggtgtgtggctacccgcttccagcccattttcctgattctttggcttgttaatcgagaatatcccccaaatcacttgtctctgttcctcagagttgtaggtctccagatatgtccccagtgctccacattaaagatacatgcccactttgctgtatcttcagaaatgttaaaatgttaccagagaactaataaatgttgttatggctgg

SEQ ID NO: 356681 - DNA, 290 bp, Homo Sapiens
  misc_feature (155)..(163): n is a, c, g, or t
gccaccacgcctggctgaagttcatattatttttatgtgtcataacacataaaattatttttatgtgtcataacatctttttaaagatgtgctttttagcttatttattgggataaaatgttttgaatttgaatatagatgccctgttttaagannnnnnnnncccacacagttttgcatttaagtaccagaatacccaaacatttttcattagtcttcatcaacactcccgtttgtgttctcagtcaaattaaaaatagcaattcttggccgggtgcggtggctcacac

SEQ ID NO: 356682 - DNA, 1049 bp, Homo Sapiens
  misc_feature (5)..(5): n is a, c, g, or t
  misc_feature (18)..(18): n is a, c, g, or t
  misc_feature (33)..(33): n is a, c, g, or t
  misc_feature (62)..(62): n is a, c, g, or t
  misc_feature (85)..(85): n is a, c, g, or t
  misc_feature (126)..(126): n is a, c, g, or t
  misc_feature (492)..(500): n is a, c, g, or t
  misc_feature (509)..(567): n is a, c, g, or t
  misc_feature (693)..(862): n is a, c, g, or t
  misc_feature (1034)..(1035): n is a, c, g, or t
  misc_feature (1044)..(1044): n is a, c, g, or t
caacnttgatccccctcngcgcgtgagcgctcnaaccatgagaccgaagcagtttcccgcgnccgctcctcacacagagactgcncccccgcgcccagaccctttggacaaggagatccaagcggnccccacaatgctcagcgggtaaagagctcctccccactcctctcccgccagcagacgaaggaaacaccccgcagcctgcacatgctcagatggagctctgggcccgcgggttctactgcgcaggccctcacactcagcaaagggacttggacgcgaaagccctggtggcgctcagccggttgggagttgtagctttctggcgctacagcaggagatacaggtggccaatgggtgagctggctggaggtaggaacaaggttaaggaagctgggatcttcgtgcagactggatcgtcactatagcaacaatgaaacatcgggaagggctagttctgctaggcagtctgccattttcattctttcatcnnnnnnnnnaactcaaannnnnnnnnnnnnnnnnnnnnnnnnnnnnnnnnnnnnnnnnnnnnnnnnnnnnnnnnnngcttctattttggcgggagatcgacttaataactgtgaacacgtgtcactggaaaaagcagtatgttaataagtaactgggccgctttgggaaaaatggaaatgcaggcaatgttagaacactggnnnnnnnnnnnnnnnnnnnnnnnnnnnnnnnnnnnnnnnnnnnnnnnnnnnnnnnnnnnnnnnnnnnnnnnnnnnnnnnnnnnnnnnnnnnnnnnnnnnnnnnnnnnnnnnnnnnnnnnnnnnnnnnnnnnnnnnnnnnnnnnnnnnnnnnnnnnnnnnnnnnnnnnnnngtaaatagctgtgtggcataatttcaggtagtgataagtgctgtgaaggataaagcaaagaaaggggcagggatggctctttggagagactacttagggatggctttcaggaagaggtggcatttgagcaggggcccgagggattgatgtgacttgtgataaaagaaaaacnncagacgaancaaat

SEQ ID NO: 356683 - DNA, 1394 bp, Homo Sapiens
tccggatggcttcctttgggatgaaggctttcaccagctggtggttcagcggtgggatccctccctcacccgggaagcccttggccactggctggggctgctaaatgctgatggctggattgggagggagcagatactgggggatgtaggcccgagcccgggtgcctccagaattcctatgtacaacgatgcagtccacgccaaccccccaaccctacttttgcctgtagcccatatgctagaggttggtgaccctgacgacttggctttcctccgaaaggccttgccccgcctgcatgcctggttttcctggctccatcagagccaggcaggcccactgccactatcttaccgctggcggggacgggaccctgccttaccaaccttactgaaccccaagaccctaccctctgggctggatgactacccccgggcttcacacccttcagtaaccgagcggcacctggacctgcgatgttgggtggcactgggtgcccgtgtgctgacgcggctggcagagcatctgggtgaggctgaggtagctgctgagctgggcccactggctgcctcactggaggcagcagagagcctggatgagctgcactgggccccagagctaggagtctttgcagactttgggaaccacacaaaagcagtacagctgaagcccaggccccctcaggggctcgttcgggtggtgggtcggcccccaacctcaactgcagtatgtagatgctcttggctatgtcagtctttttcccttgctgctgcgactgctggaccccacctcatcccgccttgggcccctgctggacattctagccgacagccgccatctctggagcccctttggtttacgctcccttgcagcctccagctccttttatggccagcgcaattcagagcatgatcccccctactggcggggtgctgtgtggctcaatgtcaactacctggctttgggagcactccaccactatgggcatctggagggtcctcaccaggctcgggctgccaaactccacggtgagctccgtgccaacgtggtaggcaatgtatggcgccagtaccaggctacaggctttctttgggagcagtacagtgaccgcgatgggcgaggcatgggctgccgccctttccacggctggaccagccttgtcttactggccatggctgaagactactgaagggagggagaggaggggagccaagacactcatgccactctggctctgaagggacaaaggcttctggcttttgcccccagccccttggataccagtaattcaaaccttcctcatttcatctcaggtgtctccttgctgtcatcccacatagccctggggtgaatgtgaatccagagtctatttttctaaataaattggaaaaaacaa

SEQ ID NO: 356684 - DNA, 1793 bp, Homo Sapiens
  misc_feature (108)..(108): n is a, c, g, or t
  misc_feature (1174)..(1174): n is a, c, g, or t
cggtccggaattcccgggatggccaggatgggggtggccgctgcatggagggtggactcagcggcccccgtgatgggctgacatgtgggcgtccgggggcctcctggnccttcctgtcctgcccccctgaggacgagtgtgcaaacgggcaccacgactgcaacgagacgcagaattgccacgaccagccccacggctatgagtgcagctgcaagaccggctataccatggacaacatgacagggctgtgccgccctgtgtgcgcccagggctgcgtgaacggctcatgtgtggagcccgaccactgccgctgccactttggctttgtgggccgcaactgctccacggaatgccgctgcaaccgccacagtgaatgcgctggtgttggggcgcgtgaccactgcttgctctgccgcaaccacaccaagggcagccactgtgagcagtgcctcccgctgtttgtgggttcagctgtcggaggcgggacctgccggccctgccacgccttttgtcgtggaaatagccacatctgcatctccaggaaggagttacaaatgtccaagggagagccaaagaagtactcactggacccagaggagattgaaaactgggtgacagagggtcctagtgaagacgaggccgtgtgcgtgaactgccagaataacagctatggggagaaatgcgagagctgcctgcagggctacttcctcctggacgggaagtgcaccaatgcgccaagtgccgggaatcatttcacgggagtccgctgggcggccagcagtgctaccgcctcatctcggtggagcaggagtgctgcctggacccacgtccagaccactgcttcatgagcccaaacgccgggcgctaggccccggccgcactgtcctctttggcgtgcagcccaaattcaccaacgtggacatccgcctgacgctggacgtgaccttcggggccgtggacctctatgtctccacctcctatgacaccttcgtggtccgtgtggcccctgacactggcgtccatactgtacacatccagccacccccagccccaccacctccaccaccccctgcagatggtgggccccggggggctggggatccaggaggagcaggggccagcagtgggccgggcgccccagcagagccacgggtacgggaggtatggccgcggngcctgattacctacgtgacggtgacggagccgtcggcagtgctggtggtccccggcgtgcgggaccggctggtcatcacctacccacacgagcaccatgccctcaagtcgagccgcttctacctgctgctgctgggcgtgggagacccaagtgggcccggcgccaacgggttaaccgactcgaagggcctgctcttctttcccgcaggaccaggcccacattgaccctgtttggcttcttctaccggcttcttctcctggtttttactcttcctcttacttctggggctcctttggaaggccaagcaggcttttgaccaacggcagaagcagcgccgcaccttctagagatgaccaagaaggccagtcccccctttgcccaggtcaccgtctggttcccacctgaccctattgttcccgggcttcccttggaagccggattggagctccaacttccggctttcgtcgatttaggcccttactggaccaccttttttttacagggaccgggggctctttgggacacatggaagggggttgtttccccaatacttccggaccacttgtgggtggagagtggcccttcttctgtgcccccaaaagagcttggttgggtggcc

SEQ ID NO: 356685 - DNA, 976 bp, Homo Sapiens
gccaggtatgaagtatggcatatacttgacactgtcctgtgtaaccctttactttgctcaggctttcaagattgagtctttttttcccccaaattaggttaacatgcatttgaccccaacctgtggggtttgagtaagctggaaatctgtgacggtaggctttctagtgtcacgaggtggtggtgactgaaggaaaagctgggatcacaggttccttctgatggagaggaaggtttatttctatgcccctcccaccaccctccacctagagctcacccaagcctgctccagtcccaggggcaggccattctgcaaaagcaggacctcacagaaacaagggctgggttgaggtcacccccttcagagttggttcctgggccagatgggtaagaggcatttgtaattttaaaaatgtgaaacttgggtttggtgttttcttctaagtgcctaaataagcaagccaggctgttgatattttagccagagaaatcggcaagccaagattaacccgaatctgaagtttagaatcttgagtttgcatctgcatcatatcatgctgttttgatgaggaaacatttgccactgaggagttggagggagggcaagacgacagtgttaagtcagatcatttaatggtttcccctaagccctggaaaaatatttgaaagaatggcagcaaaaaggttaagaaagcaagccagatttactgcacaatatgcagtacccagtactactttaaatcccaagagaacagtgtgatgtctaatatatacaggtctatgaaaatactgtggaataagcccaggaaggttagatgtgtttgcaaataagttgcccaaagggtccccctctaagtaaaacaaatattcagaccacaggctttaatgtaaactgtcaaaaagtgggatgtggaggatttttgttaagtgtcaatcgaagttaaaaagcaagggtttttggccaggcgtgcgtgtca

SEQ ID NO: 356686 - DNA, 2333 bp, Homo Sapiens
  misc_feature (749)..(757): n is a, c, g, or t
  misc_feature (1400)..(1408): n is a, c, g, or t
ggaaacagtgagagacttcctctgatgaaaataactaatgtgttatttgctttgtaaacctagtggcggagaatgcaacagttgagctatgcactgttttgatccaacttgaagaagcaattaagcctcccactcttgtcaccatttacatgtacaagaaaactcctaagtacagaaagatggagggattaggaggggacaaatgatttttggatggattgcagatttttcctgttttgatacttgtttcactgttacaaaaagtgtattctgtattttatttctgtgtcttgtagactaggcacagttctttccctctttgacccacgcaggagccttccctggtctgtccttttcattacttctgtagttgggcactgtctagcttcttgagctacactagcttttcctttcttcacatcgtagaactgtgagaattgaccactgttgttgtaagctaaatgattttggacaatatagcggaattttagttcagaggactagtattttctgtctatagttagacataaatttttattaagctcttggtttggtctcccttttccttaggtgctgctacatcctcatcctcctcttcaccttcatccagttccataacagctgctgttatgttaactttagctgaaccgtcaatgtccagcgcatcacaaaatggaatgtcagttgagtgcaggtgacaggcaggacttgctaaagcactttgcacttaatggctgttgagggccacnnnnnnnnnatactgcacagtggcacaaaaaaatatcagacaagcactattttatatttaacaaattgtttcttgacaagctgacttggcacttaagtgcacttttttatgaacgaaacaagtacaatgaactgcttttcctcaagcaataattgtttccaacttgtctgggaatggtgtgtctggtaactggaaggccttccactgtggcaaatggaggcttttcactgcctgtagagacaatacagtaagcatagttaagggggtgggtcagaacatgttaagataacttactgtatatgtattcccttgtatttcgttaaagctggaacattcgatattttctccatttcatttatgaaacaaattatgaacctattttcattgcgtacaaggtaatggttttttaaagcaagtcaccttagggtggctttcaactgtataagtcaagcacattgtaataaattcaaaacctgcagttaacaggatattagacatcaatcctggtaaccaaatattaaagattctctttaaaaaagactgaacatgtgtacaggtttgaattaggctaaaaggtcttgcagtggcttttcatggcccttcaaagtggaatggaactactgtactgtgccatttttctataaatcagtannnnnnnnnaattttgatatacattgtgtgaaaaaagaaaatggctaataaactgtattaaatcttaaacaatgtataaagattgtacttagccagttcaaagtgtatatttattcataatgaattataacagttatatttttgtgttttcttgtaaatgtttcttttcccttaaatacagataattcatttgtattgcttattttattatgagctacaacaaaaggacttcaggaacaagtaatgtattagtatggttcaagattgttgataggaactgtctcaaaaggatggtggttattttaaatataaatagctaatgggggtggtaggcctataaaattaaatgccttgtataaaatccaaaatgaatgcaaaattgttttcacttgtattgactttatgttgtatgattccaatctctgttctgtttggcacttgtatttaattcttcacctttgtaagacatttgtatattgtggatgtgttcattcaagctatttaatatctggcactgttaatacacagtactttattgtacagactgttttactgttttaattgtagttctgtgtactttttttggatggggctggcatgttttctttgtttcctggcaatacgacgtgggaatttcaatgcgttttgttgtagatgctaacgtgtcagaatcctttacattcaacttttctaagaaaagcattttcagtcttgtagtgtgtgcttacagtaactaattttgttgaaaatggtttcaagttattcaaatttgtacaggactgtaaagatttgttgacagcaaaatgttgaagaaaaaagcttatagaataaaagctataaagtatatattaggatctgcaaacaatgaagaattatgtaatatattgtacaaatgtaagcaaaggctctgaaataaaatgccatagtttgtgaa

SEQ ID NO: 356687 - DNA, 1332 bp, Homo Sapiens
  misc_feature (421)..(540): n is a, c, g, or t
  misc_feature (638)..(638): n is a, c, g, or t
  misc_feature (712)..(726): n is a, c, g, or t
  misc_feature (868)..(919): n is a, c, g, or t
  misc_feature (1158)..(1158): n is a, c, g, or t
  misc_feature (1208)..(1208): n is a, c, g, or t
  misc_feature (1237)..(1237): n is a, c, g, or t
gggaggcacagacaccaaggacagagacgctggctaggccgccctccccactgttaccaacatgaagctgctcgcagcaactgtgctactcctcaccatctgcagccttgaagtacttccagaccgtgactgactatggcaaggacctgatggagaaggtcaagagcccagagcttcaggccgaggccaagtcttactttgaaaagtcaaaggagcagctgacacccctgatcaagaaggctggaacggaactggttaacttcttgagctatttcgtggaacttggaacacagcctgccacccagtgaagtgtccagaccattgtcttccaaccccagctggcctctagaacacccactggccagtcctagagctcctgtccctacccactctttgctacaataaatgctgaatgaatccnnnnnnnnnnnnnnnnnnnnnnnnnnnnnnnnnnnnnnnnnnnnnnnnnnnnnnnnnnnnnnnnnnnnnnnnnnnnnnnnnnnnnnnnnnnnnnnnnnnnnnnnnnnnnnnnnnnnnnnngagaacatggacaaaaactgttccagaagaaagcgggggtcatgactaagggcttggactctcaccaatacaaaaggcccggaggcaaccgaccaganctgaaaatgtgccccagcgacctctcgaggaaaaaatttgaaaaaacccccgggggggcgcagggggccccccnnnnnnnnnnnnnnnccggcgcccctgccccctctcataagcaaaaaccggcgcgacataccaatagggggtgtgtgtccccccaaagagaaaacaaaaccccccccgcggggacaagcaccacctttcgtaattccaccccagcccatatcagagnnnnnnnnnnnnnnnnnnnnnnnnnnnnnnnnnnnnnnnnnnnnnnnnnnnnggtggcgccgaaaaacgcccggccgttcctcaacaacacaaaacgcgtgggccccttaccgcgcccgcccgcgtatatattaacccccaaacaatggcgggggggataatcctcttcaccccaaggcccatttgtccccggacccagcgaggagaatccctcccttactttctcgccgagaagaaccctattctcattatatggatacacctgtcggggcgcgggagaatcctcctcanccgccttgcgcggattcgctcaccccgccccccatataaaacgcccattnttcccgtgcgagcagaaacaacactggcncggcggacacaaacaagataggcggcgtctttttcttgcgcccgcgcgccgtgttgtataccactatattcgccggggcgccaacacgctctccc

SEQ ID NO: 356688 - DNA, 671 bp, Homo Sapiens
ggggaggcacagacaccaaggacagagacgctggctaggccgccctccccactgttaccaacatgaagctgctcgcagcaactgtgctactcctcaccatctgcagccttgaaggagctttggttcggagacaggcaaaggagccatgtgtggagagcctggtttctcagtacttccagaccgtgactgactatggcaaggacctgatggagaaggtcaagagcccagagcttcaggccgaggccaagtcttactttgaaaagtcaaaggagcagctgacacccctgatcaagaaggctggaacggaactggttaacttcttgagctatttcgtggaacttggaacacagcctgccacccagtgaagtgtccagaccattgtcttccaaccccagctggcctctagaacacccactggccagtcctagagctcctgtccctacccactctttgctacaataaatgctgaatgaatccaaaacaagcaacaacccccccaaaacacaaacaaaaccttgtcgggccgcctcgggcccctcaaaaagcttttcaaaaaccattcttttgggggccccgggggccccagaaggggtaaagtgaacaaggggctcataaacctggttttcccaaggaaaaaccccggggtccatgaaacaaggggcttggggaat

SEQ ID NO: 356689 - DNA, 1739 bp, Homo Sapiens
cgtcggcgcagagacactcctgagggatttcgtctgtcggtccatgtgtttgtgggggccgagtcctggacaggcctaggagggaaccgccccggccagggccggctgctcggcgcctgcacagggcatgagtgctgggggctttgggacacacgctccctgctgcctctggggcagatgtccacctgcactgcttgcagtgagaagctggggccccagtggacgagccgtggtgcctgaactgctcccgctgtgtccccgccacgtgaggcatctcttcctgaccgtggtcctgagaccacctggcctctgccttcccagggttaactgtacttgttctctccgtggctgccgacacccttctggccttcaaacttaaccctcatcactcgtggactcctgaccccacccagggctgaccaccggaaccctgctctctgcttcctttacggctgatattgtccccattccagtgttgttcttgtgcctgtctcccctctagctccttgcagtcagggagaggactttctttatacctctatcccttgtcttctaggggcatctcctgctcagtgaaatgtgctgacccgtagcaggtggtctctaccagggcttagtgtcagcatgggacacttttccagccattaccccttctttcccctctacccacctccagccccgaggtgcggcccagcaggacagatactgccacagccctcccttggttgtgttcatacttcctgggctgctcatgccttcctgtttgctggtggattctctttttgctggagtgtatccccaagcagcttttccagaaaggaccaacttgcccggatctctaattctccatcaaagccactttccctcagagctttgcagcattgaggaggcatcttcaagcatctgactcttcttctccctggaagcttctaaagtctcagtgccttgccctcctgctctccacctttgctctctgttctggttatttatcgaggagtctctgaggctcttttttttgctctcttgtagtggccttggtgagctcttcagcctcaaggcttgtccttggctctggatgaggctcttctggcctctccccaatctgcccatgtgttccaaacaccgcatgccccagctgggttccaaacagggcgggtgggggccactctcctgtctagcttcgtagcgtgggctgaaacctgggaaagtctctccatgaagctgaatggagaagaacatggcttccgcgaggccctaggagccaagcaccacacagaacccaccgcttggctgtgatcccgagtgacggggacagcctggactgcagaaggaatgcccaacgctggcgggaacggaggggcttttcttgctcgtctttccagttccacattgtcacattggagtcctgggctcactgagattatgttgaaaatccgacctctaggggatctccatgctagttttgtcctttaggcgtggaggcatgcgtgccgcactgtggcgtctgttctgtgcgcctgctcaccgcccttccttctttttccgcgtggggcagtttttatcgcgtctccccggcagctgcttcggcgaggtggggcccgcgtgccattggtagcgtgtctctgagtctcaccgcagcccttgtagctgggcatcctcgtcagatgacaccccgagcagggttgacgtgccaggcaaaatcgtttgcacccgtatttgctaacttctcactgttctag

SEQ ID NO: 356690 - DNA, 1312 bp, Homo Sapiens
  misc_feature (1236)..(1236): n is a, c, g, or t
aacggcagctcgcggtgttgttcactcgcgcgtcgagcacacggtgggtccggcggcgggttggcgccccaggcggcgttccctgtggcctggcgcctgggccgctgccctgagcgggttccgccccagagcccgaccctcctgggggctctaggcggagtcccgcgagccgagggggaccggcgaccgctgccgaagcatgaagaaggggtaaggcgtgagcccccaagatttcacggtgaactggcacaaaggttaatctcaagatgccgctagtgaaaagaaacatcgatcctaggcacttgtgccacacagcactgcctagaggcattaagaatgaactggaatgtgtaaccaatatttccttggcaaatataattagacaactaagtagcctaagtaaatatgctgaagatatatttggagaattattcaatgaagcacatagtttttccttcagagtcaactcattgcaagaacgtgtggaccgtttatctgttagtgttacacagcttgatccaaaggaagaagaattgtctttgcaagatataacaatgaggaaagctttccgaagttctacaattcaagaccagcagcttttcgatcgcaagactttgcctattccattacaggagacgtacgatgtttgtgaacagcctccacctctcaatatactcactccttatagagatgatggtaaagaaggtctgaagttttataccaatccttcgtatttctttgatctatggaaagaaaaaatgttgcaagatacagaggataagaggaaggaaaagaggaagcagaagcagaaaaatctagatcgtcctcatgaaccagaaaaagtgccaagagcacctcatgacaggcggcgagaatggcagaagctggcccaaggtccagagctggctgaagatgatgctaatctcttacataagcatattgaagttgctaatggcccagcctctcattttgaaacaagacctcagacatacgtggatcatatggatggatcttactcactttctgccttgccatttagtcagatgagtgagcttctgactagagctgaggaaagggtattagtcagaccacatgaaccacctccacctccaccaatgcatggagcaggagatgcaaaaccgatacccacctgtatcagttctgctacaggtttgatagaaaatcgccctcagtcaccagctacaggcagaacacctgtgtttgtgagccccactnccccacctcctccaccacctcttccatctgccttgtcaacttcctcattaagagcttcaatgacttcaactcctcc

SEQ ID NO: 356691 - DNA, 1504 bp, Homo Sapiens
  misc_feature (205)..(205): n is a, c, g, or t
  misc_feature (994)..(994): n is a, c, g, or t
  misc_feature (1116)..(1116): n is a, c, g, or t
  misc_feature (1153)..(1210): n is a, c, g, or t
  misc_feature (1213)..(1221): n is a, c, g, or t
  misc_feature (1429)..(1429): n is a, c, g, or t
  misc_feature (1431)..(1431): n is a, c, g, or t
ccctttcaacccccttgggtaggaggggaaagggcccagtgattcaaagctggggttggtaaaaaggcaagtgctttaaaaatgtttatttctcacccgcaaaaggccaagccctccagttttgtgtgggaagggcaatgtgttcccaggccagggtacagtagatgaccccctaactgaacacatatagatggaggtgaactgnagcagagggtcagggttagggtcacccaaagtccctgtgcctttccccagcctctgtgcccatggggatgcctttctcccaggccttcaaggacagtgtttccactccactccgtgggaagtccttcttggaatctaacttttatgagacaagaaagcactttgcaagtaggtgaagaacgagtcagctttaaagaacaattactgagattgttactgctactgctgccatggaggtcaaagctaagtggaaagctggatgggaacaggggtaggggactgatcgcctcagtgctcttgaagctctgaaggtgagaagcgtgtgtgcatgtgtgtctgtttgtggaatgacttcccaggctcttaaatcaatctgtagagaagtggaccgaggtcacacttcaagaaggacttcctcagttaggcctgggggaagcaggcatgggagggtttgagctgggagccccaggaggggacataccacattggagtatgggctgcccaggtactaggggtgcaggtgaatgtgcttggcctcctctgctgcccccaacccagcccctgtcttattgagatgatcagtgtgcatcctttccaagaccctgggaaatgaacccctcatttctttgtcctacaatttaaaaatccaaggattctcagaatcaaccccagcagactggaagctcccaatcttaaactagcaacctgatccaacccgtggtatctaaagattgggcaactcagggtggactcagccacttccctcctctatttatcttttccttacaanttttatacattctactggacccaggggccctcaatgctactaaactttaagctatcttaatattgtctactaagtaactagtaattgtttctttctctctctaggattatatgaaataaatntgaattattattattaataattattattttgtagtannnnnnnnnnnnnnnnnnnnnnnnnnnnnnnnnnnnnnnnnnnnnnnnnnnnnnnnnnttnnnnnnnnntctagatctcttaaatctcacacatctctgagggttcctataggcctgctaggccttaattctggattccccctcctcacttgcccctgcgacagggcaggggaaagtggtgggggacaccccaggatcctcagtccttagtcctacagcttcttcctttcttgttaatccctttctttgtttggctctgccggctcccctgaggggnangggggagaggggaggaggagtccatggagtgaaatccaatctactggaagggtcccaggagggaccgggttcc

SEQ ID NO: 356692 - DNA, 1627 bp, Homo Sapiens
  misc_feature (23)..(23): n is a, c, g, or t
  misc_feature (721)..(721): n is a, c, g, or t
  misc_feature (771)..(771): n is a, c, g, or t
  misc_feature (1399)..(1399): n is a, c, g, or t
  misc_feature (1433)..(1433): n is a, c, g, or t
  misc_feature (1466)..(1466): n is a, c, g, or t
  misc_feature (1477)..(1477): n is a, c, g, or t
  misc_feature (1493)..(1493): n is a, c, g, or t
  misc_feature (1524)..(1524): n is a, c, g, or t
ctcgaagaccaggaacgcctganacccgaagacaaagagaacactccgaggagccaggtatttgcgaggagcagaacccagaggccgagcggcgaagagagcagcagggaaggagcggggatttccagggggccgatcgtcctgggcccgaggaaaagagagaagaaggggacacggagcctctcctgaaacaagaggggccggtggaagccgcgcacctccggtggagaggaaagaagccgccgcccttagaacaaggccgcaaggtggaggagctgcggtggcaggaggtggacgagagacagaccatgccccggccctacacgttccaggtgtcctccggagggaagcagattctctttcccaaagtcaacctgagccccgtgacgcccgcaaaggacacggggctcaccgctgctccccaggaaccaaaggcccccaaagccagcccagtccagcacgccctaccgtcgtccctgagcgttccccacaccgccattctggtcacgggcgcgcactctgtggcccggcagtcaacctgagccagatcaaggacaccgcgtgcaagtccctcctgggcttggaggagaagaagcacgcggaagccccagctggggagaaccctccccgaggccccggcgacgcgagggcgggcagcgggaaggctaagcccccccaggagtctcccagacagcgcgtccgcactcgcagaatgggcttncattcggtccagaatcctgaagaacgcagagagtgacccgcgcagcagcngagagggaccagttgaggcccggtgatgagtccactcccaggggccggtgtgattcccgcgggaaccaacggaagactccgccagtcaatgcaaagttctctattatgcctgcctggcagaaattttccgatggtggcacggagacctccaaacagagcacggaagctgaaagcatacgaaaaagacccatgctgggacccagcgaagagacagccccccagcctcctcctgctggtgttcgcgagctcgggaagggtccggagaagtcggagatgcaccgggagcccgcagacaccaccgagggatgcaaatttgccaaagacctcccgtctttccttgtcccaagccttccttaccctccgcagaaagtggtggcccacacagagttcacgacctcgtcggacagcgagactgcaaacgggatagcaaagccagaccctgtgatgccaggtggagaggaaaaagcctcaccgtttggaataaaattgagaaggaccaactattccttgcgcttcaactgcgaccaacaggcagaacagaagaagaagaagaggcacagcagcaccggagacagcgcggatgcagggccgcctgcagcggggagcgctcgtggagagaaagagatgnaggggtgtggcccctcaagcatggtccatccctncccccagagcggaagcaagccccttccacccgnagggactccgntgtacctttcagcagncgctctgtttctgtggcccaccctgggcctncacgggccagcagccagaccccgttttcgggcacgacaaggcagcaaacaaaagccaactggcccaaaagccagcactggcttccaagcccaccagtcagacc

SEQ ID NO: 356693 - DNA, 1791 bp, Homo Sapiens
tggtacggccggagtctagggatccccacaggtaatgggtgtccgatgtcacgggggactctgtgatccgtgttcccctgaccctcctagtgcacaacttggccgggctcactgggctcctgcaccactgcctgtcaggtccgctgccagccccaagccccccaccagccatgagctcctccagaaaggaccacctcggcgccagcagctcagagcccctcccggtcatcattgtgggtaacggcccctctggtatctgcctgtcctacctgctctccggctacacaccctacacgaagccagatgccatccacccacaccccctgctgcagaggaagctcaccgaggccccgggggtctccatcctggaccaggacctggactacctgtccgaaggcctcgaaggccgatcccaaagccccgtggccctgctctttgatgcccttctacgcccagacacagactttgggggaaacatgaagtcggtcctcacctggaagcaccggaaggagcacgccatcccccacgtggttctgggccggaacctccccgggggagcctggcactccatcgaaggctccatggtgatcctgagccaaggccagtggatggggctcccggacctggaggtcaaggactggatgcagaagaagcgaagaggtcttcgcaacagccgggccactgccggggacatcgcccactactacagggactacgtggtcaagaagggtctggggcataactttgtgtccggtgctgtagtcacagccgtggagtgggggacccccgatcccagcagctgtggggcccaggactccaggcccctcttccaggtgagcggcttcctgaccaggaaccaggcccagcagcccttctcgctgtgggcccgcaacgtggtcctcgccacaggcacgttcgacagcccggcccggctgggcatccccggggaggccctgcccttcatccaccatgagctgtctgccctggaggccgccacaagggtgggtgcggtgaccccggcctcagaccctgtcctcatcattggcgcggggctgtcagcggccgacgcggtcctctacgcccgccactacaacatcccggtgatccatgccttccgccgggccgtggacgaccctggcctggtgttcaaccagctgcccaagatgctgtaccccgagtaccacaaggtgcaccagatgatgcgggagcagtccatcctgtcgcccagcccctatgagggttaccgcagcctccccaggcaccagctgctgtgcttcaaggaagactgccaggccgtgttccaggacctcgagggtgtcgagaaggtgtttggggtctccctggtgctggtcctcatcggctcccaccccgacctctccttcctgcctggggcaggggctgactttgcagtggatcctgaccagccgctgagcgccaagaggaaccccattgacgtggaccccttcacctaccagagcacccgccaggagggcctgtacgccatggggccgctggccggggacaacttcgtgaggtttgtgcaggggggcgccttggctgtggccagctccctgctaaggaagtagaccaggaagccaccctaacactcggccagacccgctggctcccaggccctgagaggacagagatgaccacatccctgctggatgcaggacccgtccaaagatgccccggggaggggtgtcagcccacgttgctggcctttggggtcaagaggagtagggatcccaggctgccctggacttagaccagtgtctgaggtggtaacca

SEQ ID NO: 356694 - DNA, 932 bp, Homo Sapiens
ggggtgtcccctgggggagggccaaccccagtgtgtccactcctccccggccaaactgggcacctctgtcacctctgctgcacccggccccttcgttgtcagtatcggcctttgtcttagtcaagctttcgaggagcaactcagcaattctgttaccgataatcacctaacagtttacacattcaaaaccactgggaagccacagaccaggcaccgtgggatggggaagtggagactgagaggctgctgccggggaaatatgcagtgcagacaagaggtccgctgccagccccaagccccccaccagccatgagctcctccagaaaggaccacctcggcgccagcagctcagagcccctcccggtcatcattgtgggtaacggcccctctggtatctgcctgtcctacctgctctccggctacacaccctacacgaagccagatgccatccacccacaccccctgctgcagaggaagctcaccgaggccccgggggtctccatcctggaccaggacctggactacctgtccgaaggcctcgaaggccgatcccaaagccccgtggccctgctctttgatgcccttctacgcccagacacagactttgggggaaaccatgaagtcggtcctcacctggaaagcaccggaaggagcacgccatccccccacgtggttctgggccggaacctccccggggggagcctggcactccatcgaaggctccatggtgatcctgagccaaggccagtggatggggccccggacctggaggtcaaggactgggatgcagaagaagcgaaggaggtcttcggcaccagccgggccactgccggggacattcgccactactacagggactacggtggtcaagaaaggccggggcataaccttgtgtcccgaggcgttccacagccgtggagtgggcgaccccg

SEQ ID NO: 356695 - DNA, 2342 bp, Homo Sapiens
tttcagagagagagaaaaatatacggtctatggtacgaggctgggtggaaaatcggcacgagggttccgttaggtctgagggagcgatggcggtacgcgcgttgaagctgctgaccacactgctggctgtcgtggccgctgcctcccaagccgaggtcgagtccgaggcaggatggggcatggtgacgcctgatctgctcttcgccgaggggaccgcagcctacgcgcgcggggactggcccggggtggtcctgagcatggaacgggcgctgcgctcccgggcagccctccgcgcccttcgcctgcgctgccgcacccagtgtgccgccgacttcccgtgggagctggaccccgactggtcccccagcccggcccaggcctcgggcgccgccgccctgcgcgacctgagcttcttcgggggccttctgcgtcgcgctgcctgcctgcgccgctgcctcgggccgccggccgcccactcgctcagcgaagagatggagctggagttccgcaagcggagcccctacaactacctgcaggtcgcctacttcaagatcaacaagttggagaaagctgttgctgcagcacacaccttcttcgtgggcaatcctgagcacatggaaatgcagcagaacctagactattaccaaaccatgtctggagtgaaggaggccgacttcaaggatcttgagactcaaccccatatgcaagaatttcgactgggagtgcgactctactcagaggaacagccacaggaagctgtgccccacctagaggcggcgctgcagaatactttgtggcctatgaggagtgccgtgccctctgcgaagggccctatgactacgatggctacaactaccttgagtacaacgctgacctcttccaggccatcacagatcattacatccaggtcctcaactgtaagcagaactgtgtcacggagcttgcttcccacccaagtcgagagaagccctttgaagacttcctcccatcgcattataattatctgcagtttgcctactataacattgggaattatacacaggctgttgaatgtgccaagacctatcttctcttcttccccaatgacgaggtgatgaaccaaaatttggcctattatgcagctatgcttggagaagaacacaccagatccatcggcccccgtgagagtgccaaggagtaccgacagcgaagcctactggaaaaagaactgcttttcttcgcttatgatgtttttggaattccctttgtggatccggattcatggactccagaagaagtgattcccaagagattgcaagagaaacagaagtcagaacgggaaacagccgtacgcatctcccaggagattgggaaccttatgaaggaaatcgagacccttgtggaagagaagaccaaggagtcactggatgtgagcagactgacccgggaaggtggccccctgctgtatgaaggcatcagtctcaccatgaactccaaactcctgaatggttcccagcgggtggtgatggacggcgtaatctctgaccacgagtgtcaggagctgcagagactgaccaatgtggcagcaacctcaggagatggctaccggggtcagacctccccacatactcccaatgaaaagttctatggtgtcactgtcttcaaagccctcaagctggggcaagaaggcaaagttcctctgcagagtgcccacctgtactacaacgtgacggagaaggtgcggcgcatcatggagtcctacttccgcctggatacgcccctctacttttcctactctcatctggtgtgccgcactgccatcgaagaggtccaggcagagaggaaggatgatagtcatccagtccacgtggacaactgcatcctgaatgccgagaccctcgtgtgtgtcaaagagcctccagcctacaccttccgcgactacagcgccatcctttacctaaatggggacttcgatggcggaaacttttatttcactgaactggatgccaagaccgtgacggcagaggtgcagcctcagtgtggaagagccgtgggattctcttcaggcactgaaaacccacatggagtgaaggctgtcaccagggagcagcccctggatgcccagcagggcccccccgaacctgcacaagagtctctctcaggcagtgaatcgaagccttctacatggtgctactgctcttggagtggacatgaccagacaccgcaccccctggatctggctgagggctcaggacacaggcccagccacccccaggggcctccacaggccgctgcataacagcgatacagtacttaagtgtctgtgtagacaaccaaagaataaatgattcatggtttttttt

SEQ ID NO: 356696 - DNA, 449 bp, Homo Sapiens
agcagggccccccccgaacctgcaacaaagagtctctcctcaggcaagtgaatcgaaagccccaaggatgagctatgacagcgtcccaggtcagacggatgggtgactagaccccatggagaggaactcttctgcactctgaactgggcccacccctcggggctgcagagcagtgagcctacatctgccactcagccgaggggaccctgctcacagccttctacatggtgctactgctcttggagtggacatgaccagacaccgcaccccctggatctggctgagggctcaggacacaggcccagccacccccagggcctccacaggccgctgcataacagcgatacagtacttaagtgtctgtgtagacaaccaaagaataaatgattcatggttttttttacttggtttgttcagacaatggaaatttgcccattctgtcaaaaaaa

SEQ ID NO: 356697 - DNA, 1038 bp, Homo Sapiens
  misc_feature (7)..(7): n is a, c, g, or t
  misc_feature (16)..(16): n is a, c, g, or t
  misc_feature (24)..(24): n is a, c, g, or t
  misc_feature (29)..(30): n is a, c, g, or t
  misc_feature (35)..(35): n is a, c, g, or t
  misc_feature (37)..(38): n is a, c, g, or t
  misc_feature (40)..(40): n is a, c, g, or t
  misc_feature (42)..(42): n is a, c, g, or t
  misc_feature (55)..(55): n is a, c, g, or t
  misc_feature (58)..(58): n is a, c, g, or t
  misc_feature (67)..(67): n is a, c, g, or t
  misc_feature (71)..(71): n is a, c, g, or t
  misc_feature (82)..(82): n is a, c, g, or t
  misc_feature (107)..(107): n is a, c, g, or t
  misc_feature (298)..(298): n is a, c, g, or t
cccgcanacttctccngactgggntgggnncgttngnnananatccccggcgtcntgnttcctttcncctntggccagcccncgcccccggccttcagagtgggatnagcagagggcatcaggcgaaaacgttctgttgctggaacttgcgtcagcgagcacagcgggggcagcccttcttcaccacagcctggcagctctggtggaagacggtcttgcacttggcacacctgactgtggtgtcaaactcagagggggaagatgatgtcgtggtgctggcagatctggcagatgaaantgcgctgggtgcacaggtcgcagtggtagacatgctgggaggcaaattcaatcagggccttgaggaatccttcatatacctcatctgcgatctgccggaggtcagcaacacggaacctatgcggagactccaagagataattccggtggttgagcctcttgctgagctccttcagggcgccactccggcacaggcccaggtaatcccccaggagcttcagctgctcccggctccatcccaatgaggtgcatccgctccacatgctcgtacagagacgcgttcaccatctgcaggttgatgaggggctgggcccggatctgcgtcagaaacttcagggcctgcctgcagatcgggcgcttggtgaggtcccagttgtggatgatcctggccggaatcactgaggcatcgtcttggtggcagatgtcacagtaatagaggccagagaaggcacagagcttgggtcgtacaaaggagaagccgatctgccgggagcagcctgcgcagaagcagccttgggagtcaaggcctttctccatggggatggccaccaggtactgcagcaggaagccattctcccgggtggcaaatttcagcacctcctgacagttttcatccaggctcccgcccagggtcaccgcctcctcggctgtctccaagtaggatgccaggactttgcggaccagatccctccacagggcggcttcctcggcatcccgggaattccggaccggtaccagcct

SEQ ID NO: 356698 - DNA, 976 bp, Homo Sapiens
  misc_feature (891)..(891): n is a, c, g, or t
  misc_feature (897)..(897): n is a, c, g, or t
  misc_feature (921)..(921): n is a, c, g, or t
aaggagcgaggcctgggtggcgaattcggcacgagggtctgagttgtcagccgttgttttttcgtgctcgctagtcgccgccgccgctccgccatggggaagcgacagcaccaaaaggacaaaatgtacattacctgtgctgaatacactcacttttatggtggcaagaagccagatctcccacaaacaaattttcgtcgtttaccttttgaccactgcagtctctctctgcagccctttgtctacccagtctgcactcccgatggcatcgtctttgacttactgaacattgttccatggcttaagaagtacgggaccaaccccagcaatggagagaagctggacgggaggtccctgatcaagctgaacttttccaagaacagtgaggggaagtaccactgcccagtgctgtttaccgtgttcaccaacaacacccacatcgtggctgtgaggacgaccggcaacgtctacgcctatgaggcagtggaacagctaaatatcaaggccaagaacttccgggacctgctgaccgacgagcccttctcccggcaggacatcatcaccctccaggaccccaccaatttggacaagttcaatgtctctaacttctatcatgtgaagaataacatgaaaataatagacccagatgaagagaaggccaaacaggacccgtcttattatctgaaaaatacaaatgccgagacccgagagaccctgcaggagctctacaaggagttcaaaggggacgagattctggcagccaccatgaaggccccgggagaagaagaaagtggacaagctgaacgctgcccactatttccacaggggaaaggtcagcgctttctttcacctccacgcgatggtcccggagaacacacatgaagcagctgncaatcnacgaagatgtgctgcggctaccantttgtgaagaaagagggctacgtgcggctgcacacccaacaagggcgaacctcaa

SEQ ID NO: 356699 - DNA, 1165 bp, Homo Sapiens
  misc_feature (629)..(629): n is a, c, g, or t
  misc_feature (755)..(755): n is a, c, g, or t
  misc_feature (880)..(880): n is a, c, g, or t
ctccagagcggcagaccctcgtgagcctggctcagcccacgcccaagtacccccatgaagtgaatgggaccccaatgtatctctatgaagtggccacggagtcggtgtgtgaatcagctgccagacttctcttcatgagcatcaagtgggctaagagtgtgccagccttctccacgctgtctttgcaagaccagctgatgcttttggaagatgcttggagagaactgtttgttctaggaatagcacaatgggccattccggttgatgctaacactctactggctgtatctggcatgaacggtgacaacacagattcccagaagctgaacaagatcatatctgaaatacaggctttacaagaggtggtggctcgatttagacaactccggttagatgctactgaatttgcctgtctaaaatgcatcgtcactttcaaagccgttcctacacatagtagttctgaactgagaagtttccggaatgctgccgccattgcagcccttcaagatgaggctcagctaacgctcaacagctacatccataccagatatcccactcaaccctgtcgctttggaaaactcctgttgcttttgccagctttacgttctattagcccatcaactataganagaagtgttttttcaaaaaaaccatcgggcaatgtgccaattacaagactgctttcagatatgtacaaatccagtgatatctaagctcacaagatacccacttttcaggatgggacagtatcagangaacttcaacccatggagaacaagcctcaactaacaaacccttcaggaagcatataccggggaatgtgtagccttcaggaaaaaaatgccaattgacacaaagcattccagtagctatgacctgncgccctgaccaggatagggcgggtgggaaggagaggggtgcaacaggaccgcctgcactgaaaactcactgctgccatgccctgggagggggcaaactgggggttgccacaggccgtgccattctgcctcttacctggaagatcaggctgaacgatcaaaagctgaacataagtagtgctttctcttcctttttagcatacaaagtttggtaaccaaatatagctctgtgtataacatcgtactgcggccttcaaaactacgttatgttggagcatttattttaa

SEQ ID NO: 356700 - DNA, 897 bp, Homo Sapiens
gggcagaggcggcgagaggcgggctgaggcggcccagcggcggcaggtgaggcggaaccaaccctcctggccatgggaggggccgtggtggacgagggccccacaggcgtcaaggcccctgacggcggctggggctgggccgtgctcttcggctgtttcgtcatcactggcttctcctacgccttccccaaggccgtcagtgtcttcttcaaggagctcatacaggagtttgggatcggctacagcgacacagcctggatctcctccatcctgctggccatgctctacgggacaggtccgctctgcagtgtgtgcgtgaaccgctttggctgccggcccgtcatgcttgtggggggtctctttgcgtcgctgggcatggtggctgcgtccttttgccggagcatcatccaggtctacctcaccactggggtcatcacggggttgggtttggcactcaacttccagccctcgctcatcatgctgaaccgctacttcagcaagcggcgccccatggccaacgggctggcggcagcaggtagccctgtcttcctgtgtgccctgagcccgctggggcagctgctgcaggaccgctacggcttggcggggcggcttcctcatcctgggcggcctgctgctcaactgcttgcgtgggtgccgcactcatgaggccccctggtggtcacgggcccagccggggctccgggcccgccgcgaaccctcccgggcgcctggctaaaaactggaccgtccttcccgggaccgcgggcttttgtggcttttaaccccggggccgccctcgggccaagggtgccgtggggcatccttcgtgcccccccgggggtttcatggggcgaagctacgccccaaggaccccgagggcgtgtcccgaacacccat

SEQ ID NO: 356701 - DNA, 886 bp, Homo Sapiens
cgccccaagggttccccttgggggggtaaggctcccacccaaccggaacccccggggcgggggaacgaaagaagcccccccaggcccccatgagcccgaggggcggcccacgggcgtaaaagccacaaaagcccgcggttccccggaagaccgcttcaggtctaagcaggcgcccgggagggttcgcgggcggccccgaagccccggctgggccgtgaccaccaggggcctcatgagtgcggcacacacgcagcagttgagcagcaggccgcccaggatgaggaagccgccccgccagccgtagcggtcctgcagcagctgccccagcgggctcagggcacacaggaagacagggctacctgctgccgccagcccgttggccatggggcgccgcttgctgaagtagcggttcagcatgatgagcgagggctggaagttgagtgccaaacccaaccccgtgatgaccccagtggtgaggtagacctggatgatgctccggcaaaaggacgcagccaccatgcccagcgacgcaaagagaccccccacaagcatgacgggccggcagccaaagcggttcacgcacacactgcagagcggacctgtcccgtagagcatggccagcaggatggaggagatccaggctgtgtcgctgtagccgatcccaaactcctgtatgagctccttgaagaagacactgacggccttggggaaggcgtaggagaagccagtgatgacgaaacagccgaagagcacggcccagccccagccgccgtcaggggccttgacgcctgtggggccctcgtccaccacggcccctcccatggccaggagggttggttccgcctcacctgccgccgctgggccgcctcagcccgcctctcgccgc

SEQ ID NO: 356702 - DNA, 904 bp, Homo Sapiens
gaaaagccccaggattggttaaagcagggaaaggcgggcccttggggttcgggccacggcccaaggtcccttggcggtagctcccccacgaaccccgggccgggacgaagagcccccagcaccatgaccgaggcggccacggcgtaaaagcacaaagccgcggtcccggaagacgctcaggtctagcaggcgccgggagggtcgcggcggccccgagcccggctgggccgtgaccaccaggggcctcatgagtgcggcacacacgcagcagttgagcagcaggccgcccaggatgaggaagccgccccgccagccgtagcggtcctgcagcagctgccccagcgggctcagggcacacaggaagacagggctacctgctgccgccagcccgttggccatggggcgccgcttgctgaagtagcggttcagcatgatgagcgagggctggaagttgagtgccaaacccaaccccgtgatgaccccagtggtgaggtagacctggatgatgctccggcaaaaggacgcagccaccatgcccagcgacgcaaagagaccccccacaagcatgacgggccggcagccaaagcggttcacgcacacactgcagagcggacctgtcccgtagagcatggccagcaggatggaggagatccaggctgtgtcgctgtagccgatcccaaactcctgtatgagctccttgaagaagacactgacggccttggggaaggcgtaggagaagccagtgatgacgaaacagccgaagagcacggcccagccccagccgccgtcaggggccttgacgcctgtggggccctcgtccaccacggcccctcccatggccaggagggttggttccgcctcacctgccgccgctgggccgcctcagcccgcctctcgccgcctc

SEQ ID NO: 356703 - DNA, 940 bp, Homo Sapiens
  misc_feature (86)..(94): n is a, c, g, or t
cgattgtgggtccaaggaaagggggccctatgggtttggggaacgggtaccaggtgtcttggggggaggggtcacccctgaacccnnnnnnnnnacgaagtagcccccagctccaatgggggaaggggtccctcgggtaaaagccgcaaaacccgcgttccccggaagacggttccaggttttagcaggccccggggagggttcgcggcgggcccccgagccccggctgggcccgtgacccaccaggggccctcatgagtgcggcacacacgcagcagttgagcagcaggccgcccaggatgaggaagccgccccgccagccgtagcggtcctgcagcagctgccccagcgggctcagggcacacaggaagacagggctacctgctgccgccagcccgttggccatggggcgccgcttgctgaagtagcggttcagcatgatgagcgagggctggaagttgagtgccaaacccaacccccgtgatgaccccagtggtgaggtagacctggatgatgctccggcaaaaggacgcagccaccatgcccagcgacgcaaagagaccccccacaagcatgacgggccggcagccaaagcggttcacgcacacactgcagagcggacctgtcccgtagagcatggccagcaggatggaggagatccaggctgtgtcgctgtagccgatcccaaactcctgtatgagctccttgaagaagacactgacggccttggggaaggcgtaggagaagccagtgatgacgaaacagccgaagagcacggcccagccccagccgccgtcaggggccttgacgcctgtggggccctcgtccaccacggcccctcccatggccaggagggttggttccgcctcacctgccgccgctgggccgcctcagcccgcctctcgccgcctctgcccgccatcccgggaattccggaccc

SEQ ID NO: 356704 - DNA, 1369 bp, Homo Sapiens
tggaccggtccggaattcccgggatcggcgagaggcgggctgaggcggcccagcggcggcaggtgaggcggaaccaaccctcctggccatgggaggggccgtggtggacgagggccccacaggcgtcaaggcccctgacggcggctggggctgggccgtgctcttcggctgtttcgtcatcactggcttctcctacgccttccccaaggccgtcagtgtcttcttcaaggagctcatacaggagtttgggatcggctacagcgacacagcctggatctcctccatcctgctggccatgctctacgggacaggtccgctctgcagtgtgtgcgtgaaccgctttggctgccggcccgtcatgcttgtggggggtctctttgcgtcgctgggcatggtggctgcgtccttttgccggagcatcatccaggtctacctcaccactggggtcatcacggggttgggtttggcactcaacttccagccctcgctcatcatgctgaaccgctacttcagcaagcggcgccccatggccaacgggctggcggcagcaggtagccctgtcttcctgtgtgccctgagcccgctggggcagctgctgcaggaccgctacggctggcggggcggcttcctcatcctgggcggcctgctgctcaactgctgcgtgtgtgccgcactcatgaggcccctggtggtcacggcccagccgggctcggggccgccgcgaccctcccggcgcctgctagacctgagcgtcttccgggaccgcggctttgtgctttacgccgtggccgcctcggtcatggtgctggggctcttcgtcccgcccgtgttcgtggtgagctacgccaaggacctgggcgtgcccgacaccaaggccgccttcctgctcaccatcctgggcttcattgacatcttcgcgcggccggccgcgggcttcgtggcggggcttgggaaggtgcggccctactccgtctacctcttcagcttctccatgttcttcaacggcctcgcggacctggcgggctctacggcgggcgactacggcggcctcgtggtcttctgcatcttctttggcatctcctacggcatggtgggggccctgcagttcgaggtgctcatggccatcgtgggcacccacaagttctccagtgccattggcctggtgctgctgatggaggcggtggccgtgctcgtcgggcccccttcgggaggcaaactcctggatgcgacccacgtctacatgtacgtgttcatcctggcgggggccgaggtgctcacctcctccctgattttgctgctgggcaacttcttctgcattaggaagaagcccaaagagccacagcctgaggtggcggccgccagcttagtc

SEQ ID NO: 356705 - DNA, 724 bp, Homo Sapiens
cagaggcggcgagaggcgggctgaggcggcccagcggcggcaggtgaggcggaaccaaccctcctggccatgggaggggccgtggtggacgagggccccacaggcgtcaaggcccctgacggcggctggggctgggccgtgctcttcggctgtttcgtcatcactggcttctcctacgccttccccaaggccgtcagtgtcttcttcaaggagctcatacaggagtttgggatcggctacagcgacacagcctggatctcctccatcctgctggccatgctctacgggacaggtgagggtggcctcacaccgggccccctgtccggggctctgctggcggatcctgctgggcgcgtgtagcttgggctcagcaacagggccttccgcctgctccccagggaaaccctggagggaagccctttggggccaggatccttggctgggcagcaacatgctctccaccggggccaaaccaggcagggctgcgaagtccatcctggacccctgtccaaacgggtcggctgtatttatagaccgtctcagaggacaggctcctgagagccgttcctgaaaaaggtggctgttcctgagctgcagggacccaaggaggcaccaagcaggcggacgctcacgtgtcatcaatggccttgagctcgagggagccatggccaaggagtggcacttggagacccgaggaggacgaacgaagggagggcgaagggga

SEQ ID NO: 356706 - DNA, 1513 bp, Homo Sapiens
ggcctgggtggcgaattcggcacgagggcttcccagcattgtgaacagtggatcgagttctcctgctacaattcccggctgctcaacactgcaggaggctacccctacagcttttggattggccgaaatgaggagcagcacttctactggggaggctcccagcctgggatccagcgctgtgcctgtggtctggaccggagctgtgtggaccctgccttgtactgcaactgtgacgctgaccagccccagtggagaactgacaagggactgctgacctttgtggaccatctgcctgtcactcaggtagtgataggggatacgaaccgctccacttctgaggcccagttcttcctgaggcctctgcgctgctatggcgatcgaaattcctggaacaccatttccttccacaccggggctgcactacgcttccccccaatccgtgccaaccacagcctggatgtctccttctacttcaggacctctgctccctcgggggtcttcctagagaatatggggggcccttactgccagtggcgccgaccttatgtgcgggtggaactcaacacatcccgggatgtggtcttcgcctttgatgtggggaatggggatgagaacctcacagtacactcagacgactttgagttcaatgatgacgagtggcacctggtccgggctgaaatcaacgtgaagcaggcccggctccgagtggatcaccggccctgggttctgcggcctatgccactgcagacctacatctggatggagtatgaccagcccctctatgtgggatctgcagagcttaagagacgcccctttgtgggttgcttgagggccatgcgtctgaacggagtgactctgaacctggagggccgtgccaatgcctctgagggtacctcacccaactgcacaggccactgtgcccaccctcggctcccctgtttccatggaggccgctgcgtggagcgctatagctactacacgtgtgactgtgacctcacggctttttgatgggccatactgcaaccacgatattaggtggttcctttgagccgggcacctggatgcgctataacctacagtcagcgctgagctctgcagacagggagtactcccacatgctgagccggacagtgacaggctatgaacctggctacatcccgggctatgatactccgggctatgtgcctggctaccatggccccgggtaccgcctgcccgaatacccccggcctggtcggcctgtgcccggttaccgtgggcctgtctacaacgttacgggagaggaggtctccttcagcttcagcaccagctccgcccctgttgtcctgctctaccgtcagttctttggtccgtgactacatggctgtgctcatcaaggttgatggggccctttcagctggcgattatcgctggggcaccagttccctaagtgtaccaggttagccattcgccagtgaccgttggcagcccctaggcctcttctcccggtttccggaactcttctccgtgggcc

SEQ ID NO: 356707 - DNA, 1525 bp, Homo Sapiens
  misc_feature (1045)..(1047): n is a, c, g, or t
  misc_feature (1049)..(1050): n is a, c, g, or t
  misc_feature (1113)..(1113): n is a, c, g, or t
  misc_feature (1129)..(1129): n is a, c, g, or t
  misc_feature (1131)..(1131): n is a, c, g, or t
  misc_feature (1137)..(1137): n is a, c, g, or t
  misc_feature (1142)..(1142): n is a, c, g, or t
  misc_feature (1144)..(1144): n is a, c, g, or t
  misc_feature (1146)..(1146): n is a, c, g, or t
  misc_feature (1148)..(1148): n is a, c, g, or t
  misc_feature (1155)..(1155): n is a, c, g, or t
  misc_feature (1166)..(1166): n is a, c, g, or t
  misc_feature (1168)..(1168): n is a, c, g, or t
  misc_feature (1172)..(1172): n is a, c, g, or t
  misc_feature (1174)..(1176): n is a, c, g, or t
  misc_feature (1193)..(1193): n is a, c, g, or t
  misc_feature (1237)..(1237): n is a, c, g, or t
  misc_feature (1323)..(1323): n is a, c, g, or t
  misc_feature (1344)..(1344): n is a, c, g, or t
  misc_feature (1356)..(1356): n is a, c, g, or t
  misc_feature (1374)..(1374): n is a, c, g, or t
  misc_feature (1386)..(1386): n is a, c, g, or t
  misc_feature (1388)..(1388): n is a, c, g, or t
  misc_feature (1397)..(1397): n is a, c, g, or t
  misc_feature (1403)..(1405): n is a, c, g, or t
  misc_feature (1413)..(1413): n is a, c, g, or t
  misc_feature (1429)..(1429): n is a, c, g, or t
  misc_feature (1431)..(1431): n is a, c, g, or t
  misc_feature (1444)..(1444): n is a, c, g, or t
  misc_feature (1452)..(1452): n is a, c, g, or t
  misc_feature (1487)..(1487): n is a, c, g, or t
  misc_feature (1502)..(1502): n is a, c, g, or t
cggagccgccagaccgtcgcgcccctgccccatcgtagtatatgagctcgcctacacaaggacccccgctaaaagccagagctcccagtccccgaggcttgaagacggggactcccttctccaccaactctgtcctcggggggtggggccccagccgagatcacagcgcgacaggagtgggggtggccgctggagacaggtgaagaaacaagaaaactaagaaatccgagcggttggagggggagtctgtgtggatgggatggggacgccgggggaggggctgggccgctgctcccatgccctgatccggggagtcccagagagcctggcgtcgggggaaggtgcgggggctggccttcccgctctggatctggccaaagctcaaagggagcacggggtgctgggaggtaaactgaggcaacgactggggctacagctgctagaactgccacctgaggagtcattgccgctgggaccgctgcttggcgacacggccgtgatccaaggggacacggccctaatcacgcggccctggagccccgctcgtaggccagaggtcgatggagtccgcaaagccctgcaagacctggggctccgaattgtggaaataggagacgagaacgcgacgctggatggcactgacgttctcttcaccggtgaggctggggggaggcataggtcttggcacagggaagtagagtttgggagactcggccgtctggagccttgtttctaactcactcccgccctcaaacctccgcggcctcccggactcaggccgggagtttttcgtaggcctctccaaatggaccaatcaccgaggagctgagatcgtggcggacacgttccgggtgcggagcgggaccagcctagggagggagggggtgcaggtgggggtcggaagggcctgggcgcccgctgaggaaatgagaggcagagagcagcctatgtttgaagataccccatcacccctcccgcgcccctgaatacctcccttcgctcaccctaggacttcgccgtctccactgtgccagtctcgggtccnnncnncctgcgcggtctctgcggcatggggggacctcgcactgttgtggcaggcagcagcgacgctgnccaaaaggctgtccgngnaatggnagtgntnananatcaccnatatgccaccnanaccnannnagatgacgcagctgctnactgtctctttcttcgtcctgggttgcctgggtgccccctttcntcctgcaccgtggaggtggggatctgcccaacagccaggaggcactgcagaagctctctgatgtcaccctggtacctgtgtcctgntcagaactggagaagctggcnccgggctcagcnccctctgcttggtgctcngcacacgccccnanagctgaggncctgannntggggaanagctgaccaggggtantntagtataggaagnagaagggnaaggagggttagatagagaatgccgaataggcagnagttgggagagagcntcaatattgggggaggggagagt

SEQ ID NO: 356708 - DNA, 1359 bp, Homo Sapiens
ctggtacggtccggaattccgggatatcgtcgaccacgcgtcgcggagccgccagaccgtcgcgcccctgccccatcgtagtatatgagctcgcctacacaaggacccccgctaaaagccagagctcccagtccccgaggcttgaagacggggactcccttctccaccaactctgtcctcggggggtggggccccagccgagatcacagcgcgacaggagtgggggtggccgctggagacaggtgaagaaacaagaaaactaagaaatccgagcggttggagggggagtctgtgtggatgggatggggacgccgggggaggggctgggccgctgctcccatgccctgatccggggagtcccagagagcctggcgtcgggggaaggtgcgggggctggccttcccgctctggatctggccaaagctcaaagggagcacggggtgctgggaggtaaactgaggcaacgactggggctacagctgctagaactgccacctgaggagtcattgccgctgggaccgctgcttggcgacacggccgtgatccaaggggacacggccctaatcacgcggccctggagccccgctcgtaggccagaggtcgatggagtccgcaaagccctgcaagacctggggctccgaattgtggaaataggagacgagaacgcgacgctggatggcactgacgttctcttcaccggccgggagtttttcgtaggcctctccaaatggaccaatcaccgaggagctgagatcgtggcggacacgttccgggacttcgccgtctccactgtgccagtctcgggtccctcccacctgcgcggtctctgcggcatggggggacctcgcactgttgtggcaggcagcagcgacgctgcccaaaaggctgtccgggcaatggcagtgctgacagatcacccatatgcctccctgaccctcccagatgacgcagctgctgactgtctctttcttcgtcctgggttgcctggtgtgccccctttcctcctgcaccgtggaggtggggatctgcccaacagccaggaggcactgcagaagctctctgatgtcaccctggtacctgtgtcctgctcagaactggagaaggctggcgccgggctcagctccctctgcttggtgctcagcacacgcccccacagctgagggcctggccttggggtactgctggccaggggtaggatagtataggaagtagaaggggaaggagggttagatagagaatgctgaataggcagtagttgggagagagcctcaatattgggggaggggagagtgtagggaaaaggatccactgggtgaatcctccctctcagaaccaataaaatagaattgaccttttaaa

SEQ ID NO: 356709 - DNA, 1738 bp, Homo Sapiens
tcatctggaggtctaggaagcatatggtgatctgtcagcactccatttgcccggacaccttttgggcagcgtcgctgctgcctgccacaaacagtgcgaggtccccccatgccgcagagaccgctcagttgggatggacccgagactggcacagtggagacggcgaagtcccgggaacggtgtccgccacgatctcaggctcctcggtgattggtccatttggagaggcctacgaaaaactcccgcccggtgaagagaacgtcagtgccatccagcgtcgcgttctcgtctcctatttccaacaattcggagccccaggtcttgcagggctttgcggactccatcgacctctggcctacgagcggggctccagggccgcgtgattagggccgtgtccccttggatcacggccgtgtcgcccaagcagcggtcccagcggcaatgactcctcaggtggcagttctagcagctgtagccccagtcgttgcctcagtttacctcccagcaccccgtgctccctttgagctttggccagatccagagcgggaaggccagcccccgcaccttcccccgacgccaggctctctgggactccccggatcagggcatgggagcagcggcccagcccctcccccggcgtccccatcccatccacacagactccccctccaaccgctcggatttcttagttttcttgtttcttcacctgtctgggagaagaaacagaaaaggaggagacagagaaaaagacatgcagacaagggcgttgggggtggttaagagcgcccaggtcttcctcctgccatctctaggcgtccctcccactccgccccacccactccagaccttccgctcctgtcgacctcactctacccagcaccctcaggggtcagattctttaagaggagcctgaggaacaaggctagggtctctaatctccaaaacacctgttgcccctgcttgggggcttgtgaggtccctgtcgggcgcccctcttggcagccactaggatgcgctcactccccaaaaatgcagcagccccgcccccttaaccctcagctgctcgctaccgcagggactggaagtccagcccgcgacccgcaggggttatgggacagaaggagaaagctggagaggcaggggctggggaatggaagtcctgaatacccgaacgagaagggagagaggtgggtaggaagggaggagttcgagcctaaggagttaagcatcctctctccgccctggctggtcacgctgcccctagcacgacctagtataaaccagaccgagtcccgaaggactgggagaggtctaaaacgaaatgcgaggggcggggtaacagggggcgtggttccggggcgctggcactactcccggctccaggacccggttccccgtctatgtcccaaagtccaccccgcctagctccgcgcccaaataccggctccccatactctctgtctggtgcaggcatgggcccggcacccccaaactccggcccccacacggttcagggccccccacgcaagactcacctccagcggccacccccactcctgtcgcgctgtgatctcggctggggccccaccccccgaggacagagttggtggagaagggagtccccgtcttcaagcctcggggactgggagctctggcttttagcgggggtccttgtgtaggcgagctcatatactacgatggggcaggggcgcgacggtctggcgatcccgggaattcc

SEQ ID NO: 356710 - DNA, 872 bp, Homo Sapiens
ctacacaaggacccccgctaaaagccagagctcccagtccccgaggcttgaagacggggactcccttctccaccaactctgtcctcggggggtggggccccagccgagatcacagcgcgacaggagtgggggtggccgctggagacaggtgaagaaacaagaaaactaagaaatccgagcggttggagggggagtctgtgtggatgggatggggacgccgggggaggggctgggccgctgctcccatgccctgatccggggagtcccagagagcctggcgtcgggggaaggtgcgggggctggccttcccgctctggatctggccaaagctcaaagggagcacggggtgctgggaggtaaactgaggcaacgactggggctacagctgctagaactgccacctgaggagtcattgccgctgggaccgctgcttggcgacacggccgtgatccaaggggacacggccctaatcacgcggccctggagccccgctcgtaggccagaggtcgatggagtccgcaaagccctgcaagacctggggctccgaattgtggaaataggagacgagaacgcgacgctggatggcactgacgttctcttcaccggccggggagtttttcgtaggccctctccaaaatggacccaatcaccgagggagcctgaaatcgtggccggaacacttttccggggacttcgcccgtcctccactggtgcccagttctccggggtcccctccccaacctgccggcggtccttctgccggccatggggggggaccctccccaactgttttgtggcaagggcaaaccaaccgaaccccttcccccaaaaaaggccttgttcccgggggcaaaatggcccaaggggctttg

SEQ ID NO: 356711 - DNA, 1723 bp, Homo Sapiens
  misc_feature (82)..(82): n is a, c, g, or t
  misc_feature (87)..(87): n is a, c, g, or t
  misc_feature (93)..(93): n is a, c, g, or t
  misc_feature (100)..(100): n is a, c, g, or t
  misc_feature (105)..(105): n is a, c, g, or t
  misc_feature (1197)..(1197): n is a, c, g, or t
  misc_feature (1199)..(1200): n is a, c, g, or t
  misc_feature (1202)..(1202): n is a, c, g, or t
  misc_feature (1229)..(1230): n is a, c, g, or t
  misc_feature (1232)..(1232): n is a, c, g, or t
  misc_feature (1244)..(1244): n is a, c, g, or t
  misc_feature (1250)..(1250): n is a, c, g, or t
  misc_feature (1252)..(1252): n is a, c, g, or t
  misc_feature (1269)..(1269): n is a, c, g, or t
  misc_feature (1271)..(1271): n is a, c, g, or t
  misc_feature (1277)..(1277): n is a, c, g, or t
  misc_feature (1279)..(1280): n is a, c, g, or t
  misc_feature (1282)..(1284): n is a, c, g, or t
atgcaagtactttacatgagagtcagctttctgtggaactttctagtgagaggtcacagcgtcaaaaaaagagatgtagaanagtcnaattcnctgcagnaagangcgtgtcagaagagatcagatcaccttattaatacagaatctgaagcagtcaatttaagtaaagtcaaagtcttcacaaaatcagctcatggtgggctgcaaaggggcaacaagaaaatcccagagtcatctaatgtaggaggatcaagaaaaaagacatgtccattctataagaaaatacctggaaccggctttacagttgatgcctttcagtatggcgtggttgaaggttgcacagcctattttctcacacattttcattctgatcattatgctggattgtctaaacacttcacatttccagtttattgtagtgagataactggcaatttgttgaagaacaagcttcatgtgcaagaacaatatattcacccattgccactggacactgaatgtattgtgaatggtgtcaaagttgttttgcttgatgccaatcactgtccaggtgctgtcatgatcctcttttatcttcctaatggtactgtcatattacacacgggagacttcagagcagatcccagcatggaacgttctcttcttgcggaccagaaagtccatatgctgtacttagataccacatattgtagcccagaatacacctttccatctcagcaagaggttatccggtttgccatcaacactgcctttgaggctgtaactctaaacccacatgctcttgttgtctgtggcacttactctattggaaaagagaaagtcttcctagccattgctgatgttttaggttcaaaagtgggcatgtcccaggaaaaatataaaactctacagtgcctcaatataccagaaattaattcactcatcactaccgacatgtgcagttcattggttcaccttctcccaatgatgcaaattaattttaagggcttacagagtcatttgaagaagtgtggtgggaaatacaatcagattttggcatttcgacctacaggatggacacactctaacaagttcactcagaaatagcagatgttattccccagaccaaaggaaacatttcaatatatggaaattccttacagtgaacacagcagctacctagaaatgaagcgcttttgtccagtggctgaagccccncnnantcatacctactgtaaatgtgggccccnncnaatctaggagcncaatgnanaaatattttagagagtncnaattgnanncnnnatattgatgataccccccgaggattccagtagtagttaagttccttggatgtagcttgttagtagttaaatctatagaaatgtgaaatacactttgtgtggaaaaacctcatgaagattgttcagatactttattttctcatttatgtttgaacaacatgttcgtggtgctgaatgcctctcagcatcatcaaggataactgaaactgggtctccctgggacccttaatttcttgtcccctgccctccatgggcagttatattctgcatcaagccttagaagaggaagcaaaggcagattcagggaccaaaaggattaatgataattaataaagtagtttgaagcattatatatataagtaattatgtgtctttaaaattatgagatgaaacttttatatgacgtgtatacttaaataaaattaatataaaatttaaaa

SEQ ID NO: 356712 - DNA, 861 bp, Homo Sapiens
agcgggctgtcggggcgaccgcgggagctcgccgtgcgccgtggctgggacctggcctggccgagcgcgccggcgccgcggccgcagacaaagggcggctcgcgcccgggccgccacgctctcgggctctgcctcgggaaggagacttggtctgaaagatgccacattcctgcagcctctcttggtgcagtggaatacagtcttgggcgaggtggcgtggatgagctggtgaaagaggatgctgcccacatccaaaggctccagaggatcctggcctggcagctgagctcccctgcatttggaacctcaggcgtaacttggtgtagagctcatgaaaggtgcttgtgtttctccagcttttttcaccagtgcttaccagactggctcaggttttggaatctaaggtgagctggtagaaacaggagaggtagaaagaagcccctgggatgcctccagaattcattgatgggatccctgcatactgcttggaacacagaaagaggctgtgacacagctgagctttggagcatcttaaggagctcagctcagcaaacaagctcttgcatttcagccagaaagagcctcttgtaacaaagtattcaaaggggagagtttctgcatcttttactttgcagtccactatggtagaaaaattgacattccatagataatgatactggggttactttccaagattgccagctttaaacagacaatttgagccattctaggcttaagaagggtccaggaaacacaggaaatcagtagacagccctccccaatgcaggttcagacgacaggctgcgaccccaacttagcacaggtccagcgagcttgaccatatgccatactcgtctccac

SEQ ID NO: 356713 - DNA, 872 bp, Homo Sapiens
tgaacagcttggcatgctcttctgccagcgtgccctgctccagcaagcgtgccagttcggtctccatgtactcctggacgatgtacgccacgctgaacttgaacagctcaccctgcaggtcagtgcccttgggaccgagcacctcgtacactttgacgatgttgtcgtggtccaggcgccgaatgatcttgatctctcagagcgcgtgcttcatgctgcgggcatcgctcagggcaatcttcttcacagcgaccttccggcaggcccggctgtccatggccgacagcaccaaaccattgacaccgaagcccaggggttggaagtcaacaaagcgcccaccgaggtcatacccatagacactggcgatgcagtcacccttctcagccattgtgggctcagtgatctggagctgccaggtaacacaggggcagtcaggaaaggccacgtctcggctagcggcctccctcgcgcacctcattctgtcaagtcccacgcctgagggatgtgttttctcctagtgaggtcactgccaccagctctctggagacgagaatggcatatggtcatgctcgctgagctgtgctagttgggggcgcaggctgtcgtcttaacctgcattgggagggctgtctactaattcctgtgtttcctgaacccttcttaaagcttagaatggctcatatttcttttaaagctggcatcttggaaagaaaacccagtatcattatctatggaatgtcaagttttctaccatagtggactgcaaagtaaaagatgcagaaactctcccctttggaatactttgttacaagaggctctttctgggctgaaatgcaagagtttgttttgctggagctggagctccttgaaga

SEQ ID NO: 356714 - DNA, 1058 bp, Homo Sapiens
  misc_feature (955)..(955): n is a, c, g, or t
  misc_feature (962)..(962): n is a, c, g, or t
  misc_feature (965)..(965): n is a, c, g, or t
  misc_feature (998)..(998): n is a, c, g, or t
  misc_feature (1027)..(1027): n is a, c, g, or t
  misc_feature (1032)..(1032): n is a, c, g, or t
  misc_feature (1043)..(1043): n is a, c, g, or t
  misc_feature (1047)..(1047): n is a, c, g, or t
  misc_feature (1049)..(1049): n is a, c, g, or t
aaactatctgtaaaattcatgtaggatagctagagagtatttggagaattatttttcaactaaatgtttatttgcaaatgaactacagacacactccttgagtgtccactttcaggataaggaactcataaaggcaacaccatatttacaactttgcatcagatctctctcctggtgtgacttttctgaagcactgcacatgaattcatttgcaggaggatgtcctacattacacttatactgtttttctgtagtgtgtattctcacatgtcgccttaaggatgaggaacaattgaatgctttcccacaatgcttacattgataaggtttctctccagtgtgcagtctcatatgtattggtaaagatgatggccatttgaagaccttcccacattccttacattcatagggcttctctacagtgtgcgtcctcacatgttgttgcaaaagttcaggccaactgaaagctttcccacactgcttgcatttatagagtttctctgcgcgtatgccttctcatatgtttttgtaaggatatgtggcaatagaaagctttcccacatagcttgcattcataggatttgtcttcagggtgcattctcacatgttctcgaaagcaagcagacaagctgaaggctttcccacactgcttacattcatagggtttctctctagtatgtgttctcatatgttttcgtaaagatatgggccaattgaaagttttcccacattgcttgcactcatagggtttctctccagtgtgcaccctcatgtgtcctcgaaaggaggaggggtgactgaatgctttcccgcactggttgcattcatagggtttctctccaccatgagtcctttcatgtcttcgaaaggaatgggggataaatgaaggtcttcccacactgtttgcattcgtagggtttctctccagtgtgaatcctttcagtcttcgaaaggntggaganaangaaggtttcccacatgtttgcatcgtagggttntctcagtgtgtgtatcagtgtctcgaaanccganaaactgaggcncccncntctttcatt

SEQ ID NO: 356715 - DNA, 1003 bp, Homo Sapiens
  misc_feature (13)..(13): n is a, c, g, or t
  misc_feature (17)..(17): n is a, c, g, or t
  misc_feature (19)..(21): n is a, c, g, or t
  misc_feature (26)..(26): n is a, c, g, or t
  misc_feature (50)..(50): n is a, c, g, or t
  misc_feature (64)..(64): n is a, c, g, or t
  misc_feature (88)..(88): n is a, c, g, or t
  misc_feature (361)..(361): n is a, c, g, or t
  misc_feature (402)..(402): n is a, c, g, or t
  misc_feature (433)..(433): n is a, c, g, or t
  misc_feature (441)..(441): n is a, c, g, or t
  misc_feature (444)..(444): n is a, c, g, or t
  misc_feature (452)..(452): n is a, c, g, or t
  misc_feature (457)..(457): n is a, c, g, or t
  misc_feature (465)..(465): n is a, c, g, or t
  misc_feature (469)..(469): n is a, c, g, or t
  misc_feature (481)..(481): n is a, c, g, or t
tccacctaagaanaggngnnnttctntcaatatatatgatatgatgattnaaaaataataatcncataaataaggagctagacacccnctcccctacagagctctgtgaaagtccaggacatctcagccgagggaagccctgccaccaaaactgtggatcagggcacatcccagccttctgtagggcacccagaacacgaggggaggacaggctcgacctggactccaggactctttccaaagactgagtgacacttcaagggacagacaggaggaccacatgaacccacaaggcccaaactcaggctctgcccctgaaccctggacagagcaactcgcaaacaggacagagaacagaccngttcaagaaaccgcagcttgggaaaccccgggcaacgtganttggcaacagacgggtgatactccctcacantggctacntcntgaggccntgccntagtcccnggcntctgcaggaccntttagggaaggtgaattggtagggacaaaaaaggcacaaaccacaaagaaatgacaggagaagaggcgggcacccctgcagagtgagcactgcggagggccgggccctgtcctaggcccgcggatgaatcctcgcagcagcagcaacagcacccttttctaggggagccacagctcagggcagccacacctccaggactccaggctgcctggcctcacagtcctgtgaccacccccactgcctgtgcaagtgacctgcaaattcaggaaaggctgcctggtcctacgaatgcagcaatccctccaagagcctggaggattccggccgcacctggagcgcgccacctgcagcctgtctgcctgccacagtgctcactgctttccattcagcgccaggccatttcccaagctggtcaaccacggggtggccgggcaggtgcagttcacccgcaggtgagaagacaagcctccagcactggttccttttgtcctcaaatcagatgacacaaggagcactccacag

SEQ ID NO: 356716 - DNA, 1087 bp, Homo Sapiens
  misc_feature (174)..(182): n is a, c, g, or t
  misc_feature (326)..(348): n is a, c, g, or t
gcgtggcgaattcggcacgaggatggttagtactataattatcccaaggattcattcactcatagaacatttgttgagcaattactacctgccagtcacttccaagtggtaagtgagatagaaatggttctttgtggcgctcacaatttattggagaatggaaacacaattacnnnnnnnnngtgtgataagttctgggagaagggtggtacaggatcctgtggggtagtggtggctccatataggagggacattgggatactgatcaggaaggagtgggggacagggctagaagctgcattagtataaagttatgtcagactgcnnnnnnnnnnnnnnnnnnnnnnntcagtagtctgtggtaaagaattgctataggaacagccagtaggggcagttaagctggtcttggtgaatcaggggaagcgtcctagaggaacagatgtccatgctgaggccaaatgctggacaggagttagccagacagggaaattgcattctgggcagaggagacagcaaaggtcaagaaacatgacaactttggaagactgtaacttgttcagaggcagagggtgcaaaggagaaatgaggaaaggtgaagctggagaggtgggcttggtccagctcttgctgggccttttcagccgtgttaaagatttagactgtatccagagggatgttgaactttaagcctaagactgaaaaggtgagaattgtgccttagatcactatggttgcagtgtggagactggtttggaaaggggagaaatcagaggcttttacagccatcccagggagagagaatgaacaccagaattagggtaatggaagatggaaagaagagaaatcgttttatgggttgctcaggagatagaattgacatgtcttgggattgttttgctgtgtaggggagagagacaagtcaagagtatacatcctgtttctgacttggcaactgggtgggtcatgggtctgtttcctgagacagttgtctacagccataccaccgtaagcgccctaaatctcatcagagacagttatgcaaatggagattggggaaagagaggttgtggctggagaccagaga

SEQ ID NO: 356717 - DNA, 1702 bp, Homo Sapiens
  misc_feature (1580)..(1609): n is a, c, g, or t
  misc_feature (1622)..(1622): n is a, c, g, or t
  misc_feature (1660)..(1660): n is a, c, g, or t
ccgggatggcagctgaacaggggcactgaggtgtcggccggcggggcagtggcccggagcggggggcgggggcgttgatcatgtttccctttgggccccatagccctggaggggacggatcggccggagccggggctgaggagccgacgccccacgaggggcaggcagcagccaccgggccgccctcgccactacatcccggggctgatgcgacccatccccctccacccgcccgaagccctcgccgccccggcgccccatcgctgtccccggccccgcgctccggagagctagggctgcctggagctccggagtcctcaactgcctccgccccgggagaaccgtcacctccctcccctccgtgccggcggcccgggccagactgcagggccaagagccggggccgacacggcctcggcgcgggcctgggcggccctggcgctaggctgttcgggtggctgaaagaacgcagcctgggccgcgggctgttcgtggacccggcgcgggacaattttcgcaccatgactagcctctacggttccatccaccccgcggactcggtgtacctcagcacccgcacccacggcgccgtcttcaacctcgagtactcgcccgacgggtcagtgctgacagttgcttgtgaacaaactgaagttctgctttttgaccctatatcttcaaagcacataaaaacactttctgaagctcatgaagactgtgtaaataatatcagatttcttgataaccggctgtttgctacctgctctgatgacactacaatagcactatgggatctgagaaaattgaacaccaaagtatgcactttacatggtcacactagctgggtgaagaacatcgaatatgatactaatacaagactcttagtaacatcaggatttgatggaaatgtcattatttgggacactaacaggtatacagaagatgggtgtccacataagaaattctttcacacacgttttctcatgcgaatgaggttaacaccagatagttccaaaatgttgatttcaacgtcctctggatatctcttaattttgcatgaccttgacttaactaagtctttagaagtaggcagctatcccattttaagagcaagaagaactacttcaagttcaggagtttcaccacgaaatagtcttgaagtcgtaacccctgaagttcttggtgagagtgaccacggaaactgcatcacgtccttacagctgcacccaaaaggctgggccactcttcttcggtgctcaagcaacagtgatgatgaggaggtacaggcagcagcactccaccttcaacagggctcattggacaaattgccattgccgtgtgtgcagagcttaggccgatcgctgactgcagtctctgccttcaagggcatactgctagagatcctgcttctcgactctcctgtttctgtcctctcttgcttcatatggtatcattatcccttccaaactcttcttattcctctcctgctggggttgagcaaggtgggaggtactttaaaggccagcatcagctcagtttttgcccagcttcttaaatcttgcctctttcatctcaccctnnnnnnnnnnnnnnnnnnnnnnnnnnnnnncccttgtataatnaaacataggtctggaaatgtttcagctaagctgggctnaaatgtgaggattttaactaaggccaattggagtattcataa

SEQ ID NO: 356718 - DNA, 1956 bp, Homo Sapiens
  misc_feature (1051)..(1051): n is a, c, g, or t
  misc_feature (1718)..(1727): n is a, c, g, or t
ctttttagaaataaattttatgtgtattttcaggtcctcccaaacattttcctgtggtcaccgtcaatcatattttgaaagatgtagtaaccagctatctacaagtagaagaatatgaaccagagctctgtagacagatgactaaaaccatttctgaggttattaaagcccaggtcaaggacttgatgattccacggtataaactaattgtgattgttcacattggacaactgaacaggcagagcatacttattggaagcagatgcctctgggatcctaaaagtgataccttttcatcttatgttttcagaaattcttctctcttcgctcttgcaaatgtctatgcagtttaccttgagtgattgaaaataagaaatctagctcttacttttgaaaattctgaggcaggctgtatgtctgtacacaaaagttttactgccaaaaactttgagaaagaaacaacactgatatttcaagcaactggaagcttttgaattttttcatattctagtaaagatttggggaggggagggtagccacagaaagaatcttgtttatctaaagcaggaacttgatcttggttttgctggattgctttccatagacatagattcttattaaatatttggtttggtactaattattttaattattctttaattagagtggtacaatttcctgcattggtttttaataaaaagaagctttagaaaaactatggctatataccctgaccaataaatgatagtagaatattcaacatggtatacacaaatgataaataatgtgcctcagtgctgcatataaaagaatacttgttttcattttgtacttaataaattgagcagcattcattaagtgcaattattgttacatgtacctgacagttgaaactgctgaggtagaattaatggcttcataacaattatcgtggtcccacgggctgcaagctaaaaactagaagctcttgtggcttgcctgcactttacacaattgtgggagaaccgaaagttggctcttccagtaatggaaactataaaagtgaataaanggctttttgggacactgaagtagacattgtgatattaaatatacatgatgcttaatactaaaatgtgtctgtaacacataaaatcatttattggaaagagacattgcttttaaatatcctaggctaacaaactttttcacaaaatatatggctggcaccttaacaaataaagcatgtgtagttaccattttactcctatgaatttaatactaaagtgacccagtgaggtttttgaatagacgggtgctaaaatttacagggctgaaatagcttattattctgctggttaatgtatcttacgccacggatcatttatttttatgaagctttcaagtctttgtgtgcaagtaaaatgatgttgtggcgttgttcttggatggtaagtggactgcctagaggacatttgttaaaggtcaaagacaaattgtacacatatggagaaaattagcaatgctgtagtcttaaggaaaaaatgatttatcattcatatcaaaaagagtttagcaaatggaaaaccagttaatgctttaattttaaaatgttttggtgtcttacttttccctaaaaatgacatgtagtaaaaaatggatacttttaaaatcccttcccttctgctattttctggcttttaaagtgattattcaaaatgaatttgtcaattttcacnnnnnnnnnnctgttagtgcattagtgggaatatgtctatgtaataatttatcacaaccaatatttgtcaatctccatagaacagttttcaatctggattagattacacgtataacaagtaaatgagcttcatattttcattacacattggtgaacatctcccttcgtggaacaacagcgggggtaatcatatcactaattttgtatgaataaatgaaaatgaagaaacttctttacat

SEQ ID NO: 356719 - DNA, 645 bp, Homo Sapiens
gcggccgccggctgaatgaagcctgggacgcgggagccgcgccgcgcgcagtgtctgcagtgccggaggtctgggaggctccgggcgaagcctccctgctgcaggttatgatgatgtcagacaatgctaaaggcagagcagctcattcatggaagaaaagagggagtatttcttctctaagtaatcatgaattttggcgaaaggaaattcatgggcgcatcaaagattctatgagtactgtgtcttatatggaagaacccagtcagcgtgatgatatctctcgccttacagttcagatggaaaacacctatcagttgggtcctcccaaacattttcctgtggtcaccgtcaatcatattttgaaagatgtagtaaccagctatctacaagtagaagaatatgaaccagagctctgtagacagatgactaaaaccatttctgaggttattaaagcccaggtcaaggacttgatgattccacggtataaactaattgtgattgttcacattggacaactgaacaggcagagcataattattggaagcagatgcctctgggatcctaaaagtgatacctagtcatctttatgatatcagaaatacttctctcttcgctcttgcaaatgtctatgcaggttaccttgag

SEQ ID NO: 356720 - DNA, 1717 bp, Homo Sapiens
  misc_feature (109)..(109): n is a, c, g, or t
  misc_feature (112)..(112): n is a, c, g, or t
  misc_feature (951)..(1098): n is a, c, g, or t
  misc_feature (1136)..(1190): n is a, c, g, or t
  misc_feature (1213)..(1233): n is a, c, g, or t
gctgcggttctcagccggccaggaacagaggccaaaggaatggttcctattcctttcaaagggcataggttttttcccaatttgttctttacccatttcagagaagggnagnaagagtaatttcacagctttgcttagtaaaaattgttttttcagtcctcagttttctcaactgcacatcagcacttgaatttttttatgaatatgtgtttggcttccccagggaagttgcttgctggtaaacaaacgaaagcataaaaagaaaaaagcgaagtattttctgaagttgggccctataaagtattagaaaaacaattttataatgtgcaataatcaggtaactaggtttttcagttaaaaaatgtaatgaccttatataagctagattactgagactatggtattaaacaatccatttgctcctctaaggaatatttacaatttaaaacctgctttccagcaagctgggccaggtttcacattaatttacttttcatatataatacagaaaatgaaaataaatattaaccttatagtaaaggactcatctctgaaaacacatgttctgatgctttagataacgagttgagaatataatacagaaatgaattcagcttcaagttgtgcttgcatatatattttctgaagctttgctgccagcttgttaacaggaaaagaccacctatcacatccacatccattatgtgcttttctcatgcccctagggatcatggtgcttggtcaagtatatatttgagtcaaattctccaaagcataaattactctccgattttaggttagggccctttggaagccatggttatttgttcagaatgcaacatattattaatacaccaaggcaataatttaccaagtcattaggttgaaccatatgaaagtgtctatattcatttcacctatcattttaacctataaaaatgatcacttggnnnnnnnnnnnnnnnnnnnnnnnnnnnnnnnnnnnnnnnnnnnnnnnnnnnnnnnnnnnnnnnnnnnnnnnnnnnnnnnnnnnnnnnnnnnnnnnnnnnnnnnnnnnnnnnnnnnnnnnnnnnnnnnnnnnnnnnnnnnnnnnnnnnngggcgcctgtagtcccagttactcaggaggcttgaacnnnnnnnnnnnnnnnnnnnnnnnnnnnnnnnnnnnnnnnnnnnnnnnnnnnnnnntgacagagtgagactctgtctcnnnnnnnnnnnnnnnnnnnnngattacttacatatggttcaatttgtcattatcctggaaccaatagagagtagtttgagccctaggagaatatgaatcaatacactgttgagattgcattgcgttcactgatggtgaccttccctcttgcctttaaggcaaccataagtgaggcaaatgtaccatatagagatggatgagactggaccttttgtctttttctgtctccaaactgactttgtcatttttgaaactgctgtaaacattcctctcaatggaacagcctctgcccaacaaataaagttctcactcttgaaagaaactacaccagggttaggagatcaaatgtggcatgtgactgtgactttgtagatgagtggaacctctgccataactctttctgctccccaaattgtcctgagaatttggctaggacagaacattagtcattgactgctcctagccagatctggagaactgagctaggcacaaaattccatctcag

SEQ ID NO: 356721 - DNA, 1175 bp, Homo Sapiens
  misc_feature (355)..(355): n is a, c, g, or t
  misc_feature (429)..(429): n is a, c, g, or t
catcattctttagttgaactcaattcaacgaaaaggaatagcacttgaactgagcattagaaaatgagagaataataggatttcaatggatacaagtgaggacagctggtaagagaaaggagattccaggaacagtattggtaaaaataaagaggtgcccaaaagcacagcctcctcaatgactgcagggaatgtgatactgcacaagggcagagtatcacagggctatggtgagggagaaggctagacatgcaatttgggagcagactgcaaagggctctgatggctgtgttgagtattgagcacttgatcaagtagacctgagcaagtttgcctttcataaagcaaaaattangaagactcaaagaggagaaatgagaaaacacaaaaaccacctaagaagctgcgtatggagtgcagaacacgtangaaaggtagaaatggaaaggaaataaagtgaaaagattacaggaggagaatctacaaaattgcctgaggataagaacaaaaggaagaaaagagatagggatgacaccaaggtttctaatcaagggataactcagatgaagtatgaagaaaagagaaatagatatggatggaagatagtattttgggtttacaaaatacaatgtttgggatacaggagagcctcccatttcccagtcatgtaacaagcagatagaaatgcacgtctggaactccagagacaagtgaggaaatttattttgaaggttatctatgtagaaattattgtttctatgagaagtggatagacatatggcaggagacagtacagatagccacctgaaaggggatatagataaaatgaaaataaaagagtttagaatggagatggagacatagatgccaaacatcaaatggagacagagttccatgttgatgaagaaagtgaatgtcaaagaagtaactgacaaagaacaacttccatccatggcatatttccaatggaagatgcttccaatattttattcctctagaaaaacatagttgcctcttttcttccccctccccgagaaaagcaaaaatggttacctggccagtaagtagatttagaatatttaagatacatccaacaaactactcttatttctagctagccaaataatcttgatagatctttttaaaataagacataaatcaatgtatctacaaaa

SEQ ID NO: 356722 - DNA, 788 bp, Homo Sapiens
ccagctcggttcctaagctgcagtggggaaacagggtggtagggtttctgaatgggtcggctccccccacttggtggcaggtgttatgtgcagggctctgggaacacttcacctcccctgggcgtacatgcccagagacggaacgcccaaagcgggaaaaagccagctgccaatgaaattgaggccggagcactccaaacggtgtaccactaccacactggccgaacagaaccctaaggggggagggggacatcagcagccccaacagcaccaggctgccggcgccagccaccccccaggaagtgccaggaccttccagaccagaaagtgggacccatggcagccgagacctcccagtcaacagaatcatcgatgtggatcttgtaactggctcggcgcccgggcgggatggtggcatagcgggggcacaggctggccctgggaggtcgcaggccagtggtgggcctcctacatcagacctccctggcttgggccccgtcccgggtgagcctgctaagcccaagaccagcgctcaccacgccaccttcgtctgagctgccctggcctggccaactctcctgtggacatgtcggggtggggcagcccaggtggattctgtgggcctcaggggggccaccctggccaccacaccctcaggagcccagccaggagggcagggggtgacctcgctggaggcactggccccggacattcgccatgctggccatggggctccctggccctggcctcctgctgcccaataaagcatttctgaggacccaaaaaaa

SEQ ID NO: 356723 - DNA, 489 bp, Homo Sapiens
agcggccgcggacctcttcctggtgggcggggacaagcctctggtgctgcaccaagacagtagcatcttggagtcaagggacctgcgcctagaaaagcgcaccttgtttcggctggatcttgttccgattaaccggtcagtgggactcaaggccaagcccaccaagcccgtcacggaggtgctgcggcccgtggtggccagatacggcctggacctcagtggcctgctggtgaggctgagtggagagaaggagcccctggaccttggcgcccctatatcgagtctggacggacagcgggttgtcttggaggagaaggatccttccagaggaaaggcatccgcagataaacagaaaggtgtgccagtgaaacagaacacagctgtaaattccagctccagaaaccactcggctacgggagaggaaagaacactaggcaagtctaattctattaaaataaaaggagaaaatggaaaaaatgctagggatcc

SEQ ID NO: 356724 - DNA, 1438 bp, Homo Sapiens
  misc_feature (55)..(69): n is a, c, g, or t
  misc_feature (75)..(308): n is a, c, g, or t
  misc_feature (311)..(313): n is a, c, g, or t
  misc_feature (319)..(319): n is a, c, g, or t
  misc_feature (322)..(325): n is a, c, g, or t
  misc_feature (330)..(335): n is a, c, g, or t
  misc_feature (337)..(337): n is a, c, g, or t
  misc_feature (339)..(346): n is a, c, g, or t
  misc_feature (348)..(358): n is a, c, g, or t
  misc_feature (360)..(427): n is a, c, g, or t
  misc_feature (429)..(669): n is a, c, g, or t
  misc_feature (1141)..(1141): n is a, c, g, or t
gaccgcacgggacagcgcaacgaaccgaagcaccaggcgcacacgcacgaccacnnnnnnnnnnnnnnncggggnnnnnnnnnnnnnnnnnnnnnnnnnnnnnnnnnnnnnnnnnnnnnnnnnnnnnnnnnnnnnnnnnnnnnnnnnnnnnnnnnnnnnnnnnnnnnnnnnnnnnnnnnnnnnnnnnnnnnnnnnnnnnnnnnnnnnnnnnnnnnnnnnnnnnnnnnnnnnnnnnnnnnnnnnnnnnnnnnnnnnnnnnnnnnnnnnnnnnnnnnnnnnnnnnnnnnnnnnnnnnnnnnnnnnnnnnnccnnncccccngcnnnnccccnnnnnncncnnnnnnnngnnnnnnnnnnncnnnnnnnnnnnnnnnnnnnnnnnnnnnnnnnnnnnnnnnnnnnnnnnnnnnnnnnnnnnnnnnnnnnntnnnnnnnnnnnnnnnnnnnnnnnnnnnnnnnnnnnnnnnnnnnnnnnnnnnnnnnnnnnnnnnnnnnnnnnnnnnnnnnnnnnnnnnnnnnnnnnnnnnnnnnnnnnnnnnnnnnnnnnnnnnnnnnnnnnnnnnnnnnnnnnnnnnnnnnnnnnnnnnnnnnnnnnnnnnnnnnnnnnnnnnnnnnnnnnnnnnnnnnnnnnnnnnnnnnnnnnnnnnnnnnnnnnnnnnnnnnnnnnnncctcccccatcagggtcagctcggccacgtgctcatcctccaccgtctggatgcccccggcctccacttcctgagactgcctcttccagatctgggcggtgccctcctgcgcgagggagacgggggactggggagtgcagaagggcccgctgggagacttctgcccggggggggtcgtcccaggaggtccaggggggctggaggctgagcccgggctggtggacgggctgtcgctgctctcctggactggctcccactgctcgccaggctgggaggcgctctcccggccgttgcctgtggcgcttctcttgctaaagcccttggccacagcagctggagtggggagggtgagttctgtggaaccaggaggtaaacggaggaactctggcaacaccaggtcttccttccttagcaccccacgttggtcatcttgctcttgttgctctgagctttggaaataagcttcaaaaanactcgtagccgagtggtttctggagctggaatttacagctgtgttctgtttcactggcacacctttctgtttatctgcggatgcctttcctctggaaggatccttctcctccaagacaacccgctgtccgtccagactcgatataggggcgccaaggtccaggggctccttctctccactcagcctcaccagcaggccactgaggtccagccgtattctgccaccacgggccgcagcacctccgtgacgggcttggtggcttggccttgagtcccactgaccggttaatcggaaccc

SEQ ID NO: 356725 - DNA, 1539 bp, Homo Sapiens
  misc_feature (974)..(974): n is a, c, g, or t
  misc_feature (1005)..(1005): n is a, c, g, or t
  misc_feature (1263)..(1263): n is a, c, g, or t
  misc_feature (1308)..(1308): n is a, c, g, or t
  misc_feature (1325)..(1325): n is a, c, g, or t
  misc_feature (1381)..(1381): n is a, c, g, or t
  misc_feature (1414)..(1414): n is a, c, g, or t
tgggtggcgaattcggcacgaggggggcatccagacggtggaggatgagcacgtggccgagctgaccctgatgggggagggggacatcagcagccccaacagcaccttgctgccgccgccctccaccccccaggaagtgccaggaccttccagaccaggtacctccaggttctgatccctccaccttggccccgtaagcgtggtctgctcagcttccagtcagaaaggacagtgggcccccggctgccactgtttgctggtggtctccgtgaccccctcctcacctgctggttgggggcttccttggccctcttggaaaggaggggctcgtgtggccccaggccagtgtctgtcaggatggtccccccgaggcgctctgggcaggcatcctggtgtcctgagaggctcttgcaggaatgatacgtggcagtgcctgcagcgaggtctgggaacaccctgggtgaggcctgggggtttccgaaaagggaggcattcctttccaaatctggacagcgatacgttttcaatgtttctggcatcaacactgggacaaccatgggcatttgtgtctgtgttgagcgaactcgaagccccgcatgctgtgtcctaaccaggcggcaggggctgccctgaaacactgagccagatcgcgtcggaatgaaagcgcttgaggcgagaggagaggctccgtggcaaccacccgggggggtgccgacctcagcaagtagcggttcggccgggcgagcgagccggcattcgcgggcagactgtgcgatcggcgccatggctacgcgtccaaggcagcgcgtctttctctgtggcaccgaggtgtggatgagtagtaaggtggtgagtatattggagttgtcggacactagagtccaggcgcctgcgagcgtcgtatatgagctatgcgccacactgtccgcgctggtcacccgtgtgtagagaaccgatcccgtgacacgcgcgcnctccgcgaggatccgcgaggacgacgcgtcnactgtgtgcattccagctatacgtggggtcgagcgggccactctccgtttctacatacatctcctcatctggacgttagaggcaggccggataccaccccccctgcctacttatgtttccgtgtacggtcgcgcgtatacgcgacgcgcgacctgcgcgcgggcatgtacttgtccacgcacgaccgcagttcacgactccccacatgcgcgccgcctccgcatcttcatacacgcagctagccgtacgataatgtgntccttgcgcgccgcgccctattcttaacatacctcagagtggctnctatagaatgatgaccntcgacagtaataatgtgcaccggtctgctcacaacgtcgcgagctcttgctcaaanataagactctccgcgttgtctgccgtgtgtacngcacgcgtacgatatgtccgccgctttcaacaaatggttgaggtgcctatgcctgcggcgacagccgtggcgaagcgactgctggcggttgcacctgtagacttgtatcttccgacggcacattt

SEQ ID NO: 356726 - DNA, 3008 bp, Homo Sapiens
  misc_feature (452)..(452): n is a, c, g, or t
  misc_feature (739)..(739): n is a, c, g, or t
  misc_feature (747)..(747): n is a, c, g, or t
  misc_feature (1591)..(1591): n is a, c, g, or t
  misc_feature (2341)..(2341): n is a, c, g, or t
  misc_feature (2349)..(2349): n is a, c, g, or t
  misc_feature (2540)..(2540): n is a, c, g, or t
  misc_feature (2543)..(2543): n is a, c, g, or t
tgtttcattaacagattattataaagcaaaaagcatgcagaaaaagaagcagacgttttacattgggaattaatgaaagcgtgtctgctagttttgggtaggagaactgggaagttgttgcttaaaattttatatcacctccacaaacaaaactcttcggaaatggtaaaataagaaaatgcatgattctagaggcattcctaagcacccacgtgtcaggctttgtggtgtctgtggtatcatccgaccgtttggactggttagggcttactgagagctccatttctggaaagccttacaagactgaggaatatcagactgcgaatcaccgggaacggttcctttgcagcacagaagcaatctctctccccatcttcgcatattctgatggcaaaacaagtggaagaaaagaggaagcatgactgcagatcagatcagttctctttgtggantatattttcagtaaaatgtatggatctatcttttccttgttcttatatctagatcatgagacttgactgaggctgtatccttatcctccatccatctatggcgaactatagccatgcagctgacaacattttgcaaaatctctcgcctctaacagcctttctgaaactgacttccttgggtttcataataggagtcagcgtggtgggcaaccccctgatctccattttgctagtgaaagataagaccttgcatagagcaccttactacttcctgttggatctttgcngttcaganatcctcagatctgcaaatttgtttcccatttggggttcaactctgtcaaaaatggctctacctggacttattgggactctgacttgcaaagtgattgcctttctgggggttttgtcctgtttccacactgctttcatgctcttctgcatcagtgtcaccagatacttagctatcgcccatcaccgcttctatacaaagaggctgaccttttggacgtgtctggctgtgatctgtatggtgtggactctgtctgtggccatggcatttcccccggttttagacgtgggcacttactcattcattagggaggaagatcaatgcaccttccaacaccgctccttcagggctaatgattccttaggatttatgctgcttcttgctctcatcctcctagccacacagcttgtctacctcaagctgatatttttcgtccacgatcgaagaaaaatgaagccagtccagtttgtagcagcagtcagccagaactggacttttcatggtcctggagccagtggccaggcagctgccaattggctagcaggatttggaaggggtcccacaccacccaccttgctgggcatcaggcaaaatgcaaacaccacaggcagaagaaggctattggtcttagacgagttcaaaatggagaaaagaatcagcagaatgttctatataatgacttttctgtttctaaccttgtggggcccctacctggtggcctgttattgggagagtttttgcaagagggcctgtagtaccagggggatttctaacagctgctgtctggatgagttttgcccaagcaggaatcaatcccttttgtctgcattttcctcaaacagggagnctgaggcgctgtttcagcacaaccccttcttttactgcagaaaatccaggttaccaagggaaccttactggggtataatgagggagcatctggaaatctttagccttgtgaaaactaaccttctctgctgagcaattgtggcccatagccatattttgagaagaaattcaagaatggaatcagcagttttaaggatttgggcaacattctgcagtctttgcaatagttcacctataatcctattttaaatctcagagtgatcctgctgactgccagcaaaggtttgtaattaagaagggactgaaccactgccctaagtttctttatgtggtcaaaaactagataatgaaagtagcaggtgctaagtatcagtgctaaatgctctgtatgtcactacatatgaaaaaacatcaaaaaacaattagcattggacatcttaataaattaagttgacatgaggtaaatgtgttgataaaaactaattttagaagtttgaagactttaaaacatttcatactactattgttttgcaaagactaaaatatttggggacttaaagtactgtaatccactaaagacgtgccaatgaattattggaatatcacactttaaaaacccgccttgtaacgttctggggagcattccaaagcagtatattggttccaattagagtttactttttttgtattaatacattgctatttctaaataccactttcctcaacctactagtaagattgcctagcattngaactggnattatgtggttttttgttgatttggtataaagtttttccaattcatttatattttacaaatgctagatattggtctgggaggcaacattaatggtaccagcctgtcacaactgagcagttctaataatgcagaataaatacatgttgccttaaagggttatctagtatccttcatcttatttagcactggngcnaatagccaagggaaatcaaatcagtaactggtccatggtcatgcatctaaaaagtgcatggaagatcatttattactttttccttttttctcacatggtttgaaacttaaagtgcacatcactgaaataatgagattttcttctacggtgtgctaccctttctaaactgttctaagaagcaggcagttgatgtatgtttatattttaagtcagctgtcaaggggagaccacagccttagtatgacatcctgcacaatttgtgaagcatttattctactgaaggcacagtcttgtttatactttctgcacattcagtgtattggtaatttaaattatttcagttttaacttgtgaaagcttatattatgatttctggtattttagaaatacattagagtctgtgagtctcattctttaagatacagatgtgtgaacttcaatataaagttgcatttgccaaaattt

SEQ ID NO: 356727 - DNA, 1351 bp, Homo Sapiens
  misc_feature (4)..(4): n is a, c, g, or t
  misc_feature (12)..(13): n is a, c, g, or t
  misc_feature (24)..(24): n is a, c, g, or t
  misc_feature (34)..(35): n is a, c, g, or t
  misc_feature (49)..(49): n is a, c, g, or t
  misc_feature (68)..(240): n is a, c, g, or t
  misc_feature (392)..(392): n is a, c, g, or t
  misc_feature (1236)..(1288): n is a, c, g, or t
agtnttgcagtnnccaggatggantcagtggcgnntctctgctcgctgnaacctctgggttcaagcannnnnnnnnnnnnnnnnnnnnnnnnnnnnnnnnnnnnnnnnnnnnnnnnnnnnnnnnnnnnnnnnnnnnnnnnnnnnnnnnnnnnnnnnnnnnnnnnnnnnnnnnnnnnnnnnnnnnnnnnnnnnnnnnnnnnnnnnnnnnnnnnnnnnnnnnnnnnnnnnnnnnnnnnnnnncggcatgagccaccacacccacccaagcgctcacatttcttacaaagggtagcttaccataaaatatccaactgcattgaggacctaagttaaacttgattcattccatctgcagcccagctccaacagtgagattcttttcaccataaatnaaccagtgtccagggtcctaaacacaagatcggtgactaaaaggggagtttgggttttctccacctggcaagtgtgaaacgactgaagaaatctgtctacaaatgacctatctagaacgccttagttctactgtccctgggtttgtagtgtgggcaagtgtcaggggatttggctccagttctgagcctatgggtcttaagcaggtcactcactctcctgggtcttggcttctttctctgtaaaataaaagggctagatgagattgtttctttgtgagcccttcctgctctaacactctatgaaatctccagtaacaaaaacctgaagtggtattcactttgcctccccagcatccggtacagggattggcagagtgttgaggcacaacatgagtcactgacctttaaatagtggaccagtaccatggcaaagggggataattttaagaaagaaagaggacaacaggaaaaggaattaggaagagtcacgggacatctgggatgtttttgtcccaaatttcaactgctagtgggtagaacttatgaacaccaccaatatgagaggggagagaaaccaattctttaggctcaaatgaggggacaacatgtgagtgatcaaaagattgctggaaaagcatagatccaaagccagaagctgtattctggggctcaaatgaaccctacttctctagagaccacaaaatgccttgatttatgaggagaggtaaaagtggtatcaaatcaccaaaactattagtgatacgaatataaaatgttggtggtgtattgaaatagtgccaggaccaccgctctggaaatagtggcttagtgctttacatctctnnnnnnnnnnnnnnnnnnnnnnnnnnnnnnnnnnnnnnnnnnnnnnnnnnnnngtgcataaaaaatgcattaaagtgtacatcctcgcagatgtggaaacaaagtcacagagacac

SEQ ID NO: 356728 - DNA, 805 bp, Homo Sapiens
  misc_feature (755)..(755): n is a, c, g, or t
tgcccataagttataaaggtcaaatgaaaaaataattgatgtagtggtgctctgcaaactgcaaagcgttttacagatataagtacaaattattgatctgtatgtcacatactctgctgagaactggagacatgcaaatggttgcaaagagtagtgtttctcaaagagcggtatatggatgtattctcagttatctctgagtgtgtgagcaagtgtatgtgcttatttagaaaaaatttttaatgaaactacaaattgaatctattaatagatgagctgaataaccacattataactgagatttccactcaatttcagagagtttcatatctgcctatgatctttttaattctagggtaaactacttatatatgtcttgcactaatgaaggagaaaagagaaccagccttaatatgaaaaatggtaaaagttaagtgatttccccaggctaattgaattaataaataaactcaacttcatttgaactagttggccccacactggaaatatttataccttgcttttatgtttgcttatattctaataaaattttgggggggcaacaattatgaacccaggaaagatttttgattgtaccatctagataaatttcccttgatgacttactctagccaagtaccctttctttacagaatcttctatatggatgggttaatgaattcaaggaatatagggttttccccacaacttattttcatttgatatcaagaaactgtgctcccttgttcccctgnacaaacccttcctgcctatactagggacaaacgggtcccaataaatttag

SEQ ID NO: 356729 - DNA, 1605 bp, Homo Sapiens
  misc_feature (31)..(31): n is a, c, g, or t
  misc_feature (119)..(119): n is a, c, g, or t
  misc_feature (142)..(234): n is a, c, g, or t
atgagccactgcgcctggccgagtagagaanaatttactgctgattaaggttgtgtttttcaacctgcaatcccgagaccctcagaataaagattacttgaggttgctatgaaaaatanagattcctgtcctccccctggcnnnnnnnnnnnnnnnnnnnnnnnnnnnnnnnnnnnnnnnnnnnnnnnnnnnnnnnnnnnnnnnnnnnnnnnnnnnnnnnnnnnnnnnnnnnnngcctaaagagaatgcaacctaagagggcaaggctagtgcatagcttaaatcgctccagcctttggtaatcccttctaaacacagtaccacccatgtggaggagactgcaaggaagctgttattcaaagtagaacagtcagccttgtgcttgagtcctgctttatgcttgcgtgtttataacaaaacacaaagggcaagtcttcatatcagcacttagtcttgatatccaagtagctgactactgtacttatgataacagcttgaagaggactgcaactctcccctcacgaatggtgacagagttggcttgtcacacctggctcagggaagaaaaatgagtaaacccctacctctttactcttgattcctcttccaccctaatactgttaacacatcatcctgtgtgattcaaataatctggcagatgaaatacagaaaatctaagtcatattgttcttatcactctatggccagatattatactaatctaattttaaaaatccttttctgtgcaatagaaataaccaaagctcattctgtctcctttcctttctaatgctgttgataggaacaaaatatcaagtaaggatacatgctagagatgttaaattcatacaagtaaagtaaattacaaagagaggtggtaatatttttttctagaatttcacaataaaatccctctcaccatgaaaatctttttataattttaacaggaaacttaaaagacattttgttgcaagactatcttaacaattataagaataatgccattatctgtgctcaatatagataaacataacagtaactttaaaaggccaagtatactcataagtgaggatgaaatttatttttcaacaaccaatatgccaatatccaacttctaggttttattcaattctaatgtcatgggtttctcctaccccagtcaaaactcctgccaaatgtccacaaaattgacaccaaaatcaacaaacacaaagaaagagagggacagggagagggaaagagaaatagagagtgaggaaggaaggaacgtgacaagagctaccatgcaaaatgaccagaagaactggagttcagtggcacagatcagcaggagcagaggaatgctgcaaaagatgatgctgcatagagtctaacttgggagatgcctgtatgatgctggatgaccaagtactaaggtcacaagtgtgttcatggacccataagaaccaggatcttggacccaaacttataagatcttctaaaaagaaaatacttcatctaaattgaagcaattcctaagtcaaacaccagaagagttccttatttgatgtaagttgtgcctaaaactttggctgatacaaagaaacccgtccactaaggcaccct

SEQ ID NO: 356730 - DNA, 825 bp, Homo Sapiens
  misc_feature (5)..(5): n is a, c, g, or t
  misc_feature (23)..(23): n is a, c, g, or t
  misc_feature (36)..(36): n is a, c, g, or t
  misc_feature (46)..(225): n is a, c, g, or t
  misc_feature (367)..(459): n is a, c, g, or t
  misc_feature (487)..(487): n is a, c, g, or t
  misc_feature (492)..(492): n is a, c, g, or t
  misc_feature (608)..(608): n is a, c, g, or t
  misc_feature (620)..(620): n is a, c, g, or t
  misc_feature (771)..(771): n is a, c, g, or t
  misc_feature (789)..(789): n is a, c, g, or t
  misc_feature (804)..(804): n is a, c, g, or t
gtgantggtgaatctcggattantgcaccctatgantcccgggttnnnnnnnnnnnnnnnnnnnnnnnnnnnnnnnnnnnnnnnnnnnnnnnnnnnnnnnnnnnnnnnnnnnnnnnnnnnnnnnnnnnnnnnnnnnnnnnnnnnnnnnnnnnnnnnnnnnnnnnnnnnnnnnnnnnnnnnnnnnnnnnnnnnnnnnnnnnnnnnnnnnnnnnnnnnnnnnnnnnnatgagccactgcgcctggccgagtagagaagaatttactgctgattaaggttgtgtttttcaacctgcaatcccgagaccctcagaataaagattacttgaggttgctatgaaaaatacagattcctgtcctccccctggcnnnnnnnnnnnnnnnnnnnnnnnnnnnnnnnnnnnnnnnnnnnnnnnnnnnnnnnnnnnnnnnnnnnnnnnnnnnnnnnnnnnnnnnnnnnnngcctaaagagaatgcaacctaagagggnaaggntagtgcatagcttaaatcgctccagcctttggtaatcccttctaaacacagtaccacccatgtgggggggactgcaaggaagctgttattcaaagtagaacagtcagccttgtgcntgagtgcctgcnttatgcttgcgtgtttcataacaaaacacaaaggcgaagtcttcatatcagcacttagtcttgatatccaagtagctgactactgtacttatgataacagcttgaagaggactgcaactctcccctcacgaatggtgacagagttggcttntcacacctggctcagggnagaaaaatgagtaanccctacctctttactcttgat

SEQ ID NO: 356731 - DNA, 505 bp, Homo Sapiens
  misc_feature (139)..(139): n is a, c, g, or t
tttttcaacttctgagttttatttaacactagtgccatgggttttctcatcccaaccaaggctcctgccaaatgtccataaaattcataccaaaaattcaaaaaacgaggacggaggcagagaggaatggtggagacangggatggggagaacaagagccacatgcaaaatgacccaggaaaacccaagctcagcgggcacagacaggagcaaaggaatgctgacagaacaggctgcgtggttgaaatggagatgcccggatgacggctggaaggccaagtacttcaggtcacacatatatatgtccactgacccataagaaccaagatcttgatccaaacttataagatcttctaaaaaagaaaatactttcaccctaaatttgaagtaatttataagccaaacaccagaagagttcctcatttgatgtaagttgtgcctaaaactttggctgatacaaagagacccgtccactaaggcaccctgaggcgatctgacagtgtgt

SEQ ID NO: 356732 - DNA, 1871 bp, Homo Sapiens
  misc_feature (1582)..(1582): n is a, c, g, or t
  misc_feature (1585)..(1585): n is a, c, g, or t
  misc_feature (1656)..(1656): n is a, c, g, or t
  misc_feature (1715)..(1715): n is a, c, g, or t
atttatttgagaagcgatcccaggatgcaagagagatgcacaggagtgaaaaaaagaggaaagccaatataaggatggttattgccaaacccgccacagaagtctcctcctcttttgaggagacttacgaaatgcatttcagaactgtctgcccaggtgatgaaaagagtaatcagttatccactagcaactttccacctaggtcaaggatggccccatgggcacctaactcccctgcacctttgggctgtgcaattgggagtaccaaacaaggtctgcaaacattccacgtcaggaaggctgaagtgaaaggtatacagctagaatccaaagagaggtactatcatattctctgagaacctggtcaaagacttcatggaattagttaccacagcagtgactggagtagaaggcagggcagagaagatctgaagtggggcccaacatttctgatgcgtagatcaaaggcttaaggctggaataaactcagcatgtttgaggaatgcaagagaagggagagtgggtgaagacatactaagccttggtgagtatggtactgagttgaagcaggaagagatcagatcccacaggagtctgcaaggctgaataaggaatatacatagaatgaatagtgcttactactgaataaagtagtccaggaaagacattctttttaatattaaaagataaagccccaatatataacccatctgaggatttctaatcataatcttcagcatcaaattactgcctttataacatagtttggggagatgaaaagaaaaatcacagatcaactattttctcccactaccagcaaagaaaaaatgaggaacctatgacttaagagcagttgctagaaattttaaagaaagggttcacttttatgtcaagatcagacaactttaaattatttaaagatcctgttacccttgctctgttgactgccacttcagtgtttctttcaggacactccaaacagcagacaagagataaagtgtttcaactgtgtcacaagaggacagaaagtggctgtttgcatctgtttgggtctagtgtcaacctcaaagttactcattagtatccataaaaataaaaacttaggacaaaaggttaagtgtacaaatagaggaaacacacattccataaaggagagggggaaagattgaattcttaaagccatactaaataatatcctacaatgtgcaagcagaagtgaccttagagaacgctagcctctaaatgacccagaaagtaaattatgactaagtatgaaagccagacatgacatgatgataaaatatgagctgatcagtattagaaaatatataatttggtttatttcctaattcatagaatcctaagacttgatggtgctcttagggatcatctaatccaaaattactgccaatgcagggattccttctataaaacccctggggatcactagcaacatgggacttttaggttggagactctagctggtagtgggcagttctacgttcaccactaaatttgctcttatttgattgccagcccttagtcttagcttttttaaggaaaacagtaactcatttcatanatntttatagcaaagtctatatatgcttgccacgcaatttgagagttaatttctttgtttcaagtgtaggaatnattatcagtgtaaattcctccattctagatgaacagctccttaaagacaagaccatatntcttgtacattttcaaatttctgccttaaacagagcaccttgcttatattaggatttcaaatgtttgtgaaatgataaatgaatggaatgagtgaacgaactgaaatgaaattaatgcccatatttaaaaatagaatattagctgatttcatcccg

SEQ ID NO: 356733 - DNA, 1192 bp, Homo Sapiens
  misc_feature (1167)..(1168): n is a, c, g, or t
attcctattttaatacttactttatagaaacagaaatgtttgcttagaaaagtatttattgagaattcatggcaaacttaaggagaataatagcatgcttgggaagagaaaaattgattcactcattcaataaatatttgttgagcacctattatggtgctaagacacttgctggatagcaactggatagtaaggtatggcgaaaaagacagctatagtgcctgcccttgaggaacttatattctagtgagggagacagaaaaaggatatatgcatgaaaatagtaatcacagtctttaagaagctcatcaaaagggataagacaaaatataatcatcacagagagtataaatgtctgagtgcattgtaacaaggtagtttagcaaagagaagagatggtatgggtttgaatattctgagacctgaggagaagttagaaaataagtagaattaagtttgtgaagaaatgtcactttgataaagggcaaagcaatagcaaagacgcagaggcaggaatcagaataacgtatttcaatatagccagttcagcttggctgcagtgtagttttcactgcagaagagtgggagagaataagtggaaaagctggtgaatgccagaagcggaaatgtgttgctcaacaagaaccgtgaggaccttgttgttaaaacattagccaatgggtggaatgggaaaagtactaagctaggattcatgaggacagctagcatttgccattaaccagttgtgggtctttgggcaaaactgtctgactctgagtctgggtcttcatctgcagtaaaagaaacattgaattgctgaatcttcttccaacttaaacaacctaaggttctgggtagaaaactcttctacatcactccaaaaagtaggaatctagtctctgtctgagtacttcaaatgacagaaagcttactgttctttgaggcagccagttcaacagctctggcactgaacagttaaaattaatagaacagttttgttagaaatgagctgaaatctgccttgccataattcactctgttgaaagttcaaaacttcagagcagctctgcccaacagaacttcttacaaagatataacagtccaattcagcagccatgtgaccactgagcacttgaaatgtgcctactatgagtggaaagctgaatnntttattttatttaattttcattta

SEQ ID NO: 356734 - DNA, 2033 bp, Homo Sapiens
  misc_feature (50)..(50): n is a, c, g, or t
  misc_feature (121)..(266): n is a, c, g, or t
  misc_feature (1392)..(1392): n is a, c, g, or t
  misc_feature (1451)..(1451): n is a, c, g, or t
  misc_feature (1465)..(1465): n is a, c, g, or t
  misc_feature (1639)..(1639): n is a, c, g, or t
  misc_feature (1672)..(1673): n is a, c, g, or t
  misc_feature (1748)..(1748): n is a, c, g, or t
  misc_feature (1802)..(1802): n is a, c, g, or t
  misc_feature (1863)..(1863): n is a, c, g, or t
  misc_feature (1901)..(1901): n is a, c, g, or t
  misc_feature (1912)..(1912): n is a, c, g, or t
  misc_feature (1931)..(1931): n is a, c, g, or t
  misc_feature (1954)..(1954): n is a, c, g, or t
  misc_feature (1969)..(1969): n is a, c, g, or t
  misc_feature (1971)..(1972): n is a, c, g, or t
  misc_feature (1975)..(1975): n is a, c, g, or t
  misc_feature (1981)..(1981): n is a, c, g, or t
  misc_feature (1994)..(1997): n is a, c, g, or t
  misc_feature (1999)..(1999): n is a, c, g, or t
  misc_feature (2030)..(2030): n is a, c, g, or t
ataaaacaaaggaaccagaaccacatccactgatcggatttgcctggggnggaggggtgctctctcctttgatcttctcttctggaagagatggaccaaaagcctctccagcaataatccnnnnnnnnnnnnnnnnnnnnnnnnnnnnnnnnnnnnnnnnnnnnnnnnnnnnnnnnnnnnnnnnnnnnnnnnnnnnnnnnnnnnnnnnnnnnnnnnnnnnnnnnnnnnnnnnnnnnnnnnnnnnnnnnnnnnnnnnnnnnnnnnnnttcttgaagactatctttccagcttgtcacatatgcaaggtgtatttacaggagacagcaatggaaacctggtcagttgagcaggtctgcagttggttggtggagaaaaatttaggagagctagttcatagatttcaagaggaagaagtaagtggggccgctcttcttgcacttaatgatcggatggttcagcaactggtaaagaaaattgggcaccaggctgttctgatggatttaattaaaaaatacaagcagaacactcaaggactgaagtccccagaaaaccccaaaaaggcagccctggtcatgcaaacagaagcagctcgagattacagggatgaagagtcctccagtccagccaggcatggggagcagatgccatctttctatccagctgaaaaccttgataatggactaattgaccaaagagtattgaaacagagaagaaatgtgaaacaaattctagcaagaagcaaagcattacagtggacgaagtcctatgttttaccagagtttccctatgatgtcaaatgcatgttagcagagcagaagtgcccggatcacagcatgaggataaggatcattgagtttctccaggccgacatgactaagtatctggaaggctcactgtaccccagcacccagcagtacaatgacgtggttaatgccctgctgcaggcccaccctttcctggatgaggatggctgtggcttctttttatggaaacgagccctcaaagatcgctttaaatatgttcgaagacccatagaagatgatgagcaagtgattagaaataagtgtaaatttggacaccgaagaggccagacaaggaaatctcttgctgatataagatttgatgaaattaaacttgtccagataaaagaagaagctgtttgttttgattctgagctagatgaacatattaagtggttccagcaagaatacgtgaaaacagaaaaggactggagagaaattgacaagagaatgacccaaactttggaaataagaaaaaagatgattggcagccgaacacctctgaaggacattcttaaaactgttccctttcttgaagtgcccttatcagatgttcagaagaattccaacttcctacaagaacagatatttnataagaaaacaaggcacatttttggaatccctattcagaaaatacactgacttctttcncagtggtggacaanccaatcaatattgtatcgcaagaaaaaatgaaacattacacagatgaagacatgttgaaatacatgaagatgacagccacatgtttacccctcccagatgtttttggggatgatcccagcctttttgtcatcatgaatgaacaggtgcaagtgcccacacctgtgttggaagtnaaaaaccctttcaacatggaggtcggcgaattnnctttatatttagaaagggagaggctcacaaaggtggacgactgtgtcacagccttgcggcgctagtagctgcctntcatgtatttaggattgagtgtccaagaagactgtcccagactttcaacttccnagaaacgctgattttcgatatgcacagtccttattttccttctttgaaagaaaaggaaaangaagtaggatttcagcacccactctacttaatagcatnccaaatattgnactggaatttacctctggnaaaactgaagccccataagaaantgtttagatttaggntnntgntagagntaggtatgagaannnntncttgtatttatagatgctaatgaatttcaangct

SEQ ID NO: 356735 - DNA, 2486 bp, Homo Sapiens
  misc_feature (75)..(129): n is a, c, g, or t
  misc_feature (366)..(366): n is a, c, g, or t
  misc_feature (370)..(372): n is a, c, g, or t
  misc_feature (374)..(374): n is a, c, g, or t
  misc_feature (379)..(379): n is a, c, g, or t
  misc_feature (383)..(383): n is a, c, g, or t
  misc_feature (398)..(398): n is a, c, g, or t
  misc_feature (405)..(405): n is a, c, g, or t
  misc_feature (413)..(413): n is a, c, g, or t
  misc_feature (746)..(746): n is a, c, g, or t
  misc_feature (1963)..(2016): n is a, c, g, or t
  misc_feature (2173)..(2217): n is a, c, g, or t
  misc_feature (2241)..(2241): n is a, c, g, or t
  misc_feature (2339)..(2402): n is a, c, g, or t
aaaatctatattagagtatgtggcaataatgtaagtgtatttatatggaaattgtctcatgccttataagctccnnnnnnnnnnnnnnnnnnnnnnnnnnnnnnnnnnnnnnnnnnnnnnnnnnnnnnnatactgaaagtaaaacagtcttcagccttggtttcagctatctcttcaaatcagcattaagtatttaatatcagatataacatttttggcttgtcagaccagtaaatcatgtttttccactggacaaaggaagctgaagaaacaactgttgaacaaactaaatgctgtgacatgaagcatctgagcttctagagtctgagtattgtagttaaaatgattggtgaacatttaactggncaannngnatggnatcngtcatggaggggggntcacttnccccagcncccaaaatgaacagtagttttaatagcaaaagaaataaaaagtttttttcttttgattctttagagccaactgtgaaagaggtcagcaatacattaacagcagcaatggacaaggaagagcaaaatagaggattaaagtatcttgctggacgtttgttcatctttttctgtattagcctgaaaactgcaactggcttatggaaatttccggtgcatgtgtctccttagatccttcacagatttagaattcagtctgcctgagggctctataaccatgtaagaaagctttctttatctagcttggtggcagccaaaacagactccatgtcattnaggatgtcagaactcaaagcttcctgcagacttggcatcagctcctctccttctatgttcattccatctccttccagtgttccaagggtccacatttgtcccaaggaatggcttcaaggtagtctgggaaacggttctgctgtgagggcagggtgctttggttgatagtatcacctgtatccatctcatccacactgttcaggaagtcatctggggttcgagggacactgtagctgctcatgcttagtccactgtctgtactctcatctcgagagtgataggtgccactgttaaggaaaggatctgagctattggtcgtcattgttctcaattcctgagacatcccgggagaagacactggattttgagtcccaccatcctgctccagtgttggtaactggctacgcagggctaactcctgccgaagcagttcttgctgtttcagccgcagcctctccttctccatctgcagttgctgcagtcgcatctgttgctgctggttggagttgctgccacccatgacgcctccctgtgggctctggggagccaggggtggtggctgtttcactggagcactctgactgattctctggttcatggctgaagccgagttcatcatattctgctgcactggtggactggtgggggctgtgacgttcatctgggacagcatggccttcctggggtcctgccatgttgttgtctgatcgatgtgatttaagaagtatctctgaccagaagatgtctttgccatctcccaacctgctggcagaggtacatcatcaggtatctcaaaagaagactgtcgaagatgctgagctgtgggtgtagctgctgggccagagactactccagtgggggtcagtgtcccaggagaaacagctcccaactgcagagaagctggagaggaatgagctccaacatgctgtggagtcagggctcccgcagtgcctgcatcagtactggcctgtcgggagtgggatttgggctccggcggcttgaagaaggagtcgggcagcttccggagcctcatgggcacggtctggggcacgttggccgtcttggggttcatgacggcgttgaagagcgcctccaggtcggtctccgagtccccgcggacgtgcacgatctgatgcccggcgggggggtctgcgcgccgcctgggtcgccgcgggtgccggttgcccgggtccggacggcgggcccttgctgcgggnnnnnnnnnnnnnnnnnnnnnnnnnnnnnnnnnnnnnnnnnnnnnnnnnnnnnntgcccgggatccatggcttctgcctcccccgacgcgcaccccctgacccaggcgagcgagctacgcccggacgccccggctccacgggccgaggtggagaagcggcgacggctgcgggccgggcggcgctgtcctcgctctcagggccgggggctgnnnnnnnnnnnnnnnnnnnnnnnnnnnnnnnnnnnnnnnnnnnnntgcgccccggctccactggtctgngcgtgcgcctcgggaggggctgcgaggcactcggacctgcggcgcctgagaactttttccctccaactcccttgacggaggccggacggctcgttgcnnnnnnnnnnnnnnnnnnnnnnnnnnnnnnnnnnnnnnnnnnnnnnnnnnnnnnnnnnnnnnnnccctggcggcggctgcgccatcccgaaaattccggaccggtaccagcctgttgtttctcaaggtcggacgacgatgatagtgag

SEQ ID NO: 356736 - DNA, 508 bp, Homo Sapiens
aatgttcacatcaaatgaatataaatgcacaccagggttaatggacgaaaacaactgggcgtaagcaccacagaggagatatcctttgcaaaggctcactttgctagttgtgtagacaaagaatacatgcatgacaaaatacaagacaattcacccatgccaaataattcatacaggctgtttaagtactgcagaaaataaaagaaggaaaggctaccagacttttcaataaggtctacagcttcccaagagcatgtctttgttaaatcaggaaatataaaaattatgtgtgtatgtgtatgtatatatatataccaccctattaactattttaaaatcgtattctattttgggggttgtgttaatgatgatgaaccagaaaagattttctcttgatggtttcttcaacaggaaacagatattggaatagtgtacatgtcatttttatctatacaatgaatttattatgtttttcttagtaaagtgatagacattgaaagcaagcttg

SEQ ID NO: 356737 - DNA, 1243 bp, Homo Sapiens
  misc_feature (28)..(28): n is a, c, g, or t
  misc_feature (855)..(930): n is a, c, g, or t
gaatgcctgtggaaaagtcctaaaaaanaaaatatgtgggccaccatagcttaaataatacacatccatggcccctttaacacttaaagcccattacccaaatagtgaagatgtaaatgggaagaatttaaatgtggtaagaaaagtccagagtggctgacccagtccccggaccttcccatgtgaaatgaactcttccttggctccttgaggctggggatagtgagcaaataactttcctttcaagagaattaaacactgcccattctgacaggcacatgggacgcatgcagcaacatctatgcagagtctgcaagcactccctgggtggtggttgaatctgcaccactgtggacctgatccctgtacaccagccagggaggctttggtgtggtcactttcttgtttcttattcaatcacatgcagtacttggaagatgtcagtggagtgtaatcatgcacaaaaatggtacttgtaggtatgtacaacatcaaactttcattgtcttatagcatctttagatgcaacatcaactatctcctcttttagcaagagggatgaatgaggaagccaaacccctactccccaaagaaaaaacatcacctggggacacatgcaaatagcatcctgcaacagcagggtgagataaactccacatgataagatggatgaattcctatgaagtcaggcctgaaagtcttcctagggggataatcccacctttctttcctcttcaatcccacatcatcccacataacctaaatctgaaggaaacagcttcacaacattgcgtttgagctttggtaccttcatttgggaagtgtaaatgctagtaacattctttataggattcnnnnnnnnnnnnnnnnnnnnnnnnnnnnnnnnnnnnnnnnnnnnnnnnnnnnnnnnnnnnnnnnnnnnnnnnnnnntgctttctctccctctactttcccaccccaattaaaagcaacatactgataagcctaacaaactctgaataaggccatttgatgcaatttagattattctgtatcagagttactgctgtcagttcatatttagtccctgagggagtctcattttatgagccagagacattttctattgagggcagatggaccctgacacactgtcctctttatagccatgttttaccagtttcacaaaaacagtttgaaaacctgcacacaacttagacagggatggcaccactgtataattcagcaaccttactgagaaacc

SEQ ID NO: 356738 - DNA, 1127 bp, Homo Sapiens
  misc_feature (3)..(3): n is a, c, g, or t
  misc_feature (12)..(12): n is a, c, g, or t
  misc_feature (19)..(19): n is a, c, g, or t
  misc_feature (22)..(22): n is a, c, g, or t
  misc_feature (31)..(31): n is a, c, g, or t
  misc_feature (33)..(33): n is a, c, g, or t
  misc_feature (41)..(43): n is a, c, g, or t
  misc_feature (53)..(53): n is a, c, g, or t
  misc_feature (56)..(56): n is a, c, g, or t
  misc_feature (66)..(66): n is a, c, g, or t
  misc_feature (72)..(72): n is a, c, g, or t
  misc_feature (75)..(75): n is a, c, g, or t
  misc_feature (84)..(84): n is a, c, g, or t
  misc_feature (88)..(88): n is a, c, g, or t
  misc_feature (98)..(99): n is a, c, g, or t
  misc_feature (102)..(103): n is a, c, g, or t
  misc_feature (108)..(108): n is a, c, g, or t
  misc_feature (117)..(117): n is a, c, g, or t
  misc_feature (125)..(126): n is a, c, g, or t
  misc_feature (128)..(128): n is a, c, g, or t
  misc_feature (148)..(148): n is a, c, g, or t
  misc_feature (151)..(152): n is a, c, g, or t
  misc_feature (210)..(210): n is a, c, g, or t
  misc_feature (230)..(230): n is a, c, g, or t
  misc_feature (255)..(255): n is a, c, g, or t
  misc_feature (638)..(646): n is a, c, g, or t
  misc_feature (650)..(650): n is a, c, g, or t
  misc_feature (666)..(666): n is a, c, g, or t
  misc_feature (669)..(669): n is a, c, g, or t
  misc_feature (676)..(676): n is a, c, g, or t
  misc_feature (682)..(682): n is a, c, g, or t
  misc_feature (689)..(689): n is a, c, g, or t
  misc_feature (696)..(696): n is a, c, g, or t
  misc_feature (705)..(705): n is a, c, g, or t
  misc_feature (711)..(711): n is a, c, g, or t
  misc_feature (713)..(713): n is a, c, g, or t
  misc_feature (715)..(715): n is a, c, g, or t
  misc_feature (719)..(743): n is a, c, g, or t
  misc_feature (752)..(752): n is a, c, g, or t
  misc_feature (760)..(760): n is a, c, g, or t
  misc_feature (768)..(768): n is a, c, g, or t
  misc_feature (771)..(771): n is a, c, g, or t
  misc_feature (786)..(786): n is a, c, g, or t
  misc_feature (790)..(790): n is a, c, g, or t
  misc_feature (802)..(802): n is a, c, g, or t
  misc_feature (815)..(815): n is a, c, g, or t
  misc_feature (835)..(835): n is a, c, g, or t
  misc_feature (858)..(860): n is a, c, g, or t
  misc_feature (864)..(865): n is a, c, g, or t
  misc_feature (876)..(876): n is a, c, g, or t
  misc_feature (881)..(881): n is a, c, g, or t
  misc_feature (883)..(884): n is a, c, g, or t
  misc_feature (903)..(903): n is a, c, g, or t
  misc_feature (916)..(916): n is a, c, g, or t
  misc_feature (950)..(950): n is a, c, g, or t
  misc_feature (952)..(953): n is a, c, g, or t
  misc_feature (961)..(961): n is a, c, g, or t
  misc_feature (1027)..(1027): n is a, c, g, or t
  misc_feature (1069)..(1069): n is a, c, g, or t
  misc_feature (1113)..(1113): n is a, c, g, or t
  misc_feature (1119)..(1119): n is a, c, g, or t
  misc_feature (1124)..(1124): n is a, c, g, or t
ggnatagggtgngctcccnctnctccctctncnaaagaggnnnagtttgtgtngancaaagatcanaaaganaanaaaagtttnattntgacatcccnncannaccantttttgtgnatgattcnncnccactgacatcttccaaagnacnncatgtgattgaataagaaacaagaaaagtgcccacaccaaagcctccctggctggtgnacagggatcaggtccacagntggtgcagattcaaccaccacccanagagtgcttgcagactctgcatagatgttgctgcatgcgtcccatgtgcctgtcagaatggcagtgtttaattctcttgaaagaaagttatttgctcactatccccagcctcaaggagccaaggaagagtcattcacatggaaggtccgggactggtcagccactctgacttttctaccacattaaattctccattacatctcactattggtaatggcttaagtgtaaagagccatgatgtgtatattaagctatgtgccacatatttatttttagactctccacagcattcatgtcaatatgggattaatgcctaaactttgtaaatattgtacagtttgtaaatcaatgaataaaggttttgagtgtatcttaccaggctnnnnnnnnnaaangcacatcccacccaangantaatgcnccccgnttatgtncaacgcnctgcccttngccccncngngcannnnnnnnnnnnnnnnnnnnnnnnngttgtgtanacaagaanacatccanganaagaaacaaaacaantcanccataccaaaanaaacaaacaggcngtttaagaactgcagaaaanaaaagaaggaaaggctaccagannngggnnaaaggtctacngcttncnnagagcatgtctttgttaantcaggaaattttntaattatgtgtgtatgtgtatgtatatatatatncnnttttattnatttttttaaaatcgtattttattttgggggttgtgttaatgatgaagaaccaagaaaagattttntcttgatggtttcttcaacaggaaacagatattggaatagtntacatgtcatttttatctatacaatgaatttattatgtttttcnttagtnaagtnata

SEQ ID NO: 356739 - DNA, 548 bp, Homo Sapiens
  misc_feature (32)..(32): n is a, c, g, or t
  misc_feature (39)..(39): n is a, c, g, or t
  misc_feature (70)..(70): n is a, c, g, or t
  misc_feature (105)..(105): n is a, c, g, or t
  misc_feature (142)..(142): n is a, c, g, or t
ccattttggcaaggataaactcccatgacaanctcccantactgcatgtgaatgaataagaaacaagaantgaccacaccaaagcctccccggctggtgttacangggaccaggtcccacagtggtgccagaattcaaaccnacccacccccgggagtgccttgcagactcctgccatagatgttgcctgccatgccgtccccatgtgcctgtcagaatggcagtgtttaattccccttgaaagaaagttatttgcctcactatccccagcctcaaggagcccaaggaagagtcattcacatggaaggtccggggactggtcagccactctgacttttcctacccacattaaattctccattacatctcactattggtaatggcttaagtgtaaagagccatgatgtgtatattaagctatgtgccacatatttatttttagactctccacagcattcatgtcaatatgggattaatgcctaaactttgtaaatattgtacagtttgtaaatcaatgaataaaggttttgagtgtatcttaaaaaaaa

SEQ ID NO: 356740 - DNA, 916 bp, Homo Sapiens
  misc_feature (110)..(154): n is a, c, g, or t
  misc_feature (174)..(183): n is a, c, g, or t
  misc_feature (901)..(901): n is a, c, g, or t
cgttcgtctggtcggaacaaaaattaattgaggctcccttggttcaaaaccagcttgggtcatggtttctgatgtttaataactaaggaccaattcaaccaattcaatannnnnnnnnnnnnnnnnnnnnnnnnnnnnnnnnnnnnnnnnnnnnaaaactcatctctaattgtnnnnnnnnnnttatctctaattgtaggcttttgaagttagggtcggtcagtatttttagatagaatctttcaaaactcaggagagagactcagcttatttcatgtgtatgatgaggatgtctcctttattctttttcctgctatcacacttatgccaggctttctttcaaaacttaactcacccagctccttgtctttgaagccttcttttaattcttctcccacattccccaaaaccaagtcaattctctccctcagtgccctcatgtgtataaattgcatatcgtatggcatttttttcatgtctgtaagactcccaatttcccaaaggcgaggttactgtcattttcttctgtatctacagtgaccatcacatgaaaagtactccataaaggtgttaaggatggaattgtgtcaccaaccccaaaattcatgtgttaaagccctcaccctcgatgtgaccatatttagagatagatagggcctttaaagaggtaattaagttaaatgaagtcaaaatagtggggcctagtatcatatgaccgatgtccttataggaagaggagagacaccagggatgtgcacacacagaggggagtccatgggaggacggggcaagaaggtggctgtcctcgagccagaaagaggcctcagaagaaacccaacttgctggctcctgtcttgaacttcggctaccagatgtggtaaagaaaatatggggttgttcngcaaaacaccaagcc

SEQ ID NO: 356741 - DNA, 1557 bp, Homo Sapiens
  misc_feature (126)..(126): n is a, c, g, or t
  misc_feature (139)..(139): n is a, c, g, or t
  misc_feature (141)..(141): n is a, c, g, or t
  misc_feature (143)..(143): n is a, c, g, or t
  misc_feature (273)..(273): n is a, c, g, or t
  misc_feature (346)..(346): n is a, c, g, or t
  misc_feature (1523)..(1523): n is a, c, g, or t
aaggcggccacgtcctgctccccctggtgaagaagctgccctgggcttgtcgtcctagggtcaccaaaaatgtctgaggtgaagagccggaagaagtcggggcccaagggagcccctgctgcgganccgggaagcggantngnggcgggaagacccccgtggcccggagcagcggaggcgggggctgggcagacccccgaacgtgcctgagcctgctgtcgctggggacgtgcctgggcctggcctggtttgtatttcagcagtcagaaaaanttgcaaaggtggaaaaccaataccagttactgaaactagaaaccaatgaattccaacaacttcaaagtaaaancagtttaatttcagaaaagcttgagtctactgaaagcatcctgcaggaagctacatcatccatgtctttgatgacccagtttgagcaggaagtatccaacctccaagatatcatgcatgacattcaaaataatgaagaggtgctcactcaaaggatgcaaagccttaatgagaaatttcagaatattacggatttctggaagagaagcctagaagaaatgaacattaatacagacattttcaaatcagaagcaaaacatatacattctcaagtaactgtccaaattaactcagctgagcaggaaataaaattgctcactgaacggctaaaagatttggaagatagcacactaagaaatattagaacagtaaaaagacaagaagaagaagatctcctgccagtaaaggagcagctaggctctgatacaaaggcaatggaaaagttagaagaggaacagcatgccccctttgcaaaagatgaaaatctgactaataaactttccgactacgaacccaaagtttaagaatgcaagacacatttgccaacaattgaaagtgctattcactctgttctcagagtctctcaggatctgatagaagcagaaaagagaatggaagacttgactatgcagatgtttaatatggaagatgatatgctgaaagcagtgtctgaaataatggagatgcagaaaacccttgaaggaattcagtatgataatagcatattaaagatgcaaaatgaactggatattctaaaagaaaaagttcatgattttatagcatactcaagtacaggagaaaagggaactttaaaagaatataatatagaaaataaaggaattggtggtgatttttaaattcatgacatttattctgatgaaccatatcattatacataaattgattagtccattgattttgagttactttgatatgcctcatcttatcctacattattggaaaataaatgagatgtccacacaaatggattatccacataatcaaagcttatctttttaagcactaaaacttacttcattgtaactatttgaaatagaaatagttctttaaaaatatttctctacttttaaaacaagatacttaatatttttaatgttttttaaagcattaatggacatcatcattaatttcacctattatattgtacccacatatantagtctccaggggcaataaaggagatttaccact

SEQ ID NO: 356742 - DNA, 1115 bp, Homo Sapiens
  misc_feature (516)..(556): n is a, c, g, or t
  misc_feature (758)..(758): n is a, c, g, or t
gctgccctgggcttgtcgtcctagggtctccagacatgtctgaggtgaagagccggaagaagtcggggcccaagggagcccctgctgcggagcccgggaagcggagcgagggcgggaagacccccgtggcccggagcagcggaggcgggggctgggcagacccccgaacgtgcctgagcctgctgtcgctggggacgtgcctgggcctggcctgtggcagaaatctgaagctatcatggaacaattgaagtcttttcaaataattgctcatctaaagcgtctacaggaagaaattaatgaggtaaaaacttggtccaataggataactgaaaaacaggatatactgaacaacagtctgacgacgctttctcaagacattacaaaagtagaccaaagtacaacttccatggcaaaagatgttggtctcaagattacaagtgtaaaaacagatatacgacggatttcaggtttagtaactgatgtaatatcattgacagattctgtgcaagaactagnnnnnnnnnnnnnnnnnnnnnnnnnnnnnnnnnnnnnnnnnataggtgatcttctttcaagcagtattgatcgaacagcaacgctccgaaagacagcatctgaaaattcacaaagaattaactctgttaagaagacgctaaccgaactaaagagtgacttcgacaaacatacagatagatttctaagcttagaaggtgacagagccaaagttctgaagacagtgacttttgcaaatgatctanaaccaaaggtgtataatctaaagaaggacttttcccgtttagaaccattagtaaatgatttaacactacgcattgggagattggttaccgacttactacaaagagagaaagaaatttgctttcttaagtgaaaaaatatctaatttaacaatagtccaagctgagattaaggatattaaagatgaaatagcacacatttcagatatgaagtaagttttgacattattgagatttagactaaggtaatttttttaatgggacctctcatgagaagactggtaaatcaaaaataatgatattttggagcaaaagtcattttatatttaatcctattttgtacagtaaaaataaaacttt

SEQ ID NO: 356743 - DNA, 828 bp, Homo Sapiens
  misc_feature (351)..(377): n is a, c, g, or t
tgtttatcccaccacacacctttgagaaagtaattagggtaaaaactaactctcatatattacaatatctagagcccccatccccacgacctggttccaaaaaccttgtaaaagcaattacacaggttgtgggcagcaagggtgtttaaagctccccaaaagccattggaattttcttttcccttttaaagacggggtatggtggcctttttatttgaatttttttccaaagaaatgtgcagtctgtaaacactttttaataccttctgatgtcaaagtgattgtgcaagctaaatgaagtaggctcagcgatagtggtcctcgtacaaagaaacggggagcaggacgacnnnnnnnnnnnnnnnnnnnnnnnnnnntgcccacaaaaagaatcaggacttgtactgggaaaaaaacccctaaattaattatatttcttggacattccctttcctaacatcctgaggcttaaaaccctgatgcaaacttctcctttcagtggttggagaaattggccgagttcaaccattcactgcaatgcctattccaaactttaaatctatctattgcaaaacctgaaggactgtagttagcggggatgatgttaagtgtggccaagcgcacggcggcaagttttcaagcactgagtttctattccaagatcatagacttactaaagagagtgacaaatgcttccttaatgtcttctataccagaatgtaaatatttttgtgttttgtgttaatttgttagaattctaacacactatatacttccaagaagtatgtcaatgtcaatatttcgtcaataaagatttatcaatatccc

SEQ ID NO: 356744 - DNA, 1036 bp, Homo Sapiens
  misc_feature (33)..(33): n is a, c, g, or t
  misc_feature (390)..(390): n is a, c, g, or t
  misc_feature (546)..(546): n is a, c, g, or t
  misc_feature (929)..(929): n is a, c, g, or t
  misc_feature (942)..(942): n is a, c, g, or t
  misc_feature (949)..(949): n is a, c, g, or t
  misc_feature (960)..(960): n is a, c, g, or t
  misc_feature (962)..(962): n is a, c, g, or t
  misc_feature (969)..(969): n is a, c, g, or t
  misc_feature (973)..(973): n is a, c, g, or t
  misc_feature (984)..(984): n is a, c, g, or t
  misc_feature (994)..(994): n is a, c, g, or t
  misc_feature (998)..(998): n is a, c, g, or t
  misc_feature (1001)..(1002): n is a, c, g, or t
  misc_feature (1009)..(1009): n is a, c, g, or t
  misc_feature (1011)..(1011): n is a, c, g, or t
  misc_feature (1018)..(1018): n is a, c, g, or t
  misc_feature (1024)..(1024): n is a, c, g, or t
  misc_feature (1030)..(1030): n is a, c, g, or t
aatcataaaaaccacacatttcagcagccatanagaattatagcatggaaaataccaaaggtctagctttcagcagctgagaggtagaggatgctttacaaagaaatcccgtatcaatgatacaagtaattgcgataaacaatgtaggccctaatctccccaagccaaataataattcatttacattcccaaactatttttcataaagattatgtactattaaaatacaaatatcaaggttacccgaagtataagcaaacaactttaaaaaaatggagattaaaaaccctttcagaaagctaatttaacttttaaaaaaccatggaggtaaagaaaaagattaaactgcacatcaggtagtcaataaaggcagaatttactgtgcatgancccacatgagccaatcttaagttaatcactgagcagagaattcagcaagtccaaatgagagagaacaaagggtttaaaaatgacaatctgtagaggaataatccaaacagcaagagaattctttaaatctctccagttaaaagacagatgcctgcnagacctcacgccctcccttgcacttgtttcaacgtgattgccaatgtttgtactcttcaaagttccaagggtcataaaacagctttgtattagctgaatgacttgctttcaacttcggtatcacggattccattcaaattcactgtccttttttctctacctgaggtggaggtgcaggtttgccattaagagccatctgcaagggcgtagtctggcttgcaggaggcaaaggagcagtcttcaacttctttgtactagttttagacggatgcccctcctcctcttcatcagaatcctgaaggccatacttagaaaaatgggagaccttaaacacccaagaaccagtttcaggccggtattctttgaattgagcccctgtttcntgaaactgcttcnatcttcntcatagttgananagcaagngatntgggcctttantaacacgagntgtnttnntgttggncnactcccnccatgnaactcngccttc

SEQ ID NO: 356745 - DNA, 1154 bp, Homo Sapiens
  misc_feature (1053)..(1062): n is a, c, g, or t
atgtgtaaaggcctgcacacttcatacgaagcgaggcctgggtggcgtaattcggcacgaggggagagtgcattgtctctgatttcactattggtcggaaaggttatggttcaatctattttgaaggagatgtgaatttgacaaatctaaatttggatgatattgtgcatatccggaggaaagaagtagttgtctacttagatgataaccaaaaaccacctgtgggtgaagggctaaataggaaggctgaagttacattggatggagtttggccaacagataaaacatctcgttgtttaataaagagcccagatcgccttgctgatatcaactatgaaggaagattggaagcagtttcaaggaaacagggagctcaattcaaagaataccggcctgaaactggttcttgggtgtttaaggtctcccatttttctaagtatggccttcaggattctgatgaagaggaggaggagccatccgtctaaaactagtacaaagaagctgaaagactgctcctttgcctcctgcaagccagactacgcccttgcagatggctcttaatggcaaaacctgcaccctccacctcacagccaaagcccagaaggggaacagttagggaaggggtttgtggaaactggggacagtggaacatgggtaaattatccccccaggagccaggttttgggatcccatggttaaaaagagaagcattgcccttggagggaatcaggaaaccgtgttggtcctgccctccaccacattattttgcattctttcccctgggaaatttaaatcccaccatgccctttacccggaaacattgaaaaggccattcatttgccttacctgggttcaacaaacaatgtttagaatatgggccaccttggatatcccccgccttttagatttcacccttgccctttcccaaagacgccaagacctttcctccaagaaacatttttgttttcgtccccaataaattcccacccatattcgaccatttatctccacttgcgtgagtgaaaaaaactccgttatcatcttaaagttgannnnnnnnnnttaacttatcactatttcgaaaaatttttaaacaaggcttgcacaacgtctttttcttttttcccccccaaatggggaccttccgggggcgc

SEQ ID NO: 356746 - DNA, 1734 bp, Homo Sapiens
cggaaatcgcggggagggtcaaaggagacccggtctccgaggctcatggcgatgctggtcctagtacccggacgagttatgcggcctctgggtggccaactttggcgcttcttgcctcgcggactcgagttttggggcccagccgaggggactgcgagagtcttgctgaggcagttctgcgcgcggcaagcggaggcgtggcgtgcctcggggcgccctggctattgcctgggaacccggcccctcagcactgcgaggccgccacccccgtggtcgcagaagggccccggagactccacgcgcccctcgaagcccgggcctgtttcctggaagtctttagcaatcacatttgctattggaggagctttactggctggaatgaagcacgtcaagaaagaaaaggcagagaagttagagaaggaacggcagcgacacatcggcaagcctttacttgggggaccgttttccctcacaactcatactggggagcgtaaaactgacaaggactacttgggtcagtggttattgatttattttggcttcactcattgccctgatgtctgtccagaagaactagaaaagatgattcaagtcgtggatgaaatagatagcattacaactctgccagatctaactccacttttcatcagcattgacccagagagggacacaaaagaagccatcgcaaattatgtgaaagaattttctcccaaactggttggcttgactggcacgagagaagaggtcgatcaagtggccagagcatacagagtgtattacagccctggccccaaggacgaagatgaagactacatagtggatcacacaataataatgtacttgattggaccagatggtgagtttctagattattttggccagaacaagaggaagggagaaatagctgcttcaattgccacacacatgaggccatacagaaaaaagagctagccaaagcagtgttgctggatgcagtattctcttgctaagaggaaggaaactgtctcgcataggagcctatataaatataaacatatatacgtgcactctacagaatggccttcataccatgagaacatttctgttttggatggggatgttacccttgcgttcaaccaaaattgattcttggaactgtaaagattacaacccaaagtctcccaggaagctgtggggagaccagaggatcaagctgaagtgaagccagtgaagagcccacctgtggaaggacatggcggggcgaggcacagccagtgcattcctgcctgcgaacaggccctcccagcagctttgccgcctctccatcgtcttgggcccttgctcaaatagctgtgggactgaatttcacagaaaagaatataatttccatagtgctcttgcttgcctcttcttgagttctttgctcttctgagttcttggtggctaataacagtcagattagggtctctgccattcagagttgatgcttgaaaactttagttttccttattaatgaatatcactatcagatttgactaatgaagaggaaatctattgtttgggggaaaaaaaacatcagtttgatttctctaggggttcttttatgtgatttttagctaagtggtgtgccaggttttcagtgacataccaaatggaaataagaggatattgatcacgagtgtgatgctgagtacctttctgcatatactggattgtactttgtgtaaagtaaacatactcagttttgctgttcaa

SEQ ID NO: 356747 - DNA, 1133 bp, Homo Sapiens
  misc_feature (9)..(9): n is a, c, g, or t
ctgactganaggttttggtggcggtacagacacttttaactcacagtaaaagcaaaagcaacagctcaagcagcctccttggagaaaacctgaaaattcaacttgttcaagagaaggtcttgtacgtgcctaagttctagagcctcctgacgtgagcatggctgagagtgaggaccgctccctgaggatcgttctggtagggaaaactggaagtgggaaaagtgcaacagcgaacaccatccttggagaggaaatctttgattctagaattgctgcccaagctgttaccaagaactgtcaaaaagcatcccgggaatggcaggggagagaccttcttgttgtagacactccagggctctttgacaccaaggagagcctggacaccacctgcaaggaaatcagccgctgcatcatctcctcctgcccagggccccatgctattgtcctagttctgctgctgggccgctacacagaggaggagcagaaaaccgttgcattgatcaaggctgtctttgggaagtcagccatgaagcacatggtcatcttgttcactcgcaaagaagagttggagggccagagcttccatgacttcatagcagatgcggatgtgggcctaaaaagcatcgtcaaggagtgcgggaaccgctgctgtgcctttagcaacagcaagaaaaccagtaaggcagagaaggaaagtcaagtgcaggagttggtggagctgatagagaaaatggtgcagtgcaacgaaggggcttacttttctgatgacatatacaaggacacagaggaaaggctgaaacaacgggaagaggttttgaggaaaatctacactgaccaattaaatgaagaaattaaactagtagaagaggataagcataaatcagaggaagaaaaggagaaagaaattaaattactaaaattaaaatatgatgcacccaataaaaaatataagggcaagaagctgcagagaaatatatttaaagatgtttttaataggatttggaagatgctttcagcaaatatggcataggtttttgtcgaaatgtaagttttattcttcctaatttactgtgatttgttaatggatgaattgtattttgcaaagatagttagagaaatacctccttcccctt

SEQ ID NO: 356748 - DNA, 776 bp, Homo Sapiens
  misc_feature (555)..(593): n is a, c, g, or t
tttcacccccaagacgggcgttgacccccccctgcaaagtataccatgcgctgtgatatatcccacccaacacaggaccaccaaaacaatggtcccaatacacatgatgggccgttacacgaggaagaaccagaaacccgttgcattgatcaagaatgtctttgggaagtcaaccaaggaacccatggtctcttgttccccgcaagtaagagttaaaggaccagagcttccatgccttcaaagccgatgcggatgtggacctaaaaagcatcgtcgaggaatgcgggaaccgttgctgtgcctttagcaacggcaagaaagccagtaaggcagagaaggaaagtcaagtgcaggagttggtggagctgatagagaaaatggtgcagtgcaacgaaggggcttacttttctgatgacatatacaaggacacagaggaaaggctgaaacaacgggaagaggttttgaggaaaatctacactgaccaattaaatgaagaaattaaactagtagaagaggataagcataaatcagaggaagaaaaggagaaagaaattnnnnnnnnnnnnnnnnnnnnnnnnnnnnnnnnnnnnnnnataagggaagaagctgagagaaatatatttaaagatgtttttaataggatttggaagatgctttcagaaatatggcataggtttttgtcgaaatgtaagttttattcttcctaatttactgtgatttgttaatggatgaattgtattttgcaaagatagttagagaaatacctccttcccctt

SEQ ID NO: 356749 - DNA, 642 bp, Homo Sapiens
  misc_feature (315)..(370): n is a, c, g, or t
  misc_feature (590)..(590): n is a, c, g, or t
  misc_feature (592)..(594): n is a, c, g, or t
  misc_feature (596)..(596): n is a, c, g, or t
  misc_feature (598)..(598): n is a, c, g, or t
  misc_feature (600)..(600): n is a, c, g, or t
  misc_feature (602)..(602): n is a, c, g, or t
  misc_feature (605)..(606): n is a, c, g, or t
  misc_feature (608)..(609): n is a, c, g, or t
  misc_feature (615)..(617): n is a, c, g, or t
  misc_feature (619)..(619): n is a, c, g, or t
  misc_feature (621)..(622): n is a, c, g, or t
  misc_feature (624)..(624): n is a, c, g, or t
  misc_feature (626)..(626): n is a, c, g, or t
  misc_feature (628)..(629): n is a, c, g, or t
  misc_feature (631)..(631): n is a, c, g, or t
  misc_feature (635)..(635): n is a, c, g, or t
ggggtgtggttctagcaacgagcggtggcgggggttgtgccggtcccactggcaggcgggcaagaggggagtccgggcggcggccggcgtgggagccgggggaccaccatggtaaagaagcggaaaggccgcgtcgtgatcgactcggacacagaggacagcggcagcgacgagaacctggatcaggagctcttgtccctggcaaagcgaaagcgcagtgactctgaggagaaggagccgcctgtgagtcagcctgcagcctcgtcagactcggagacgtctgacagtgacgatgagtggacatttgggagcaannnnnnnnnnnnnnnnnnnnnnnnnnnnnnnnnnnnnnnnnnnnnnnnnnnnnnnnaacaggccaacaaaactgcctcctcaggcagttcagacaaagacagttcagctgagagctcagcccctgaggaaggtgaagtgtcagactctgacagcaacagctcctcttccagttcagattcagactcttcctcagaagatgaagagttccatgatggctatggagaagacctcatgggagatgaggaagacagggcccgtctggcacagatgccagngnnngngngngnganngnnctgttnnntngnntngngnngngggnggtgttg

SEQ ID NO: 356750 - DNA, 1152 bp, Homo Sapiens
  misc_feature (218)..(218): n is a, c, g, or t
tgcaccctccgaggactgggagtcccgagtccagcttagggggagtgggggcgcgacccccaacccagaaaccttcacttgaccgctcaagttcgcggcagcagggcgggccgcgccgaatctcggcgtgcgcggaggggagatgcaggcgagcgccagagcccgggctcgggggccctgcgccggggagaggagccgggacccaccggcggagcaanaacaagtgtattcatattcaaacaaacggaccaattgcaccaggcggggagagggagcatccaatcggctggcgcgaggccccggcgctgctttgcataaagcaatattttgtgtgagagcgagcggtgcatttgcatgttgcggagtgattagtgggtttgaaaagggaaccgtggctcggcctcatttcccgctctggttcaggcgcaggaggaagtgttttgctggaggatgatgacagaggtcaggcttcgctaatgggccagtgaggagcggtggaggcgaggccgggcgccggcacacacacattaacacacttgagccatcaccaatcagcataggaatctgagaattgctctcacacaccaacccagcaacatccgtggagaaaactctcaccagcaactcctttaaaacaccgtcatttcaaaccattgtggtcttcaagcaacaacagcagcacaaaaaaccccaaccaaacaaaactcttgacagaagctgtgacaaccagaaaggatgcctcataaagggggaagactttaactaggggcgcgcagatgtgtgaggccttttattgtgagagtggacagacatccgagatttcagagccccatattcgagccccgtggaatcccgcggcccccagccagagccagcatgcagaacagtcacagcggagtgaatcagctcggtggtgtcttgtgtcaacgggcggccactgccggactccacccggcagaagattgtagagctagctcacagcggggcccggccgtgcgacatttcccgaattctggcaggttgtccaaccggatgtgttgagtaaaattctggggcaggtatttacggagactggctccatcagacccagggccaatccggtggtagtaaaaccgagagtagcgactccagaagttgtaacgcaaattaggc

SEQ ID NO: 356751 - DNA, 1421 bp, Homo Sapiens
  misc_feature (719)..(719): n is a, c, g, or t
  misc_feature (973)..(973): n is a, c, g, or t
aaaagtaatgaaatgttctctttttacttcaccctgccagaatgtgccacttgacttatctttattgtctatgcaacccatttgccacttcctatttgataggacagatacattttactctcatgctcgtggatccgctatgagtcataaaaccaagagcccgttacccagaaaacttggaccaaaccctcactgatagtgaattatttcaaaaatagcctccctactcatacagacattttaagattctgtgacaatttaatgactgaatctttttaggatatgttgctttacctgccttctgttgtaaaatggctctggtctcatgcacagcaggaagtgatccctttattgttataggtaatagattcttgggaacctttttttagattgggttaccagatgaaatgtaggatgcccagttaaatttgaatttcaggtaaataattttttagtatgcatatgtctcaaatattgcatatactaaaaattactatttgaaattcaaatttaactcatatttttatttgttgaccttggcaactctgctttagggtcaccaaacagcttttaaaatcacaaattctagtgaattaaagtacttgtgtaggtgtggcacttaaataggcttcggagcttgaaataatcctgttagagtactgtggagctgtgtggacagacagtgaaagaaatctaccaccatcaccacaccgaatganttattaatactgatgttggagaaactacaaccaagttgattctggaagagttactggttaaatccatcttttgcttgggagcctagaagtttgttacagtaaagacttgcatttctgcactggattggaattaaggtcatttagtaagaaattactatttaaaaaaatggaaatagagtttagaaaatatctgagacagaaacttagatacatttccaacatgggcaaaacctaggaacttagagaaaaacaanacctatcatgcggttagaaggagagaaggggacactcagaaacctgagcacatttcttaaagctggtgaaaggaggcagaaagcagcataccatgggagcatctgtgtgcacacatgaccaagacagtgccgccagtacctgcgcctgatagggtttcagttcagactacctgtcctttcctcctccttaaaaagattttgctacattttaaacattagaatatattctttaagaatatttttgtgggttatttattgattttgtggttttaaaactcttgagcacgagcagaacagcttttgttgctaaatcaatcaaattacagtggtgcactagacagaaacagtcccttagaatgcagcttatatgtgagtatctactgttaatgggagaattggaattttatgtttagaaaaaggcagatttggggctgggcacggtggctca

SEQ ID NO: 356752 - DNA, 1695 bp, Homo Sapiens
  misc_feature (15)..(15): n is a, c, g, or t
  misc_feature (31)..(31): n is a, c, g, or t
cgattaccggcgccnctaaaagcaaacgagnagtctagcaacaggcacccacccaggctcacctcgtagcagtgctggacccagcccccattaagatgccgcccccaacggcccacccatctggccagcttggtggggggcacccgaaggggccgaaggctgtgtcttgagcttgttactgcgttcaacactaagatgccaccgatgtggcagctgcaggcatcccctgtggtcagctccaaagcaactgtgacgtccgtgggcccctcaagcttatacaccatggacaggtaaatcttgggtggcactggggcctgcagggaaaataacctcacagccacatttccaacctccggtgggatcacaccccggacgagcagggagctgcctccgtgccaggcatcctccaggcagcagtgcgtcctcacccagccccggccatcccctcccagcctgtgttctccaaacaagggctggatctcctgggcgctcaggtggtaccagggccctaccgcctcttcctggccatagcagaccctccgtgcacccatgcccaggcagaaggacgtgacgaaaggcaaggagcagatgctatgtgtgggcagataacgctccagtcggccccagaacttgtcctggttctggaagaaatccttcttctccagacactcatacacccagccgggggcaaacaaagccacggagaagccatgctttcggatcagctccaacgacttgtctgtgtcgaatcggcctccgaccacgttccctcgagcaaacacatccacgcccacgtacacatcagcccggcgctccccagcctgccccagcatccgctccaagtgctcctcccgccagttatagttagtgaagaagccgtcgcaggaatcaaagaagaccctgttgtgctggttgagttcgtcttgccatttgagctgcccactttgcaccacgctgtcataccagagcaccaggccccctgggacctgccggtgcagctgtgtggtgaggtaccgcaggaaaggaggcatgttccccacagcggccagactcagcgagttctcgatgttgatcagccagccatcaaaacgaaaaaactgagtgatctggaccagccggtcagccactgcctggtacgagcgctcatccccggccaggaaggcttcacagagccttcccccttcattccactccgtgatgaaagtccccagcacgcagaccccatgcctgtgggcagtgttggtccagcccactgggggaatggtgacggtgtggtggctgaagtacacaaagacgtcgatgcactgccagtggtagaaagcatagggagtctgcaccaccgagccctgaatgaacctgtcatccaggtacccgcccatcatgtcatgacacaacaaagtccggcgcctctggctgctcagagggggctggcgacacgccaggggctccagggccacattaaagccatcctccaagcggggcttccacgccaagagctcctccagcgaagacaagtaaaagctgattggtttggtggtgtccttgtcataatatctaactggcagggggtccggggaaaaactgaccacctctcgaaagactgtctcttcttcttcatctttgatgctccttcccggccgccgccgccgccgtgtagccgaccgggtgaccgtcaccgccgcggcctccatgaca

SEQ ID NO: 356753 - DNA, 574 bp, Homo Sapiens
ttctgccatcagaagagggccgtaagcagagtataatgggatcaagtgagcagccttaaacctgcggaagagatgctgagtggatctgggcaggtaccaacagtggctgctgtggcttcttcatgcttctcaggaaaacaggctcctgctgtttgaaacaggctccccagtagggactggtcctaaagaatagaaagcagacaggcgtgtatgcaatagaggaggagaccccagagtgctgagctgagcatgcccatggcctgcacccacattcaccattcagacgaggccctcctccctggaggtgatcccaaacctctggaaattggagtaactggccatttgatacccaaggattatgctcggcttggaagaatgagcctggcctatgggagtctctcctagggattaatctccaagacaaaggaagttgttcattggtttaggagccgggtagaaatcctgtaagttcagggttgcaagattttataccatttgtctgagctaggaggaaacccaggtagtggagagagaattgtgatcagttcctgtaacctgccacaatccctggtgg

SEQ ID NO: 356754 - DNA, 766 bp, Homo Sapiens
  misc_feature (46)..(83): n is a, c, g, or t
  misc_feature (380)..(382): n is a, c, g, or t
  misc_feature (385)..(387): n is a, c, g, or t
  misc_feature (392)..(396): n is a, c, g, or t
  misc_feature (402)..(403): n is a, c, g, or t
  misc_feature (413)..(413): n is a, c, g, or t
  misc_feature (425)..(425): n is a, c, g, or t
  misc_feature (427)..(427): n is a, c, g, or t
  misc_feature (434)..(454): n is a, c, g, or t
  misc_feature (471)..(471): n is a, c, g, or t
  misc_feature (477)..(477): n is a, c, g, or t
  misc_feature (501)..(501): n is a, c, g, or t
  misc_feature (507)..(507): n is a, c, g, or t
  misc_feature (515)..(515): n is a, c, g, or t
  misc_feature (590)..(590): n is a, c, g, or t
  misc_feature (627)..(627): n is a, c, g, or t
  misc_feature (638)..(638): n is a, c, g, or t
  misc_feature (681)..(681): n is a, c, g, or t
gagatagactcactatagggcgaacggagctcacgcggggcggcgnnnnnnnnnnnnnnnnnnnnnnnnnnnnnnnnnnnnnnatcaggccaaatcggccgagctcgaattcgtcgagagcggctgggaacttgctgactgcgcggccgggaggagccgagccgggcggcggcggcgggaggctacagcgcgcgggggtctcccgcgtcccctccgcctcgccgggagctcgcgccctcgcccagccgagctcccacccccgcttttttccgaaggcgctgggcggcgccaccctccggccggagcccggcactgcacaaccccctccgactttcaatgttccacactccccggccagagcctcctcggcttcttttttnnnccnnntccannnnnttgccnncacagctgcntccatttccttnancgaaggnnnnnnnnnnnnnnnnnnnnnccacaccgtatcggcgngcgagnggccgggcgggcggccgagttttncaaganataacttnaccaagatgtccagtgataggcaaaggtccgatgattagagctccatcaccatcagtggcaatttagatgcggancagcgagacccatccgctccagagcctgtaagataangaggaaagaanatcttctgctacccagcagaataaaaacataaactttctagcnaaactactgctaagttatccactagtgctaaaagaattcagaaggagctagctgtaataacccttgatcctccttctaattgcag

SEQ ID NO: 356755 - DNA, 1299 bp, Homo Sapiens
cccccttccccctcccacagctgcctccatttccttaaggaagggtttttttctctctccctcccccacaccgtagcggcgcgcgagcgggccgggcgggcggccgagttttccaagagataacttcaccaagatgtccagtgataggcaaaggtccgatgatgagagccccagcaccagcagtggcagttcagatgcggaccagcgagacccagccgctccagagcctgaagaacaagaggaaagaaaaccttctgccacccagcagaagaaaaacaccaaactctctagcaaaaccactgctaagttatccactagtgctaaaagaattcagaaggagctagctgaaataacccttgatcctcctcctaattgcagtgctgggcctaaaggagataacatttatgaatggagatcaactatacttggtccaccgggttctgtatatgaaggtggtgtgttttttctggatatcacattttcatcagattatccatttaagccaccaaaggttactttccgcaccagaatctatcactgcaacatcaacagtcagggagtcatctgtctggacatccttaaagacaactggagtcccgctttgactatttcaaaggttttgctgtctatttgttcccttttgacagactgcaaccctgcggatcctctggttggaagcatagccactcagtatttgaccaacagagcagaacacgacaggatagccagacagtggaccaagagatacgcaacataattcacataatttgtatgcagtgtgaaggagcagaaggcatcttctcactgtgctgcaaatctttatagcctttacaatacggacttctgtgtatatgttatactgattctactctgcttttatcctttggagcctgggagactccccaaaaaggtaaatgctatcaagagtagaactttgtagctgtagattagttatgtttaaaacgcctacttgcaagtcttgcttctttgggatatcaaaatgtattttgtgatgtactaaggatactggtcctgaagtctaccaaatattatagtgcattttagcctaattcattatctgtatgaagttataaaagtagctgtagatggctaggaattatgtcatttgtattaaacccagatctatttctgagtatgtggttcatgctgttgtgaaaaatgttttaccttttacctttgtcagtttgtaatgagaggatttccttttaccctttgtagctcagagagcacctgatgtatcatctcaaacacaataaacatgctcctgaaggcaaaaaa

SEQ ID NO: 356756 - DNA, 393 bp, Homo Sapiens
tccccaaaaaggtaaatgctatcaagacttgcaagtaggcgttttaaacataactaatctacagctacttgcaagtcttgcttctttgggatatcaaaatgtattttgtgatgtactaaggatactggtcctgaagtctaccaaatattatagtgcattttagcctaattcattatctgtatgaagttataaaagtagctgtagatggctaggaattatgtcatttgtattaaacccagatctatttctgagtatgtggttcatgctgttgtgaaaaatgttttaccttttacctttgtcagtttgtaatgagaggatttccttttaccctttgtagctcagagagcacctgatgtatcatctcaaacacaataaacatgctcctgaaggcat

SEQ ID NO: 356757 - DNA, 1675 bp, Homo Sapiens
  misc_feature (66)..(66): n is a, c, g, or t
  misc_feature (103)..(103): n is a, c, g, or t
  misc_feature (150)..(150): n is a, c, g, or t
  misc_feature (152)..(152): n is a, c, g, or t
  misc_feature (190)..(190): n is a, c, g, or t
  misc_feature (302)..(302): n is a, c, g, or t
  misc_feature (324)..(378): n is a, c, g, or t
  misc_feature (470)..(470): n is a, c, g, or t
  misc_feature (1287)..(1287): n is a, c, g, or t
  misc_feature (1527)..(1535): n is a, c, g, or t
cggcagcagcagcaggaagccgagccgggttgagcgactcggaggcgagcggaggagctggaatanggggagtcagcgaggacggtggggccaggagcccttnggagggcctacggagggagcggccccaggcgctttctagagcgtgangntgggggagcaggcgcagggtggcacgagcggaggcggnggcccgggcgtggggcacggctggggaagctgccgcctccggccctgcccggctgcctccgccgcggccagtggctatggagcaggcgggcaccagacctgcggcgacagancatccacggctccggcggcccnnnnnnnnnnnnnnnnnnnnnnnnnnnnnnnnnnnnnnnnnnnnnnnnnnnnnnngcccagcggcctcccagctgcgatactctgtgccagaggagcaggcacccggcgcgctcgtgggcaacgtggctcgcgcgctggggcttganctgcggcgcttggggccgggttgcttgcgcatcaaccatctgggtgcgcccagtccgcgctacctggagctggacctgacgagtggagcgctcttcgtcaacgagcgcatttatcgggaggcgctgtgtgaacagcggcctcgctgcctgctcagcctggaagtgctggcgcacaaccccgtggcggtgagcgccgttgaggtggaaatattggacatcaacgacaactcaccgcgtttcccgcggcccaactaccagcttcaggtaagcgaatcggtggcgcctggagcgcgctttcacatagagagtgcgcaggaccccgacgtgggcgccaactcagtacagacctacgagctcagccccagcgagcacttcgagctggaccttaagcccctgcaggagaacagtaaagtgcttgagctggtgctgcgtaagggcctagaccgggagcaggcagccttgcaccacctggttctcacagccgtggatgggggcattccagcccgctcgggtacggcacagatctctgtgcgtgtcctggacactaacgacaactctcctgcctttgaccagtccacttatcgcgtccagctacgggaggactcacccccaggcacattggtggtgaagctgaatgcctcagacccggatgagggctccaatggtgagctcaggtactccttgagcagctacacgtcggaccgggagaggcagctcttcagcatagatgccagtaccggggaagtgcgagtaattggggggctggattatgaggaagcctcctcctaccagatctatgtgcaggcgactgaccggngtccagtgcccatggcaggtcactgcaaggtgctggtggacatcgtggacgtgaatgacaatgccccagaggtggtgctcacggacctgtatagcccagtgcctgagaatgctacacccaacaccatttgtgggcgttctcagtgtcaatgaccaagactcagcccccacccggaagggagcctgggtctggaggcccactgccttttcgactgaatgcttttggaaactcctatcactnnnnnnnnncggcccactggacgaggagcggggggctgtcttcaacattagggggcacgccacagaggggggaataccggagttaaaatccttgggtccactggagggtggaattcttggccataaaggacattccaccaaggcttttg

SEQ ID NO: 356758 - DNA, 894 bp, Homo Sapiens
  misc_feature (536)..(580): n is a, c, g, or t
aaaacacacacatggatgcttattctccaccctgttccacatctggcattttttgtgcatcttccaacttaagtacacagcagcaagtgctctacatctttgggtagctacacagaaccccactgtggctcactgtggacacaccattgaaaaccttgtatgtaggtcacttagtacaaggaggaacacaactgttgaagaagtacctaaaaattgaattacttgaacaaagtgtgggacatttgctgttttgatggattttaccacactgtcttcccatttatgcttaccagcaatacataggaacacttgggtccctgcagtcagggtgtggaaatggcagatgacttcagccctaaggtgcatttttcttactaggaggagatggagtgtattttatgggatataagcattagctacatttcctgtcctgttcacatcctttgcccatgtgtctatgaggttattgatctttcttactgatttattgtagctctttacttaggaggttaattagccttttgcctgtggagagnnnnnnnnnnnnnnnnnnnnnnnnnnnnnnnnnnnnnnnnnnnnnggccatttgtcttttgactctgatgtggtttttgctgatttcctttgatgtattctagtttatctgacttttctttggcgacttatggactttctctcaccactaaaagccctcactgctctctcagtcttcttgatttaacctcctccaggcttccgccttctccaggccctgattctcagttggagttgctggtgcctcctccttcacccagcgtctgacgctggagtgctcacagtgtggctgggaccacttctctcctctgtagataccaccctgtgttgatcacttgcaggccgggtctgtgtgcatgt

SEQ ID NO: 356759 - DNA, 1119 bp, Homo Sapiens
  misc_feature (987)..(987): n is a, c, g, or t
  misc_feature (991)..(991): n is a, c, g, or t
  misc_feature (1059)..(1059): n is a, c, g, or t
  misc_feature (1088)..(1088): n is a, c, g, or t
  misc_feature (1092)..(1093): n is a, c, g, or t
  misc_feature (1103)..(1103): n is a, c, g, or t
  misc_feature (1109)..(1109): n is a, c, g, or t
gccaacctctatggatatataaagggaagcttgaggaggaatttcacagttacagtgcagaagcagaggcaaaagaattaaccagctcttcagtcaagcaaatcctctactcaccatgcttcctcctgccattcatttctatctccttccccttgcatgcatcctaatgaaaagctgtttggcttttaaaaatgatgccacagaaatcctttattcacatgtggttaaacctgttccagcacaccccagcagcaacagcacgttgaatcaagccagaaatggaggcaggcatttcagtaacactggactggatcggaacactcgggttcaagtgggttgccgggaactgcgttccaccaaatacatctctgatggccagtgcaccagcatcagccctctgaaggagctggtgtgtgctggcgagtgcttgcccctgccagtgctccctaactggattggaggaggctatggaacaaagtactggagcaggaggagctcccaggagtggcggtgtgtcaatgacaaaacccgtacccagagaatccagctgcagtgccaagatggcagcacacgcacctacaaaatcacagtagtcactgcctgcaagtgcaagaggtacacccggcagcacaacgagtccagtcacaactttgagagcatgtcacctgccaagccagtccagcatcacagagagcggaaaagagccagcaaatccagcaagcacagcatgagttagaactcagactcccataactagacttactagtaaccatctgctttacagatttgattgcttggaagactcaagcctgccactgctgttttctcacttgaaagtatatgctttctgctttgatcaaacccagcaagctgtcttaagtatcaaggaccttctttgggaataatttttccttttcaagtttttcaagatgtaggtatatccatgaatgccaatttgcatttaaattccacgtatcctgtagtttnattnctcattgttcttaaagactgttgatactataacatcagtgatcattatattttaaacagaaagggctntcagatacctccatctactggccatcccnctcnnaacaaactcntcaaanaggtaaaaaa

SEQ ID NO: 356760 - DNA, 1143 bp, Homo Sapiens
ggcctgggtggcgaattcggcacgaggtaactttgaccaggagcctatactggactctttcaacttctctcaagaatgccttttccaggagcagtacctgtccaaggatttgacaccagcagtgacagacaatgatgaggccgacaagaaggccggccaggccacagagggccattgtcctcggcagcagtgggccctggtggagtttgagaagcccgtcacctgccctcggctgtgcctggtgattggctccaggctagatgcggacattcacaccaacacgtgccggctagccttccatggcatcctgctccacgggctagaggacaggaactacgccgacagcttcctgcccaggctgaaggtgtacaagctgaagcacaagcatggccttgtggagcgggcgatggatgactacagtgtgatcggccgctccctgttcaaaaaggaaaccaacatccagctcttcgtggggctcaaggtgcacttgtccactggggaactgggcatcatcgacagtgccttcggccagagcggcaagttcaagatccacatcccaggtggcctcagccccgagtccaagaagatcctgacacccgccctcaagaagcgggcccgggctggccgtggggaggccaccaggcaggaggagagcgccgagcggagcgagccctcacagcatgtggtgctcagcctgactttcaagcgttatgtcttcgacacccacaagcgcatggttcagtctccctgagtgtccggtgacctcccccagggcctccttgcccagcccagtccaagctgctgtgccaaatcccaaccagccacgcctcagcctctcccagtctctccctgcagtcctgcagcagcagcccccacccccaagctttggtgctgagccctggtgaggagctgagggggatgggttgctggggccaggagggtctctcctccagcccctgcaaactcccacccaggacagcccccagcccaactaggaaagggccatgggcagagggctggtagccagtatcttccactgccccatctgttggccacctgcaggccagtctcaaccctcccccaggtgggcaggcacttgatggctacaaataaatgtcccgtggccccagcccactctaaaaa

SEQ ID NO: 356761 - DNA, 2543 bp, Homo Sapiens
  misc_feature (100)..(157): n is a, c, g, or t
  misc_feature (969)..(970): n is a, c, g, or t
  misc_feature (1060)..(1090): n is a, c, g, or t
  misc_feature (1839)..(1853): n is a, c, g, or t
  misc_feature (2351)..(2427): n is a, c, g, or t
gccgccggacacgcagccgcaggccgggaccgggacgcagctggggagtcagggacgcgcgcagccagcccttccccctccggctcccgcaccgccggcnnnnnnnnnnnnnnnnnnnnnnnnnnnnnnnnnnnnnnnnnnnnnnnnnnnnnnnnnnctctcccggccccggctgccagcaccatgtccgcagggggagattttgggaatccactgagaaaattcaagttggtgttcttgggggagcagagcgtcgggaagacgtctctgattacgaggttcatgtacgacagcttcgacaacacataccaggcaaccattgggattgacttcttgtcaaaaaccatgtacttggaggaccgcacggtgcgactgcagctctgggacacagctggtcaggagaggttccgcagcctgatccccagctacatccgggactccacggtggctgtggtggtgtacgacatcacaaatctcaactccttccaacagacctctaagtggatcgacgacgtcaggacagagaggggcagtgatgttatcatcatgctggtgggcaacaagacggacctggctgataagaggcagataaccatcgaggagggggagcagcgcgccaaagaactgagcgtcatgttcattgagaccagtgcgaagactggctacaacgtgaagcagctttttcgacgtgtggcgtcggctctacccggaatggagaatgtccaggagaaaagcaaagaagggatgattgacatcaagctggacaaaccccaggagcccccggccagcgagggcggctgctcctgctaatgcagagccgacctgtggcttcccatgacactccttgcttgttgtgttgcttcctattggctagcttcctaaggggggagggaaccgagttatcaagatgggaggatttttcttttctctctgtctttaggagtagggtgggatggggagggaggctgnncatcagggatcacatcactcttaacggctgttacttaaacaactattttttggtttggttgtaatatattgtactttattaagattgccnnnnnnnnnnnnnnnnnnnnnnnnnnnnnnntcatgtgtatacaattttttgccagataaaaatgtagtcatttttatttgaaagatgtgctttttgtttttgtatatttgtaaacttatagagaaccttttccacatacctcctccttcctgttctctttgaaccgttcatcacctctgccttcctcctatccccagcccaataaattaaaacaattaactgagcaaattaattaggcttcagtctggggccatctggccccactctctaggccctactccagttaaatcaaacattggtttgaacacatcagcctctgaaaaggtagctctgactcttgtctttccatggccagagtgggtcgtcaacctcgtgtggagctgagaccaaggtctgtgggctctaggcagcccggcagcagcccccagaggaactgctcccacctctccttctctttccctgaaaagccttgaagggggttgagggtacaggcaaccttgtgttctctgtgccctcagggactggcagagcaagaggccatcagaaggacgaggtgctgttggcaattgcagctgcgtggtgcgtggtttatagactggggtgccatgtgtacttctgaaaatattttaaccagcccacccagcagtcagtacacatgcctgggccaagtctaagaaactcagtgtgtgatgttgggcacgtgtgccatcctgaagccttcctcctggatgtcagggaagctggaccacctggagttgatcctctgtgatggggaggcnnnnnnnnnnnnnnncgtgctgtctgcagaaccaccagcttgaaagatccatgttcttagagcctcagctgctaatattgtcgagtgctttctggaaacagctgattggttgctaatgtttacaccccagtggcatggcgcagttgaagtctacgtggacatatctctgtggctactgtggctgcgctgtggtcacctgacggatgtggtatcagagtggcggtctccagaaggctgcttgcccccagagagccatctccttccatttttgattcattcctgagaatggcttagtcctgagaatctgcaaagtctctgttgaccactctctcttcccacttagtgatactacctacttggtcagcattccctttatacttatatttactgttctctgccatcccagtaccaggagtattttgctaagaataggaagtcacaaatatacactaccgatccagcatggctcagctttcaatatatccccttctgtatattgtttcaaacaatatnnnnnnnnnnnnnnnnnnnnnnnnnnnnnnnnnnnnnnnnnnnnnnnnnnnnnnnnnnnnnnnnnnnnnnnnnnnnnatatacatgtttacacatatttctttatcctcttatacatacaaagactcttttgtgcatgttatcttagctcatattatactctgtattgtttttgtattcattctgctttactt

SEQ ID NO: 356762 - DNA, 619 bp, Homo Sapiens
  misc_feature (402)..(437): n is a, c, g, or t
  misc_feature (454)..(484): n is a, c, g, or t
  misc_feature (518)..(527): n is a, c, g, or t
caaaaaggagttaaaacccaggtttcagcttaaggtgttttataagaagggttaaataaagttttaaaagaatattagacccaggggcttgggacaaccaaaagaatccggtaaagtggggccgatttttaagattcccaataggcgcctttaaaagatccacacagctaagcttgccgtgggcccagtttcagcaccaatacaagtcgcaaagccaaaatgttgggtaatgtttaaagtttaaaaataagtatttcccttttataaaagtagtagttcacgaattataatttaaaaagtaactatgcccttggtaatccaatcccaatagatataccaagctgtgcaaacatttattatgactttctggtccttttcctggtgggagtggagaaatttggnnnnnnnnnnnnnnnnnnnnnnnnnnnnnnnnnnnnccactttgaagcctttnnnnnnnnnnnnnnnnnnnnnnnnnnnnnnntctgagaattactgaattattaacacatagtaannnnnnnnnnaactttatatcctgttaagtcagagtactgttggagaaggtttttgctttttatatttgggattaaatcttgggattgggtgttgtggctca

SEQ ID NO: 356763 - DNA, 1955 bp, Homo Sapiens
gtttcagtggagcattagtttaaatatttagtctaatcagagactcacagccctgggcaatagatacatagctttttaaaattttatcctttgtgacctgctatagtggcattggactattttctgcatgtattataactaaagattggccttatttcaattgtttttattgcacaacttcactacaaatttaaagactgctggcattattataaaactgtcttcctccaatccaagtaaataagtatgtggaatatttgtgagctggattaggtaacatctgagacttgggattgactaaatttagttatcacttggaaatgaattacataagatacagtaatcagagaaaatatctttatgcagcatgtatgttaacatctagaactgtccctcatctgcagtgcagtagaggaatcagacattttaagaaatgtattcaaatatttttatcttatatgttagcagcatttacatgttttcagatatgatttgtaatataaattaatttctccagttaacaatgtttacttcaattctgacattccattttatacatatatacctactgtatatctctctcaaatgtcagctagaagcaactttttcagttttctatctaatgaaaacggatatattctgaatgtttttgttacctgaaatttatttttgagtaggttgaaaggaccaagatacttgagtgattaaaggactgtaagtgttctgcttatatgcaggagttacatgattttaaaagtcataataggggaagtagttttatcatctgattactcctattaacctaaaaagtatttctaacataacagattgagcagtggttttgttacacttaggcaagaatttattttcccattaaaatttgaaaaatacacttttctttgcttctacccttgcagtttcccttagttcccctaatttccaagtgatctgaactaaaattaatattacacttactaagaaactatttttgttaattatactgagcaaagtttgctccaaatgaaaagtcattacgaactatgtatagtacccaagaaaaggtcaaattgagtcagaagactgtaagtaccacttttggcgctccagagataaaccttgtacacactgcagtagaacagtgagtagaaaatatgagctataaatagatattatttttagttttgatagctctgtgttgaaatacttttttaatgcagataaaaattatcaggaaattaaccttatggcacagaccaaatacttagtgcatggctgagtttctacaattcaaggagccaagaaaataggttcaaaatgaaaaataggacatgcaaataaggcagatgcacacatactggtaactttaagattgtgtgtgttgattagtcacaaatgatagactataacatgagacaatacaaaggttacatttttggaccatattaaaaatgcaagaagacaggggtcttactcaagatcttttagaaaacttaaatcctgtcacaggatatttagacatgtgtagaatgtagctcaatttttaaaaagtaactgacctagagggtgaaagttgaaactgacacattttcaaattaagattatgcttattttgtacagaaaacaatgtttaaacacaagcagatctgttgtatgtaataagtaacaccagagttttaaaacaaattaattatttagctttattgaagttggtttttttccttccgaacctggagtatcatattataaacagcagtttcacaccagaatagcagtgccctttctttttgtacatactgattggacctttctttactgttacgtggacactttctatgttagttttgatgcataattctttgaatccttttatacaaactagaatgtatgtgtaagaatacctgtccctgcaatgtagtaactacaaacttatttttaaataaatagaaaactttttt

SEQ ID NO: 356764 - DNA, 932 bp, Homo Sapiens
tgggaatataaatgggaactccttggtgtattgttctcagacctgcagcagatgggtgccctttgaaggagctcccaccatctttctgtggttcagagaaagatgtggttatatggctttagaattgggtgccacatattggggacaaaacataggtaaaaatgagaagtctttccttagactaaggtttcactgtgataattgtaagaatgtgttagtatgtcttcaactcccatctttcatttatattgcagataacaactttgtcttttaaaaagttttgagctttaaattattgagataccagattaccaaagaaatagtttcacagaacaggtataaacttgatttgtccagtttgactaaaacagcttttcaaaacaaaatctagcagctcactgtaattttttttattgttatttatgattctcttacattcattcagaatgcttgaaaatattagtaagtaggcagataatttggattggtttagctattgtaaagagttatttctctctagccatttataaagtatacttttattataaacaactgaaagtttatggtagatgccgtatacaattgtctgaattatctgtagtataaacatctgaatatacaaacattaggaaatgataggaattcagcaaaaggggctttaatatttactttgcttacattttatattttgcttaatcctttagaatccaaaggccctattgtgcctttaaatgtagctgaccaaaagcttcttgaagctaatacacagtttcagaaaaaacaagggaagaatactattgaagtctgggggcttttagatgatggaggtttgaccttattgataccataccttcggacgtccaagaaaaaatggtaagtcgttattacagtgtaaacaagtgttttaagttaaacagaaaatacaagtaccg

SEQ ID NO: 356765 - DNA, 469 bp, Homo Sapiens
  misc_feature (432)..(432): n is a, c, g, or t
  misc_feature (440)..(440): n is a, c, g, or t
cgaggaagagctggaagactggttggacagcatgattggctaaaaaggggaaaaaaacggcctgaagcaaatcttggttgccttctaacggcaggtgggcataaggctgtccttcaggaccagccagtttacaagcatgtctcaagctagtgtgttccattatgctcacagcagtaaatgcctacctctgtgtttgacatctgaaagaatacattgaagcagcttgttgcatttgtttttctggcttagtaatctaatagatttccttaagggcaggagatagactctggcccttgtttctagcctccttccttgcagtgtttacaacatagccagtgtttacagcatagcagatgctgctgctgattaagagaatagatgcaaacaaggcatgcatttggccaaaataaacaaatgctggtctgtcccganccccccanacacagagaacatacaaaacctgtcggag

SEQ ID NO: 356766 - DNA, 1436 bp, Homo Sapiens
  misc_feature (1096)..(1299): n is a, c, g, or t
caactctctccccctctcagccacttcctgtctccagtatgtccctggcgcggcccggctggccgtctgcgcaccctctctcccctcggctctttcctaggaaagctgagcctcatagcttccgggagaaggttttccggaaaaaacctccagtctgtgcagtatgtaaggtgaccatcgatgggacaggcgtttcgtgcagagtctgcaaggtggcgacgcacagaaaatgtgaagcaaaggtgacttcagcctgtcaggccttgcctcccgtggagttgcggcgaaacacggccccagtcaggcgcatagagcacctgggatccaccaaatctctgaaccactcaaagcagcgcagcactctgcccaggagcttcagcctggacccgctcatggagcggcgctgggacttagacctcacctacgtgacggagcgcatcttggccgccgccttccccgcgcggcccgatgaacagcggcaccggggccacctgcgcgagctggcccatgtgctgcaatccaagcaccgggacaagtacctgctcttcaacctttcagacgaaaaggcatgacctgacccgcttaaaccccaaggttcaagacttcggctggcctgagctgcatgctccacccctggacaagctgtgctccatctgcaaagccatggagacatggctcagtgctgacccacagcacgtggtcgtactatactgcaaggtgggccaggacctcgggttccctggtgcctggaggttccaggtcagcctggagctcccagaccctcatccctgtctctctgtctgtcagggaaacaagggcaagcttggggtcatcgtttctgcctacatgcactacagcaagatctctgcagggtgaggctcccagcgcctgagtagctgcttccccagtggccctttctccagctggccccttaggaacccatctcccctggagcccacctcttcgttgagagtcctctgctgtcagcttagcacttccacctcccttttatcactagtactgcaacatagtctgcagcagatggtctgtagagtttcctggggcagccacaaacagggtggtgtaaaacagtggnnnnnnnnnnnnnnnnnnnnnnnnnnnnnnnnnnnnnnnnnnnnnnnnnnnnnnnnnnnnnnnnnnnnnnnnnnnnnnnnnnnnnnnnnnnnnnnnnnnnnnnnnnnnnnnnnnnnnnnnnnnnnnnnnnnnnnnnnnnnnnnnnnnnnnnnnnnnnnnnnnnnnnnnnnnnnnnnnnnnnnnnnnnnnnnnnnnnnnnnnnnnaacacacccctggtggagatttaagatgctaatgacacatgcgacgtatgagcaagcaggtgcagctactgcacgtgtgcacccagaaggacccccccagaaacatgctttcctagcaaacaccttctgcccacccg

SEQ ID NO: 356767 - DNA, 845 bp, Homo Sapiens
ccacgcgtccgagcctcctcccggcacgggactcctcacaacccccagcctcagcttccctgacagggcaggggctcactcttctccactccgggccaggaacgcagcctgcttgccttttgtccaattgggtgctctttctttgcgactgatacaaagtgggaacaaactccgcttccggtgatgcccgggccccaggaggctgggggagaagtgcacgctgcccagccttcaacctgaactgcccccagcacttccgagccccgacccctgcagctgtgagggcccaggggctgctggctgccaggaccaccgcattgcagaggtctcccttgcagcaagagatctgggagtccacaacggcacttaacctgccctctgccctggcaccccagggactcactgccaaagacgctcactttctgggagacacagaccccatccaggaaggggcacgagaccacgctgcaggaggccccttccaagaccgccaagcatctgtagcagcgcagaccctgagctgggagagagggcaagaaaacacacccctggtggagatttaagatgctaatgacacatgcgacgtatgagcaagcaggtgcagctactgcacgtgtgcacccagaggacccccccagaacatgcttcctagcaacacctctgcccaccccgctgattctctcggcaccacgggaaccaccttctctactctcactgaacacccctggggatgtatctgtaaaaattggaaacacctttcggctagaaacccagaggaaggcgctcatgaccacccgggagctcaccagagggctcttgaagtttctattcaagaaaaccattcc

SEQ ID NO: 356768 - DNA, 1553 bp, Homo Sapiens
  misc_feature (1156)..(1156): n is a, c, g, or t
  misc_feature (1266)..(1266): n is a, c, g, or t
  misc_feature (1282)..(1284): n is a, c, g, or t
caacaggaggataaccagaagggtgagtaacagcaaacctcaatgaggggcactaaatacttatacaggcggaaaccgagggatcagcttccttacagtgactatacagtcctcaaaccaccgaaacaaaagggataaccgtattgagatccaccagtacagtaaccgtatgctcatcaagaatataccaaatacgatgtccataccgtccttcagtttgatcgtgcccttcatccgtccggaatccggaacgatgaatgaccgttgggtcagcctgctccgtagccagcagtagcgcaagcgggttattcagtaggcctgcgccaagttccggacgagcatcaaccaccggaccgtcacgcaccaccacgtgtcccgtatcttcgtgtaggaccgccaccgcgtgctatatagcaaggtgcccaagaccgactgctccaattgtaagcgggtgctcatggtgctgtccggcctggcctcgtccactgccgacatccagcacaactccgtccactatggcagcgctctcaagcgcctggacaccttcgaccgccagggtatcttgcaccgtctcagcacctacaccaagatgctctttgtccgcgagcccttcgagaggctggtgtccgccttccgcgacaagtttgagcaccccaacagctactatcacccggtcttcggcaaggccatcctggcccggtaccgcgccaatgcctctcgggaggccctgcggaccggctatggggtgcgttttcccgagttcgtccagtacctgctggacgtgcaccggcccgtggggatggacattcactgggaccatgtcagccggctctgcagcccctgcctcatcgactacgatttcgtaggcaagttcgagagcatggaggacgatgccaacttcttcctgagcctcatccgcgcgccgcggaacctgaccttcccccggttcaaggaccggcactcgcaggaggcgcggaccacagcgaggatcgcccaccagtacttcgcccaactctcggccctgcaaaggcagcgcacctacgacttctactacatggattacctgatgttcaactattccaagccctttgcagatctgtactgaggggcgccgcagctggccggggccgccctgccccggtcactcacctgtgcncccgggcatcctcctgtccctggctcctcatcctgggagcaacagggctctgaggacgtgaggagccatcgctgtgggaggcagcaggccccgggtggggggcagaggcncccagccttggatggnnnccccagcccctggcctgtacctgtttcctcattccttggctgagggagaggctgagaactgggcagacacccctggagctcagccgacagttttgatgagcagggaagtctgaggcccagaggacggggggcccagcggtaagggatgtcccgcactcccttagccattgccttggaccaaaccacgtggtttgcagcttttctacgagccaggggggagggtccctggaattaaggttccaaataacagcacaatgggtttccagagc

SEQ ID NO: 356769 - DNA, 778 bp, Homo Sapiens
tcctcagcttcagcctccgcgccaggcccggccccgccgcgccatgtcggactacagcccgggcggggggtcggccgggggcccctctcagccacccggcggaggcggcccgggaatccgcaaggacgctttcgccgacgccgtgcagcgggcccgccagattgcagccaaaattggaggcgatgctgccacgacagtgaataacagcactcctgattttggttttgggggccaaaagagacagttggaacgatggagatcaaccggagagcaagaagctggcttcccagggagactcaatcagttctcaacttggacccatccatcctcccccaaggacttcaatgacagaagagtacagggtcccagacggcatggtgggcctgatcattggcagaggaggtgaacaaattaacaaaatccaacaggattcaggctgcaaagtacagatttctccagacagcggtggcctacccgagcgcagtgtgtccttgacaggagccccagaatctgtccagaaagccaagatgatgctggatgacattgtgtctcggggtcgtgggggccccccaggacagtttccacgacaacgccaacgggggccagaacggcaccgtgcaggagatcatgatccccgcgggcaaggccggcctggtcattggcaagggcggggagaccattaagcagctgcaggaacgcgctggagtgaagatgatctttattcaggacggatctcagaatacgaatgtggacaaacctctccgcatcattggggatc

SEQ ID NO: 356770 - DNA, 973 bp, Homo Sapiens
gggcggtaggcgggggcctggccctcccgctgcgcctcgagtgggatcccaacgggtgacccccctgcagggagtaggggcgcactgggggtcaccaggagcggcgcctggattgcagccaaaattggaggcgatgctgccacgacagtgaataacagcactcctgattttggttttgggggccaaaagagacagttggaagatggagatcaaccggagagcaagaagctggcttcccagggagactcaatcagttctcaacttggacccatccatcctcccccaaggacttcaatgacagaagagtacagggtcccagacggcatggtgggcctgatcattggcagaggaggtgaacaaattaacaaaatccaacaggattcaggctgcaaagtacagatttctccagacagcggtggcctacccgagcgcagtgtgtccttgacaggagccccagaatctgtccagaaagccaagatgatgctggatgacattgtgtctcggggtcgtgggggccccccaggacagttccacgacaacgccaacgggggccagaacggcaccgtgcaggagatcatgatccccgcgggcaaggccggcctggtcattggcaagggcggggagaccattaagcagctgcaggaacgcgctggagtgaagatgatcttaattcaggacggatctcagaatacgaatgtggacaaacctctccgcatcattggggatccttacaaagtgcagcaagcctgtgagatggtgatggacatcctccgggaacgtgacaagcggctttggggaccggaatgagtacggatttcgggatgggcggatgcatcgatgtgccaagtgcccaggaattctgttggcgtggtcattggccggagtggagagaatgataagaagatccagaatgatgctagcgtgggaataaagtcagcagtataacggacgggaccgagaagaatggcaaata

SEQ ID NO: 356771 - DNA, 444 bp, Homo Sapiens
gagaaaacatacttcctaattataagaggtgttcaaaagggaacgggcttatttcattagggagtggatatcctgtcaataaaaggattcaaagacggaccgaatcaccactgcacaataataagtgaattgtatcataggctggacaaaactactcccactgcaaagatggtggaagccacaaccatattgatgccccatgccccacctggtgaatttggctgggggatgctaaccctctttcgtttggaaacaaagtcattgtcttcagtaagggacaagggtcccacttgctataatgaaagaggcaatgagtacaccctaactgatagtcttttttgggtaataataataataaaacctaacatttattgggctcttgtatgtgccagtcattgtgctaatcgtaatgaatgaactcactgaagttttatactgaaaaaa

SEQ ID NO: 356772 - DNA, 996 bp, Homo Sapiens
  misc_feature (10)..(10): n is a, c, g, or t
  misc_feature (20)..(20): n is a, c, g, or t
  misc_feature (48)..(48): n is a, c, g, or t
  misc_feature (63)..(63): n is a, c, g, or t
  misc_feature (82)..(82): n is a, c, g, or t
  misc_feature (113)..(113): n is a, c, g, or t
  misc_feature (130)..(130): n is a, c, g, or t
  misc_feature (153)..(154): n is a, c, g, or t
  misc_feature (169)..(169): n is a, c, g, or t
  misc_feature (238)..(238): n is a, c, g, or t
gccacctacntatcccaaancgcccgctccccaccccgattaaagttntgactgaccttcctntcgggccgggggttccagntctcagccaggctcgtccaccgcccactctntgaacccgctgtgccangctggggtcccatctggccggcnncccgcccgccccgtngacccagctcagcccggtgccaccaaagggaagagttgccagcatggaaggctttgggcggtgagtgcngcgctcagagtcccgccgggtctcgggtgacttgaggaacttgaagctgaggaaggcaggcaggcgggtgtcgctccctgtgggtgactgggcagggggaggccgggtggtgcctccggcccctgcagcagccagtgaggatgtggcccctgacgagaggaatttgccctgcagtgggatgatctgcttcaacttcatgacgttgttgggtgccagcagggaccctgggcgcttgggccgttcaggcccgtggccacccgcagtgctgcccttggccttggcagaggccttctcggaggaggtggcagggtccagcccagagccctcggccctcgcctcctctcggccaccagaatcatgctcccgccgggcatggtgctctgcatggcgctgtcgctcctcctcctcccgccgcctgcgctgctgctgctggtagcgatgctgggcctggcgctcgtgtctcttaaaggcctcgcggcgctggtactccagcttggccatttcctcggccacccagcccgggatatcggggatggccacgtggatgaggtacttgaggagcagagcgaagtgctcgagcactaccaccgacacgatggctgcctccgggctcagccaggggaagaggcgctgcagctgcccgcactggccgattaagtagcagttgaccacaatcgctaggacacccatggcctccatcaccttctgccactggccgatgctttccacgcgctggccgaagggccgctgcagcccgg

SEQ ID NO: 356773 - DNA, 1604 bp, Homo Sapiens
  misc_feature (26)..(26): n is a, c, g, or t
  misc_feature (709)..(709): n is a, c, g, or t
  misc_feature (717)..(718): n is a, c, g, or t
  misc_feature (722)..(722): n is a, c, g, or t
  misc_feature (725)..(725): n is a, c, g, or t
  misc_feature (739)..(739): n is a, c, g, or t
  misc_feature (1088)..(1175): n is a, c, g, or t
  misc_feature (1355)..(1401): n is a, c, g, or t
  misc_feature (1553)..(1553): n is a, c, g, or t
  misc_feature (1570)..(1570): n is a, c, g, or t
  misc_feature (1582)..(1582): n is a, c, g, or t
  misc_feature (1584)..(1584): n is a, c, g, or t
  misc_feature (1586)..(1586): n is a, c, g, or t
  misc_feature (1588)..(1588): n is a, c, g, or t
  misc_feature (1590)..(1590): n is a, c, g, or t
cgagacccggcgggactctgagcgcncactcaccgcccaaagccttccatgctggcaagctcttcccctttggtggcacccgggctgagcctgggtccaacggggcgggcgggcaggcccggccagatgggacccccagcagtggcagcagccgggttcagaggagtgggccggtggacgaggccctggctgaggagctggaagccccccggcccgaagaggaaggctcaggtcacaagctttaactcgggggtggggacgccgggccggctttggggatagggtagggtggccaggcctggggagaggggctgaaggggacaggggaagcccggtcttaggtcctggtggggacctgggtcagtggtacgtggagcctctcagttaaagcctgcttagtatctccagggcctttgttagcctggagccccgtgcctgaccctccccagggagggatgccaaagccccttgtcccaggactgcacccagggacccccaccatgctccggtgccaggagagatgagggaggcctgtttcccaaccagcccacccttctcctgctccagctcactcttgggggggacttgaccccccaggcctctatgcaaatccacaccctgcagcccagctgttcaggaaggccttcctcgaggtggggctggggctgcccacccagggagctcccacatgtgctgagcagaggtgcangcctcggnnctgnccncccacccccaccanctcccctgccccaatcccaacctgggctccaacaaccccattcccagggagcccaacaggtggcagctgcagcacaagggccataggtcagaagccagagggacttcctcaaactgtcctcccccctgtgaccggcaggggccgtgcccagaggcagggtatgcaccggaagccgcccagggggccgccccacctcagtctctgatcagaagcaataaagcctttatgtgcctggatgcccgggagggagcgcgggcagggttgccagcccggcggggtccggcgggggcggcatccccccggaacggcccctctcgcctccgcagggacagcgctggcccccgtgggnnnnnnnnnnnnnnnnnnnnnnnnnnnnnnnnnnnnnnnnnnnnnnnnnnnnnnnnnnnnnnnnnnnnnnnnnnnnnnnnnnnnnnnntgctggcagtgggacgggccctggggctgcgggggcgagggtgccgccccccgccaggccctggccgctgccgagtgcccaccctgtgccatggccgggcccccacccgccccccagccctgccgggagacgccagcttttacagcctcccgcccccaccgctaccgcccacctcggatnnnnnnnnnnnnnnnnnnnnnnnnnnnnnnnnnnnnnnnnnnnnnnnggccgtgtgctggcccagcggctggcattagctctacccgccctgccttctcttctcatatgcaatatcagtcattcacaggggcggccggtctccaaaatgcaaaatgcgcttcagcccccgagggcccccagtattggtcggtgcccccnatctgccgttttccttnccaaacgaaagnanancntnaaatccaactgaaa

SEQ ID NO: 356774 - DNA, 1010 bp, Homo Sapiens
  misc_feature (878)..(878): n is a, c, g, or t
  misc_feature (882)..(882): n is a, c, g, or t
  misc_feature (884)..(884): n is a, c, g, or t
  misc_feature (887)..(887): n is a, c, g, or t
  misc_feature (894)..(894): n is a, c, g, or t
  misc_feature (896)..(896): n is a, c, g, or t
  misc_feature (902)..(902): n is a, c, g, or t
  misc_feature (905)..(905): n is a, c, g, or t
  misc_feature (918)..(918): n is a, c, g, or t
  misc_feature (920)..(920): n is a, c, g, or t
  misc_feature (922)..(922): n is a, c, g, or t
  misc_feature (924)..(924): n is a, c, g, or t
  misc_feature (949)..(949): n is a, c, g, or t
  misc_feature (960)..(961): n is a, c, g, or t
  misc_feature (971)..(971): n is a, c, g, or t
  misc_feature (975)..(975): n is a, c, g, or t
  misc_feature (978)..(978): n is a, c, g, or t
  misc_feature (980)..(980): n is a, c, g, or t
  misc_feature (983)..(983): n is a, c, g, or t
  misc_feature (986)..(986): n is a, c, g, or t
  misc_feature (988)..(988): n is a, c, g, or t
  misc_feature (992)..(992): n is a, c, g, or t
  misc_feature (996)..(996): n is a, c, g, or t
  misc_feature (999)..(999): n is a, c, g, or t
  misc_feature (1001)..(1001): n is a, c, g, or t
tggcgtcccggttcctgtcgcgctcacctgcgccggtagcgaagaaatcgccccgggacatggactcagtggtctttgaggatgtggctgtggacttcaccctggaggagtgggctttgctggattctgctcagagggacctctacagagatgtgatgctggagacctttcagaacctggcctcagtagatgatgaaactcaatttaaggccagtgggtcagtttctcagcaggatatttatggagagaaaatacccaaggaatctaaaatagccacgttcaccagaaatgtttcctgggcctctgttttaggaaaaatttgggacagtcttagcatcgaagatcaaaccacaaaccaggggagaaatctcagtagaaatcatgggttggagagactctgtgaaagtaatgatcaatgtggagaagccctcagccagattccacatcttaatctgtacaagaaaattccacctggagtaaaacagtatgaatacaacacgtacggaaaagtcttcatgcatcgccgcacatccctcaagagtcccatcacagttcacactggacacaaaccatatcagtgccaggaatgtgggcaggcctacagttgtcgttcacacctaagaatgcatgtgagaacccacaatgggagagagaccctatgtgtgtaaattatgtgggaaaacctttcctcgtacttcctccctcaatcggcatgtaaggattcacactgctgagaaaacctacgaatgtaagcaatgtgggaaagcctttattgacttctcaagtcttactagtcatctcagaagtcacaccggagagaagccatataagtgtaaggaatgtgggaaagctttcagttattcctcaacgtttcgaanacanantanaacacananggcggnaanccatataaatgtnangnangtgcggaacctttagttatcctcanttttcgaagannatgatttccnacanggngnganccnanaatntaanaangnggggggcct

SEQ ID NO: 356775 - DNA, 791 bp, Homo Sapiens
taagcaggctaatagcagcatagaggattagattaatggaacagcactgcataccaggaaagctacatctccaatagtttaggctgcaagtcagtagccaaacacaagagcatgtaagatttggaggacaaagtataaatattttaagtttacacaaccaagattataggctaccttcccaacttctaatttgaagagcactgaaaatggagctgtgaacacttcatttttaaaacctgacaatatggtgctattgactacttaatacaaagatatattacaatatttttaggtaaatgtattaagtctggcctgggcataaatgtacatacagaaaatgtttgtagagaattcatcaaaatcatgcccatttgctgttgtagagctacagtattcttcaatggtggtgactgaccagtgagtttctacttcttacagatgggacacaacagtcatgggctgtctcagctgcccaaagcctgaggcagaccacatgagagctgtggcttcttcttggattcaggttggataacccaattcagtaattaaatatgtaaattttggggggcgttggggggtgttttctaggaacttgaagagtacgtgacattataaaaaatgggtgttggaagactaattgtagaaatttgacctgagggccaatgttacttggtgtaagttcactcagacagacatgtcagaacatgcccaaagaagcctatatcttgctgctgggaaatgtaaagcagttggcatgtagaatacgataataaatcatttaagaaaccacc

SEQ ID NO: 356776 - DNA, 702 bp, Homo Sapiens
  misc_feature (506)..(506): n is a, c, g, or t
  misc_feature (522)..(522): n is a, c, g, or t
  misc_feature (550)..(550): n is a, c, g, or t
  misc_feature (584)..(584): n is a, c, g, or t
  misc_feature (589)..(589): n is a, c, g, or t
  misc_feature (593)..(594): n is a, c, g, or t
  misc_feature (609)..(609): n is a, c, g, or t
  misc_feature (612)..(612): n is a, c, g, or t
  misc_feature (702)..(702): n is a, c, g, or t
aaatcaaacaaattttagtacaaaaaatgcagtaactaaaagagctcaatgtgtagatcaagtagcagattagatggtgctgaataaatagttaatgaactgaaacgtcagaaaacaatgcatactgaagctcagagagataaacagatggaaaatacagaaaagagcataagagacttatgggatagggtaagtaggcctaacatgcttctacttgaagtctcagaagaagagaacaaagagaatgggatacaaccaatatttgaagagataatggctgtgaatttccctaaactataaaagacttcaagccacagaccgaagcattaatcagccccaaacaggcagaaatacaaagaaaatacaaacagctagaggtaaaaaagacggattatcttcagtggagcaacagcatggttgacagctgacttctgaacaaaagcaaaggaaagcagatgacagtggtaatgaaagtgtagaaaggaataccctccaaaaatgaaggngaactaaagaggtttncagacaagaaaaatatgagaaaatatancgccagcagacttgcactaaaagaaatactaaanggcantaannaggcagaaggaaaangancccaaatagaatcttagaagtgcagtaaagaatgaggagcaacagaaactatatataagaatatagattggccgggcacggtggctcatn

SEQ ID NO: 356777 - DNA, 1047 bp, Homo Sapiens
  misc_feature (745)..(756): n is a, c, g, or t
  misc_feature (760)..(771): n is a, c, g, or t
  misc_feature (785)..(936): n is a, c, g, or t
  misc_feature (941)..(941): n is a, c, g, or t
  misc_feature (945)..(945): n is a, c, g, or t
  misc_feature (953)..(954): n is a, c, g, or t
  misc_feature (959)..(960): n is a, c, g, or t
  misc_feature (970)..(970): n is a, c, g, or t
  misc_feature (977)..(977): n is a, c, g, or t
  misc_feature (996)..(996): n is a, c, g, or t
  misc_feature (998)..(998): n is a, c, g, or t
  misc_feature (1015)..(1015): n is a, c, g, or t
  misc_feature (1017)..(1017): n is a, c, g, or t
  misc_feature (1019)..(1019): n is a, c, g, or t
  misc_feature (1021)..(1023): n is a, c, g, or t
  misc_feature (1026)..(1026): n is a, c, g, or t
  misc_feature (1029)..(1029): n is a, c, g, or t
  misc_feature (1040)..(1040): n is a, c, g, or t
  misc_feature (1043)..(1043): n is a, c, g, or t
cttatgttctgacccaccaatggtcattatggtcagattggttgatgccacaccagtcaaggtagagtctgatagggcagtatcttaataaccctacccatgacttaactgttggatttgaaaggaaaacgtaggatttgctcttgtccccttacccgccacaaaattttgataatttgtttaaaagggagaggcagaggaaaagactagaagcataaatagctgctttaggtttgccagaggcacatagcttaacattagttcttaatatcgatgttatttttactaatgtaattaatcaacagagcaccaagattctttcatggtgaaaagggtgggcttctgttttggtatcttaaaatgtttcttttaaaatatacatcacctgtgtgagaaccaggaccacctgggagagtgatgaatcattggctccactcaaaagcattgctttactgagttttaaatttcacactgttttgccgctcaagaaaggtcttaaagtagttaaaggatgccagcaatagtgcgaatagaattttcggttgtctgcataataaaaacacccattgcagcatgattggtatgttgctcttgcattattgggaatggtaaatcagttatgggctagaaactatggaatgggccgtcctcatatgtgatgggattgctgattcagacttccctaatttccatacaattttgttatgtgcagagttctaaagccattttataatactgcagtatnnnnnnnnnnnnaccnnnnnnnnnnnngagacggactgtcnnnnnnnnnnnnnnnnnnnnnnnnnnnnnnnnnnnnnnnnnnnnnnnnnnnnnnnnnnnnnnnnnnnnnnnnnnnnnnnnnnnnnnnnnnnnnnnnnnnnnnnnnnnnnnnnnnnnnnnnnnnnnnnnnnnnnnnnnnnnnnnnnnnnnnnnggggnttcncatgttgnncagannggtctcgaancctgacncaggcatctgccgcctcancncccaagtgctggattanangngnnnccncgngccggccagtnttntttt

SEQ ID NO: 356778 - DNA, 993 bp, Homo Sapiens
  misc_feature (904)..(904): n is a, c, g, or t
  misc_feature (920)..(920): n is a, c, g, or t
  misc_feature (937)..(937): n is a, c, g, or t
  misc_feature (945)..(945): n is a, c, g, or t
  misc_feature (956)..(957): n is a, c, g, or t
  misc_feature (961)..(961): n is a, c, g, or t
  misc_feature (966)..(966): n is a, c, g, or t
  misc_feature (968)..(969): n is a, c, g, or t
  misc_feature (978)..(978): n is a, c, g, or t
  misc_feature (986)..(986): n is a, c, g, or t
  misc_feature (988)..(988): n is a, c, g, or t
tgctccttgttacctgactttcggcttcaggatccgcagcgtgcacccgcgttccgtgagtgccctataggcagtcagcatgcccctctgcgtgtccctgtgttacggggacgccggctgggagccgcagagctatctcagaactagggcgctctcctttgggcacctccaggccattttcctttcattcgagcccacagggttagagacaaccctcactccgttgcttggggacaagggcttcactccctgtcccgagcttgcggctgagcttgagggtggctgggtcatcctggccccccactggatgggaattggctgctctggtgatttctgtgacatcccagaccccaactgtggggctctggagcggactgcgcttcacttcgtggggagggtgtttccacctaggccactcttatttctcttcacatccccagatctgtcttctgagactttgcccttctccaggaagagcactcaggagaccaggaaaatggccacagggctcctgagagccaaaaaagagaaattccatcttctaaaccaaaactcattgctcagctggagcgaggggaagcgccctggagagaggagagaaaatgtccactggacctctgtccagggggaatggtttcagctttcgcccattcagtatgaagttggctgtaggtctgtcacagataactcttcttattttgagaaatcgaagccagaaattcaacttagtccctcctgccctctgattttctccagtcagcaagctctcagccaacatgtgtggctgagtcatcttctctcagctgttttcaagtttaatgggcaggaaaacctctccacctggggaaaacactatccagaagatcagaaacaacagcaggatccattctgctttagtggcaancagaatggattcaganggagagactcagactcngtttgggngatagcaaaanngcantcaangnntttcagccnctgaagananagcag

SEQ ID NO: 356779 - DNA, 1067 bp, Homo Sapiens
ctgaccttttattatgctacttgtttgtttgatagagaaaaaaatttccattaacggcatactggaagctgctgtttcccaattattatgaggagttgacacctctgtgcctgtttctaggctaatttagtctggactgttaacaaaatgaatcagtagtccatatgaagaccttcctggctgtttttaagctaccgctgaaaatcagacagttaaaatttatttatatttttcacaattaggagttgaagttatattctgtaatattaaaatatttttttctttacgattttagaccagtctgctttgttttaagtgaaattccttttatttctacttggtttttacttgtgtcaacatttaggtaagtcatatcaatttccatatattttcagtataattcttgtaaactaatttaatacttttttatgaagtggttatggtttgaattgataattctcttgtgatttttaaaaattttcctttacagtatgctacctcttctattgaaggatgaactcctaatgccctcttttttgacaacaatgcgcattttttatagcttgtgtaacttccttttcaatatttgaaaagacttctgaagaagaactgcagttgaaatccttttccatttctgtgaggaaatatcttccatgttttacatttctttccagaattatacaatatttgtttcttatctcagtcatcactatggtgcttctgacgttgatgactgtcacactggatcctcctcagaaactaccggacttgttttctgtattggtgtgttttgtatcttgcttgaacttcctgttcttcttggtatactttaacattattattatgtgggattccaaaagtggaagaaatcagaagaaaatcagctagctgtattcctaaaaaaactgtttcctaaacaaatgtgaaaatgtgaacagtcgctgaaaggttttgtgaactttttgctatgtataaataaaattaccatattcagaaccatggaaccacaggaaaggaaatggtgaaaagtcattgttgtctacacaaaataaatgtatatggagacc

SEQ ID NO: 356780 - DNA, 1796 bp, Homo Sapiens
  misc_feature (149)..(149): n is a, c, g, or t
  misc_feature (153)..(153): n is a, c, g, or t
  misc_feature (292)..(292): n is a, c, g, or t
  misc_feature (338)..(338): n is a, c, g, or t
  misc_feature (461)..(461): n is a, c, g, or t
  misc_feature (529)..(805): n is a, c, g, or t
  misc_feature (808)..(830): n is a, c, g, or t
  misc_feature (1308)..(1577): n is a, c, g, or t
gggtgctaaaaccagcaggaggtctcataggactctgtttcattggtacagtccagctaaatagcctagaccagggcccagggtgtcacctcctcataatattggaaacttgctgctccagtaagccgttaatgaaccttttttctctntcanccaaacaagtagctaagaaagggatcagataaccaaatctgagaaggctttgtcacatatttggtagtacttggtaaatatgaattcccagtattgttttcaaacatctcttttatgttctttcatgttacatatactnccgctaagttaaaactaaagatatggcagacaacatcatcatgccnctggagaggacaagagagacaagaggataaaggaaaacaaattgataataataaaattaaaaggaggaagaaattagtaggaagagctacataaaaagggaaatagtataggaacaggaagcncaatgccaataaacagaaccactggctttatcaaagaattgtttaggggccaggcacagtggctcagnnnnnnnnnnnnnnnnnnnnnnnnnnnnnnnnnnnnnnnnnnnnnnnnnnnnnnnnnnnnnnnnnnnnnnnnnnnnnnnnnnnnnnnnnnnnnnnnnnnnnnnnnnnnnnnnnnnnnnnnnnnnnnnnnnnnnnnnnnnnnnnnnnnnnnnnnnnnnnnnnnnnnnnnnnnnnnnnnnnnnnnnnnnnnnnnnnnnnnnnnnnnnnnnnnnnnnnnnnnnnnnnnnnnnnnnnnnnnnnnnnnnnnnnnnnnnnnnnnnnnnnnnnnnnnnnnnnnnccnnnnnnnnnnnnnnnnnnnnnnngttgtttagggtcatagctctaagccctgtaacctccttaccacaactcctgctcccagtacctcgggattcaattgtggcaatgcgcaaagaaggagcattgctagtgtgaagccctgagtcctggtccccatgtttgccctttatttactgtgtgaccttgagcaaatgattaatctattttcttaagtggaaatggaaataataataataccctgtattcttaaatagttgaaagaactctttgcaggtatcatctagtgtttacttttttaaaatacaataaactttcctaatgatggtggttgttgaataattgttatcattattttgaatctctttattttaaaaatgtgctctataaagatttgggcattctccccctttcccagaaggatgactttttcctatgtcaactaatatatgagatttaaaccctgggattataaactgaaaactactaaaagaaattactagnnnnnnnnnnnnnnnnnnnnnnnnnnnnnnnnnnnnnnnnnnnnnnnnnnnnnnnnnnnnnnnnnnnnnnnnnnnnnnnnnnnnnnnnnnnnnnnnnnnnnnnnnnnnnnnnnnnnnnnnnnnnnnnnnnnnnnnnnnnnnnnnnnnnnnnnnnnnnnnnnnnnnnnnnnnnnnnnnnnnnnnnnnnnnnnnnnnnnnnnnnnnnnnnnnnnnnnnnnnnnnnnnnnnnnnnnnnnnnnnnnnnnnnnnnnnnnnnnnnnnnnnnnnnnntgacagagcaagactccatctcaaagaaagaaattactagaggactttccatttcactgcttgagaatggacgcatattaatagcaagctcattgaaggtgctcaataaatactgttttctctttctggtttaattctttcccatttatgcattcaatatttatttaccaaacacaagcattgacaaaaaatgtattacagccggcgcaggggctcaca

SEQ ID NO: 356781 - DNA, 635 bp, Homo Sapiens
ccccactccatccccacatccaaaaccatgaagaagggctcggaagtaagggaatgaagaagatgacctagagaggactcttccagccagatgtgggttgccctccctgaccacttaccctctacatgcaccagtacccgcgccctcagtcccacagaacacacacaaaagcaccagcagccagagctctgtccagctactctgaatccgggccctgtctctgtgtacgcccttagggtatgtctgcctccttcaaaaggctcaaggctcccagaggacaggactggtgatctgtccctgaatctcttgaggctaggaggggacgaaggttcaggactcgggaggtttctgtagagatgagcaatatagtgacagagacacagaagaagcaccactagtcagtcagaccctaacatcccccacccgcacccctggagggctgtgccccaaatcaggaaattttaaaggactgtttccatgacaactgcccttgcttttgcgttgccatggcgtccctggagggaagggaagaaaaagggaggagtaggggaggggctaggtgcccaggaaaagaatgtggagtttgagaagggcagctgctgctggccctatcatcagagaaaactaaaacaaga

SEQ ID NO: 356782 - DNA, 964 bp, Homo Sapiens
  misc_feature (625)..(625): n is a, c, g, or t
gaaccctctgggtgatgtatactcccctgaagagctacaggagtacctggtatttgccaagaggcacaggctgcatgtgattgtggatgaggtctacatgctgtccgtgtttgagaagtctgttgggtaccgcagtgtcctaagcctggaaaggctccctgacccccagaggacccatgtgatgtgggcaaccagcaaggacttcgggatgtctgggctccgctttggcacgctgtacacagaaaaccaggatgtggccactgccgtggcttccctctgccgctaccacggcctcagtggcttggtccagtaccagatggcacagctgctccgggaccgtgactggatcaaccaggtgtacctgccggaaaaccatgcccggctcaaggctgcccacacctatgtctcagaagagcttagggcattggggatccccttcttgagtcgtggagctggcttcttcatctgggttgacttgagaaagtacctgctcaagggcacctttgaggaggaaatgctgctctggcgccgctttttggacaacaaggtgctgctgtcctttggcaaggccttcgagtgtaaagagcctggttggtttcgctttgtcttctcagaccaggtccanccggctttgcctggggatgcagagggtccagcaggtgcttgcaggcaaatcccaagtggcagaagacccccgtccctctcagagccaggagccaagtgaccaacgcaggtgagctggtcattgtctcgtggccagagggcccagcagccactgtggacctggggcgttctggggctgcagaagactgactgtggatgtgccatttgccaggaaggtatctaacttggctttgtgcctgaagaactgtttcttgtctttcgctgtagcagtgggaaactccttaagctgtggttcagcctgggccctccctctctcctattaaacaaaactaggagagtc

SEQ ID NO: 356783 - DNA, 1156 bp, Homo Sapiens
  misc_feature (336)..(337): n is a, c, g, or t
  misc_feature (1110)..(1110): n is a, c, g, or t
  misc_feature (1116)..(1116): n is a, c, g, or t
  misc_feature (1118)..(1118): n is a, c, g, or t
aggtgggaaaactggaaagattgaatgtcctttggagttcacagaggtttggcagtgggaggagaaaaacaaaacgaagcatagtgggagtgttgaacagactttcccaagatccccagatcctgaaattcaagaaaatatttgtcaaagtattagctgagtgcaagctaaggtatcaaaatagtgaatacacacaccaaggaataatctttgcaaaaatactttgtctcaagacaaatagaacacagcagactttaataatcaaaacagaaacaccaacatagagaacctaaggaacgaagagaatctgatttccaaagtcaccacattataaanntcaaatgccaatcttcaacaacaacgaaaacaacaaaattcacaagacacataaagaaacaggaaaatggctcattcaaaggaataaagtgattaattggcataaactgtccctgagaaagcccagatactaaagtgacttgacatttgctcaactagataagagtgagtttcgacaaagaagtaaaggaaatttggaacataatattatatctaaaggagaatatcatcaaacaaagaaattatataaaagaaccacacaaaaattctggagctgaaaagtacagcaactgaagtttttaaaattacttgcagagatcaacaacggatttgcagattagtgaactcgaagataggaaaattgaaattattgagtctgaggagcagaagagaaaaaggaatgaataaaagtgaatagaacctaaggaaactgagggacaccatcaagcagatcaaggagaagagagaggtaaaaaagagtggtaagataaataatagccaaataccttccaaatatgaagaaagacatgaatatacagataaaataagcccagcaataccaaattggataaacccaaaaacatctacaccaaagcacattataatcaaattgttgaaagccaaacaatgacagaatcttaaaagcaataacagcaaggcaattcaacaaaataaaagggatgttcaatacaagtatcagccaatttctcatcagaagcctggaggcaagaaggcagagaaataatatatttaaagtgctgaaaaaagccaggnacggtnantcatgcctgtaatccctgcactttgggagtctgagatg

SEQ ID NO: 356784 - DNA, 1539 bp, Homo Sapiens
  misc_feature (30)..(30): n is a, c, g, or t
  misc_feature (36)..(36): n is a, c, g, or t
  misc_feature (59)..(59): n is a, c, g, or t
  misc_feature (70)..(70): n is a, c, g, or t
attgaagtatgcataccacaacccaacgtntctttntatctagaatctgcttgtagagnatggatttagnagattgggcagctagaagctcaatttcaagaagctggacaagcaccattatcagatgctatggctaaaaagtggaagccctgccagaatgtgagcgtcttgactcgtcctccaattcggctgtatgtaagaatagatctggtaagtggtggtcttcccctccatcttttgactgttccagattttcactgtgccatcatttgaacatgttgcaaaaagtgagtgttcatcagagactctaattcgattcacagcagatttatgctcatgaagatgggcaactaacagccctttaggacgccatccaggtggtggtggtttactctcccattcagcattttccatcatctgcttagctattctctcagcattgcactgctcccgcttttgctggatgagttgctgaagttcagttttacaagttgtaattcgaatctgataggtggatggtaagattgtactacttaaaaccggtattactggttttttattttggacagttgtcacttctggaacctgtgaagaagttgacaaagggacacaaatgccagcagaggactcggaacgaggaggtttcccagtctgaatcacctcctgatcactccctttaggtagggcctgtggcatgtttggtgggtccagtgacccaaacatgcttttccattcttcatttacatttgagtcttgttttacatgttttctggcccgtttgtcatctggttcttgtttggttttaacaagatcaacttgtctcccagttatgcctaaagctgccaagtcaattacacctttctgactactatcatgaagatggctctggtccactatattggcctttgctttattagatttcatcatgaagtctttcagtgccagaagtttgtcttcctcttcctctgtcattccctgtgagagcaacttcttcagaagctgtgctatggcaggatcctctggcggagggcagtcgggaagagaaccatttcgtttcttctgacgcatgtgaagatgtctgaacaagctagtaatatctttagacctcaaagcataatcaaatatagaacgacttactggttcctttaaaacactgagcagaacaagttttctttcaatctgtattattggttgggtaatatatgggtcaagataaggcatcagtttacagtagacatcagctgtacttatttgacgagctaccactgtgataaatcccacggcaccataacgtatccataaattgggatgacacaggaagggggcaatatcactggcaaattcgtaaacatggggtttttgtagcagtcctaactggcacatacaagtaagggcataaagagctttcacaatgacaaattcctcagcatcactaagaccttgttgcagcagaggcttgagaattgaggagctttgccagccaacataggcagcaacacctaggaaagaacattgcacttcctacccagcatgataaag

SEQ ID NO: 356785 - DNA, 2136 bp, Homo Sapiens
  misc_feature (6)..(6): n is a, c, g, or t
  misc_feature (41)..(41): n is a, c, g, or t
  misc_feature (46)..(46): n is a, c, g, or t
  misc_feature (71)..(71): n is a, c, g, or t
  misc_feature (74)..(74): n is a, c, g, or t
  misc_feature (78)..(78): n is a, c, g, or t
  misc_feature (81)..(81): n is a, c, g, or t
  misc_feature (83)..(83): n is a, c, g, or t
  misc_feature (85)..(85): n is a, c, g, or t
  misc_feature (88)..(88): n is a, c, g, or t
  misc_feature (108)..(108): n is a, c, g, or t
  misc_feature (120)..(120): n is a, c, g, or t
  misc_feature (240)..(240): n is a, c, g, or t
  misc_feature (289)..(289): n is a, c, g, or t
  misc_feature (301)..(301): n is a, c, g, or t
  misc_feature (308)..(308): n is a, c, g, or t
  misc_feature (310)..(310): n is a, c, g, or t
  misc_feature (336)..(336): n is a, c, g, or t
  misc_feature (340)..(340): n is a, c, g, or t
  misc_feature (352)..(353): n is a, c, g, or t
  misc_feature (358)..(358): n is a, c, g, or t
  misc_feature (360)..(362): n is a, c, g, or t
  misc_feature (364)..(364): n is a, c, g, or t
  misc_feature (366)..(366): n is a, c, g, or t
  misc_feature (382)..(382): n is a, c, g, or t
  misc_feature (385)..(385): n is a, c, g, or t
  misc_feature (387)..(390): n is a, c, g, or t
  misc_feature (397)..(398): n is a, c, g, or t
  misc_feature (403)..(403): n is a, c, g, or t
  misc_feature (417)..(417): n is a, c, g, or t
  misc_feature (419)..(419): n is a, c, g, or t
  misc_feature (426)..(426): n is a, c, g, or t
  misc_feature (436)..(436): n is a, c, g, or t
  misc_feature (438)..(438): n is a, c, g, or t
  misc_feature (449)..(449): n is a, c, g, or t
  misc_feature (456)..(456): n is a, c, g, or t
  misc_feature (461)..(462): n is a, c, g, or t
  misc_feature (464)..(464): n is a, c, g, or t
  misc_feature (473)..(473): n is a, c, g, or t
  misc_feature (1384)..(1397): n is a, c, g, or t
  misc_feature (1547)..(1556): n is a, c, g, or t
  misc_feature (1684)..(1684): n is a, c, g, or t
agaaanaacaaaacaaaaatcttacccaattcctttcagtnggggnaactttgccaatttatcattgcttncgnaaantgngncnccncgcggaaccccaacaggttnttgttttaaggncaaaccaggtttttggtccttccctggggagaagttactttcaagtcagtgaaagttcttggcccacgattaaaaggcccttgccaattagtactcaacaacttcaattcatttttttcnggttcaagatcgagtaggagcctaataaggcggggaaaaaagggcaaantgccccgcccgnccagccncngcttacaccggccccccccttccccncgcncccaaccgcggnngtgtnannngngnttgagactcttggaanggntnnnntctgaannctgtntaggttatgcaggntncaatggngatcttcggntncagggaagggnggggggnggggnngncctgtgtgntgccaaaaccaacaaagccccatggatcaggtaatgaaacttcagcttttccccctttgagatttatttactggcagctgacaaggggcaaattcagctcgaaatgtgcagtcaaggccctgtcaagcttttagaggcacccttgtcttgaagcaccttcatgactggcatttcactcaaaagccctcggcactggtccttaacagcttatgacatcacaaaggacactccagacagatgcctacatggcatcctgcagcattttaaaagagaattagtggttttaattatggtcgtagtatgaaagggaaccatgcaagctccacaggagacctttgatcagacccttttgctagtacaatgccacggaactgtgactattcctggtaaggggccttttcttgctgaatgactcaccagtgatctttgaatgcagacaagcttctagccctccctcttcattagtgagcatttctatacaggggcctatatagtgcttggagtctaggagctatacaattggggggaaaagaagccctacagattctggcctctacttaggaagtgctgaaggactctgagtgactttattcattaaaacaggttgctattaattaactgtcataataaaataaagaactattatttgcatttcttactatgttctctttagtaatatgtataaaagatgcttgtaacagaaatgaatttattgggccacttccccatcccccccaatccctgcctttttttcccctttgcattttggcagcaggagcctactaattattgggtctagatctctgagtccaaatagaaataaaacataaatataaaattaattaagtaaatgcaaaatcttttttactcgccagtttctgcaactgaaataagcaaacatcaaattaacnnnnnnnnnnnnnnagtgatttccaagaacgatctaagacagtaaaacacaaacttttttcaaaatatcacccatttggtgtttagcttgaagtgtaagactatgtaacaactatagctactttgtaaaaaatgtactctcacctaaagcctaacatgaatcannnnnnnnnnccagaaaacagaaaatgtctttggtctggtattaatatcaaaagaatttaaacttaaaactgatcccaataagcatggcccttacacagttcatgaccaatatttagttatatgaaaatgggtcattnctcttctaaaatctaatccagtgcagtcatctggtgaaagactggaagtcagaagacttttcaaaagcttctcactgaaatggtaatttggtaacacgggataaacagaattttgcataaatagcagaccttagtcactgaataccccattaaacagtactgctggaccatgatacttatatctgggagatgacttagttttaaattttttatgcagtttcttttcttgaaggaaaaacttccagacttcagaattttggaagctgaacgatgagcaggtttttcatattttgctgtctcagacatttttcctatttctcagactttgcagttcttttcttaggtgctttagagcacctaaaatatcagcttgctgtgggtcattcggtgctttctgagagtacagacggaaatgtctgatggtttccgataacagcacttcaggatctgca

SEQ ID NO: 356786 - DNA, 957 bp, Homo Sapiens
  misc_feature (24)..(24): n is a, c, g, or t
  misc_feature (39)..(39): n is a, c, g, or t
  misc_feature (84)..(84): n is a, c, g, or t
  misc_feature (162)..(162): n is a, c, g, or t
  misc_feature (529)..(529): n is a, c, g, or t
  misc_feature (815)..(815): n is a, c, g, or t
gagaatgggaaggggcttcaggcntgtgcaggcgaatcnaagcaggggtctcctggacccctggctgcatgggcactgcctccnccaagctccctgctgagcgacccactggcagtggctcctcatgcctcctggctgccttggaagtcagatgttcctgtnggcctatcacagacccatccttccctggggcatcacctgaggaacatcctcttcccaatgcctccctacaacccacctgtgcctcctgaagcccctcctgcgcgcacactcactctctctcattctctccttcaaggagttaacagatctgagcttccatcttctcatactcaggactggccccttcttcccctttcccctccacagtccatcctccactcagcagccagatgccgtacctcctgggattccgtttcaccaagaatgaaatttaaagtccttggccagctggctctctgactcccacacttccctctcacgcactgggtcctggccacactggcctcccctctgttcttcaaacacnccactgctgggcatgcatttactgtcccctctctagaatgatcttcctgggttatctgtgggcctcactcacttcattcaggttctgtgcaaatgttttctttaggtgaagccttctggatcaccctttagaaaatagcatgtcctagtctctctcttttctcttaactagttttctttttcttcatagtacctaccaccactcaacatactctataacataactccataatgtgttccataacacaagggcaactgtcagcccttctagaatgtgagctctaggnctcttggaataaacctgatttattttttcactgctgtgtccttattacctagaacggagtaggtgttcaaaaagtatatgctggatgggcaaatgaataaacatgtctgaatctgtctgaataaacatgctcttaacctgtc

SEQ ID NO: 356787 - DNA, 1751 bp, Homo Sapiens
  misc_feature (58)..(78): n is a, c, g, or t
  misc_feature (333)..(645): n is a, c, g, or t
gaatataaaaatattgatttattaccaacaaagcaggatttcccagttttttcaattnnnnnnnnnnnnnnnnnnnnnatagcagaatgaaattacatttttcacatctaaaggtttatacctcaaagaaaataggcatgtgtccaaaagacaattagaaagcaagaaatctttccttttactttgaatatggaaaatcttttaacagagactctttccaggcaaaccaatgaagatttaggcatagaaaatgcttgtcaccttaaggttttaaaatataactgtattcaccaaatcaagtttttactagaagtttttacgatttttatgtannnnnnnnnnnnnnnnnnnnnnnnnnnnnnnnnnnnnnnnnnnnnnnnnnnnnnnnnnnnnnnnnnnnnnnnnnnnnnnnnnnnnnnnnnnnnnnnnnnnnnnnnnnnnnnnnnnnnnnnnnnnnnnnnnnnnnnnnnnnnnnnnnnnnnnnnnnnnnnnnnnnnnnnnnnnnnnnnnnnnnnnnnnnnnnnnnnnnnnnnnnnnnnnnnnnnnnnnnnnnnnnnnnnnnnnnnnnnnnnnnnnnnnnnnnnnnnnnnnnnnnnnnnnnnnnnnnnnnnnnnnnnnnnnnnnnnnnnnnnnnnnnnnnnnnnncaaacaaacaaaaaaacttttgttttaagtggctgagactatgtgctagacttactactgtttaatatgctaaaatgatacataatttattcttcacagctcaaaattcaatgtaaagccaaatattaatttttgtccagtagagaaattaaatgtttacaaacaaagtatggaacagttgttggcctatgtaaattgaaatgtaattgaccattttattttcaaacatgcttaatcttcacgtgtctttttcacattgatactcattttgcagaaataagatgactggtactaatttagacaataaacaaactacaccaagcacattttagtaaagatattttggtggaacgcaaagtaattaacgatgaaaacatttgcgtaatagccatttactaatatggttaccaagttcttcaatgtttacatgacttgctcatatatagtaaaaatgtcaattttaaaatattttcacacttcatgcactggagttagtttaagaagggaaggctcttttaaaatgtttataaagaagaaaatacctttttaaagagaaaatgtctaagtgagaggacataaacttatggctcattattttttgacctagttaagaatataaatttcaatggctacttaagaatatacaaaacccaaactgaaagcaattcttcaatttattcaggcaagcaagtcaaaaaaataattttgtcattactggcacagatccaatccactgttcaaagacatgactttggactgtctattttcctataagatttattttttaaaagaagataatttgtttggttctactaattagtataacttagagataaacaaatgattttcccatttaattcttttgcggtgaaagaaaacagtttaaactagattttctaagataatgggtacatcaacattgtaagaaaggccctataggcttaagttctaaaaacattacggttttaaagaaatcaatgcttttccatcactctttacataacactgagaaatttcaaatataaattgtagaaaccagtatatgaaattttaagaaaaatcttactaaaaataattataaaatgcttttagaaatgtaagccgct

SEQ ID NO: 356788 - DNA, 1694 bp, Homo Sapiens
gtccggaattcccgggatctggcaaccaccattctactttctgattctgaaaatgactgctctaggtacctcatataagtggtatacaatatttgtgcttttgaaactagcttattttacttggcatgtcttaagggttcattcatgttgtagcatgggtcaaaattttcttccttttttaggctgaataatattccattatatatatgaattacgtatttgagtcatgtagatgaattatatacatgaatatatgtatctcctatttatttttaaaggcagcaaattgtattaatgattttgatatatattggcttttaagtataaagactattaccatttaactcttggaccctaaaatcgtttttcttaagcagcaaattatcatcctgatggaactattcaagtaagcaatggtagccttgccttttacccagcacagacgaatgtatttcccagacctactcagccatttgtcaatagccggggatctgttagaggatgtactcgtggtgggagattaataaccaattcctatcggtcccctggtggttataaaggttttgatacttatagaggactcccttcaatttccaatggaaattatagccagctgcagttccaagctagagagtattctggagcaccttattcccaaagggataatttccagcagtgttataagcgaggagggacatctggtggtccacgagcaaattcgagagctaactgcttcattatgagaaactcactgttgctaataaaacagcagggtggagtgattcttctcaggtgagcagcccagaaagagacaacgaaacctttaacagtggtgactctggacaaggagactcccgtagcatgacccctgtggatgtgccagtgacaaatccagcagccaccatactgccagtacacgtctaccctctgcctcagcagatgcgagttgccttctcagcagccagaacctctaatctggcccctggaactttagaccaacctattgtgtttgatcttcttctgaacaacttaggagaaacttttgatcttcagcttggtagatttaattgcccagtgaatggcacttacgttttcatttttcacatgctaaagctggcagtgaatgtgccactgtatgtcaacctcatgaagaatgaagaggtcttggtatcagcctatgccaatgatggtgctccagaccatgaaactgctagcaatcatgcaattcttcagctcttccagggagaccagatatggttacgtctgcacaggggagcaatttatggaagtagctggaaatattctacgttttcaggctatcttctttatcaagattgaaagtcagtacagtattgacaataaaaggatggtgttctaattagtgggattgaaggaaaagtagtctttgccctcatgactgattggtttaggaaaatgtttttgttcctagagggaggaggtccttacttttttgttttccttcctgaggtgaaaaatcaagctgaatgacaattagcactaatctggcactttataaattgtgatgtagcctcgctagtcaagctgtgaatgtatattgtttgcacttaatccttaactgtattaacgttcagcttactaaactgactgcctcaagtccaggcaagttacaatgccttgttgtgcctcaataaaaaagttacatgcaaaaaaaa

SEQ ID NO: 356789 - DNA, 1663 bp, Homo Sapiens
  misc_feature (1282)..(1282): n is a, c, g, or t
  misc_feature (1285)..(1324): n is a, c, g, or t
  misc_feature (1344)..(1344): n is a, c, g, or t
  misc_feature (1364)..(1364): n is a, c, g, or t
  misc_feature (1400)..(1400): n is a, c, g, or t
  misc_feature (1418)..(1418): n is a, c, g, or t
  misc_feature (1433)..(1433): n is a, c, g, or t
  misc_feature (1443)..(1443): n is a, c, g, or t
  misc_feature (1464)..(1464): n is a, c, g, or t
  misc_feature (1472)..(1472): n is a, c, g, or t
  misc_feature (1549)..(1549): n is a, c, g, or t
  misc_feature (1555)..(1555): n is a, c, g, or t
  misc_feature (1561)..(1561): n is a, c, g, or t
  misc_feature (1567)..(1567): n is a, c, g, or t
  misc_feature (1574)..(1574): n is a, c, g, or t
  misc_feature (1622)..(1622): n is a, c, g, or t
  misc_feature (1643)..(1643): n is a, c, g, or t
  misc_feature (1645)..(1645): n is a, c, g, or t
gctcccgagggccctggttcccccggggctttccggaaggcccgccaagcccccaaggtccagaaagttcccgcgaacggaacgggcctcccggcgttcagtggggtccttggtcaagcacttggcacgcatcggagctcattactcctcatcgtggtcctgtaaggctgtgtccgtgtcagtggcagtgctaactctcagcttcatcgccctggaccgctggtatgccatctgccacccactattgttcaagagcacagcccggcgggcccgtggctccatcctgggcatctgggctgtgtcgctggccatcatggtgccccaggctgcagtcatggaatgcagcagtgtgctgcctgagctagccaaccgcacacggctcttctcagtctgtgatgaacgctgggcagatgacctctatcccaagatctaccacagttgcttctttattgtcacctacctggccccactgggcctcatggccatggcctatttccagatattccgcaagctctggggccgccagatccccggcaccacctcagcactggtgcggaactggaagcgcccctcagaccagctgggggacctggagcagggcctgagtggagagccccagccccgggcccgcgccttcctggctgaagtgaagcagatgcgtgcacggaggaagacagccaagatgctgatggtggtgctgctggtcttcgccctctgctacctgcccatcagcgtcctcaatgtccttaagagggtgttcgggatgttccgccaagccagtgaccgcgaagctgtctacgcctgcttcaccttctcccactggctggtgtacgccaacagcgctgccaaccccatcatctacaacttcctcagtggcaaattccgggagcagtttaaggctgccttctcctgctgcctgcctggcctgggtccctgcggctctctgaaggcccctagtccccgctcctctgccagccacaagtccttgtccttgcagagccgatgctccatctccaaaatctctgaacatgtggtgctcaccagcgtcaccacagtgctgccctgagcgagggctgccctggaggctccggctcgggggatctgcccctacccctcatggaaagacagctggatgtggtgaaaggctgtggcttcagtcctgggtttctgcctgtgtgactctggataagtcacttcctctgtctgagcttgtgtcccctaagcagggttgatgtgaggattaagcatgctgaagcaagtggaaagctccttgtaaactttnaannnnnnnnnnnnnnnnnnnnnnnnnnnnnnnnnnnnnnnnccataccccacagtataatntttccccatcctccttccanagcttggtcatcctcctaaagacccctttcctaccnaattacaggccttccctngagtctgctctaaangtcccaacangcatttccatctttttccatngctccctnaaacccagggctgcactttgccaacttttttgattcctttttgaaataatttgggcccaacctttctccaacgggcnacgagnacaacnccaccntaaccangtgaaaggaaaaaaaccacaaacccgaccttgttagctttgtggtgtnataaaacactctaccatgacnanttggcaagaagaagccag

SEQ ID NO: 356790 - DNA, 424 bp, Homo Sapiens
  misc_feature (204)..(204): n is a, c, g, or t
gggaaaaaatccggggaagcagtttaaaggctgccttctccctgcctgcctgccctggccctgggttccctgcggcctcctctgaaaggccccctagtcccccgctccctctgcccagcccacaagtccttgtcccttgcagagccgatgctccatctcccaaaatctctgagcatgtggtgctcaccagcgtcaccacagtgnctgccctgagcgagggtctgccctggaggctccagtctcgggggatctgcccctacccctcatggaaagacagctggatgtggtgaaaggctgtggcttcagtcctgggtttctgcctgtgtgactctggataagtcacttcctctgtctgagcttgtgtcccctaagcagggttgatgtgaggattaagcatgctgaagcaagtggaaagctccttgta

SEQ ID NO: 356791 - DNA, 1542 bp, Homo Sapiens
  misc_feature (801)..(801): n is a, c, g, or t
  misc_feature (859)..(859): n is a, c, g, or t
  misc_feature (870)..(870): n is a, c, g, or t
  misc_feature (957)..(957): n is a, c, g, or t
  misc_feature (959)..(959): n is a, c, g, or t
catttcacacttcggggtttgttcactctcccactcttcattctaacactttaccagggtcaggttttctttattcctaatgacccccggacacaaagtccccagtggtgtggtcgcccatgtgtacacggtgtgccacatcatgccctggttcttgccctcctctgcgggacaggcgaacgacatatgtccacatcatctaccagtttgcccagtccgtcttcctccttctatccattgtcttgaaacaattgcacctgcatacgtggccaggttggttcactcagtgcctgcaggattggggccccttattctccctgactgtccccagcatgctcatgatctgtgttcagtggtgggcctatcagatcgggagcttcctcatggggctgctcagtgtggtggatctctctgcccaggctgtcatctatgaggtggccactgtgacctacataattccctgggggctaagcatcggggtcttgtgtccgagtgggaatgcctctggggcctccgaatactgtgcaggccaaggcgctcggccgtctcgggcgtgctcagcatagagatgtcattgccctggtgagccaggtctgaccggtttatagtgtctttcacgtgtttgaggccatctgttgtgtctatggcggagttctgagaggaactgggaagcaggcctttggtgccgctgtgaatgccatcacatattacatcatcggcctaccactgggcatccttctgacctttgtggtcagaatgagaatcatgggcctctggctgggcatgctggcctgtgtcttnctggcaactgctgcctttgttgcttatactgcccggctggactggaagcttgctgcanaggaggctaanaaacattcaggccggcagcagcagcagagagcagagagcactgaaaccagacctgggcgtgagaaagcagtcctatcttcagtggcnanaggcagttcccctggcattaccttgacaacgtattcaaggtctgagtgccacgtggacttcttcaggactccagaggaggcccacgccctttcagctcctaccagcagactatcagtgaaacagctggtcatccgccgtggggctgctctgggggcggcgtcagccacactgatggtggggctcacggtcaggatcctagccaccaggcactagcaaagaagcttggaaatagaaagccaggagtggctgtccccagtatgcaaacacaccacggtctgccctgcaaaaacaccaatggggtctagtgcaggtggacactttgaaccactcctcaaaaaaagaactttggctgattccttgtggtgacactcagaggggtctgaacagacttgacaattctgttctggtcaagctggagttttcttctgtgacttggactgctctacagaagacatcagccaactgcacgagtcagagtccagggattgtcactattattaataatgtaaatggcttcaaatgggacactgcagataaaatcacaaaaaccactgttatattaaagattacacatttcctggg

SEQ ID NO: 356792 - DNA, 948 bp, Homo Sapiens
  misc_feature (169)..(196): n is a, c, g, or t
  misc_feature (206)..(206): n is a, c, g, or t
  misc_feature (719)..(719): n is a, c, g, or t
  misc_feature (722)..(722): n is a, c, g, or t
  misc_feature (896)..(908): n is a, c, g, or t
aaccactgccatatatgaggtctgtcactgactgaaacatcattatagggcacataactagaatttaataaatcaagttaaacaaattatctttgtaatactgtacccttccatgaaaggaaaatggtatgcttctaacttgagttttctttaatgtcctaaagtacannnnnnnnnnnnnnnnnnnnnnnnnnnnatataatgtnaggtacagtcaatcctcctaatctgccatttctagggcagagtacccagtgaaacatcttgtttggtgtgtcagtcaccccctgctgcagagttccctgtcacacaaatacatgcaaaagggtaataaataaatgggaaacaaagtatagttttagtaatcaacatgcaagattctaacaaaagctggagataactgcttatgccagataatttaagtaagagaaagtaagtagaagaggtggtaagaaagatatatcagatgagcactgaccccaaaccactaagatgatatggtccaaagaatgtcagaatgactaattcaattatccaactctgctcagctggaagaggaaagaagggaataaagatgttagatcctttaccaggacttccatgcacggggagagaagttgaaagtcaaaactgtaacaggaataaatacaaaaattcttcccaaacatacctaatatttctttggccctagagtcactgaattcacatttaaactaaanctnatatttcaattttgattacattaatggagctctgaaggaatgaaacctattaaagaaaaattaaaatttataaacaatttaggcagtcatatatgtatttatatatacacacatacaatgtatatatgaaatccttatacaggtgtaaacattcttaataaattataagcaatnnnnnnnnnnnnntttagtatgtttgcttttaaaataaaacaattcatacttt

SEQ ID NO: 356793 - DNA, 1361 bp, Homo Sapiens
  misc_feature (77)..(77): n is a, c, g, or t
  misc_feature (89)..(418): n is a, c, g, or t
  misc_feature (706)..(725): n is a, c, g, or t
aactcaagttagaagcatacatttttcctttcatggaagggtacagtattacaaagataaatttgtttaacttgatntattaaattctnnnnnnnnnnnnnnnnnnnnnnnnnnnnnnnnnnnnnnnnnnnnnnnnnnnnnnnnnnnnnnnnnnnnnnnnnnnnnnnnnnnnnnnnnnnnnnnnnnnnnnnnnnnnnnnnnnnnnnnnnnnnnnnnnnnnnnnnnnnnnnnnnnnnnnnnnnnnnnnnnnnnnnnnnnnnnnnnnnnnnnnnnnnnnnnnnnnnnnnnnnnnnnnnnnnnnnnnnnnnnnnnnnnnnnnnnnnnnnnnnnnnnnnnnnnnnnnnnnnnnnnnnnnnnnnnnnnnnnnnnnnnnnnnnnnnnnnnnnnnnnnnnnnnnnnnnnnnnnnnnnnnnnnnnncaatcctaattctcacatgttttggggaaaaaattttaattttgaaaaaatttaggaaagttcctaccaaatatacatgtataaagtttattaaaagtcataatgacccaggaatagctaatgacacagaagtagatcaaaatagaacacaatagagaacttcaaaataaaacaggtgtgagaattgtgtgtgtgaaaaagctgggttcaaataagttggtttgttagacattcatatgcctactcatcagccatttcgttctcccttccttgctgacaaagccccannnnnnnnnnnnnnnnnnnnggcctaaaactctgtatggctgccttgtgctatagaatagggtgcttccctagcctagagagggtgagtgttgattagattctgtgccaatcatggtaattggcttacttgatcatttgatggaacctaggcctaacgagacaaaggaagcctgaagcctttgaataaagaaatttcctgttgcccttaacaattgatacaagttagggatttgcccagcacccctcttctgctccccagtgaagatatgtgatatgggatgtttgaagctaatctgcaacagccttctgatggccatgaaaggacaagtatggagatgaaagctatcacactgagaatagtgggatgtagatagaaagcacctgaattgtgcttctgaattaaccaatccaggaactgctttacctttggactttttgttatgtgagatattctttatattgttccatttgctttgggtatatgtatattgttacttgtagccaaaaagaaacctctcttagtagaaacaaagggagagttaggttattcaaaaattagtatgggacaattgaatatgcctttttctgcgggagtaggtggggagaaacttaaaggttcacttgtaaaacaataaagtactaaagaaaatgtgat

SEQ ID NO: 356794 - DNA, 2182 bp, Homo Sapiens
  misc_feature (10)..(10): n is a, c, g, or t
  misc_feature (53)..(53): n is a, c, g, or t
  misc_feature (55)..(55): n is a, c, g, or t
  misc_feature (57)..(57): n is a, c, g, or t
  misc_feature (84)..(84): n is a, c, g, or t
  misc_feature (107)..(108): n is a, c, g, or t
  misc_feature (115)..(116): n is a, c, g, or t
  misc_feature (125)..(125): n is a, c, g, or t
  misc_feature (129)..(129): n is a, c, g, or t
  misc_feature (133)..(133): n is a, c, g, or t
  misc_feature (135)..(135): n is a, c, g, or t
  misc_feature (139)..(140): n is a, c, g, or t
  misc_feature (142)..(143): n is a, c, g, or t
  misc_feature (151)..(151): n is a, c, g, or t
  misc_feature (154)..(154): n is a, c, g, or t
  misc_feature (158)..(158): n is a, c, g, or t
  misc_feature (188)..(188): n is a, c, g, or t
  misc_feature (218)..(218): n is a, c, g, or t
  misc_feature (222)..(222): n is a, c, g, or t
  misc_feature (241)..(242): n is a, c, g, or t
  misc_feature (260)..(260): n is a, c, g, or t
  misc_feature (281)..(281): n is a, c, g, or t
  misc_feature (284)..(284): n is a, c, g, or t
  misc_feature (288)..(288): n is a, c, g, or t
  misc_feature (305)..(305): n is a, c, g, or t
  misc_feature (326)..(326): n is a, c, g, or t
  misc_feature (334)..(334): n is a, c, g, or t
  misc_feature (338)..(338): n is a, c, g, or t
  misc_feature (344)..(344): n is a, c, g, or t
  misc_feature (398)..(398): n is a, c, g, or t
  misc_feature (401)..(401): n is a, c, g, or t
  misc_feature (415)..(415): n is a, c, g, or t
  misc_feature (425)..(425): n is a, c, g, or t
  misc_feature (439)..(439): n is a, c, g, or t
  misc_feature (814)..(814): n is a, c, g, or t
  misc_feature (1948)..(1950): n is a, c, g, or t
ataaaaagtnatccataactttaaataaatacctccacaaatataaatataantnantataaatattaatttatatcacatgtnggcataacacaccaccctccaanncataacnntattgtcgntccnccgncnatcnncnntccggtcnttngggnttcaggtcttttttccaacacaaaacagangtgctcaactgccatctgtatttaactgtnaacntctcattataaaccaaagnngcatgtctcatgatgtcnccggatgtggtactccctgangcntttngcatggccacccttctngcacttctcacaccgggtgtnggtctgtnagtngcagcnggcacaccgggtcctcttgtcctgatggataatccagtgcccaatcatatcgcngcngctctcagtctccnaccgcctgcntcgcctcccttganatgttgtgtcagccttgctctccagatacacacaggcaatgtatctccggcaggcaaggcggtccacctgggcatctgggcagcagattctatgcagctgccatgcattgttgagggcagcatcaatgacatagccaataaagcttgactaccactttcatgcctcggatcttcaccttgtacttggcaatattctgatcccatccctacacacgccacccaccttctcctgatacagcttcaccagtgatggctggtggacctgagtccgcgttttagctgctccagagtgacgactggtcagcctcactggctctatgcccacagcattggagcaaatgttgaccacgctgctatcgtgccagcggcacacgnatgatctcctcactctcatcgactttgtaatcaaatgaacccctcttcatttttttcagttctttggggtcttttaggggacatcgctcagtcctgtactcacgaacagttcctgtggctttcaccccctttttcctcaaaatggacatcagtttaacacttgtgaaaaccttgtcaaaaaatatgtgatatggcagaaaaccacgctcctgaagcgcatccacaaattttattaccatactgcctcctagatccaagctcctgtctggcttggtaaacagtgtgccctgtgagggctcaaaccacaccaagtagcctctgctggttgtcccacaccaaatcttgtagccaagtcgcacaggcttccccctgtgcagctgcttggacccccggtgcccaaagtactcacacatagactcgccaaagctgtagaactcttccaagggtgcatgcttctggaaattgcagttcatccggatgatgagaggtctgaccttggcaaacctatcacttgcatcaagttcgttgttatctgcaaaatgtaagtatgagaagattagttcaaatctgtcccttctaattgcatcagccacaagatgatgatgtgaatcgggagaggtttcccagaacatccttctccttggataagagatgtacccacttaaaatcaaaatgcccaaaacacacttcaattcctgagccgtaagactcaaattgacatttttctgccaagcataacgattggtttcattaacaatgaaattaattgttccttcatcaaaaaacaactcaaaaaggcccacgggactcagctcttggcttttcagatcctcatatgaggatctgatgcagtccaactgccaaagtctggacgaatatctcttttggtccaaatgcgctgaggtttcacaactgctttctgcctcttcttggctggctgcagctccaggtcgtgattatcctccccggtgccagagtcctcacacaggactgaagcatgcagcacactgccaggtaggtgagcacctcgctggctgtcttcatcccctgagtcctcatcagtgaattcccccgcagcattgtcgggaggtgcaatgaaaatctcttccctgttgttgttggactcttcctccnnnatagcattcagaacctcaagcagctttgcagacttcacctttgagtggatacctctcccagcaatgacatctctggatgttgaagccatgatgaactgggaagatgaagctgtctttactcacagagtctaagaacctgccctaccccagacggagactcgcgagcccgaaccggaccatgagccgcgccgaatcggagcgtgcgcctgcgttggcgtcgggcgtggcggcc

SEQ ID NO: 356795 - DNA, 1987 bp, Homo Sapiens
  misc_feature (1232)..(1232): n is a, c, g, or t
  misc_feature (1240)..(1240): n is a, c, g, or t
  misc_feature (1263)..(1263): n is a, c, g, or t
  misc_feature (1762)..(1762): n is a, c, g, or t
  misc_feature (1764)..(1881): n is a, c, g, or t
  misc_feature (1883)..(1913): n is a, c, g, or t
  misc_feature (1922)..(1922): n is a, c, g, or t
  misc_feature (1926)..(1926): n is a, c, g, or t
  misc_feature (1936)..(1936): n is a, c, g, or t
ctcacagtgacagattctgaggaaacagcatgcaaaacatttgaaccattttctacatctcccattgttgcatagagagtgtgcaccgctgctatcttgccagatccacactggtcctcccgaaagccaggttcatacacagcaactttttaattattctaacagttacccattaacagtcgactcctgtatttctgagagtcttgtactcacctctgaaatttaaaaacgtataaagagagcctgggttaatcagttctgcagcccctacgtgacactgtgctagttctccttcttctgtctcctccttaccctggccctgcacccctgtacttaagagggagaggtgggaggtgctgtctggtatcatttgctgcctcgccagtagagggtgccgctgtgcagggtaactgcccgcctgctcccttcctgacctcccctgaccccgaagatcactacctctgtcattcaggcattggggtacatcctgataagtcgtgtcagaactgccaatttcaggactgagatgtgtttttaaaaaacaaatccttataaactccactttgtactttagattttaaaactggggaaaaatgtgatattctttggaccacttttttaatttatataagccttaatgaacagtgtctatacatttgcatacacacacccccaccccagagtgttctcagtatgtcagagaaagtgccacagcattaggacgggagcttggagaacgttttctagaaaagggttagcttcctgttggcatgaaattttccaagcaaacctcattaaacatctgttgtttgttaaagatgttccactgaaagcaacgcatgtttcaaaggcacgtctttccgttcgttggttttctgtgtgtaaggagtagcattgctgttggcgcctaacctcgcgtgcactgcattctcaaccccgtaccagtgcatcatcagaagccttcctcgtgaccataactctgtgtctgcagatatgtgttcccgtgtaagccagtttcccccttttactcagactgatttcacctagattgtcacggtttccttcatgttaactttgcgtgactttgttcttcctttactactctgtatgcaatatatatacatatatacgtacatatgctgcccaaacacacctgcatacacccgtatagcacctttacacctttattgagtaatccggtcccgaaaggaggtgagagctgagacccaacngcagttanccccaagcagcgccctgagaacngcaaccctaggagccaaagaaaacccgaggaagaggaggaaaaaaagccgccatccccaaacccaggacccaccaacaaatgaaacatgaaaaaaacagtgacttttaaggtgaaaagagtttcaagcattccaaataaattatcaatgtttcataactttttattataaacccaccccctaataggaagccaagtactatttgatacagtggtaaaaaccaaactaccttgaatttttttaaggcaacttatgaataatgctcattttcacagtcagaatagctttaaaatatggttgaatttgatacacacaggaagttttcttgaagaacaatcctttcgcttttcttttttcttgagagatctaaagagaaactgtagattgttttcctgacagcaaaagactaatgtgacaaaatgaagtcattgtaaagaagcgatgcaacttgtcaaatatttaataaagaattatggaagctggaacattttctacatcanannnnnnnnnnnnnnnnnnnnnnnnnnnnnnnnnnnnnnnnnnnnnnnnnnnnnnnnnnnnnnnnnnnnnnnnnnnnnnnnnnnnnnnnnnnnnnnnnnnnnnnnnnnnnnnnnnnnnnannnnnnnnnnnnnnnnnnnnnnnnnnnnnnnttggggggnggcnctgggccccngaaaaaattttttaaaaacatttctttggggcggcccgcccccccaaagag

SEQ ID NO: 356796 - DNA, 888 bp, Homo Sapiens
  misc_feature (571)..(629): n is a, c, g, or t
cttcgaaaagtccactgcaaatcgttataaaattgacatgcatcgtgcttacaagactcatttgtcacatatctttctgtcaggaaacatcacagttctctttagatctctcaacaaaaagaaaacgaaaggattggtcttcacagagacttcctgtgtgtatcaattcaaccattattttaaagctattctgactgtgaaaatgagcattattcataagttgcctaaaaaaaattcaaggtagtttggtttttaccactgtatcaaatagtacttggcttcctattaggaggtgggtttataataaaaaagttatgaaaacattgataatttatttggaatgcttgaaactcttttcaccttaaaagtcactgtttttttcatgtttcatttgatgatagatcctgaattaggaaatgacagcaaattaacatcatcttcctagggttttcttaggctccaagggttgaaattcacaggacacagcttggagaaaactgcagaagggactaaactctcacctcctttcgaaaccagattactcaataaaggtgtaaaaatgctatacaannnnnnnnnnnnnnnnnnnnnnnnnnnnnnnnnnnnnnnnnnnnnnnnnnnnnnnnnnngagtagtaaaggaagaacaaagtcacgcaaagttaacatgaaggaaaccgtgacaatctaggtgaaatcagtctgagtaaaaggggaaaactggcttacacgggaacacatatctgcagacacagagttatggtcacgaggaaggcttctgatgatgcactggtacggggttgagaatgcagtgcacgcgaggttaggcgccaacagcaatgctactccttacacacagaaaaccaacgaacggaaagacgtgccttcc

SEQ ID NO: 356797 - DNA, 514 bp, Homo Sapiens
  misc_feature (400)..(400): n is a, c, g, or t
  misc_feature (454)..(454): n is a, c, g, or t
  misc_feature (466)..(466): n is a, c, g, or t
aggatgtggaaagagcacctggcgggatgaaggtccaacagcctgtgcctctccactgctggccctggagccggcagcagtgaggcattcattgtctgtgttcttgtactcacctctgaaatttaaaaacgtataaagagagcctgggttaatcagttctgcagcccctacgtgacactgtgctagttctccttcttctgtctcctccttaccctggccctgcacccctgtacttaagagggagaggtgggaggtgctgtctggtatcatttgctgcctcgccagtagagggtgccgctgtgcagggtaactgcccgcctgctcccttcctgacctcccctgaccccgaagatcactacctgtgttcatttcaggcattgggggtacatcctgataagtngtgttcagaattgccaattttcaggactgagatgtgttttttaaaaaacaaatncctgataaaaantccaattttgtaactttagattttaaaacttggggaaaaatgtgatat

SEQ ID NO: 356798 - DNA, 996 bp, Homo Sapiens
  misc_feature (323)..(323): n is a, c, g, or t
  misc_feature (392)..(679): n is a, c, g, or t
agaggcagaatcagctttactaattttgtaacagaataagcactctgtaatgacactgtacttttaaactgaagactccttacgaaaagttaaaaaagtgttcttaaatgtattgaagctgagcatatttacattacacaattgtgcatatctgtattttaaaattatacagtcattgttcactgtgtaaaatctgcaagacacaggtaaacaagcaaagaaaaattatcccaccagagataaatgctgttaatcttttagtaaatcacctttagagctgttttgcgggatagatacataacacaaactgggtggcattaaantctgcatgctttttgaaaagtgattctggagtgaacaaaaattgcaactttagaagatatacactgccnnnnnnnnnnnnnnnnnnnnnnnnnnnnnnnnnnnnnnnnnnnnnnnnnnnnnnnnnnnnnnnnnnnnnnnnnnnnnnnnnnnnnnnnnnnnnnnnnnnnnnnnnnnnnnnnnnnnnnnnnnnnnnnnnnnnnnnnnnnnnnnnnnnnnnnnnnnnnnnnnnnnnnnnnnnnnnnnnnnnnnnnnnnnnnnnnnnnnnnnnnnnnnnnnnnnnnnnnnnnnnnnnnnnnnnnnnnnnnnnnnnnnnnnnnnnnnnnnnnnnnnnnnnnnnnnnnnnnnnnnnnnnnnnaaaagacaacatcgatgaaacatatagaaaaaaccactctatactgactacaggtatagctataagactgccagatttaaagcacatagctgatgtgttgatgcttttcaaaatgctggcactttaaaggaaagggctcatttagtactgccagcctttgaaaagtattattagcttttttgtggtacagcattattccctttttgcaggtaaggaaactataccccagctcgggttacccttcttagacccctccttttatgtagggccgaaaccttaagcggttaaagactcctttatttaaaaagcccaccttt

SEQ ID NO: 356799 - DNA, 960 bp, Homo Sapiens
  misc_feature (193)..(193): n is a, c, g, or t
  misc_feature (636)..(658): n is a, c, g, or t
  misc_feature (766)..(779): n is a, c, g, or t
aggaacaaatgttaaagggtaagataatttccctgcaaaaggacacagaaggcagtcttaagaagatgaatggatgagagaagggagagaataaaatgcaataacgaggccagcatttactatgtattttctcctcacctgtctctccatatttaggtcacttaccagtttctgtgcccttttggagctttgnttgagggcttcattctcaccctgtatttctttagccctaaattgacactctctccaaaaatccattccattgtctgtggaccaagatgttctatgtaattcagaagcagaactcttggctaaagggctagtgtggccttcagaaaccattcaattattttctccctacacctttgtcagtttgaaaccagtgaggaaaaaaggtatgttgataagaaacctatattgctaggtagaatttgtacttgttttcttggtagcagttttgaaatattctgtacagtacgttcctattgtttaataataaattcaaaaatatttctaaaaccttaaaaccaactatgccaagcattaagataaacaaatatgatgttctttgacgtaaatcaacgtgatgattctttcacatgtaaacacattttagtgtttctggtttgtcatttnnnnnnnnnnnnnnnnnnnnnnnatttactctataccctttagcaaaatacagttttaaatttttattgtttttagtagtttcccaactttaagacttatctaatttaactgagaaagaaagcctttttcnnnnnnnnnnnnnntggatttctaaggatggtggtttgagccttgattagacttttgatgtgctaagccagacaggcagtctgtacattgatggccatcacaatgcagctttggtttaatttaattcaggcctgctgctgagttatgcacagactttttgttgaccaaaataaaatataaagggttttcttctgt

SEQ ID NO: 356800 - DNA, 682 bp, Homo Sapiens
  misc_feature (461)..(461): n is a, c, g, or t
  misc_feature (465)..(465): n is a, c, g, or t
gtgagttgaatggtggccccaaagattatatgtcctgttcctggaatctgtaaatgtcgccttctttgaaaaaagtgtctttgcaggtggaattaaattcaggattttgagataaggagataattctaggctatccaggtgggccctaaataccatcattagtgcccttataagagagaggtagagggagggtcaacaccacacacacagaaaggataggctatgtaaagatggaggtgcagactggagtgatgcagccacaagctaaggaatgccaaggaaggctgcagccaccagaagtcggaagaggcaaagaacaggttctcctccacagcctccagaagcaatgtggccctgctgacaccttgattttggacttctggcctctagaatggagagaataaattcctgttgtttttagccaataacagtgtggttgtcacagcagccccaggaaaatncacncaactgtatgcatgtactgtatttcctgcatctaatttcttttcctcggctggattttaatattcttccatattatatgtatctatagttcatttttaaattactgagtagtatttcattgtatggatatcacaattcacttactgatttcacctgttgatggatatttgaattatgtccagattcaggctattatgaataaagctgttatgaacaa

SEQ ID NO: 356801 - DNA, 1703 bp, Homo Sapiens
  misc_feature (209)..(217): n is a, c, g, or t
  misc_feature (249)..(258): n is a, c, g, or t
  misc_feature (1105)..(1131): n is a, c, g, or t
  misc_feature (1198)..(1253): n is a, c, g, or t
  misc_feature (1515)..(1515): n is a, c, g, or t
  misc_feature (1546)..(1546): n is a, c, g, or t
  misc_feature (1553)..(1553): n is a, c, g, or t
  misc_feature (1646)..(1647): n is a, c, g, or t
  misc_feature (1674)..(1674): n is a, c, g, or t
  misc_feature (1682)..(1682): n is a, c, g, or t
tgccccgaatgcactggagtggggatggtccatcggcaactataaactgattctcatcaggaaactgcacattatctccccatcacttcaaaggtctcgtcaggcagaggtgacgccaggagatgatttaaaggtgaaaatgacaaggtttccacccctcaaaccttggctccttttctgacaatacagtctgaatgaacccgatgtcnnnnnnnnnactgtggaaataggatcggaagagagtaacannnnnnnnnnaatcctgataaagaagattgttgggaagctctttgaaacaaaaattttaaatggtggcacagatggattttaaaaagtgttagatctttccaatgaacactaatagagtactctgctcttggctggatttttcagagaatggcaatggtctctgcgatgtcctgggtcctgtatttgtggataagtgcttgtgcaatgctactctgccatggatcccttcagcacactttccagcagcatcacctgcacagaccagaaggagggacgtgtgaagtgatagcagcacaccgatgttgtaacaagaatcgcattgaggagcggtcacaaacagtaaagtgttcctgtctacctggaaaagtggctggaacaacaagaaaccggccttcttgcgtcgatgcctccatagtgattgggaaatggtggtgtgagatggagccttgcctagaaggagaagaatgtaagacactccctgacaattctggatggatgtgcgcaacaggcaacaaaattaagaccacgagaattcacccaagaacctaacagaagcatttgtggtagtaaagggaaaaccaaccctctggaaaatacattttgggaatctcaaaacatctcacatatatacaagccaaatgggatttcttacttgcactttgactggctaccagataatcacagtgcgtttacttgtgtgtaacgaaaatatcctacagtgagaagacacagcgttttggcaacaccgtggaaagtgggcttaaaaaagggttttctcagtgaaatttttgggcatcatgaagaacgatcaactatcttctaatttgaatctatagttactttgtaccatttgaannnnnnnnnnnnnnnnnnnnnnnnnnntttgaaatattatctattctcttcaagaaatgaacagtaccacagtttgagacggctggtgtacccnnnnnnnnnnnnnnnnnnnnnnnnnnnnnnnnnnnnnnnnnnnnnnnnnnnnnnnnctaacggcaaggaagatatgtgcccttttgagaattcaagatggcactgacacgggaaggccagctacaggtggactcctggaatttgaggcatcataatgatactgaatcaagaacttccttctgcttctaccagatggcccaaggaagcacatcgtcctgttttattgctttctaccctgtgcaatattagcatgcaagcttggcttacataatcatactttatattcaattgatatataataaccgttctaacctcttncaggaaatatttttagaactactagcttttncacttangaagaaaatgagattcttaagggagccactccaccatgctattaagactctggcagagttatgggtaggatatggatccctacatgataagtnnctgtaatacaatgtcttaaggctttgnatagctgncctagactgcagaaatgttct

SEQ ID NO: 356802 - DNA, 998 bp, Homo Sapiens
  misc_feature (5)..(5): n is a, c, g, or t
  misc_feature (10)..(10): n is a, c, g, or t
  misc_feature (16)..(16): n is a, c, g, or t
  misc_feature (18)..(18): n is a, c, g, or t
  misc_feature (25)..(25): n is a, c, g, or t
  misc_feature (31)..(31): n is a, c, g, or t
  misc_feature (41)..(42): n is a, c, g, or t
  misc_feature (44)..(45): n is a, c, g, or t
  misc_feature (47)..(47): n is a, c, g, or t
  misc_feature (58)..(58): n is a, c, g, or t
  misc_feature (63)..(63): n is a, c, g, or t
  misc_feature (68)..(68): n is a, c, g, or t
  misc_feature (74)..(74): n is a, c, g, or t
  misc_feature (77)..(77): n is a, c, g, or t
  misc_feature (79)..(79): n is a, c, g, or t
  misc_feature (84)..(84): n is a, c, g, or t
  misc_feature (86)..(88): n is a, c, g, or t
  misc_feature (97)..(99): n is a, c, g, or t
  misc_feature (110)..(111): n is a, c, g, or t
  misc_feature (125)..(125): n is a, c, g, or t
  misc_feature (142)..(142): n is a, c, g, or t
  misc_feature (150)..(150): n is a, c, g, or t
  misc_feature (153)..(153): n is a, c, g, or t
  misc_feature (155)..(155): n is a, c, g, or t
  misc_feature (160)..(160): n is a, c, g, or t
  misc_feature (163)..(163): n is a, c, g, or t
  misc_feature (173)..(174): n is a, c, g, or t
  misc_feature (178)..(178): n is a, c, g, or t
  misc_feature (180)..(183): n is a, c, g, or t
  misc_feature (187)..(187): n is a, c, g, or t
  misc_feature (189)..(191): n is a, c, g, or t
  misc_feature (195)..(195): n is a, c, g, or t
  misc_feature (206)..(206): n is a, c, g, or t
gctcncaganaacacngngcgttantgtgtntaacgaaatnncnncngtgagaagacnccgcnttttngcaacnccntngaaantnnncttaaaaannngttttctcagnnaaatttttgggcancaagaagaacgaacaantatcttcnaantngaaantanagttactttnncccntnnnncatntnnntctntatatatatanaatattttgaaataatatctattctctaaaagaaatgaacagtaccacagtttgagacggctggtgtacccctttgagttttggatgttttgtctgtattgctatgttttgttagtcatttctttttctaacggcaaggaagatatgtgcccttttgagaattcaagatggcactgacacgggaaggccagctacaggtggactcctggaatttgaggcatcataatgatactgaatcaagaacttccttctgcttctaccagatggcccaaggaagcacatcgtcctgttttattgctttctaccctgtgcaatattagcatgcaagcttggcttacataatcatactttatattcaattgatatataataaccgttctaacctcttccaggaaaatatttttagaactactagcttttccacttagaagaaaatgaggattcttaagggagccactccaccatgctattaagactctggcagagttatgggtaggatatggatccctacatgaataagtcctgtaaatacaatgtcttaaggctttgtatagctgtcctagactgcagaaatgtcctctgattaaatccaaagtctggcatcgttaactacatagtgctgtagcaacaagtcttatcatggcatctctttctatgtttggtttgctttttccaagagtattcaggtctcctcttgtgagataggaaggccatgaaaacaattagatttcaagatgatctatgtgaccaaatgttggacagccctattaaagtggtaaacaacttctttct

SEQ ID NO: 356803 - DNA, 631 bp, Homo Sapiens
  misc_feature (500)..(500): n is a, c, g, or t
  misc_feature (591)..(591): n is a, c, g, or t
  misc_feature (596)..(596): n is a, c, g, or t
gattgaacaggaggagtctgcagcttttcagtgcctgggataactatagtttaaagatcattgtgtaaaataggatttttagtcagcatgcattgttttaaaccgactaactgatagcctaaaactttatttttgcattttgccaatccttggagttttgttttgcagaattaagaaaaaaatgaatgtatgatcatctgaaaagggctttctctcaatcccacttcatggcatgacctctgctggatcattagttctagccagagaagtagcaaaggaacatgacgtctgagacctcccttccctcatcagtggggctgactgagctgggggcttgaagccggaggtaacctttcctgtcgaatgttctctttagagaatggcaatggtctctgcgatgtcctgggtcctgtatttgtggataagtgcttgtgcaatgctactctgccatggatcccttcagcacactttccagcagcatcacctgcacagaccagganggggacgtgttgaagtgatagcagcacaccgatgttgttaacaaggaattcgcattgtagggagcggttcacaaacagttaaagtgtttcntgttntacctggggaaaattggcttggaacaaggaaggaa

SEQ ID NO: 356804 - DNA, 440 bp, Homo Sapiens
  misc_feature (23)..(23): n is a, c, g, or t
aaataaccgtccctaaagccctncccgggaaaaatatttttaagaaactacctagccttttcccaccttagaagaaaaatgaggattccttaagggagcccactcccacccatgctattaagactctggcagagttatgggtaggatatggatccctacatgaataagtcctgtaaatacaatgtcttaaggctttgtatagctgtcctagactgcagaaatgtcctctgattaaatccaaagtctggcatcgttaactacatagtgctgtagcaacaagtcttatcatggcatctctttctatgtttggtttgctttttccaagagtattcaggtctcctcttgtgagataggaaggccatgaaaacaattagatttcaagatgatctatgtgaccaaatgttggacagccctattaaagtggtaaacaacttctttct

SEQ ID NO: 356805 - DNA, 1018 bp, Homo Sapiens
ggcctgggtggcgattccaacacgaggctcatgggtctagatattcaggagtttttctgagggcagagattggacatcaacaaggctagaagggtcagggaagtgggctaaaggaacagattcctagagattaatgaagaggagggaggtttctttggtcttctattccaagggtaaggttgcgattatgggtaagattggccagaggtaggaatgtggggagaaggagaggctgaaaagaaagcagaggagaacccaggtccctgcctcagccttcagcagagttggcttattgcctgcctctataccaataagtcagtcaccttgctcctctccagaggcaaagtggaagagatcctgcaagacacatctatcctttcacagtgttcccaagggaacttggaaaggagagtcaggtattagaggaaagagaagggtatttgtatacaaagccctggccttaaagaatgttacttagtagctactcccaaattgtcagccttcttacctggccaaggtgtccaagccagaaaggaaaaaaggttatggagtctttctcaccctaaggacagggtggaagagggtggtatatagggaagggccagataggcaacttcatttggcttgtgtgcatctggcctggaactggtgttaagccaggcttttgcttgtttgttgccatccctcaccctttgccatttcccttttcagagaatgtaaatgattttcatgttaggccaaaataaacaacttatagggtacatatgttgtcataaaaggtaaaagtgatgcatgccaaaccaaactaaaccaatttggattatctgctattcgggtaatcttcacagaaatgactgagagaagaatctgcagtttactgagggcatttcagttcctcctaccacctcaacaggactttgtccagactctcctcctcttacctttgtgccttgactgtggttctttgtggcaagatactttggttggttaaaataatatggaacaaaggatccactga

SEQ ID NO: 356806 - DNA, 479 bp, Homo Sapiens
atgtttttagaatctttgagaaaaaaaggttaaaaataggttcgaacctggtgcaggggcccaaaatgatgaaaaattaaaggtagattacaaaagtgatgaaaaacaaataatggtggaaaaaaagttttttggaataatcttctttgggtctatcttgggaaatgtctaaagaaagaaatcatagaattggactgtaaagaaagggattcacagtgctggggctaagaacaaattgacatcaccttttaggaataaaatgcttctctttaaacctttagctccagtgtaacagcatagtcaatgggcttcataggagtagcagtgagaggacagtgtcacagcaagggcctctctgcatactccctgatcattgtgtttgcaggttcagcatttcttcttgagtccttcccttcttccaaccttattgcctcatttcccccttgtagtcaatgttttttggaaacactgtttatttt

SEQ ID NO: 356807 - DNA, 1080 bp, Homo Sapiens
  misc_feature (917)..(918): n is a, c, g, or t
  misc_feature (939)..(939): n is a, c, g, or t
  misc_feature (977)..(977): n is a, c, g, or t
  misc_feature (997)..(997): n is a, c, g, or t
  misc_feature (1003)..(1005): n is a, c, g, or t
  misc_feature (1010)..(1011): n is a, c, g, or t
  misc_feature (1014)..(1014): n is a, c, g, or t
  misc_feature (1017)..(1017): n is a, c, g, or t
  misc_feature (1022)..(1022): n is a, c, g, or t
  misc_feature (1050)..(1050): n is a, c, g, or t
  misc_feature (1052)..(1052): n is a, c, g, or t
  misc_feature (1063)..(1063): n is a, c, g, or t
  misc_feature (1067)..(1068): n is a, c, g, or t
  misc_feature (1073)..(1073): n is a, c, g, or t
  misc_feature (1077)..(1077): n is a, c, g, or t
ctgcgcgctgcgcccgaagcggcggtcggtggcaggggtggtagcggcggcggcgacggtttcgtgggggccgcgcgctgctctgtgagcggcgggtggcagcaggggactcctgacacttccccttccccaccgaaccgcgctttctgaaacaaagactcattttgaagatgtttaacaaatcatttggaacaccctttgggggtggcacaggtggctttggcacaacttcaacatttggacagaatactggctttggcactactagtggaggggcatttggaacatctgcatttggttctagcaacaatactggaggcctctttggaaattcacagactaaaccaggaggattgtttggaaccagttcatttagccagccagctacctccacaagcactggctttgggtttggtacgtcaacaggaacagcaaataccttgtttggaactgcaagcacagggaccagtctcttctcatcccaaaacaatgcctttgcacaaaataaaccaactggctttggcaattttggaaccagtactagcagtggaggactctttggaaccacaaataccacctctaatccttttggcagcacatctggctccctctttgggccaagtagttttacagctgctcctactgggactactattaaatttaaccctccaactggtacagatactatggtcaaagctggagttagcactaacataagtaccaagcaccagtgtattactgctatgaaagaatatgaaagcaagtcactagaggaacttcgtttagaggattatcaggctaacaggaagggcccacagaaccaggtgggagcaggtaccacaactggcttgtttgggtcttctccagccacttccagcgcaacaggactcttcagctcctccaccactaattcaggnnttgcatatggtcagaacaaantgcctttggaactagtacactggatttggacaaatccnggtggtctctttggccacanatcagnnnatacnnccnctnagcancatttggccggctacaccacccagacantnggctttccttngtannccagnccanagg

SEQ ID NO: 356808 - DNA, 586 bp, Homo Sapiens
actagtcacggtggtagtggtccacgtggtcatgggaataatcttccttgggctctacgtaggcagagtctcgactctcctgggtttccgagtcaaatgcctcttgcctggagaggccgcgacttgtcccactgcgatggttgtggtgtggggctgaggaggaagagcggtgctgggatttcttgactggttccacactaggttcttcttcagcttgggaagcagaacggataggagcggagcgatcagtcctctgatcaccttgagaaccctgtgaattagaggctagggtggggctaagaggcagacttgaagtggctggagaagacccaaacaagccagttgtggtacctgctcccacctggttctgtgggcccttcctgttagcctgataatcctctaaacgaagttcctctagtgacttgctttcatattctttcatagcagtaatacactggtgcttggtacttatgttagtgctaactccagctttgaccatagtatctgtaccagtcggagggttaaatttaatagtagtcccagtaggagcagctgtgaaactacttgggccaaagagggggccaga

SEQ ID NO: 356809 - DNA, 1077 bp, Homo Sapiens
  misc_feature (4)..(4): n is a, c, g, or t
  misc_feature (6)..(6): n is a, c, g, or t
  misc_feature (18)..(18): n is a, c, g, or t
  misc_feature (32)..(32): n is a, c, g, or t
  misc_feature (41)..(41): n is a, c, g, or t
  misc_feature (46)..(46): n is a, c, g, or t
  misc_feature (56)..(57): n is a, c, g, or t
  misc_feature (64)..(64): n is a, c, g, or t
  misc_feature (73)..(321): n is a, c, g, or t
  misc_feature (323)..(323): n is a, c, g, or t
  misc_feature (694)..(694): n is a, c, g, or t
  misc_feature (739)..(739): n is a, c, g, or t
  misc_feature (791)..(808): n is a, c, g, or t
  misc_feature (1040)..(1040): n is a, c, g, or t
  misc_feature (1047)..(1047): n is a, c, g, or t
atananttatacatcacnttacttaattcttncattctttnttttntccaaatacnnattcacncttattcannnnnnnnnnnnnnnnnnnnnnnnnnnnnnnnnnnnnnnnnnnnnnnnnnnnnnnnnnnnnnnnnnnnnnnnnnnnnnnnnnnnnnnnnnnnnnnnnnnnnnnnnnnnnnnnnnnnnnnnnnnnnnnnnnnnnnnnnnnnnnnnnnnnnnnnnnnnnnnnnnnnnnnnnnnnnnnnnnnnnnnnnnnnnnnnnnnnnnnnnnnnnnnnnnnnnnnnnnnnnnnnnnnnnnnnnnnnnnnnnnnnnnnnntntgcgctgtctttctaaaaactagctaaatgtctgctttgtgctttgacagtaagtaccactataaagcaccttcatctttctgtataattcagtgaccgttatatttttcttcgacttctctgttattaccggtctttaatgacagctggatataaattctaaaacactcatggcaaaaccattgtcaaaacaatctgatttcaaactgctatggatggtccatgttatttgtaactcatttacagtgagaataggaaaacagaggtgtctggctctacatagctattaaaagagctttaacagtgtatgtgatgctgggttgaattaacagtttgttaaaactcaagtggacagtattcagtttcctacnacaaacatattttaactgctttgtgattaagtttaaaatacatgnatttgcatttaatattgtatgcatatcctggcaagaaacttatttttctttnnnnnnnnnnnnnnnnnntagcaaatgtagtacctcatgaacatatatgatggttaacatgtaccaggtactcatctaaacacttacattaaatcgaatctcacaacaatgctaaatatacgcataactgttatccctgtttcacctctgagaaaaatgaggtgcagagagattaaataagttgctccacatgacatgggaaagagaggcaggatttgaaaccagtgctttcaactattcttgtctctcnaagagancagagcctgtgtaagtttaaattaaaataa

SEQ ID NO: 356810 - DNA, 1621 bp, Homo Sapiens
agggcccggcgcgctccgggaggccgcggcgcgggcccaggagcggcaggactcgggccggagcgtggccggacccccacccgccgaggggcccaggaggacgcggcagagtcacggtggcagcattgagagttggacacccgggtccttgaagtgatctctaggccccagccccaaatccgccaccattccgtgctgcggggacaccatggctccagaagaggacgctggaggggaggccttagggggcagtttctgggaggctggcaactacaggcgcacggtacagcgggtggaggacgggcaccggctgtgcggggacctggtcagctgcttccaggagcgcgcccgcatcgagaaggcttatgcccagcagttggctgactgggcccgaaagtggagggggaccgtggagaagggcccccagtatggcacactggagaaggcctggcatgcctttttcacggcggctgagcggctgagcgcgctgcacctggaggtgcgggagaagctgcaagggcaggacagtgagcgggtgcgcgcctggcagcggggggctttccaccggcctgtgctgggcggcttccgcgagagccgggcggccgaggacggcttccgcaaggcccagaagccctggctgaagaggctgaaggaggttgaggcttccaagaaaagctaccacgcagcccggaaggatgagaagaccgcccagacgagggagagccacgcaaaggcagacagcgccgtctcccaggagcagctgcgcaaactgcaggaacgggtggaacgctgtgccaaggaggccgagaagacaaaagctcagtatgagcagacgctggcagagctgcatcgctacactccacgctacatggaggacatggaacaggcctttgagacctgccaggccgccgagcgccagcggcttcttttcttcaaggatatgctgctcaccttacaccagcacctggacctttccagcagtgagaagttccatgaactccaccgtgacttgcaccagggcattgaggcagccagtgacgaagaggatctgcgctggtggcgcagcacccacgggccaggcatggccatgaactggccacagttcgaggagtggtccttggacacacagaggacaatcagccggaaagagaagggtggccggagccctgatgaggttaccctgaccagcattgtgcctacaagagatggcaccgcacccccaccccagtcccccgggtccccaggcacggggcaggaatgaggagtggtcagaatgaaagagagtccccggaaggctgccaccggggttcgggtgagggcactctatgactacgctggccaggaagctgatgagctgagcttccgagcaggggaggagctgctgaagatgagtgaggaggacgagcagggctggtgccaaggccagttgcagagtgggccgcattggcctgtaccctgccaactacgtggagtgtgttgggcgcctgagtgtcctgacaggccttctgcaacgtgtacacaccctggttcaaagccagcttctcctggagaagccggacctcaggccctgaaaccgcctctctggctgtcctctgtcccttgagggaggaagtcctgggac

SEQ ID NO: 356811 - DNA, 1202 bp, Homo Sapiens
  misc_feature (35)..(35): n is a, c, g, or t
  misc_feature (51)..(51): n is a, c, g, or t
  misc_feature (232)..(509): n is a, c, g, or t
  misc_feature (511)..(540): n is a, c, g, or t
  misc_feature (896)..(931): n is a, c, g, or t
  misc_feature (948)..(1004): n is a, c, g, or t
  misc_feature (1034)..(1034): n is a, c, g, or t
  misc_feature (1078)..(1090): n is a, c, g, or t
aaaacattgtagtttggttaaaataacacattatnccaatgatacaaattnggggaaaaaacccctggcttctataacaagtgagttatacattaaagacagtattgcagaaaggcttcagggattaatttgattaaattagaggagagcctattcccaggtcttcctagctcatccacacacatcacctttcagtgttctttataggtacttaaaacttaaaaaaaggccnnnnnnnnnnnnnnnnnnnnnnnnnnnnnnnnnnnnnnnnnnnnnnnnnnnnnnnnnnnnnnnnnnnnnnnnnnnnnnnnnnnnnnnnnnnnnnnnnnnnnnnnnnnnnnnnnnnnnnnnnnnnnnnnnnnnnnnnnnnnnnnnnnnnnnnnnnnnnnnnnnnnnnnnnnnnnnnnnnnnnnnnnnnnnnnnnnnnnnnnnnnnnnnnnnnnnnnnnnnnnnnnnnnnnnnnnnnnnnnnnnnnnnnnnnnnnnnnnnnnnnnnnnnnnnnnnnnnnncnnnnnnnnnnnnnnnnnnnnnnnnnnnnnngataatgtggcaccaaatttgtaagatactttgaaattcataatttcagatggatgtggctggtaaggatcttaacaagcccccagtttgggctgacttttactaatgaggaaaattgttaggattaagcagggtcttgaggaatcacctctaaaggctcagactttaaagtgcttcccctcccttccctaccccaacatttggagaaatctctcactagatggcctttcaaataaatgagaaacacatggttctaggacaattgattatttgagaaaaaagtatactcaaataaattccagatagaataaaggttaatgtgaataaacaaaaacaaagagaatatgggtaattcnnnnnnnnnnnnnnnnnnnnnnnnnnnnnnnnnnnngagacagttcttactcnnnnnnnnnnnnnnnnnnnnnnnnnnnnnnnnnnnnnnnnnnnnnnnnnnnnnnnnntgggcccaagccatcctcctgcttagcctnctgagcagctgggactacaggtgtgtgtcgctacacctggctannnnnnnnnnnnngtagagataggggtattgctttgtcgcccaggctgggctcagattcctggctcaagacattctcccacctggcttcccaaagtgttgggatacaagcatgaaccatttggtc

SEQ ID NO: 356812 - DNA, 897 bp, Homo Sapiens
  misc_feature (82)..(147): n is a, c, g, or t
  misc_feature (489)..(592): n is a, c, g, or t
  misc_feature (613)..(674): n is a, c, g, or t
  misc_feature (689)..(746): n is a, c, g, or t
  misc_feature (769)..(780): n is a, c, g, or t
ccacttccaccaaagacaaatcacagcagaaccgacctaacttcaaaataaactgcagtcccatatactgggcctgattacnnnnnnnnnnnnnnnnnnnnnnnnnnnnnnnnnnnnnnnnnnnnnnnnnnnnnnnnnnnnnnnnnncctataaagaacactgaaaggtgatgtgtgtggatgagctaggaagacctgaaataggctctctctaaattaatcaaattaatcctgaagccattctgcaatactgtctttaatgtatactcacttgttatagaagccagggttttttcccctaatttgtatcattgctatatgtgttattgtaccaaactacactgttttaattgctgtaaattttaatatgtcttagtatctgggtgtgggaatcttgaaagcatggagtttgtgttattcaccactgtattctcaaatatcagaagagtatctggcctactaagtgcacaataaacatagttaaaatgnnnnnnnnnnnnnnnnnnnnnnnnnnnnnnnnnnnnnnnnnnnnnnnnnnnnnnnnnnnnnnnnnnnnnnnnnnnnnnnnnnnnnnnnnnnnnnnnnnnnnnnntattaattttataatattatnnnnnnnnnnnnnnnnnnnnnnnnnnnnnnnnnnnnnnnnnnnnnnnnnnnnnnnnnnnnnngcggcgccccctagnnnnnnnnnnnnnnnnnnnnnnnnnnnnnnnnnnnnnnnnnnnnnnnnnnnnnnnnnntggcgccgtgattctcccccccnnnnnnnnnnnncccccgggggggaaaccccaagtcttttttaaaaaaaataccactatggggcggttttgtggattgttcttctggggctattttttataacgcgggtgttccttagcgggggtctct

SEQ ID NO: 356813 - DNA, 1960 bp, Homo Sapiens
  misc_feature (519)..(519): n is a, c, g, or t
  misc_feature (521)..(521): n is a, c, g, or t
  misc_feature (524)..(525): n is a, c, g, or t
  misc_feature (1483)..(1498): n is a, c, g, or t
taggtgcctagaggatcccggaaacaaagcggatgtgaaaaggccgacaacaagctcacatacgtcaccaaatggcagaggacagcacagcagattactcatccattctccagaaattcaaccatgagcagcatgaatattaccatactcacatccccaacatcttccagaaaatacaagagatggaggaacaggaggatagtgagaatgggagagtcccatgaagacatatgcagaggttgatcggcaggtgatcccaatcattgggaagtgcatggatggaatagtaaaagccagccgaatcaattgatcagaaaaactgattcacagctggtaatagaagcttataaatcagggtttgagcctcctggagacattgaatctgaggattacactcagccaatgaagcgcactgtgtcagataacagcctttcaaattccagaggagaaggcaaaccagacctcaaatttggtggcaaatccaaaggaaagttatggccgttcatcaaaaaaaataancntcnncctccccctcctgcctctgcctcaccctctgctgttcccaacggcccccagtctcccaagcagcaaaaggaacccctctcccaccgcttcaacgagttcatgacctccaaacccaaaatccactgcttcaggagcctaaagcgtgggctttctctcaagctgggtgcaacaccggaggatttcagcaacctcccacctgaacaaagaaggaaaaagctgcagcagaaagtcgatgagttaaataaagaaattcagaaggagatggatcaaagagatgccataacaaaaatgaaagatgtctacctaaagaatcctcagatgggagacccagccagtttggatcacaaattagcagaagtcagccaaaatatagagaaactgcgagtagagacccagaaatttgaggcctggctggctgaggttgaaggccggctcccagcacgcaacgagcaggcgcgccggcagagcggactgtacgacagccagaacccacccacagtcaacaactgcgcccaggaccgtgagagcccagatggcagttacacagaggagcagagtcaggagagtgagatgaaggtgctggccacggattttgacgacgagtttgatgatgaggagcccctccctgccatagggacgtgcaaagctctctacacatttgaaggtcagaatgaaggaacgatttccgtagttgaaggagaaacattgtatgtcatagaggaagacaaaggcgatggctggacccgcattcggagaaatgaagatgaagagggttatgtccccacttcatatgtcgaagtctgtttggacaaaaatgccaaagattcctagaggggagtgcctgcgagcctcgggtgagccttcctggaggagcctccgtctgcttgttcccacaggcctccagcgccctgccctgtggacagcccacccctccgcagccccatccctgcggggcggnnnnnnnnnnnnnnnncagcatgctccctgcggccctgccctcccgcccagcccgggccacctcgtgggggacaagtctcgccagcgcccacccccatggctcgggtcagtcctcatcgctccccctccccaccccgcgcaggccactgagacggtgggacacacgcccccacctgctccttcctgggccctcagtccacccgggctcgtcctggcagccctttcgcgcttcacacagtgccttttgtgaaagtgtcatcaccgggtcccctgaggagacaaggcaggtccagcgcacatcaggcggactgagcactcgatgtcatccgtgtcgatggtcatccgtgtgtcccagactgcctgctgtagaaaacacttcctcctctcctgagtctgtgaagtactcagtggtcctttttggattctaggcttgcacctcatactaaacattgaccctttcactgaccgcctctgcaca

SEQ ID NO: 356814 - DNA, 883 bp, Homo Sapiens
  misc_feature (7)..(7): n is a, c, g, or t
  misc_feature (395)..(419): n is a, c, g, or t
  misc_feature (440)..(637): n is a, c, g, or t
  misc_feature (642)..(676): n is a, c, g, or t
tctttcntccccccgtctctgctgccccctagcttcccctgttaaatcccctcttccctgctatatccacctgtcccctctctggcatccccagatcccagttctccccaggctgtggttctccctgtgctctccttatcactggctgcccctcttgctctcccagcaccatgctgctctgtctgccctggctccaaatccctccttctctccccaactctccatctgaggagcctccccttttctgcccctctccctatcttgctgaactttatctctctagaaacccagtttttctctaaatttctctagttgcttttctccccctgctcctttctcagcatcttcatgcactgtctctgcaaatccctcatccaccatctactttgccatcnnnnnnnnnnnnnnnnnnnnnnnnngagatggagttttgctcgtcnnnnnnnnnnnnnnnnnnnnnnnnnnnnnnnnnnnnnnnnnnnnnnnnnnnnnnnnnnnnnnnnnnnnnnnnnnnnnnnnnnnnnnnnnnnnnnnnnnnnnnnnnnnnnnnnnnnnnnnnnnnnnnnnnnnnnnnnnnnnnnnnnnnnnnnnnnnnnnnnnnnnnnnnnnnnnnnnnnnnnnnnnnnnnnnnnnnnnnatctnnnnnnnnnnnnnnnnnnnnnnnnnnnnnnnnnnngcgtgagcatcgcacccagctgccgtctgtttatgggtctccttcattcttctttcccatttcaccatttttctatttcctctcctccacacattcatagggaggggactgcagtcagatccccacctcaagagcccatttcctgtgggatggaatttgggacaagagaaaccttaacgtcctgagatagaagtcacgtccccacac

SEQ ID NO: 356815 - DNA, 849 bp, Homo Sapiens
ggggctcagtcctgggggccctgattggtgtggctggctccacctatgtgaaccgtgtgcgactacaggagctgaaggctttactcctggaggcgcagaaggggcctgtgagtctccaagaggccattcgagaacaggcgtctagctactcccgccagcagagggacctccacaatctcatggtggacctgaggggcctggtacatgctgctgggccagggcaggactctgggtcacaggcaggtagtcccccgaccagagacagagatgtagatgtcctttcagctgccttgaaagagcagcttagtcattccaggcaagtccattcatgtctagaaggcttacgagagcagcttgatggcctagaaaagacttgtagccaaatggctggggtggttcagcttgtaaagtctgcagcacacccaggcctggtggaaccagcaaacggggctatgcacagcttcgtgctggaacaggggagcatgatcttggcactggcagacacgaaacagagactagaagcccaagtcaacaggaacaccatctatagcaccctggtcacctgtgtgacatttgtggccacactgcctgtgctctacatgctattcaaagccagctaaccccctggcccctcctccagagggtctgaggcaatagcctgtgaatggggatttaagtagagaatcgtagcaatgaagcgagcctttgggggcatgtacaacctcaatctgaaggagcagtatctgtgtggctcaccagcaggccgtgcttcgctttgtagacaaggttcatttacattaattatcaaaactttgtgctaatgtccaattaaaatatcctgagttttat

SEQ ID NO: 356816 - DNA, 1531 bp, Homo Sapiens
  misc_feature (27)..(27): n is a, c, g, or t
  misc_feature (1309)..(1309): n is a, c, g, or t
  misc_feature (1368)..(1378): n is a, c, g, or t
  misc_feature (1390)..(1390): n is a, c, g, or t
  misc_feature (1398)..(1398): n is a, c, g, or t
  misc_feature (1400)..(1400): n is a, c, g, or t
  misc_feature (1408)..(1408): n is a, c, g, or t
  misc_feature (1410)..(1410): n is a, c, g, or t
  misc_feature (1418)..(1418): n is a, c, g, or t
  misc_feature (1440)..(1440): n is a, c, g, or t
  misc_feature (1491)..(1491): n is a, c, g, or t
  misc_feature (1529)..(1529): n is a, c, g, or t
gcacgccaggtacgaggagctagggtngtcctgccaggtagaatcggaaccgtaggaggggtacttaaccggacggcctcccaggcctgtggccgtgcgcgggaagagcactgcagatctcaggatgatggggcgcagccctgggtttgccatgcagcacatcgtgggtgtgccccacgtactggttcggaggggcctccttggaagggacctcttcatgaccaggactctctgcagcccaggcccaagccagcccggagagaaaagacctgaggaggtggccctggggctgcaccaccgcctcccagcactgggaagagccctggggcacagcattcagcaacgagcgacctccacagccaagacttggtgggacagatatgaagagtttgttggactcaacgaggttcgagaggcccagggaaaggtgacagaggctgagaaagtgttcatggtggctcgagggcttgtccgagaggctcgggaggacttggaagttcaccaggccaagctgaaggaggtgagggaccgcttggaccgtgtctccagggaggacagtcagtacttggaactggctactctcgagcacaggatgctgcaggaggagaagaggcttcgcacagcctatctgcgtgcagaagactctgagcgagagaagttctccctcttctctgcagctgtgcgggaaagtcatgagaaggagcgcacaagggctgagaggaccaagaactggtccctcattggctcagtcctgggggccctgattggtgtggctggctccacctatgtgaaccgtgtgcgactacaggagctgaaggctttactcctggaggcgcagaaggggcctgtgagtctccaagaggccattcgagaacaggcgtctagctactcccgccagcagagggacctccacaatctcgtggtggacctgaggggcctggtacatgctgctgggccagggcaggactctgggtcacaggcaggtagtcccccgaccagagacagagatgtagatgtcctttcagctgccttgaaagagcagcttagtcattccaggcaagtccattcatgtctagaaggcttacgagagcagcttgatggcctagaaaagacttgtagccaaatggctggggtggttcagcttgtaaagtctgcagcacacccaggcctggtggaaccagcagacggggctatgcccagcttcttgctggagcaggggagcatgatcttggcactgtcagacacggagcagagactagaagcccaagtcaacaggaacaccatctatagcaccctggtcacctgtgtnacatttgtggccacactgcctgtgctctacatgctattcaaagccagctaacccctggnnnnnnnnnnngaggccccgacncaatagcngngaatgtgnanttaagtanagaatcgtagcaatgaagcgancctttgggggcatgtacaaccccaacctgaaggagcagtatctgtgtggcncaccggcaggcagcggggctttgtagacaaggtcaccnca

SEQ ID NO: 356817 - DNA, 501 bp, Homo Sapiens
agttcgacggagactctcgtcagagtctgctgcacgcatgataggctgtgcgaagcctctactcctcctgcgagcatcctgtgcgtcgagagtagccagtaccaagtactgacggtcctccctggagacacggtccaagcggtccctcacctccttcagcttggccgggtgaacttccaagtcctcccgagcctctcggacaagccctcgagccaccatgaagcactttctcagcctctgtcacctttccctgggcctctcgaacctcgttgagtccaacaaactcttcatatctgtcccaccaagtcttggctgtggaggtcgctcgtggctgaattgctgtgccccagggctcttcccagtgctgggagtgcggatgtgtgcagccccagggccacctcctcaggtcttttctctccgggctggcttgggccgggatgagtctccgacgaactagttcgacggaaactctcgccctagctactctggaggctaaggcga

SEQ ID NO: 356818 - DNA, 1985 bp, Homo Sapiens
ccggagccccgccagagcccgacttcagccccagccagatcccgcgtcaacggaggcggaacggcggaccccgtaccctggcagcatcggagcaccggcgggtgaaggcaaggtccctggactggtcatatacctcttgtggccctggcagaatcaagatgaggccctgtcatgcctccccagtgaggcctacagtctgagcagacagcatggcctgccactggcagtgaacaccatgtctgcaggaggtggccgggcctttgcttggcaagtgttcccccccatgcccacttgccgggtctatggcacagtggcacaccaagatgggcacctgctggtgttggggggttgtggccgggctggactgcccctggacactgctgagacactggacatggcctcgcacacatggctggcactggcacccctgcccactgcccgggctggtgcagctgcggtagttctgggcaagcaggtgctagtggtgggtggtgtggatgaggtccagagcccggtagctgctgtagaggccttcctgatggatgagggccgctgggagcgtcgggccaccctccctcaagcagccatgggggttgcaactgtggagagagatggtatggtgtatgctctggggggaatgggccctgacacggccccccaggcccaggtacgtgtgtatgagccccgtcgggactgctggctttcgctaccctccatgcccacaccctgctatggggcctccaccttcctgcacgggaacaagatctatgtcctggggggccgccagggcaagctcccggtgactgcttttgaagcctttgatctggaggcccgtacatggacccggcatccaagcctacccagccgtcgggcctttgctggctgcgccatggctgaaggcagcgtctttagcctgggtggcctgcagcagcctgggccccacaacttctactctcgcccacactttgtcaacactgtggagatgtttgacctggagcatgggtcctggaccaaattgccccgcagcctgcgcatgagggataagagggcagactttgtggttgggtcccttgggggccacattgtggccattgggggccttggaaaccagccatgtcctttgggctctgtggagagctttagccttgcacggcggcgctgggaggcattgcctgccatgcccactgcccgctgctcctgctctagtctgcaggctgggccccggctgtttgttattgggggtgtggcccagggccccagtcaagccgtggaggcactgtgtctgcgtgatggggtctgaaggcttggtgggagctgtccactggagcagctcattgccagaggcagctatttctatggctccttttgctgctgaggacactcactgtggctctgtgggatgagagaggcatggggggtgagcacttgaaacactgccttggggccttgggttaagggagcctttgtctttagtgcaggacacacatatgcttacacctacctttatcaccattcgttcatgaatcatgcctagctccatccttgccctgggacctactaggccttccatccaactgggaaatggggagaagcaaagctggcctcatgctcttcagggtcagttcctatctggagttgaccaggcctaccccagttgccattcctgaaaaatctcagctgccaggctgcctttagggtccctgtagacccaggagagttgagagggtgggggacacagagagaatagagaggatgtgggaactgccagagggccggagcgcaggagttcaagtggaggaatgctggctttgagccctctacactgctggttgtatgaccttggacaagtcacttcacctctctgtgcctcagcatcctcatctataaatggggatctctgaaaccttcctaccctacctacctcacagggctgttgtgaggacccagggagtttggatgtggaagtaaaagtgctgctaaaacct

SEQ ID NO: 356819 - DNA, 434 bp, Homo Sapiens
atgtccaagtgcccacgtgaatttgctggtgaaagttagcacttgtgtgtaaattctacttcctcttgtgtgttttaccaagtatttatactctggtgcaactaactactgtgtgaggaattggtccatgtgcaataaataccaatgaagcacaatcaagattatgtactgtgtgtctgtaaagggtcagtgacaatgaaaaagacagcttgttttgttcaaaatatagactggatttcccatagagctcttttaataggtttccatgactcaataacatagcaaaatgcctccagacctaaataaggtgtttatctactgagagctacagatttaccctacattgtcacacccggatacaatcttaccctacctacctcacagggctgttgtgaggacccagcgcgtttggatgtggaagtaaaagtgctgct

SEQ ID NO: 356820 - DNA, 1752 bp, Homo Sapiens
  misc_feature (823)..(885): n is a, c, g, or t
gatgtagggccccagcgcccgggccatggcggcggcggtggcgggagctgctgtctgagcagcggttgcggaccgagcgaacttggcccaggagcccgggcctagggagaggcgcggcggcggcgggagcgcgaacggctggagctggccttcttcgccttctcctcggctgtggagccctggtggggggtctgcgcccggtcaccatgacgacgccggcgaatgcccagaatgccagcaaaacgtgggaactgagtctgtatgagctgcaccggaccccgcaggaagccataatggatggcacagagattgctgtttcccctcggtcactgcattcagaactcatgtgccctatctgcctggacatgctgaagaatacgatgaccaccaaggagtgcctccacagattctgctctgactgcattgtcacagccctacggagcgggaacaaggagtgtcctacctgccgaaagaagctggtgtccaagcgatccctacggccagaccccaactttgatgccctgatctctaagatctatcctagccgggaggaatacgaggcccatcaagaccgagtgcttatccgcctgagccgcctgcacaaccagcaggcattgagctccagcattgaggaggggctacgcatgcaggccatgcacagggcccagcgtgtgaggcggccgataccagggtcagatcagaccacaacgatgagtgggggggaaggagagcccggggagggagaaggggatggagaagatgtgagctcagactccgcccctgactctgccccaggccctgctcccaagcgaccccgtggagnnnnnnnnnnnnnnnnnnnnnnnnnnnnnnnnnnnnnnnnnnnnnnnnnnnnnnnnnnnnnnnccggttcggaagactctggtgaccggggagggactctgggagggggaacgctgggccccgcgagtgctcctgagtgcccccagccccccagagccaggtggagaaattgagctcgatgttccggccccacgcccctgctcgtgagagaagggagaatactgccagacagaggtatgtgaagacaactgggaatgccacagttggaccacctctcaaagtaattggcccggcgcattgccctcgagcggaggcaacagcaggaagcaggggagccaggagggcctggagggggcgcctctgacaccggaggacctgatgggtgtggcggggagggtgggggtgccggaggaggtgacggtcctgaggagcctgctttgcccagcctggagggcgtcagtgaaaagcagtacaccatctacatcgcacctggaggcggggcgttcacgacgttgaatggctcgctgaccctggagctggtgaatgagaaattctggaaggtgtcccggccactggagctgtgctatgctcccaccaaggatccaaagtgaccccaccaggggacagccagaggaaggggaccatggggtatccctgtgtcctggtctatcaccccagcttctttgtcccccagtacccccagcccagccagccaataagaggacacaaatgaggacacgtggcttttatacaaagtatctatatgagattcttctatattgtacagagtggggcaaaacacgcccccatctgctgccttttctattgccctgcaacgtcccatctatacgaggtgttggagaaggtgaagaaccctcccattcacgcccgcctaccaacaacaaacgtgcttttttcctctttgaaaaa

SEQ ID NO: 356821 - DNA, 1414 bp, Homo Sapiens
  misc_feature (181)..(181): n is a, c, g, or t
  misc_feature (310)..(310): n is a, c, g, or t
  misc_feature (340)..(340): n is a, c, g, or t
gcgccccttaccagcttccagtctctcgaggtggccagtgtggtgcttggtccttgtttccaggatggacttccccagctccctccgccctgcattgtttctgaccggcccccttggtctgagcgacgtccctgacctctctttcatgtgcagctggcgagacgcactgactctgccagangcccagccccagaactcagagaatggggcactgcatgtgaccaaggacctgctgtgggagccggcaacccctgggcctctccccatgctgcctcccctcatcgatccctgggaccctggcctgactgcncgggacctgcttttccgcggagggtaccgntatcggaagcggccccgagtcgtgctggatgtgactgagcagccggttcctcttggatcatggagacgtagcctttgcgcccctggggaagctgatgctggagaatttcaagctggagggagcgggggtgagtggcccgtgactccaggggtggggactccctgctgtccttcaggggtgaactcgagggtgtgtgagcctgacaaggcctttccatgcagagccgcactaagaagaagacagtggtcagtgtgaagaagctgctccaggacctcggtggacaccagccctgggggtgtccctgggcttacctcagcaaccgacagcgccgcttctctatcctcgggggccccatcctgggcacgtcggtggcgagccacttggcagagctgctgcacgaggagctggtgctgcggtgggagcagctgcttctggatgaggcctgcactgggggcgcgctggcctgggttcctggaaggacaccccagttcgggcagctggtctaccctgctggaggcgcccaggacaggctgcgtatcctttcttgcgagacaggagattccagcgggctcgcctctggtagaggaggtgctcttggcatggtccagagaagggcaggaatttggggggcttgcagtgatcatagctcatgcactgatccttagtgagaggcccagatttccaagaggtcgttctgaccccaggtgacaatccccaattccttgggaaacctggacgcatacagctccagggacctgtccggcaagtggcgacaatgcaccgtccagggagaaagtaaggcccttatataacactttcctccctcactggctgacctgctacctgaccccatggcactttccatccctcctcagctctgctggccgtccgctctgactaccactgtgccgtgtggaagtttggtaaacagtggcagccaaccccttctgcaagcgatgcaggtgggagaaaggggccacgggggatcaggcctcagcccctcacctgccccgggggagctgggccatctgcagcccgctcgggagcccgtcctgcctgtgggagcccctgaag

SEQ ID NO: 356822 - DNA, 1097 bp, Homo Sapiens
  misc_feature (1007)..(1015): n is a, c, g, or t
ctggaccggtccggaattcccgggatgtgggtagctgcggcggggctgacccgtcccgagtgccaaagctgggtgttctacttgagatttccctcgtggtgccagggtccggcgagcatcacgccgaggcccatattccagacgaccacgacgaggcctggggtcactgaactctggctgccccttaccagcttccagtctctcgaggtggccagatgtggtgcttggtccttgtttccaggatggacttcccacagactccctccgccctgaaattgtttctgaccggcccccttggtctgagcgactgtccctgacctctctttacatgtgcagctggcgagactgcactagactctgccagaggcccagccccagaactcagagaatgggtgcactgcatgtgaccaaggacctgctgtgggagccggaaacccctgggcctctacccacatgctgcctcaccctcatctgatccctgggaccctgtgactgactgaccgggacctgcttttcctgaggagggtaccggtatctggaagcggccccgagtctgtgctggatgtgactgagcagagcagccgattccatctatggatcatggagacgtagccgtttgcgcccctggggaagctgatgctggagaatttcaagctgtgagggagcgggggtgtccctgggcttacctcagcaaccgacagcgccgcttctctatcctcgggggccccatcctggggcacgtcggtggcgagccacttggcagagctgctgcacgaggagctggtgctgcggggggagcccctgcttctggatgaggcctgcactgggggggcgctggcctgagttcctggaaggaacccccagttcgggcagttgttctaccctgcttggaggcgcccaaaaaaggccgggaattcttttcttgcgagaacgggagaattcagcgggggtcccccctgcaaaaggagggggttatggacaaggccacaaaaaagggcaggaaaatnnnnnnnnnttggcggggaataagactcggggcaaggaatctttcgagaaggggcgccgatattcccaggagggccctccggaccccatag

SEQ ID NO: 356823 - DNA, 1016 bp, Homo Sapiens
  misc_feature (254)..(274): n is a, c, g, or t
  misc_feature (569)..(578): n is a, c, g, or t
  misc_feature (869)..(891): n is a, c, g, or t
agaaaaaggcattgcacacacgggtgaaatgtgaagtactagaactgctatttattatcaaactacttcatgtgcttactatgtaatagtgccagaagtctgaggttcatgcttccctcaccttattaaaggatgttgcaaaattccatttttatatggaataaattgttaatattagctagttaagaaaaccatgcatgaggtcattgcatgcaaaacatgggtatagtcaaagtgagacagtcatcaatccnnnnnnnnnnnnnnnnnnnnngttaacacttagattaagcctgacccaaatctgctgttgtactgttagcacaaatgaagtcaccattctgtaacaatgattagcagaatgataccgagacagtacctgaagaaaagccatgcaaagccaaaggaaaaaaagatatgctaagagtatatgacaaggggcataccactacacatcctgtaaacagctgctttaaacagcatgttatgattgaccaaagggtggtcccttaagagggcgttgttgtcgttgttttggtatggattttgctgattaaaataggaggggnnnnnnnnnngataaccccctgaaggtacatgtgaaaatgcagtggtagagcccttgttaagaacagatttactttaggcataatattttgctgatttaagcccattgattgaacacacaaatctgagcaccatcagagttcctacatactgacatggctattttctcacattatctggaggtgggttggggaatagcacggatctgatccagacaaatcacaccattgccagcggataaacagtaactcaggaaacagtaactgaagtcccataggcagcacgtggtatgattcagttcnnnnnnnnnnnnnnnnnnnnnnntttcaatatactaagcgaggtcaccttttggtctaccaactgttatcttcatccgggagctgtgtgaccagcgaattgcaaaattttactaacatactacctgtgagaagatgatcccgggaatt

SEQ ID NO: 356824 - DNA, 738 bp, Homo Sapiens
ccacagacgaggcaagcttggcagccatgcaggcctaggtttcaaattcttatcctctgttgctggctgtaacctggggaaatctaagctttagttttcttctctgccgaatatctacctggtaagtggttgtaaggatttaagaaaattgcttgcaaagcacttaagtcagggcaaggtagacagcaggtacataatgagataaacttgaaatacagagtccaaatcattatgatttcaactgtactgcagccacaaagcaccagtgagaacgttattaaaatcaggggtgaacatacttaatacacctgataggagttacggcctgaacgtttatgtctccctaaatagctgaagacctaactgcagcatgtctgtatttggagatggggcctctacagaagtcattaaggttacatcggtcctgagggtggggccctcatccaacaggattcgtctttctgagaagagacgcaaggggctcgcctgctctccccccgtgcctgcaccagagaaggaggccatcggcaagccaaggagagccctccccagaaatcacacggaccagcaccttgatctgggacttccagaaaacagaactgtgaaaagacaagtttctgttgtttaaaccacccaatctgaagtattgtgttatggcagtcctgggcagactaatacaatatgcaacacatttacaataaatatacaataaacttaaaaatgtggaatgtaaaaaaa

SEQ ID NO: 356825 - DNA, 453 bp, Homo Sapiens
gaggacttacagaagaatgtcaaggacttaatggtgcaagctggcattgaaaattctattaaagaacaaatgctgaagacctaactgcagcatgtctgtatttggagatggggcctctacagaagtcattaaggttacatcggtcctgagggtggggccctcatccaacaggattcgtctttctgagaagagacgcaaggggctcgcctgctctcccctccgtgcctgcaccagagaaggaggccatcggcaagccaaggagagccctccccagaaatcacacggaccagcaccttgatctgggacttccagaaaacagaactgtgaaaagacaagtttctgttgtttaaaccacccaatctgaagtattttgttatggcagtcctgggcagactaatacaatatgcaacacatttacaataaatatacaataaactaacaaatgtggaatgt

SEQ ID NO: 356826 - DNA, 1528 bp, Homo Sapiens
  misc_feature (181)..(181): n is a, c, g, or t
  misc_feature (215)..(215): n is a, c, g, or t
  misc_feature (422)..(422): n is a, c, g, or t
  misc_feature (1160)..(1160): n is a, c, g, or t
ttcccgggatgtgaaggctcggggctgaagcggggtaattcctctcctgcaattacttttggatggaagtatgcccctttctcagtagaagatggtaatcttggagaatgaccatggagaaggggatgagttctggagaagggctgccttccagatcatctcaggtttcggctggtaaaanaacagccaaagagttggaaacaaagcagtcctanaaagagaaacgaggaggctttgtgttggtgcatgcaggtgcaggttatcattctgaatccaaagccaaggagtataaacatgtatgcaaacgagcttgtcagaaggcaattgaaaagctgcaggccggtgctcttgcaactgacgcagtcactgcagcactggtggaacttgaggattctccttttacaaatgcaggaatgggatcnaatctaaatctgttaggtgaaattgagtgtgatgccagcataatggatggaaaatccttaaattttggagcagttggagcactgagtggaatcaagaacccagtctcggttgccaacagactcttatgtgaagggcagaagggcaagctctcggctggcagaattcctccctgctttttagttggagaaggagcctacagatgggcagtagatcatggaataccctcttgccctcctaacatcatgaccacaagaaaatgactcaggcactttggacacggtaggcgctgtggttgtggaccacgaagggaatgttgctgctgctgtctccagtggaggcttggccttgaaacatccggggagagttgggcaggctgctctttatggatgtggctgctgggctgaaaatactggagctcataacccctactccacagctgtgagtacctcaggatgtggagagcatcttgtgcgcaccatactggctagagaatgttcacatgctttacaagctgaggatgctcaccaagccctgttggagactatgcaaaacaagtttatcagttcacctttccttgccagtgaagatggcgtgcttggcggagtgattgtcctccgttcatgcagatgttctgccgagcctgactcctcccaaaataagcagacacttctagtggaatttctgtgggagccacacgacggagagcatgtgtgtcggatatatgtcagcccaggatngggaaagccaagactcacatttcaagacttcctcctggtgcggtggcaggacagtctgtggcaatcgaaggtggggtgtgccgcctggagagcccagtgaactgacccttcaggctgagtgtgaagcgtctcagaggcatttcagaacctgagcttttgggggtttttaactgaagttggttgttttatccttcttgttttataattcctattgcaacctcgtgcactgctcgagacacaagtgctgctgtagttagcgccttagtgacacgcgggccttttggtgggtgaagcgggactgttttgtgtatgtgtgccccctatgtgccgcacctaatgtgtatgtgttggagaatgtgtggtttgct

SEQ ID NO: 356827 - DNA, 436 bp, Homo Sapiens
agttgcataaaatctgtgtccaccctttctgccagctctagtttcctcttgtttcttttaaatgcagctaaactgaatcttgtggtcatgatgttaggagggcaagagggtattccatgatctactgcccatctgtaggctccttctccaactaaaaagcagggaggaattctgccagccgagagcttgcccttctgcccttcacataagagtctgttggcaaccgagactgggttcttgattccactcagtgctccaactgctccaaaatttaaggattttccatccattatgctgggcatcacactcaatttcacctaacagatttaggattaggatcccattcctggcatttgtaaaagggaggaatcctcacactaggaattcagggaaaaattgtttttggaaaaggggccatacacctacatgtaggggg

SEQ ID NO: 356828 - DNA, 855 bp, Homo Sapiens
ctgcggcgcagcagcgactagtgggagtccgatgtgggagaggggctgcggccaccgccaccgccgccgccaccaggaaggcggaggacgcaggagccaagagcaagggacgccgccacggtcatcttcgcctgccccgccgccctcttagagacactcattgcctatggatcatcctctcccagcttttgcaagcaccgggctgctcgcccgctgattttcctcctccataggctcactgcggaggcaacggcgaggtgtccgatttgtgcacttgaggcccgcaatccgggacggtggggaatctgcgcctcctggccgggcatgaagaccccgtttggaaaggcagctgcagggcagcggtccaggacgggcgctggccacggcagtgtgtctgttaccatgataaagaggaaggctgcacacaagaagcataggagccgacccacctcccagcctcgggggaacatcgtgggctgcagaattcagcacggatggaacagatggacgatgaacctctaacacagtggaacaggaaccgttctggatcagctcctttgaataaacctgcccaccaccaaagaacccatactatgactttctttacattgtatcaaagtaatgtgtccaccggatgtgagcaccagcaaactcacttcttcctcagaacatctctaaaagctggcacacagattccgacgggacaatatggtttcctttcacccgcaaaccaattgttatgaattgagacccagcagaccaacagcaaaacacctaggaaggaacagctgttctccatgggtgactgctgtgaaaccaacaggatggctcttatctaattaatcctaagaatgc

SEQ ID NO: 356829 - DNA, 1775 bp, Homo Sapiens
  misc_feature (1640)..(1640): n is a, c, g, or t
atcaggccaaatcggccgagctcgaattcgtcgagagcgggttgctgatgctgccgtgcggtacttgtcatggagctggcactgcggcgctctcccgtcccgcggtggttgctgctgctgccgctgctgctgggcctgaacgcaggagctgtcattgactggcccacagaggagggcaaggaagtatgggattatgtgacggtccgcaaggatgcctacatgttctggtggctctattatgccaccaactcctgcaagaacttctcagaactgcccctggtcatgtggcttcagggcggtccaggcggttctagcactggatttggaaactttgaggaaattgggccccttgacagtgatctcaaaccacggaaaaccacctggctccaggctgccagtctcctatttgtggataatcccgtgggcactgggttcagttatgtgaatggtagtggtgcctatgccaaggacctggctatggtggcttcagacatgatggttctcctgaagaccttcttcagttgccacaaagaattccagacagttccattctacattttctcagagtcctatggaggaaaaatggcagctggcattggtctagagctttataaggccattcagcgagggaccatcaagtgcaactttgcgggggttgccttgggtgattcctggatctcccctgttgattcggtgctctcctggggaccttacctgtacagcatgtctcttctcgaagacaaaggtctggcagaggtgtctaaggttgcagagcaagtactgaatgccgtaaataaggggctctacagagaggccacagagctgtgggggaaagcagaaatgatcattgaacagaacacagatggggtgaacttctataacatcttaactaaaagcactcccacgtctacaatggagtcgagtctagaattcacacagagccacctagtttgtctttgtcagcgccacgtgagacacctacaacgagatgccttaagccagctcatgaatggccccatcagaaagaagctcaaaattattcctgaggatcaatcctggggaggccaggctaccaacgtctttgtgaacatggaggaggacttcatgaagccagtcattagcattgtggacgagttgctggaggcagggatcaacgtgacggtgtataatggacagctggatctcatcgtagataccatgggtcaggaggcctgggtgcggaaactgaagtggccagaactgcctaaattcagtcagctgaagtggaaggccctgtacagtgaccctaaatctttggaaacatctgcttttgtcaagtcctacaagaaccttgctttctactggattctgaaagctggtcatatggttccttctgaccaaggggacatggctcctgaaaatgaatgaaactggtgactcagcaagaataggatggatggggctggagatgagctggtttggccttggggcacagagctgagctgaggccgctgaagctgtaggaagcgccattcttccctgtatctaactggggctgtgatcaagaaggttctgaccagcttctgcagaggataaaatcattgtctctggaggcaatttggaaattatttctgcttcttaaaaaaacctaagattttttnaaaaattgatttgttttgatcaaaataaaggatgataatagatattattttttcttatgacagaagcaaatggatgtgatttatagaaaaactgggaaatacagggtacccaaagagtaaatcaacatctgtata

SEQ ID NO: 356830 - DNA, 1499 bp, Homo Sapiens
  misc_feature (34)..(34): n is a, c, g, or t
  misc_feature (38)..(39): n is a, c, g, or t
  misc_feature (44)..(44): n is a, c, g, or t
  misc_feature (46)..(46): n is a, c, g, or t
  misc_feature (58)..(59): n is a, c, g, or t
  misc_feature (73)..(73): n is a, c, g, or t
  misc_feature (124)..(124): n is a, c, g, or t
  misc_feature (131)..(204): n is a, c, g, or t
  misc_feature (264)..(276): n is a, c, g, or t
  misc_feature (280)..(280): n is a, c, g, or t
  misc_feature (286)..(286): n is a, c, g, or t
  misc_feature (292)..(293): n is a, c, g, or t
  misc_feature (295)..(295): n is a, c, g, or t
  misc_feature (299)..(299): n is a, c, g, or t
  misc_feature (316)..(330): n is a, c, g, or t
  misc_feature (1048)..(1048): n is a, c, g, or t
cgatatttacatatgatacacggtaaataacagngccnntcgcngnggcccaccctgnncccaccccagtgcncccctccccccagcctcgttaaaaatcgctgcgtaaagtcaggttaactgnggcgggnnnnnnnnnnnnnnnnnnnnnnnnnnnnnnnnnnnnnnnnnnnnnnnnnnnnnnnnnnnnnnnnnnnnnnnnnngggggccattctggttcggtgtacagcactgtgctacctcgcccctctttccctaataannnnnnnnnnnnnagtnggtggngagctnntntggngccaaaatttgtgcaannnnnnnnnnnnnnncttgaaagaggccagagttggggttctgaggggggaagagggacgtcaatgaggaggagagccagaaaatggaagacttagaggtttggggggggtgtggaccccgactactgcccctccctccctcgaaggggcctcgaggggggagaggcgggcacaggtgcggagatggcgtgggggaattccctccaccctagggtccccattctggccgtctggtgtgcgcctagggcgggatgcacccaagggcttgggacgaaagggtgaagggaggaaaggaagaaaaagagttaaaggaggaggaagacgaaaaagaagccaaggatagctgagaaagcaagaagatcctttagacaagagccccctaaaaggcaggtaaccttcaggaagcagaaaagagcccagccggtgagaaagaatgggaccttccagggaagtaggggagatggggagggaagggccaggttaaccgtacccgtggcttccagcccccttccctacgccaccccggggctgcgggtggagcaagccggccctcccactgcaccggaggacccagcaggtcaggaggtgagattaggcagggaaaaaggaagcccaggttagaagggagaagaggatggtcggtattcccgacggctgcccgaacctgctctccagcccagcgccctgcggtgaggtccgaggttggggagctctggggagctgggcgcttgcnatcgcctctggctgctcccagctcagagcaggtggagaacgagggaggagctaattttcttggagaggagggaccagaggaaaggggcgggccaacgaaggggaggagtcatttgggagtgagagggaccaatgaaaaggagaggtcgggaaaagagggcgcggccattgaaataagggagtctgtgggcggagccattgggaggagggcggggcctaaaactggcgcagcctcctccgggtgggagcgaggagtcccgaggacggaagggggcgctgcattgcagggagaccccctaagacgaggaggaggaggaggcagggggagctccgaggggcgggcctcagcagggcgaggtggagatgtgcaggtggtccgggtacttgatggcgggagggtagttctgcgtcatttggatggacatcccgggaattccggaccggtaccagcc

SEQ ID NO: 356831 - DNA, 406 bp, Homo Sapiens
  misc_feature (48)..(48): n is a, c, g, or t
gctgaggcgcaccctcggagctccccctgcctgcctcctcctcctccncctcttttctgcttcctgaaggttacctgccttttagggggctcttgtctaaaggatcttcttgctttctcagctatccttggcttctttttcgtcttcctcctcctttaactctttctctcctttcctcccttcacccgttcgtcccaagcccttgggtgcatcccgccctagggcagcaccagacggccagaatggggaccctagggtggagggaattcccccacgccatctccgcacctgtgcccgcctcttcccccctcgagggccccgtcgagggaggggagggggcagtaagcggggggtcgaacaacccccccaaaaaccttctaaagtgtttccatttttgtgggcttct

SEQ ID NO: 356832 - DNA, 960 bp, Homo Sapiens
  misc_feature (5)..(6): n is a, c, g, or t
  misc_feature (9)..(9): n is a, c, g, or t
  misc_feature (15)..(15): n is a, c, g, or t
  misc_feature (26)..(26): n is a, c, g, or t
  misc_feature (31)..(31): n is a, c, g, or t
  misc_feature (43)..(43): n is a, c, g, or t
  misc_feature (48)..(48): n is a, c, g, or t
  misc_feature (56)..(56): n is a, c, g, or t
  misc_feature (60)..(60): n is a, c, g, or t
  misc_feature (62)..(62): n is a, c, g, or t
  misc_feature (85)..(85): n is a, c, g, or t
  misc_feature (90)..(90): n is a, c, g, or t
  misc_feature (141)..(141): n is a, c, g, or t
  misc_feature (293)..(293): n is a, c, g, or t
cacgnnganagccancctgccctggnaccgnggtggggagacnctttnccccattntttncngtttcctgccattattggtgtgnaaganaaaacagggctgcacagtggcagagaagtcctttgcagtggggaccttggnagagactattcagggcctgggtgctgcctcagcccagtttgtgtctcggctgctccctgtgctgttgagcaccgcccaagaggcagaccccgaggtgcgaagcaatgccatcttcgggatgggcgtgctggcagagcatgggggccaccctncccaggaacacttccccaagctgctggggctccttttcccctcctggcgcgggagcgacatgatcgtgtccgtgacaacatctgtggggcacttgcccgcctgttgatggccagtcccaccaggaaaccagagccccaggtgctggctgccctactgcatgccctgccactgaaggaggacttggaggagtgggtcaccattgggcgcctcttcagcttcctgtaccagagcagccctgaccaggttatagatgtggctcccgagcttctgcgtatctgcagcctcattctggctgacaacaagatcccaccagacaccaaggccgcactgttgctgctcctgacgttcctggccaaacagcacaccgacagctttcaagcagctctgggctcactgcctgttgacaaggctcaggagctccaggctgtactgggcctctcctagactgcaggctgcagccagtccagagagaatagagcctgcccaggccttaagaccacctctcagcccagttcagttctgccttaccaaagattctgagactcatacccatttggagccagccccacttgctgccttacagggctgtccctgaggctggatctgttacaaatgagtcatgacatcatactgtaataaaagcagcttgttttctgcttgaacaat

SEQ ID NO: 356833 - DNA, 1526 bp, Homo Sapiens
  misc_feature (551)..(551): n is a, c, g, or t
attttttggaaactataatatacttgatgcttttacaggctctcaacattgataatacttgaatcattgtgggtgaccttgggcttctggagctttaaggaacaaagttaagtgacacatcccgttacagaaaaaggtatattctgtatatcctatattctatataactatggactagtcaccctccttattctgattagcattcaaaagcatcaccacaatacctctcatactcttttgacgcggcatagcactggatatatctgttctgtttcattgttggacctttagcaaacacttactgatttcctccaacgtgccacgttctgtgctttctgttcttgaagccacattcagtagaagatacaaacatggaacaaataaagatggtattatgttgttaagtgttaaattaaagaaataaacagagagcaaaaaggaggaaggtacaaactctgcccagaagagggaagagaaagtagggaaggcttccctaaggaggaagcattgggaatggctccttgcttttagggaccctgtctgggactgtnaccacagcttcctgaatggtctccagctcccacacttcaagcaagaggataagtaaagttctaacagtgtgctgggggacagcccttaccaccaccacagcccgccagcccacccccgccaggcctggagctcttcagcaggagtggggaatagccattctgattaaaagtgacagccagacctctgcaagatgtcaacaaggaccctccaacaactagtaataaaggaacacattcatttactaagcactgacattttgaagggtaaattctggtgaacgacacccactcatccctctgactcctactcttagctaatgaccctgacagtcaagttgcttttgtacctgctgttccttctgcctagagcaccttcctcctctttaaggacaggcaatatagacaccaattcatccaggaagccctcctgataacccccaactaagggaacgtcgacatcctccacttcattcattcagctaaagcttactgagcacacaccatgtggcagacacgagggacacagtggtgaacaaaacagacaaaatatactgccctcgcggagcttatattctagtgcatggaaatgaacaataagcaaaataaacaagggaaacacatagtgtattaagatagaggagaatcggtgggggcggcccaccctggcaggaaagtatattgataacagaatttagaattgctggtgtgcggggctcataaagagcaaacccactttgagtttatttcacgattattttcaaattctctacagatgacgcacctccttaggtcctgctcccagtcaccattgaatcagaatgccactggattaaagagtgacaggtcaaagggaggaagcagagcaaggatggagaaggaggaatgggtgttgaacgggctgcaattttaaataggatggttagggagggagccgtcactaaggtgacaacgtgagtaaagatcttggagggaggc

SEQ ID NO: 356834 - DNA, 503 bp, Homo Sapiens
gcaagtttccttgaggattcaaaaggcatgtaaggctcccacattgtcacagtcatagtaaagaaaatttatgattccaaaaaccctcttgttctttcaagataggatgaggagatcagtttgccttttaaaatagaccccagataacatgctccatgttgagcatgacctggcttcccagtggagagatggagaaaataatcctggtgcaagttgctggagagggagagttgattagcatttgtttccttgagtaacaacataaaccacaagtgatcgagtgcatccctgcttggcaggaggagaatgactgttcataaatgatgcccttctccatttccagagctcttgtcagcttggcttcccaaagtggtatcactcatctgtcaagttgattgggtctgacccagacaaagcaaaccagaggcaatctcaattacgacacatttgtaaatgtcctgtccaactcattccaaagtccaaataggtgaatcagaattcgc

SEQ ID NO: 356835 - DNA, 842 bp, Homo Sapiens
  misc_feature (679)..(744): n is a, c, g, or t
gtttctgaaaagactgacattgaacttgtctatggcaatgcttctttcacaagcacggactgggctgaggtcaactctgatagattcagatgactagaaattggccaaaaaagcagggagaagaacatgaggtagacttaaagaacttcctttatgtaaagatctgtgactctgaaatatcctccaaaaggagagtgcatctgagactgatatttaaactaagaaaaatgtttagtctgagatggatcataagtaaatgagcagtgtgagaggggagggatgggtaggtgctttccaaatacttcgcctatgaatgcataattttcagatttttttcccctagattttgagggagcagagaaacgggaaaaaactttagtcaatatctcgtgtttcattttaattaagtgacaggtccaagtgtgacatccttcagcacccagggacaagagaggggaaagatgctttatggaatgtaagaagatgaaggtgactgggattcagcgagagagaggtccctcagacctgggacctccctttatagggaaagaccatattccataggtttagggctttaccttaaaagctcatttttttcattcttccatccctaggaaagtacttaaaaccagacttttaaatttttatttatttacttattattatatagagacagatnnnnnnnnnnnnnnnnnnnnnnnnnnnnnnnnnnnnnnnnnnnnnnnnnnnnnnnnnnnnnnnnnncaggtttaagcaatcctcccacctcagaccccaggtaacttgggaactacaggcatgcaccgacatgcctggttaatttttgtatttagtgtagagga

SEQ ID NO: 356836 - DNA, 2080 bp, Homo Sapiens
  misc_feature (45)..(81): n is a, c, g, or t
  misc_feature (403)..(436): n is a, c, g, or t
  misc_feature (1198)..(1210): n is a, c, g, or t
  misc_feature (1561)..(1821): n is a, c, g, or t
  misc_feature (1841)..(1992): n is a, c, g, or t
  misc_feature (1996)..(2000): n is a, c, g, or t
  misc_feature (2007)..(2008): n is a, c, g, or t
  misc_feature (2012)..(2012): n is a, c, g, or t
  misc_feature (2018)..(2018): n is a, c, g, or t
  misc_feature (2020)..(2020): n is a, c, g, or t
  misc_feature (2068)..(2068): n is a, c, g, or t
aataatcactatagggcgaaccggagctctacgcggggcggccgnnnnnnnnnnnnnnnnnnnnnnnnnnnnnnnnnnnnnatcaggccaaatcggccgagctcgaattcgtcgagagcggacgtacgcgcactgcgcccagcatgagggtcgcggctctgatcagtggtgggaaggacagctgctataatatgatgcagtgcattgctgctgggcatcagatcgttgctttagcaaatctaagaccagctgaaaaccaagtggggtctgatgaactggatagctacatgtatcagacagtggggcaccatgccattgacttgtatgcagaagcaatggctcttcccctctatcgccgaaccataagaggaaggagcttggatacaagacaagtgtacaccannnnnnnnnnnnnnnnnnnnnnnnnnnnnnnnnngcttttgaaacttgttaaggaaaaagaagaagtagaggggatatcagtaggtgctatactttctgactatcagcgtattcgagtggaaaatgtgtgtaaaaggcttaatctccagcctttagcttatctttggcagagaaaccaggaagatttgctcagagagatgatatcatctaacattcaagcaatgatcatcaaagtagcagctttgggtttagatcctgataagcatcttgggaaaaccctggatcaaatggagccttatctcatagagctttctaagaagtatggagtacatgtttgtggagaaggtggagagtatgaaactttcactctggattgccctctatttaagaagaaaataattgtggattcatcagaagtagtcatacattcagctgatgcatttgcacctgtggcttatctacgctttttagaattgcacttggaggacaaggtgtcctcagtgcctgacaactacagaacatctaattatatatataatttttgaaaagtgttttggaacattgttcattaaaccaccatttctatacaaaaaaattgcatagtattttctcagttactatgactagtttatttttttctcatgactcttatttttttagagaaacatactttcactagaagaggttagtggaaccatttattaattgggaaaatgtcgacggcatgttcattaatagtgccaactttcttggaattcactctttctctttcgttaacacatcttccctatgaccnnnnnnnnnnnnnatttcatctataaaccccatttctgtagcatttctttttttatcacactagtttcttttcctccttctctctttcttgctccaatccctaccaataatgtcatgatgcagaggcatttgaaaatgaagatgaaaagatggtcactttatttagccagtcaagcttattctactgggtgtcgccaaagcgatttatcatttttattttaaatatattcatggttgaagtgtttcaacgttattggacaattaggaagaatgtccttaactcttacaagttattttataactgatttttaaaatgctgtttttcagtattaactatgttgaccttagaaaacttttacaaaannnnnnnnnnnnnnnnnnnnnnnnnnnnnnnnnnnnnnnnnnnnnnnnnnnnnnnnnnnnnnnnnnnnnnnnnnnnnnnnnnnnnnnnnnnnnnnnnnnnnnnnnnnnnnnnnnnnnnnnnnnnnnnnnnnnnnnnnnnnnnnnnnnnnnnnnnnnnnnnnnnnnnnnnnnnnnnnnnnnnnnnnnnnnnnnnnnnnnnnnnnnnnnnnnnnnnnnnnnnnnnnnnnnnnnnnnnnnnnnnnnnnnnnnnnnnnnnnnnnnaacctttatattattatacnnnnnnnnnnnnnnnnnnnnnnnnnnnnnnnnnnnnnnnnnnnnnnnnnnnnnnnnnnnnnnnnnnnnnnnnnnnnnnnnnnnnnnnnnnnnnnnnnnnnnnnnnnnnnnnnnnnnnnnnnnnnnnnnnnnnnnnnnnnnnnnnnnnnnnnncatnnnnnatatacnntttnaaattncntctttcatttattaatatccatttaattttctctctatcttgtcatanatatctagctca

SEQ ID NO: 356837 - DNA, 874 bp, Homo Sapiens
ctgctgccttggaccgggacagctcgcggcccccgagagctctagccgtcgaggagctgcctggggacgtttgccctggggccccagcctggcccgggtcaccctggcatgaggagatgggcctgttgctcctggtcccgttgctcctgctgcccggctcctacggactgcccttctacaacggcttctactactccaacagcgccaacgaccagaacctaggcaacggtcatggcaaagacctccttaatggagtgaagctggtggtggagacacccgaggagaccctgttcacctaccaaggggccagtgtgatcctgccctgccgctaccgctacgagccggccctggtctccccgcggcgtgtgcgtgtcaaatggtggaagctgtcggagaacggggccccagagaaggacgtgctggtggccatcgggctgaggcaccgctcctttggggactaccaaggccgcgtgcacctgcggcaggacaaagagcatgacgtctcgctggagatccaggatctgcggctggaggactatgggcgttaccgctgtgaggtcattgacgggctggaggatgaaagcggtctggtggagctggagctgcggggtgtggtctttccttaccagtcccccaacgggcgctaccagttcaacttccacgagggccagcaggtctgtgcagagcaggctgcggtggtggcctcctttgagcagctcttccgggcctggggaggagggcctggactggtgcacgcgggctggctgcaggatgccacggtgcagtaccccatcatgtggcccccgcagccctgctgtggccccggccctggacccttgcgtgcgaaaattacggcctccggccacggcgcctg

SEQ ID NO: 356838 - DNA, 1805 bp, Homo Sapiens
  misc_feature (210)..(239): n is a, c, g, or t
  misc_feature (311)..(311): n is a, c, g, or t
  misc_feature (452)..(452): n is a, c, g, or t
  misc_feature (667)..(667): n is a, c, g, or t
  misc_feature (670)..(670): n is a, c, g, or t
  misc_feature (1249)..(1262): n is a, c, g, or t
  misc_feature (1456)..(1456): n is a, c, g, or t
  misc_feature (1512)..(1512): n is a, c, g, or t
  misc_feature (1630)..(1631): n is a, c, g, or t
  misc_feature (1663)..(1663): n is a, c, g, or t
  misc_feature (1767)..(1767): n is a, c, g, or t
atcttttcttaatatgtaacgtctctctttgtctcatggaaccacattttgatttaaggtctattttgtttgataccagtatgtccatccctgctttcttttggttactatttgcatggaatatctttttccattcttttactttcaatctatttctgtctttggatctaaagtgaaactttgtagacagcatatagttggattatcggnnnnnnnnnnnnnnnnnnnnnnnnnnnnnnaactcattttgccagtttctgtgttttgctctgaggatttaatccagttatatttaaagtaattactgatanggagggacttacttctgtcattctgctatttattttctatgtgattttagcttttttgtcccttatttcctatattactctctttttgtgtgtttgatttttcaaatgtgagacattttaatttcattcttgtttcatttngtgtatattccataactattttctttgtggttaccatggagattacatttcacatcctagatttgtaatactctgatttgaacttttaccagcttaccgttaataacacagaaaaactctgatcttatacaactccatccccaacacttgtagatagtaatgtcacaaaattacctctttatacattgtgtgtccaaaaacatagattaataatnttntaacacattcgtctcttaaatcacataaaaaacaacaagtggagtacaaaccaaagttacaataatatgaactttaaaattttcccaggtatttgcctttactagagatccttatttcttctcatggcactgagttactgtccagtgtcctttcatttcaactggaaggactccctttagcatttcttgcacagcagttctcttggtaacgcattccctcaattgggaatgtcttcatttctccctcagttttggtggatagttttgccagatttaggggtcttggttgtcagttcttttcttttagcactttgaacatgtcagcccactgccttctgccttctgtcttctgccctctaaggtttctgatgagaaatctgataatcttagtgagtatcccttgaatgtaatgagtcacttcttttttgctgctttcagtattctctttatgtctctgtcttttgacagtttgattataatgtgcctcagcgtgagtctctttgaattcatccttcttggagctcactgagcttcttgggtgtttatatttatgtctttttacatctgtatagtgtgttnnnnnnnnnnnnnngtctttcatcaaatttgggtagttttggccatttcttaaaaatagtccctcttcctccttgtttctctctttcctctggaactcccaccttttcttctattagctgcatgttggtttttgtctgttacaaattgagctactgtaatcattagtgtgtaggtctttgtgtgggaatattctttctcttctcttgngttattatctaaaagtgcaatgcctttgttgcagggtaggtgaatattttacattntaagaaactgccaaattgtgttctaaagttattataccattttacatcccctgcctccctgattgtgagcaagagttccagtttcgtcacataatcacccaacattgctatgatctgnngttttaatgtttataatgctactagggatggnagtatagtatcttatttgtagtttaacttgcatttctctaagcttcatgattttgagcatatttaaatcatgtttttatttgccacccataatacttcaatggnaaaatggctactggattctcttgcctatttaaaaagaa

SEQ ID NO: 356839 - DNA, 729 bp, Homo Sapiens
tctttcagaaatagtcctggcttctacaagatccaaggcacagctgagtttaggtagccggtggaaccaagatccacctgaaggaatgcagtccttttttgttccacagaacctcagaatttatagtcccttcccaatattttagaaagattttgttttattgttctttaaaattacgtttggcctgactggttctgtggaagaaatgcaggaaactggaccttagggattttggctgtatttcactctttactggagggccttcttgtcagggttccttgtaacacactcccataacaaacaaattgtgctcaaaatgctcttagaatagggagaaattttgcagagagagacctctaaatgaatttatattatacagtgtcataaagtagagcttctgacaccatccgtaaattattgctgactttatccatgcttttgcttttatcataggcaaaaggttcagctacactctattctcttttaattcatttatggagcaatactgaaccaaacttggtgcccttttcagcctctgtccctgtgagaacagtgtgttgcttcccttcaaagtttcgtaaaaaatttgtaaatattaaaatgatatattagtttaatgtggttgatgttaaaatttatttggtattggttaaaaaaaggtaaatttttaaaaacgttatgttgttgttgttacaatagtttaaataggttgtataaaggttatttgtg

SEQ ID NO: 356840 - DNA, 1152 bp, Homo Sapiens
ggctggtaccggtccggaattcccgggatgtgcagctggtttgccttgcactgcgtgtcccagggacaacccactcaaactgggtgtcctagggacaacccacctccctctcctgccaaaaggttactgattgggctccccataaccccagctctgccaggacccttttatcctttttggctcccagaggcatagagctgagattccagggttctaggggttcctggaagtttggctccaactgttgtattctcttccctttcccctgctgctcagtttgtgcccataacctcctcctgggtagtcccctgaggttggcaggacttggcccttctggggcccctaaagcctgctcaggccctcctgctgctgaaccttggcctgggcactgctttcctgcatcctggaaaaccccgactccctggcccaggcccacacctgctgtgtggggctgcccacgtggccactgagcccccataggctgccatcaaggccggtcccagcaatttcagccaggctgccccagggcccagacgtctgtatacacagcaggcacctgtgtcagctcagtgtcgcttctgctcaatgtctacctctcgcggctcccatgcagccagtgacgctgctggtgggggcggctggcaccgccgtttgtgaattgcctggcaaattgggtgccctcctggggctggaggggtctgggctcctaacccccatccctgctctccccactagaaatgtgtcttcagtctgccagctcttctgctctacttccagtgctgcatcctgcactcaagcccagggctgctggcgagtctatggggaggagtgcggatcaggctcagcctcagcctcagcctcagcctcctctatggtcctgtctcctggcggttcacaggtgcccatcccccctttaacatttcacagttcttggccttccaaaggcaccagctcatatggcatagccaccccaaccctaatccttcccccaaatatcctgatttaaacttgggcagacttagtctgattcttgaaaactctaccatctccttcttgcacaaggcactggttacactaaaatgataaaataattagtatggggtactttgctcccagttacattccctcttccctgagaaccccaggctaggc

SEQ ID NO: 356841 - DNA, 1130 bp, Homo Sapiens
  misc_feature (136)..(176): n is a, c, g, or t
aaatgggtctccagctttccagtgaaatgtgacactctcaatagaatgcataatgttggtttctaaagttacactccataattattgttattctgtagaaaactgtacagaaggtaaatagaatagcttcaatggnnnnnnnnnnnnnnnnnnnnnnnnnnnnnnnnnnnnnnnnnccattgcattaaaagaaatgggtagcatgtgtctttcagagaaaggagctatttggttattcactttgtcaatcttaggtttttttaaatctttaaacaatttcttctttgtgatgataaaaataatataaatttactgtttctgatcatgactgagtctattacttgtcatggcttttgtacgcaactgtgttttaaaaataccggttttgcctctttggttacatgtggtgagcatggatgtcaagattatttttcaactagattattcaatttgttttatatttcttatacttaatacttatgactacagtccaaatcagtcttttagaaggtgctcttgctaactgtggaatatttgacgacatgaaagtcctttttctttgctttcagtggttggctttcactgaaagaaagtgtaaaaaaagtcagaatttatagctttcactatgtccaagactaggactgggttataaagattttcttttgtgaaggaaaataaaagaaaatttgccactactgcatttactttactattgtaaacttaagattcattccttagtctttggaattttgatgtctcaaaaccagatgagtggaagtgctgaatttgcaaaataaagctaagaatgcttaactctgcactttaagttctactctgaccaaattgaagatgagcagagcagccctgaacagcattttgtttatacagtcttgtttaagaatagaatttttttaactcttcattttttgtctctgtggaagctgtgtaactctttttaaaatgcaatttaaaacattttgttattctaacaattctctcaaaaaacagcatttccaatggtaatcggtattgttacgctgaacttatgtattccctgtacctgaacacttgttgctgcctcacaagaaaatagaacttttatgttaaaaataaagtctgttttttttgaa

SEQ ID NO: 356842 - DNA, 1091 bp, Homo Sapiens
  misc_feature (35)..(35): n is a, c, g, or t
  misc_feature (84)..(84): n is a, c, g, or t
  misc_feature (202)..(240): n is a, c, g, or t
  misc_feature (378)..(387): n is a, c, g, or t
  misc_feature (695)..(695): n is a, c, g, or t
  misc_feature (913)..(913): n is a, c, g, or t
aaattaaaacacagttgcgtacaagagccatgacnagtaatagactcagtcattatcagaaacagtaaatttatattattttantcatcacaaagaagaaattgtttaaagatttaaaaaaccctaagattgacagagtgaataaccaaatagctcctttctctgaaagacacatgctacccatttcttttaatgcaatggnnnnnnnnnnnnnnnnnnnnnnnnnnnnnnnnnnnnnnntcccattgaagctattctatttaccttctgtacagttttctacagaataacaataattatggagtgtaactttagaaaccaacattatgcattctattgagagtgtcacatttcactggaaagctggagacccatttnnnnnnnnnntcaaccaccagggaactaagggttaaataaaacagctgaatgaacctatggttaatatttttttcaagactgtggtaaagcttacatgcttaaaaattagccctttggcactggcagttagagttgttttgtaccttgtacctttttttcaaatctcaagctctatttctcccaaaccccagggatctgtctggttgccatacaattcatttacctgcaaattcacattctccttacaaccaaacattacactagaagttctatgtataagactgtaaataattctgaaacttgttcttccattccanttttaagttactttagattaaggacatatgaaactccacagaaagatatgaattagacaaataggcacaacagagcaaaagggaaaacctctacagagtggcattctagttctaaaatgccattgtgactagcagggatagagatggaagaggaacggaagtgcaaggccaagaacacagatttaacagaattcaagtcatccaaaaaccaagagttntttttaaataacttgtttttaacttcctctacccccattctgatttcagttttaccttttcttctgaacttctgatacagcagatactcagtggtgatacagtcaagttataatgcataacaaagaaggcaaaatatcaaggctctcagtgagaaaatgtagaccccaaataactgag

SEQ ID NO: 356843 - DNA, 1150 bp, Homo Sapiens
  misc_feature (18)..(18): n is a, c, g, or t
  misc_feature (37)..(37): n is a, c, g, or t
tatccctcacatataaangtgaacaacagtacataantttcctagaggtaaaataatttttgtttatataccccacaacaagtatgagtaatagaatattgtttgtattattatgtaattgtcctagaattcataaattactacattctcattccttggccaaatttctgtgagagaattggcagtaccatatattacattagtaccaagtacattttgtaggtgacaatactgctcttgtcatcaataccactctttacatgatggattcatggctagcaaacagaagtgaattatcagtaaacttgatgcatttggcctttctgatttttagataacgagaaaattaaaagtaggtctcccagctgtttccattcacctaacatcatgtcatttatttattaacagacaccttatcttgtctcttgcccttgctatttagttcatttgcatgctaaaatttatcctaatgttacaaaagataatgcttacattactgaatagaaatgagtaagtttattcatgattgcatgaagagaaaacttgtttcaatagggactgaagaggaagccaaaaaagtatatcaaaatgtgattaaaagattaagaaaagtactatgcctgggataaataaataaagtgaactgaaggaaaaaaataatctcctagaaatcccgataaaggatttctctctgctttagagaacacatcatatccacagggaatattgtaatgtgtaaaactttatagaagaaaaagtattcctttctgtccttggggctggcagaatgcatgcatttttaataataacaacagtaattactgttattttaatactaatttcatttcatgctaagcatttttaaatgaaaataccatgtctcaggtaggttaagtaacttgatggaggccactggtggaaggtagtaagtggtgaagccagaattcaaacctgggtctgttacactgcaaggcttgtgtgttaacctttgtataaaactagccatataccgaaatccatctaaatttttctgcaacttttaaccagattgagtcactcctgatacatagatcagaggtttaccgtaacatctaggtagactgccttgttttactacattacagaacttcaatgctatttattatttttt

SEQ ID NO: 356844 - DNA, 1557 bp, Homo Sapiens
  misc_feature (210)..(210): n is a, c, g, or t
  misc_feature (304)..(304): n is a, c, g, or t
  misc_feature (354)..(354): n is a, c, g, or t
ggataaaactagtgacattagggagaggggcggcacataggctggttattcagaagaggaagcagaatgaatgcgcgcctcacaggctttcaaatgactgtggtggtaaaaaggcaggtgcgccatgctgccactgtgggagaccgaggaacaagggccacaggtacccacacatctcaggggctggctttctttgagggaatgcaatgngcagctcactgtccacattgtttctgagctcttgggagtattttcttagaaaacagtaactttcaatgtactaacaatccttttaagttattcnccataaatctgtcttttgactgaattacaagcttctagagggcgagagtnagtaagccccatgatgtcacataggccaaggaagttatgtcactccgccatggagtctctaaatatggggaaaccaactatcctattaacaattcaccaactgtccataaaaccccgttagacccaggctgcatgccttgcagtgggggcctcacctggcatcctgcagacagggagacagtgcaatcatgatggagcagtccttggcagtcatggcgacgcggtactgctgcacctgcaggggcgggaaagatcagctccaggtcacacaggaagcctctgcccccccacacaaccttccttcccagtagccaagtgtgggaactgcttcctgcctcagaacctgagggtgggattaggagcgagggccacggtgagcacgggcgtcaggaggtcgccctgtgagagcacctgggccagccctcagtgccacggggctgctcagaggccagcaccgccccctgacctctcacggcaagcagtgtgggaccccaactccagaccctgagacggatgatctgtcttcagcaaggtcaccacagtcggcctttggaaggaaaagcagtaagccacctgagccccgcatgttggccacactcagagtatcaagtgagtatcactcgacacctgcaaggagagcgcagggggtgttcagcaaggcatcgcttagaacgacattccctccggaacatcatacagccaccagagacaacggcagacggccacccttctacaggctgtgcatgtgttaacttgctccaccctcacagcagcccaacagggcagcacggccggcgtcccactttacagacaagcaacagacacagacatcacttgtctgtcatgccctgcttgtcaatggcaaggcagggactcaaacccggtacgctggctctgacatttacactcttcaacacatgctccaagctatgtgggtctgtccatactgaccagggacagctcaacacacaccacactgtcagagtcgacatacgtaaagctgtacatgtgcacatgtgtgtgacgcgggcagggagaaaggtgaaggacaggcaccacaatgctcacaactgtctcctctacagagcagaatgtgaggcactctctcctcttccttctttggactttcatatatggtttgcattgttttagatggcatagctctcgctttcacaaaaataaacagttgtaaaagaaaaggaa

SEQ ID NO: 356845 - DNA, 2046 bp, Homo Sapiens
  misc_feature (1364)..(1364): n is a, c, g, or t
  misc_feature (1378)..(1378): n is a, c, g, or t
  misc_feature (1387)..(1387): n is a, c, g, or t
  misc_feature (1393)..(1393): n is a, c, g, or t
  misc_feature (1398)..(1398): n is a, c, g, or t
  misc_feature (1401)..(1401): n is a, c, g, or t
  misc_feature (1407)..(1407): n is a, c, g, or t
  misc_feature (1411)..(1411): n is a, c, g, or t
  misc_feature (1433)..(1433): n is a, c, g, or t
  misc_feature (1442)..(1442): n is a, c, g, or t
  misc_feature (1456)..(1456): n is a, c, g, or t
  misc_feature (1495)..(1495): n is a, c, g, or t
  misc_feature (1508)..(1508): n is a, c, g, or t
  misc_feature (1515)..(1720): n is a, c, g, or t
  misc_feature (1726)..(1726): n is a, c, g, or t
  misc_feature (1755)..(1757): n is a, c, g, or t
  misc_feature (1759)..(1759): n is a, c, g, or t
  misc_feature (1762)..(1775): n is a, c, g, or t
tcgacatcagaggcttcatgctggagagtaaaatttggaatataatgagtatgggaagatttgtatggaagcaccttttttttctcctaaattcctaggaatgtaagactcaatctgtagctagtatgaatattttgtattttgaacaagaaatgttgtgtcctaatgtgtcctagtctggagtttgatgccttatctgctgctcagtgggtgtaccttatcccttctgagcctcagtttccccattccccccaatagaaaaatggggatatttcctagggttgtcctgagaataaaatgagttctgtgtgacagttaactgccattaattaattagccgttctaaaagtttatttacaatatcaaaatctgacaagtaaatcagcattgttgtttggttctcataatgtattgtttcttaagaacattttgtaattgggctatgattttatgatctacagacgtctatttaaactataatgtcttggtttaaataggataatacaatctaagactggtttgtccttgagaaatttcagatttaatcagagaaaaatgtactgattgggatttgagtggacattgtggggtgtatttctggataccctcaagatcttcatttaaattttgatactttctattactagatctaatttgattttaagctctaagtttcacttttccattaaacggaaagcctccaggacattaactgaataaaacctcatgttgtgggacttctgtgtgtgtttagggttggcagcaggtgattaggagaaggcatatgacagtagagaggactggaatatagaggagaatataagcatgtagatgaggatgtggctgtatttgttttgagttctaggagcacagcaccaaatgtggtctcttaagggaagatgagggtagaagatgttaagatcccaggttccagcaactgatgccactgactaacaactagccacttgtcagaggaaggagagaacagtgtcttggggatgctgatgggttggagtgcctaatggctcattaaaagccatgaaaaagcaaagaaatcaaagaatacttttgatggagctttaggctatgctaagctctttaatgtaaacaagcacctctaacgctaaaagcacccttgcaagaaaggtaggagttactattcacatcctagagtcaaggaaaaagagaagatgtttgacttgctcaaagtcaagcaggtaatgtcagaattgaatctcaaatctatatctttatagatttgcagttctggtttatataataccaaagtcacatacaggtaatttcccaccattgaaccttcctgttggtgtgagatgccaaatctgtgaaaaccagacacaggnggccaggtgggtgncgaaccccngatccncaagnganccgccngccncagccccccaaagggctgggantacaggtgngagtcactacatcnggtctgattttaactattctaataggtatgtagtggtantaattgttttaanctgcagnnnnnnnnnnnnnnnnnnnnnnnnnnnnnnnnnnnnnnnnnnnnnnnnnnnnnnnnnnnnnnnnnnnnnnnnnnnnnnnnnnnnnnnnnnnnnnnnnnnnnnnnnnnnnnnnnnnnnnnnnnnnnnnnnnnnnnnnnnnnnnnnnnnnnnnnnnnnnnnnnnnnnnnnnnnnnnnnnnnnnnnnnnnnnnnnnnnnnnnnnnnnnnattttntcaatccttgattccttctctttactttnnntntcnnnnnnnnnnnnnnaaagaaatggtagcataatatacacagttgtccattttttaaagactaaaccatctcacagattgttcttgtatcagtaaataaagatctttcccccacccttgcccagtgtgtcattgtcttaatagaccattattagttccctattggtggacacttaatggcttttatttttctgttgtaagcaaaactgcatatacagcatccttgtctttaggcacatgtgcaagatatttataaggtaattctcaggctgggcacagtggctcat

SEQ ID NO: 356846 - DNA, 2351 bp, Homo Sapiens
  misc_feature (1729)..(1729): n is a, c, g, or t
  misc_feature (1745)..(1745): n is a, c, g, or t
  misc_feature (1749)..(1749): n is a, c, g, or t
  misc_feature (1780)..(1780): n is a, c, g, or t
  misc_feature (1814)..(1814): n is a, c, g, or t
  misc_feature (1826)..(1826): n is a, c, g, or t
  misc_feature (1832)..(1832): n is a, c, g, or t
  misc_feature (1861)..(1861): n is a, c, g, or t
  misc_feature (1863)..(1863): n is a, c, g, or t
agcgggctcgggatttggcgtcggcggctccgggcgcctccagctccggctcgggctccggctccggctccgggcgccgaccaggtccccttggcccccgccgcgcgccctccaacctgctgctgccgccgccgcgccccccaggctctgccagctacccgcgctctgagcccggggccagattcccatggaagcgccgcgatgttcgccccccggctgctggatttccagaagacgaaatacgcgaggttcatgaaccaccgagtccctgcccacaagaggtaccagcccacagagtatgaacatgcggccaactgtgccacccatgctttctggatcatccccagcatcctgggcagctccaacctctacttcctgtcggacgatgactgggagaccatctctgcctggatctacggcctcggcctctgcggcctcttcgtggtgtccactgtgtttcacaccatctcctggaagaagagccacctcaggatggtggaacactgtctacacatgttcgaccggatggtcatctatttcttcatagcggcttcctacgcaccctggctgaaccttcgggagctgggcccctgggcctcccacatgcgctggctggtctggattatggcttccgtgggcaccatctatgtcttcttcttccatgagcggtacaagcttgtgaagcttctctgctacgtcgtaatgggcttcttccccgccctggtcatcctctccatgcccaacaacgaggggcatctgggagctggtgaccggaggggtcttctactgcctggggcatggtcttcttcaagagtgacgggaggatcccctttgcccacgccatctggcatctctttgtagcatttggtgctggtacccactactatgccatctggaggtacctctatctgcccagcaccctgcagaccaaggtgtccaaatgaggtgacccagactcgagaggtcgtttgggctttaggagtggaggacgtttctgcgaacgttaacccagagcacagtgccaaggcctgtcttccctttattgggtagagttcttgatggctccaaggtgacttctggtgacagccagatcgtccctcgagtccccagcgagaaagaaagcatttagccattcttacagaggagaaattaaccctgtaatgtgtttctattttagatgagtgtttcctaatacaagcaacattaacatcttcagaaaaggaagcaggcatggtcctggaaaattggggaatgacgggccaatctgtgtttcctaaggtcctgaagaatctggcaaagagtcctgtgggttgtttatacctgggtggccagggcctccctctctgttaccaaagtccaggctggtgaattgtctctggttcagggaaaggggacagcccagcttgaagatgagggatggtgaatggctgtgaccatggcagacatcaccaatcaagtgcagcacatgggtgatgtcagaattcttcccagcacagtgttctgggcagccagtaccaatcaatttggcactcatgatgggacctctttgcccttcctgtctggtgtgctctgaaatgggataatggccagagtagctgaaaatctccaaatgggcatttgcatgcctatctcctcatctccccctcccttttggggaaactcctggagtagccagtttgggggcagtagagggaaactgaggcgcacacccatgcagcccctgattttnttttccaccgtagttngttntcagtagatttgggaatgaggatgctgttanttggccatttcttcccatctccaaaaatccaganacattacgaganctattnatttataagatggggcaaacatcccccangnacttgctccctgctccatacttaaggtttgtgatgccaacatttggattctctcttggtaccaatcagtggctgttagaggctactcaggtgtaccccaaacagaaggcacatggatctggggcgactgttccaggtcctcccaacctctgaagtgctcagtagcccaacaacaaggctgctgggggcctgttcttcagcccccgtcagggcggggccagcctctctgtccaatgctgcctggacatttactggggaggtgagtagcaggcccagctccaggatctgaattggaatctcagattctctggataaagaatctgtctcaagtcaggaggtcctcattctgcgactcccaaccagggtggagtgggcacagacaggatgccttatgcttatctctagcacattccagggggttccagggttcctgcacctggaatccagtgtgtccaagccagtattaaattatctcaacacattccacag

SEQ ID NO: 356847 - DNA, 453 bp, Homo Sapiens
caccagggaaaaattggagttaagtttaatgttgggacagatgacatcgccattgaagaatccaatgcaatcattaatgatgggaaataccatgtagttcgtttcacgaggagtggtggcaatgccacgttgcaggtggacagctggccagtgatcgagcgctaccctgcagggcgtcagctcacaatcttcaatagccaagcaaccataataattggcgggaaagagcagggccagcccttccagggccagctctctgggctgtactacaatgggcttgaaagttcttgatatgggcagccgaaaacgatgccaacatcgccatagtgggaaatgtgagactggttggtgaagtgccttcctctatgacaactgagtcacagcccctggcatgccatcagaggtgtccccatcaattatggagactaccccgaccctggctactagcacagc

SEQ ID NO: 356848 - DNA, 2105 bp, Homo Sapiens
gctggaccggtccggaattcctgcgatgtcgcttcggtctcttctccccggctgatcccagcactctccgtgacagcgcctcctgactcagcccaggaccggcttcttctcacgacctgctggagactggacgcccacacctgacccggaactcggaggcgtgcttcctccacccgccggctagcagccccgggccctgagctcccgccgacgccgctggggggcccgacaggcccctcggcgctgatgctgagtgggatcgagggcccggggcggcggcggagtacgggcctctggcgccttaggccagccgcaggtgtcggttcttaggctctccaggctcgctagctcccgccccggcttggatgggtctccctgcgccataaatgtggctgctgaggcggcggtggccgtggcccgtcgcgctgctgctgcggcgctccaagttcatctccgccccggggctctcctgccccacctcggggctgccgccacccgctccttatcccctggccctggccttgcagcgtggcgacaatggacaagatcctggagggccttgtgagttcctcgcatcccctgcccctcaagcgggtgattgtgcggaaagtggtggaatcggcggacactggctagacgaggcgcagtgcgaggccatgtttgacctgacgacccggctcatcctggagggccaggaccctttccagcggcaggtgggggcaccagggtgctggaggcctacgcacgataccaccggccagagttcgagtccttcttcaacaagaccttcgtgttgggcctccttcatcagggctaccactctctggacaggaaggatgtagccatcctggactacattcacaacggcctgaagctgattatgagctgtccgtcggtgctggatctctttagcctcctgcaggtagaggtgttacggatggtgtgtgagaggccggagccgcagctctgtgcccgactgagcgaccttctgaccgactttgtgcaatgcatccccaaggggaaattgtccatcacgttctgtcaacagctggttcgaacgataggccatttccagtgcgtgtccacccaggaaagagagctgcgggaatatgtctcccaggtgacaaaagtgagtaacttgctgcagaacatctggaaggccgagcctgccacactactgccttccctgcaagaagctattgcaagcatctcttccacagatgcatcattggaaccttctgtagcattggcaagccttgtgcagcatattcctcttcagatgattacagttctcatcaggagccttactacggatccaaatgtaaaagatgcaagtatgacccaagccctttgcagaatgattgactggctatcctggccattggctcagcatgtggatacatgggtaattgcactcctgaaaggactggcagctgtccagaagttactattttgatagatgttactttgctgaaaatagaactggttgttaatcgactttggtttcctcttgtgagacctggtgctcttgcagttctttctcacatgctgcttagctttcagcattctccagaggcgttccatttgattgttcctcatgtgggtaatttggttcattctttcaaacaatgatggtctgccttcaagtacagccttcttagtacaattaacagaattgatacacctgtatgatgtatcattattctggatttccagatctctatgaacctattctggaggcacactaaaggatttccctaagcccagtgaagagaagatacgttaattctcaatcaaagtgcctggacttctcaatcccaattctttgggcgtcttgctttgtctagaactttcttgaaacactcttgaaaactgggaaaaactggtctttattaaccctaggaacatacattgttcattatgcaccagtgttataccacagcctttggtttattgggccacagattttcagggagaccaaggtattatctttaaattctaacatggttgcaattcccattactcggaacacattcacggctcttttgggccttttgggccttacacacggggagttaccccccccgatattcttgagggtccga

SEQ ID NO: 356849 - DNA, 1634 bp, Homo Sapiens
  misc_feature (1402)..(1402): n is a, c, g, or t
gggtcacttgctgcagaccaggtgagagtggaatcactactggggatggaatttgcagaatctcagaaactagtcaggtcagagatgcgactactgagcagccattgcatcagtagcactagtgtgaggcagaatcatttgacttgttttacataccaacagcagaaaggaaaacctgtacctgtgcctgcatctgtgtaaagaggatccaaagataacctgttccaaggggcagggataaaagaactttgatgtttttgattaaattattttagaactctataaatgtctgaaatatcagataaagtatgtaaactcacccctactacaagcaggagatagtgaggtaatatacttaggctagagttctgggagctgagccaagaggtccgggttagagtgatggagagcacagtcctgctcagtaacagatatatcttggggtatgataaaaacagtcctttcgctggttcaaaacatgttctgtgataggaactcctaaataaattgactgtttcctgtgtacaaaactggcaataaacatatcaccagtctcctcttaaaaccagtaactcctctcttttattataagcagatcatcattccatctgagcaatatattatgacagtcaaaggaacccatcatgtactagtgatatagtcaaacttagaacataaaagttaacctaacacatgtttactgatacatacaattgctatcttgctttacagtaactagtcataaatagtaaggaaggtttaaaaaccaatgaaaaattcaactttttaattttacactaggtcccaaaggggcaaatctccttctcagaaactatccactcagatttgtatagctgtaaaaggctttttgaggattagattaggctctcaccttgagaaagtagagatgtgagattaaaaaatccatttggtttagggaagaggttaacagcatgaggccaagacctcacagtggtcaaaggaatttgtgttacttctttttgttgagattctcataatattttttaaatgaattatcaaaaatagtgtcttcaaaattgtggcatattttaaattttcacactaaacaaaacaacatttttttaacaagcacacataatagaattctatttacaagatgataaaaatattcttatatataaatataaatgtcataatgtgctgtagaagtacgtgtagtccaatcataggctccacgtttgaatttgtatgatgaaatattctttcagaaaaaaagaaatattatttcaatgttgtgatttggcaataaaggcgaagtttaaatttagtaacttttgggaatttgaggccttgaccaagtgatttttcaggacccatctgtgatagtccatgaaagaaacctcttttgaggcctctctgnagagtagagtatcattaaacacagatgattagtggccaattatgacagtttctccagcagggaggggtctgtgcgggcatagagactattaaaatcaagaggttctgagcccttaaatatttagcactgggaatgggccatttgctaagccgccagcttgttttctgacctttactaaaatacttccataaatggaaaaatgaaaataaagtgctcttagctttcccaggct

SEQ ID NO: 356850 - DNA, 1088 bp, Homo Sapiens
  misc_feature (1021)..(1021): n is a, c, g, or t
  misc_feature (1027)..(1027): n is a, c, g, or t
  misc_feature (1031)..(1031): n is a, c, g, or t
  misc_feature (1034)..(1034): n is a, c, g, or t
  misc_feature (1046)..(1046): n is a, c, g, or t
ggggccccatttcccaggatacctggacaaaaccattttttgagccttttgtgcccaaccatagtcattagtcttttaacagagccatctgttcatttatgtaacagacactgattgaatatctttcacgttctggtataaggctacaccgagggatatagtggtgtgcagtactgccatggtgcccaactgtatggaggtggcactcatagcaaacaccggttgcctcccaaagaacttttccaacacagcagaatctccttcattggtatcccataccaaaacacagggatcatacaagatgcctcagagtcaaaattccagctactgatcacagttaagttttggttctatcacttgctagctatgcaatagttacagacagaatgattgcatcttcacaaaattcattgttgaattaacccccactgtgatggtatttggacactagcctattggaaagtaattagggttagattaggtcatgagggtgagacactcatgatggtattagtggtttcataagaagaggaagagagaaaggccatctgcaagctggggagaaggtcttcagtgggaacccaattggctggcaccttgatcttggacttccaacctccaaaactgtgaaaaataaatgtctgttgtttaagccacccaatttatggtattttgttatggcagcccatgtgaacagtgaccttatcttctctatgcctcagtttcctcatccagaaaatggggataattataatcctatcttacagatttaaaattaggattagatggaatattacaaataaagtgcttcacacagggacttgcccaataaatgatcgtttttatcgaagtgcctaactggaaatgccaatcatagaatgctagagctggaagggatcttgccaagccccttcactgtatggaggaaaggaagctcaaaggggaatggcctgcccaggactacgataccagggtcccgactcctgctttaggggttgttcccctcaccgctggggaaggnctcatncttnctnctatcacatgtntcatccctgacactgagcacacccacttggaaattgtcaccc

SEQ ID NO: 356851 - DNA, 1574 bp, Homo Sapiens
  misc_feature (200)..(522): n is a, c, g, or t
  misc_feature (527)..(592): n is a, c, g, or t
  misc_feature (1216)..(1332): n is a, c, g, or t
tgccatggtgcccaactgtatggaggtggcactcatagcaaacaccggttgcctcccaaagaacttttccacacagcagaatctccttcattggtatcccataccaaaacacagggatcatacaagatgcctcagagtcaaaattccagctactgatcacagttaagttttggttctatcacttgctagctatgcaatannnnnnnnnnnnnnnnnnnnnnnnnnnnnnnnnnnnnnnnnnnnnnnnnnnnnnnnnnnnnnnnnnnnnnnnnnnnnnnnnnnnnnnnnnnnnnnnnnnnnnnnnnnnnnnnnnnnnnnnnnnnnnnnnnnnnnnnnnnnnnnnnnnnnnnnnnnnnnnnnnnnnnnnnnnnnnnnnnnnnnnnnnnnnnnnnnnnnnnnnnnnnnnnnnnnnnnnnnnnnnnnnnnnnnnnnnnnnnnnnnnnnnnnnnnnnnnnnnnnnnnnnnnnnnnnnnnnnnnnnnnnnnnnnnnnnnnnnnnnnnnnnnnnnnnnnnnnnnnnnnntgacnnnnnnnnnnnnnnnnnnnnnnnnnnnnnnnnnnnnnnnnnnnnnnnnnnnnnnnnnnnnnnnnnnatttaaaattaggattagatggaatattacaaataaagtgcttcacacagggacttgcccaataaatgatcgtttttatcgaagtgcctaactggaaatgccaatcatagaatgctagagctggaagggatcttgccaagccccttcactgtatggaggaaaggaagctcaaaggggaatgccttgcccaggactacgataccaggggtcccgactcctgctttaggtttgttcccctccaccggctggggaaaggctcatccttcctcctatcacatgtctcatccctgacactgagcacacccacttgaaattgtcaccccatttacctggtgagcagctcctatgtgaggttgctaagagatgaggatccatcactgagttccacacctaggaagtctcttaaattaggttgtcagaattcttctttttgaagaaaacccaaatagaaaaaaaagatttcaccgacgtttccttggaaaatgctgtgggaggagttaaaactatgctaaagtgtgcagcagatttataataatagctgaacacctttcatttgctttgccctttgtggtttgcaaagcacatttctacatattgttgagtccccagaatcaatcaatcaannnnnnnnnnnnnnnnnnnnnnnnnnnnnnnnnnnnnnnnnnnnnnnnnnnnnnnnnnnnnnnnnnnnnnnnnnnnnnnnnnnnnnnnnnnnnnnnnnnnnnnnnnnnnnnnnnnnntgctctagcaggcaataaatgcaacacacacatgtacacctacagacaatgttttcagatattggcaggtattgtggaaaaaataaggcagggaaaggggagagagagttaggggacttgttttgagtggccaggaaagctctctctggaatgcaatccaggcagagattattaatattgctgaataaatatctgaaacctcaatttatagatacagaaacacagtccagactcacacagca

SEQ ID NO: 356852 - DNA, 1761 bp, Homo Sapiens
  misc_feature (26)..(26): n is a, c, g, or t
  misc_feature (28)..(28): n is a, c, g, or t
  misc_feature (32)..(32): n is a, c, g, or t
  misc_feature (117)..(117): n is a, c, g, or t
  misc_feature (167)..(168): n is a, c, g, or t
  misc_feature (172)..(172): n is a, c, g, or t
  misc_feature (241)..(241): n is a, c, g, or t
  misc_feature (308)..(308): n is a, c, g, or t
  misc_feature (330)..(330): n is a, c, g, or t
  misc_feature (352)..(352): n is a, c, g, or t
  misc_feature (452)..(452): n is a, c, g, or t
  misc_feature (455)..(495): n is a, c, g, or t
  misc_feature (505)..(505): n is a, c, g, or t
  misc_feature (528)..(546): n is a, c, g, or t
  misc_feature (1052)..(1162): n is a, c, g, or t
  misc_feature (1260)..(1260): n is a, c, g, or t
  misc_feature (1700)..(1701): n is a, c, g, or t
catatactgagttctcaatgtatcantntganactcttattgcatttcaccacactgccatatatggacctgtgagaccttcacttgtaggaaatttccctttaaaaatgcatcttnaagactacaatgaaatggggaaaagcatagttttggttgagaaggaatgnnaggntttctctagatgtttaattaatcattttgggatgagtatatttcttgtcagattagcagcacgtaaganctggaggctcaagtgtattctattcacacagaagtggatagattccacacacagtcaataaaaagcnagaggcttatgtaaaacaaggntaagaaattgcagttaccttcncaccaaaagaaattatttcaaaagcaacatcacatagtcgcaattacagtaaaatggaattttgttatgtcctcttgctttattccgaattaaaacttcnctnnnnnnnnnnnnnnnnnnnnnnnnnnnnnnnnnnnnnnnnngagcaaatcntgcaaatacatatatctgccagnnnnnnnnnnnnnnnnnnnagtattcattagcaagaaaattttgcctaagagaaagacatgaaagcatacaatgttcaaattaaatgaaattaagtaaattcaaattaagtaaatgaaaacaaatctaacatttcacttttattaatttggggagggcataatttgatgttggcataagcagtaatgtttgtaaactgtttatggagatgcggaaagagaagaggatgaatgtatattatatgagtgaggtttgatgtctaccagtcctcattttcatatgaggaaactgagattgcacattttaaaaaaaacttgcacaagatcacaccactagttaaatgacagattcataacccaaatctacttctgcctggcaccaaagttcacgttctttctttttcacttttggcatacttgatcttgttataagtcctttagaaatagtagtgcatttagttccccttaataattctatataatgaaaactgtaattaccactgctttacagtgaagaagttaaaagnnnnnnnnnnnnnnnnnnnnnnnnnnnnnnnnnnnnnnnnnnnnnnnnnnnnnnnnnnnnnnnnnnnnnnnnnnnnnnnnnnnnnnnnnnnnnnnnnnnnnnnnnnnnnnngcatctcttgacatgctttggaaataaatggaatccatactgtcttcagtgggaatatgatactgtagcctagtttttacaaggtaaaaactctccangaagtaatcaatgtctatattataataaatataatagtctacttacatgatcaatatttgtactatttcttggttcccacagaaatctaatagaatagaaacaccacttttttgtcctgtcactagatttctataaaaatgcttgtttgtgggcagggaatactctgaagaagagttatgaaaaggaagggcacatttattgctgtagtttgaaataaaactttttttcacccaacttagataaagcgcaaatggaattttatttgcaggggcatattaacatagaattaaaatgacaactatatagttacgctagtgctgaatagcgtctatatctaacctattttctaaaagatattttatgaccctctacacttgtatgcacagtacagaaaatacactgatgtctgtagttttgtttctgtagcccctaccacttnncaggtattctgcaaatacgtgcctttggggatgaagaaaaatgatttatgttaacagaac

SEQ ID NO: 356853 - DNA, 965 bp, Homo Sapiens
ggggtcgctaaaacaaatggcttgtgaaggctaagagcatacgcccggtaaaatagaatcggttttaaaaaatataccacccatcccgtgggtacggtttttttcggtggcatccaaaaaatatggcgggaaacaggagtaagccagccttaccggaggaagcaaaaaataaagtggggggggcgggccacttctcagagaacaagcagaaggatggttgcatctcaaacgggtgttattcccaaggggtttataccgcgaaccgttcaaaaggatcctgtgggaaaacacagcaataataactctgctcactgtgagaaaccggcaagacagggtctgggaaaaacttgggtctccagcatttggggcctgttttcctgcttggcctttgggagaacaggctttcgggggatcacagcagatcttggctcctgggctttgaatttggatttgtagctttgcactccccgtttctgcagaagctgcaaggcagcaaggtagcgaacgttgctggggtctggagggcacgccaggtttttctcagacaggagggaccaatgcaggcagcgctgctccggatcggtcagcagggatatctgggccgctggggaaggggaggatggcgtgtcgttgaccatagggtgtttggccagctcactggctcttttttcacctttcccatctgctgttttcaagccatatgcataagccacacacccatccttttccacatccagcaccttctcttctgactgcaagaaagagttcttactcttcttacccagaacatccaaagcatttgaaagtgaagccttcaggggaggcagaactaggagggccctggaagtcagggggcctgggatggatagccctctgtgggcccctccactgggattcccagaggccttgcccctattagtgccggggatggcccagtctttgtgcaccaaataactccttatttg

SEQ ID NO: 356854 - DNA, 1158 bp, Homo Sapiens
  misc_feature (89)..(89): n is a, c, g, or t
  misc_feature (91)..(91): n is a, c, g, or t
  misc_feature (93)..(93): n is a, c, g, or t
  misc_feature (95)..(96): n is a, c, g, or t
  misc_feature (105)..(105): n is a, c, g, or t
  misc_feature (113)..(113): n is a, c, g, or t
  misc_feature (116)..(116): n is a, c, g, or t
  misc_feature (292)..(295): n is a, c, g, or t
  misc_feature (301)..(302): n is a, c, g, or t
  misc_feature (488)..(488): n is a, c, g, or t
  misc_feature (493)..(494): n is a, c, g, or t
  misc_feature (500)..(500): n is a, c, g, or t
gttgcgccctgtgggcatggcttatgggcgctcgccctcttggctgctccaggtcaagcccagcgcagatctcacaggccacctcttcnangngnngcggatacnccgggganggntccggctccaactcccactccggctcctgctgcagctccagccctgaccccttcctcagggccgggctcagcggctctgactctggaggaggagctgcaggaagcgatccggagggcgcagttgcttcctaaccggggcatcgatgacatcctggaggatcaggtggagcctgatnnnnccctgnnccctattcccctggacttccctggctccttcgacgtgctgtccccctccccggactctgaaggcctctcatctgttttctcctcttcactcccgtctcccacgaactcctcctccccttctcccagggaccccacggactccctggactggctggaggccctgagggggggtcctcctctgggttntggtnncccacnccccagcatcttctccgctgacttatctgactccagcagcagccggctgtgggacctgctggaggatccatggtgatggattctaggatttacagagacagagaactgatgggggtggagagaagctccttgtgggaggagagggaactaccagcagagcccctcctaccgcagacacaggatcggagacaacctccaaccccacctgcctcctgaagtgctgctgacatgcaactgccttaactttgcctacctggcctccttatgatccccctccggcgtggtatggttggggggcttcttttgctgctggccacggcaaacaagctgcttgctgcttccttcagagacctcatggatgttcttacatgccccggaccccggtagatggctccctgttgtttggggagcctggaaggtggttatgccttttggatgcaggagaggagcaagaaagagtggagagggagaatgggggagccggaccctgacctccctgggttctggttggagatgaaaaaattagaagcatcaggtctaagatcagcttctcttggaagcagagcctgagacaagatataaatgccagtcatttattaaagaagtgttctggctgggtgctggagggttagtatgtgttttccaggagatgtggcag

SEQ ID NO: 356855 - DNA, 723 bp, Homo Sapiens
tctccgtggagaaagtcccatcttactctcccttaggaccctcccaccagctcagcctgtggaggcctcccaagattgtaggaataggcccatccctctctggccatggccccaagttcctgcacacaggagcacccacagagagacacacacaggacacaaaacccctggcacgttcagagacagaagccacagatacatcccggcacagacagacacacacgaggccagctcccttgcgtgtccagcccctccagacaccaccactcagaaactctgagagagagcatgggcagacaccctcagcagacaggaggcctgagttccagtctccacctttattgttcttgaaagcccctgctctctctgagccttatttcatcatctgtaaaatgggaatgtcctgaatgacttctaaggctctttctggcttgaactgtcagagccaagcccacatccctccttgggcagggcagcagctgctgccacagcctccagcggctgccactgtgggctctgggagcccggagcgatgcttgtgtgagaggcagagtgccaaggatgaaactggcacctgacagtaagccggttccaggcctcctctgggcccaaggcccaaccaatttttgttttgttcctggaaaaagctctttggattccatagcttggatcttctttttttacttaatgaaaaataaaaatcccaatgggtgggcctccctt

SEQ ID NO: 356856 - DNA, 2012 bp, Homo Sapiens
ccgcgaaacctagtgctgaagtaggcgcggacgtgcccggtgcctggcgcgtggtagcaggcgcccggtgccccggccggcgaagaccatggcgttcatggtgaagaccatggtgggcggccagctgaagaacctcactgggagcctgggaggcggcgaggataagggagatggggacaagtcggcagccgaagctcagggcatgagccgggaggagtacgaggagtatcagaagcaactcgtggaagagaagatggagcgggatgcacagttcacacagaggaaggcagagcgggccacactgcggaccacttccgagacaaataccggctacccaagaacgagacagatgagagccagatccagatggcaggtggagacgtggagctgccccgggagctggccaagatgatcgaggaggacacagaggaggaggaggagaaggcctcagtccttgggcagctggccagccttcctggcttgaacctgggctcactcaaggacaaggcccaggccacactgggggatctcaagcaatcagctgagaagtgtcacgtcatgtgaccacttccccggggttacccactgggctgggcccccatgagggctaagagtgtgtcaacttccagggacccatactccatttggggctttgtttcccttgccccatcctagttccaagacctttcccatccatgccccaagcctatcttctggtttcttcctctccgctgggagtaaagtccccatcttcactctacccttcaggaccctccccaccagctcagcctgtggaggcctcccaagattgtaggaataggcccatccctctctggccatggccccaagttcctgcacacaggagcacccacagagagacacacacaggacacaaaacccctggcacgttcagagacagaagccacagatacatcccggcacagacagacacacacgaggccagctcccttgcgtgtccagcccctccagacaccaccacttcagaaactctgagagagagcatgggcagacaccctcagcagacaggaggcctgagttccagtctccacctttattgttcttgaaagcccctgctctctctgagccttatttcatcatctgtaaaatgggaatgtcctgaatgacttctaaggctctttctggcttgaactgtcagagccaagcccacatccctccttgggcagggcagcagctgctgccacagcctccagcggctgccactgtgggctctgggagccggagcgatgctgtgtgagaggcagagtgccaaggatgaagctggcactgaacagtaagcggctccaggcctcctctgggcccagggcccagccaatttctgttctgttcctgtagaacgctctctggattccatagctggaatctcctctcttagctcagtgaaaaataaaaatcccaaatggtgtgcctaccttcccacttcttactggcttccaggagtcttggagttcatagccccccgagcctgccttaaaggggtgtcctccaccccccacctacagcttcacaggaggggagagggcatccagtgctaggagtagaagtgtctccagctctgttctcttggggccccgggtgaaaggtggggtcctggggcttatgaaataggtcctgggctttgaaggaggatggagcagcctcattatgtggggaagatggggcctctggggcgtcactgagaccacaggtggggccggggctggaccgcagctgtcttgggtgcctgtgcctacacccctcctcaccctagagacggaagatgtgcaaaaagaaagaaggaagggcaactgcattccagccccacactgtgatgactttgagcctgtcctttccctccttgagcctgtcttgcttgtcccctgtaaaatgaacagtccccctctcccccaaatagtaataatacatgtttcaaagggtgaccatttataaagcatatgacaaaccatatcaattaaatgtaactcattcttttt

SEQ ID NO: 356857 - DNA, 1940 bp, Homo Sapiens
  misc_feature (19)..(20): n is a, c, g, or t
  misc_feature (28)..(28): n is a, c, g, or t
  misc_feature (62)..(62): n is a, c, g, or t
  misc_feature (64)..(65): n is a, c, g, or t
  misc_feature (78)..(78): n is a, c, g, or t
  misc_feature (83)..(84): n is a, c, g, or t
  misc_feature (88)..(90): n is a, c, g, or t
  misc_feature (95)..(95): n is a, c, g, or t
  misc_feature (107)..(107): n is a, c, g, or t
  misc_feature (121)..(121): n is a, c, g, or t
  misc_feature (125)..(126): n is a, c, g, or t
  misc_feature (132)..(132): n is a, c, g, or t
  misc_feature (135)..(135): n is a, c, g, or t
  misc_feature (142)..(142): n is a, c, g, or t
  misc_feature (146)..(146): n is a, c, g, or t
  misc_feature (153)..(153): n is a, c, g, or t
  misc_feature (156)..(179): n is a, c, g, or t
  misc_feature (192)..(192): n is a, c, g, or t
  misc_feature (201)..(201): n is a, c, g, or t
  misc_feature (224)..(224): n is a, c, g, or t
  misc_feature (228)..(228): n is a, c, g, or t
  misc_feature (235)..(235): n is a, c, g, or t
  misc_feature (247)..(247): n is a, c, g, or t
  misc_feature (264)..(264): n is a, c, g, or t
  misc_feature (266)..(266): n is a, c, g, or t
  misc_feature (268)..(268): n is a, c, g, or t
  misc_feature (421)..(421): n is a, c, g, or t
  misc_feature (658)..(658): n is a, c, g, or t
tttattatttttatttgtnnaaatacanattctcaataaaattaacttaccatcatttcaantnnatatcggttacanattannaaannnttttnagagatgtggtnattgtataagagantggnntgattngtngaatggntttngttttantannnnnnnnnnnnnnnnnnnnnnnntttgtttttggtntttgagtgnttgatattgactatcaatttgtntcgngtggttnagtatcagattncagaaacatccggggcntngnacaccttttagtatctcagagccaactagtcgcgaacagaggaagtaatacaattgcttttgttaatgttctcatgcgacaggcagaggcagtcaatattagatctggtaagacacatctagctctaggtggaatctgaggggggatgcagcnacaagaaagcggcaccaactgagcatgctcctattcaggcagagacagaaagggagtggacgtactgtagaagctggccattacgtagttttggcagcgatcaccagtaaactcatttgggcacaaagtttaggagcagtttggagattagtttctgttgtttgtggctgagttgctgacttgggcgttctcacctcagggttccgggtgggtgaggggagggatggggcggtgggnggcaagaaagaaaaggcaaaaatacgattgcttcggggtcggtgccgctgatggttcaaaggagacaacagccttgtcaccttgcactgtaacttgaacctcactttcagattgagccctagagacaggtgaagtgtatgcctcagacgacacccacacagctgaggcagcagttgcgtccagagaaataatagggtcctggcctaaccccccagggtcaaggtgagtaggagagtcatattcaaagatcttgtccacaaatacccacttgaggccggcgatgcagaggcagaggctgaccaggcaagccaggatggggacaatgcagattttctctgagttgaggcaacctctcaggcgctcagcttctaggcacgcacagcagggcacggccaggcccacgagtccaggggttctcccatcttcagtctggggctctggcatgtcttctgctgccggaagcccatcaagagatgggtctgcactcagctgagtggaggggctggaggacctctcggcggcgacctcagacatgtctggggaataaatctccatcggctcacctccagaagaaggcctggccgctctcacggtccattaccacgcagaggcccccccaaccaaatgatacagcatcttacagggggaaatcgataaatcgtccaagtccaaggccattattaaaatcaagaagagttcagaaagatgcaaggggggaagaaaagctcctagcaactacaaaatcaaagtatatcgtaataattctttaagctgctgtttctgggccacttttctagttcttttaaatgctactccaaaccatcccgggctcgtcaagaggacagggacgaaaatagatcgacggagctgccggctgattaattaagtaaaccagtagcccaaactgaaaggcatgtttctcacctcgagcatctgaagctggtgtctgctcagatgaagaaaacaactgtcatgcaggagaagtaaaagcagaaggaggaccagcggcggtggcggcggcggcagcagcagcggcggcaggagaggcagtagtgacaatagcaacagcatcctgttgtgttaacgcgacgacggctgaaaggggctgaatcattacagagcagcaggtgcctgccctcggagcatcactgcaaacaggatcagagggctccggaggcaagagtgcagccaggaggggcggtcactcccttccccgccctgcctccaccccacccccgactactcctctttgtccttcttgagtgctcattcactttcttcc

SEQ ID NO: 356858 - DNA, 422 bp, Homo Sapiens
tagaggcctagaatgtgtccttacccagatcctaataattgaactgccctctgccctgtccgccatgagaacattaacaaaagccaattgtattacttccctctgttcgcgactagttggctctgagatactaataggtgtgtgaggctccggatgtttctggaattgatattgaatgatgtgatacaaattgatagtcaatatcaagcagtgaaatatgataataaaggcatttcaaagtctcacttttattgataaaataaaaatcattctactgaacagtccatcttctttatacaatgaccacatcctgaaaagggtgttgctaagctgtaaccgatatgcacttgaaatgatggtaagttaattttgattcagaatgtgttatttgtcacaaataaacataataaaaggaaaaaaaa

SEQ ID NO: 356859 - DNA, 1189 bp, Homo Sapiens
  misc_feature (91)..(91): n is a, c, g, or t
  misc_feature (220)..(220): n is a, c, g, or t
  misc_feature (1177)..(1177): n is a, c, g, or t
  misc_feature (1179)..(1179): n is a, c, g, or t
  misc_feature (1181)..(1182): n is a, c, g, or t
  misc_feature (1185)..(1187): n is a, c, g, or t
gatccgagaggagcttggaaagctgtagtatccgctcatttttaaaatttaatttttaagtaaaggaatttgccaggatatctgcatcaanagtactgtagcctgggaaacctgaacacctgaaatgcatgctctataaataataggaacggcgacatttctagtaatgatagtttttacactgtacttaataggaagcttccaaaagaagaaaaccccnacaagttttccattttcttaaagtaggaaaaaatgaacagtaataattatgatgaagatgatagtagtgctatgggatgtgtggactgtttagtgtgttcccctttgtgggtgggttcctatgatacttattatagaacacagtggatcctttttgaatgttcgtggaagggccaggagttcctgtgaaaccaggatactgcagctttattaaagttaaagaaactgtaacatatctcttatatattaaaaacgtttaaaagttttaaagagaaattgcattaatacagattgaagtattttattcttttttgacttgaaaaattatatttcatattgcaaagatgtttacaagtattttaatttaagttcagtgaacttttttgtagctgggttaaatctttttattttagtatggccttatggcaaagaacactgtattattttaataatcacacaattgtgacggaattacaaccataaaatgtgtaatgttttgaacagtattctgttgggatggagattttataggttcagacaaatcttctagatctgcttcacccagcatattttctattcagtgatataaagcatattttattctatattattacaaaaacggaaatgtataaacatgtcaaaaagaactgttgatgctttctaacatttgtataaatagaattcagtgcaagttacaaaaattctgttgcaccactctagttttagtatttctattttaatacatttgtttaccacttgtttatgtatatgtaggtgatgttacttgagcttaaatgtactttactgagcaaagtttaaaaaacaaagtatattttattttatgataaagggcctttaacctcatggtcaaatactaatattatatttgctgagacaagatttgaaattgtatcaagagttttatttttctgacatttaaagttctacataataaagntnannccnnngt

SEQ ID NO: 356860 - DNA, 1699 bp, Homo Sapiens
  misc_feature (778)..(778): n is a, c, g, or t
  misc_feature (1597)..(1597): n is a, c, g, or t
  misc_feature (1603)..(1623): n is a, c, g, or t
tgagaaatgaaaaatcttttattttttacaaaaattttcataaatgcattttatatttaatatgcatgctactataacaaagcaactgaaaatgtaattacagttaagatacttttatgcatatttaaaaagtaatattttaatcccctcgatttttaaaaattgaaagtggaataagcaattcttcaaaaaatatccattctcccccatgcaactgttgcaatgatttaacaaggaaaattagaataatcggtcaaatgaatgtttaaaagccactgtcacctcatgaaaccctttccatttggtaccaagtttagaaatgctcacatttcaaatatttatctactgcctctgtgttacaaccactaatgtgttctaactgaagagtttctcatttggggtattgaccttacttgaatgctaacccacttcttattgcagttaattgtaaattcatagaaagtattttctagcatacttgagaggaaattcagactactaagatccttttttcttttcatgtaaatgcttccttaaaattaaaaccggcaaggaaatacagccaatttatagtttaccaattttatatacggttattcattctttttttcctgagatattaagcacatttgtaagtagtctgttttcatgcaaaaatatattttcccattcttcacattcattttaaagtattttatattttaaataactatattgcatttgtgcttcatacatttggaaaataaaggatatttcattttctttactgcagaaaaangaaagggttattggttctgtgataggtaatacaatcaaattaagtgctgatttaaagttgctaaaacattacctgattggaaaaaattccaatggaaagttctattttttctcatacttgtagttttaactacatgtagaatgaaagcatgacttgcataaatgaaggagacataaaatgtttaatccttggatttctgagtttatgagttcctaatacatggggctaggcctacacactatacctgaccagagtcccgtctcccatttgcaagggaagtctcaatattatataaagacatcttccacagcaaaaggaaaaacagatttggtatatattttataatatacacaaaaggatctgtttgcaaaatatgagaattactaatacatttgaataacagataaaaaggccaaacatttaagaacatatttacacttaaggaactgattatctgttatacttctaggcttaaatagatccaatgcccaatatgaatgtgaccatcgtaagtacatcacctttttctatctctgttaatgagaaatacagatttttttctcctccagaataaagttgggaaatctgaagcaagaaggatttttccactgatacatagggtttcatttctcatttcttacaaattaagtggcattaaacagagaaatagataaatgtacatgcaagatatttagggtacactatttactttcttagcacatctgaactaacccatttattgccccaagtgtgatgatttccacatagacctggaaatctagaaatataagatatttaagtgcaaaaagagaaacttgntttggnnnnnnnnnnnnnnnnnnnnngaaacggatctcgcttttgtgcccaagctgaaaacaagggggggaatttggttattgaagttccgcttcaggttat

SEQ ID NO: 356861 - DNA, 1699 bp, Homo Sapiens
  misc_feature (434)..(732): n is a, c, g, or t
  misc_feature (1068)..(1068): n is a, c, g, or t
aaccatttcacaagcgaacaacattataacaggcccgccaaatacaattggggttaaaccctatggaggtggaaataaagccaacattgatttagggggccaccctaagtgggatgaaaaatacatgtctcatgcctatccgaggggtcacaacagtaagaatcacactgtgtgtgacactgtgcaaagcagtctgatacagtaatagtctcgtgttttgcaggcatgagtacattcacaggtcaaaggtgttaaacgatcctagaactaatataaatctgtgttcacaacagctccattctacatgcccagtagcctccaaacatggcacatttataggatcagacattagtcagtatggttatttcttaatcaattgccaccattttcctttcccactttgatctacaaaagttccattttttcccccccannnnnnnnnnnnnnnnnnnnnnnnnnnnnnnnnnnnnnnnnnnnnnnnnnnnnnnnnnnnnnnnnnnnnnnnnnnnnnnnnnnnnnnnnnnnnnnnnnnnnnnnnnnnnnnnnnnnnnnnnnnnnnnnnnnnnnnnnnnnnnnnnnnnnnnnnnnnnnnnnnnnnnnnnnnnnnnnnnnnnnnnnnnnnnnnnnnnnnnnnnnnnnnnnnnnnnnnnnnnnnnnnnnnnnnnnnnnnnnnnnnnnnnnnnnnnnnnnnnnnnnnnnnnnnnnnnnnnnnnnnnnnnnnnnnnnnnnnnnaaagctagcaactttttaagtgctgaagaggactgtgcagaaatccacccagttaaacatgaagctggccttttaaagttagcccaacccttttttgtttcacagtttagggtctaacaggaactaaaggtagaactttggtagttaacagcatcagtcatggctgaactacacctgctgaaggctcttcttaagtggaaataatcttcatggggctggcccgtgaaaggcatggccccagcttctccctttcacctcagaattgtcttcggatggtagccactcagcccattcctaaaggccatgagattttcaacacttatgggcaaatggctnactggcaactgattcatatgtacggttttgttgaaccatatcctgacaacacagatgacacagctgacattcagatggtgacagttcgtgaggcagcattacagggaacaaaaactgaagctgaaaggcacctagtgtacgagcgctgggatttcctatgcaaactggagatggtaggggaagagggagcctttgtgatagggagggaggaggtgctgactgaagaggagctgaccaccacactaaaggtactgtgcatgcctgctgaggagttcagagagcttaaagaccaggatggagggggagatgataaaagggaagagggcagcctgacgatcacaaatattcccaagctcaaagcatcgtggagacagctgcttcaaaacagtgttctactgactttgcagacctatgccacagacttaaaaactgaccaaggtttactcagtaataaggaagtctatgcgaaactcagctggagggaacagcaagccttacaggttcgctatggtcagaagatgatcttacatcagttgttggaactgacaagttagcagtttccctgttccctgaaggaacagcaataagaactttattctaagctaatactcattgatgtttgaaaaagagg

SEQ ID NO: 356862 - DNA, 1254 bp, Homo Sapiens
  misc_feature (137)..(137): n is a, c, g, or t
  misc_feature (884)..(884): n is a, c, g, or t
  misc_feature (899)..(899): n is a, c, g, or t
  misc_feature (969)..(1078): n is a, c, g, or t
  misc_feature (1124)..(1205): n is a, c, g, or t
  misc_feature (1246)..(1246): n is a, c, g, or t
  misc_feature (1251)..(1251): n is a, c, g, or t
acagaaaataatctgttgggtaaaaaagggaagccaggatattcccaagaaggcaaaaaattcaagaaccaagctaaagggccatatttttaacacttctctcaaaaattaatttaaagtttccattggcacaatcncaggatcagtagtgagtcttaaaaattaggaatggcatagacccaagaccttcaaagtttatagacataatgaacagatctactagttgaattaaagggagaacttacctggtaaaatactgtcttaaacaagctctagaaaaagatgaattgcaagtcagatttaatcagcagatataggcacataacgcctacaatacaaactccttaatatcaaaagctctgtcttacttatcttcataatttcataaacacctagcccaagcattatgcttgcttaatagatgacccataaatattagtacaatttagttgagcaagtaataggagagacccggggggaaaaattaaggcacaaagaaaaatagagttaggactggaatgacggacgactgaaccaacataataagagcaagcacacagccattccccatcagttgcagctgaatgaatcagccctttagctaactgtccatgaagaaatctgataggtaagcaatgctaaaaaatttctagaatatcacttagcatttgcaatgagttccattcaaaatatattcaattttcctttgtgatgtttttctttgacctgtagggctcacaagtgtgttgaatacccaaaaatttggaaattcttgcagacatcttttttccactgattcctagaggaagtgttgttgtgatcagcagacacatatttctatatgatttcttttacttgaaaattgtggagatttgttttatggnaccaaatatggtctntcttgctgtgtattctgtgagcacttccagggtgaagtttcaataagtaccgaccaggtcacgttgattnnnnnnnnnnnnnnnnnnnnnnnnnnnnnnnnnnnnnnnnnnnnnnnnnnnnnnnnnnnnnnnnnnnnnnnnnnnnnnnnnnnnnnnnnnnnnnnnnnnnnnnnnnnnnntcacttattttggtttatgctttacatattttgaagctctgttgtnnnnnnnnnnnnnnnnnnnnnnnnnnnnnnnnnnnnnnnnnnnnnnnnnnnnnnnnnnnnnnnnnnnnnnnnnnnnnnnnnntccaagctatattcctttttttaatttccttttgcttgatntttanata

SEQ ID NO: 356863 - DNA, 1174 bp, Homo Sapiens
ctagtaattttgcaatctacctaataagtacctaaatacgctgaaatggaggttgaatatcctactgtgtaacaggtcagaatttcaagctctgggtaataactgctgatattttttctaatttcaaatttacctcttttggctatgtcttgccaagtgtgtatgagactagactttacaactgtctttgatggcattttcagaacaataaatgtcacaatcccttctatagccccctacagtgatctcttcaaggtcaactgcagtgttgcttccctccccctatagggctggaatctgtctaggagccctctctcggaggccacagaggctgggggtagccattgtgcagtcatggcccgggggaaacttgccaaccttcgtgtcaggtgctgtgtgtaagtggagaacttggggatagaggaggaagctcctcgtggcccttccaaggtgaggcaaaggcatctggacttgttccagcccagcccaccgggtgacatcaccgggcagggaggggtgctggtggtggttcatacggagtaagctgctctgcctgtgtgagtggctcctgggccctaaacaggcacctttaggccatgggtcactcaccgtgagccatcaatgtgctctggtctgacatggtttctctctgtcttctagtctagacctagtttttttgttctgttccccacgtatggatatagtagagattgttgtctgtgaaatttctcttttgtagattttgagttttcccttgtagtgtaaagaatgatcactttctgtaacaataacaagaccactttttaagatttatcctgtttgttctttgttgattgaaacataataattgttaaaattctctacagccttctttttcttccatagctaatcttccttctaatagtttttgctttctgttttgctgttgttgctttgcaaagctttcccctcatagcctgtacctgttatcaatataaaataatcttcctgttgaatgcttcatgacttgaattctactttgataaaaacattgccatactgctttttatcttgatgaattcatctggcattgctttgccttatcatctcatctggagtttttaaatgccatttgtttcagttgtctttaacaacataataaatagactttgccatttaccaggcaactaccgcg

SEQ ID NO: 356864 - DNA, 933 bp, Homo Sapiens
ctttttttaaacacttgttaaaaagatataaaactggttgaccgggaccttcttttaagaaaaagtccacaagtcagaaatgtttaaaagaagggcatccaaggatgccccaaaaagtcgtggaactcttggtaactccctggaagtagtagtgtaaggcatgttacttttaaccaccattttgttttgaaactaatgtagagatgcctgatccaaaacaggtgtggagaatattgaacggctcagaacccgcgtcccttacttaacacaaatccgaatctccctcatccatgatgcgtccattggatcactcgctggtggtcactgtgtggcagttactaggggaattctgcctctgactgttctttttcttttggtctttaaacaccctgtcgtgggatgtgctcactgatttgtggctatgttgaaggtatcacttgtcttgagggttttcaatatttcaggatcatgctggtggcaaaaggactccatgcctctgtggaatcatgtccacagggggacctgcctcccgtgatgtcccacctttccttcaaggtctgtcatatgagtcctccccttttacaacacttattatggtatttttcaagttattcttcttagatttgcagtacctactgaaatttgtgtttttatagttgaagttaggaaaatgctatttgatttgtaattagatatttaagtcacttgtccaatgatgtgtatgtctaagcctcatgtaccgatttgaagtcagacttaaaaatgtatttacagattcacttgagactttttaatcggttcttcaaatatttcatgtttacattaaaaatttccagagaagcataaaagtattcactttcctgccttgtcatttctggaaagattttggggagatattttattgcatattaattaataaattgttctactagg

SEQ ID NO: 356865 - DNA, 1006 bp, Homo Sapiens
  misc_feature (41)..(41): n is a, c, g, or t
  misc_feature (171)..(171): n is a, c, g, or t
gattcggaattgtgttaagtaagggacgcggcttctgagcngttcaatattctccacacctgtttgaaatcaggcatctctacattagtttcaaaccaaatggtgttaaaagtcacatgcttacactactacatacaggagtaacaagagttcacgacatttggggcatcntgcatgcactcctttaacattctgactagtgactctcttaacagatgtccgctcaccagttcatacattttacaagcctaaaaataagtgatatccttctactaaaaaaatgagcaataaaaaggtttaattatcagaatcccctatacattttggaaattaacttttaaaagttcagcaaaacattaggtacttaacaacatgtatgtggatctgtacaatagtttaaatttgtaagaattactcccatgtctcaggaataatttcctcgagtcccgagagtactgaacctcagtttcatcaccgtcttaaattcagacttcattcatgtaaactgggaaactcgaatctcctatttagtgaaaagagaccacggtctttacagtgcagtaaccattcattatcctgggggagggaacaggcggaaacggagctgaggccgaggcttttctggagggcaccagcacatttaaactcacagaaggcacttgagggctttgaggggctttgcaaccaatgttttccgtgacaatgggaaactttaaacaactgtacaaaggtggctccaacaccatgaagcttcctatttcactcaaaaggccacattcagtatataaaaatggggtacattaagatgctaataaattaaacaatttataaacatttaaaattatagatatcttacaaaaacgtgataaaaattatttcttcaaacaggcaataaaacagtataaaaggtctcttaattagcacaaactagctgggagagggagggaaaggaagccttagacctgagatctaaaagatcccgggaattccggaccgtaccagcctg

SEQ ID NO: 356866 - DNA, 902 bp, Homo Sapiens
tttcccgaaaatccatttaaaacggaaatctgttttcaggaaaagttccaaggaaaaagggccagttttttcaaaaacttggttcaggagaagggagcataagtttacaggcctacaggacgtacccaaaatcctgctgctgggaaaacccacaggcatgttatctattttttattttaatagggttggtgcttatcttctaataagatttaaatgtcgccaaactgtagcccaaataatataatttataatttacaaattgactaaaattgggtatagtatggtatttgaaagaataagcatatgcttctgtttattaaaaaaagaaaccttccaatgtccaaaactgctaaccctcgacgtggccgccaagttagtcgctccttgctaaccggtgagtgaccgcggccccgagcctggggctggacgcaggtcccaggacatgctgctcccttgtgtgagtgaccacggccccgagcctggggctggacgcaggtcccaggacgtgctgctcccttgtgtgagtgaccacggccccaagcccagggctggaggcaggtcccaggacgcgccgctccctcatgctgcccgggcccttcctccaagaccctacagagcctgaggggcaccttggcttccgcctgtgctagctttgccatgtcatctggaataatacttgaaattttgatttttggaaaaaaaagttttttatcttttgttgaaatcacctgttatccttgtttgtaaactgataacttttttgcttcttctcaggaatacagttttcaactgttgtcttgctcttgatagaaactgagaagcagcaatctgtatttgtggaggaaagtcctctcttttgcatattctaataaactgagccgcgtttgctccgtcaaaaaaaa

SEQ ID NO: 356867 - DNA, 420 bp, Homo Sapiens
  misc_feature (214)..(214): n is a, c, g, or t
acgtgctgcctccccttgtgtgaagtgaacccacggccccccaaaccccagggctggaggcaaggtcccccaggaagcgcccgctcccctcaagcctgccccgggccccctccctcccaagacccctacagaagccctgaagggggcaacccttggttcccgccctgtgcctagctttgcccatgtcatctggaataatacttgaaattttganttttggaaaaaaaagttttttatcttttgttgaaatcacctgttatccttgtttgtaaactgataacttttttgcttcttctcaggaatacagttttcaactgttgtcttgctcttgatagaaactgagaagcagcaatctgtatttgtggaggaaagtcctctcttttgcatattctaataaatgagccgcgtttgctcctccgc

SEQ ID NO: 356868 - DNA, 903 bp, Homo Sapiens
  misc_feature (61)..(61): n is a, c, g, or t
  misc_feature (591)..(599): n is a, c, g, or t
  misc_feature (771)..(780): n is a, c, g, or t
acgactgcaaggcaaaaaaatacttaaaccattggcctttaagttctttgcttggacccanctgagaatagacctaaggtctttggggtgggtccggtattagcatttccataagtactttcacaagcttttaatgggactcgtgaagattgctttaaattttggtattgaaacaaacaatacattttgcactgtagtaatgggagcactaactcttacaacagtctagtgaatcgttttaaagaatcagtctcagtgtacacattttgaaaagattgtttcctgtgctttacgatagcttagtgcaatgtgcacttctgttttacttgccattttcctgctctgttttctctgtgacatgaagcaacagaaactgagatcaaagttaagattatatcctgtttgtagtatcagatatttttctgtgtacaattataggattgtaatctaaactggaatttttaggcagtaagtcaccacaaaatgttttagataagacacaataaaattattataaataaaagcttaatgtttgtaaaaaatctcttttttagtatttcttttttcacatgaaagaagtggtggctgctnnnnnnnnngctacagtgtttattaagggtctttttgatttatgtaaatatttgtaaattggtcagtgcctgtaaatttaaatataaaaagtaaccttgaaaacagttttaactttttcaaaagaactatgtccaacattttttagacctgctgtagtacagttttgtacctctaacgtannnnnnnnnngcagaccaaatgctaaaacttttgcttttctttgacttgtaaaaggtgcacattttcattttcttccttaagttcaaatttttgtatgatgtcaaatgcaataaaatttatatatgcgacatt

SEQ ID NO: 356869 - DNA, 1414 bp, Homo Sapiens
  misc_feature (281)..(291): n is a, c, g, or t
  misc_feature (440)..(483): n is a, c, g, or t
ttccttttcccgcgacagagtccccccccacacaccagaataatgttgagagggggggtgtggccttcccgtgggcaggggggttgtgcgcctaaaccgggggagacacccccataaaccccgggggttcggcttccccccaaaagaaaattccacttttggattgccaaacaggcatttcgcccttttttaattgttaaaggggaatttggtggcaaaataaggaaaatatgggttggataatatagtgccctatataacctctcaagtcccaaatttgnnnnnnnnnnnttgtcaagccattgacagcaaaatatgtactttagcagcatattttatatgggtaaacagtaatagccagttagacacttcatttgtgatttgtcctaaaaatagaaaatgctttttattttcctgagtccttggcaaacaaaaaacannnnnnnnnnnnnnnnnnnnnnnnnnnnnnnnnnnnnnnnnnnnctgggacaccctcacagttcagaacgttgtgtctcactgtcagtttttacatacagagatgaacaaacagcactggggccaattttcaatgactgatcaaatatggcgattgaaaataaaacacccatcatctacaaagttgctcaagatgaaagtttcttacagtgctataaatgcaatatcaatttgaattgttgtccatacaaaagtatgaatttctattccattagtaatactgaatgattaataccttaacagcgataaaatttttagaacatttaaaaaatacagaggattccagttttacatcatacttctgacggattatcatactttctattttgtctgcaaaacttttacagagtacagtgcattgacatgataaaaccaaggcacaaaaatacagttacgataagtgtatataaaccctagcactttgtgccaattttggaaacagatcataaagtctgaaaaattaccacattctatttgattagtgaacaattaattgtgcagtaaatagactgttaaccaccattccattattaaatatatggctatcactatacaggttgtggataattcaaaaatagttttaaatattaaaacctgtaatatctaggtggtcaacgcagatattgagccttacgttatctaaataagtttccatttaatttgcaatccacatggcagttagcaatttttaaactatttccattacataaatggtggggtttattctaaatgttaaatcctttccccttacaaaagacagaagatttacaagaagataaccaatataagaagtgcatagacaacgataataaaatccaaattggactcaaaggttgaagtctaatctactgggacattctcttaatttagggtgaggagcaacacattcctgtgatgattcattagtttcttaatt

SEQ ID NO: 356870 - DNA, 964 bp, Homo Sapiens
  misc_feature (12)..(12): n is a, c, g, or t
  misc_feature (14)..(14): n is a, c, g, or t
  misc_feature (16)..(16): n is a, c, g, or t
  misc_feature (18)..(18): n is a, c, g, or t
  misc_feature (21)..(21): n is a, c, g, or t
  misc_feature (35)..(35): n is a, c, g, or t
  misc_feature (40)..(41): n is a, c, g, or t
  misc_feature (43)..(43): n is a, c, g, or t
  misc_feature (51)..(51): n is a, c, g, or t
  misc_feature (54)..(54): n is a, c, g, or t
  misc_feature (59)..(59): n is a, c, g, or t
  misc_feature (79)..(79): n is a, c, g, or t
  misc_feature (83)..(83): n is a, c, g, or t
  misc_feature (94)..(94): n is a, c, g, or t
  misc_feature (103)..(103): n is a, c, g, or t
  misc_feature (106)..(106): n is a, c, g, or t
  misc_feature (127)..(127): n is a, c, g, or t
  misc_feature (174)..(174): n is a, c, g, or t
  misc_feature (467)..(467): n is a, c, g, or t
  misc_feature (623)..(623): n is a, c, g, or t
  misc_feature (721)..(721): n is a, c, g, or t
ggcagtagaatngntnanccnggaggtagaggctnagtanncnaagattcnccnctgcncttcagcctggtgactcagncganctcgtctttgnaaaaaacanagncagcccagaaattcagtcctngtgaatgtctaaattatctgacacagatatgctaggcttacccagtnacaccaagttgctatagttctctaatatcacatctctgtacaaattcctctgatatgagttcaggcattcccattcttcctgagaaaagtctacagccacatctctgaacatcaccaaatcacgagccatgattttagaactgctagaactggtcaattttcctcaaggttcatgtacttcagaagcagggtccacagacaccagagagggaaccggcttttagaagagcagcagcgattcgtttctccttttcaagcgccttctctggaaactggcagggctggggaagcangcagagttcagtacaccccaggcttttcttaactcgattggaacccacactccacgcttccctggccccaactaaccgccacccaactcagaggatagcccagccctgggagtcagcggcgccagaatacgggagagcgcctgtctccgtcgcganatgtagcgcgcgggggggcggaggcaagtcccgcagctgctccgggccgggaggggcgcgtggggccgggtctcggcgggaatagtcgggccgggganacggagccagaggggccgcagtgtccctcgcctcaggcctctacctgtaatggccgccccgtgactgaccagtgccattaaagataatccaggcctgctcccctgtggacactgcggtccaaaatttaaaaaaacaatattccgcctttttatttttcatttggttctacggctcggaaacaggcggaggctgcgagccccgccccgcccccagcgacgcctcaccggaacctttggaaatcg

SEQ ID NO: 356871 - DNA, 740 bp, Homo Sapiens
  misc_feature (281)..(281): n is a, c, g, or t
tcctaccttaagattttaacatcttgtaaatattaatatttgaaggggagaggaaaaatacatttgtagtagaaatattccctctaacaattctgtttaactagtaagttttttttaagttatcttccatgcctgcttccctagtctgaactccacattccagttgtcagaagaatgaatggatttaaattttctaatcattattttgggcccatgttagcagttgaaacaattaagttcctcactctttcctgcttttaggatgattttagactgtgagnataaaatcaaccctttctgtcagcacagaattgaacatcgaatggagcaaggtctacactctcagcctgtagctgtgctaatgttaggattgaattgttctattaattccctcaagagacccacagcctcaaaagagttgcttattatccagatgtccgaaattcagaaacccaaagtcaggcaaagaaggaaactgagataatgatttaatttttttaagtcactgcaggatttctctcaaagaaaacatctgaaaatggttgagaaagtagttccagatcattaactattttacagagggactgaaagccagggaaaataaagaacagaatgatagtagtatcttgatattaaatttgcatcagaaatgagcaaaatatgtcaatatgaaataatttgaaatcaaattcagattcacatgtatagtgcatagttcaagaaataatgcttactcttgt

SEQ ID NO: 356872 - DNA, 1170 bp, Homo Sapiens
  misc_feature (172)..(181): n is a, c, g, or t
  misc_feature (559)..(559): n is a, c, g, or t
  misc_feature (599)..(609): n is a, c, g, or t
  misc_feature (616)..(616): n is a, c, g, or t
  misc_feature (653)..(653): n is a, c, g, or t
  misc_feature (669)..(670): n is a, c, g, or t
  misc_feature (681)..(681): n is a, c, g, or t
  misc_feature (739)..(740): n is a, c, g, or t
  misc_feature (765)..(765): n is a, c, g, or t
  misc_feature (788)..(788): n is a, c, g, or t
  misc_feature (830)..(832): n is a, c, g, or t
  misc_feature (849)..(850): n is a, c, g, or t
  misc_feature (868)..(868): n is a, c, g, or t
  misc_feature (874)..(874): n is a, c, g, or t
gggtagaagataggggtaatggtttttccgcccaaggcttgggttcaaattctgggcttaaaccatttttcccacttggctttcccaaagtgtggggattacaaggcatgagccatggcgtctgggctggggtgattctttatctgacatagaggttgggaaccagaccacnnnnnnnnnnttaataaattacataacttacaaattagtaagaaagatatgaccatactaatggaaaaagttaattcaaaaacttttgaccttaaactaactttttggataataggcttcctgaagttcaagagtgacatattaggcttatattaggcttatttgtaatgtgtgaattatacaggaaacattgtcaagtgtgaggtggtgtttagcttcctttgggttatactgatagagatttgttgttaatatgtgttccaggattgtatgagagttctaaaattctgatatgtctgaatatatgtggtaaggattatgttaaattgtggtaagccacagaaatagccacatttgtcaactgtggctttatggctgtcttaagacntttgtcatccataattgatgttttgctttgatccttctcnnnnnnnnnnngtgactnataatcagctacagtccaaggcttacttctttggagntcatgaaaagaactcnngaatgcaggtntctggtaactttggagagtgtgccattggattagacagaaaacttccaaggcactaanngaaaggctgatgtgttcataaagangaatatgaagtagagcaggagtngattacatggactgaaatgaactaatggaagactgaaataannngtatggcttttgttgtnngaaatattgctacttctntttgtnttttcagagtctgaataatctttttattttgagctatttatagccttgaaatacactttaagtgtattgagtattctaatttctccagaatttgtaaactatttatgaatattcttaattcatggcatttgtctgtataaagttaataaccacgttttcttttgtaatagggcacaattgaaaccggttactttctcaggactttgactgaaatggccttgtgaaatgttctagcaaagccaatctaggagagtctatatggacaatgattcttgttgcactttgtgtgggtaatc

SEQ ID NO: 356873 - DNA, 1221 bp, Homo Sapiens
  misc_feature (130)..(138): n is a, c, g, or t
  misc_feature (183)..(476): n is a, c, g, or t
  misc_feature (1095)..(1103): n is a, c, g, or t
acgcgtccggaacttcaggaagcctaatatccaaaaagtcagtttaaggtcaaaagtttttgaattaacttttttccattagtatggtcatatctttcttactaatttgtaagttatgtaatttatcaannnnnnnnngttgttctgtttcccaacctctatgtcagataaagaatcacccannnnnnnnnnnnnnnnnnnnnnnnnnnnnnnnnnnnnnnnnnnnnnnnnnnnnnnnnnnnnnnnnnnnnnnnnnnnnnnnnnnnnnnnnnnnnnnnnnnnnnnnnnnnnnnnnnnnnnnnnnnnnnnnnnnnnnnnnnnnnnnnnnnnnnnnnnnnnnnnnnnnnnnnnnnnnnnnnnnnnnnnnnnnnnnnnnnnnnnnnnnnnnnnnnnnnnnnnnnnnnnnnnnnnnnnnnnnnnnnnnnnnnnnnnnnnnnnnnnnnnnnnnnnnnnnnnnnnnnnnnnnnnnnnnnnnntagaactaaattttaaacaaacaattacccatattctcctttgattttgcttattcacattaaccctttattctatctggaacttatctggagtacaactcttttctcaaatacccccccggtcctagaaccatggggctcctcccttaccctcaaaggccctcctctgccaacgattcccccaatgggccgggcaagggaccggcaggggcaatatcccttcccactttgacccctttctaacgccattccgccaccaacctcgccttacccttgtagcacctttccccgctccccgtataccgcagcgcccccgtttggcgggcattggccccgaaccccccacacccgtttcctcctccccctgccacattcatatccctttttcaccctgcgccttgtccccccccattgtacccccttcccgtttgcccctatgcctctttcaccgtctcccgcgttgtctccctttcccacacaccacgtctcctcgattagccaccccacgagacaccatcgcgcgctgcgtcacccccacacatttccccctcccgcgtaacgccacgtgcccgatgtcgttgtgaacaccgcccgcatttaatatagctcccctactcgnnnnnnnnnactgtatactccccctccaccttcttactctcacccactccgcgccgatcagactggcgcacaacccatgtaatccccggcgcttatgtcactccacctgagcacacagagccccgca

SEQ ID NO: 356874 - DNA, 700 bp, Homo Sapiens
  misc_feature (102)..(157): n is a, c, g, or t
  misc_feature (279)..(297): n is a, c, g, or t
ttattctaaagtacccagaaccgtgtttgagtgctgacaccatatgcaacatggggcatccgggctggagtgatccagttttttagttggtggtggcgatgnnnnnnnnnnnnnnnnnnnnnnnnnnnnnnnnnnnnnnnnnnnnnnnnnnnnnnnnacattcattaagaaccctactgaaaccctaggtgaaaaaaggtgtgccttctgttgccacatttgacccaccacaggaatcactggaatggacttctatttataatgtattaagtaactggnnnnnnnnnnnnnnnnnnngtttgattgacaccaaaaaattaccttggcacaaatgccagacctgtgaaggtcagaggcccgatgcttttcccaggagggagggaactttttggttgtctgtggcaattcctctgtacagattgtaacgttttaaaaatttcccttcaccccgtcacttgaatatatgttcatagtaatttgtaagatacttcttttccttattttggttgcaagacccttccgaacacattcctggataaagtattttgcactatttaaagacaacccatatggatgaagtcaggatgttgcaatatgatggcgtaacagtgctcatcgttgtacctggaatgtaactaatcaggttaaatgtactattttaaaattgaaaaataaattttcccatgagcatgttttaatg

SEQ ID NO: 356875 - DNA, 1081 bp, Homo Sapiens
  misc_feature (1017)..(1017): n is a, c, g, or t
  misc_feature (1020)..(1020): n is a, c, g, or t
  misc_feature (1037)..(1037): n is a, c, g, or t
  misc_feature (1039)..(1040): n is a, c, g, or t
  misc_feature (1042)..(1042): n is a, c, g, or t
  misc_feature (1050)..(1050): n is a, c, g, or t
  misc_feature (1055)..(1055): n is a, c, g, or t
  misc_feature (1057)..(1058): n is a, c, g, or t
  misc_feature (1061)..(1061): n is a, c, g, or t
  misc_feature (1064)..(1064): n is a, c, g, or t
ccgggatcggcgcgcacccggccagcgcgccctcgccagctgcgctcatgagttctgggccagctccccagaggcctaggcgccgccgccgcagagggcgcgggcaagacaaaggaggcagacaaaggcgggcgcacagtcaagccgtgcgggcaccgggcgaggcaggcccactcctcccggtagcgggaaggatgaccacgctcacacgacaagacctcaactttggccaagtggtggccgatgtgctctgcgagttcctggaggtggctgtgcatctcatcctctacgtgcgcgaggtctaccccgtgggcatcttccagaaacgcaagaagtacaacgtgccggtccagatgtcctgccacccggagctgaatcagtatatccaggacacgctgcactgcgtcaagccactcctggagaaggtgagggtgcactgggctccccagccatctcaccccatgctcacccccgtccctgtgtgctcacagtccaactctgggatggggtgaagctaggactctgtggggtcttcatggctccaatacccagaagcctgttccctgcactctggagaccatcccaacccaggggcaggccccaaggcatgcgggccatgttcagggtgccttgggcctgggagcccgggttggagctggctctaagtaggggctgccccagagggttcggggttcttctcacatccgtcccctgttctccacgctaaacgttctgtctgagctgagcccctcagggtttcttccccatctagtcctgatctcagacttcctgggaccttccctatggggcccgggcattctctcagcctacaccactcatgctggagggtgccggcttctcaaactcgctatctggcctcttggggaccccagcctagcagctgagcagggctgtgagtgggccgtttctcctccttccttgggcaaagggggtggaggcagggtggtgtaatcggggtggggtgctggctctgcagtgggggttctctctttgcanaangatgtggagaaaatggngnngngattttgntaaanannacnccngtggagaaattcttttt

SEQ ID NO: 356876 - DNA, 1076 bp, Homo Sapiens
gggaacgtcaccgagcggcgccgaggccccgggttgagcgggaggcgcgatcggtccggtcggtggctccccgcggcggggccgggcccgatctcgggcgggaaccgagcgcagagccggtagcgggaaggatgaccacgctcacacgacaagacctcaactttggccaagtggtggccgatgtgctctgcgagttcctggaggtggctgtgcatctcatcctctacgtgcgcgaggtctaccccgtgggcatcttccagaaacgcaagaagtacaacgtgccggtccagatgtcctgccacccggagctgaatcagtatatccaggacacgctgcactgcgtcaagccactcctggagaagaatgatgtggagaaagtggtggtggtgattttggataaagagcaccgcccagtggagaaattcgtctttgagatcacccagcctccactgctgtccatcagctcagactcgctgttgtctcatgtggagcagctgctccgggccttcatcctgaagatcagcgtgtgcgatgccgtcctggaccacaaccccccaggctgtaccttcacagtcctggtgcacacgagagaagccgccactcgcaacatggagaagatccaggtcatcaaggatttcccctggatcctggcggatgagcaggatgtccacatgcatgacccccggctgataccactaaaaaccatgacgtcggacattttaaagatgcagctttacgtggaagagcgcgctcataaaggcagctgagggggcacctgccaccccactgatgcccaaactgtcagactttgggggatccccgcctagggcagtgctgcatggctgccctgattccaagtgctcttatcgcctctgtgtgtggatcgcccgccccagcccggggccgctcaggtctgcttggaggatgcctcccccaggagggcagtgagggatgccgcaacctcgacttctcagcctcctggggttccgccggccaacactgtctgtctcaaatactgtgctgtgagttgtttcaataaaggggccccaagggctgggctgagctgagccctcctt

SEQ ID NO: 356877 - DNA, 1096 bp, Homo Sapiens
  misc_feature (773)..(773): n is a, c, g, or t
  misc_feature (954)..(962): n is a, c, g, or t
ggtccggaattcccgggatctgactggctgggaacggaccttagcagaacttaaaaggcgccttctgtgtgccactgtcactgccaacttggtgactcatttaaaactcataaccagccggtgaggtcggtacttcgctcctcctcattctgcggaggggaaagcagcacggaaatgccctgtgactggcagcggaaaaggcgaccaccgcttgtgttttacgttgttaaagggaagctggacgagataataaagatcttcagtttagatcttggaggcatatcaactgtggttctaaatggctatgatgtagtaaaggaatgccttgttcatcaaagcgaaatttttgcagacagaccatgccttcctttattcatgaagatgacaaaaatgggaggcttactcaattccagatatggccgaggatgggttgatcacagacgattagctgtaaacagttttcgatattttggatatggccaaaagtcttttgaatctaaaatcttggaagaaaccaaatttttcaatgatgctattgaaacatacaaaggtagaccttttgactttaaacagttaataacgaatgctgtttcaaacataaccaatctgatcatttttggagaacgattcacttatgaagacaccgattttcagcacatgattgagttatttagtgaaaatgtggaactagctgccagtgcctcagtcttcttgtataatgcctttccatggattggcatcctgccttttggaaaacatcaacagctgtttangaaatgcagctgtagtctatgattttctctccagactcattgaaaaaagcttcagtcaacagaaaggcctcagctacctcagcattttggtgatgcttattttaaaaggaaaaagggatcaagggaaaaaatgaacccttcatctacttttctccaaagaaaaacctaaatttttctccannnnnnnnnaactcatcaatgggctgggaacggaaactaccacccaatggggcttacggtggggccggaatcttttttcctggcccctttatcccaaataattccagggacaaagtttcagaaaaaagaattggattttattt

SEQ ID NO: 356878 - DNA, 1453 bp, Homo Sapiens
ggggccaatgggagtatggcagggctggagggagtgcctgggtctcagggctgctgtggagttcgcacctccagctcgggccgatgtggaagctttggagagctgaagagggcgcggcggcgctcggcggcgcgctcttcctgctgctcttcgcgctaggggtccgccagctgctgaagcagaggtggccgatgggcttccccccggggccgccggggctgccatttatcggcaacatctattccctggcagcctcatccgagcttccccatgtctacatgagaaagcagagccaggtgtacggagaggtacagccccgacgggccccgggcagggagggccgccaggctggcccgggctggccagggccttcctggttggacttatggccgcccctgggccgactagtcgggacctctccgtgtgcccggctgcccctttgagggacaacccgcttcccggggtctggaaaggggagaagtcctcgacgccgtgcccccttgcagggggagccccgcccctgccggtgacccactccgggccgaggctccgaggcgatccagtcctgattttcccgctaccgctcgagctcttgctcctgcgcctgcgccgtttggctcgccagccgcgccgccacttcaggtccagggtggacgcatgccctcaggtgcgggcgtcttgcgagtcggcctcgcagctctgtggaagctgcacgcggcttgtcggaaaatcaaggcgttctgagttctagatggttaatagcaggttcttcggtgtctgcagtcgacgaacgactggtgtaggcgtttgctgtgagaatggagaatgcaggggaacgcccctgactgagaagcgggccctgggaaacgattgtgaacgcgtgaatgaattgatgactaaaatccgctgcgggggtcctacagcgcagatggtaatgccgttctgactggctgggaacggcaccttagcagatacttaaaaggcgccttctgtgtgccactgtcactgccaacttggtgactcatttaaaactcataaccagccggtgaggtcggtacttcgctcctcctcattctgcggaggggaaagcagcacggaaatgccctgtgactggcagcggaaaaggcgaccaccgcttgtgtatcttcagtttagatcttggaggcatatcaactgtggttctaaatggctatgatgtagtaaaggaatggcttgttcatcaaagcgaaatttttgcagacagaccatgccttcctttattcatgaagatgaccaaaatgggaggcttactcaatttcagatatggccgaggatgggtttgatccccgaccatttgctgtaaaccagttttcgattatttttgaatatgggccaaaaattcttttgaatcctaaaattcttggaaagaaaccaaaattttttccaaggatggctattggaaaactttccaagg

SEQ ID NO: 356879 - DNA, 974 bp, Homo Sapiens
  misc_feature (5)..(5): n is a, c, g, or t
  misc_feature (94)..(94): n is a, c, g, or t
gtagngcccgcaaagctgctgcatgttccaggcgctccccctgccgctgatctctcagctctgccaagctctgattggcagcctcaagttcctntgcagcttctggttcgagccaactgggctttgtgatcagcttccttccgttgttgtaattcctcaatcttgttcctgctgtcattaaacagagtctcctgttctgtctgcagacgccaaaaactttcttggtttctttttcagtttctcggagagcttagcaagttcctcctgcagcctggatgtttcggcctgctttgagctctctaagccttgcagctgttcccagagcaatctcttctcctctttctccatttcccatttcagctccacctctgccaacggcatgggggccaggacggtggggcacgggccccctgggggatccccctggccctcactgacagctgagaacttcccggcctctttcccatagcgttcctgcagggctgccacgttcttctgcaaggctgtgttttcagcctgtagcctcagcagctccccatccacgaggggcccagcttgggcaacccctgctcctgcagccccctccttcagttgctggttctcttgctccagctgttccatctggctgcagagcttgctgaactcggccattagtgtgctgttctgcaaacggaagtcctcctcctggctgtgcagctttgcctgcagcatctcattttcactcagcaatacctcgacttcctgagctttcttgctcttgctcagtgccttctgagctttgctgaactccttatccaagtaggcgaccttctgtcgaagactggtgagttcaacaccattcttgcgtagttcatctgaaagctggtagttgtttgtccggagttccaggagctgagcctgcatccgctgaaactcctccttcagcggacgcgtggtcgacgatatcccggaacttccggaccggtaccagcccg

SEQ ID NO: 356880 - DNA, 1455 bp, Homo Sapiens
  misc_feature (14)..(14): n is a, c, g, or t
  misc_feature (23)..(23): n is a, c, g, or t
  misc_feature (37)..(37): n is a, c, g, or t
  misc_feature (95)..(95): n is a, c, g, or t
  misc_feature (112)..(112): n is a, c, g, or t
  misc_feature (942)..(942): n is a, c, g, or t
  misc_feature (1028)..(1028): n is a, c, g, or t
  misc_feature (1121)..(1121): n is a, c, g, or t
  misc_feature (1403)..(1403): n is a, c, g, or t
  misc_feature (1434)..(1434): n is a, c, g, or t
cgccgctgccgctnccgtcgcanttgaggggcgagcncccgcgccgcgccgctgcagggacgccccgccaacgccactgccgcttcagctggatngctggatccatgagaanatgctgatggcgcgggatggcacggcgggaggacaaccacaagctgcataagagatggctccggcaccaggcattcatggccgagctggctcagaataaggagtggctggagaagatcgagcgggagggccagcaactgatggcaggagaagcccgaactggcggcctccgtgcggaagaagctgggcgagatccgccagtgctgggcggagctggagagcaccacccaggccaaggcacggcagctctttgaggccagcaaagcagaccaactggtgcagagctttgctgagctggacaagaaactccttcacatggagagccagctagcaagacgtggaccctggaggagacctggccactgtcaacagtcagctcaagaagctgcagtccatggaggtcaagtgggatgagtgccccgtttaggttggagattcagattgctctgacggttggcgttccctcgttcccacggcgagcttagggtctgatgcgcgtccaggtataacttgatgttcttaaatcgcggatatatcttttctccttcgcttgcatcactttcgcgccgtttaattgctcgacacttcatgtaccggtaaccccggtccccctcgattcacgtgcatacaatgttagtctcgatctttcaatttagatcatgattccacataaccgttagaagacaaaataccgatccaattgaagtggaggggttcgtctaaagtgacaacactgactattattcctactccccacacattctcggagtatcagattccacacccacgaaagtggataggcgacagatctcaatagtgagatgtatgtantattgcgtaagatccttgcacttaatattgcatctatctatgtggaactttggtactcaatattcttcgtcgttacgactttgtgnagcattagaagttaccattggatactataatggattatatatctggattcatccctcgtaatattatccgacgtttctctgagtgcgctcctntattttggctatgtatattaagttacaattacttcctcacatgctttgcgcagcgtgactgcgtattctggtcgtccgcgcgctgtcttgtgtaatggatgatacgtgtatagtctctggagcttgtcgatgtcacctgtatgcgatgccagtggcacgaggtgtgtatgtatgtgattagttagttgttcttggtcctctgggttatcgtgagctgtgactcctgagtcgatgtgtacgtgcgcatcgaagattacatagctgccgagtgtgcggcggcgntacactttcacactatcgtctatgtgctctnatttcgaggcgtgccttatat

SEQ ID NO: 356881 - DNA, 1684 bp, Homo Sapiens
  misc_feature (582)..(582): n is a, c, g, or t
  misc_feature (635)..(635): n is a, c, g, or t
cgaatagcccttcccccaaggccagaacccgtgggaaaccggaacccaggcgtctggcccccaactggggtaacaacctcccacgtcgtcccctagggaaaactgcgctgcactgggctgctgccgtgaacaacgcccgagccgcccgctcgcttctccaggccggagccgataaagatgcccaggacaacagggttagatgggacagagggcttcccacaaaacagtcaggcgcacgagagatggaaagtgcggtaacccgcaaagcctgaagggataggggccagtggtcgcgcaagtgaaggcagaaaggcccagtcctgtgggcgtggccttccctgatatcggccctggctcttctgtacaggagcagacgccgctattcctggcggcgcgggaaggagcggtggaagtagcccagctactgctggggctgggggcagcccgagagctgcgggaccaggctgggctagcgccggcggacgtcgctcaccaacgtaaccactgggatctgctgacgctgctggaaggggctgggccaccagaggcccgtcacaaagccacgccgggccgcgaggctgnggcccttcccgcgcgcacggacggtgtcagtaagcgttgcccccgcatggggngcggggctctgccgcgctgccggacgctgtcagcccggagcaggccctcgtggggggcggagcttgtctgcaggctcggacttggtccgtagacttggcttgcgcgggggggcggggcctattctcattgccggagcctctcgggagtaggagcaggaggaggcccgacccctcgcggccgtaggttttctgcaggcatgcgcgggcctcggcccaaccctgcgataatgcgaggaagatacggagtggctgccgggcgcggaggcagggtctcaacggatgactggccctgtgattgggtggccctgggagcttgcggttctgcctccaacattccgatcccgcctcctggccttactccgtccccggagcggggatcacctcaacttgactgtggtcccccagccctccaagaaatgcccataaaccaaggaggagagggtaaaaaatagaagaatacatggtagggaggaattccaaaaatgattacccattaaaaggcaggctggaaggccttcctggttttaagatggatcccccaaaatgaagggttgtgagtttagtttctctcctaaaatgaatgtatgcccaccagagcagacatcttccacgtggagaagctgcagctctggaaagagggtttaagatgctaggatgaggcaggcccagtcctcctccagaaaataagacaggccacaggagggcagagtggagtggaaatacccctaagttggaaccaagaattgcaggcatatgggatgtaagatgttctttcctatatatggtttccaaagggtgcccctatgatccattgtccccactgcccacaaatggctgacaaatatttattggggcacctactatgtgcccaggcactgtgtaggtgctgaaaaagtggccaagggccacccccgctgatgactccttgcattccctcccctcacaacaaagaactccactgtggggatgagcgcttcttctagccactgctatcgctatttaagaaccctaaatctgtcacccataataaagctgatttgaagtgttaa

SEQ ID NO: 356882 - DNA, 1845 bp, Homo Sapiens
gctggaccggtccggaattcccgggatccaccccgctggatctggcagccactcagcccttcgagctgtaggggaggcgctgcgcccccggccccagccgatcgggggctcctggcgctagcctccctccagagcgccgcaggagtccctcctgccgtctgacttgagtccctgctgctgcagtgcacgccccttcggcagccagggtggggcccagacccaacctggcccctcctgcccccaccccgcctttgggtcgctgacccccacgctgtggtgagggtctgagagctggtaccacggagcctgggcaacctcctccgcccacccatgcccaccccgcatgaggctgagaagcagatcacagggccagaggaggcggaccggcccccttcaatgtccagtcatgatacagcctctccagcggcccccagccgcaacccctgctgcctgtgctggtgctgctgctgtagctgctcctggaaccaagagcggcggcgcgcgtggcaggcctcccgggagaagcaagctgcagcccctccccagctgtgaagtatgtgccacgccaagtcctgaggaggtgcagagctgggcgcagtcttttgacaagctgatgcacagcccagcgggacgcagcgtgttccgggcgttcctgcggacagagtacagcgaggagaacatgctcttctggttggcctgcgaggagctgaaggccgaggccaaccagcatgtggtagacgagaaggcgaggctcatctacgaggactacgtatccatcctgtccccccaaggaggtgagcctggactcccgtgtgcgggagggcatcaacaagaagatgcaggagccgtccgcacacacgttcgacgacgcgcagctgcagatctacacgctcatgcaccgggactcctacccccgcttcctcagctctcccacctaccgtgccctgctgctgcaggggccatcacagtcctcctccgagagcctaggccgcccccagcagcacagaccccgccgcctcctacggccgactctgggttcccttcaggtgttgttgtcggcagggctgtcagggcacatgcctggccggctggggtccccacccgcggagacggtcctagacccagtggggagtgctgtgtctcctgggtctgcccacccgtggccaagcaggaactccaggtgcagggcgggcctccaggtgcagggcgggccagaagccccctcatcggcccgcagctggctggcccagtgctcctggctgggggctcttgcgtggtgagagtaggggtccccccaggagccatgctggacccatgagcctcgctggggcctcctccccaggcagccaatgggccccagacaagcctttggtggggaacagaacctccgcatcgtgtagttttgtgacataaggagacctcctacttgagctgtctgtaccccagaatcaaacacagaacctcagaaccagatttaggacctcagaatcctgcactcaaggtggcaggacccaatttctgttttatatgttcatgaactttaaacctggaaacatgtccttactaggtgttttatcaaaaaaaagttttcatatttatctctatccctaaccccccaaaaataggatgtcttattattgaagatatttttaccccccctttccccgactcacaccacccgtaaacccttgtcggccgccttcgcccccttcaaaaaagctttcaaaaccatttccctttggccccccgggaccccgctagggaaggtgaaccatgggcccaaccctgatctccgtacggaaaatcccgggtccattgcccaaggcgctgggcgactcccccacc

SEQ ID NO: 356883 - DNA, 1200 bp, Homo Sapiens
  misc_feature (630)..(630): n is a, c, g, or t
cggggaaccgccgagaaagtctcggccgccgttgagggaaggcgccggcccgggggctctcctcgcgtgctcttcgcctcggggggggcgcggcgctataaggccccctccgcgggaaggggcacgggagccgctctgctgaaatggggccccccttcgcaaaccacaaagcccaaggcgggccaacgaggtttatgcgctcggtgtaaagaaccccttggaagcgtaacgcccgggtgcgttaagagggaaggctccccccgcgggcgcaaatgggagcgcgggtcggttaagaactccggcgccaaacgctgtgcgggcggtttcctctccggaaaacgcggttggttggtgccgggaacccggcgctctccctcgcaattgctttccgtcggttggaaatgccccccttgcgccgggcacccaaccggggggaggctcccaagggggcttaaacctgtccactttggcggggaccaacggagatgggaaattaccggtaacgctcctcttccgtatagattggacgcccttgcgccttttctgtcgtgtcatacccaaccaaatgcgcctggtttttggccctctcggcgccttctaaacgccttcctttcccgcaaggcgccccanaccccagaagacgacgaaatggttcctccctctccggccgtgggaaccctcgggtccccgcaagggaaccccgcccgggacaccacccgctggccggtccccgctgggccctgtggacaacacagcctgcgtccaaaaaaggactgcgcgcccaaggcttctggaacctcccttccaggacctttggccgttgggcacaaatacctcatcaagcctgggggaaggggcttcaacctgcttttccccggaggcctgccaacggcccgccgccggcttttggttccacaggaacaactaacaagcaacaagcaacccagcaacaaggcaacaagggtttccgcttggggcccgctgaagaggctgtatcatgactggacattgaagtggggctcggtccgcctcctctgggccctgtgatctgcttctcagcctcatgtcggtggtgggcatgggtggccggaggaggttgcccaggctccgtggtaccagctctcagaccctcaccacagcctgggggtcagccgcgctcccgagccacatcgcgccgccgccggcccgcgccctcccgct

SEQ ID NO: 356884 - DNA, 1297 bp, Homo Sapiens
  misc_feature (838)..(862): n is a, c, g, or t
ggacccgcttcctgtgatttcctgggtgacaccccgaaggcgtttcatcaccaccaagtccaatggaagagccaccgtgttgggtgatggcaccttggaaatccgctttgcccaggatcaagacagcgggatgtatgtttgcatcgctagcaatgctgctgggaatgataccttcacagcctccttaactgtgaaaggattcgcttcagatcgttttctttatgcgaacaggacccctatgtacatgaccgactccaatgacaccatttccaatggcaccaatgccaatactttttccctgggaccttaaaacaatactggtgtctacagctatggggctgcttcacattcctggggagtggttttaatttgttttccttctccctttttgtgtggagccgagggaaagggcaagcacaaaaacagcattgaccttgaaatatgtgccccagaaaaaacaatggtgctgttgtggaaggggaggtagctggaccccaggaggttcaacatgaaaatgatttgaaggcccacccctcacattactgtctctttgtcaatgtgggtaatcagtaagacagtatggcacagtaaattactagattaagaggcagccatgtgcagctgcccctgtatcaaaagcagggtctatggaagcaggaggacttccaatggagactctccatcgaaaggcaggcaggcaggcatgtgtcagagcccttcacacagtgggatactaagtgtttgcgttgcaaatattggcgttctggggatctcagtaatgaacctgaatatttggctcacactcacggacaattattcagcattttctaccactgcnnnnnnnnnnnnnnnnnnnnnnnnngaacaacctacagtgtaggatttacatattaaaaagacacatttgtctaaaacatactctacagaaaaatttgtatctatgattatcatttgttaaagccttgcatcataccatattgttggttcagtaccacaaagagatcaatatattcttttcttccttttttgaaacatatatgctgtacatgttttaaagcaatatgaatgagaggttgtccttttagttactcaccactatagatccaagtgtgatttcaccttccgttacctacagatgaccctgagactagatccctggagttatgggcggagatattttgagagatgtgtttgtctgatgtaggatgccaagaaacaggacccaaggcaaaactgctcaactctgttaacttctgtctaccataaataaaggcatgtgcctagttttgatacaaaa

SEQ ID NO: 356885 - DNA, 1324 bp, Homo Sapiens
  misc_feature (43)..(43): n is a, c, g, or t
  misc_feature (45)..(45): n is a, c, g, or t
  misc_feature (47)..(47): n is a, c, g, or t
gcggagaacaggccagtgatgatgaaggatgtgtccgaagacntngngtctctctgctgaaatagaaaagacaatgtctgagatggtcaccatgcagctggataaagagttactgaggcatgacagtgatgtgtccaacccgcctaaccccactgcagtggcagcagattttgacaatcgaggcatgattttctccaatgagcaacagtttgaccctctttggaaaaggcggaatgttgagtgccttcaacccctgactcatctgaaaaggcggctcagctacagtgactcagatttaaagagggccgagaacctcctggagcaaggggagactccacagacagtgcctgcccagatcttggttggccacaagcccaggcagcagaagctcataagccattgttacatcccacagtctccagaaccagacttacacaaggaagccttggttcgcagcacactttctttctggagtcagtcaaagtttggaggcctggaaggactcaaagataatgggtcaccaattttccatggaaggatcattccaaaggaagcacagcagagtggagctttctctgcagatgtttcaggctcacacagccctggggagccagtttcacccagctttgcaaatgtccataaggatccaaaccctgctcaccagcaagtgtctcactgtcagtgtaaaactcatggtgttgggagccctggctctgtcaggcagaacaccaggacaccccgaagccctctggactgtggctccagtcccaaagcacagttcttggttgaacatgaaacccaggacagtaaagatctgtctgaagcagcttcacactctgcattacagtctgaattgagtgctgaggcaagaagaatactggcggccaaagccctagcaaatttaaatgaatctgtagaaaaggaggacctaaaaaggaaggtaaaaatgtggcagaaagagcttaattcccgagatggagcttgggaaagaatatgtggcgagagggaccctttcatcctatgcagcttgatgtggtcttgggtggagcaactgaaggagcctgtaatcaccaaagaggatgtggacatgttggttgacaggcgagcagatgccgcagaagcacttttttattagagaagggacagcaccagactattctctgcgtgttgcactgcatagtgaacctgcagacaattcccgtggatgtggaggaagctttccttgcccatgccattaaggcattcactaaggttaattttgattctgaaaatggaccaacagtttacaacaccctgaagaaaatatttaagcacacgctggaag

SEQ ID NO: 356886 - DNA, 1427 bp, Homo Sapiens
  misc_feature (968)..(968): n is a, c, g, or t
ctggagacctctgtccactgcccatggaggggcctggggctgggagcagtcccggtttagcctgaggtccccatagggcttcctcccctgctgggtttgggaagcagttagggagatagcgacccggagtttccccagaagcggggtgggagggtgtgcatgctagtgttggcgcgtatgcatgtgcatgagtgtgcaccgttcctaaagaaggggcctctggggctgcccaccctacctgccctgcctgcctgctgcccctcccagcctgccaagaaaacggtaggggagcatgatggggcctttgaggcagggtcgcagggacaagctcagctttaggcaccatctgttcccatcacgcctgctgctgtgacccgttttggaaaactggtgtgtaccgaggcgctgactgcacggctgaccgcctgctcgtgccttcattctgcagcggcatggtccctcccattctggctccacctgcagcctccctgggtggcctaggctcccccgaccaaaagacctccctctcatgatcactggtacctgggggcctgaattctggcccccggctccccacacagctgggactggcctggatggctgtcctgggagcccctgcccaccctgacggagctgggcctcccctcatcctctgtaactcccgccttcaccagactcaaggacaccctggccctgctgaggcatacagagcttcagcccagcacagaagcaagacaaaatcagtggctcttagagtttaagaaaacaagacagactctcagatgaaagatctgacaagcaccgtggccagtcacagggagagacttgatgtctggccttttaattcctcctctgccagggtgggtcctgggacctctaatgtgggcatgtcgtccaccccaggacgagccatcagggacagaccccccacccccaaggctgcagccacaccatgtttcaggcttggngctggggcaggcttgggctcaatcctgggcacccaggggcagcccacccctaacctggctcctacccaccttgcccttgaaggatgggcctgctgcacgtctccctcctccaccccataccacactggggggtctgagccacccccctcagccccgttcggctcagaccgacccccactccatccccagacctgcagcacaagtgcgcgggcctgtcctcccaggggcctgggcgactccatatgcaatcagtagcgagcagccgggccccacagaccctcatgcactctcttacgtgccattctccccagactttttttgtacttaatgtatgaaagatccaaactaatattgctgtaaaaaggagagacaaattaatatagcttattctataaatatatctgtatataaaggtttctgtatattgtatagagctgtgtataaactggatgtagaagc

SEQ ID NO: 356887 - DNA, 1490 bp, Homo Sapiens
aagttaagcgtgccgtcatgcaggacggagatgcgcacgcggtaggagccgtgggtcatgagggtgccgttgggcgtcagccagttgacggaggtcatggaggtgcccgtgcggcatttgagctcggcagccatgccctcggtgacgttgaggtccgtgggcggctccacgatgacgggcgcatagcaggtgaaatgcgactggtccagctccccaatgtagcgccccttgaggccggcgggcgcatgacagcgggcgcagcacgtcgtgttgctgggcaccgtctccttgagccaccagctcagccagagcacgtcgcagttgcaatgccaggggttgtggttgaggtgcacgcgctcgaggcggtgcaggggcgtgaagaggtcgtggggcagcgacatcaggttgttgtgggacaggttgagctcctccagcgacttgaggtcgtcgaaggcgttgcgctcgatggtggctacctgggcgtgcatgagccacagcttgcgcaggctggtgagaccctggaaggagcccgggcggatcaggtccagccggttgcccgacagctccagctcctccaggcgcaccagggccgtcaggttggggatgtccttgaggttgcacatgcccaggttgaggtagcgcaggttgaccagcccctcgaaggccgcctccgagatgtattccagccgcttgagctcgcccaggtccaggcgccgcagcgagggcacgcggttgaaggcgtaggaggggatgctctcgatggggttgttccgcagccagagctcccgcagcttggacaggtactcgaaggcctgcgtgggcaccgtggtcagccggttgtcaaaaagctccagcgtgttgaggctgggcagcccgttgaaggcgcccacctcgatcttgcgcaccaggttcttgctcagctgcagaatctccaggtgccgcaggtgcttgaacgtgtccgtccggatcacctggatgccgttctcttgcaggttcaggtaccgcgtgttgaccgggatgctggctgggacctcggccaggtctctccgtgtgcagatcacccggctggcctggttgctgcaggagcaggccacggggcaggaggtggccggcggggagccccctccggcggcagacgtcacggccactccacctccaccggcccccaggggtggggagaagagccagaggaagagcaatgccccgtggggccaggacatcctaccgggcggcagcggggggcacggggagccgcgggcacgcgccatcctcaatgttcatgctccgcgtggacgctggggggctcttaagaccctggcgatgatccagcccacaccctcttagccaaagggctggcccaaagcgcagggcctggatttgaggccgggggagcccgcagggcctgtgggagcccacggcacccaccccggcctccaggcctgctgctggcaagtctacctccgcatctccccattgaaaaattccggacc

SEQ ID NO: 356888 - DNA, 1536 bp, Homo Sapiens
gggcgcgtccggcagacggcacgttaacgtccaccaacgtcaaccggcagagacacggccagaacacaggcagtgggacgaaggcagccgggcaacaccaccggcctcggccacgcgtcaacgtctcgccgtggaccccgaggcgccggggcaccggcagcggcgggggcggccctgggggcagtggtggtgttggagggggcagtggcggctacacctacttcaccacggtgaccgtggagaccctggagacgcagcccggagaggaggccctgcagccgcgggggacggagaaggaaccgccagggcccacgacagacggtgtctggggtgggggccggcctggggacgcggccggccctgcctcgtcttctaccacggcacccgccccgcgctcctcgcggcccacggagaaggcgttcacggtgcccatcacggatgtgacggagaacgccctcaaggacctggacgacgtcatgaagaccaccaaaatcatcatcggctgcttcgtggccatcacgttcatggccgcggtgatgctcgtggccttctacaagctgcgcaagcagcaccagctccacaagcaccacgggcccacgcgcaccgtggagatcatcaacgtggaggacgagctgcccgccgcctcggccgtgtccgtggccgccgcggccaccgcggccagtgggggtggtgtgggcggggacagccacctggccctgcccgccctggagcgagaccacctcaaccaccaccactacgtggctgccgccttcaaggcgcactacagcagcaaccccagcggcgggggctgcgggggcaaaggcccgcctggcctcaactccatccacgaacctctgctcttcaagagcggctccaaggagaacgtgcaagagacgcagatctgaaggcggcggggccgggcgggcgaggggcgtggagccccccacccaggtcccagcccgggcgcagcctgaccgggacccctccctcccacagcccagcccaccttctgggaccacgcagggaattggggagaggtggcttccagccccatctggggctcggacccccagtaaggacagggtggggctccaggagcggagtctctgggatcctcgcctcacccccgccaatccccggtgacgggaggggacgtgggacccaggagaagtggcctgagttctccgcgtttcctcctcgctctcccaccaagcgttccgggcccgccgccttccaggggagagaggagctttctccaggggtgtcctttcccctcggccccaaacaccttccttttacggttcagtttttgcagtttgacgcccgtccctccctcccactcctccgccctcaaaactgaagagatggacacgtcgccagagctcccgtcccagcgcccggctctgctcccggccggcggtccctgtcgtcggcgcgggggggagcctccacccgccccagccccacctgccccacagacacttttgatactgaagggaggtttgcgtcaacgactacctgctctgtaattacttt

SEQ ID NO: 356889 - DNA, 614 bp, Homo Sapiens
tttaaagtaattacagagcaggtagtcgttgacgcaaacctcccttcagtatcaaaagtgtctgtggggcaggtgggacaggttgagctcctccagcgacttgaggtcgtcgaaggcgttgcgctcgatggtggctacctgggcgtgcatgagccacagcttgcgcaggctggtgagaccctggaaggagcccgggcggatcaggtccagccggttgcccgacagctccagctcctccaggcgcaccagggccgtcaggttggggatgtccttgaggttgcacatgcccaggttgaggtagcgcaggttgaccagcccctcgaaggccgcctccgagatgtattccagccgcttgagctcgcccaggtccaggcgccgcagcgagggcacgcggttgaaggcgtaggaggggatgctctcgatggggttgttccgcagccagagctcccgcagcttggacaggtactcgaaggcctgcgtgggcaccgtggtcagccggttgtcaaaaagctccagcgtgttcaggctggtcacagcgttgaaagtgtccacctacatccagtgccacacgttcttgctcacccgcagactgtgctcggaaacgagctgaattt

SEQ ID NO: 356890 - DNA, 1827 bp, Homo Sapiens
tctgtccagttaaacagatggtggcccttcttggagcaaagagccactgctctgcttagcttagcctgttcagaaaaacggcacaaaactcacctgcaaattgtgaaggttttctggccaatccagaggtgtgcctgcagtgtctgagtcctattctgccccaggagcttgtgaagaacccacagaaaggggaaatcttgaggttggtgaaccacagagcgaaccagtccgtgtccttgacatggtagccaagttggagactgagtgcctgaagcggcagggccagcgtgagcctgggagcctctcaaggaataacagcttccgtcgaaatgtgggcagagtattgcttgcaaatagcactcaggctgatgaaggcaaaacaaagaaaggcgtcttggaggcacctgacactcaggtgaatcctgtggggtctgtatctgtggattgtggcccttcaagagctgatcgttgttctcctaaggaggaccaggcctgggacggtgcttctcaggactgccccccattgccagcagggagtgagtttccacatagacagtgcagagttagagccgggttcgcaaactgccgtgaaaaacagcaacagatatgatgtggaaatgacagatgaactcgttgggttacctttttcctctcatacctattcccaagcctctgaattgcccacagatgctgttgattgtatgagcagagagcttgtgtcccttactagccgaaatcctgatcaaagaaaagaatctttgtgcattagtatcactgtgtccaaggtagacaaagaccagccttccattttaaactcctgtgaagacccagttccagggatgttgttttttttgccacctggtcagcacttgtcagactatttcccagttgaatgaaagcacaacaaaagagtcttcagaggccagccagcttgaagatgctgctgggggtgacagtgcatctgaggaaaaaagtgggtctgctgagccatttgtactgccagcctcttctgtggaaagtacattaccagtgcttgaggcatccagttggaagaagcaggtgtcgcatgacttcctggagaccaggtttaaaatccagcagcttttggagcctcagcagtacatggcttttctgccccaccacattatggtaaaaatcttcaggttacttcccaccaagagtttagtggcccttaaatgtacctgctgctatttcaagtttatcattgagtactacaatatcaggccagcagattctcgctgggttcgagatccacgctatagagaggatccttgcaaacagtgcaagaaaaagtatgtgaaaggggatgtgtccctgtgccgatggcaccccaagccctattgccaggcattgccctatgggccagggtattggatgtgctgccaccggtctcagaaaggattccctggctgtaagctggggcttcatgacaatcactgggttcctgcctgccacagctttaatcgggcaatccataagaaagcaaaagggactgaagctgaagaggaatactaaagtccatgtgagaggcaacaaaaggaccggtttctaaagctgcaaaacacctagatacaccgttcaaatgagcgtagccccctgagtcatcactctagaagaatctgtacatcatcaggactgcattgctcaggcattttctaaactctaaattacgagctgtacaaaaaatggtctttgtgttatagggcatctcatgtttgaccccggtgttttccacagttggattcagttggctgggaatactggctgttttcctaatcaaaccctcctcaaggaatgagactcacc

SEQ ID NO: 356891 - DNA, 378 bp, Homo Sapiens
  misc_feature (18)..(18): n is a, c, g, or t
tccgccctgactcggccnacctcaaaaaatgggcaccccctgctcctgaaaacatgaagccccaggatggagaagaaggcaaagccggccacaaagctggtgccgctgttgaggaagcagagggcgatgcagtccctgtggggcaggggtgaggagagggcggaatggcagggtcagaacagggctgcaacctctcctgcttcctgtctgggagcacagcccctcctggcggacactgtcctggccccttcacggacgccggagcagggctacctggcagaattcagaggaccacgcaaagcactggctctcctccgacactcctcggccccaccagcccagggacggaataaatcaaggtagtcctaaaagaatgcg

SEQ ID NO: 356892 - DNA, 1598 bp, Homo Sapiens
ccatggcctgtacccaatcatgtcttcgatgttgtcgtagaagcgtttggttccgtaaacccaagccacacagagggacttgaagatggccacgaacaggaggcacatgccactggccgcatagtagtcaaagagctggaacacgtacattccgccctcttcacttactgtggagccaaatggctcctcacccatccctggaggtgggtggtccatgcccaaaggccagaggagggacctgcctactttgtcgttcctctgtgagcatgatcagccccacaaggaaggagacgacagatactccaaggatgaggacttccctccggttcttcttgcggaacacgtgagggtacatgtccaccagcgctgtcaccaggctttctacacacacaaactggctatccagtcccaggagaacgaccatgaagaagaaacagcaggcccagagaggagagaagggcagcatcaccacagcccgcgggtaagcgatgaaagccagaacagggcctgaatcggccacctcagaaatgggcaccccctgatcctgagacataaagcccaggatggagaagatggcaaagccggccacaaagctggtgccgctgttgaggaagcagagggcgatgcagtccctgtagcagttgttgtggtacttgttgtagctgcccagggctgtcaggcacccaagacagatggcgaaggagaagaatatctgggtgcctgcatccatccacacctggggatcccacagacgcgtgaggtttgggtacaggtaaaactgaattccttgggctgccccaggcaacgtcacccctcgaattaacaggaccaccagcatgaggtaaggaaatgtggccgtgaagtacaccaccttgcctgtggacttcacccccttccagatgcagaagtagcagatgacccaggccagcaggaggcacagagccagctcccagcgcagggcccccaggtgctggatcccatcagagatcttcaagacccgccgctcccagaactcgatgacaggagaggtggcattctcagaggtaccattcagggagccgttggtcttctggaactccatacagtgttctgtgttccactcatggtagcagccgccccagggcaggtcgatggtgaagctgctgaagaggtagaacagggcccaggccaacacaatgatgtagtagacgttgaggaggatgacgatcatctgggaggcatagccaatgccctcaaagatggggcagatcttcctccaggctgtgacgcctccctggctagtgtactggcctagtgctgtctccagaaggaagacaggaatgccacaggtaaagaggaagacgaggtaggggatgaagaaggcacctcccccatttttgtagcagagatagggaaacctccagacgttgcctaagccaatgatctccccagccactgacagcacaaactccatcttgttgttccagtgcccccgctccagggtgccatcttcctccttcttttccatgactggatacactggttttgtctctccattactggttgtgcctgagaccctgctatccatcccaccttagtgaagctgctgccagaggtcc

SEQ ID NO: 356893 - DNA, 847 bp, Homo Sapiens
tgaaccactcaggagccggcacagtgaccccatttgagaattttacctcacctgtcatggaattctgggagagacgagttctgggcatcacctcgggcatccatgacctgggctccctgcgctgggagctggccctgtgcctcctgctcgcctgggtcatctgctatttctgcatctggaagggggtcaagtccacaggcaaggtggtttatttcacagccacgtttccgtacctgatgcttgtcattttgctgatcagaggtgtcacccttcccggagcctaccagggcatcatctactacttgaagccagatttgttccgcctcaaggaccctcaggtgtggatggatgcgggcacccagatcttcttctcctttgccatctgccaggggtgcctgacagccctgggcagctacaacaagtatcacaacaactgctacaaaggactgcatcgccctccgcttcctgaacagtgccaccagctttgtggctgggtttgttgtctatctccaatcctgaggcttcatgtcccaagaagcaaggggtgcccaatttctagaagtggccgagatcaggtcctgggtctggccttcagtagccttccccaagggctgtgactatgatgcccttatcccagctgtggtcctgcctgttctttatcatgctcatattcctagggctggacagcccagttgtctgtgtggagtgcctggtgacagcctccatagacatgttccccaggcagctccggaagagcgggcggcgcgagctcctcattcctcaccatcgccgtcatgtgctacctgatagggctttcctggtcaccgagggcgggatgtacatttcc

SEQ ID NO: 356894 - DNA, 1131 bp, Homo Sapiens
  misc_feature (21)..(22): n is a, c, g, or t
  misc_feature (26)..(26): n is a, c, g, or t
  misc_feature (28)..(28): n is a, c, g, or t
  misc_feature (48)..(49): n is a, c, g, or t
  misc_feature (55)..(55): n is a, c, g, or t
  misc_feature (59)..(60): n is a, c, g, or t
  misc_feature (77)..(77): n is a, c, g, or t
  misc_feature (85)..(85): n is a, c, g, or t
  misc_feature (87)..(87): n is a, c, g, or t
  misc_feature (92)..(92): n is a, c, g, or t
  misc_feature (188)..(188): n is a, c, g, or t
  misc_feature (213)..(213): n is a, c, g, or t
aaacaaatgaggcccctttanntcanantttttagttggctttttgtnntcaaanacannaattaatccagatgaanagaattcncnccacnattagccctaatgttttgaatgccctaaatggtttccattagaaacattgacccacctgggctgtctgcaaatggatagatttctgcatatgagcnataacatatacatacatattatacnctatatacatgtacagatgtacatatatccgtattgttccaacagtttgcactttgatcactactgttctctgaacaggatctcattatgaagagtatgtttagtttttttcagtcttcatatttgttctaactactagttttactcaccttccccatagagtaggctgaagtttggcagaaacagaagtaaaagcaccagggtcagaaaaatcaaacatagagttgacagatatggcttaagttagtaagagaagatgtatgtcttgttaacttcagattcgtagccacagtctttgaggtcatagtaacagtctctgtaatactccagaacatggattcagttgttgatggaagtcaggtattgatggaaactcatatgatggccatccctgggccaacaaattagcttggttaaactaagcctcaggagttggcattccaagaattgttatttgcatttcttctaccatgcttccttttctcagctaacctcactatctgaaatagcagttatctaactaatgcgttatcttgatcatttgaataaaaactaaatctgaacacattttagaatctcacagcaaaggggcacatttctcacagaaaaatgcaatagcctgtgcgtattaatttcaggcttatcataatgtccctcaaagacgaaaagttgtcttagagtgattgcttttcctctcctctaacttcttcatatttattgaagatgaggaagaaatgcctttcatagaaaatatgttttatgataatctgtattctactacttctgcttaaattttttatgtgagtaaatttcctattaaaaacatttagtgctataaacaaatttcagccctttttaaccctttagaattaatgaaacaactgagagccttaatatttttagaaaataaatattaac

SEQ ID NO: 356895 - DNA, 1918 bp, Homo Sapiens
  misc_feature (176)..(176): n is a, c, g, or t
gggaagaggtggaggaaggcagtggtagaggggccatgggggtcactcttgagggtgggggcaagagggagctgcaccgccaggcatagctgcttgtctgggtggagcctcctgggccgtggaggtgggcgccagcatccacttctgtgagcacaccccagggccaggtgcccgantgtggagcaggggtcatgtgcgggtgctcccgtgcacaggctgggtggcacgccctggtgatggggtgtttgagccccgccagacagcagaaaccctgtagagaggctgtgctccctggggctggaagagatgactggccccagatgccctgagccgccccagccgaccaggcctgcctgggtcacaccaccttctgctgccccagacctcctggctctcggctcaggctgccgtgcctctgtgctgcaccagctggggtcccggtgagtgggggcacttcggtgagggtgacagggtggcctatctcaagggagcagggccaccttcctgcaagtttactggggccagtttgtaccagttcagattctgcctgttttcaagatggcagtcccaaacccaacaactgttggccacactgaaagcaggagcccctctggtgctcctagagggtggcccagaggagctgtgccagggcgtggagaggagggcaccagggggccgcaggggtctctccaccctgcaggggcccagactgcctgcccgtcaggcacaggggcatctacctagacaggacagcagggtggaccccagtttggaagctgagcccccagccacgaacatggatctgaggaggggcccttgggtcgggccctgaagacgacacacggcagcccacaggccacgacagacgctggatgccctcctaccgccagacacctccccaaaggccttggacctccttaggcgactcctggtgttcgccccggacaagcggttaagcgcgacccaggcactgcagcacccctacgtgcagaggttccactgccccagcgacgagtgggcacgagaggcagatgtgcggccccgggcacacgaaggggtccagctctctgtgcctgagtaccgcagccgcgtctatcagatgatcctggagtgtggaggcagcagcggcacctcgagagagaagggcccggagggtgtctcccccaagccaggcacacctgcacaaacccagagccgaccctcagctgccttctaggacacctgtgcagggtcccagacccaggccccagagcagcccaggccatgaccctgccgagcacgagtccccccgtgcagccaagaacgttcccaggacagaactccgctcccctactccaaaatgatctcctagggaatggggaaaagccccctggggcgaaagaagcgccccccttgacactctcgctggtgaaaccaagcgggaggggagctgcgccctccctgacctcccaggctgcggctcaggtggccaaccaggccctgatccggggtgactggaaccggggcggtggggtgagggtggccagcgtacaacaggtccctccccggcttcctccggaggcccggcccggccggaggatgttcagcacctctgccttgcagggtgcccaggggggtgccagggctttgcttggaggctactcccaagcctacgggactgtctgccactcggcactgggccacctgcccctgctggaggggcaccatgtgtgagccgccctactcccttcacctggccctctgttcctgccccagccccttccccagacccctctccagtctcctgcaccccttagccctccctgctttgcctggcccgttgaagttccagggagcttgcccgggtctcctcgggggagcagatgagggccctgcccccgccccactgacttcctccaataaagtcatgtctgccccc

SEQ ID NO: 356896 - DNA, 1752 bp, Homo Sapiens
  misc_feature (971)..(971): n is a, c, g, or t
ctccgacgtcatcggggcgcgccctcgcgctgtcgccgccacagtctgcgacgggacccggcgtgcccatgtgtcaggtgggcgaggactacggggagccggcgcctgaggagccgcccccggcgccgcggcccagccgtgagcagaagtgtgtgaagtgcaaggaagcgcagcccgttgtggtgatacgagccggagatgccttctgcagggactgtttcaaggccttctacgtccacaagttcagagccatgctgggcaagaaccggctcatctttccaggcgagaaggtgctcttggcgtggtctggggggccttcgtccagctccatggtctggcaggttcttgagggcctgagccaagattctgccaaaagactgcgctttgtggcaggagtcatctttgttgacgagggagcagcctgtggccagagcctagaggagagatcaaagaccctggccgaagtgaagcccattctgcaagcaactgggttcccatggcatgtggtggccttagaggaggtgttcagcctgccaccgtcggtgctttggtgctctgcccaggagctggtgggatccgagggggcctacaaggcggccgtggacagcttcctccagcagcagcatgtgctgggggccgggggtggtcctggcccgactcaaggggaggaacagccaccccagcccccgctggacccccagaacctggcaagaccgcctgcccctgcccagactgaggctctttcccaactgttctgctcagtgaggacactgactgccaaggaggagcttctgcagaccctgcggacccacctgatcctccacgtggcccgagcccacggctactccaaggtcatgactggggacagctgcacacgcttggctatcaagctcatgaccaacctggcgctgggtcgaggggccttcctggcctgggatacgggcttctcggatgagcggcacggggacgtnggtggtggtgcggcccatgcgggaccacaccctgaaggaggtcgctttctacaaccgcctgttctccgttccttctgtcttcacaccagccgtcgacaccaaggccccctgaaaaggccagcatccaccgggctgatggaggcccttcatccctcaggctgcagacccagttcccctccactgtcagcactgtgtacaggacaagtgagaagctggtgaagggcccccgggatggccctgctgctggcgaatccggccaccgatgcctcctctgcatgtgtaccctgaacgtcaaacgccgctaacagtgccacggctattggggctcaaacctcctcgcgtctctcccgaatgcagtcacccatccccctgactgagacccggacacccccggggccctgctgttctccaggggtgggctgggcccagcgctgcggccagggggcctgcaggagggaggacccccaagcctgcattgaggagcagctgtgctacagcttgccgcgtgaacatgaaggacttgccctcactggaccccctgccgccgtacatcctggctgaggcccaactccgcacacagagggcctggggcttgcaggagatccgggactgtctgattgaggacagtgacgacgaggcgggccagagctgagcgtgaggacgtgcttgccgggacagcaggcagtggccacctggtacaccacactggagccggaaggcaaggacgggggactggcctctgattgtccatttgtataaataaaacattttttaattaacc

SEQ ID NO: 356897 - DNA, 861 bp, Homo Sapiens
gggggggccgggccggggcggcgcgagcggctggagcaaggggccccgcggcagctgcgggcgacgcggtcgatggacatgggcacccagggatcggggcgcaagcggctccccaaccgggagcggctcacggcggaggacgacgcgctcaaccagatcgcgcgggaggcggaagcccggctcgctgcaaaacgggcggcccgcgcggaggctcgcgagatccgcatgaaggagctggagcggcagcagaaggaggtagaagagagaccagaaaaagattttactgagaaggggtctcgtaacatgccgggcctgtctgcagccacgctggcctctctgggtgggacttcctctcggagaggcagcggagacacctccatctccatcgacaccgaggcatccatcagggaaatcaaggactctctagcagaagttgaagagaaatataagaaggctatggtttccaatgctcagctagacaatgaaaagacaaacttcatgtaccaggttgataccctaaaagatatgttgctggagcttgaagaacagctggctgaatctaggcggcagtacgaagagaaaaacaaagaatttgaaagggaaaaacacgcccacagtatactgcaatttcagtttgctgaagtcaaggaggccctgaagcaaagagaggaaatgctcgagaaacatggaataatcctaaattcagaaatagctaccaatggagagacttccgacaccctcaataatgttgggataccaaggtcctaccaagatgacaaaagaagagttaaatgccctcaagtcgacaggggatgggaccctatggaagagccagtgaagtggcggtgaaaaatgaaatcg

SEQ ID NO: 356898 - DNA, 1387 bp, Homo Sapiens
  misc_feature (1377)..(1377): n is a, c, g, or t
ccttgaagtaaaacaaagagtgctaaaataaataataggagtaagaaagagatctgctttgctatttggcaggtagtgttctccagctgcagtgcccttggaagagcacgtggcattcactgtgaccaaaacggcaggtaggacagccctgggaccctgacagctcccattccttccccttaactctccctagagcaagaaaaatatgtttataatggaacagttctcagtagactttatgagaagattctgtagctttcgcgctgagcagatgccttctatgtcttcatggtttagtagttttgctgctattaggatcagtggctcacaacatacttggtacattcaaccccattgctcctttcccccacacgccgcttccccaagaccccaactcatgatacttccatccatctagagatgtgacatttcagactgacttttgtgcagttagatgtaagcattttaacctctcaacccacaccagttcctttggccccaggccacacatttcaccttaatagctcaacaccatacatgcatttattttctgactatacagtagccgcaaccaaggcttgaaaacttgttaaaaggccagggccctattcatgagacgcctgacggtgccttttacccttagaaaagcaggttgacttttcccccactctagttaaagagaatgttgcacacaaaagaaaaagggtggaaaatctcaaacacttggcaacaggcaaacaaatttgatcatctcctttcctcctcctcttggtaaaatacagtatttatattttccagcctcagagaagatagcagaacatgatctttcacaagagaattatagacctgcttattataaaacagatgtgctcccatggcaaagtgccttctccctccgcccccagctccctgtcactgtagcttacttttgccttcgctgtaattaatgtatccgtgattccaactgtcagcgaggccattcctagcacactgcatttggagacctgaagtgcagtgccatctcctccccttgaacatgtttgccctgcatacagaatttcctctcctagctcacaggcacccagggtcatacctgccgagagtcaagggcgaaattctggatcccccgtcaaaacatcttgttttcaccagccccatttagagggccctggtaaatacgagcagtcccttgtgactccttaagaggacttttcacccacataattttctggttatttttcaaaagggaaaccaaaaaatcgatggtgttatcacccataagattaccccaaagcttgggtccatggtcccagcacttccctgtttccctcttccctttttcgggacccaaccctgaacaagctttggggtcggtgnggccaagccc

SEQ ID NO: 356899 - DNA, 1890 bp, Homo Sapiens
  misc_feature (37)..(37): n is a, c, g, or t
  misc_feature (60)..(60): n is a, c, g, or t
  misc_feature (78)..(78): n is a, c, g, or t
  misc_feature (87)..(87): n is a, c, g, or t
aattcaccgtatcgaaaacccctgaaaagtcaacagnggctgtgaatgtgggaaaacacnggtatacctaatttaacnggaaacccnggaggaagcttcatctggaacaaatctctaagcttgttaaagtgcttgaagggagctactacttctaaaacattcaataataactctatccctaagggaaattcctggctcatggctatcgtagctttaaacgtttttctgactctctttgcacaccaattctctacccagatgaggagcttttccattttcagcagatatatattcttcccatgtaatagtgttctgaggaggaggtgtaagagactgtcttcgaatcggctcaaaattctgttccattatgtttccacctttactcaaactctccatgatggccttatttcgaagaatatcctcttcactgagatgttctcttccttttccttgattctaaaacaagtccattcaccaggtaaaagtctgccaaaaagtttcctactctttctgttttatcttcccgaaaaagccatcctgtctgggcacgcgtgaaagaaattgattttgttgataaagttgcagagtaaatatcactgctcattaaaatatccacctcttcttctgtttccatctctgattcctcatgatgtattcgctgataaactttttgttcattgtctaatactacaaaagattcagagggcgccgcatccccattgaaaatgaagcttagatcccctcgttggcacttcatgtcagcaaagtctatgagagttgtgtcaagcctgatattgataccttgtttgtatattttacatgcatcggaaggcagaattcgggaaagtaaaggcacccagctttgaaaatcccagtgaagttctagataaaagtcacctagctctttcagggcttttaataatcgaggtcgtttttcttcaacactttccctggattgctgcttaagcttcctcaaaagagctgtaatcatctgcctatctccatagctgatggcttccgccagagggctccatccctgagcatttttcaccttgactggagcattgtgagccaaaagtaaatgggcacattctttatttcctaacatcacagcaaggtgtaaaggagtatttccgtgattatctttctgcccgatattgtgcgtgcggatgagagaggagagtctcctcacatcccccttgaagacgcactcgtgcaccgggtagtgtgcggggcaactgcctccatccgcgacgacagcaacggggttggtgccggccagaagggccggggactgggagttggcagtcacggaggaattgtgcagcggcagagccggggcgccggggggattggaggaggccggagctgccttcagctgtagccggtggtgatggttactgaagatcttatgacaagctttgccgcccttgccaatcctgcttctggtaaaggtaccgccgagggcagccgccgcttcctcatccccgggctccagcaggtccccttcttctttgctgggcttgtggtccctccgcagtgagcggatcttctccccggtcatcgccgccgccaggggcaagggggggaatcgggaggctcaccgctggcgacggagctggcgctgcggcggcacaaggcgattagagcggtggccaagagcctccagcgcagcatgaactcccactgagcccccgagcctgggacaaacgcatctcccggggaagagccggctctcgcctaggcacgaagggacgcgcgctcgctgggggaagctagaactcaggtgcccacgacaccaggatctcagtctcgccgtcgcagccgccgtcgctgccttacaccgaaaaacagggcacggccatcttcctcttgcatcccgaaaattcc

SEQ ID NO: 356900 - DNA, 582 bp, Homo Sapiens
  misc_feature (109)..(109): n is a, c, g, or t
  misc_feature (525)..(525): n is a, c, g, or t
aatgctcagggatggagccctctggcggaagccatcagctatggagataggcagatgaccgattcgaagacagtctcttacacctcctcctcagaacactattacatgnggaagaatatatatctgctgaaaatggaaaagctcctcatctgggtagagaattggtgtgcaaagagagtaagaaaacgtttaaagctacgatagccatgagccaggaatttcccttagggatagagttattattgaatgttttagaagtagtagctcccttcaagcactttaacaagcttagagaatttgttcagatgaagcttcctccaggctttcctgtaaaattagatatacctgtgtttcccacaatcacagccactgtgacttttcagggagtttcgatacgatgaatttgatggctccatctttactatacctgatgactacaaggaagacccaagccgttttcctgatctttaactgacgtggaaaaggatgccgtctaaccaaggaaagaaaatacagagaccttanaagtggatccaaatagaagggacaaatgctttcagtgaagaaaagggaattacacat

SEQ ID NO: 356901 - DNA, 999 bp, Homo Sapiens
  misc_feature (9)..(9): n is a, c, g, or t
  misc_feature (13)..(13): n is a, c, g, or t
  misc_feature (25)..(25): n is a, c, g, or t
  misc_feature (31)..(31): n is a, c, g, or t
  misc_feature (58)..(58): n is a, c, g, or t
  misc_feature (71)..(71): n is a, c, g, or t
  misc_feature (87)..(87): n is a, c, g, or t
  misc_feature (101)..(101): n is a, c, g, or t
  misc_feature (338)..(338): n is a, c, g, or t
  misc_feature (559)..(559): n is a, c, g, or t
tttcaaatnatantagaaccagtgntgtgtnaaaatacagtccagtatttcatcatanctaatccagtctngatacagccgcttctntgcagctctcaaanttcagctaatgatgagccttctaaggaggtatctttctgtgctaatgcagatgctggctcctgtgaatttgaggcaaaatggtccacttgtctatatttaacattttctgttctatcggtaccagggtaagcatcattttctacttgtaaatggtctttagaattcaaaatagaagtttcgatagcttgatcttgttgatctgacagttcagtcacttttattttggaagattaacngtcattgtagtacggcctgataaaaataatctgagattgaccaaggagcatggttctctgtttgtacttctacatcagactttttattatcttcatttctcccacgttggagtattttactgagttcttccacctgcgtgcggagctcctggttgttgctttctgcgttctggtacagccgttctgtgtgatgcagcagcttctcgatctcccgcacctgncgcttgcagtccgcagttcacgttccaacttctccaccttccgccttagctgggccagctcaggctcgggggaggtgggcggcggcggcgaccgcggcggggacggcgcctccgaggccatgagctccggcgcgagactgctcgtcgccgcggaggggctgcgttcaggccgaaacggacgccggcggacccagagaccactggagcgcgcgggcagcgaaaggcagcctcacacccggctggccgcggtggcccctggccatgacgccctgaaactcacttgtagccgaacggggctgcgagcaacgagcaaggggaccgaggatggcccctgcccgatgtgcgcggcctgcaaaccggaaaactttcctggaaactaccttctccagctacagagacagagggaggagcgtcggataagcagtcggaaaaccagaggc

SEQ ID NO: 356902 - DNA, 549 bp, Homo Sapiens
  misc_feature (21)..(21): n is a, c, g, or t
atggcctcggaggcgccgtcnccgccgcggtcgccgccgccgcccacctcccccgagcctgagctggcccagctaaggcggaaggtggagaagttggaacgtgaactgcggagctgcaagcggcaggtgcgggagatcgagaagctgctgcatcacacagaacggctgtaccagaacgcagaaagcaacaaccaggagctccgcacgcaggtgcgcggtcctcctcagccccgcgccccatccagcccaggcgaggccttcgaagcccgtgatagcctcggaaggggtccctggcaggggctcagaactactgtagagtacttaaagtaaataagtagaagctcagcgcagttacaattccaagtaccttaggagcaaacctgagttcaggttacttgatttaaatcaatgtctcgcggctggcgtgaattgaacttaagtactgtggctacattgtcttcattctcacttgacctaacatcccattggcagtaggcgcatttactgtagatcacatttcagtttattaaaatgctggacttgagtcag

SEQ ID NO: 356903 - DNA, 1615 bp, Homo Sapiens
  misc_feature (1484)..(1484): n is a, c, g, or t
  misc_feature (1560)..(1560): n is a, c, g, or t
  misc_feature (1603)..(1603): n is a, c, g, or t
taggaagcgaggcctgggtggcgaattcggcacgaggtcagttgctgccatggagtcagccgggctagagcagctcctacgggagctgctgctaccggacaccgagcgcatccgtcgggccacggaacagctccagatcgttcttcgggcccccgccgctttgccggctctctgcgacctgctagcctcggcggccgacccccagatccgccagtttgcggccgtgctgacccgcagacgactgaacacccgctggcgacggctggcggcggagcaacgggagagcctcaagtccctgatcctgacggccctgcagagagaaacagagcactgtgtgagcctcagcctggcccagctctcagccaccatttttcgaaaggaaggcttggaggcctggccacagcttttgcagctgcttcagcacagtacccacagcccccacagcccagagagagagatggggcttttgctgctaagtgtggtggtgacctcccggcccgaggccttccaaccccaccaccgggagcttcttcggcttctgaatgagactcttggtgaggtgggctctcctgggctgctcttctactccctgcgcactctgaccaccatggctccctacctcagcactgaagatgtgcctctcgctcggatgttggtgcccaagctgatcatggccatgcagactctgatccccatagatgaggcaaaggcctgtgaggcccttgaggctttggatgaactgttggagtcagaggtgccggtcatcaccccctacctctctgaagtcctcacattctgcctggaggtagctagaaatgtggccctgggcaatgcgatacgcatacgtattctctgctgcctcactttcttggtcaaagtcaagagcaaggccttactgaagaatcgtctcctgccacccttgctgcacacccttttccccattgtggctgctgagcccccaccaggccagttggatcccgaggaccaggattcagaagaggaagagttggagattgagctgatgggggagactcccaagcatttcgctgtacaagttgtggacatgctggcactacacctgccccccgagaagctctgtccccagctgatgcccatgttggaagaggctttgcggagcgagagcccataccagcgcaaagctggactcctggtgctggccgtgctgtctgacggagctggcgaccacatcaggcagagactgctgcccccactgctgcagattgtgtgcaagggcctggaggacccctcgcaagttgtacgcaatgctgcgctgtttgccctgggccagttctcagaaaacctacagccccatatcagcagctattcaagggaggtaatgccactgctcctcgcctacttgaagtcggtgcctcttggacacacacaccacctagccaaggcctgctatgccctggagaattttgtggagaacctagggcccaaggtgcagccctaccttccgnagcttaggaatgcatgctgcagcttctgaggaaccccagcagtcccccggccaaggagctgctgtgagcgccctgngagccatgctacggctgcccaggtctcgctgctgccctacttncctgccatcatg

SEQ ID NO: 356904 - DNA, 985 bp, Homo Sapiens
  misc_feature (7)..(7): n is a, c, g, or t
  misc_feature (16)..(16): n is a, c, g, or t
  misc_feature (25)..(25): n is a, c, g, or t
  misc_feature (37)..(37): n is a, c, g, or t
  misc_feature (61)..(61): n is a, c, g, or t
  misc_feature (91)..(91): n is a, c, g, or t
  misc_feature (537)..(537): n is a, c, g, or t
ctcctgnctttactcnccatgaggnaacccttctccnccagcgttcagcaggactgcactncttgtaaactcagctccaggaatctgaagntgaaccttcctggtcagctcctcctcctgcagggcgaggatgtgtgtgaggctctgcacccgcacctgcagcaactccgcggtggcatgcaggctgtcccggtcctcctgcaagtgctgcatggtttccagaagcttctgtcgctccagttcccatgtctggctgtggacctcagaaggcacttgttccccaacatattttcttagattctcaaccagggtcacctgagcctccaagtcttcctgggtcttgctcagctgcttccgaagcagctcggcctccctctgagcctcggccagctccttggcttcccctgctcttctggtttccagactactcagagacttctccaagccctcagccttgctggtcaaactggaaagagcctcctcgtgagcctgtgtcaaagaggacagctgctcttggtgcagcctctgaacctcttncagctcccgctggctcccctcttccaagttcttccggacaacctcagccccagccaaagcagcacgcaggccctcagcctcagctcggccggccttctccgcccgtgccagagcctctagctccatggcctgggcctctagcctcatcttctgctgcagcgaggtctcccgcaggagccggacctcctcctccagccgccgcagctcttgcagctgccgaacgatcacctcagcctgctggctcagggcctgtgacccctccagcccccaggacctgcctctccgccctggctcctgcctgtcactggaaacatcccgttcccacatggtcacttgaggtctctgggtgtctagccgcctctctgagacatcttgatggcctgaaggtggaaacatctccacattatttgaaggctctagattctgtctccagccatctatgttcccc

SEQ ID NO: 356905 - DNA, 814 bp, Homo Sapiens
ccaaagcgcagtagggggctctcgcggttggggaacatagatggctgaagacagaatctagagccttcaaataatgtggagatgtttccaccttcaggttccactgggctgattcccccctcccactttcaagctcggcccctttcaactctgccaagaatggctcccacctggctctcagacattcccctggtccaacccccaggccatcaagatgtctcagagaggcggctagacacccagagacctcaagtgaccatgtgggaacgggatgtttccagtgacaggcaggagccagggcggagaggcaggtcctgggggctggaggggtcacaggccctgagccagcaggctgaggtgatcgttcggcagctgcaagagctgcggtggctggaggaggaggtctggctcctgcgggagacctcgctgcagcagaagatgaggctagaggcccaggccatggagctagaggctctggcacgggcggagaaggccggccgagctgaggctgagggcctgcgtgctgctttggctggggctgaggtagtccggaagaacttggaagaggggaggcagcgggagctggaagaggttcagaggctgcaccaagagcagctgtcctctttgacacaggctcacgaggaggctctttccagttggaccagcaaggctgagggctcggagaaagtctctgagtagtctggaaaccagaagagcagggggaagccaaggagcttggccgaggctcagagggaaggcgagctgcttcggaagcagctgagcagaccaggaagactggaggtcaggtgacctg

SEQ ID NO: 356906 - DNA, 2147 bp, Homo Sapiens
  misc_feature (153)..(153): n is a, c, g, or t
  misc_feature (159)..(159): n is a, c, g, or t
  misc_feature (167)..(167): n is a, c, g, or t
  misc_feature (184)..(184): n is a, c, g, or t
  misc_feature (321)..(321): n is a, c, g, or t
  misc_feature (443)..(443): n is a, c, g, or t
  misc_feature (589)..(589): n is a, c, g, or t
  misc_feature (628)..(628): n is a, c, g, or t
  misc_feature (1976)..(1984): n is a, c, g, or t
attcccgggatcgcggcggcgaatgctggctgcggtaccctcccgctcgcttgtccgtctgcgcgcccgcgatgtgaaccagccgactgggggcgggctggcggctctgcctgcggcacgcatcggatattttctcctgagacaggtaccctnaattgnagccgtgnattcccttggagccagnagacacaccaccaagggctcggagcgccgcgctccggggctggaggcagctgcagcgctcgggtccgcgcggccgggtgcagtagcctcagtcccagccgccgcctcgctgaagtcgtgtgccctggcgaatgcccngcgcccggcacagctgagccaaaggcgactggtgcagagcggcggcgcctggtcctgcaattgccgctgctgccgggctgtgccggggcggcggcgctgccccgcgcaggtttgcagaggcntgcctccgagcgccgtccgccaggaagactccctgcctcctgagtcccaaaaacacgagatttttctcctactttcagcagttggccacaacttcattgctgggaaaaggccaagaaagaagagagaactctcaccacaacatttncaaagggaatacattgccagaacttggaatactctactnggacaaacatttcctccaaggacacagctttctgcctccatgtcaccacctttgaaggactgactgattccctcggctggtgccagtgcctgctcctgccatggggcccgcggggagcctgctgggcagcggacagatgcagatcaccctgtggggaagtctggccgctgtcgccattttcttcgtcatcaccttcctcatcttcctgtgctctagttgtgacagggaaaagaagccgcgacacatagtgggggacatgagaacctgatgaacgtgccttcagacaaggagatgttcagccgttcagttactagcctggcaacagatgctcctgccagcagtgagcagaatggggcactcaccaatgggggacattctttcagaggacagtactctgacctgcatgcagcattacgaggaagtccagacatcggcctcggatctgctggattcccaggacagcacagggaaaccaaaatgtcatcagagtcgggagctgcccacaatccctcccgagagcgcagtggataccatgctcacggcgagaagtgtggacggggaccaggggctggggatggaagggccctatgaagtgctcaaggacagctcctcccaaaaaaacatggcggaggactgcctgcatgaaactgtgaaagagatcaaggaggtggctgcagctgcacacctggagaaacgccacagctgtgcaaggcaaaatctacttctgcctcgaaagagctcccagggccccaacactgaacgcaaagctgaagctcgcttgaccatgccctcggtggcacacaacataaaaaaatgttcgccaaaagcgtcaaatggagaccacttatccctttggaaaattccttgctgcatcccaggaaagaaggaaggcccccttaccaaccttgtccccccgcgtttaacccctttcttgggaaccaagacatggtaaaaatccccttcaagggaacacaccgggaatgcggcgcggccaataatggcccgccaaaacccacacattttgtccctaccaccaacccaccggaacctctaggttggtgtaaaacccctaccgcgccgacataacgtaaatctcacacccccctccccttttggcttccgcctcacccacagttttcccccgccgcgccacccatatataatacctccccggattttgttttcggcgggcgaacaggaaaatgcagaatcctctccccgccccttacatgggagccctccatttttccgcgacaaaattaaaaaaccgccctgcgggtaacgccccccagacgcatcatataataattcaggcgggcgcacgcttccgaactacctcccagggggnnnnnnnnngaaatgacacccaacacctctacccaccccctccccactatttcatatggtgggtactaaacacaccacgaaaaggggccccttccccgcggactcggcgataggaaaagagggaaatccaaccaccgtcgccacacttcgtgttctcacacctcctccctcg

SEQ ID NO: 356907 - DNA, 1494 bp, Homo Sapiens
  misc_feature (981)..(998): n is a, c, g, or t
  misc_feature (1300)..(1308): n is a, c, g, or t
gggatcgaaaagaagattaaaaaagggaagcagaggagttgggagctggcggtcgttcccggggaagaactgctaaaacatgagaccaaggcacagaccttactgtatgagaagcaatgctcctcaaaccttctgcgtgctgacatagaccttcccagaagcaaaactgttggcggcgacctgagcgctggaagccgaaggggaagaggaaggagacgcgaaccagggcggccggcacaaaagcggcggactcgcggcggcagcgcctgcccggccgggagcacaacccacggccctactccagcgaagtcccgcaccggcttctaggaataaagtttacgttctcctgaggccgcaccccccaactcccacccaggacggcacatctccgtgtcctcctcccccaaactccactcgggaccccgagaaccaccccaaccttccggccaccacaacaaagagccgcaccgaccggcgaggataaacagcggcggagggcgagagggcggcggggcgagcgcctccacgcagcaactccggagtcccccgattgcccgagcgcagtttctccgctgctgtttccaccggctttgtaacactgggaatttacatcctcacccgcacccctcacgcccgaggattttaaactcacctttactctcgaactgagagttgcggtagatgggatttttgccttttccccagatggttgaaggttaagatttttggaaaccccaccacctccttatttctattattatttctgcaagaaaagtataaagagagttgtagtggaggtgagatttgtgatcgggaaagccttcgactccctccttctccgtcttccgcttctctctctctgattagttcctatccagcagcagattgaagcaggagaggactcccctcaaggtcggcccagcagcctcacctctaggcgaaggcctcatgaaccaagtgacgtcaaccaacaaggcctcnnnnnnnnnnnnnnnnnnaacaatgaaagttgctgttaacaagggaaaaaaagagagagaattgtttacaccattccagtcccaataataaatgacgccaccagcccctaaaggagccaagggagggggttgcctcttctttccaagaatactgtagctttgagtttgcaccgtcccctgccccaggaaaaagttaagaaacttaaaatgttttgttttgcttttaaagaagacaggacagaaaacgggatttaaaacttagtttttaaaaaaacaaaagctacagagtagggagcataggtcaaccatccccacctaannnnnnnnngttcctaaactcagaattctacaacccaactaaattaatatgccaagattttgcggatgttaaaactcaaaaaaagcagtatgcaagacggtcccggggtaaaattctactgcctttccacggacaagttaaactggctgtaatgtttatgcactaagttaaaataaaatttaaataaaagccgtt

SEQ ID NO: 356908 - DNA, 1757 bp, Homo Sapiens
  misc_feature (151)..(151): n is a, c, g, or t
  misc_feature (1035)..(1035): n is a, c, g, or t
aaatctcattaccatgttggataagtgtgttttccaaaaataaaacatcacctccctccttatcagaactatagttagatataggtagactggggaacattttgtacaatggtagcatctaggtttgagtaagtccctaggtagatctttnatctctttgtatgccctccttaaaaaggtgtacccttcacttattcctcccagtgcagttggagaatgtttgtatcaagtttttgccagcttccctgtggaacagacagcaactgcttaacaaatggcaggtttatgtaagaggaaatctcccatggtttaacgtgcttttgtttcctgccagtatgtaccttctgtttttgttcacgcataatcatcttgtaacatacgaaaatggatgtttaaatgcaggtagatgagtatttgtcctaaaatgtgatcttccttgttgatgctggagcttgaggagctatccctatgctctgctgccaccttggaaactcagaaggatttacaacggagttctgcacaggggaagctggaagcagcattcccacagcctcttctggggctggcaaggctcagagaggcatttgaaatggctattattgacacccatagacttgggtatgtttcagagagaaactataacatctatctcatgggaaaacacactttctctgtttttaaataactccgtttcagcaagatccatgtgtgtagcctctgaatactctataaaggctccgtatttctttctttctttccttagtccggaatggagacagaagaaagattcggttgaagatgtccctgtgtggatctcagtttgcgctctgagcgacgtcctggctcatttgggtgtgacggtgagagcagaggcgctctgctgacagttttttcttgtctaagcttccattccgcatccacaatatgactcgccttccactccagttaacttcttggaagtccagagcacttagtcaaagctgtttacaaaatgcaaagcatctgggcggccaaggcagaggctcctgtgttctnctatgtaaccgcctccaaaaaagctgggaaatttcgcggatcaaaatgtaggcgcttaaagctgaccctctgctgtcaatgttgggacttagatacattttttgcatcgtcattcttgtgtgtgtttcccgtttattccattctaaggctcaggctcgcgctgtttctctcgcgcgcgctgtcccctctctccatttcccattcacacatcaaactccgtcctccgcacccctatcttcccgtgtcttcttagttatgtgaatgtgtgtcattaggcttactcggacactggatgggtgagtgggaggcagcttttcttgcggtttcatttacacttggcatgggtgggtgggtgccctccacaattcgtctcgcacacggaacacagttaaaatctgtagctagaacgagtgaaaagttccgaatctttaaagcgcagctaggacaggaaataatacagggttgggggatgtggacgggggcggagagcagagaagtaaaggaataaaaccaacttcgctggcaacttcaataaatccggtaactggaggcaaaaaatagactccgagggctgggtctggtccggatgaaacgctagggctccttcccttccttgaatcttgggcgctggaagccagccacgggcgtcttgccacgcgagtgcccctagacagcaacacacccactgggaacgcacgtgaacaaactctcgcatcccggga

SEQ ID NO: 356909 - DNA, 1454 bp, Homo Sapiens
gatgaagggttggaatagaataatacatttacaggatttaggttggttttctttctgtccagtctcatctgaatttcgtctgtctcttgtggtccagaagttccacagagcaacgcagctgcatgtggtgacaggtagagcagttaaagctgccaataggaactcgtccatattccacacacctggtatagtgttatgccctccatgggcacttacctgcaataagcagaagccactgccacattcccgtgtattgggaaaatggactactgtgtgcgaacaggccctttaccctaatggcagggaagatggattatctttggccagtggagctgccaatctagacatacacattcaactgaatacaattaaaagcagttctttaaatgcaaatataattacttcatctttataatacaatagtattaactggcccatatggctcatagtatggatgagccctgtatagcacaaggtcaacaggtcctctccttgtccttacaatctaaagcagatgacactgacatggacaaacaagtgcacatgcatagttgcggcagttttagagaaatctagaaagctaggtagcaacactatgcataaatgttgtggtccaatgcattagtttgctttaacaaaaatctgggaggtattttttctctttattcaggaaggcttcatgaagcaggaagtggtcaaaggagggaaggttactggttaaattatgataggaagaactttccataactagttgcaaaattgagtgctgggtgggttgaggaatgggaaaaagggggagcaaggtgttttgtgtagatggaacaaagggcaaaggatagactgtaaggaaggccagataaagcttggagtagcatgagaacttgaggaatagtatgatatgggctgtgcagcaggcagagagaatcaccttagctgaaacatgggtgttaggagcagaccatgaggtggtagaaccatcatctatagtaaatcaggtactacgctataactattgataaggaaacagctgactgccactgaaagaataagcagttttaggggactagctcctatgggagataaaggtcagaaatcgtagtatctgatgaagatattttgatgagcaggtgagaagaaagataaacatggccagatggccaaggactgggataagtagccgtttcacattcaattagaattctgtggctggaataagatcagggagagcagtaggaagatatagtattctataattcatagcttgttgtgttagagattaattaggattctgctgttgaatcttagtacaaaaaaatctaatatttattaggaattaagggaagatggtacttctgttatgttgcctaagcagacaggaagctacaagaaacaccagtctgaagcagtgcctcaggatctcagatgatttaggaagtgtgctgtaatgtcaaaaa

SEQ ID NO: 356910 - DNA, 1011 bp, Homo Sapiens
  misc_feature (351)..(370): n is a, c, g, or t
  misc_feature (608)..(608): n is a, c, g, or t
  misc_feature (610)..(611): n is a, c, g, or t
cctaatgctcacatggcgaccttttgctcccctgcctgcagttgaaacaaaagcagtttgaccaagctcactctgcattcatttgacttttgagagaagaatgaataaatgagagcagaccatgtacatgttcactttgcaaagttaaagctggttttcatctctaaatggcactatgggcaaaatagacggtatgatgtaatttttatcttgcttgacatactaaaatgacttagtcattttaaaaatgatctgaaaaattgtcttagggacctgttttgaaaatacatctaattcatactgcttcataaatggaaaattacttcttcttaaaaaaggaatgattaaaannnnnnnnnnnnnnnnnnnnaaaagactaaggaaaagacactgacgacaaaaagaattcacatgatagtagtattctgggtgacaagcagcacactgcaatgacaccgagaagcagtgcttggatctggtgagcaaagatccagggactcaccctataacatgttccaaaatgtgatattcaatgcttcacaatgggaaaaagccacagctcatacaaaagcattttcataaaattctcacaaatgttaaacagtatntnnaaaatataaaagaggatgcacagattttctctgcatgcacaggcagtgcttggtgagaacaaatttaggcaggcacagtggagataggacaggaagtgtctcaaaaagagttaagaagctggacctaagcagctgtaggtttttaactttaaaaagttaaagatttaaaaatatcagaatgtacatatatcaaccattacattcagtccataaatgtctacagatcatcactgttcagcttatctgtcctagtagatagttttcataaaaattcatgaataagttgcctctggtctgaaaacatcctaaggttgaagcagatttatatgtaaagaaccatgttctcaatttaaaaagaaagtagtacaaaagggctaacaaacccctaagagtgcaaatc

SEQ ID NO: 356911 - DNA, 1627 bp, Homo Sapiens
  misc_feature (1351)..(1351): n is a, c, g, or t
  misc_feature (1419)..(1419): n is a, c, g, or t
  misc_feature (1431)..(1431): n is a, c, g, or t
  misc_feature (1446)..(1446): n is a, c, g, or t
  misc_feature (1472)..(1473): n is a, c, g, or t
agtcaatagctaatgtttctcccagaaactaaacaacatagtttaggggatattaggcctacattctaatcacattgtaaggaagtgattttctaattttgaagcttcccaggagcagccccctccaggaacaattttccctgtgaactttcactgagaaactattatatgccatggaggagtcaaagatgaattaaatccaatgctatcctccaggagtgagctttgtagttggagagaaaagccaaccttatagatacaacctgtacatatataacctatgctgcatttaggcagatgataagccctaggaatggaaagagggaaaagctcccttttgccaggaatgatgaaggaaagctttatggaaacacaggctgtatgtgaaagatgggtgaatctttgcaggtagggaagaagtagggggcatgtctggctgagaaccggcctgatcatagagtggaaaaatgaaaggcagaggtgaaggaagaatactaaatgtgaaaggctgaaatacacagggaagtgttgccagtgtgcaacagaatctcatctcgtgcaaaattgaattagacttccttactccttccttactctgggtaggtccatgtgcagcctttcctcagagcatctagcctgacatacttggctcatctgctgtgcttctaagccaaataaaaatcatcaaacacatcgaagatatttttgggagtcaccaggttaaagcaaagcctcagtcactgaaagcaaaaactgaattggccaggtctccactgacaaaacagagtaaatgatagtatgacagataatttcaagttttccaagactccaatttctgaaaaatgtctcatgactccaaaaaatcacgtacttcctaaaatgttgccagtggaggaccgaatcaaggttattgctgacctcattttttcaaccttttcagttatttgacctgaataggcaatcccccaggatttctgattgaattctacctgaaagtttagattttaaaagacaacctgtaggaagctaagtctcaggcaacaaaatttaaaaccatcagaacttgtttctccaaacatcaacctgctcctgtcaagtcctttttcatctctcccttttgtccctttacatactgttttgtaagttccttttgatatcatttattgcaggcagtatttttacatccatcttcaagaaacttgggagacatttagacatttagtatgtgtacttttagttgtcttgcctctttatttcagataatgcctgtgattagtgaatggcggcattattcctgaagacaaatgaaggaacatagggagcaagattgactgtcatttgaatgatgganagagaagtagaattaccggtgaggttacaaaaatcgtaagttagcagacattgagaaaggaaaacttnctacttgggctnttcaggcttatgtgnacattatctgggaatgtgtttctagnnctttcctaaaggagaaattttttattcctgggttgctgaaagctttctggactaaaaggatataagcagcttaatagcagcatagagggtttagataatgggacagccctgcatacaggaaagctacatcttccatagtttaggctgcaagtcc

SEQ ID NO: 356912 - DNA, 1964 bp, Homo Sapiens
  misc_feature (672)..(682): n is a, c, g, or t
gcggccgctcccgagcgcagccctgcccggcccgccagccgcgcgtcccggcgcccgcgccccacggccacagccttgcctctatctagctcacggagcatgtgcagacccgcaggcgctaaggtgctctcagtccgggggccttctgggcagcggtgactgtcaccccaagagagacctttcgggggctcttgccgcacctctgctgcgtcgcgggtgacactgcggtgctcgcgagcagggtggcagctgcctctcggtggagacgtcttgggacccttgcgcccttcttctctccttccttcgctgctgtctcctttccttccttggctgctcgctctttctctcgccggctcagacccgtagcctccggaacgggactcgtgggtcgccgccgcctctgtctcttccaaaggggcctcctcacttcggagatgcagtgacaagttaatatgggcgtccaagcctctgtttcccaggaggaaactttgcaagaggcggcagcccctgagcgcccagagctcttgaaaggccacccaggagaggtgtgagacccggcggcagcatccgtccaggtgggacccgctgagcgccgtggccagtcccccattaccatcccggcaccccaaaggcgcgctcgcccgattgcttcgagttcaccgacctggggannnnnnnnnnnagccgctggtggtgggcgcctcgtgggctaaggcccggcgcctgctctgctacccgcgctgcctttagcggtcgcccccgccgccgctgccagggacgtgctgggaaagcccaagccccgggagaagatgccggccatcctggtcgcctccaaaatggaagtcgggactggcccaaacccgtgcacagcgccgcgcccatcctgcacgtgcccccggcccggggcgggcccccagccctgctacctgaagttgggaagcaaggtggaggtgagcaagaccacctatcctagccagatccccctgaaatcgcaggtgctgcaggggctgcaggagccagcgggggaggggctcccgctgcggaagagcggctcggtggaaaacgggttcgatacccaggtgagagatgccgtttgccggggtactgttctggaaggatggatgaatagttctttcgggatggtgtgggagaaagggctggatgggagaagggtctaccatgtggccagggaagggaaccattccccttaggccggcaggttgggggatgcgcgaggagagtgggccggccggtgggtgtggcccgggtgccggaggtttgccttaagagctcttcgagacctgggatggcgggcacgtctgcagcatcttcctggggaggaggaaaggtcgggatgttctcaaaaaacgtgtgcatcgctggaaatgtgaggtcctgcatgttgaggtcttggccccaagaagccagtatccgcagcagcagctgtgtgtctgtctggcggttccgcagagattctgttccggacaaggaatgatctaaggccccattgggttcgacgccccctagcctggctgtaagatccaggaagaaaaggggatcgcgggtggcagtgaacctgctcttcccttggcttgaagatgacctgtccctgccccatcctgcggggtgacgggattccgggcaaggtgctgggactgcggtactagtgcaccagctgaggccggcagctggagactcctagcgccttggctggctgttgcggtgggggtgggggtggaggtggctgcctcagaatggcggccgaagctaagcccctccttcctgggtggtagatcctggtgttggtagcccgagtgacggggcgtggggatgggagatggcttgaagagaattggtgactcctacctttccagacatcccgggaattccggagccggtcccaggcctccttcgtggcgtcgcgccccgcggtcagtggcaagggggacggggcgaggggggaa

SEQ ID NO: 356913 - DNA, 2125 bp, Homo Sapiens
  misc_feature (1167)..(1167): n is a, c, g, or t
  misc_feature (1247)..(1247): n is a, c, g, or t
  misc_feature (1392)..(1392): n is a, c, g, or t
  misc_feature (1394)..(1394): n is a, c, g, or t
  misc_feature (1436)..(1436): n is a, c, g, or t
  misc_feature (1486)..(1486): n is a, c, g, or t
  misc_feature (1492)..(1492): n is a, c, g, or t
  misc_feature (1553)..(1554): n is a, c, g, or t
  misc_feature (1578)..(1578): n is a, c, g, or t
  misc_feature (1597)..(1597): n is a, c, g, or t
  misc_feature (1637)..(1637): n is a, c, g, or t
  misc_feature (1676)..(1676): n is a, c, g, or t
  misc_feature (1681)..(1681): n is a, c, g, or t
  misc_feature (1693)..(1693): n is a, c, g, or t
  misc_feature (1729)..(1729): n is a, c, g, or t
  misc_feature (1731)..(1731): n is a, c, g, or t
  misc_feature (1734)..(1735): n is a, c, g, or t
  misc_feature (1763)..(1763): n is a, c, g, or t
  misc_feature (1788)..(1788): n is a, c, g, or t
  misc_feature (1852)..(1852): n is a, c, g, or t
  misc_feature (1854)..(1854): n is a, c, g, or t
  misc_feature (1875)..(1875): n is a, c, g, or t
  misc_feature (1901)..(1902): n is a, c, g, or t
  misc_feature (1961)..(1962): n is a, c, g, or t
  misc_feature (1996)..(1996): n is a, c, g, or t
  misc_feature (2031)..(2031): n is a, c, g, or t
  misc_feature (2072)..(2072): n is a, c, g, or t
cccggaattgccaaccgaaatgactggacaagtgcacgggaacggctgtcatttgcgaagtgcgccttgcgatctaggcgcctcacagcgcaaattatccagtaatttctctgaaatcgatgctggtttgttttcccaaggcaaatcagcagcttatacagacattggggccacaaagccggtggaacaacgggagacggcttcctgagtgtcaggtcctccaagatgagcttaaacttcgggtggtgggcaggctcggtaggcgggaaaggcccgtgtccagatgaatgcagtccatgtttatattgatgaaagacacgtataccatttggtccagctcaaccattcttaacaagtgctggctgtgagcactggtgtgtgtgtgcctgcgtgcaaccagcaatgtaagtgatgaccagctgcatgatgccttaatttgagtggacaaagtcggtcaagaaccactttcaggcttctgggtctccaagtctttgtctccctgtatccaaacgaggcattccaagtttgacagcatggaacattgcatgtccgaaataccaaccgtgaaactgggtaaaaagcttcaggaggtgatattgatgtgtatagtttaggaaataaaacccaatacttacttcaaagaacgtaatttgtggctttttagagagaaggatactttgacagttttcatttgtcgtctacatgtatatggtacgtttcattctgccttttaattaatttggtattttactatgaaaactactttgtattaataaaataatgtatttccaatgttataagttgtgttataacagtttcaaaagccaaataaacaagatgcattttgaaatgctccaacaacaagacgaggacttttctgatttgtgaaacaaaatcatctacactaatgagggggggcggctcaaaagtatcccccagaggggcacaagttttaagcggccccccactttttcttggaaaaagggggagcccctaatagaggagaccaaattataaaaggccaggcacgacggggccctccatgttattaccatagcctcgagtcaaataggggcaacaacaaagcaccacttgttcggccgatcaattcgaacaccccccatgaaaatataccaattgccagcacgcgcccaacaaatcgacaanaacgtaccgaatataacacaaccgtcagataaccaaagaacacatggccaccactccatctctctagacaaacgaccaangaacacaccaccagcaccgcccaagtgcccatacgggagaacccgcccgcacccgacctgtcccggacgactctaaaacgaacaagatcggtgggacgtagttataaggatgagggtgccacttcaacacgcctcactgcatacncncccataaaaccaacacgccgctcgtgtaagataaacaccganaatgaatgagttaacatacagccttctccacatcagcgcatcagctccgncttatnatcctaccaagaccaccgccgccagcctctcgtaattgacggcttgcaacaagaattcatnnattcccgtacacgaatttacgggntacccggatgcctcccccnccaagcgggccatggcacccatattgctgtttacaatccntttccacctaacctccaccccccgcgacacccgcgccgngcttnccacagaaatcnataggcgtacagaaagacaaatctgagaccgacttngnggnntattggtaaatacaacaatcaagaccanccacggcgacccccaccaactacgncttttgcccccacactaattaccgcgcattttaccctcctcaatgagagcatgattggcagcgnancgcctatcaaccctatgattngtaattacttgtaccgtaaacatccnncacgaccacccacccgaacctcaccctcacccttgaaggactaacacaaccacaaaccnngcaataaaccgcaccacctacaccctccaaccgnagcagatgacgaaaaatggatcgaggaagaacgcnagtgggttaccattaccattccaaatagtattcggggagantaacatagtatttgacgactacacggacacacgccagtgagatcgcgactatg

SEQ ID NO: 356914 - DNA, 963 bp, Homo Sapiens
  misc_feature (553)..(553): n is a, c, g, or t
gcagtcataatacaacttatttttaagcttacatgaataatttgttttattttttattccatctaaagatgtgttaccttactgcatcagagattatactaaagatatgactgtaagtccgtctttgcttcattccattttactcaaacacaaataaaattaagtacttttagtctatgctttcttgatagattcaaaatgattaaaagtgaacagtaatatatgcatatctacaaatttagtataccttacttataaaaaaatcacacatactgatatatgtttatttaagcattaagaatataaacaatgtgggaagctgtaattaaaatctaaataacagaccaaattttaaattggtaggatctttgttttatagcctaaatgaattaaaatcaataatagtcaaaagtaaaatataattctcagatcccattcttttattaagatcatgagcaggcaactccagccgtacattctgatatagttataaaagatttatatatgttataaaataaatgtgacaatttagctatatattcttattctaatnttttttaattgatgctaaccatagtgatgggagatccttctttatacaggagaacataatttattatcttattttaaaataaaattacactaaaaccccaattatttcaagaaatggggcgcaataaagcttattttattattatatcgatacttttaaaattacaagatagaccaattgttggaccttcatgcccttaaaaagggaatttacaaaaggcttaagaaaggagtccaaaagtatttttaagccttttctttgaaccccttatattagcaaattttgaaaacctatattgggtttataaccaaaagcccaaaattcttctaagctttttttataaagagttcccctaatatttaatgggaacttgcatatgtagggaaaaagagtctccttctatattaaaa

SEQ ID NO: 356915 - DNA, 833 bp, Homo Sapiens
gcgacggtttccctgctgctgcagcccccgtcggctcctcttttccagtcctccactgccggggctgggcccggccgcgggaaggaccgaagggaatacagcgtgtccctgcggcggctgcaagaggactaagcatgaatggcagccggagagtcagagcaacctctgtccttcccagatatggtccaccgtgcctatttaaaggacacttgagcaccaaaagtaatgctttttgcactgactcctcttctctcagactaagcactctccagctggtcaagaatcacatggctgttcactataataaaatcctttcagccaaagctgcagtagactgctcggttccagtaagcgtgagtaccagcataaagtatgcagaccaacaacgaagagagaaactcaaaaaggaattagcacaatgtgaaaaagagttcaaattaactaaaactgcaatgcgagccaattataaaaataattccaagtcactttttaataccttacaaaagccctcaggcgaaccgcaaattgaggatgacatgttaaaagaagaaatgaatggattttcatcctttgcaaggtcactagtaccctcttcagagagactacacctaagtctacataaatccagtaaagtcatcacaaatggtcctgagaagaactccagttcctccccgtccagtgtggattatgcagcctccgggccccggaaactgagctctggagccctgtatggcagaaggcccagaagcacattcccaaattcccaccggtttcagttagtcatttcgaaagcacccagtggggatcttttggataaacattctgaactcttt

SEQ ID NO: 356916 - DNA, 1916 bp, Homo Sapiens
tgctgctgcagcccccgtcggctcctcttttccagtcctccactgccggggctgggcccggccgcgggaaggaccgaaggggatacagcgtgtccctgcggcggctgcaagaggactaagcatggatggcagccggagagtcagagcaacctctgtccttcccagatatggtccaccgtgcctatttaaaggacacttgagcaccaaaagtaatgctgcagtagactgctcggttccagtaagcgtgagtaccagcataaagtgtatgaatctgggtgctccagtgttgggagcaaatatacctaggatagatgcagaccaacaacgaagagagaaactcaaaaaggaattagcacaatgtgaaaaagagttcaaattaactaaaactgcaatgcgagccaattataaaaataattccaagtcactttttaataccttacaaaagccctcaggcgaaccgcaaattgaggatgacatgttaaaagaagaaatgaatggattttcatcctttgcaaggtcactagtaccctcttcagagagactacacctaagtctacataaatccagtaaagtcatcacaaatggtcctgagaagaactccagttcctccccgtccagtgtggattatgcagcctccgggccccggaaactgagctctggagccctgtatggcagaaggcccagaagcacattcccaaattcccaccggtttcagttagtcatttcgaaagcacccagtggggatcttttggataaacattctgaactcttttctaacaaacaattgccattcactcctcgcactttaaaaacagaagcaaaatctttcctgtcacagtatcgctattatacacctgccaaaagaaaaaaggattttacagatcaacggatagaagctgaaacccagactgaattaagctttaaatctgagttggggacagctgagactaaaaacatgacagattcagaaatgaacataaagcaggtagcatctaattgtgtgacatatgatgccaaagaaaaaatagctcctttacctttagaagggcatgactcaacatgggatgagattaaggatgatgctcttcagcattcctcaccaagggcaatgtgtcagtattccctgaagcccccttcaactcgtaaaatctactctgatgaagaagaactgttgtatctgagtttcattgaagatgtaacagatgaaattttgaaacttggtttattttcaaacaggtttttagaacgactgttcgagcgacatataaaacaaaataaacatttggaggaggaaaaaatgcgccacctgctgcatgtcctgaaagtagacttaggctgcacatcggaggaaaactcggtaaagcaaaatgatgttgatatgttgaatgtatttgattttgaaaaggctgggaattcagaaccaaatgaattaaaaaatgaaagtgaagtaacaattcagcaggaacgtcaacaataccaaaaggctttggatatgttattgtcggcaccaaaggatgagaacgagatattcccttcaccaactgaatttttcatgcctatttataaatcaaagcattcagaaggggttataattcaacaggtgaatgatgaaacaaatcttgaaacttcaactttggatgaaaatcatccaagtatttcagacagtttaacagatcgggaaacttctgtgaatgtcattgaaggtgatagtgaccctgaaaaggttgagatttcaaatggattatgtggtcttaacacatcaccctcccaatctgttcagttctccagtgtcaaaggcgacaataatcatgacatggagttatcaactcttaaaatcatggaaatgagcattgaggactgccctttggatgtttaatcttcattaataaatacctcaaatggccagtaactcaaaa

SEQ ID NO: 356917 - DNA, 1440 bp, Homo Sapiens
  misc_feature (631)..(654): n is a, c, g, or t
  misc_feature (1165)..(1166): n is a, c, g, or t
  misc_feature (1171)..(1171): n is a, c, g, or t
  misc_feature (1240)..(1240): n is a, c, g, or t
gagataacagttgttaataaaattgatcctgttgatagtagtttgtttttgtggtgggtgctgtgaagagtaaacattactcagtggaaagctaagttcagaaggtactttgtttttcctcccttgccttaagtccttggtatttataatcaatgctgaaccttctatttcactaccgctccctgttttagatattcagatttaaaaggttttcaaagaattactttcttccatgttcaaagctagattttactaaacacatgtatcacattcatatatattgtttcttggccccactgccaaaggaagtcagtcagtaatttcacaaccgttatcagagtttggaagcagaaatagctgttaactaaaacctcccactgctcagactactttctgccctaatggccattactatccagtctgtattgctacaagggacccactggtaccccttttagattctatcaaaaggaacagggttttcctagaggcaggcagcctggtggtatggcacagcagaagcttactgctaatgaaatgggaacctccccctcccttgtggtttcagcacagaacctgaatgccaggaaaaattcctgggccaagaagctaaagctaaagaaaccttccnnnnnnnnnnnnnnnnnnnnnnnncaaactgtagggtcacttttgattgaggcaaaggggtcctactgtaagtggaaaagactcactcccctaacataagttttcactgtggtgggatggtgccgcccgatatgcttgatatgcttttccttccacatgttaagctaggaaacctaacaggatgtcagcagggcagttaactctggactcagagccctcaagggcatgtggcagaacctcatggacatcacaagaccatcagtctgaatccaggtcgtgggggctgtcatagccgaactccttctgcacatccagagggtacttgctccacatccgctgtctgctgctgcctctttcctcctcactcaggctgttgtagtcagcagagcctagaatgacatcccgggagtggattctaaatgtgattttcctaggctactgcaagaggccccttctcttctcaaaaaggcctgtttttgttcccgattgtaatgcaaaatccttgctcaataaataaaaaagaatatagaaatcnnttttntttaaagaaggaatcactttcctatcatcctaaaccaagttccttcacactggagtattttgtcacttnctcccctccgtggagtattttgtcacttctcccctccgtataggattttttgttgttgtaagagttgtagtcatattgtaaatatttttgtacctttctccttttaacgtgttattgacaaacctccccaaaagaatatgcaattgtttgattcatttctctgttatcagacaccaataaattctttttgttgggccttc

SEQ ID NO: 356918 - DNA, 1746 bp, Homo Sapiens
  misc_feature (93)..(116): n is a, c, g, or t
  misc_feature (957)..(1016): n is a, c, g, or t
ggcaccacagtgaaaacttatgttaggggagtgagtcttttccacttacagtaggacccctttgcctcaatcaaaagtgaccctacagtttgnnnnnnnnnnnnnnnnnnnnnnnnggaaggtttctttagctttagcttcttggcccaggaatttttcctggcattcaggttctgtgctgaaaccacaagggagggggaggttcccatttcattagcagtaagcttctgctgtgccataccaccaggctgcctgcctctaggaaaaccctgttccttttgatagaatctaaaaggggtaccagtgggtcccttgtagcaatacagactggatagtaatggccattagggcagaaagtagtctgagcagtgggagattttagttaacagctatttctgcttccaaactctgataacggttgtgaaattactgactgacttcctttggcagtggggccaagaaacaatatatatgaatgtgatacatgtgtttagtaaaatctagctttgaacatggaagaaagtaattctttgaaaaccttttaaatctgaatatctaaaacagggagcggtagtgaaatagaaggttcagcattgattataaataccaaggacttaaggcaagggaggaaaaacaaagtaccttctgaacttagctttccactgagtaatgtttactcttcacagcacccaccacaaaaacaaactactatcaacaggatcaattttattaacaacttgtatctcttctaagcagactctgtccgtatgcctttccaaaccatagctgccttaactgactgccttggtgtttattctagcgtaacattgtccagtagaactatctgcagtgatgatatgttctgtgtctgcactgtgtagtagtagacacgggtggctgctgagcacttgaaatgtgattagcgcaactgagaaactgagcttttaattttatttnnnnnnnnnnnnnnnnnnnnnnnnnnnnnnnnnnnnnnnnnnnnnnnnnnnnnnnnnnnnaggaaacaacacagaacattcagctaggggtgtaccctcatagcctgtgagtgtctcttactcactgtcatgggggaaggtgagttacacagggaggtaccttcttgccgcctcttttaggatttcctaagtatctctccttcatcctacctgccatcattctttgactttatgtccattttctaaacctttgcctacacttgctcttatctacatggagttgttcaacctgccgaagtgattaaattctgtgtacacaggccgtatatattgcagctaattaaaacaacaaacatcctaggcatgcacaaaggtataattcaccgttataacaggcagcaacttgtatgtctaatattagacatcttgctttctgtctgtaggcatagaaacaaaggattgaaagccattctcatacagcaaccgggtgaaaaaaacaaaacactgtgctgttacaatgtgctccctgctatttatactcattaagtttccccaatattaaagggctgacaacttaataaactgtactcactgcaaaagggataataagcacaccaggaaaaggatttaaggagacagacaacaaagagctggcagaaattaattccaccatgaagcttgagtgctgtagggatcctctggcttcgctcccaaagagaggatcctgggagaagtctgtatccagcacagaggggaaaaatgctgtcaccatccaaaaatgaaaggagcc

SEQ ID NO: 356919 - DNA, 1090 bp, Homo Sapiens
  misc_feature (874)..(874): n is a, c, g, or t
  misc_feature (878)..(880): n is a, c, g, or t
  misc_feature (886)..(887): n is a, c, g, or t
aaggaagcgaggcctgggtggcgaattcggcacgagggcggcagccactatggaggccgccaggaccgctgtactccgggtgaagcggaagcgcagtgcggagccggcggaggctcttgtgctcgcttgtaaacgcctccggagcgacgcggtcgagtcagcggcacagaagacgtcggaggatttggagagagcggcggagaataatgtcttccacttggtggccactgtgtgctcccaggaggaaccagtccagcctctcctgcgggaagttctgcgcccgtcacgggacagccagcagcgtgtccgccgtaatctccgcgcctcggctcgggaggtccggcaggagggccgctaccgggtgctttccagccgccgatccttggggaccacctcgagcggccaggagtccgagtacacgccggggaacccagaagccgccgggaactcgggctttcagttgttagaccttgtccacgaggagggagaacctgaagccgcctctgcaggctcctgcaaaacatctgacccagatgtgatcctctgcaattctgtagagttgatccgtgagcgattgactgtgtctgaggatggaccaggagtcaggcgccaggaagaacaaaaacacgatgactatgtgtatgacatttactacttggagacggccactccaggctggattgagaacatcctctccgtgcagccctacagccaagaatgggagctggtgaatgatgatcaagaaccagaggacatttacgacgatgaagatgacgagaacagtgagaataactggcgcaatgagtacccagaggaggagagcagtgatggagatgaggattccagaggctctgctgactacaacagcctgaantgannngagaannagcagcaccaaacagcggattgggagcaagtaccctctggatgggcagaaggagttcggctatgacagcccccacgaactggattcagactgatgggccttgggatgtccatgaagttctgccccatgccctttaaaggctcctagtccccagtttactggccctgcggactccgggttagggttccctaacctaacctgggg

SEQ ID NO: 356920 - DNA, 2119 bp, Homo Sapiens
  misc_feature (102)..(102): n is a, c, g, or t
  misc_feature (1605)..(1605): n is a, c, g, or t
  misc_feature (1623)..(1623): n is a, c, g, or t
  misc_feature (1685)..(1685): n is a, c, g, or t
  misc_feature (1695)..(1696): n is a, c, g, or t
  misc_feature (1699)..(1712): n is a, c, g, or t
  misc_feature (1744)..(1744): n is a, c, g, or t
  misc_feature (1749)..(1749): n is a, c, g, or t
  misc_feature (1765)..(1765): n is a, c, g, or t
  misc_feature (1771)..(1771): n is a, c, g, or t
  misc_feature (1787)..(1787): n is a, c, g, or t
  misc_feature (1797)..(1797): n is a, c, g, or t
  misc_feature (1802)..(1802): n is a, c, g, or t
  misc_feature (1805)..(1805): n is a, c, g, or t
  misc_feature (1811)..(1811): n is a, c, g, or t
  misc_feature (1814)..(1814): n is a, c, g, or t
  misc_feature (1822)..(1824): n is a, c, g, or t
  misc_feature (1831)..(1833): n is a, c, g, or t
  misc_feature (1836)..(1836): n is a, c, g, or t
  misc_feature (1847)..(1847): n is a, c, g, or t
  misc_feature (1853)..(1854): n is a, c, g, or t
  misc_feature (1856)..(1857): n is a, c, g, or t
  misc_feature (1868)..(1869): n is a, c, g, or t
  misc_feature (1873)..(1873): n is a, c, g, or t
  misc_feature (1876)..(1877): n is a, c, g, or t
  misc_feature (1900)..(1900): n is a, c, g, or t
  misc_feature (1908)..(1908): n is a, c, g, or t
  misc_feature (1910)..(1910): n is a, c, g, or t
  misc_feature (1924)..(1924): n is a, c, g, or t
  misc_feature (1929)..(1929): n is a, c, g, or t
  misc_feature (1931)..(1931): n is a, c, g, or t
  misc_feature (1935)..(1935): n is a, c, g, or t
  misc_feature (1954)..(1954): n is a, c, g, or t
  misc_feature (1964)..(1964): n is a, c, g, or t
  misc_feature (1971)..(1971): n is a, c, g, or t
  misc_feature (2001)..(2001): n is a, c, g, or t
  misc_feature (2067)..(2067): n is a, c, g, or t
  misc_feature (2118)..(2119): n is a, c, g, or t
tcttcacaccagatttcacttttgatccttccagctccagggtctcgggcttcagctttgtgccgaggcaccaacactgctgcggtcctctctccgactgancgctgatctcaccgttcccgctcctgtctcctggaaccatgtctctggtaagccagaatgcacgccactgtagcgcagagatcactgcagattacggcgacggcagaggtgaaatacaagctactaacgcctccgggtcccccacctccatgctagtcgttgatgccccccagtgccctcaggcgccaatcaactctcagtgtgtcaacacttcccaggccgttcaggacccgaatgacctggaggtcctgatcgacgagcagtccagacgtttgggggcgctcagggtccatgaccctctagaagacaggtcgattgctttggtgaatttcatgagaatgaaaagccagacggaggggtctatccagcagtccgagatgctggagtttctcagatagtactcagatcagttccctaagatcctccagacgagcctcagctcacctggaccaggttctttgggttgaacctgagagttattgatcctcaggctgacacctacaatttagtcagcaaacggggtttccagatcaccgataggatagcggagtccctggacatgccaaaagcaagtctcctggccctagtcctaggccacatcctcttgaatgggaaccgagcaagagaggcctccatttgggacttgctgctaaaagttgatatgtgggataagcctcagaggatcaacaacctctttgggaacacaaggaacctcctcactactgactttgtgtgcatgcgattcttggagtactggccggtgtatggcactaatccccttgagtttgagttcttgtggggctctagagcccacagggaaatcacaaagatggaagccctgaagtttgtgtcagatgcccatgactgaagaaccctggagctggccagaagaatataataaggccctggaaggtgacaaaaccaaagaaagaagcctgactgctggcttagagttctggtcggaggacactatgaatgataaggcaaatgatttggtccagttggctattagtgtcactgaggagatgctgcctatacatcaggatgagctattggctcacactggcaaagaatttgaggatgtgttcccaaatatcctcaatagagctactctaattcttgatatgttctatgggttgtctctgattgaggttgataccagtgagcacatctacctccttgtccagcaaccagaatcagaggaagagcaagtgatgctagagagcctggggagacccactcaagaatatgtaatgccaatcctaggtttgatcttcctgatgggcaaccgtgtcaaagaggccaatgtctggaacttgcttcgaagatttagtgtggatgtagggagaaagcattccatcacccgtaagcttatgagacagcgctatctggaatgcaggccactgtcctactctaatccagttgaatatgagcttctatggggccctcgagcccaccatgaaaccatcaaaatgaaagtcttggagtacatggccaggctcnacagaaagcgaccacagnactggccagaacaatatagggaggctgtggaagatgaggaggccagagccaaatctgaggcnactatcatgnnttnnnnnnnnnnnnnngtgaagcctagggaatatgtctcccccccgcngagtngcctaagtcaccgacnccttgnccacataggccttggngcccccaatncgaanccnggtagngcntgtgtggnnngcccccnnnccncccgccccccncgcccnnannctagtagtatnncctnccnnttaatatactcttggattaggcnaatgcccnanatttataaatggantttcncntttnccatcccggtcttgtttcngcataaaagntcagacngctctgtaaaatgtattgataatatttacntctttgaaataatcagtaaaatggtctggtacaggagttaaataacaatgacacacacacaacaanacaaacacaaaaccactgatctgtgattgctctccctttgtgtctactgcnn

SEQ ID NO: 356921 - DNA, 669 bp, Homo Sapiens
ttatatggtttctgtcgggctgactcattccacttttgaagcacccagtggattaattagtcttattattgcatttactgtcacctacacatttgtttgtgggaaggcactcctcttggcatttgcttagttggaaaaaggaacactaagactatagccactggataatgctcttgaagttcacggcactgtggcagcataaagcttgaacagacctagtttttttattgatggagtgcaactgatgtagcaccacttttctctgacactgtatattagcttttagttatgaactacttccttccagtgcagcagttgttgcctaccattggtaccagtttggcaccattataaagaaacattgtacctcttataggaagaatttggagagttttggtatggtaatcaagatgtgtattgtaataattaactgaattctgtgaacacactgtttctaccttaagtgaaagaaaaagagaacagctgcaattatttatcttcactcatttctcatagatagccaggatttttcagtgtacattctcttgtcctgaaattattttcagttcttgttgattcttatagattataatgagaaaggcacgagcaagaaatttgaaataaagaacacaaaatgagattgccctttttatataaattaatattaac

SEQ ID NO: 356922 - DNA, 735 bp, Homo Sapiens
tgcttcggtgacaagtgtacgaagaggacaaagcaagccccgggggaccgtgtctctgaccaacgggatgggcatgcggaaacaagggcatggcacaagaaaggcacaggcggctgaaggagtagaaggatgggcgccatggggtccccactgcaccggtacgagggggcccggaaccctggcaggtcaggggccctggccaagccagatctggagctgctgctccctgctgcggagaccgcggaggcttcgcgttgaccaagttccttaaagaactggctgatagggcaggaggtccaggcctgggctctcgggccctcctagagggccattggagcttgcagctcagacccccactttgagttttatttatttaaatagtagttggatgcttggcacgtcgtcctgtaataggaaacccttgcctcatcagttttcctgatttacaagtgcaatattttagccaatgccttgggagaagctgccatgcaaaggtggacaccattctccagcttcaggggatatgctcgtcccgggcaccggtggcaggcagctggccttctggactaaggcagcctggggggacactgcagtctggctacacacagagatctggcaccccctgggtggagtgtccctcgggggctttgggaaagcatggcaccctcagaccacacagtagccaagttctggagcaaataaaaggcctgtgttatttcttgttcttgaaaaaaa

SEQ ID NO: 356923 - DNA, 671 bp, Homo Sapiens
  misc_feature (86)..(146): n is a, c, g, or t
cctttaactgacaaagccatcatgagtggtcatgggccactgcttttccctttgtgagtcaatacatagtgctgctgtgtgctttnnnnnnnnnnnnnnnnnnnnnnnnnnnnnnnnnnnnnnnnnnnnnnnnnnnnnnnnnnnnnctgtaattcaggtttttcctttttttgtaccattttaaagttagtatcttttgatatgcatatttgtttatggtaaaaaatttataacgtgttcaatattttcttttcccccattaatcagttcattagaaatattttaaaatcagctattttgtgaagccatgagttccagaaagtaaaggtgacatcggaaaaataatcaaaagctatttaaagcatctataaggtgctctctttctgtcttctacagatgagtcacacctttgagcttaatctttgaaaggttagagaataaattgatttttataaatactgcaaatcaggcttttgtttcctttttcagatatcttggacaaatcacatattttaaaatttgttcttgtatttattggttttgcagaagaaggcatcgtcatgcacagtatttgtaattaaaagcaaatcatttgtttaaaaaggcagtttgcaaaaaatgtttttggtcttttataattctcattaaaagaatatctggcaaattaaaaa

SEQ ID NO: 356924 - DNA, 1016 bp, Homo Sapiens
  misc_feature (503)..(503): n is a, c, g, or t
  misc_feature (803)..(803): n is a, c, g, or t
  misc_feature (832)..(832): n is a, c, g, or t
  misc_feature (842)..(842): n is a, c, g, or t
  misc_feature (845)..(845): n is a, c, g, or t
  misc_feature (849)..(849): n is a, c, g, or t
  misc_feature (853)..(853): n is a, c, g, or t
  misc_feature (865)..(865): n is a, c, g, or t
  misc_feature (869)..(869): n is a, c, g, or t
  misc_feature (875)..(876): n is a, c, g, or t
  misc_feature (879)..(879): n is a, c, g, or t
  misc_feature (883)..(884): n is a, c, g, or t
  misc_feature (897)..(897): n is a, c, g, or t
  misc_feature (900)..(900): n is a, c, g, or t
  misc_feature (902)..(902): n is a, c, g, or t
  misc_feature (914)..(914): n is a, c, g, or t
  misc_feature (930)..(930): n is a, c, g, or t
  misc_feature (934)..(934): n is a, c, g, or t
  misc_feature (937)..(938): n is a, c, g, or t
  misc_feature (942)..(942): n is a, c, g, or t
  misc_feature (945)..(946): n is a, c, g, or t
  misc_feature (954)..(955): n is a, c, g, or t
  misc_feature (961)..(961): n is a, c, g, or t
  misc_feature (973)..(974): n is a, c, g, or t
  misc_feature (976)..(976): n is a, c, g, or t
  misc_feature (986)..(986): n is a, c, g, or t
  misc_feature (989)..(989): n is a, c, g, or t
  misc_feature (991)..(991): n is a, c, g, or t
  misc_feature (996)..(996): n is a, c, g, or t
  misc_feature (999)..(999): n is a, c, g, or t
  misc_feature (1005)..(1005): n is a, c, g, or t
  misc_feature (1012)..(1013): n is a, c, g, or t
aacggcctttttaaacaaatgatttgcttttaattacaaatactgtgcatgacgatgccttcttctgcaaaaccaataaatacaagaacaaattttaaaatatgtgatttgtccaagatatctgaaaaaggaaacaaaagcctgatttgcagtatttataaaaatcaatttattctctaacctttcaaagattaagctcaaaggtgtgactcatctgtagaagacagagagagagccccttatagatgctttaaatagcttttgattatttttccgatgtcacctttactttctggaactcatggcttcacaaaatagctgattttaaaatatttctaatgagactgattaatgggggaaaagaaaatattgaacacgttataaattttttaccataaacaaatatgcatatcaaaagatactaactttaaaatggtacaaaaaaaggaaaaacctgaaggacagaaaagtcaaatttatttaatgaaaaactaaaattaatnaaaattagcaaatacacacaaaaaaagcacacagcagcactatgtattgactcacaaagggaaaagcagtggcccatgaccactcaagatggcttgtcagttaaaggaaaaaaacccaaacacgcacacacccacgcaggcacacactcccacgcaaaaacaaactttttcaacaatacaatcaatctacaacaaacacaaaactcagaattattttacaatgcttcctttcttaatacaaaagatgcccatcttgggtgtatatacatatattttttcagtggtttactgttgacttanttttaaatatattagtgttactacatgcnactgtttccngtntttnacancctttctttttntttnacttcnnttntttnncttccccccccgnaananttttagttggcnaaaaaagggtgcctantttngtnnaaanaannttttaaanngggccnaaaagtttgttnncnattcaaaaanggnangtttnatngtgccnaattgcnnttt

SEQ ID NO: 356925 - DNA, 903 bp, Homo Sapiens
cacataaggggtgggaatccaacatcattttcgccctgccagtgaggaaagaagggccctccaggggcgaaggccaggccacaaccggttaccacggtcaaaggaaggccaaggctgggtaatccaccaaccactctgaggcgggggctctttccggaggctgaaatcccacctgactccatcttccttgcctgcctgggaactcatgccaaacaaagactgggattaggggttctgtgcccttgcctaataaggaacattcctcccatgtctcttgtgtggtcccaaaaggagaagtgagtttgccaaggatatggggcagaaggctccctctgctgaccccctgcagcctggagccagcccggggactgtcctgggtggagggccaggtgaacacaagctgctgccggggactgtcctgggtggaccggcaggtgaacacaagcggctgccgcatgtagccactcactcgactttttttcagctgtgaccattcctgggagctctttgagcctttctgtctcatttggaaccagggggaaccaggaaggggctcctggcctctctgtgtcctctgcagtgggggttgtggggggcgcagcatccacgccttgctgcccttctttcatgaagtctgttttttaagtgctggttcccccgaatattttatgcagaggagggaaaaaatatagtggcaataatattctcacagtctggtgagcaggcaattaattaggagtaagggggcctagtagagcgtggcgtgtggcagaatcgcaccgccccggctccccagcccaccgccatgcagggctcgcgtgcgggaaaactaatatgccggcgtttaagcctgtgcccctctgctgggtgtaactgcgctgaaataaatgatctgacattgtg

SEQ ID NO: 356926 - DNA, 898 bp, Homo Sapiens
caggcccaccggttcaggggtctaacccctggcctaccgtggccaatgaagttcctgacccgcccctccaaggtacgagaaagctggaggggccccaaggaatattaaggccagcccctgaaggcctttctgcaaaaaagtatgaacagcctcaaggggcatgggacacctcaattgaaacgccccccctgggcctggtgaccatgaacgtggacctggccgaccgcaccctgtctgtggcggtcaccccagtacagacggtgatcatgctgtattttcaggaccaagccagctggaccctggaggaactgagcaagccggttaagatgcccgtggcgctgctgcggcggcggatgtccgtgtggctgcagcagggtgtgctgcgtgaggagccccccggcaccttctctgtcattgaggaggagcggcctcaggaccgggacaacatggtgctcattgacagtgacgacgagagcgactccggcatggcctcccaggccgaccagaaggaggagaagctgctgcctcttctggacgtacatccaggccatgctgaccaacctggagagcctctcactggatcgtatctacaacatgctccgcatgtttgtggtgactgggcctgcactggccgagattgacctgcaggagctgcagggctacctgcagaagaaggtgcgggaccagcagctcgtctactcggccggcgtctaccgcctgcccaagaactgcagctgacacatcgcccgcccgcccgcccgcccgccaggcgctgccctgcaggtgctctcgtcctcccgtgccagcccccgcccgcccgtgtcccagaatgcactgctgaggagcatgcccacccccacccccgcagtgtgcagattaaagcaagtcagatcatcaa

SEQ ID NO: 356927 - DNA, 1588 bp, Homo Sapiens
  misc_feature (8)..(9): n is a, c, g, or t
  misc_feature (20)..(21): n is a, c, g, or t
  misc_feature (40)..(40): n is a, c, g, or t
  misc_feature (54)..(54): n is a, c, g, or t
  misc_feature (336)..(356): n is a, c, g, or t
  misc_feature (491)..(491): n is a, c, g, or t
  misc_feature (584)..(584): n is a, c, g, or t
gggcgggnngggggtggaanngagggagagagctcctgcngggcagcgcctggngggcgggcgggcgggcgggcgatgtgtcagctgcagttcttggagcaggcggtagacgccggccgagtagacgagctgctggtcccgcaccttcttctgcaggtagccctgcagctcctgcaggtcaatctcggccagtgcaggcccagtcaccacaaacatgcaggagatttgtagatacgatccagtgagaggctctccaggttggtcagcatggcctggatgtacgtccagaagagctgcggacacaggccagcccccgtcaggcacctgcaggcctcnnnnnnnnnnnnnnnnnnnnngtgggacctagcacgcgcaccagcagctcctacctccttctggtcggcctgggaggccatgccggagtcgctctcgtcgtcactgtcaatgagcaccatgttgtcccggtcctgaggccgctcctcctcaatganagagaaggtgccggggggctcctcacgcagcacaccctgctgcagccacacggacatccgcgcgccgcagacagcgccagcgggcatcttcancgccttgctcagttcctccagggtccagctggcttggtcctgaaaatacagcaagattcaccgcctgtaactggggtgaccgccacagacagcgtgcggtcggccagctccacgtccatggtcacccaggcccagggtgtgcttccaactgagggtccgcatggccttgagctgctcatacttcttgcagtaagcctcccagggctgccctgatatcctcggggacctccagcttctcgtccttgaagggcggccagaactcactggacaggatgacagcgtagaccccgaacggtggctgctcctctgctggccgcttctcatcctcctcccggatgttggcattgatgcggcgggagtccgccatgtccttcagcatgacttcacagaagtgcattggggcctcgccaaagcgcagcttcagcagctccacgttgcggatctcccgctcggggctgaagctgaactggtgcagcaggcggtcggccagcagcgagcggtactcattgatgaagaggtccttgctgccgtagatgctgaccagcaggctgatgatgtccgatgaacgccgcttggagctcgacttccctggatcggcatccacagggtccgggacccagtcctctggctcgcctgagtcatcctcactgtcctggcctgtctccaggctcgccgggtcggtcttggacagctcaacagccaggtcccctgtcccgtccgagtcccccgtcagcccagccacaatctgccgcactgtgtcctcccgcgtcctcaggtagcggcggataggctcacaggccacctccaggatgaccatggaagggtccagcacgcgcagcgccttgatggcagagatatagagggtgatgatgtcacacgtgttgacgcctggatgcaggagccgagtctccagggcagccttgagggacacgagcagctgctgcctctggtccgtcctctccaggcagtacttgacctcgtgccgaaatcgccacccaggcctc

SEQ ID NO: 356928 - DNA, 936 bp, Homo Sapiens
aaagcaggttttacagctttatagggcttggtttaataaaaagatccgggtaatttttaaaatctcatttttattctttggaagagcttggggaaggtgaagaaattctttaacctggaaaaccagaggtttttccaacctttcaaaatatttgaaaatggaggggttattgaaccaaccaattccattccttaaatgttttaaagtttattttagtagttagctctcatgccatttttttaggtaggacctgggttgctagggttttggtcttgttgagaaacatatttaaggccacaaaaatattagcaattatcacatctcccattgactcgggatctctagtgggctagtttaatcactaccacaagtttgcaagggaaatacaccgttccttctttacagataggtgaaactattgctcagggaggtgaaataaattatcctgggtctcaaggttaactgtgtagggaaaagcacccagacgtgactggttttaagcccatgtgttaagcattttattggaacaacttaaacatggttactagttttgcctttatgctaacatggatgattgcataaaaactggcatgtgagaaataaaccagcatgcccatgttatagaggcaggtaatatttagttaattgttcaagtacacaggttgacctaaaagcagaaaatataagagccttggtcttctgcctccctactgagcttggggttccatatcactttgtagagatgatcaataacaacaaatggcagaaagcagctgagacatttacattcaaatcacacactagaaaggaaaagaaaacaaaaaagagttccttttaaatggtttccaactccaaatttcctatgaagtttgacttaaaaagaaatatacttagcttcattctcggctctccaaaatcttggtcattcctaaaagc

SEQ ID NO: 356929 - DNA, 999 bp, Homo Sapiens
  misc_feature (316)..(316): n is a, c, g, or t
  misc_feature (354)..(354): n is a, c, g, or t
  misc_feature (388)..(388): n is a, c, g, or t
  misc_feature (443)..(443): n is a, c, g, or t
  misc_feature (504)..(505): n is a, c, g, or t
  misc_feature (512)..(512): n is a, c, g, or t
  misc_feature (519)..(519): n is a, c, g, or t
  misc_feature (523)..(523): n is a, c, g, or t
  misc_feature (527)..(527): n is a, c, g, or t
  misc_feature (529)..(529): n is a, c, g, or t
  misc_feature (537)..(538): n is a, c, g, or t
  misc_feature (544)..(544): n is a, c, g, or t
  misc_feature (546)..(546): n is a, c, g, or t
  misc_feature (553)..(554): n is a, c, g, or t
  misc_feature (557)..(559): n is a, c, g, or t
  misc_feature (564)..(564): n is a, c, g, or t
  misc_feature (566)..(566): n is a, c, g, or t
  misc_feature (582)..(582): n is a, c, g, or t
  misc_feature (590)..(590): n is a, c, g, or t
  misc_feature (608)..(609): n is a, c, g, or t
  misc_feature (615)..(615): n is a, c, g, or t
  misc_feature (619)..(619): n is a, c, g, or t
  misc_feature (621)..(621): n is a, c, g, or t
  misc_feature (634)..(640): n is a, c, g, or t
  misc_feature (643)..(644): n is a, c, g, or t
  misc_feature (648)..(648): n is a, c, g, or t
  misc_feature (654)..(654): n is a, c, g, or t
  misc_feature (656)..(659): n is a, c, g, or t
  misc_feature (663)..(667): n is a, c, g, or t
  misc_feature (669)..(669): n is a, c, g, or t
  misc_feature (677)..(680): n is a, c, g, or t
  misc_feature (683)..(684): n is a, c, g, or t
  misc_feature (686)..(688): n is a, c, g, or t
  misc_feature (694)..(700): n is a, c, g, or t
  misc_feature (711)..(711): n is a, c, g, or t
  misc_feature (713)..(713): n is a, c, g, or t
  misc_feature (715)..(715): n is a, c, g, or t
  misc_feature (717)..(719): n is a, c, g, or t
  misc_feature (728)..(728): n is a, c, g, or t
  misc_feature (730)..(736): n is a, c, g, or t
  misc_feature (739)..(742): n is a, c, g, or t
  misc_feature (753)..(753): n is a, c, g, or t
  misc_feature (758)..(758): n is a, c, g, or t
  misc_feature (783)..(783): n is a, c, g, or t
  misc_feature (785)..(785): n is a, c, g, or t
  misc_feature (788)..(788): n is a, c, g, or t
  misc_feature (792)..(792): n is a, c, g, or t
  misc_feature (794)..(794): n is a, c, g, or t
  misc_feature (801)..(804): n is a, c, g, or t
  misc_feature (810)..(810): n is a, c, g, or t
  misc_feature (817)..(817): n is a, c, g, or t
  misc_feature (823)..(823): n is a, c, g, or t
  misc_feature (825)..(825): n is a, c, g, or t
  misc_feature (831)..(831): n is a, c, g, or t
  misc_feature (834)..(834): n is a, c, g, or t
  misc_feature (847)..(847): n is a, c, g, or t
  misc_feature (849)..(849): n is a, c, g, or t
  misc_feature (851)..(851): n is a, c, g, or t
  misc_feature (854)..(854): n is a, c, g, or t
  misc_feature (858)..(858): n is a, c, g, or t
  misc_feature (861)..(862): n is a, c, g, or t
  misc_feature (876)..(877): n is a, c, g, or t
  misc_feature (880)..(880): n is a, c, g, or t
  misc_feature (890)..(890): n is a, c, g, or t
  misc_feature (902)..(902): n is a, c, g, or t
  misc_feature (904)..(904): n is a, c, g, or t
  misc_feature (909)..(909): n is a, c, g, or t
  misc_feature (912)..(912): n is a, c, g, or t
  misc_feature (915)..(915): n is a, c, g, or t
  misc_feature (922)..(922): n is a, c, g, or t
  misc_feature (927)..(928): n is a, c, g, or t
  misc_feature (934)..(934): n is a, c, g, or t
  misc_feature (936)..(936): n is a, c, g, or t
  misc_feature (941)..(941): n is a, c, g, or t
  misc_feature (945)..(945): n is a, c, g, or t
  misc_feature (950)..(950): n is a, c, g, or t
  misc_feature (952)..(952): n is a, c, g, or t
  misc_feature (957)..(957): n is a, c, g, or t
  misc_feature (962)..(962): n is a, c, g, or t
  misc_feature (967)..(968): n is a, c, g, or t
  misc_feature (970)..(970): n is a, c, g, or t
  misc_feature (987)..(987): n is a, c, g, or t
  misc_feature (991)..(991): n is a, c, g, or t
  misc_feature (993)..(993): n is a, c, g, or t
  misc_feature (997)..(997): n is a, c, g, or t
gtaaacagcaaactattttattcttgttttctatttaccaattcaaacttgctctgcaggtcactcctccctgcccctgggaaaaaatctagggcatgttctgtgactttctggatcacaaaattcacatgatttttggatcattctcagttaaccaaaaatttgtcctgtaacttctagctataaaaataggctctgttcagcatttaaaatgtccaatcccatgtaggagtctaaactttcgatttcattttaagtttaagcttcctcttgattcctcccccaagcctggcccaggcttgcatttgggcttcanggcattcggcgggtagcactctttcctctccatttatncactttcactcttccctccccaactagcttgcangggatttctgatcacctagtagagtctagaggcgtaagggaaggagggcaccaanggggcaggccaggctttatgggaatagtgctgttgcgagccaagtacttgagtacttcgannggccccntctactngcangcancntccctatnngtcctntnagcccannttnnnctcanantgggggttagcacacngggaccanctccatcccctttaaaannatttantacntnttgcggcggcaannnnnnngcnngggngttcanannnncccnnnnnanggctttannnngcnngnnngccaannnnnnntttctgcccanantntnnnggcactcangnnnnnnnctnnnnaggcagaaagnatggntttaaaaaaatcatcgattttcttncnttngacncngcacttnnnngcagcnggatgcnccagtncncttgcnatnattttgggcaaanantngcnacantgnnaaaatataaaaaannacntggcaaaatngcgtctacaaantncaagncanttncatcagngtaanngcagtntnggcancaanggcancnagggnccgangcagnncngcaatatgggggggcgncctngntgantg

SEQ ID NO: 356930 - DNA, 770 bp, Homo Sapiens
cagtacagatcagccatcctggatggaacttgccagaaagaaatctcaagcttggagtgacatgccccagattataaaataggtgggcagtgtgctgataaagcatgtccactagccctgacaagccacttagttaaaaactgccagtgtattgtggcaaacaaactgtgaaacttaaagattgattttatcatcaagttatgacgaacttggggaagaggaaggaaccaggcaaaacaaagaggataaacacacagccatactcctgggccagagggcccagaaacaagaacaacattgaaaaagtccaggaaccagttcctgtgcccaaaggtacgaatgtgtcttttcgaattcccttgataaagaagcctcagacaaggaagaaaatagaaatgaaattggacacataaataggacacccagcaaaggccagaagagaagcccttctaggagaagggacatctgtgcttccagctgagatcagcccatgtctctggtcgctctcttgcctgtggatcctgtcttctttcatgtttactacgaggcatgacattcatggcaaaacagggatgccgtttccaagagcagctataaaacaatctgttttcctaaagacagccactctgagaaggagatgaaggaacacggcagggttcatcaattcatagactgtttccaaaaataatttttaaacttttccactaggcatctgtgtctttaaccactgcacaatgcattgcctgtttaataaaaggtttcaaacatgc

SEQ ID NO: 356931 - DNA, 950 bp, Homo Sapiens
  misc_feature (38)..(38): n is a, c, g, or t
ccaccattgaataaatattggcaggcctacatccaggngcacagaatggatgtttctgtgggtctctgtgtgtgcaggatttcttccacactatgactgatcagggaaaggggtgggtttgggctaatttacagatcacaggcaggagccaacatctaaaggcctttcacctgagacacaggacattatgaatcctcctaagtgtcttggcagatggtgatagtggcagaaacaaaaccaaatgatctatagctatgtttacaatgagaattaatcacatttcattcggtagctgggactatgatgggcaagcatgccactcaagcaagggcacaccctctcaatacagccctcctcagtcttcgattcacaatcttacacatggattccaaagttgccataaaggttcttttgtcagggcataactgctgcattttcataactgtagaaagtgtgggtagagaacctcctattctgccatcttgctatgccatatgttccgatatgttctatgtcaaatttatctgattacagattcagaatttctgaaataaagtactcagatttacacattgtgtaataagtaaatgtattgcaatgcttcattctcattagagcattttattaattattgaaatgcatttgcttttattgcggcgcatggcatgtcaaagattcaaaatgccagctcttcataagtcacagttgaaaactagttatttaaaggattgtttttatgatacgtctgtattatattcaatattttataggtcagaattttctcttgttttcaactgtattttactggggagtctcttttcatgtaggttctccttgatcatttacttttttgtgtgtttttaatcttcatatttgtatggtaattttcaactttgtaccttttatgaccatgtattgtttaattcccaataaaaatcattggaagcaag

SEQ ID NO: 356932 - DNA, 1615 bp, Homo Sapiens
  misc_feature (109)..(109): n is a, c, g, or t
  misc_feature (197)..(197): n is a, c, g, or t
  misc_feature (777)..(786): n is a, c, g, or t
  misc_feature (1074)..(1074): n is a, c, g, or t
  misc_feature (1128)..(1128): n is a, c, g, or t
  misc_feature (1132)..(1132): n is a, c, g, or t
  misc_feature (1197)..(1197): n is a, c, g, or t
  misc_feature (1207)..(1207): n is a, c, g, or t
  misc_feature (1234)..(1234): n is a, c, g, or t
  misc_feature (1240)..(1291): n is a, c, g, or t
  misc_feature (1309)..(1309): n is a, c, g, or t
  misc_feature (1395)..(1395): n is a, c, g, or t
  misc_feature (1416)..(1468): n is a, c, g, or t
  misc_feature (1498)..(1542): n is a, c, g, or t
  misc_feature (1559)..(1567): n is a, c, g, or t
  misc_feature (1583)..(1583): n is a, c, g, or t
cccacaatacaggaatgaaaatgtatttaatttctccattgtaaccaaaagctatacatttggtttgtgtttatggccactaagcaccatctggccaagacacttaggnaggatttcataatgtcctgtgtctcgaggtgaaaaggcttttagatgttgcttctgtctgtgatctctgaattaccccaaactgcacnccttgcacatgtcagtcatgatgtggaagaaatcctactcacacagggacccacagacagaaatatccatctctgcccctggatgtaggcttgccaatatttatttgatggtggatcttgacgtggcactacaacttggctccaagtccatgcaaccaaaatccaggaggagtttttcctgacctgtgacctgcccaaaagcacagctacatgtgtccctgtaggcatgctggctgactttattcccaccgtgaattgtgaagcagtcctataaccaagctccagtccctggcagctagaggcagggagaagtcctgcccacctagaaatctggagggagaaatgtcatgaacccagaacaaacctgaagactttggtctcagctgtgtatcctgaagcagccctatgaattagtttcacaccctctcagctgtgatcaacgctcagtaacggtcatctagaaacctgtccaatgactaggttagagcatttccaaacatctcgcaagagccaaacagcaggagccacacctactcatatttattgtatcagcatctccatttgcagatattaactgggnnnnnnnnnnctcagcaccagtcttatttgatcaagatcttaaagaaagttcagtctcctcagaaaaatggaatcctcaactgtctgatgcttaaataacaggtctgccaagcattaacttcactgtagacccagtagtagttatgtgaccaggatccaatgcagttgactgtgatcctagtgaaaatctcatcagcccagaaaaccaatagaagatatttacctccctaaactagtctgtaatgattgaaagaagtatttatctccttcagatgcaagaacatcaaaacaaggcttnacagattatgataggatcaggcaaacctaacagcacaaaaagaaactaaaaatnctcnaggaacaattaataataaaacacagatctagaaatatgtctaacagagaattcaaagtaattatnttaaaaaatntcaataagagtccaggcgaggaggctnacactnnnnnnnnnnnnnnnnnnnnnnnnnnnnnnnnnnnnnnnnnnnnnnnnnnnnatcgtgaccatcctggcnaacatggtgaaaccgtctctactaaaaatacaaaaattagccaggtgtggtggcacattcctgtatatcttagctacttgggaggntgagactaggagaattgcttnnnnnnnnnnnnnnnnnnnnnnnnnnnnnnnnnnnnnnnnnnnnnnnnnnnnntgtttggaaacagaataagactccatcttnnnnnnnnnnnnnnnnnnnnnnnnnnnnnnnnnnnnnnnnnnnnngtacacagattactaannnnnnnnngcaacaatgcatgaanaaaatgagttataaaaaagaaggagagttggg

SEQ ID NO: 356933 - DNA, 692 bp, Homo Sapiens
  misc_feature (508)..(509): n is a, c, g, or t
  misc_feature (623)..(623): n is a, c, g, or t
gtaaacctaagactgatgagggctgtattgagaaggcatgagcttgcttgagtggcatgcttgcccatcatagtcccagctacaaaataaaatatgattaattctcattgtaagtatagctgtaggccatttggttttgtttatgccactagcaccatctgccaagacaccaaggaggattcataatgtcctgtgtctcaggtgaaaggactttagatgttgctcctctcagtgatctccgaattagccccttgcacacatctatcatgatgtggaataaatcctgcacatgcaggaacccacagacagaaacgtccatctgtgcccctggatgtaggcttgccaatatttatttaatggtggatcttgacgtggcactataatctggctcccagtccatgaaactgaagtccagaagcagtttttcctaacctgggacctgccaaaaaacacactatatgtgcccctgtaggcatgctggctgactttattcccactgtgaatcttnnggaagcagtcctaaaacccagctccagtcccaaaacctacctccagtccctgtcaactaaagtctgggagcagtcctgcccacccaggaatctggagggagaaatgccatgaangccagaaacaaacctgaagacttttggtctcagctgtgtatcctgaagcagccctatgaatcagttcca

SEQ ID NO: 356934 - DNA, 1037 bp, Homo Sapiens
  misc_feature (944)..(944): n is a, c, g, or t
  misc_feature (951)..(951): n is a, c, g, or t
  misc_feature (965)..(966): n is a, c, g, or t
  misc_feature (969)..(970): n is a, c, g, or t
  misc_feature (990)..(990): n is a, c, g, or t
  misc_feature (994)..(995): n is a, c, g, or t
  misc_feature (998)..(998): n is a, c, g, or t
  misc_feature (1020)..(1020): n is a, c, g, or t
tgcgaggtcggttccgcccgactctaacatggcggcgccctttgtctgctctggagtgccgtccccggccttctcgcggccgtgatgcacctccctctgcggtggggtccgggacatggcaggtaatgagccggacgaggggagccaagctggagtttacacaggcaaactgtcagaaaagagtagcctgggctgtctggaaatctgagccatggactttccccagcacagccagcatgtcttggaacagctgaaccagcagcggcagctggggcttctctgtgactgcacctttgtggtggacggtgttcactttaaggctcataaagcagtgctggcggcctgcagcgagtacttcaagatgctcttcgtggaccagaaggacgtggtgcacctggacatcagtaacgcggcaggcctggggcaggtgctggagtttatgtacacggccaagctgagcctgagccctgagaacgtggatgatgtgctggccgtggccactttcctccaaatgcaggacatcatcacggcctgccatgccctcaagtcacttgctgagccggctaccagccctgggggaaatgcggaggccttggccacagaaggaggggacaagagagccaaagaggagaaggtggccaccagcacgctgagcaggctggagcaggcaggacgcagcacacccataggccccagcagggacctcaaggaggagcgcggcggtcaggcccagagtgcggccagcggtgagtcagatgccaaggacccagccggctgtcctgtcacctcccagcagcctgggcacagggtagtgagggctgccttggggcaggtagcacgggcacctgcacctcttgagcctgtgttacccagaatgacctattgtgtgttccagggggtctgtttcaaccagagcagacacaacagcctggctaggggttgtntggggcnccctcctgggtcanngcnncaccacagcgcgcggtcagnaagnntcnaccctggcaaaggtaacatcanctccgtgcttcccacca

SEQ ID NO: 356935 - DNA, 2720 bp, Homo Sapiens
ttccgcccgactctaacatggcggcgcctttgtctgctctggagttgccgtccccggccttctcgcggccgtgatgcacctccctctgcggtggggtccgggacatggcaggtaatgagccggacgaggggagccaagctggagtttacacaggcaaactgtcagaaaagagtagcctgggctgtctggaaatctgagccatggactttccccagcacagccagcatgtcttggaacagctgaaccagcagcggcagctggggcttctctgtgactgcacctttgtggtggacggtgttcactttaaggctcataaagcagtgctggcggcctgcagcgagtacttcaagatgctcttcgtggaccagaaggacgtggtgcacctggacatcagtaacgcggcaggcctggggcaggtgctggagtttatgtacacggccaagctgagcctgagccctgagaacgtggatgatgtgctggccgtggccactttcctccaaatgcaggacatcatcacggcctgccatgccctcaagtcacttgctgagccggctaccagccctgggggaaatgcggaggccttggccacagaaggaggggacaagagagccaaagaggagaaggtggccaccagcacgctgagcaggctggagcaggcaggacgcagcacacccataggccccagcagggacctcaaggaggagcgcggcggtcaggcccagagtgcggccagcggtgcagagcagacagagaaagccgatgcgccccgggagccgccgcctgtggagctcaagccagaccccacgagtggcatggctgctgcagaagctgaggccgctttgtccgagagctcggagcaagaaatggacggtggagcccgcccggaaaggggaagaggagcaaaaggagcaagaggagcaagaggaggagggcgcagggccagctgaggtcaaggaggagggttcccagctggagaacggagaggcccccgaggagaacgagaatgaggagtcagcgggcacagactcggggcaggagctcggctccgaggcccggggcctgcgctcaggcacctacggcgaccgcacggagtccaaggcctacggctccgtcatccacaagtgcgaggactgtgggaaggagttcacgcacacggggaacttcaagcggcacatccgcatccacacgggggagaagcccttctcgtgccgggagtgcagcaaggccttttccgacccggccgcgtgcaaggcccatgagaagacgcacagccctctgaagccctacggctgcgaggagtgcgggaagagctaccgcctcatcagcctgctgaacctgcacaagaagcggcactcgggcgaggcgcgctaccgctgcgaggactgcggcaagctcttcaccacctcgggcaacctcaagcgccaccagctggtgcacagcggcgagaagcactaccagtgcgactactgcggccgctccttctccgaccccacttccaagatgcgccacctggagacccacgacacggacaaggagcacaagtgcccacactgcgacaagaagttcaaccaggtagggaacctgaaggcccacctgaagatccacatcgctgacgggcccctcaagtgccgagagtgtgggaagcagttcaccacctcagggaacctgaagcggcaccttcggatccacagcggggagaagccctacgtgtgcatccactgccagcgacagtttgcagaccccggcgctctgcagcggcacgtccgcattcacacaggtgagaagccatgccagtgtgtgatgtgcggtaaggccttcacccagggccagctccctcatcgcccacgtgcgccagcacaccggggagaagccctacgtctgcgagcgctgcggcaagagattcgtccagtccagccagttggccaatcatattcgccaccacgacaacatccgcccacacaagtgcagcgtgtgcagcaaggccttcgtgaacgtgggggacctgtccaagcacatcatcattcacactggagagaagccttacctgtgtgataagtgtgggcgtggcttcaaccgggtagacaacctgcgctcccacgtgaagaccgtgcaccagggcaaggcaggcatcaagatcctggagcccgaggagggcagtgaggtcagcgtggtcactgtggatgacatggtcacgctggctaccgaggcactggcagcgacagccgtcactcagctcacagtggtgccggtgggagctgcagtgacagccgatgagacggaaagtcctgaaggccgagatcagcaaagctgtgaagcaagtgcaggaagaagaccccaacactcacatcctctacgcctgtgactcctgtggggacaagtttctggatgccaacagcctggctcagcatgtgcgaatccacacagcccaggcactggtcatgttccagacagacgcggacttctatcagcagtatgggccaggtggcacgtggcctgccgggcaggtgctgcaggctggggagctggtcttccgccctcgcgacggggctgagggccagcccgcactggcagagacctcccctacagctcctgaatgtcccccgcctgccgagtgagctggcggcccttctgactgtttatttaaggatggatggcaccctggaaccgggaagggtggcctgttccctagagagaataaattggattattttctaaaaaaa

SEQ ID NO: 356936 - DNA, 1074 bp, Homo Sapiens
  misc_feature (813)..(813): n is a, c, g, or t
ggcctgggtggcgaattcggcacgagggacagttggtgtccgttcggctgctcgggtcggattccgcggtcccaacccttccccatggccgaccctgagaagttgcaggtttcttcgccgcccccgccgcctccctcttctccctcctcttcagacgcctctgcagcatcttacccgggcagcccagtgagtttgggctggccagttccgagcaggagcagcggcccaacggtggaccagctggaggaagtggagctgcagatcggagacgcagccttttcattaaccaaacttcttgaagccacatctgcagtatcagctcaagtggaagaacttgccttcaaatgtacagaaaatgcacgtttccttaaaacgtggcgggacctcttgaaagaaggctatgattctttgaaacctgatgactgatttggcatacttcgttgtttaataatgactgcaataattcatacttcttatgtcatattttgtacatgtaccacacatataggatgacctctgtccagcagttctgtatatactcagaatgaaatttttcttggttttcttggtttttgtgaaagcagaataccgatgctatttttgttgcggaccagtacttgtttgtccttaaatactttatgcctctgaactttcatagaatcctttatgaaagttaacttcatcaatagacggttaatattaatagagccacagtgctaccagtagcaaactaggtagaccattatttgttttgccacaagatgctaagcatggcagactttgaagttgcgtttcatcttaaggaccaagggnaggtaactttaaggttgcccagggggggatccagcctccgttagggctaagtgtctacaggctaatgattggggcctttattccaaatcccccagccacctaaaacaggggtcccacaacatttccctaaaaggtttggttggattaaaagaagttaaccaaccttaatttggaaagcttttttttcccttcccatatttagccatggaaaaagggccacttggtttccccctgggaaatggtttgaaattttgaaatttt

SEQ ID NO: 356937 - DNA, 685 bp, Homo Sapiens
cttagatgtttcatggagcttattttgagaactttcccatttcaggtttctgcattcaggctttacatggtcagttaactcagagataccccagctgtttatcatcagctcctctgaaatgtgatccctttgtaactgtgctcatcacttcgccagtgcgttcaatgacacgctgatggcaggtggtccctgctgaaacccccacgcctccgcttcagcatctccacgctctgaagctgtctttcaaaatgtgtgcactgacccccttgtttgatcaaatttgtgtaaaatttttttagaagagatggcttattaacagggaagaagcttgttatattccagttgtaagaatagccttagtgtttagatttttttatgatagggaagatgcggccatcactgggatattttcaaatcccaaggacatcagagtgaagtgtcagttgtcagatgattttaaaagttatgtcttcagagaaaaaaagattcattttctcattttaagccaattaaatattctgagtgagactaatcactcatttgcctacgaccttttagaaaagttgttttgttgaaatactgtacgtacgcttaatctaaatttgcattgactatgttttagtgtatttataaatggtgaactcagtttctgaaattaaacttcttatttgcaattttaaaaaaa

SEQ ID NO: 356938 - DNA, 904 bp, Homo Sapiens
cctgggtggcgattcggacgaggacacccactgagaacggtagccttggccaatccaggctcatgatggaacattttgaaaaacttatctttttgaaagtgaatcttcccttaatatactttcagtattgaaactcacgacggcaccactaggccagaggcgtggctgccccagcgttagcagcctgtaccaggtctatgacccgctctgcccacggctgtgtacgacatcagaccaggcactctcagggccgctctccagctcaccacagtgtctccacgtgccttaccccttctccttcaggccaagtttcgcggggtgttttattaagacgtccactagaaatagcttgtcctgtcaactatgaaatatggtgactagattttaattcataaccgtaaagttttttaaagttttgggttagtaatttgttttactagaatgacaaagaagatgtaaaccattttattctgtaggctttttactcaattatgtacaaaccacaaatcaggtactgtattttagtgaagcattgctttaattgcaacagaatagcttttgtggctatcaaatgaaatctgtaaataggaggtggagggcaagccatcctgactgagcagtttttaaccgcaggttctaaagtgtcccgcggagtacagataatattctggaaggtaactgtttactacgacagagacgtggcatttggaaaccaaacttagatgtttcatggagcttattttgagaactttcccattttcaggtttctgcattcaggcctttacatgggccagttaactcagagatacccccagctggtttatcatcagcttcctcctgaaatgtggatccccttggtaactgggcctcatccctttccccagtgcggttcaatggacccgct

SEQ ID NO: 356939 - DNA, 575 bp, Homo Sapiens
  misc_feature (416)..(416): n is a, c, g, or t
  misc_feature (450)..(450): n is a, c, g, or t
  misc_feature (471)..(471): n is a, c, g, or t
  misc_feature (479)..(479): n is a, c, g, or t
  misc_feature (491)..(491): n is a, c, g, or t
  misc_feature (509)..(509): n is a, c, g, or t
  misc_feature (535)..(535): n is a, c, g, or t
ggagaacctgtggtcacttgtggccaaggtgaagaagaaagacccaagagaaaagctgcctgaagccatggtgcttgcgtatctggaggaggaggtgcttgaacacagctgtgacccgctcacctactggaacctgaagaaggcgtcctggccggggctgtccgcgctggccgtcagatttttgggctgccccccaagcatcgtcccttcagaaaagctgttcaacacacccactgagaacggtagccttggccaatccaggctcatgatggaacattttgaaaaacttatctttttgaaagtgaatcttcccttaatatactttcagtattgaaactcacgacggcaccacttaggccagagggttgggcttgccccagcgtttagaggcctgttaccaggtcttattgacccgnttttgcccacggttgtgttacgacattcagaccnggcattttcagggccgttttncagtttancacagtgttttncaagtggctttacccttnttctttagggcaagttttggggggtnttttatttaaggacgttcattggaattaggtttttctgtt

SEQ ID NO: 356940 - DNA, 1244 bp, Homo Sapiens
  misc_feature (5)..(5): n is a, c, g, or t
  misc_feature (54)..(54): n is a, c, g, or t
  misc_feature (58)..(58): n is a, c, g, or t
tttcnagtctctggcatgtgtagcctctcctggtcatagaccagtctctttgtnagtnattgtggcagttcacacagtagccaccaggggtctctgtttccattacaaactttgttctgtctgggccagagaacctagcctttgaaatctctccatcatatgaaacataacgggatgggacaatcccgtaacctgtttggggttgggggctttctctctgtgttctttccattgatgtgaattggtcattggtgtttgctcttgcctctcctccatcccctagaagtacacccccgtcttattaaggagcttttaaagtttttctgaatgtatagacatttctcgggttcctacctttgtctctgatggaccattttccatttaagacattttcctgtataagacagttttatagctggttccttttcaaggtaaagagtcttaaagagagttttattgtgtctatggcaggtttgggaaaggtaagaaatgggtcctttcccctcctaatgtttttagaacttaaaaaataaaattcattatcctattaaaaaattaaattaagctttgctaatccagaaattgttcccaaatgaaaacttgttttaagtccaccccttagtttccttattttacaaggtctctcttcagggaccaacaggggcttagagagccttagttagattaaagggagaccctacctcttaaaaccagttttcatttatccaaacaaggacaattaagggaaccctgaccccacaggctctcaagtcttcccaaggccagaatcgaaagaaaattaaaatttgaatgctgaatattctggctctactctggccttttttctggttcccttccaaaatgcacaaatcatacccttgtctgctccaattcagtctccaaacctggtgcctgtcctcctggcccccctagcatcatgctttgccagggagttcaggaccaggacacatccccaggtcagtctcatgggttctcagacagctaccttgagttaaagcctgaacctcacccttccttgctttggtttcttgaataaaaagctggccttatatttcagccctaatattttctttgattccgcaaaagaggggtgctgcccttcttgtagggaaaatcgggtgtggttatctttgaccagaagagatctctttggcccaccccggtaattgttctaggtttatggaagtggtcagctcttatttttattccgcgcaaaggaaaag

SEQ ID NO: 356941 - DNA, 2069 bp, Homo Sapiens
  misc_feature (1724)..(1724): n is a, c, g, or t
  misc_feature (1922)..(1922): n is a, c, g, or t
  misc_feature (1951)..(1951): n is a, c, g, or t
  misc_feature (1953)..(1953): n is a, c, g, or t
  misc_feature (1975)..(1976): n is a, c, g, or t
gcccggccagtgctgagaatgtaatggagatgatcctgcctatccctgagttccagtctagtttactgtcagagaatacttatttccatttttcctattttgttcttgagtctctttcctcagaatttacttttccacttaaatgacgtacgcagcttttaaatttgcgttgtaagatttattttggctctccccgcctgttctttgcacattaaaaatgaaaaagtttgtagaactaagctaagcagatggtcttcctgcaaaaagaccgggctgaagtaaagcacttgttttggacctggttcacagaaaaaaggcaaaactggttatcctgaccctcaagctccaacataaactgctcgctttctccgggaaacttgccccgccacacacacttgactgcgtggccagttctttcgaagcctctcgctcccaacacggagttcctcccatttcttcacagtcggctctcagcagctgctgctggtttctcggctccaagcaccacgagtaccgcactctgaggtttacaaagcactctgcttcaccgactgtgatcctcacagtcctgtccggtggcctcacgcaggtggcggtgcagcctttcaggcccagagcggccaggagcgaagcccgcagccccgcctggaagcgcagcgcggtcggtcgcgcgcccctgaggcttggaggcctgggcttcccccagcagcgctcgagcaccgccccagtcgagcctcacaccggatgccacttcatatttgggcccagagctcaattcgcgccgatgcggtccgccgtccttaaatctcttcagccaggatctctccccgactgcaaagcagccctgggcgggagcggcaacatctccacgtcacccttttggagccgccgacattcagaggggcaggacacgggaacgcgcgctgtcttgctttacggcgcgggtgcgcgagtttgcggcagcgtgacgccctcaagtttggcgggaaaagcgctgcatttggattcctgcagtggtgggcaaaggacagtccgccgaggtgctcggtggagtcatggcagtgccctttgtggaagactgggacttggtgcaaaccctgggagaaggtgcctatggagaagttcaacttgctgtgaatagagtaactgaagaagcagtcgcagtgaagattgtagatatgaagcgtgccgtagactgtccagaaaatattaagaaagagatctgtatcaataaaatgctaaatcatgaaaatgtagtaaaattctatggtcacaggagagaaggcaatatccaatatttatttctggagtactgtagtggaggagagctttttgacagaatagagccagacataggcatgcctgaaccagatgctcagagattcttccatcaactcatggcaggggtggtttatctgcatggtattggaataactcacagggatattaaaccagaaaatcttctgttggatgaaagggataacctcaaaatctcagactttggcttggcaacagtatttcggtataataatcgtgagcgtttgttgaacaagatgtgtggtactttaccatatgttgctccagaacttctgaagagaagagaatttcatgcagaaccagttgatgtttggtcctgtggaatagtacttactgcaatgctcgctggagaattgccatgggaccaacccagtgacacccgtcaggagtattctgactggaaaganaaaaaaacatacctcaacccttggaaaaaaatcgattctgctcctctagctctgctgcataaaatcttagttgagaatccatcagcaagaattaccattccagacatcaaaaaagatagatggtacaacaaaccccctcagaaaggggcaaaaaggcccccgagtcactttcaggtgggtgtgtccagagtctcccangtggatttttctaagcacatttcaatccnanttttgggactttctcttccagnntaaacagtggctttctaagtgaaagaaaaatggtggaaggtactccaaggttcctcagcccagaaaacccccggcacagggtcttttttccca

SEQ ID NO: 356942 - DNA, 1071 bp, Homo Sapiens
  misc_feature (507)..(515): n is a, c, g, or t
ggcctgggtggcgaattcggcacgaggggcaaaggacagtccgccgaggtgctcggtggagtcatggcagtgccctttgtggaagactgggacttggtgcaaacccggggagaaggtgcctatggagaagccagacataggcatgcctgaaccagatgctcagagattcttccatcaactcatggcaggggtggtttatctgcatggtattggaataactcacagggatattaaaccagaaaatcttctgttggatgaaagggataacctcaaaatctcagactttggcttggcaacagtatttcggtataataatcgtgagcgtttgttgaacaagatgtgtggtactttaccatatgttgctccagaacttctgaagagaagagaatttcatgcagaaccagttgatgtttggtcctgtggaatagtacttactgcaatgctcgctggagaattgccatgggaccaacccagtgacagctgtcaggagtattctgactggaaagnnnnnnnnncatacctcaacccttggaaaaaaatcgattctgctcctctagctctgctgcataaaatcttagttgagaatccatcagcaagaattaccattccagacatcaaaaaagatagatggtacaacaaaccccctcaagaaaggggccaaaaaggccccgagtcacttcaggtggtgtgtcagagtctcccagtggattttctaagcacattcaatccaatttggacttctctccagtaaacagtgccttctagtgaaaaaagatgtgaaggaactccaatttctcagccagaacccccggaaaggtcctttcccttatggggataccacccccctcatacattggataaatgggggacaagggaatcggctttttcccccaccccacctggttcccggatcaaattggctttttgaaaaagccccgtttactggcgaccccccggaatccctccccgaaaacccccgggcaagagggctggggccaaaaagaaagggcccgcaattcctttaacccaaatggggaatgccacaaccaaaccttatttccaaggggctgg

SEQ ID NO: 356943 - DNA, 2240 bp, Homo Sapiens
  misc_feature (273)..(273): n is a, c, g, or t
  misc_feature (392)..(392): n is a, c, g, or t
  misc_feature (395)..(395): n is a, c, g, or t
  misc_feature (828)..(828): n is a, c, g, or t
  misc_feature (853)..(853): n is a, c, g, or t
  misc_feature (890)..(890): n is a, c, g, or t
atctgctcctgtgctttggggatggaaaccagtatgtgcgtgaggctgcagatgactgtgccaaggctgtgatgagcaacttgagtgctcacggggtgaagctggtgctcccctccttactggctgccctggaggaggaatcgtggcggaccaaagctgggtcagtggagcttcttggggcaatggcgtactgtgctcctaagcagctgtcatcctgtctacccaacattgtgcccaagcttacggaggtgctgaccgactcccatgtcaaantccagaaggctggacagcaggcgctcaggcagatcggctccgttatcaggaacccggagatcctggccattgctccagtcctcctggatgccctgacggatccctccaggaagacccanaantgcttgcagaccctgctggacaccaagtttgtccacttcattgatgccccatccctggccctcatcatgcccattgtccagagagccttccaggaccgttccacggacacgcggaagatggcagcccagattattggcaacatgtactccctgacagaccagaaggacttggctccgtacctgcccagcgtgacgcctggcctgaaagcatcgcttttggaccctgtgcctgaggtgcggaccgtatctgcaaaggcccttggggccattggtgaagggcatggggggagtcgtgctttgaggacttgctgccgtggctgatggagacactgacctatgagcagagctctgtggatcgctcaggcgctgcacaggggttggctgaggtcatggccggtttgggggtggagaagttggagaagttgatgccagnaaatcgtggctacagccagcaaagntggacattgcaccccatgtccgagatggctacattantgatgtttaactacctgcccatcacctttggagacaagtttactccttatgtggggcccatcatcccctgtatcctcaaagtaggtaccatgaccttggcaagggtagagtccttgaggagggcaggaggcaagtgctcacctggagagctagagatccctgctggctggggttggttggcagagccctcagccttcagtgagccccatgttttttgggctggggcctgggggtggcagctctggctgacccaccctctgtgtgcccaggctcttgctgatgagaatgagtttgtgcgtgacaccgccctgcgcgcgggccagcgggttatctccatgtacgctgagacagccatcgccctgctgctgccccagctagagcaaggcctctttgatgacctttggagaatcaggttcagctctgttcagctccttggggatctcctgtttcacatctcaggagtcactgggaagatgaccacagaaactgcctctgaggatgataactttggaactgcccagtccaacaaggcgatcatcactgccctgggggtagagcggcggaaccgggtgttggcagggctgtacatgggccgctcagacacccagctggtggtgcggcaggcgtccctgcatgtctggaagattgttgtctccaataccccccgcaccttgcgtgagatcctacccactctctttgggctcctgctgggtttcctggccagcacgtgtgcagataagagaacgattgcagcgagaacattgggagatcttgtgcggaagttaggggagaaaatcctccccggagatcatccccatccttgaggaaggcctgaggtctcagaagagcgatgagaggcagggtgtgtgcattggcctaagtgagatcatgaagtccaccagccgggatgccgtgctgtatttctctgaatccctcgtgcccacggcaaggaaggcttcgtgtgacccactggaggaggtcagagaggcggcagccaagactttcgagcagctgcattccaccatcggccaccaggctctggaggacattctcccatttttactaaagcagctggatgacgaggaggtgtcagagtttgacttggatggtctgaagcaagtcatggctattaagagtcgtgtggtgctgcctaacttgtgccaaggtgagaagccactgtcaaacccgggtgctggcgtatcctatcgcagtggctggtgatgccctcgaccgacatctgggagtgatactcccaaggggcatgcatgggcctgaaggcaaacgcttggggacccagatgacaggtggagatggccaatggtcaggctgtgatcctcatgcgagaggatg

SEQ ID NO: 356944 - DNA, 1570 bp, Homo Sapiens
cttggggaggggcggcgaggcggggtttatagcccgggcgcccgcgggccccacgctttgaccgggtcgtggcagccggagtcgtcttcgggacgcgcctgctcttcgcctttcgctgcagtccgtcgatttctttctccaggaagaaaaatggcatccgttgcagttgatccacaaccgagtgtggtgactcgggtggtcaacctgcccttggtgagctccacgtatgacctcatgtcctcagcctatctcagtacaaaggaccagtatccctacctgaagtctgtgtgtgagatggcagagaacggtgtgaagaccatcacctccgtggccatgaccagtgctctgcccatcatccagaagctagagccgcaaattgcagttgccaatacctatgcctgtaaggggctagacaggattgaggagagactgcctattctgaatcagccatcaactcagattgttgccaatgccaaaggcgctgtgactggggcaaaagatgctgtgacgactactgtgactggggccaaggattctgtggccagcacgatcacaggggtgatggacaagaccaaaggggcagtgactggcagtgtggagaagaccaagtctgtggtcagtggcagcattaacacagtcttggggagtcggatgatgcagctcgtgagcagtggcgtagaaaatgcactcaccaaatcagagctgttggtagaacagtacctccctctcactgaggaagaactagaaaaagaagcaaaaaaagttgaaggatttgatctggttcagaagccaagttattatgttagactgggatccctgtctaccaagcttcactcccgtgcctaccagcaggctctcagcagggttaaagaagctaagcaaaaaagccaacagaccatttctcagctccattctactgttcacctgattgaatttgccaggaagaatgtgtatagtgccaatcagaaaattcaggatgctcaggataagctctacctctcatgggtagagtggaaaaggaccattggatatgatgatactgatgagtcccactgtgctgagcacattgagtcacgtactcttgcaattgcccgcaacctgactcagcagctccagaccacgtgccacaccctcctgtccaacatccaaggtgtaccacagaacatccaagatcaagccaagcacatgagggtgatggcaggcgacatctactcagtgttccgcaatgctgcctcctttaaagaagtgtctgacagcctcctcacttctagcaaggggcagctgcagaaaatgaaggaatctttagatgacgtgatggattatcttgttaacaacacgcccctcaactggctggtgtttgatttcaccaccatagacttgacatctgagactgatgaaattccagatattatagctttggaagaggagaacggatcaaataattcacatgctaatggccctgtcctctcagggcaagatgttgaataactaacaacaataaaataccccttttggttgaatacgcaatttgtattacattaaacttcctgtttttattcctgtgaaaaaa

SEQ ID NO: 356945 - DNA, 1420 bp, Homo Sapiens
  misc_feature (439)..(447): n is a, c, g, or t
  misc_feature (524)..(608): n is a, c, g, or t
  misc_feature (623)..(741): n is a, c, g, or t
  misc_feature (883)..(883): n is a, c, g, or t
  misc_feature (989)..(989): n is a, c, g, or t
  misc_feature (1060)..(1102): n is a, c, g, or t
  misc_feature (1149)..(1149): n is a, c, g, or t
  misc_feature (1187)..(1187): n is a, c, g, or t
  misc_feature (1204)..(1204): n is a, c, g, or t
  misc_feature (1273)..(1273): n is a, c, g, or t
  misc_feature (1353)..(1353): n is a, c, g, or t
gggtccggaattcccgggatggggcggtcccggccccgcagatcctcgttcctagctgcctgccagcgtcctcggcccggccctgaggatggacccaggagatcccgctggtgaccctgccgctggcgagcgccaccgcatgggccaggaccccctcctgctcctgcaggccctgcagaccctgtggtccacgcgggagcggaagcagctccgggaggaagcctggcgggggtttgctgccttggacgaccccctggccgggcttctggacatgctggagagctgccggggccagcggggagagggcccctccctggcggcctggatctcccaccagctgcagtgctggctacaggcacagccatgcccgagcctggcccaacacgccctgacgctgaccccgatgccggccccgccgcccacagcgtaactgagagannnnnnnnntttcatggaacccatggtcagcctcttcaccccgcaccatccaaaccgcaactccccccacgccgacctattaaatnnnnnnnnnnnnnnnnnnnnnnnnnnnnnnnnnnnnnnnnnnnnnnnnnnnnnnnnnnnnnnnnnnnnnnnnnnnnnnnnnnnnntccgctccgaccttnnnnnnnnnnnnnnnnnnnnnnnnnnnnnnnnnnnnnnnnnnnnnnnnnnnnnnnnnnnnnnnnnnnnnnnnnnnnnnnnnnnnnnnnnnnnnnnnnnnnnnnnnnnnnnnnnnnnnnnaacctcatatttcccttatcccgccgcacctccgcccgcccttatcatattatctccttatccccgctaatttataacacacgccctctcccccccatatgtctatctcattatctccccggctgagatttgccccacattngactcgcccaccgagaatcggccatccccactatcttattaaccccgcccgtaccaccggactgcgccgccactaatacaccgcccgataattccgccgccgatanctgatctcgagaggccgcgacggagtcgcggcgcgtttttagcgacccgcgcctcctacacccaccattannnnnnnnnnnnnnnnnnnnnnnnnnnnnnnnnnnnnnnnnnngtcgcgcgtcttagccccaataccccgcgagcgttatcgctaatacngcgaataacaacacgcgcaaacccaccagcgacccgtnaccgggatgtttatttnccaccgcactcccgcgcggcaatagtaatgacggtaatccccccccattaaatccacacgccaatactncgtgccgcaaccccctcacactccaattgttgctcatagacttgctaaaaagcacccacccctaaacaacatacaccggncgcgaggtacgtcacggccgccccccaacactcaacaatacaaaatacttaataatcgcgcctccac

SEQ ID NO: 356946 - DNA, 1106 bp, Homo Sapiens
  misc_feature (42)..(42): n is a, c, g, or t
  misc_feature (260)..(260): n is a, c, g, or t
  misc_feature (280)..(280): n is a, c, g, or t
gctacatcatggagaaagcatatcttgtcatagttggtgctnaaggtagttgttgaaaacggaggaattattaacaagattggaaccaaccagatggctgtgtgtgccaaagcacagaacaaacctttctatgtggttgcagaaagtttcaagtttgtccggctctttccactaaaccagcaagacgtcccagataagtttaagtataaggcagacactctcaaggtcgcgcagactggacaagacctcaaatttttttntccgtgggtcgactacattnccccttccttaatcactctgctgttaacagacctgggcgtgctgacaccctcagcagtcagcgatgagctcatcaagctctatctgtaacctgtgagcccttttcctgccaaggtgcagcttacgtagttgaggcagggtgagtagctgcttgacaccccagtgagtcaggccaaaactgagatgtgtttaatgaagatttatggagtaaggacttaaaatcatacatcttggagaacctttcttactcatttcagtcccatctaaaaatgtgtcagctattctaaatcccaacttaaattgttcttacggtttctagaaactttccttttcagtttccagaaatacaagttagataattggctacttaactgatgaaagatgagcccaagtccacctgtcttcatcctcccctgcactccagactgatctgcctaaagcacgcgagatgcaggcgaaaagcagccacacccctctgccacaaatgaccaacagctggtcaggacgttacacgcggtgccttgtaagaggcaagaaacacttgccgaatctgcatctggcttccagtggtaagcacattcctcagcaggatcaagccaaacagtaaaaactaccaagagaacacgaggaaggcagaaacgatgtttagcaacagtattctgcatggttcactgcttaagaaaatgccttctggaatatttgtaaactgaaattctgtatgtgtaagagatgtttaaatatgtttgggtcctaaacagctttttaaaattatacttgggaataaattcagcatcttttcaaataaactctatgaaagacaaaaaaaa

SEQ ID NO: 356947 - DNA, 1206 bp, Homo Sapiens
  misc_feature (58)..(66): n is a, c, g, or t
  misc_feature (1126)..(1162): n is a, c, g, or t
ccaagataagaagcttgaatgaagtttcatccgttgacttgccggaggggtttccagnnnnnnnnnagggttcgtttaacccagcggaggtggttttaggaaaggggccaggtgtagtccgaccccacgggaaggctccttctttgaggtcttgtcccagtttggcgcgaccttgaagagtgtctgcctttatacttaaaacttattctggggacgtcttgctgggtttagtggaaagagcccggacaaacttgaaactttctgcaaccacatagaaaggtttgttctgtgctttggcacacacagccatctggttggttccaatcttgttaataattcctccgttttcaacaactccttcagcaccaactatgacaagatctgctttctccatgatgtagccgacagcagcatctagcaccacagtgacagggacgttgaggtggcagagggctttggccattttcttacctgacaaatcaggctgtgactctgtgacgtatacactaaatcgcttcttggccgccacggctgcttccaggactctcaggaccactctggagtaggcgtgagtcaatattgtcgctccatctttgatgaaagtatggcacagatctgcaattttgtttcttgacagtgatattctcctgagaaaaagttctccccgctcaatcatgatctttttacatttggagtaatcggagtattccagggaggcaagactgatgaagcggaggaagagctccccgccagaggacactgccacagaggagtccacaccacacagggtttctatggcactggtgagattcgccctcagaccctggattgtctcccctttatctctcttcaagaactccagcaacgtccggatggcagccactgctgaggccatgtcaggatcttctttcatctgagacttaaagtattcaattaactccttgtcgtccatggcgtcctcctgctgcggagccccaggggacccgagccgcccgcgctgtctcgaacgggtccgccggccgcgccgcctgcgagccagtctgacagcgcgctgcacacctccgcaccccacttccggcgcacttccgctctcgacgaattcgagctcggccgatttggcctgatnnnnnnnnnnnnnnnnnnnnnnnnnnnnnnnnnnnnncgccgccccgcgtaagctccattcgccctatagatctacattcc

SEQ ID NO: 356948 - DNA, 1515 bp, Homo Sapiens
  misc_feature (51)..(51): n is a, c, g, or t
  misc_feature (54)..(54): n is a, c, g, or t
  misc_feature (62)..(62): n is a, c, g, or t
  misc_feature (83)..(83): n is a, c, g, or t
  misc_feature (93)..(93): n is a, c, g, or t
  misc_feature (96)..(96): n is a, c, g, or t
  misc_feature (107)..(107): n is a, c, g, or t
  misc_feature (126)..(126): n is a, c, g, or t
  misc_feature (140)..(140): n is a, c, g, or t
  misc_feature (187)..(187): n is a, c, g, or t
  misc_feature (190)..(190): n is a, c, g, or t
  misc_feature (207)..(207): n is a, c, g, or t
  misc_feature (221)..(221): n is a, c, g, or t
  misc_feature (250)..(250): n is a, c, g, or t
  misc_feature (264)..(265): n is a, c, g, or t
  misc_feature (274)..(274): n is a, c, g, or t
  misc_feature (276)..(276): n is a, c, g, or t
  misc_feature (278)..(278): n is a, c, g, or t
  misc_feature (280)..(281): n is a, c, g, or t
  misc_feature (284)..(284): n is a, c, g, or t
  misc_feature (290)..(290): n is a, c, g, or t
  misc_feature (301)..(301): n is a, c, g, or t
  misc_feature (308)..(308): n is a, c, g, or t
  misc_feature (311)..(311): n is a, c, g, or t
  misc_feature (344)..(344): n is a, c, g, or t
  misc_feature (348)..(348): n is a, c, g, or t
  misc_feature (364)..(364): n is a, c, g, or t
  misc_feature (374)..(375): n is a, c, g, or t
  misc_feature (388)..(388): n is a, c, g, or t
  misc_feature (390)..(391): n is a, c, g, or t
  misc_feature (394)..(394): n is a, c, g, or t
  misc_feature (396)..(397): n is a, c, g, or t
  misc_feature (408)..(413): n is a, c, g, or t
  misc_feature (415)..(416): n is a, c, g, or t
  misc_feature (435)..(435): n is a, c, g, or t
  misc_feature (446)..(446): n is a, c, g, or t
  misc_feature (452)..(452): n is a, c, g, or t
  misc_feature (459)..(459): n is a, c, g, or t
  misc_feature (469)..(470): n is a, c, g, or t
  misc_feature (477)..(477): n is a, c, g, or t
  misc_feature (490)..(490): n is a, c, g, or t
  misc_feature (493)..(493): n is a, c, g, or t
  misc_feature (503)..(503): n is a, c, g, or t
  misc_feature (511)..(511): n is a, c, g, or t
  misc_feature (540)..(540): n is a, c, g, or t
  misc_feature (543)..(543): n is a, c, g, or t
  misc_feature (558)..(558): n is a, c, g, or t
  misc_feature (586)..(586): n is a, c, g, or t
  misc_feature (596)..(596): n is a, c, g, or t
  misc_feature (603)..(603): n is a, c, g, or t
  misc_feature (643)..(643): n is a, c, g, or t
  misc_feature (650)..(650): n is a, c, g, or t
  misc_feature (658)..(658): n is a, c, g, or t
  misc_feature (1078)..(1078): n is a, c, g, or t
  misc_feature (1088)..(1088): n is a, c, g, or t
  misc_feature (1336)..(1344): n is a, c, g, or t
gcccgggagcgcaagggcaggcccgggaaggcaggggcgccccctgtaccnccnaacacgcngccggcacgagcaggaagccnggaagcgctnggncccagggaccncgctgggacttcatcctcnggggcataagtgcngagaaggacccagaagcaagccactcctctgcaccgcctccggggcngcnggaggggggcgggaaanaaggcccccacacnaggcgccaagcaggcccagggcaaggccnccacagccacatgnnagagacatncngncnnccngggagnaggaaacaaanacaaaangcngtcattggagcgtgtgaaagacacagtgtggcngagngggggcgggaaagaanaggggaggcnntcctaggaaaaancnncangnnccacggcacgnnnnnngnnaaggaaaaacacgcatgtngagtgcctgtnagaacncatcccngggcgagggnnaaagccnggggggagcatcngancccaggggangggagcangcgaggccctgggctttcgcagtcgagcnggngacatgcagcacacntgcaaaaccgaccataatgccacctggngggttcacanggggganaatgcacaccaaggaaccgactcaaaagagaaccaaaaanagggggnaccaagangcccatggcagtcctggtgacagtggcagaggctgacttgagcttgaggaccttgatttcaaggacagaaactacagaagcaggtacaccttctgttgtacatggaaccagcaggccactctaggcttgtcccgcatgcttctgggagcggcatgttggtgcagagccctggcctcagaccgcatgtggcccccaggaagcagggcctccattccaggggtgagttgcctgagcccagagaggtgtgcccttcactgccaccagacagccagcgagagcagctcagaactggggtgctgccgacctgcctgaggtgcccccaccagccacactgcctttggggaacagctccaggagagctggtcggctgcttctctcccaggtgcatgttccacgcaggagtatagtgcgcgccagttnccgcaatgtnctcccgaaacgctgaccaagcacagagctggcacagaacaccccttaatacagcacacgaagcgcgggtggaggggcattaagggtcccctaggtctagccggaccattgaattcgtaggcccaaactgggtttaaccctattattgttccgcgaaaacccgtgttgggaattggttttttttaaaaaaggaatggggggtttgggccctttttttaacctgccccctggggggaggcttcggccccnnnnnnnnngggcaccaaaggggggttggtggggcccaccaaggaaggtgggcattggagaaaacccttccccaaaacctggcttgggggtgtttttccaaaaaacaaaatccttttaaggggccccccgggtttgggtggcccccaaacaaaagagggggcaggggcctttttattttt

SEQ ID NO: 356949 - DNA, 1239 bp, Homo Sapiens
  misc_feature (128)..(160): n is a, c, g, or t
  misc_feature (194)..(244): n is a, c, g, or t
  misc_feature (593)..(635): n is a, c, g, or t
  misc_feature (1089)..(1089): n is a, c, g, or t
  misc_feature (1102)..(1102): n is a, c, g, or t
ctgtcccttgaggaattcggacaacatggagtcgctttctttccctaagtattccagacgtaggcatgctttgcataagtaaaccagccttgaaatttttaaatccccaagacatgcacctacacatnnnnnnnnnnnnnnnnnnnnnnnnnnnnnnnnngacaggtggccctgtcacacacagtctcatgacnnnnnnnnnnnnnnnnnnnnnnnnnnnnnnnnnnnnnnnnnnnnnnnnnnnacgccctattcctatcagcgaccaccattcaattctatccaatgaagataactttttcttaatgtgttatacctacaaattatattctcacatagcctgtatataagtgacaagcaaaaaaggaaagtaacaaaagttttcttttctttctcttctttaggtttatgaggtctgcattgttaccaagaagtgatatggtttgcagctgtatgagcttaacttttggtatcctggttcttttgtgcccatttggtttgactagaccagtttttgttagctactggtgcaatatacatgctgtcagaggtagagtgaaactttttgccactgaggagaatgtagcaaaacnnnnnnnnnnnnnnnnnnnnnnnnnnnnnnnnnnnnnnnnnnntcagagatagagctcagagttagggattttttttgtatttgttttcactcagggtgcccctgaattaaaaagtaatgaagacgtactgtactaatccttattttaacacactagtgttaagaataacagtgctgtttcacatacatcacagcttcctagagataaagacgtgtgggtatgacatacctcatttttgggattatttaacccttcgtagcctagaacatataatagctctgtaagaaaggactgtccagtgtcacaagcagactagaaagcagagtgaggtcaaaggattctgggagcaccatgataaaatataacccattcagagcctggttatgtgctttcatttcactttaagcaggtgtgctggcagatggacttccaacatgtagatagatgtatttatttgctcatcagaactttctaaactaaaaagtcatttaaaaanaataacaccaccnaaacaaaattaaaaccaacttgtatatgaaaatacagggaagaaatgcttttaaaaatgttagatttaagagacttaaagcaaaccttaggattgcctctatgcagatacttaaaagccacttaaaactgtttccaa

SEQ ID NO: 356950 - DNA, 3064 bp, Homo Sapiens
  misc_feature (1796)..(1914): n is a, c, g, or t
  misc_feature (1946)..(1955): n is a, c, g, or t
  misc_feature (2400)..(2400): n is a, c, g, or t
  misc_feature (2958)..(2958): n is a, c, g, or t
  misc_feature (3040)..(3040): n is a, c, g, or t
ggctccaagcctgtccacagcaaccagcaccctcagtccccagctgtgccgcccacctacccctccggccccccgcctgctgcctctgccttgagcaccactcctggcaacaatggggtccccgcccccgcagcacccccaagtgccctgggccccaaggccagtccagctcccagccacaactcgggcacccctgctccctatgcccaggctgtggccccaccagctcccagtgggcccagcacgacccagccccggccccccagcgtccagcctagcggaggcggaggcggcggcagcggaggtggagggagcagcagcagtagtaacagcagtgccggtggaggggctggcaagcagaatggcgccaccagttacagctcagttgtggcagacagcccggcagaggtggctttgagcagcagtgggggcaacaatgccagcagccaggccttgggccccccttccggcccccacaacccacctcccagcacctcgaaggaacccagtgcggcagccccaacggggggctgggggcgtggccccaggctcagggaacaactcagggggacccagcctcctggtgccactgcctgtgaatcctcccagctccccaacgcccagcttcagtgatgccaaggcagccggtgccctgctcaatgggcctccacagttcagcaccgccccagaaatcaaggcccctgagcctctgagctccttgaagtccatggcggaacgggcagccatcagctctggcattgaggaccctgtgccaacgctgcacctgaccgaccgagacatcatcctgagcagtacatcagcaccttcgggcctcagcccagccgcccctgcagctgtcagaggggaacataccgctgtcgctgggtgtctgtccactgggccctgtgcccctcaccaaggagcagctctatcagcaggccatggaagaggccgcctggcaccacatgcctcacccctctgactctgagcgtattcggcagtacctcccccggaacccctgtccgacgcccccctaccaccaccagatgccacccccacactcggacactgtggaattctaccagcgcctgtcgaccgagacactcttcttcatcttctactatctggagggcactaaggcacagtatctggcagccaaggccctaaagaagcagtcatggcgattccacaccaagtacatgatgtggttccagaggcacgaggagcccaagaccatcactgacgagtttgagcaggtgagggccccgccccctctcttcccgctgctagggttggggtagagtccccaggctccaggcagcccctgctggcctctgctcccttgcctccacctttcagctggcgcagtccctcagcctgaccaagtactcctccctctggctgtctgctcagcctggaacaccgccctctcatcctccacttggccagctcctaggcctcctgtaggtctcagcccaaatgtcccttcctcaaagaaaccttcctggagccacccagcccagtgcctcccctttgcagtgctgggcacactcgcttggggtgtgggattttcccagtatgtgtccctgcaccaggctgtgggctctgctgccgagggaccttgatggcccccacttcacctccaggtcccagcactcagcagggcaggggctcagtgccgaaactattttttttgaatgggcttctcaagttctaatactgggaaattcctgctgcttgcaaacactctggaaccaacctacctgggtttcagcccagtccagctgggcgactcnnnnnnnnnnnnnnnnnnnnnnnnnnnnnnnnnnnnnnnnnnnnnnnnnnnnnnnnnnnnnnnnnnnnnnnnnnnnnnnnnnnnnnnnnnnnnnnnnnnnnnnnnnnnnnnnnnnnnnnatggtgactgctacatagtcagtgtcatggannnnnnnnnncaaattactttcagttggtgtgttctacagtgatgtttttttccaccaaatacttccctgatgccgagccccttcatggggatgaagtagtacaaggtccttgtcctcaaagaactcagtcccctctcctggttctcccaggttgccatctttgaagcacttaagacattcatttagaacctaggtcctctcccattgtgtcctcagatgttaaccacagacttcctgtcctttcctggtttggcccaaaaccatcctccaagttagtacatttcagggcatccagtcattcagaaattcccacaccacttccgtcaccaataaaatgtccctgcagagtgcttggatttagactctgagactgttccattctctagaacaagggtgacagtacccactgcctcgaggtctttgtgaagattaaatgctaggctgtgcatcctgnactcacgtgagaggtgctcaaaagccacagccctcgaggaaacgaaggctgtgcactcacacctggggctggggccccgttctggcagctggcttcggtggaacctctgcggccccctccgtttcctcctcgctgaagtggcatgataacatttcctacccaagaagaaccttgtgaggatggatgagagtgtgtgcgtgcagggcagctggcccggtgcctgacacatccacagccctaagaattgtcccctttgtctgttggtccggcccagatcccagaccacctcctcgtccactcactgaccgccttctcccccggccagggcacctacatctactttgactacgagaagtggggccagcggaagaaggaaggcttcacctttgagtaccgctacctggaggaccgggacctccagtgacaccggcccctccctctacccacccccttcccccgcatgctgatccccctgcccaggtgagggccctgccctggaagactggagggaggccccaagccacggggcatccccctctcccaggaagcagggagggngccgggaggttttcctctcagccccaccctgggggcccgggggcgagggctgccccctcctcccctccccagtgagggacantttttggtaaacctattttcattt

SEQ ID NO: 356951 - DNA, 512 bp, Homo Sapiens
  misc_feature (237)..(284): n is a, c, g, or t
tggagggcactaaggcacagtatctggcagccaaggccctaaagaagcagtcatggcgattccacaccaagtacatgatgtggttccagaggcacgaggagcccaagaccatcactgacgagtttgagcagggcacctacatctactttgactacgagaagtggggccagcggaagaaggaaggcttcacctttgagtaccgctacctggaggaccgggacctccagtgacaccggnnnnnnnnnnnnnnnnnnnnnnnnnnnnnnnnnnnnnnnnnnnnnnnnaggtgagggccctgccctggaagactggagggaggccccaagccacggggcatccccctctcccaggaagcagggagggggccgggaggttttcctctcagccccaccctgggggcccgggggcgagggctgccccctcctcccctccccagtgagggacattttttggtaaacctattttcattttggaaaatatttatgaataaatagttttatatgacggctggc

SEQ ID NO: 356952 - DNA, 226 bp, Homo Sapiens
ccaccattaagtacttacatgttattaactcatttaatcttcataacaactgcattaggtaggtggtcttccccccatttttacagataagttaattgagacacagaggttcgagtgacttgcctagagtcgcccagctgcactgggctgaaacccaggtaggttggttccagagtgtttgcaagcagcaggaatttcccagtattagaacttgagaagcccattc

SEQ ID NO: 356953 - DNA, 492 bp, Homo Sapiens
  misc_feature (217)..(217): n is a, c, g, or t
cagtctctggcagccgcggacctaaagaggcagtcatggcgattccacaccaagtacatgatgtggttccagaggcacgaggagcgcaaaaccatcactcacgagtttgagcagggcacctacatctactttgagtacgaaaagtggggccagcggaagaagaaaggcttcacctttgaggaccgcaacctggaggaccgggacctccagggaaaanggcccctccctctacccacccccttcccccgcatgctgatccccctgcccaggtgagggccctgccctggaagactggagggaggccccaagccacggggcatccccctctcccaggaagcagggagggggccgggaggttttcctctcagccccaccctgggggcccgggggcgagggctgccccctcctcccctccccagtgagggacattttttggtaaacctattttcattttggaaaatatttatgaataaatagttaaatatgaaaaaa

SEQ ID NO: 356954 - DNA, 317 bp, Homo Sapiens
  misc_feature (15)..(15): n is a, c, g, or t
  misc_feature (40)..(40): n is a, c, g, or t
  misc_feature (56)..(56): n is a, c, g, or t
tcctgaaatgactgnatcccctgaaatgtactaacttggnggatggttttgggccnaaccccggaaaggacaggaagtcctgtggttaaacatctgaaggaacacaaatggggaagaggaccctaggttcctaaatgaatgtccttaagtgcttccaaagatggcaaccctgggagaacccaggagaggggactgagttctctgaggacaaggaccttgtactacttcatccccatgaaggggctcggcatcagggaagtatttggtggaaaaaaacatcactgtagaacacaccaactgaaagtaatttgaaaaaa

SEQ ID NO: 356955 - DNA, 1675 bp, Homo Sapiens
cgcgccctgagtcgcaggccgaggagacagtgagtgcgcgccctgagtcgcaggccgaggagacatggctgcacttcgtgacgctgagatacagaaggacgtgcagacctactacgggcaggtgctgaagagatcggcagacctccagaccaacggctgtgtcaccacagccaggccggtccccaagcacatccgggaagccttgcaaaatgtacacgaagaagtagccctaagatattatggctgtggtctggtgatccctgagcatctagaaaactgctggattttggatctgggtagtggaagtggcagagattgctatgtacttagccagctggttggtgaaaaaggacacgtgactggaatagacatgaccaaaggccaggtggaagtggctgaaaagtatcttgactatcacatggaaaaatatggcttccaggcatctaatgtgacttttattcatggctacattgagaagttgggagaggctggaatcaagaatgagagccatgatattgttgtatcaaactgtgttattaaccttgtgcctgataaacaacaagtgcttcaggaggcatatcgggtgctgaagcatggtggggaagtatatttcagtgacgtctatacgagccttgaactgccagaagaaatcaggacacacaaagttttatggggtgagtgtctgggtggtgctttatactggaaggaacttgctgtccttgctcaaaaaattgggttctgccctccacgtttggtcactgccaatctcattacaattcaaaacaaggaactggaaagagttatcggtgactgtcgttttgtttctgcaacatttcgcctcttcaaacactctaagacaggaccaaccaagagatgccaagttatttacaatggaggaattacaggacatgaaaaagaactaatgtttgatgccaattttacatttaaggaaggtgaaattgttgaagtggatgaagaaacagcagctatcttgaagaattcaagatttgctcaagattttctgatcagaccaattggagagaagttgccaacatctggaggctgttctgctttggagttaaaggatataatcacagatccatttaagcttgcagaagagtctgacagtatgaagtccagatgtgtccctgatgctgctggaggctgctgtggcacaaagaaaagctgctaaatctatagccaaccaggggaccacagtagtgggcaagagtgatctgcatgttttttaacctgcttttccccatagcacagacctcccaaagtgctgggattacaagcatgagccactgcgcccggccataaatgaattatttttaagaggcattgattaaagattcacagcaaatcactagttaagcagattttttttctatttcctacttaaaagttctggtgccacatagtggtcagaaatggaacagagaaactgtcttaagccttgttcaagaaagcaggaaaggcatcagaagaagtaacaagtggcagagggtctcaagaaaaaaatcttccttctgaacttttgcatagcaccttctggaattttcatcatgtttgcttattaaacaaagctcctactgccatcatactaatcatgcaaaaagattgccaaatcatgtttggtaggaggacttttgaggtagcttttgaacaaatg

SEQ ID NO: 356956 - DNA, 1660 bp, Homo Sapiens
  misc_feature (1455)..(1455): n is a, c, g, or t
  misc_feature (1481)..(1482): n is a, c, g, or t
  misc_feature (1487)..(1487): n is a, c, g, or t
  misc_feature (1571)..(1571): n is a, c, g, or t
  misc_feature (1592)..(1592): n is a, c, g, or t
  misc_feature (1629)..(1629): n is a, c, g, or t
  misc_feature (1640)..(1640): n is a, c, g, or t
cgccgttgccaggcaccggggcggcgcagtgcaggagggaacggctggttgcaggtttctctcgccctggtcccgcgcggccccgccgaggcggcgaccaaggtgggtgcggggactctcgggagccgtgggccaggcgcttagccggccacctcgggccctgtccaggcccaggcgttccagggctgctctgcgggccgcgtgcgagagggactctcgggaggccccggggcgccgcacccactccttcccacttgggactcccgcgggcgcccggctctcgctcctctggccagcgtgggcctcccaaggccccctcgcggctctctccagagcaggagccccaccttgggccgcccctctcacacctgccgtgggtctggtacgcgcctctgtgtcggactccgcgcccgcctgcgtgggaggaagccaggactcccgggcgaccgggccattcctgtggtttgtgtcagttccacagcagcacgtgggcactttccaccgtcagccactgggcagcccggggcactcctgcagcgtcccctggccctctccagggcaggggaaggttgggcagtcctgggcggccagcaccccggcgtgcatgtctcctgagcagctgcccatcgggccctctgctggcctgggggctccaagatgcaaggccggcgggagctgggtgggagagcctttgagtgacctccaggaggaagcagccagcgcttccctccgagtggcacctgagaggctgagtgatgacagtttggaatggagacggacctgccccgaccttctcctgtccgatgggaaagccagcatctccatgccccgtgagggcggttccacctgcactgcccgatgtcctgaccctggggaacacagcagcacttggggggagtttgaaggctttcgggaatcttcagccaagtctggacaattctcacagtcccttgaactcctcgagggacccacagaaccccagccaccgagaaccacttctgccccaaaagagtgcagttctcaccaaccatgccagggtggaccttgggtgacaggaacttctgccgtcccaccttctgagcccattctcagctatgagaacattttaaagtgtgcttttcaagaaataacagtccagcaggcagctgaagacgtttccaccatagaccatttcctagaaataagcagtgaagaaaaacctggcgttgaacgtgtacataaattgtgtaacgaatccagaaaactctggagagcccttcagagcatacacaccacgtctacttctcagcgcctctggagcgagtcccgttgccaggagaacttctttcttgttctcggaatagatgctgcgcagaagaacctttctggaggccagggccacatcatggaagattgtgacctcaaagagcctgaaggactcctcactgtcagcagcttctgtctccagcattgcanagccctgatccagaccaagctctcgnngccgnctggcagcaaacaggggaggctgatgacatgcagccgctttctgaagaccccctcatgcggaggtgggcagcacatcactattnccaggaaaaggatgttcactncacgcaagctcaaatgacactctttatagcgacgttngctaaaatagnaggacttgtacctttatgag

SEQ ID NO: 356957 - DNA, 1469 bp, Homo Sapiens
  misc_feature (1094)..(1094): n is a, c, g, or t
  misc_feature (1178)..(1178): n is a, c, g, or t
aggctgtaccggcccggaagttccgggatatcgtcgaccacgcgtcgccacgcgtcgccacgcgtccgcaccttctgagcccattctcagctatgagaacattttaaagtgtgcttttcaagaaataacagtccagcaggcagctgaagacgtttccaccatagaccatttcctagaaataagcagtgaagaaaaacctggcgttgaacgtgtacataaatggtgggacacactttcaactgagcattgaaagacagacagcgctcgagtggattaggccgcagtggttgagaagctcgagtaacgaatccagaaaactctggagagcccttcagagcatacacaccacgtctacttctcagcgcctctggagcgagtcccgttgccaggagaacttctttcttgttctcggaatagatgctgcgcagaagaacctttctggaggccagggccacatcatggaagattgtgacctcaaagagcctgaaggactcctcactgtcagcagcttctgtctccagcattgcaaagccctgatccagaccaagctctcggggccgcctggcagcaaacaggggaggctgatgacatgcagccgcttcctgaagaccccctcatgcggaggtggccagcacatcactattccaaggaaaaggatgttcactccacgcaagctcaaattgacactctttaatagcgacgtttgctaaaatcaggaggactttgtacctttatgaggaatttttcattttcttcctggctgggttgatgtggaaaccagagctgtctgtggagctgttttccagaccccaggcccattcctgggatctctccaacaggacctgtcctgtgttctgggcttgtctcgggtctgaccaggagatggaggatgtgtccttggcagagccaagggtgagacagaggtttctggatgccatgacaggctgtcggggtccaggtggcactcatgggccccctgccccatgtgaatgctgctggcacctggtggggggttgcccagggatggaccctgggcatggcttctgggctgcttagtccagggggagcaacttatggccaaatccatgaattcnagaggaaaaaggggaaggcactgaaacgtcaccagagagacagcttgttgagaccgctcagaaaccctctgtctgtcacactcntgccctggctgctgtgtggtcagggcaccatgagggtgtacagatgtgctgtgtcctcagagcctcgcaggtgccctcacttactgcctgggcccctgcccagcagcctcaaggacaggcctttgtccctcacggttgtggacaggaggtcgcaccactggcctgcgagagcctctggtgggcccgtggcttcccccagttatctgctaaggaaaactgtgctcttcgaaggcagagccaagaagtcagccctgacttttgtaaaattttactaaataaaaccacctggat

SEQ ID NO: 356958 - DNA, 492 bp, Homo Sapiens
  misc_feature (26)..(26): n is a, c, g, or t
  misc_feature (386)..(388): n is a, c, g, or t
aaggccctttgaaggtcaacaaaccnccccatgaatgtggcccccggccctcccaagaaaaggttccttcctccgccaagcaatcctaattcccgaagaaacaaagaaagaaagttcccccctggcaaacgggactcgctcccagaggcgctgaaaaagtaagacgtggtgtgtatgctctgaagggctctccagagttttctggattcgttacacaatttatgtacacgttcaacgcccaggtttttcttcactgcttatttctaggaaatggtctatggtggaaacgtcttcagctgcctgctggactgttatttcttgaaaagcacactttaaaatgttctcatagctgagaatgggctcagaaggtgggacggcagaagctnnntttgtcacccaatggtccaccctggcatggttggtgagaactgcactcttttggggcagaagtggttctcggtggctggggttctgtgggtccctcgaggagtt

SEQ ID NO: 356959 - DNA, 2546 bp, Homo Sapiens
ggcctgggtggcgaattcggcacgagggaacagtggaaggtcctcaacgagatcgatgcgggcgtctgtgaggaaatgacctacgaggaaattcaggataattatccactggagttcgccctgcgggaccaggacaagtaccggtaccggtaccctaaaggggagtcctacgaggacctggtccagagactggagcctgtcatcatggagctggagaggcaagagaatgtgctggtcatctgccaccaggctgtgatgcgctgcctgctggcctacttcctcgacaaggcagcagaacagctgccctacctcaagtgtccgctgcacacagtcctgaagctgactcctgtggcatatggttgtaaagtggagtccatattcctgaacgtggctgctgtgaacacgcaccgggacaggcctcagaacgtggacatctcaagacctccagaggaagcccttgtcacggtgcctgctcaccagtgaccatgttcatccactgtgaccactaggcaggcactgctctctgcagagggggtcattccaggccctccagtgtgtgtgatagtcaccatgccatgcagggatattcttgaagccacacatggctggcggaacccagagcccccaccccagcccacctggctctttgttgacagtcggcgacaaggttgtgcgtggctcctgacctgctgctaagagtcacttgaccagactgcatctgcatgggctgcgcggaggttgcccagccccagtttcttccggcgcagctcttaggtgttcactctcgccagctcagttggctttgtgaagtgtgaaaccctacaatgtgaaaggaaagtgcttgctgtgatgttcctactgtggcccagctgcccagcatggacctggtgactctccacagggcctctaccatcctctctgtggccacttcctgagccagaggccaggtcttcatggggccctgagcttctgctgcctctggtgagagggagagcccttcccatccttacccaccaggaactagagccccaaccacagcagatgcttcctgggcagccactggccaggccgttgtatccatgtcacccttagttgtggggcattcatgaacagcaatgcgcttgcttcagcacattgggatgcacagaaacgtgagggcaggggggcagttgtggtcgcccctccccagttgtgcatgtacccggctacttaggtatgcttaggggagctggtggccaggggtgccccttcaggcctgctctcacagtgaaaccacttcaagacagggcaggaagttaccttcctggtgcacacaccgaagtgctcgagggagaggctgccgccccctctccccttccctggctgtggacactggcagccaatggggaggcggcctctcccctgttgctgcccgtgtccacacaggaatgtacactggtggcagaaacatgcatttgccataaataattcagaaacacttgtatggtcctgtaaaacttctctggtgtttgttgacttctgcctgtgggtctgaggaagggagaaggcagaacccataggcagtccctgggcaagggaggattttcccggccgcagcacagccttccattcatgtgcacgtgagtctgggtgaaaatggccttgtgaagtccagtgtctgtcatgcccctgagttcttttggtcccagagagacagcctgggcagtctgtttacagctggcaaacagactggctggcaagttgtggggctgggtcagaaagtgtctggacttgtaatcgggtgccctgctgtccacaggtggactctggggaagccaggcccctggatcccaagtcctttgtgtccggagcctttcctggcctgtgcctggagggtagcacatctttccagcctcccagggctttgcagcctgcagatgccacctgtccctgagagaagttagcgtccctgaccctgaccgggggtctctcagccttgtgaactgctctgctaagagatgtccaaggcggagctggggcaagatccttccagactcatctgtcagagccccaagccctttagacccagagcccaaggaccatgcctttgggacattaggactgcagcctttgcttctgtgtattttggagttttggtgacttttgtcacctggacacactcatttgttagccatagtgggttcccttggtcagcaacagtgcatgtacctctggatgtcatctgaggtgagaccaccgaggccttttctctctgtgtacagaggggagttaggagttgctggactggatgcattacgaggactggggacagggtagagggacatccagggatcagggcatgagtgggggcaaccccccggcctctgccctggcatggtctccgcatgggctgaggtgtagctgattggctgccacatttcggccatgctggctggcgtgcccatgttgcagatattttcccgagttccccagaatggatggtattgaatctcagccacatgcaacactgtgtccagcattctttgcaataaatactttttaaaaaa

SEQ ID NO: 356960 - DNA, 1176 bp, Homo Sapiens
  misc_feature (9)..(9): n is a, c, g, or t
  misc_feature (19)..(20): n is a, c, g, or t
  misc_feature (26)..(26): n is a, c, g, or t
  misc_feature (28)..(29): n is a, c, g, or t
  misc_feature (37)..(37): n is a, c, g, or t
  misc_feature (53)..(53): n is a, c, g, or t
  misc_feature (56)..(56): n is a, c, g, or t
  misc_feature (79)..(79): n is a, c, g, or t
  misc_feature (84)..(84): n is a, c, g, or t
  misc_feature (96)..(96): n is a, c, g, or t
  misc_feature (102)..(102): n is a, c, g, or t
  misc_feature (104)..(106): n is a, c, g, or t
  misc_feature (117)..(117): n is a, c, g, or t
  misc_feature (119)..(119): n is a, c, g, or t
  misc_feature (141)..(141): n is a, c, g, or t
  misc_feature (145)..(145): n is a, c, g, or t
  misc_feature (164)..(164): n is a, c, g, or t
  misc_feature (204)..(204): n is a, c, g, or t
tgaatgatntttctttttnntttccncnnccacctcngccaaagggaggcttntcncttccctatatgacagggcaaanatggnccctggaaaaantagagngnnnccacatgccangntggcaccagtacgcaccccagnccantcaaagctcttggatggtnactccagctgggtcctccttgctggtcctcctggctgtgngaagactctgctggcgaaggctgttgcaaatgagtccggactaaattttatatctgtcaagggccccgaattactaaacatgtatgttggtgagagtgaacgtgctgtgcgacaagtttttcaacgagccaagaactcagcaccctgtgtgatattctttgatgaagtggatgctttatgtcctcgaagatcagaccgagagacaggggcaagtgtccgagtggtgaatcagctacttacagagatggatggtctggaagcacgccagcaggtttttattatggcagccactaacaggccagatataattgaccctgcaatcctgcgcccgggccgcctggacaaaacactgtttgtgggtttaccgccccctgcagatcgccttgccatcttaaaaactatcacaaaaaatggtaccaaaccaccactggatgcagatgtaaatttggaagcaattgctggtgaccttcgctgtgattgctatacgggcgcagatctctctgctttggtacgagaagcttctatctgtgccctgagacaggaaatggcaagacagaagagtggaaatgaaaaaggtgaactcaaggttagtcataagcattttgaagaagctttcaagaaagtaagatcatctatatcaaaaaaggatcaaatcatgtatgaacgtttgcaggagtccctcagccggtgatgtctccagcagccggcttagaggagctagcccatcaagccggcagagaatcccccacacgctctgaaggacccactttcagctggacacaggcgcggcctcatgtaaacattttattttcaaatgaatgaggccaagctgaagctgaagctgaagattcttcccatctggccagccttgtgtgaaaatgccttcttcctctttaagaaaaaggacaatttttaaactgctgaaataaaatgactgttacatttttcaaataaaacttttactttgaacta

SEQ ID NO: 356961 - DNA, 1035 bp, Homo Sapiens
  misc_feature (393)..(441): n is a, c, g, or t
  misc_feature (914)..(914): n is a, c, g, or t
  misc_feature (957)..(957): n is a, c, g, or t
  misc_feature (972)..(972): n is a, c, g, or t
  misc_feature (985)..(985): n is a, c, g, or t
  misc_feature (996)..(996): n is a, c, g, or t
  misc_feature (1007)..(1007): n is a, c, g, or t
  misc_feature (1011)..(1011): n is a, c, g, or t
  misc_feature (1013)..(1013): n is a, c, g, or t
  misc_feature (1017)..(1017): n is a, c, g, or t
  misc_feature (1020)..(1020): n is a, c, g, or t
  misc_feature (1023)..(1024): n is a, c, g, or t
tttgcaccctaattaattcgaaagaatcagcgttcttcagttaaaatatacaggggcggtccctggggagggatgaagcagggatgattttctgtcctcatctgcaaccctaaagcgccccctggaccccggagtgaaagggaggtattggcagctatgattctcaccaccagcaaagaggatgcctgcgagtttctcagaagacactcagcatcagctttttcccgattgctattcttctgggcacttaggtttatggtgatggccaggacgagatgggagtcgtgggttatttccccaggaacttggtcaaggaacagcgtgtgtaccaggaagctaccaaggaagttcccaccacggatattgacttcttctgcgagtaataaattagtnnnnnnnnnnnnnnnnnnnnnnnnnnnnnnnnnnnnnnnnnnnnnnnnngtggccaaaaaatgcatgtctgtaattttggactgacgttttaagaatttgttaccttacagaagagcaagggcttaggggttggaggtggcagataaaagaggattttcaactcaaatcttgtttcctgctggcctggtctgcccacgagctagagcggggaaatgttgagctcaaatgggcaaattgagaccagaaaattattttttcaacctagagaatctcctcttacagggggatgcatataacagatcatgtatgtgtagttatttctaagtagtaattcttcccagctctttgatttgccatatataaaataggtgggtcgtatgtcttccctttagacatgatgttttctactcatttgtctctctggccaattgaattattaataaaaggtctgtattatcaaagagtattctagtatttttgttacttttaatatttgttgccttttggaggtaaagctgttngggggagaagagtttttggaccatagatgtttgggtggatgtntctaattgtcattanaaaaactcaaaangattcagttgnataactgcctntaangntcanttnttnnccccattttaa

SEQ ID NO: 356962 - DNA, 899 bp, Homo Sapiens
  misc_feature (248)..(257): n is a, c, g, or t
cattaagtagcggcattttaattatatgcaaacaaagaaaaactcatgactacatcaaaagaattatattaataacacaaaatcaaagcatatttccagttaaatatagaaaaacttgtgggcccatcaggaccacaaaacctgcatcctcctcagatttcttgatatatcacacttgactagaggaatttgcacaggaagaggaaattcaaagttgaaatagaagtagagaaaataacctacagacnnnnnnnnnnctgggtcttttgatgacttgcagcttgaataatatccagcaaggatacatattaagggaaaactattccattaaaaatatttccataaactaccttcccctattaaatatacacatacttctttaaaattgggggagaagtaaattgatcatttagaaggcaagttattcaactgaaatcatttttgagatttttctaaatgacaaattagagacatcatccaaacatctatgggtccaaaaactcttcttcccccaacagctttacctccaaaaggcaacaaatattaaaagtaacaaaaatactagaatactctttgataatacagaccttttattaataattcaattggccagagagacaaatgagtagaaaacatcatgtctaaagggaagacatacgacccacctattttatatatggcaaatcaaagagctgggaagaattactacttagaaataactacacatacatgatctgttatatgcatccccctgtaagaggagattctctagggctgaaaaaataaatttctggactcaatttgcccatttgagctcaacaatttccccgctctagctcgtgggcagaccaagccagcaggaaaacattatttgagctgaaaatcctctttttattgcc

SEQ ID NO: 356963 - DNA, 1209 bp, Homo Sapiens
  misc_feature (28)..(28): n is a, c, g, or t
  misc_feature (142)..(142): n is a, c, g, or t
  misc_feature (462)..(513): n is a, c, g, or t
  misc_feature (568)..(568): n is a, c, g, or t
  misc_feature (1151)..(1151): n is a, c, g, or t
aatctttggaaacaaaatgtttccaaanttactgggatgtgcatgttgaaacgtgggttaaaatgacagggcagtgaaagttgactatttgccatgacataagaaataagtgtagtggctagggtaccaccctatgagtggnaagggtccattttgaagtcagtggagtaagctttatgccagtttgatggtttcacaagttctattgagtgctattcagaataggaacaaggttctaatagaaaaagatggcaatttgaagtagctataaaattagactaatctacattgcttttctcctgcagagtctaataccttttatgctttgataattagcagtttgtctacttggtcactaggaatgaaactacatggtaataggcttaacaggtgtaatagcccacttactcctgaatctttaagcatttgtgcatttgaaaaatgcttttcgccgatcttccnnnnnnnnnnnnnnnnnnnnnnnnnnnnnnnnnnnnnnnnnnnnnnnnnnnnaggacatgctaagcaggagttaaagcagcccaagagataaggcctcttaaagtgnacatggacaatgatgtattgctcaagattcaaaggtacttgaaatggccatagacaagtctgtaatgaagtgttatcgttttccctcatctgagtctgaattagataaaatgccttcccatcagccagtgctctgaggtatcaagtctaaattgaactagagatttttgtccttagtttctttgctatctaatgtttacacaagtaaatagtctaagatttgctggatgacagaaaaaacaggtaaggcctttaatagatggccaatagatgccctgataatgaaagttgacacctgtaagatttaccagtagagaattcttgacatgcaaggaagcaagatttaactgaaaaattgttcccactggaagcaggaatgagtcagtttacttgcatatactgagattgagattaacttcctgtgaaacccagtgtcttagacaactgtggcttgagcaccacctgctggtattcattacaaacttgctcactacaataaatgaattttaaggctttaaggatggaagtgggcatttcttttaacagtttactatgttgggaattgggttacaattttgggagtnggatttccaaaagtgaggagctaaccttcagttggatttccaggggtagtgcttgggc

SEQ ID NO: 356964 - DNA, 1271 bp, Homo Sapiens
  misc_feature (417)..(417): n is a, c, g, or t
  misc_feature (481)..(481): n is a, c, g, or t
atgagccaccgcgcccggccctgtgctgactttcaaaacttctgcccagatgtggtctatatcatatctgttcacacgtcactggccaaagaaagtcacacatttaagcctaacatcaatggggcaaggatgtgtactcctctcataggaggtgttgcatatcacacggaaaaggaagggagattgaacaagcagagaaaaatataatctatgacatgcaggaaaacagtagtttataagcgaaaagtcatcttaaagacttttccaaaatactttttctcccttttctatatcaaccaacatgcccatacaaaagggagtgtagaggagatattccatccaactataactgccatgccaggtctatggcaagagaaggatataatgtaggaaaaaggccctcccagacttccaggnactatgcgagatggaagtgcagcaaagcaacactgatttcctcagcctggagaaaaatcaagtntgttaaataagtgaggataaaatcaaaggccaagtgcccactccttcttcatgtttgggagtctagagaagatcaactctcaggcagcctccaccacaacatggtgcacagaaacagtgactcagcgttgtagcaggtctggtagagaagtgtctgaggttcaggtttcctgagcccccatagttcccataaggcacagatactgagagattataagaggatgaactggatggcagacacaccagaggctcaggggggtgcaaccagaagtcagggggaggcccaggtagccagagtgctactgggttctgagcaagcagcctacagccacatatttcagccctaaatgacagcagaacaagcagcactaaagtggatgagggaccttgcccctgagaccaggagacacctatggccatcatttatgacactaccccaagggactgtctgaattactggatcagtttaagctttaaactagactggatatttaggtaatttttctctcctggtctcaggataaaggctgtaaagacattgacaaagaagtgacattttctctgaggaaggctcaaagaaatagactaaaccatttctattttatttaccactacatccactgctttaacagtgcctgacataagtaggtattcaacaaatatttgccaaatgaaggaatgaataagaggccatagtgagaggaaactgatcaactagcaaagctatgatagaaataccaggcaggctgaattaaaaaacaatgccagttccatttggcaccaagccaaaa

SEQ ID NO: 356965 - DNA, 1185 bp, Homo Sapiens
gacctctggtccttccctgtcagtgttgctcccatctcttctctaacctttattcagccccttttccctctgctgccaacggcctttttaggatccaaccaaaccaccctttctacctgcgcaccctgccaccctctgcacacctttaactggaggactgagtcacagataattgtttccttgaagtccaggcccagctgcagcaacaacagtcattagcccgtgtcacatccctgatcagagggcatctccgtggggaatcgcctccacccagcactgctggaagccgcggctgccagggagtggggcggccggttccctcagcaggacctgggctggcctctccacctcccctagtagaggcggacccattccatctagtggccaccgagggtgggtggccctgagatggtgggcccttgacaggccttgtcagagcagagggcaggtgggagtcacctgaaagctgaaggaatggctttaaggatagaagatttctcatgacctcaagggatatgagggaggagccagtttgccagggctgggaaaataattaggaggcctagaatccctgttctcatctgggcctccggggccaggggcaggggaatggcctgcagggctgggagggggtacacgctgtgcggggtctgcccctcagttggtgacctcctctctctctccccccaggagccccagtggcaccagtgacgggcagaggggacttgccattgccccctccacccacccccacgaccccactcctggatccttcaccccagtggcctgcagacctcagcttctccctctgaacttcaagtctccaaagatcagaatctgggggagggagcgcgtgcagggaggggcttgatctccacattttctcaggagtagttcgggcatccccatatcttctcctctccccttgtgaagaggacccagatctggcttctttcccaaggagggggtggggtgttcctcgcgtccctgtccttgaaggacctccttcccccagcctcatcaccgtgctcttctcagcgccaccctcagcagccagattgcaacaccagggagaggcggatgcagagccccaccggtgggaaagttgcctgtggaagggagccttttgctacaatttgtaacttattttctaaagtctattttgtaacaatttatttaagttta

SEQ ID NO: 356966 - DNA, 1764 bp, Homo Sapiens
  misc_feature (162)..(207): n is a, c, g, or t
  misc_feature (968)..(968): n is a, c, g, or t
  misc_feature (983)..(1189): n is a, c, g, or t
  misc_feature (1213)..(1254): n is a, c, g, or t
gaaatcgaaattttataaaaaggcattgtttctcttatatccataaaatgatataatttttgcaagtatagaaatgtgtcataaattataatgttccttaattacagctcaatgcaacttggtactttcttccctccctaaaaaacgagagagaaccaaaannnnnnnnnnnnnnnnnnnnnnnnnnnnnnnnnnnnnnnnnnnnnngacaaacaaaatatgaaaaaaaatcatttcctctttggtataaaaatcagactctcaccttgagagacacacagacagacatgatactgggtttgtaaactgtgtggccaaaagggatttccctgccaagacttcccctctcccattccctgcccacccgcccccacctcactgcagcccatccagttcctttggggctcccatatggaacatttaaaatccccctacccactcccagctccaaaccattcctgaagaatcccccgacccactatcaaagaagaggaaaggattcttctcaaggctgattaggtagcgactaacttgggaaatgccttatttagggaatagcttcataggtgtggatgaagtaaaggacaggctgtggccaaactctgacagtgtcccatccagaccaagccaggcactggcctgggcctggttttgcccttatcctcctctactacccggcacaaggattccaccacctcttgccagaggctgggcctgaggggcggggctccttgcttactgaagaagggagcagagaggccaattcccgttccagcctcatctcaggtgcacagcttccccctgcagccccaccacagggccctggggtgtagatgcaagaaagcaccagatggggaggcaaagggaggtcaaaagggagtctgccaataaacttgggtttaaatttaaaattaaagaaaactacgcctccctgagctgggtgtgggtgctcacgcctgtaatgtcancactttgggaggttnnnnnnnnnnnnnnnnnnnnnnnnnnnnnnnnnnnnnnnnnnnnnnnnnnnnnnnnnnnnnnnnnnnnnnnnnnnnnnnnnnnnnnnnnnnnnnnnnnnnnnnnnnnnnnnnnnnnnnnnnnnnnnnnnnnnnnnnnnnnnnnnnnnnnnnnnnnnnnnnnnnnnnnnnnnnnnnnnnnnnnnnnnnnnnnnnnnnnnnnnnnnnnntgacaagagtgagactccatctcnnnnnnnnnnnnnnnnnnnnnnnnnnnnnnnnnnnnnnnnnnctacccctccccactgaccaaatttcagacccagctttagctcactaaggatttgggggccactttcctaggctccagcccaaggccagcaggactaaggaatccaggaattgatatgtgtgtgtgttgggggcagagggcagcactttactctcaaggtgaggaagcagacaggaccaaaccctcctttacactctcccactaccctctgctcatgggtacctccctccctggtcagctcctctgccccacagagcactggtcactgcaggcagagccgacatggatcctcccaaaccaccccacagccggccaggctgcggcatcccagtgtgtgccagcctccttttcccaggagagttaagacaccaaccacaacataaaagtcacataaaagcctcctccacttgccaaataaaaaaagacaaaaccaaactggacacaacacaaatcaaggagagacatacacgatgtgaggggccgaggcccctgcaggtctctggcttcccg

SEQ ID NO: 356967 - DNA, 817 bp, Homo Sapiens
  misc_feature (417)..(419): n is a, c, g, or t
  misc_feature (439)..(490): n is a, c, g, or t
  misc_feature (576)..(681): n is a, c, g, or t
ttatttaggtcataagttaaatatttttttcctgtggtggtattttttaatcccttctttccacctagtcactttttggaatatctgtagcaataatagtaggaacagtagatgtgcctttggagtgaaaataaatagccatttaaaacataggcctttatcaacatttagttctttcaattaggaaatggagaatgaatgtttgagtttttaaggggaattaattgaatgatattttatcatttaagatgaaatcataacactagacacatagttgtatgttttaggaggaaatttagtttttctatctgtgcttctcatgaataggagcacttcttgagtactctggggtgatttaagccctttcccaccaactgtagtccgtttgctttattaatatttatttatttatttttnnnacagagtctcactttttcannnnnnnnnnnnnnnnnnnnnnnnnnnnnnnnnnnnnnnnnnnnnnnnnnnnagggttctagaggttgtcatgtctcagccacctgagtagctgggattacggacgtgcgccaccacgcccgggctaatttttaaaannnnnnnnnnnnnnnnnnnnnnnnnnnnnnnnnnnnnnnnnnnnnnnnnnnnnnnnnnnnnnnnnnnnnnnnnnnnnnnnnnnnnnnnnnnnnnnnnnnnnnnnnngtgtgagccactgcgcccagcttattaatagacatttaatataaagaagtaaataaactttttattgaggtataatttatatacagtaagtgcacagataatgtgtatgcagttagatgaatagtgacaaatacac

SEQ ID NO: 356968 - DNA, 1623 bp, Homo Sapiens
  misc_feature (1427)..(1427): n is a, c, g, or t
  misc_feature (1498)..(1498): n is a, c, g, or t
  misc_feature (1605)..(1605): n is a, c, g, or t
agcgtgtggaaagcaaagggctggaacgtcccgggctgcggagctcgctgggttgggatggactcgttcagacctgagtgctaggacgccgaagggggcggtgaggcgtcccggcgaggagctggggtcgtctggagtttaaaagacaggtggctctcggagatgtgcgggctgcatgcccacgcttcaccgctaagggaggtcagggctgtgcgatggggaaggaagagagtgtcggggcggtgcagtcgggatgggagaagagtgtcagggccactggcccccagctcggcagagggcagtgtcgggccgcgcgcaggcagggagtgggtgtggtgtgaggctggcgctggagcggtctgggaatgttaggaggtctagggtatcgcggccctgcgtcctcttgtctggactaaaagtccgggcagttctccccggacctggattgtgggcccagcgacaggtgcttggcgatctgtgcccgctgtgcctgcggggctgtggtgggagtcctgtctgcacgggattctgtgtggctgtgcataacccagaagaggagagaactgctgtgcgtctgaagtgatggcggagggctttctgatactaagccaaatgtgatctccttattggagcagaagaaagagccctggatggttaagaggaaggagacaaaagaatggtgtccagattgggagtttggaagagaaaccaagaatttatctccaaaggaaaacatttatgaaattagatcaccacaacaggagaaggccagagttatcagagaaatcagatgccaggtggagagacaacagggtcatcaggagggacatttcagaccagctgtaataccatttacttccatgcagtgcacagcccatagagaatatcagtggcttcatactggagagaaatcctgtgaatgcaggaaatgtaagaatgcttttaggtaccagtcatgtcctattcaacatgaaataattcataataaggaaaaagaacctgaatgtggagaatgtaggaaaatctttaatagtggatcagacttgattaagcatcagacgcttcatgaaagcaaaaaacatagtgaaaataacaaatgtgcctttaatcatgattctggaattactcaacctcagagcattaatactggagagaaacctcataaatgtaaggaatgtgagaaagcctttcgttccagctcacaaattagtcagcatcagaggatgcatctttggtgagaaaccctataagtgtaggggagtgtgggaaagcctttccatccactgcacagcttaatctaacatcagaggatccatacttgatgagacatactatgaaaggaaggcgtgtggggaaggcctttaacccgtccctcaaacctttttcgaaataaaaaaatccatacgggtgagaaaccccataaatgntagggatgtgggaatgcttttttcgttatgacacacagcctgagcctttaatcagataatccatactggtngaaagacgctatgaatgccgggagggtggaaaagtgttacagttgttgcctcaccagctgaggttaacttcaagaattcatactgggtgaaaaaccccatgtatgtnagggaatgtggggaaagc

SEQ ID NO: 356969 - DNA, 2062 bp, Homo Sapiens
cccgccccctcgtcgcagtcgctgccgaccggctggctgggccttgcggcgtgaggaccccggcggcgccgcagtcccgcgagccatggcccagtccggcggggaggctcggcccgggcccaagacggcggtgcagatccgcgtcgccatccaggaggccgaggacgtggacgagttggaggacgaggaggagggggcggagactcggggcgccggggacccggcccggtacctcagccccggctggggcagcgcgagcgaggaggagccgagccgcgggcacagtggcaccactgcaagtggaggtgagaacgagcgtgaggacctggagcaggagtggaagcccccggatgaggagttgatcaagaaactggtggatcagatcgaattctacttttctgatgaaaacctggagaaggacgcctttttgctaaaacacgtgaggaggaacaagctgggatatgtgagcgttaagctactcacatccttcaaaaaggtgaaacatcttacacgggactggagaaccacagcacatgctttgaagtattcagtggtccttgagttgaatgaggaccaccggaaggtgaggaggaccacccccgtcccactgttccccaacgagaacctccccagcaagatgctcctggtctatgatctctacttgtctcctaagctgtgggctctggccaccccccagaagaatggaagggtgcaagagaaggtgatggaacacctgctcaagctttttgggacttttggagtcatctcatcagtgcggatcctcaaacctgggagagagctgccccctgacatccggaggatcagcagccgctacagccaagtggggacccaggagtgcgccatcgtggagttcgaggaggtggaagcagccatcaaagcccatgagttcatgatcacagaatctcagggcaaagagaacatgaaagctgtcctgattggtatgaagccacccaaaaagaaacctgccaaagacaaaaatcatgacgaggagcccactgcgagcatccacctgaacaagtccctgaacaagagagtcgaggagcttcagtacatgggtgatgagtcttctgccaacagctcctctgaccccgagagcaaccccacatcccctatggcgggccgacggcacgcggccaccaacaagctcagcccgtctggccaccagaatctctttctgagtccaaatgcctccccgtgcacaagtccttggagcagccccttggcccaacgcaaaggcgtttccagaaagtccccactggcggaggaaggtagactgaactgcagcaccagccctgagatcttccgcaagtgtatggattattcctctgacagcagcgtcactccctctggcagcccctgggtccggaggcgtcgccaagccgagatggggacccaggagaaaagccccggtacgagtcccctgctctcccggaagatgcagactgcagatgggctacccgtaggggtgctgaggttgcccaggggtcctgacaacaccagaggatttcatggccatgagaggagcagggcctgtgtataaataccttctatttttaatacaagctccactgaaaaccaccttcgttttcaaggttctgacaaacacctggcatgacagaatggaattcgttcccctttgagagattttttattcatgtagacctcttaatttatctatctgtaatatacataaatcggtacgccatggtttgaagaccaccttctagttcaggactcctgttcttcccagcatggccactattttgatgatggctgatgtgtgtgagtgtgatggccctgaagggctgtaggacggaggttccctgggggaagtctgttctttggtatggaatttttctctcttctttggtatggaatttttcccttcagtgactgagctgtcctcgataggccatgcaagggcttcctgagagttcaggaaagttctcttgtgcaacagcaagtagctaagcctatagcatggtgtcttgtaggaccaaatcgatgttacctgtcaagtaaataaataataaaacaccca

SEQ ID NO: 356970 - DNA, 1489 bp, Homo Sapiens
  misc_feature (1013)..(1027): n is a, c, g, or t
tgcaaagcatgcatcagccacatccatgctatctcctaaagcagtcattctgaaacccaatctggggacagtgcagactaaataaaatttcattttgatttggcctcccgctgcgaatgggactgctttgtctcagccgacagaaccagcaagccagaaagggaatgaagacatttggagaagaagcgtttactgaaaggagattcctgggctggaggaaaaccatgatctacagttcatgttgacagatattgtatttttggtcctagatctgacttttgaaatgacttatcacaaattcaaatttagcaatcatgagtgaagtacccacgatgtgctaagcatctacctctgcagatagaagaacacttactgttcctgagcatgggagggaatagaagttcctgggtcctggcctcacctcatcaggcactgccaaatttgacacctccttcctgttcacggcagtcctttgcgatagggtattagatgccaccaagtagctgcataactcacccatttggtcagagcctgggtctaagccaggtctgacagactccaaagcaagccctgtttacagcatgactgggatccagtggacgagggaactgagctgtcaaaactaagtgacttgattgaggccatgcagctggcgaggggaggaccaggatctgaacccaactgggtctcccaagcctgggccactgaaccatttcacctcttggaaaaacttaatggtcagagtggcccacccagtccatggacagcatggaggataaactgcttccctagaaatcctctccagcattcttgccaccacgactttgggacacattgaccatgaggaggagctggtcaatgatggacaggagtccagattagcagagatgtggtaataaggacaccgatgcctaaatacttgaaatatccaataggaagcattccacctttgtgcaaatgcgaaccacatctcaccaagttcaggccaaggctgccaccggtgacgttttggnnnnnnnnnnnnnnngcggggggagaggagagaaacagagaagcaaggaatgcagaagagagcagaggccacaaaaacagcagcaacgtgtcctgtgtattctgtttccttgtaaaactatgaagcatgttaaggagatacttcattttttgaggattcatactcttgtttatattataataaaaacaacccatgttctttctaaaaatttaggcaatgccttcgtgcacataaaagtaaaacaaaatcacctgtaatcctaccacacgcagatcagcacttgctaatcttttcacagggatcctaagaatatcctattctctatagaatatagttgatttatgttacctaataactaactgttaaccattttaaaattcttcagttttacattatgctagaaaaaaggagccgtcactctacgtgacatttctgtatattggtttattcattcaataaacattttttgaagtacct

SEQ ID NO: 356971 - DNA, 1638 bp, Homo Sapiens
  misc_feature (1383)..(1383): n is a, c, g, or t
atgcgcaatgtggcgctgcggcgggcggcagggcctgtgtgtgctgaggcggctgagcggcggacatgcacaccacagagcgtggcgatggaacagtaaccgggcttgtgagagggctctgcagtataaactaggagacaagatccatggattcaccgtaaaccaggtgacatctgttcccgagctgttcctgactgcagtgaagctcacccatgatgacacaggagccaggtatttacacctggccagagaagacacgaataatctgttcagcgtgcagttccgtaccactcccatggacagtactggtgttcctcacattcttgagcataccgtcctttgtgggtctcagaaatatccgtgcagagaccctttcttcaaaatgttgaaccggtccctctccacgttcatgaacgccttcacagctagtgattatactctgtatccattttccacacaaaatcccaaggactttcagaatctcctctcggtgtatttggatgccacctttttcccatgtttacgcgagctggatttctggcaggaaggatggcggctggaacatgagaatccgagcgacccccagacgcccttggtctttaaaggagtcgtctttaatgagatgaagggagcgtttacagacaatgagaggatattctcccagcaccttcagaacagacttcttcctgaccacacgtactcagtggtctccgggggtgacccactgtgcatcccggagcttacatgggagcagcttaagcagtttcatgccactcactatcacccaagcaatgctaggttcttcacgtacggtaattttccattagaacagcatctgaaacaaattcacgaggaagcactgagcaaattccagaaaattgaaccaagcaccgtggtgccagctcagacaccctgggacaagcctagggaattccagataacatgtggcccggattcatttgctacagatccctctaaacaaacaaccatcagcgttagcttcctcttaccggacatcaccgacacatttgaagccttcacattaagtcttctgtcttcactcttgacttctgggcccaattctcccttttacaaagccttgattgaatctggccttggcacagacttttctcctgatgttggatataatggctacacgagggaggcctactttagtgtcggcctccaagggattgtggagaaagacattgagaccgtcagaagcctcatagacagaacgattgatgaagtagttgagaaaggatttgaagatgatcgaattgaggctttacttcataaaattgaaataccagattgaaacatcagtctaccagcttggggctgatgctgacatcatacatagcttcttgctggaaccatgantgggaccctgtggagctcttgaagttgggaaatcagtagctaaattcagacagtgccctgcagaaaaatcaaaattttttgcagaaaaaagtaaaacagtttttttagaataaccacgcttaagctgactttttattgatgagccccgatgacaagtttcaccggaaggccggcacagggtgaagccccccaagtttaagcccaaaggccgggggttttttccccccgggaacaggcgccgaattctcccaaaaa

SEQ ID NO: 356972 - DNA, 1269 bp, Homo Sapiens
  misc_feature (59)..(59): n is a, c, g, or t
  misc_feature (430)..(430): n is a, c, g, or t
  misc_feature (499)..(499): n is a, c, g, or t
  misc_feature (636)..(636): n is a, c, g, or t
  misc_feature (652)..(652): n is a, c, g, or t
  misc_feature (662)..(662): n is a, c, g, or t
tcaggtgtatatataaaatgaaaagcaaaatgtaagtctaagacacagaaaattttggnaagctaactttgatttcaaattcaacttcctaaatatgatttgggatttccttagtgggtgaataagggcaggcaattaaggtccattctcttacttttcaagagcttcagttctggtagtggggtgcctcggaggcagatagcaaaagtgtatgcattaaaacaagttttgtgtaaaggatttgttagacaaaaaaccaaatatttgtgggtgagttcttaatactaaataaagatagttgtatattgttttaaacaaatttagatttgccttttagatataatcacatgcattactataaattattttttccttttaatatagtcaggaaaaatccacagcatttagcaacagcatacctttggataanactgcttatagttatatgtttcgtttcagcatcagtgagaaaatatacattattatgccaccgtttaanatgctggtgctcctttattttatatagtgttttattgcttcatatgtggaatattaaatcaccttaacagctagccggatgagataatcacactccacgctacagctccctgactacagctaaaaactctgcataanatacggcaggtttganggtctctgcnagggctctgaaaagtggataagaataagaggacttacacgaaagccagaaatagaggggagactgagcagtacatttcctggggttttaatttatattttgtatataccaacaggctccagatcagtctaagctgcagagctttgaataggaacacaccaaaaaagctccagaaaaattcacttcctctggccagaagatgggagtggggtaggggtggggaggctacagaaaagcctttagactcttggccatctccatccaagtgtcagcaaagaactagcagccctcccctccctctaatgggggtggcgtaagggatggcagcctcagtgaaggtaaagtttttgttatctttaactcttacacccctcagctagaaagacaatctcagaccctgaggagtgaagcccatggtaactgtcagtccaaaatcctctacctagcaaaattaaatctctcagaaatagagcaaactgggaaaattatcaagtgaaaactaaacaaattcatcactagtaggtctacttaaaggaaatactaaaggaagttctttgagtggaagggaaatggttaaaagggggggccagctggctgtggtggctcat

SEQ ID NO: 356973 - DNA, 949 bp, Homo Sapiens
  misc_feature (533)..(824): n is a, c, g, or t
  misc_feature (837)..(883): n is a, c, g, or t
atcaaggttaattaagataaaaaagaaaaacaatttaggatgtgatcccgggaaagcttgccaaaatatcaaaaggttaaaaacactttatcaaaacagcatcaaatgtcactgtgaattaatagtcatttatttaaccaggatgataatcaaaatacttcaaaatgaaatacagacagttacatgaatttttttaaaaacccttaacccttttaagcgctgttttgtcaagtaatcaaaaacctaataaaaacaagcaacaggaaccacagataattatcctgataaaatgtaaaatctttgtttcttagaccagttatcaaaaaggtaaagaaatatctccagcaatatgattgcttcagcctccagaaagcacatttagagaacctggaagtcaaacctgacgaaaaggtacttgaattcaataagacaaaggaagagtgtgtgcccaaaattagtaatgtttgccatattatagaggaatgtaaacaggtactctagtaccttgaacagggtaatacatggcttttagnnnnnnnnnnnnnnnnnnnnnnnnnnnnnnnnnnnnnnnnnnnnnnnnnnnnnnnnnnnnnnnnnnnnnnnnnnnnnnnnnnnnnnnnnnnnnnnnnnnnnnnnnnnnnnnnnnnnnnnnnnnnnnnnnnnnnnnnnnnnnnnnnnnnnnnnnnnnnnnnnnnnnnnnnnnnnnnnnnnnnnnnnnnnnnnnnnnnnnnnnnnnnnnnnnnnnnnnnnnnnnnnnnnnnnnnnnnnnnnnnnnnnnnnnnnnnnnnnnnnnnnnnnnnnnnnnnnnnnnnnnnnnnnnnnnngtaaggaagtaannnnnnnnnnnnnnnnnnnnnnnnnnnnnnnnnnnnnnnnnnnnnnnccattttttctgactatttgaaagaggcattattttctttaaatagggaagaaaacagttttcttg

SEQ ID NO: 356974 - DNA, 911 bp, Homo Sapiens
aggagagaagaggagtataggggttagaagacagcctatcactgaaccaaacttaaggccaaacagaaccaactgagttccttggagtccagacaccttttcctttggtaatgtcaaccctctattagacaagagcagtatcaggcagacgatggtatttatgagagaactttgaacacataacttcctgagcactctttgaatataatgacccacttctttattaacctaattgtgctgatagtgactagtaaatatgataatgtaaccaaataccaaaatggacattctagaaactcaaaaatacttagtgttattttcagttggatttttcttttgtttatatttgcaattttgagtcttacttggtaatctttatgtaacctaaacaatgttttataaactttaggaagctattactcatgtataaagttcataaaagttcataatatataatgcattatagtgttcaaaatgttataatgttcataatatactaataattctattgcattgccactacctgattcttgtttctgttgtcactgagtgaacagaagtaaacaatgagagagattggagacccaggaacagggtatgctaaggttgtggaacttttatcttattctctaatctgccaaacaagctgttgtaaaaatatatgttattaacatacaagcctattaaggagaatgaccctagaaatgctaggatatcagagctaccaggtgactggttagccaagtcttgacaaagagcctgttgttagttgaaccaaaagtgtgttggggaggaactaatattctgtgttggcaatgggggagatgtgagacatatctacttgtttagagctggtttaattgtttgtcttaagccgcacaccacctgaccccttggggaatttggggagg

SEQ ID NO: 356975 - DNA, 1195 bp, Homo Sapiens
  misc_feature (51)..(51): n is a, c, g, or t
  misc_feature (60)..(60): n is a, c, g, or t
  misc_feature (73)..(74): n is a, c, g, or t
  misc_feature (76)..(76): n is a, c, g, or t
  misc_feature (79)..(79): n is a, c, g, or t
  misc_feature (83)..(83): n is a, c, g, or t
  misc_feature (86)..(87): n is a, c, g, or t
  misc_feature (89)..(90): n is a, c, g, or t
  misc_feature (92)..(92): n is a, c, g, or t
  misc_feature (94)..(94): n is a, c, g, or t
  misc_feature (97)..(97): n is a, c, g, or t
  misc_feature (122)..(156): n is a, c, g, or t
  misc_feature (688)..(688): n is a, c, g, or t
  misc_feature (742)..(742): n is a, c, g, or t
  misc_feature (750)..(750): n is a, c, g, or t
  misc_feature (780)..(780): n is a, c, g, or t
  misc_feature (787)..(787): n is a, c, g, or t
  misc_feature (789)..(789): n is a, c, g, or t
  misc_feature (791)..(792): n is a, c, g, or t
  misc_feature (796)..(797): n is a, c, g, or t
  misc_feature (1048)..(1048): n is a, c, g, or t
  misc_feature (1052)..(1052): n is a, c, g, or t
ccaactccaaagtatataccctcactctctctaatctaaatcttcactccnctcaataangttctcacaaaanntncantttnaanncnnantncgnccacttataaatattcacactctcnnnnnnnnnnnnnnnnnnnnnnnnnnnnnnnnnnncacacaaatgcacagtccccctcccactccgttacctaactgtacgtcttttcatgtttataaactatacagaaaactgtatttgctgaactaaggattgtattggtgatttctagcaaaaacaaagtgatagaatttttgtctagaatcccaaactggcaacgatagtctccaagggacctggccttgccaagggcctggggcaaggtgtcggcgggacggtgaggaagggggaggcagcaagagtcactttgggggaccaatattcttagatatttagagcatcaccttgtttttatatgcaacacaagcctgtctgccaccctggagcgccctgtcacccctgctgtcgtagctgttggcttcagggtgagaagtgagaagcagcttattgtatatgagggagccaggccccgagggtgagcgagatggagaaggggaaggaaggggctttgggatctggaaaccagcaggccaggcagcatccacagtgttagtccaaagggtcggaccgtgtcgtcagcctagcgtntggtcagtgacggcctggacgggccaaggagactccgggcttgagcccaggccncacgcacngctcagctgctgaatttttccttgaggctntttggtntntnncccnncaagggccctgtgtaggacagcaggagggaggccgtcgcggggccttagcagaaggggaacaatgagggcatttcatgaaccatctcaggcacttctgcatcacggaagacctggccctcccagccgtccctggggatgctcagggtgcaggcagaggctcgggaggccggactcaggggtcagaagcagggactggggcaggcgagcccggacagggaagaggggctccgatcaaagccggccgtgctgnctgnccgggggcccaggtgggtacaagctcctttgtgctttgcacaaacctgaatcccccaccagagaggatgtgtgtgaggagccagaaaagctgaatccaattaagagagaaaaataataataacaataaatgatcttggacaag

SEQ ID NO: 356976 - DNA, 555 bp, Homo Sapiens
  misc_feature (35)..(35): n is a, c, g, or t
  misc_feature (41)..(41): n is a, c, g, or t
  misc_feature (50)..(50): n is a, c, g, or t
  misc_feature (74)..(74): n is a, c, g, or t
  misc_feature (102)..(102): n is a, c, g, or t
  misc_feature (107)..(107): n is a, c, g, or t
  misc_feature (121)..(121): n is a, c, g, or t
  misc_feature (195)..(195): n is a, c, g, or t
atccaaaattttaatccaaaagttcgaacctttcntcaacntaagtttgntcaataagccctgaagggccaaanaaactccggcttgaacccaaacctcccncaagnctcaactgctgaanttttccttgaagctgtttggtgttttgaacccaacaagggcccctgtgtaaggaacaacaggagggaaaacgtncgggggccttagcagaaggggaacaatgagggcatttcatgaaccatctcaggcacttctgcatcacggaagacctggccctcccagccgtccctggggatgctcagggtgcaggcagaggctcgggaggccggactcaggggtcagaagcagggactggggcaggcgagcccggacagggaagaggggctccgatcaaagccggccgtgctgactgccgggggcccaggtgggtacaagctcccttttgctttgcacaaacctgaatcccccaccagagaggatgtgtgtgaggagccagaaacgctgaatccaattaagagagaaaaataataataacaataaatgatcttggacaag

SEQ ID NO: 356977 - DNA, 2946 bp, Homo Sapiens
  misc_feature (1886)..(1896): n is a, c, g, or t
  misc_feature (2818)..(2826): n is a, c, g, or t
  misc_feature (2901)..(2901): n is a, c, g, or t
gggcatggagattccatcatggcggcgtccatttcgggctacaccttcagtgctgtgtgtttccacagcgccaacagcaacgcggaccacgaaggatttttactgggagaggtaagacaagaggaaacgtttagcatcagtgactcacaaatcagcaacacagaatttctgcaagtaattgaaatccataaccatcagccttgttcaaaactttttagtttttatgactacgcaagcaaagtgaatgaggagagtttggacaggattcttaaagatcggagaaagaaagtcattgggtggtacagattccggcgcaatacgcagcagcagatgtcctacagagagcaggttcttcacaagcagctcacccgcatcctcggcgtgcccgacctcgtctttcttctcttcagcttcatctccactgccaacaattccactcacgctttagaatatgtgctcttcagaccaaatagaaggtataatcagaggatatcactcgctattcccaatctaggaaatactagccagcaagagtacaaagtgtcttcagtgccaaatacttctcagagttatgccaaagtgattaaagaacatggtactgacttttttgacaaggatggagtgatgaaagacatcagggcgatttatcaggtttataatgcacttcaggagaaagttcaggcagtgtgtgcagatgttgaaaagagtgagcgagttgttgaatcttgtcaggcagaagtgaacaaattaagaagacaaatcactcagaggaaaaatgaaaaggaacaagaaagaagattgcagcaggcagtgttaagcagacagatgccgtctgaaagcttggacccagcgttcagtcctcggatgccgtcctctgggtttgcagctgaaggcagaagtacacttggagatgcagaggcctcggatcctcctcccccttactctgattttcacccaaacaatcaagaaagtactttgagccactctcgcatggaaaggagtgtctttatgcctcgacctcaagctgtgggctcttccaattatgcttccaccagtgccggactgaagtatcctggaagtggggctgaccttcctcctccccaaagagcagctggagacagtggtgaggattcagacgacagtgattatgaaaatttgattgaccctacagagccttctaatagtgaatactcacattcaaaggattctcgacccatggcacatcccgacgaggaccccaggaacactcagacctcccagatttaactaaacaaaagaaactctccacctagcactgtttttcttcattgcttactgagagggtttttgagaacttaatctggggggagaactgctttctcagatacctttactcccgagaagagagtccttgtgcacagaacttgtgggagcctccatccgctgctctttacctttggatacagtgtgcaagtttcatgacagaatcattaagataatcaaattgtcctaattctggtgcgattcatggatatactggtaaatttaggcaaagtgaaacttatcagcgtagtttctgttctttaaaataaattggaaattagagactaagcacaattagtctataaatgttctataaatcaaaaacttacctcttgcactatcatgccttgaaatttactttttcaaagggaaacaagtttagcagcagccttcaaagaacttctttctatgatgagccaaattcatctttgccagaaaagaaattttgataattccaagaagcctgattagaacaaatcagatataccttctcttgtctgcatgactttgtgagataaaagagagggcttccaacttttttctactagcttgatatgtattatcacttaaaatggttgcctttnnnnnnnnnnngtagagatactaattaccagtaagtaatcatccaaataaatacgtcataaaataaattaattattttttctttgatggattacagtgactactgtgtgcactggcacatttatggtctctgttctggaatcttggaggacacacagcagtggagaacagaaggagtgagttttataatgaacagattccagacacggtaggtttagctgagttcatacagaggagatataactcatttagatcttctgacaaatcctagtgttagttttatctgtggaggaaagacatttaataataaactgtttgggaatcttggtgaataaagattcattttcaagctgaataaccatacttattttattttaagttgccatttggggaataattgcagtatgtgtagagactctcttgggatgcacttatatttttatttaatgactacttgttttctagttttgcccacaacgtctgaaaccactaagacattcaggagcatgttgagcttctggtttggaaacagcaagacccaccatttatgacaaggacagccatgaggttaatacttggagtttaactgccttccctttgaactagttaaaatctgtaagaataaggaagttgttgaaggcttaaaatctgggttctgaaaaagtagtttcagtttataggatacacatttactcactgagctccagttccaatactaaattagacagtatcatatagacggaaaatgaaatgctagaactgccgttctttggatcgccactctatgggggtctgtcttttaacaactctcctggttatgttggccttacaccactgccatttgatttaaaacgccgcagacactttatctgcaaatgtgtcccagttgttatcagctacctactacgcagcttcagcgccagtgtgaatttannnnnnnnnaagtgccattaccgtctcctctgttcagattttgacattcacgaaaatatttttattttgatgccatactgaaancatacaatgtatatctgacaaagcagttaaatgtgacaataaaaa

SEQ ID NO: 356978 - DNA, 140 bp, Homo Sapiens
aagtgccattaccgtctcctctgttcagattttgacattcaggaaaatatttttattttgatgccatactgaaatctacaatgtatatctgacaaagcagttaaatgtgacaataaaaaacttatttaatcatgaaaaaa

SEQ ID NO: 356979 - DNA, 850 bp, Homo Sapiens
acccccccaagccaagttccagtttaagaaagtgtggcaagagggggggaccgggtggaatcagcggcggttcaaagctgcgcggggttgggggccatccgggcaactcaccctggacagtcagcttgcggaatcggcagggccagcactttctgcggggggtctctagtaaaggagcagtggatactgactgcccggcagtgcttctcctcctgccatatgcctctcacgggctatgaggtatggttgggcaccctgttccagaacccacagcatggagagccaagcctacagcgggtcccagtagccaagatggtgtgtgggccctcaggctcccagcttgtcctgctcaagctggagagatctgtgaccctgaaccagcgtgtggccctgatctgcctgccccctgaatggtatgtggtgcctccagggaccaagtgtgagattgcaggctggggtgagaccaaaggtacgggtaatgacacagtcctaaatgtggccttgctgaatgtcatctccaaccaggagtgtaacatcaagcaccgaggacgtgtgcgggagagtgagatgtgcactgagggactgttggcccctgtgggggcctgtgagggtgactacgggggcccacttgcctgctttacccacaactgctgggtcctggaaggaattataatccccaaccgagtatgcgcaaggtcccgctggccagctgtcttcacgcgtgtctctgtgtttgtggactggattcacaaggtcatgagactgggttaggcccagccttgatgccatatgccttgggaggacaaaacttcttgtcagacactaaagcacatgtttgcctttttatgcc

SEQ ID NO: 356980 - DNA, 484 bp, Homo Sapiens
cccccctttcccttccccactggaaatggcaatttaggaccagagggccccctggggtgaaaagttggcaatatttaaggtttcccctttaagaaggatcccctcctcaaacctcaggaaccccctagcagtgttacccttaaacaaaaatgagctcgagaaaaaagtagctcagttacagagaagcaaatcgagttatttccccacataaaaagtttccccagattctaagaattgcagtatcctgtaccctaaaatttttcaaggtgactcctgttgtcgtctgttgataactttaataaaggtcatttaaggacataagtttttaaagactcccaaagtgaaacttaaacattttcgggattatcgattgcatatatcagtttatgctgtgtgctgaattactatgccatgtgctattttagtgtttggggaaaatgaaaaataaaatttgttctttagcttaataaatatgtcttatttt

SEQ ID NO: 356981 - DNA, 765 bp, Homo Sapiens
gggaagttaaaaggatgacccaccaagtgcttttcccaagggtctgggctctgagttggaacccgcttgcctgcactccatcctgtctgcaacgctgcacatgtatcccgaagtgctcctgagtgaggagacaaaacgcattttccttgatcgtttaaagcccatgttttcaaagcaaacaatagaattcaagaaaatgcttaaaagcacctcagatagtctgcagataacactggggttactggctctgcaaccttttgaattaggcaaatacattatggccatagttaaggtacaagcagaacaataccaatagattaattttaagagttgtcttagaatgatttctttcgcattaagtctggaaccaaaccgtgtcaggcccttaggttcctgctgtagttttgtacgacctggcagacttaaagtaaattgagtttaaattcaaagccagttgatgcggaaggaacttttttggcatgtgttaaattgtgctttaaaagacatataaagaattgcagtatcctgtaccctaaaatttttcaaggtgactcctgttgtcgtctgttgataactttaataaaggtcatttaaggacataagtttttaaagactcccaaagtgaaacttaaacatttacgggattatcgattgcatatatcagtttatgctgtgtgctgaattactatgccatgtgctattttagtgtttggggaaaatgaaaaataaaatttgttctttagcttaataaatatgtcttatttt

SEQ ID NO: 356982 - DNA, 892 bp, Homo Sapiens
  misc_feature (118)..(118): n is a, c, g, or t
tttttgagctaaagaacaaattttattttttcactttttccccaaacactaaaatagcacatggcatagtaattcagcacacagcataaactgatatatgcaatcgataatcccgaanaatgtttaagtttcactttgggagtctttaaaaacttatgtcctaaaatgacctttattaaagttatcaacagacgacaacaggagtcaccttgaaaaattttagggtacaggatactgcaattcttagaatctgggaaactttttatgtgggaaataactcgatttgcttctctgtaactgagctacttttttctcgagctcatttttgtttaaggtaacactgctagggttctgagtttgagaagggatcttctaaaggtaaacttaatattgcaactttcaccacagggcctctgtctaaattgcatttcaagtggaaggaaaggggtatgagaagtgaaatcgaattttgctgcagaccaaaatcattctacaaaatgtagacatggtaacagcttaccacgaattcagcaagatttaacgccaagtacagtggtgtagactttacaagtatccacttccattgggtgatcagacaagtcaaaaggacacacaggatttgggacagtagccctttagaatggatgttgaagacagaacttcatggtaaatccgtatgttctaatctggtatttatacaggctatgatcgtctcctgaaatgtttcccaattctttatatgtcttttaaagcacaatttaacacatgccaaaaaagttccttccgcatcaactggctttgaatttaaactcaatttactttaagtctgccaggtcgtacaaaactacagcaggaacctaagggctgcacagtttgcatccagacttaatgc

SEQ ID NO: 356983 - DNA, 628 bp, Homo Sapiens
ggagcaacaggatttaatatagagcaaatgtttagttttatcatctgtaaaatggagataagtattgtcagagtaaacatgaagattagaaagaacacttaatgtgctgggccttttataggttaacactgacatctcaggctgaactatatacattttccttcacaaccatatcaatccttataaactatggatttatgctccttaaaacaatatataatgctgatcactactataaatgcgtggttttaaccaactgtactgaaacagctttgagtttatattctgtttggatatttggagaaaacaacaagtgctctcaagagtatttgcttagaggccggctgtgtgagtggataactttgaaagctgcttttgagacgccagtgtctggcatttcctgcattctggcctggaggccggacgtgaatctgacttctagtaaaaatacacggttcccttgacaaagtcgagctgtttatcccagagactgcacaattttccgttgataggcatggaccaatgctaactggaaatcattgcaaaaagtttttttgtcgggcggagggtgtggtgttaagataaacagtgtgcaacagaagaaattaaaacgtgaagaaattaaagg

SEQ ID NO: 356984 - DNA, 929 bp, Homo Sapiens
aattgaaacaaaaatatgacagtttggccactctatgcaaaattttcattattagatatccatgtaaaatatttttagtaactatagaacattgcattgtatggatatatttctttccaatctatggacaacattgggtctacttacctaaaaccccatcatactagtaagcagtagctatgtgataagtctaatgaaaatactggaaacctagaaattgttttaattggctgtatgaggcagaggagataaagtcttggatctgctcaagataaggagttggaactgagatgaagctggatcactaggattggtggttacacttttagtgaaaggatgggctaagaaaaatacctgcccaatggcagaagcagcagcaataatttgtctgtttcaacttcagcttcaggtagaggtaaagtctccctcttttgagaatttatatggacagtcttaccctcatgcaggttcgaggtttgaatttaccctacctgcaagtctaggaaaccataagccaaagaaaactcaaagtagtcctggattgttgtgccctatagaacttggcaaaagcaaacaccgttctattgaggagaagagagaagacctgccagagaacacagaagacacaacctaagcctcccaatattcctgatgattaaggtcaatcaaatataagcataccattcaaaattacaaaacatataaggaattacgccaccagaaataagtcaatagaaccaacaaatagcagcactgttcctcagggacttcagatactgacattaccaaacataaaacataaaataacatttgaagagtttaaggtaaagcaagaactgaaaacacaagcaaggaaaaaagaccataaaaaatgaccagggtaggccagcgttggtggctcacacctgtatcccagcactttggaggca

SEQ ID NO: 356985 - DNA, 1541 bp, Homo Sapiens
  misc_feature (281)..(513): n is a, c, g, or t
  misc_feature (1304)..(1344): n is a, c, g, or t
ggcagggttcctggcaatacttgtcttggccgcgcccaaaggctggaggccacgtccggggtgtgtgccttctcccgcccggcgccctcggctctcaccttcgtggcctccggggaagcgtccccgctaggggtggggtcttgtggactccctgtgtggcttcctggagctgacccgtggggggtctgctgccctcagttcctgctgaccgaaagtcctgcctggatctggcgcctacgaggacgtggcgggtggagctcagaccggtgggctagatggannnnnnnnnnnnnnnnnnnnnnnnnnnnnnnnnnnnnnnnnnnnnnnnnnnnnnnnnnnnnnnnnnnnnnnnnnnnnnnnnnnnnnnnnnnnnnnnnnnnnnnnnnnnnnnnnnnnnnnnnnnnnnnnnnnnnnnnnnnnnnnnnnnnnnnnnnnnnnnnnnnnnnnnnnnnnnnnnnnnnnnnnnnnnnnnnnnnnnnnnnnnnnnnnnnnnnnnnnnnnnnnnnnnnnnnnctcacgaagtctgggattactggcgtgagtcactgctcccggccttggtctggtgttttatacacatgtgcatgtgatgtggagctgtgcaggccaccttgtcagcatgcgaggagggtccagtctctgcgccttcttggtttctgacttcacacccagtagcctcactcctggcccagcatggcaagcacagtttcccactcagggcatttgccctggttattctctctgccttggatacttttctcctagattctgcctctaatattttgaccttttcctcttatattgtttcctgtctctcctgatcagaatgtaagctgcgtgagggcaggagtttttgtttggtttacagctactgtcccagctccgagaacagtgctgacacttaggaagtgtgcaggctgatttatctcacaccatttactccgggtttcctcacttctagtaaagtatgacaccttgtctcaaatattcttttcctctttccagacccatgtctttgctcatgtagatcactacttcaggctgacataaaaaccgttctcttgttaagaaagctcagcaatgggagaggcaatcctccacccgtctcttgctctcctacaggtctttcctggaggtagtgggttgaatggtggcccccaaaaagataggtccaagtcctaacttctagaacctgtgaatgcgaccttatttggaaaaagggtctttgcaaatgtaattaaaacacctggagatgaaatcatcctgtatttaggatgggccctaaacccaatgatgtctttatnnnnnnnnnnnnnnnnnnnnnnnnnnnnnnnnnnnnnnnnntcattgagatggaggcagagatggggatgaagtgtctgcaaaccaaggaatgccaaagattgccagcaaaccaccaggggccaggagagaggcctggccgattctccctcacagacagtagagggaaccaccctgctgacccgtcagtttcaggctttgggacctcagaactgtaagagaaataaagcatgttttga

SEQ ID NO: 356986 - DNA, 1464 bp, Homo Sapiens
  misc_feature (164)..(197): n is a, c, g, or t
cggctggtaccggtccggaattcccgggatagcgccgccgtttcacttcctcccggccctccctgcctgcaggagcatctctgtgcccgggtccccgggccacgccatggctgacacctacgcggtggtgcagaagcgcggggctccagcgggcgccgggagtnnnnnnnnnnnnnnnnnnnnnnnnnnnnnnnnnncgcgcagcgcggaggaggcgccgctctacagcaaggtgacgccgcgcgcccagcgacccggggcgcacgcggaggacgcgagggggacgctgcctggccgcgttcctgctgaccaaagtcctgccggatctggcgcctacgaggacgtggcgggtggagctcagaccggtgggctaggtttcaacctgcgcattgggaggccgaagggtccccgggacccgcctgctgagtggacccgggtgtaagtctaacgccagttcctgcctgttgcctcttgtgagctcggactgctgatgccccggtgctgctgagcgccgtgcgcagaatggaaacagtgggcctggatcaaagttaaagtttctcagggtgggaaatgtgggggctttgccccaatgactgtagcattcaaggcttgaggctggaggaggtagctagggtatagtggctggtgaggctgcacagagcagattcaagaaagaagatcaggaaggggcatgacccctgagttatgaaggggagaagggacagatgagcttccggagactgctctcctcaccacacagcactagtccatcctcagcacctgagcctccctcacttggacactcaggggaccacacagagaagtggatggacacttcgccatccaggcagaactaagccaggcataaccacagccaagcagattaaccccaggcagaccgataaaaagacctccagataggcagacagacagatggaccaccaacctggacagacagccaaagcttcagagatacagtccacaggtggacaaagggatccccagccagagagagagagaccagccaacagcttgatagaccagtgcagccagagagaccaccaaacagagcccccaaaagacagacatctctgctagctggacagccaggtggaccccctaagttagattactagacagatataaacagatcccctgctgaacagatacacagagttctcagaccccacccccaccctcaggtgggctggctggctgacagaccttctggccagacagactcctaaccaaccagatggactgccagacaggcagacatcagccacatggaatcctgacatcccagccagccggccagactctcatcttgatgtcttgatggatggaccccagctagtcagacatgatcctccagattgacagacaagtcccccaaatgagtacacatctccagctattcagacagatggacccccagcaaatcaggacctatctaggcagacc

SEQ ID NO: 356987 - DNA, 958 bp, Homo Sapiens
  misc_feature (256)..(286): n is a, c, g, or t
  misc_feature (869)..(869): n is a, c, g, or t
tgaacaaaggtttaattaggaaaaaagagacaaccatatagtatctttagtatagtatatttataggaatgcataacatgtgagatgtacattttgaagtttcatccataacttataacatttactgtagcagtaacaagacagcaggtcatcactttacaacattacacatgagtgattttgacttacaaataaaatatttacaacctacctttacaaaacgacattgtgtgcatacaaaatgaacaacagcagnnnnnnnnnnnnnnnnnnnnnnnnnnnnnnncccagaagatacacttaaggcagaccagcaagacactgaaataattaaggctgtggaattcttctgcaccttgaaaatatagagctatttatcaatactgtggagtgattttaaatcaattgttacaagcctgatggaagtatgtacttatatgtatatgtgcgatggtccctatggggaaacctgtccacttatgaataaggccctttgtctgaatggccagtgaagcccactccaaattctcaaaagacttgaggggggcaggggtcactcaaaaccaagagatgccaatacagtttgcaaatcaactattaatagttcaaatataaagatagttataagtccagataaacagaataaactaaatgatggcccctttatgttcacactttgttagttgggctttgtggatgccaaaaagacagtaattaatttcagaatgagtaaaaattcgtttccacaaattaacccctaatgatttttaaatggcccctaaaatggtctttctattaataaacatttgacccaacctgggtttttcttgaaaatgtaaaaaatatttttcatattagccattaacctntttacttacattattatacaccttattttacattgtacaagaaggtcaaataattattcccttatttttcacaacaagttttgcaactt

SEQ ID NO: 356988 - DNA, 900 bp, Homo Sapiens
  misc_feature (10)..(10): n is a, c, g, or t
  misc_feature (15)..(15): n is a, c, g, or t
  misc_feature (27)..(27): n is a, c, g, or t
  misc_feature (43)..(43): n is a, c, g, or t
  misc_feature (48)..(48): n is a, c, g, or t
  misc_feature (863)..(863): n is a, c, g, or t
  misc_feature (876)..(876): n is a, c, g, or t
  misc_feature (882)..(882): n is a, c, g, or t
  misc_feature (891)..(892): n is a, c, g, or t
cccgtacgtngtgtngtgggacctggngcctggacccacttgnactcntggggtgggactgagggagggaaagggctcccccacttcaggctggtcactgtatgttgacttccctctgggaagcaaaattccacttgtaaaaatcagcttccaagacaaaagatgatccgatgtcacttctgggtcaccaggaagggacacaggatctctctgaactttggaacagaccctcatattctggggccagaagtttgcccagaaagcagcaggtggctctgcctggctgtagagcccagctcattggctgtccctgggcttcgtctccctctaccgagtagttgctgcctttcttcagatcaggttaccacaatgcctccccgctgctgacgcttcatcccccacacctccagccccagttacctggagcttctcagaacccactttgccggtgctaaaacacaagagggggtgaaagtggctgccagtaatggccagaaaccaaccaccaggaggccaggctgaaagacaagctccgggtgtccaggggctgacgggccaaccatgtggcaggtcccaggccccacccactgcgccatccgcctctgagctccacagtggtcccacttaatgggaacctcctctagggagagtgatactgcaccttcacccgtaggactcatatttataacaatgtgtaatggctgtagcaaaaagcccttgtttcgtagatgtaaatggtcaaagaaacaagcgctctattgttttgaataaaatagttcaaatgagtcctgtatcgattgtatctcctattctggattagtgccttttaggaacagtagactgttctgtaattaaaatgtagnaatactaattttnagtatnaattttatnntaataaaa

SEQ ID NO: 356989 - DNA, 2000 bp, Homo Sapiens
  misc_feature (1445)..(1446): n is a, c, g, or t
  misc_feature (1514)..(1569): n is a, c, g, or t
  misc_feature (1631)..(1639): n is a, c, g, or t
  misc_feature (1661)..(1670): n is a, c, g, or t
  misc_feature (1724)..(1734): n is a, c, g, or t
  misc_feature (1747)..(1815): n is a, c, g, or t
  misc_feature (1915)..(1929): n is a, c, g, or t
aattcccgggatcttccggggaaacgcagctgcggtcgctcgggaaccacgcctggcagccactcatctctgcccagctgctgccctccccaggaggcctccatggcttcacctacctccaccaacccagcgcatgcccactttgagagcttcctgcaggcccagctgtgccaggacgtgctgagcagcttccaggagctgtgtggggccctggggctggaacccggtggggggctgccccagtaccacaagatcaaggaccagctcaactactggagcgccaagtcactgtggaccaagctggacaagcgagcaggccagcctgtctaccagcagggccgggcctgcaccagcaccaagtgcctggtggtgggtgctggaccttgcgggctgcgggtcgctgtggagctggcgctgctgggggcccgagtggtgctggtggaaaagcgcaccaagttctctcgccacaacgtgctccacctctggcccttcaccatccacgacctgcgggcactcggtgctaagaagttctacgggcgcttctgcaccggcaccctggaccacatcagcatcaggcagctccagctgcttctgctgaaggtagcattgctgctgggggtggaaattcactggggtgtcactttcactggcctccagccccctcctaggaaggggagtggctggcgtgcccagctccaacccaacccccctgcccagctggccaactatgaatttgacgtccttatctcggctgcaggaggtaaattcgtccctgaaggcttcaaagttcgagaaatgcgaggcaaactggccattggcatcacagccaactttgtgaatggacgcaccgtggaggagacacaggtgccggagatcagtggtgtagccaggatctacaaccagagcttcttccagagccttctcaaagccacaggcattgatctggagaacattgtgtactacaaggacgacacccactactttgtgatgacagccaagaagcagtgcctgctgcggctgggggtgctgcgccaggactggccagacaccaatcggctgctgggcagtgccaatgtggtgcccgaggctctgcagcgctttacccgggcagctgctgactttgccacccatggcaagctcgggaaactagagtttgcccaggatgcccatgggcagcctgatgtctctgcctttgacttcacgagcatgatgcgggcagagagttctgctcgtgtgcaagagaagcatggcgcccgcctgctgctgggactggtgggggactgcctggtggagcccttctggcccctgggcactggagtggcacggggcttcctggcagcctttgatgcagcctggatggtgaagcggtgggcagagggcgctgagtccctagaggtgttggctgagcgtgagagcctgtaccagcttctgtcacagacatcccnnctagaaaacatgggcaattcgcaaattggtggggcccccaagttaattgggggggcttggggaccccnnnnnnnnnnnnnnnnnnnnnnnnnnnnnnnnnnnnnnnnnnnnnnnnnnnnnnnnattcaagggaccaaaacctggttttatttggccctacccaaaggaccccggggccaggggannnnnnnnnaaaaacattttccgggggttgnnnnnnnnnnggggggcggggaggggcccccagagaggaggctcgtttccccctggggggcccnnnnnnnnnnncacagttgggtgnnnnnnnnnnnnnnnnnnnnnnnnnnnnnnnnnnnnnnnnnnnnnnnnnnnnnnnnnnnnnnnnnnnnnaacactccttttgtgggccccccccgggggaaaaccaccgtggtgttttccacccctggggcgtttgtgtggtgaaccccctcccccacaaaaaagtttnnnnnnnnnnnnnnntggggtatcctcttcttctaaaaaaaccacctgcgtggttgtgggggccgccaatcaaggggggggcggcg

SEQ ID NO: 356990 - DNA, 1002 bp, Homo Sapiens
  misc_feature (3)..(3): n is a, c, g, or t
  misc_feature (12)..(12): n is a, c, g, or t
  misc_feature (15)..(15): n is a, c, g, or t
  misc_feature (29)..(29): n is a, c, g, or t
  misc_feature (32)..(32): n is a, c, g, or t
  misc_feature (38)..(38): n is a, c, g, or t
  misc_feature (42)..(42): n is a, c, g, or t
  misc_feature (50)..(50): n is a, c, g, or t
  misc_feature (53)..(54): n is a, c, g, or t
  misc_feature (64)..(64): n is a, c, g, or t
  misc_feature (74)..(74): n is a, c, g, or t
  misc_feature (76)..(76): n is a, c, g, or t
  misc_feature (86)..(86): n is a, c, g, or t
  misc_feature (88)..(88): n is a, c, g, or t
ggncctccaggnttngggggcctcctacnagngggganaagngcagtggngcnnttgaactccngggagctgtngngttcccagcngngctgcctgtgggagacggcccattccaacgcaggacccaggtcttgttcgtgcagggcttccaggattcgattcaactctaggaaaggctgcttgaaatccaagtccacattcagcgttgattcctggcacagctcctcggccacgctgagcatgccctgctgatacaggtgttccacgatggccatctgcaggatctgctgctgctgttcccgcgcgtcccacaccgcatctgacacaacaccacagatctcagagtcgaagttcctgtgcaatggctttgcccactcgggatacactgctgtgaatgtccttatggtccgaagccagtttctgcaccgtatctttgatcttccggcagcactgtgacatcaccagagagagggtggctgagagaggggtcccctggagggctgcgctggccagctcagcccgcagctggcccacgtagtgcagcagctcctccaggctccgctcacagtgctgcccgtaggtcaggaacttctgcaggaccttgtccagctctctctccacgcacgcacactgctccatggtggcctcagcctgctcacttccgacccagcgcggtcgcacgaggactggacgtttgagtccgagcaactccccccggctgaggcggctcttcgggggctgggccgggacctatgagtctgggactccagctcccggcccagggccgacaactgcgaagagaacaagcccaagggcagattgttcggggcttagtcgtgggtagcaggggttctggagaaggctggggcccgggaggccggccgagctttccccgccgcgcgcctcagcgccaaaagccgctgtgcccgccctcggcccgcacctgccggctcccaagcccgcccgctctcacctcgccccgcagccccggccccggcttcc

SEQ ID NO: 356991 - DNA, 1927 bp, Homo Sapiens
gctggtaccggtccggaattcccgggatcggaagccggggccggggctgcggggcgagtggtcggccctgggccgggagctggagtcccagactcataggtcccggcccagcccccgaagagccgcctcagccggggggagttgctcggactcaaacgtccagtcctcgtgcgaccgcgctgggtcggaagtgagcaggctgaggccaccatggagcagtgtgcgtgcgtggagagagagctggacaaggtcctgcagaagttcctgacctacgggcagcactgtgagcggacctggaggagctgctgcactacgtgggccagctgcgggctgagctggccagcgcaccctccaggggacccctctctcagccaccctctctctggtgatgtcacagtgctgcctggaagatcaaagatacggtgcagaaactggcttcggaccataaggacattcacagcagtgtatcccgagtgggcaaagccattgacaggaacttcgactctgagatctgtggtgttgtgtcagatgcggtgtgggacgcgcgggaacagcagcagcagatcctgcagatggccatcgtggaacacctgtatcagcagggcatgctcagcgtggccgaggagctgtgccaggaatcaacgctgaatgtggacttggatttcaagcagcctttcctagagttgaatcgaatcctggaagccctgcacgaacaagacctgggtcctgcgttggaatgggccgtctcccacaggcagcgctgctggaactcaacagctccctggagttcaagctgcaccgactgcacttcatccgcctcttggcaggaggccccgcgaagcagctggaggccctcagctatgctcggcacttccagccctttgctcggctgcaccagcgggagatccaggtgatgatgggcagcctggtgtacctgcggctgggcttggagaagtcaccctactgccacctgctggacagcagccactgggcagagatctgtgagacctttacccgggacgcctgttccctgctggggctttctgtggagtccccccttagcgtcagctttgcctctggctgtgtggcgctgcctgtgttgatgaacatcaaggctgtgattgagcagcggcagtgcactggggtctggaatcacaaggacgagttaccgattgagattgaactaggcatgaagtgctggtaacactccgtgttcgcttgccccatcctccgccagcagacgtcagattccaaccctcccatcaagctcatctgtggccatgttatctcccgagatgcactcaataagctcattaatggaggaaagctgaagtgtccctactgtcccatggagcagaacccggcagatgggaaacgcatcatattctgattcctacctggaaggaattttgttgaaaggggttttcacctgtgagccttggtctgtctcggtagggtggtcaacttcagtggactgtggttggtttcagagcgcctggctgaggagttccactgaggggagcactggagcagccctttggcagaggctgaggagggagatggaccagcccacgcctggcacctggctccatggcataaggaaagggagatgctggcctctgtgctcctgctgtcttttcctgtttctgtttgcgtttgacttagtagcaaccgacagagtggcaagggatttggtcttcagcagtagacatccttccacccctgccctcagccaagtctcttgctgccatgccaatgctatgtccacccttgcccctcggcccaagagtgtccagcggtggcccacctcttcctcccactacagcctcaacagtatgtaccatctcccactgtaaatagtcccagttagaacggaatgccgttgttttataactttgaacaaatgtatttactgcccttttcattt

SEQ ID NO: 356992 - DNA, 551 bp, Homo Sapiens
ccactcgggatacactgctgtgaatgtccttatggtccgaagccagtttctgcaccgtatctttgatcttccggcagcactgtgacatcaccagagagagggtggctgagagaggggtcccctggagggctgcagagaaagtggaataaggacacagaggaggcagactggggcacctgccttggcagcagaccttagctctattctaaatgccagccccgtagcccaggaggcagccctgaatgccagggtgaaagaactagcttctcttccaggtcctgccactttttaactgtctgacttggaactgctcaaatgggaaaaggccagttcacctctgggagccttcatttcctcatatgtgaaattactggttgctgtgaaatgaaaatgatctggcacttactatgggaaaagtgtttatttcaactcatggactacagcatgcataggattctgtttaactgccaggttagacctagagttaccacctgatccagcagttccactccgaaggatataccagaagaaataaaaacatatgtccaccc

SEQ ID NO: 356993 - DNA, 1374 bp, Homo Sapiens
  misc_feature (1161)..(1220): n is a, c, g, or t
gctgacgctaaggggggactccacagaaagccccagcagggaacaggcgtcccgggtaaaggtctcacagatctctgctcagtggctgctgtccagcaggtggcagtagggtgacttctccaagcccagccgcaggtacaccaggctgcccatcatcacctggatctcccgctggtgcagccgagcaaagggctggaagtgccgagcatagctgagggcctccagctgcttcgcggggcctcctgccaagaggcggatgaagtgcagtcggtgcagcttgaactccagggagctgttgagttccagcaggcgctgcctgtgggaagacggcccatctgggaagaaaggggcccagtttagtgtagagctggtgggggctaggacctgagagccagcacctgagaggagggccccaaaagcctgtgtgaggctcttgagacagggctgcaggcaagtcaagtacatctgggtgaaatgaagaccacagtcaagccctgtgccctgagaggccgaagcagagtgctgctggcccacccaagggcctccttactccaacgcaggacccaggtcttgttcgtgcagggcttccaggattcgattcaactctaggaaaggctgcttgaaatccaagtccacattcagcgttgattcctggcacagctcctcggccacgctgagcatgcctgctgatacaggtgttccacgatggccatctgcaggatctgctgctgctgttcccgcgcgtcccacaccgcatctgacacaacaccacagatctcagagtcgaagttcctgtcaatggctttgcccactcgggatacactgctgtgaatgtccttatggtccgaagccagtttctgcaccgtatctttgatcttccggcagcactgtgacatcaccagagagagggtggctgagagaggggtcccctggagggctgcgctggccagctcagcccgcagctggcccacgtagtgcagcagctcctccaggctccgctcacagtgctgcccgtaggtcaggaacttctgcaggaccttgtccagctctctctccacgcacgcacactgctccatggtggcctcagcctgggcatggtggcacacgcctgtggtcccagctcctcagaaggctgaggtgggacggaggattgcttgagcnnnnnnnnnnnnnnnnnnnnnnnnnnnnnnnnnnnnnnnnnnnnnnnnnnnnnnnnnnnngagtgagaccctgctcacttccgacccagcgcggtcgcacgaggactggacgtttgagtccgagcaactccccccggctgaggcggctcttcgggggctgggccgggacctatgagtctgggactccagctcccggcccagggccgacaactcg

SEQ ID NO: 356994 - DNA, 1156 bp, Homo Sapiens
  misc_feature (933)..(933): n is a, c, g, or t
gggtccggaattcccgggatcggggccggggctgcggggcgagttgtcggccctgggccgggagctggagtcccagactcataggtcccggcccagcccccgaagagccgcctcagccggggggagttgctcggactcaaacgtccagtcctcgtgcgaccgcgctgggtcggaagtgagcaggctgaggccaccatggagcagtgtgcgtgcgtggagagagagctggacaaggtcctgcagaagttcctgacctacgggcagcactgtgagcggagcctggaggagctgctgcactacgtgggccagctgcgggctgagctggccagcgcagccctccaggggacccctctctcagccaccctctctctggtgatgtcacagtgctgccggaagatcaaagatacggtgcagaaactggcttcggaccataaggacattcacagcagtgtatcccgagtgggcaaagccattgacaggaacttcgactctgagatctgtggtgttgtgtcagatgcggtgtgggacgcgcgggaacagcagcagcagatcctgcagatggccatcgtggaacacctgtatcagcagggcatgctcagcgtggccgaggagctgtgccaggaatcaacgctgaatgtggacttggatttcaagcagcctttcctagagttgaatcgaatcctggaagccctgcacgaacaagacctgggtcctgcgttggaatgggccgtctcccacaggcagcgcctgctggaactcaacagctccctggagttcaagctgcaccgactgcacttcatccgcctcttggcaggaggccccgcgaagcagctggaggccctcagctatgctcggcacttccagccctttgctcggctgcaccagcgggaaaatccaagtgatgatgggccagcctggtgtacctgcggctgngggctttggaaaagtcacccctaatgccaactgctggaaagcagccactggggcaaaagatctgtgaagacctttaccccgggacgcctggttccctggctggggggcttttctgtgggaagtccccccctttaagcgccatctttgccctccctggctttggtgggccccttcacctcggtcttctatagacacatcaaagggggtggggagtttttaaacc

SEQ ID NO: 356995 - DNA, 911 bp, Homo Sapiens
gcggccgcaccgcctcctgcctggtctcgggtgccagcgccgccggcggagaacaggagcatggagggcgggctggggcgtgctgtgtgcttgctgaccggggcctcccgcggcttcggccggacgctggccccgctcctggcctcgctgctgtcgcccggctccgtgcttgtccttagcgcccgcaacgacgaggcactgcgccagctggaggccgagctgggcgccgagcggtctggcctgcgcgtggtgcgggtgcccgccgacctgggcgccgaggccggcttgcagcagctgctcggcgccctgcgcgagctcccccggcccaaggggctgcagcgactgctgcttatcaacaacgcgggtaagaccccggggctggagcggactccccatgtgagcgcccacttcctccaccgctggggaatttaagggctactcctaggggtcagataggacgcctagaaatctaaagccctagttgttccagcttgagtagcaagtggaggcgaggtgtacaggaagactcggtgccgtcgggacaacagtctgcccccacttcctggaaaattggccagccgggttatccaaagcgcctgtagaactttcccgagccccttgctctgcgccctctggcggaggcctgagtcagggcttggagtctccaaacaagtaaactctctgcttctccaaaggaccgctagagctttccttcagagcccacggcaaggcaaggtgcctttctcattctgcagcttgggatggctaaggttccccagctgtggtctttccgcagagctggggaaggagagaagcctcttcagaaggcgctagggcagcttcctcctctaggtctgcatgggaagaggatatctggaggaacttgggcggggctgggaagaagaaagccc

SEQ ID NO: 356996 - DNA, 1458 bp, Homo Sapiens
aggtagcgaggcctgggtggcgaattcaacacgagggagaacaggagcatggagggcgggctggggcgtgctgtgtgcttgctgaccggggcctcccgcggcttcggccggacgctggccccgctcctggcctcgctgctgtcgcccggctccgtgcttgtccttagcgcccgcaacgacgaggcactgcgccagctggaggccgagctgggcgccgagcggtctggcctgcgcgtggtgcgggtgcccgccgacctgggcgccgaggccggcttgcagcagctgctcggcgccctgcgcgagctcccccggcccaaggggctgcagcgactgctgcttatcaacaacgcgggctctcttggggatgtgtccaaaggcttcgtggacctgagtgactccactcaagtgaacaactactgggcactgaacttgacctccatgctctgcctgacttccagcgtcctgaaggccttcccggacagtcctggcctcaacagaaccgtggttaacatctcgtccctctgtgccctgcaacctttcaaaggctgggcgctgtactgtgcaggaaaggctgctcgtgatatgctgttccaggtcctggcgctggaggaacctaatgtgagggtgctgaactatgccccaggtcctctggacacagacatgcagcagttggcccgggagacctccgtggacccagacatgcgaaaagggctgcaggagctgaaggcaaaggggaagctggtggattgcaaggtgtcagcccagaaactgctgagcttactggaaaaggacgagttcaagtctggagcccacgtggacttctatgacaaataagcccatgtttttggcttcctgaacctttttgcccccacttttagacataccccagagccctgtggctccccacaccctgccataggggcagtcctgccttacacatagaagcattcatgcctgctgccctgccctcaggcacagccagctgtgagctcccaggtcattggccttaccagttgtcaggagtctgtgctgtgcaccctgggttataaggaggcttaggagagaggttatgggtattggtgtctctatccccaggaatagaacttaaggggtgggaagaacaggaaaagaagctggaacacagaagagaggaggttgtgtctcttgctcatagcaagcctgtgggtagaggaaagagtgatctggtgtcgaataggaggacccatgtagattcgcagatggcctggatgggaggaagggcagacggtacatgtcccagcccacatagatgccccttgctgagggtagcaggaccttctgttgaactttgtgtcctcactctgatgtctccttccttcagaatctaccacccctcccccaggctgggagaaggggctcctgggtgtctgtatacacgccaaaggcagatacaaataaaatacagattgtccttttttc

SEQ ID NO: 356997 - DNA, 1048 bp, Homo Sapiens
gtagcgaggcctgggtggcgaattcggcacgaggggagggcgggctggggcgtgctgtgtgcttgctgaccggggcctcccgcggcttcggccggacgctggccccgctcctggcctcgctgctgtcgcccggctccgtgcttgtccttagcgcccgcaacgacgaggcactgcgccagctggaggccgagctgggcgccgagcggtctggcctgcgcgtggtgcgggtgcccgccgacctgggcgccgaggccggcttgcagcagctgctcggcgccctgcgcgagctcccccggcccaaggggctgcagcgactgctgcttatcaacaacgcgggctctcttggggatgtgtccaaaggcttcgtggacctgagtgactccactcaagtgaacaactactgggcactgaacttgacctccatgctctgcctgacttccagcgtcctgaaggccttcccggacagtcctggcctcaacagaaccgtggttaacatctcgtccctctgtgccctgcaacctttcaaaggctgggcgctgtactgtgcaggaaaggctgctcgtgatatgctgttccaggtcctggcgctggaggaacctaatgtgagggtgctgaactatgccccaggtcctctggacacagacatgcagcaggttggccccggcagaccttccgtggacccagacatgcgaaaagggctgccagagctgaaggcaaaggggaagctgggggattgcagggtgtccccccagaaaatgcctgagcttactggcaaaaggacgagtttcaggtctggaaccccacgcggaatttctatggcgaatgaaccccccgggtcttgggtttcctgaaacctttcctgcgcccaccttttaagatttaatttagaagaccccgggggcttcccgcccccccttgctgaatgcgggggacgcgcttttctctacgcttacggaagcccctcgatgtttgtgggtggaccgggcccccaccggcgaagcggtgggccgcaccccctgctttattccgaccgcggccccgagcaata

SEQ ID NO: 356998 - DNA, 592 bp, Homo Sapiens
  misc_feature (20)..(20): n is a, c, g, or t
  misc_feature (402)..(402): n is a, c, g, or t
gggatgcgggaactgcgagncggccgcgggtcttcgggctgcgtgggcctgggaggcgcgggaagagcagtcgcacggggcagggacgacacactgcattcactggaagggacaacgcagcgccagtacatagcctgaaacgctccccagaaggtcccacgctcgccgcgcggtcgacaaccgcatcctgcgctcgcccgcggtgtctcggcaagcgctaggcttgtcgggaagagctggagggcgcaagtgcggcgctggccggacgtgccgcaccgtcagcgcagggctcgccgggaaatgtggtttctccagccggcccggggcggtggccgcaagttgggcttacagcgcggccgatccggcgtggacccgggatggctggaccgggcagcaacgggnggggcaagaatcggggcttgcgggcccctggccaggcgggtggcgccggtcccaagggtaagcccccggagcggtggaacttttgaaccactaagctgtgcttcggaacagggggtcggaggtacccttgaccgccttcaacatttttgggcccccttttcgaaacaagtggcattttgctttggggggg

SEQ ID NO: 356999 - DNA, 1631 bp, Homo Sapiens
  misc_feature (50)..(50): n is a, c, g, or t
  misc_feature (84)..(84): n is a, c, g, or t
gctggccccatcagcttcaggggctcactgcgatgtgaccagatgttagnatgtgtctctacgcgatagctgcaactgtaggtncctgtgcttttcccgtcaacattactgatgatgaagtctccgtttactgagaatttttggaatgtttctctttcttcccattccagagaaaattccagtactggatgagatactcggcactgaagggtgatggcctttcctagcttgaacacagtgcttggccaagctgacagggagggtttggggggcttatctacaaccataagctccacagtgttgtgtgatggcatcctaatggaggtcttccaggtgagaagatagtggcagctatagatgccagtatcactgtaggttacattgttgaggaagaatgatgtgttgtcatcgatgctggtggcatccaaaaattgaagtggtttgtcttctcctttcttatagagtgcaagacccactccatccactggtcctcgacaccgtaggctcacattctgacccatttggaccacagcactgggccgagcaagtagccaggtcttggggaaagtgtcagttacccagattttcaggacatcactaaggagtgaacctctatatgatgcgtcatagtaaaaacagaggtaatgtccagtatcttggatcttcaaagactggaagaagaaatttgcctcattttttattgtcttcttgtggtaaaaggacttctccaagtcttcaaccctcattagagcaaaggtcattccatagattggcccttggcacctgagattcaggctttctcccaggtgccatgatgggcccaggatgggctgtcaaagttggtttggggtagagtcctgctacaaccagcttcagggggttgctgggctctgaccacagggtggggagcatctggatatgagtgcggcagatgtaaacccccttcatcctcaggtgtcaggttgtcaatggagaatatggccattgtcccagttgggacttggtaatccacaggctctgcatatccctctttaaacagcatgaataccaaatcctgcagccagccatggcagaggatgttaacattacacccaggaagagcgggggtctcagcctgaatccagaagatgggcttggccagttggcctggtgcctccaactctagaactttactgggctttgaccagcctgtctccttccagtagcagcaccggtaaagacctgcattggactcagtaagggcacctataaggaatgaaacttggaaggtcttgtgggaagggcggatccaggtcatctgtgtcttatccttcagcagcaggaacttgcttgatatccgagaggggcttcggcaccaaagcgtgatgttctcccaaggggcctgggggtagttggactctatccacaactccggttgagggtccatcactatcgatgtcatacccagactcatccgaatgcaaaagagcaaaacagtgaatgtcttcagcatggtggccccctcccctggtctgtccagggtcatggggcctctggtgctggctgtgtgctctgagtcttgaagaatttttctcctcagcaggtggtgggatcgaggcaggtctgggatccgggaaggaaaggagaaaggc

SEQ ID NO: 357000 - DNA, 1207 bp, Homo Sapiens
  misc_feature (50)..(50): n is a, c, g, or t
  misc_feature (977)..(985): n is a, c, g, or t
agcaggctggtaccggtccggaattcccgggatcgacgagagcccgacanccggcggcgcccgagcccgacctgcctgcccagccggagcgaagggcgccgccccgcgcagagcccgcgccagggccgccggccgcagagcagttaaaacgtgcaggcaccagaaggcacttcctgtcggtgaagaagacctgtctccggtgtcacgggcatcctgtgttttgcaaacggggctgacctcccttcctggggagcaggaagggtcagggcgacatcctcactgaccgagcaaagattgacattcgtatcatcactgtgcaccattggcttctaggcactccagtggggtaggagaaggaggtctgaaaccctcgcagagggatcttgccctcattctttgggtctgaaacactggcagtcgttggaaacaggactcagggataaaccagcgcaatggattgggggacgctgcacactttcatcgggggtgtcaacaaacactccaccagcatcgggaaggtgtggatcacagtcatctttattttccgagtcatgatcctcgtggtggctgcccaggaagtgtggggtgacgagcaagaggacttcgtctgcaacacactgcaaccgggatgcaaaaatgtgtgctatgaccactttttcccggtgtcccacatccggctgtgggccctccagctgatcttcgtctccaccccagcgctgctggtggccatgcatgtggcctactacaggcacgaaaccactcgcaagttcaggcgaggagagaagaggaatgatttcaaagacatagaggacattaaaaagcagaaggttcggatagaggggtcgctgtggtggacgtacaccagcagcatctttttccgaatcatctttgaaaaagcccttatgcatgtggcattactttcctttacaaggggtaccccccggcccggggcggtgaaatagggcgatggcaccagnnnnnnnnntttttccccgtcccttttgcacggccaaccgagaatgctcccgtcaccatctcctttgaatccataaccgagcagaatcgccactcgcccaactgtgccacaccccctcacacttattttactccccgctcctgcacgggaccacgtaccggtcgtcattcgactgctcaaaacatacccattctcaataacccatcccgttttccccctgtttgcccctcc

SEQ ID NO: 357001 - DNA, 1232 bp, Homo Sapiens
  misc_feature (742)..(742): n is a, c, g, or t
  misc_feature (880)..(890): n is a, c, g, or t
  misc_feature (970)..(979): n is a, c, g, or t
ggcctgggtggcgaattcggcacgaggacgagagcccgacagccggcggcgcccgagcccgacctgcctgcccagccggagcgaagggcgccgccccgcgcagagcccgcgccagggccgccggccgcagagcagttaaaacgtgcaggcaccagaaggcacttcctgtcggtgaagaagacctgtctccggtgtcacgggcatcctgtgttttgcaaacggggctgacctcccttcctggggagcaggaagggtcagggcgacatcctcactgaccgagcaaagattgacattcgtatcatcactgtgcaccattggcttctaggcactccagtggggtaggagaaggaggtctgaaaccctcgcagagggatcttgccctcattctttgggtctgaaacactggcagtcgttggaaacaggactcagggataaaccagcgcaatggattgggggacgctgcacactttcatcgggggtgtcaacaaacactccaccagcatcgggaaggtgtggatcacagtcatctttattttccgagtcatgatcctcgtggtggctgcccaggaagtgtggggtgacgagcaagaggacttcgtctgcaacacactgcaacccgggatgcaaaaatgtgtggctatgaccacttttttcccggggtcccacatcccgcctgggggcccccccacctgatctttcgtctcccacccaagcgcctgctggggggccatgccatgtgggncctactacccgggcacggaaaccccctccgcaaggttccgggcgaaggaagaaaaataaagcaatggcttttccaaggacctttgaagggacctttaaaaaagcccaaagggttccggaaaaaaaggcgggtcccttnnnnnnnnnnncccgcacccccccggaaatcttctttttccccctaaatccctcctctttaaccacacctcttaatagccccgcggttttnnnnnnnnnnataaacatcggtgtaccaaaccggcgcccgcggggggcggtagaaatagtgggaacctgggaacgccgcgcccacatatatggcgctgactctttttgtctatctccaccgcccctcattatataactttccactcgtatctcccgcttatccgccccccgtatctccggaggtgtaccgctctttgcgcgcccctgcgacgggggccacatatcgcgcgccccaactagatttgacaagccacacccgcctt

SEQ ID NO: 357002 - DNA, 1045 bp, Homo Sapiens
  misc_feature (5)..(5): n is a, c, g, or t
  misc_feature (11)..(11): n is a, c, g, or t
  misc_feature (13)..(13): n is a, c, g, or t
  misc_feature (15)..(15): n is a, c, g, or t
  misc_feature (19)..(19): n is a, c, g, or t
  misc_feature (23)..(23): n is a, c, g, or t
  misc_feature (30)..(31): n is a, c, g, or t
  misc_feature (41)..(41): n is a, c, g, or t
  misc_feature (45)..(45): n is a, c, g, or t
  misc_feature (49)..(49): n is a, c, g, or t
  misc_feature (53)..(53): n is a, c, g, or t
  misc_feature (56)..(56): n is a, c, g, or t
  misc_feature (71)..(72): n is a, c, g, or t
  misc_feature (75)..(75): n is a, c, g, or t
  misc_feature (83)..(83): n is a, c, g, or t
  misc_feature (85)..(85): n is a, c, g, or t
aaaancctttncngnggcncccntcgcccnnggttttccgncctngganatgnggncttgggggccgtctnnagnaacacttncngagccaccgaccacccgctcgatccacttgtggaactcacgcaggaaggagcgctcgtactcgccccggcaacggtcctccatcctctcccgggtcacctggtgcagggtggtggtcacagcctcggcactgacccgctccagcagactgagcctgtgtaagacctggctgagctgatggaactgctccagagcctggcgacaccagcactgttgcttgtcactgctgcaccctgcacacagcgggctctgcaggagccggtagtaccggcgacgggcataccggctgtccagctccccttccagttccgggtctgtgcccccttcccccttcctcttactctgcatatagactctcaagaagcacccatacagacgctggatcatctcttggaaggttctgggggtgctaaagaacaagactccgcgcaacatagtgtggacttcttctcgcagcccctgagcaccagtgcccatcagcaagcccaggcgagtccatttctccagcagctctaggctacgcaggtagggatccaggcggctctccagcaggccaaaagcgtcaaggagtagcaaaaggcactggggctcatccgcagagttctcgcattgggagatggcattccagaactcaggggagatgttggcctgcagatcgttctgcagcacctccacgaaccactcctccaggaccgagtgtagcccgtggcccctcagaacctccaccgccgcccggagctcctcttcctttggcgggactgcaccgctggtccgggaagacaccagccccagcgcagccggcggcaccaggccggtgctcacggtgttccaggccactaacaactcctgtccgggccgggagtcgctgtccccctccgccaccacaactgccgccgccatctgcacccaccgactccgagcgacgctggtcgacatatccaaagcttccgaccgtaccaga

SEQ ID NO: 357003 - DNA, 1520 bp, Homo Sapiens
  misc_feature (81)..(81): n is a, c, g, or t
  misc_feature (90)..(130): n is a, c, g, or t
  misc_feature (260)..(287): n is a, c, g, or t
ggatgcccgagattagttatcaagggctgccaccttaacaggggactctggcgtgaaagcagcacctaagtggctcgctgnggagggggnnnnnnnnnnnnnnnnnnnnnnnnnnnnnnnnnnnnnnnnnaagaaaaacttaataattccgtgcagccggaaatcttagcaacacacttctaagctcccattccggtgtccttttaccctgaaggaattccaaatgtcagtgtctgtggcctccgtgcacatctgtgcgnnnnnnnnnnnnnnnnnnnnnnnnnnnnccctcccatccttcattcaagagagaaaaatcaatccgactgacgtcacatcataaacatccccaaaaggatgatgcagaagaaatttcaccccagctgccttcgtgagagccagggaattaattgcgcatgacatgctgaagggctgggaactgtcattaaaacaaagaaacaaaagaacccacccgagtggggctctggaatcaaactggcaacgctcgagatcgtttctggggcgggaggctggaaaggggagcaggcagggagcggaagcctgagcccgaccaaagacagctgtgcacgccggctccctcccactccaacctgggctcgccgtccgggctacagacgggaccctgcggggcgcccttcgacgaccgagttcgagtcccgccgccaccgcgtcctccccgccgagcgcacacgggagcggcctcgcttccccaggtggggagcttttctcgcaaccgactggggctgcagctgccaactgcagtctctgtaggaaacaaactttctcctaaatgacacgtttctccgcgacgcgcctcctgcatctggagtcgccttcaagcctattcattcacccaagtggaaacctggagggaggcagttgtgcctggttgtggcggagcccagggttttgaagctgccaggaatgggatctgggggctgtgtagttgcctaagtgggaagttgtgtcactgggcccggttgggttcagtctggcacctgactgctctccagagaccatggagcctttcagaagggcccagccctgggggatctacgacccttggttcccttcaagaaagctcagacagcgaaggaagaaaagggcagggcagcctatgagagagagaaggcagagaaaaaggaaaggagatgggaggaaagggaacgccttctttagaactcaggaaaaacaacatcagaagtgggcatttctccctgtataatctcacagtatgaccaggagaaaagctgttacaatagagagcaattgtgagcatccaatgaaaatgtactcaaaataactggaagaagatgcatggtatgatcagggttgagcctgtaatgtattattaatcattgctattagcaatatactgatgaactttttgtattgctgaggcctggacatgggctaagtcttttttaccaaagcaatatgacagcctgtggccttgctggagtggcgtttttattggtgggaagcggacccaggtgctt

SEQ ID NO: 357004 - DNA, 1921 bp, Homo Sapiens
  misc_feature (1665)..(1800): n is a, c, g, or t
  misc_feature (1805)..(1837): n is a, c, g, or t
cggtccggaattcccgggatccaaaatggcgaggggctgtattgaagtgggctgtgtttgaggccggtgtaagaacgctcattctacccccaacccttgtctccaaggacctcggtttgtgcgtgcatatgtgccgggtacccggtggggcgggtgcccagtaagtgctcggactcgcaggggaagcgcccacggggacggattggttgttttttcctgtatgaagcggttggcaccactgaagtgaccgaatgagagactctacaggggcaggtaattcactggtccacaagcggtctcctttacgtcgaaaccaaaagaccccaacatccttgaccaagctgtctttacaggatggacataaagccaaaaagccagcatgtaaatttgaagagggtcaggatgtcctagctagatggtcagatggcttgttttatcttggcactatcaaaaagataaacatattgaaacagagctgcttcatcatatttgaagacagttctaaatcctgggttctctggaaggacattcaaacaggagccactggaagtggggaaatggtctgtacaatatgtcaagaagagtattcagaagctcccaatgaaatggttatatgtgacaagtgtggccaaggatatcatcagttgtgtcacacacctcatattgattccagtgtgattgattcagatgaaaaatggctctgtcggcagtgtgtttttgcaacaacaacaaagaggggtggtgcacttaagaaaggaccaaatgccaaagcattgcaagtcatgaagcagacattaccctatagtgtggcagaccttgaatgggatgcaggtcataaaaccaatgtccagcagtgttactgctattgtggaggccctggagactggtatttgaagatgctacagtgctgcaaatgtaagcagtggtttcatgaggcttgtgtgcaatgccttcaaaagccaatgctatttggagacagattttatacgtttatatgctctgtctgcagttctggaccagaatacctcaaacgtctaccattacagtggtaagtgtggacctttctgttaaaagaaagaaaagccattttcttaaacctacaagttgaaactttctatatacatttacttggcttaagtaaaaataggttatttatgcttggctttatttcttttatttatcctcatgcctgatgtcatcttcactaagtaacatccacttgtattgctaaattaataaggctgttcagtgttgaatgttataaatgaaactttcagatatcctttagacctaaattcttactcatatttctagttcttttgaacattcagaataccatacagtagaagagagataggtataacaaatatgctaatttctgcttcaatgtagtaattcttgtgtgttggaagtgtgatgaattttagaggtttactaataaaatgcttacagtaagtacttacaaatctttgttgtattttacatattttatcaacagataggatttaacccatgaatcaaatagtttggttaagtatggtatattctgtagcttatatccggaagtgaaaacacaaaaatcttgattttaagttatatttttttaaagccagaccctctttgaatgcacttgaagaagtaatttgtggccaggtgcggtggctnnnnnnnnnnnnnnnnnnnnnnnnnnnnnnnnnnnnnnnnnnnnnnnnnnnnnnnnnnnnnnnnnnnnnnnnnnnnnnnnnnnnnnnnnnnnnnnnnnnnnnnnnnnnnnnnnnnnnnnnnnnnnnnnnnnnnnnntgggnnnnnnnnnnnnnnnnnnnnnnnnnnnnnnnnngaggctgaggcaggagaatcgcttgagcccacggggcggaggttgcggtgggctgacgttgtgccattgtactactccagcctg

SEQ ID NO: 357005 - DNA, 2233 bp, Homo Sapiens
ggttgctgtcagctgacttcccggggttggtggcagcgcgcggtagcagcaatggactttctcctggggaacccgttcagctctccagtgggacagcgcatcgagaaagccacagcatggctccctgcagagcgaggactgggccctcaacatggagatctgcgacatcatcaacgagacggaggaagggtcttagaaacctgtgtcaagaactgcgggcaccggttccacgtgctggtggccacgccaaggacttcgtggaggaggtgtgctggtgaggaccatcctgcccaagaacaacccacccaccatcgtgcatgacaaagtgctcaacctcagtccagtcctgggctgacgcgttccgcagctcgcccgatctgacaggtgtggtcaccatctatgaggacctgcggaggaaaggcctggagttccccatgactgacctggacatgctgtcacccatccacacaccccagaggaccgtgttcaactcagagacacaatcaggacaggattctgtgggcactgactccagccagcaagaggactctggccagcatgctgcccctctgcccgccccgcccatactctccggtgacacgcccatagcaccaaccccggaacagattgggaagctgcgcagtgagctggagatggtgagtgggaacgtgagggtgatgtcggagatgctgacggagctggtgcccacccaggccgagcccgcagacctggagctgctgcaggagctcaaccgcacgtgccgagccatgcagcagcgggtcctggagctcatccctcagatcgccaatgagcagctgacagaggagctgctcatcgtcaatgacaatctcaacaatgtgttcctgcgccatgaacggtttgaacggttccgaacaggccagaccaccaaggccccaagtgaggccgagccggcagctgacctgatcgacatgggccctgacccagcagccaccggcaacctctcatcccagctggcaggaatgaacctgggctccagcagtgtgagagctggcctgcagtctctggaggcctctggtcgactggaagatgagtttgacatgtttgcgctgacacggggcagctcactggctgaccaacggaaagaggtaaaatacgaagccccccaagcaacagacggcctggctggagccctggacgcccggcagcagagcactggcgcgatcccagtcacccaggcctgcctcatggaggacatcgagcagtggctgtccactgacgtgggtaatgatgcggaagagcctaagggggtcaccagcgaagtaaatttgacaaattcctggaagaacgggccaaagccgcggaccgattgcccaacctctccagcccctcagctgaggggcccccgggtcccccatctggcccagcgccccggaagaagacccaggagaaagatgatgacatgctgtttgccttatgagtgtggggtctggcaccctgcagcccaggtccccactgctctcacacccttaggctgggacctccctccctcctctggtgttaaggctgctttgggggtggcttgttacccccttttcctcctctttgaagacggagctgccccagctgtggctgggggtgtggaggcagtgggatgaactgggggacaggtctgcgctgcagtgggatctggctgctctgcctcctttcccaccccagctgaccatgagactttgctgagaagtggaggccccaggacaggctggctggctggctggctgcttgacccagtgtgactctccttcactgagtgataccctgctccgggcccatgccccaaggagcccttcagagcccacactgccagtcgaggcctggctggaggctggccacagtggaaattctgccgagcctcttgtcccttccctgctctgctgcatggggccccatggctttggctggccactgagggtagggtgtggaggtgtggaggccccctgaggagctgcggcggcccaggtacgaagctgcaactctgcgcgcagtgggcgagatctcatcagccccaggctgcaggtgaggcttcaggggatgctggggccccactgcccctccgctgccttgccctccatccttcctctgttccttctggccgggcaccacagcactggggctcacctcttggttgatcctcttgtactgggagaggtgccttttgtatccccaattaaaggtagaaaaccaccctgctagc

SEQ ID NO: 357006 - DNA, 859 bp, Homo Sapiens
  misc_feature (57)..(93): n is a, c, g, or t
ggcagggggactgacacgatcactatgggcgactcggagttaccgcggtggcggcgnnnnnnnnnnnnnnnnnnnnnnnnnnnnnnnnnnnnnatcaggccaaatcggccgagctcgaattcgtcgagagcgggggcggtggcgctggcgggtgctgtcagctgattcccggggttggtggcagcggcggtagcagcaatggactttctcctggggaacccgttcagctctccagtgggacagcgcatcgagaaagccacagatggctccctgcagagcgaggactgggccctcaacatggagatctgcgacatcatcaacgagacggaggaaggtcccaaagatgccctccgagcagtaaagaagagaatcgtggggaataagaacttccacgaggtgatgctggctctcacagtcttagaaacctgtgtcaagaactgcgggcaccacttccacgtgctagtggccagccaggacttcgtggagagtgtgctggtgaggaccatcctgcccaagaacaacccacccaccatcgtgcatgacaaagtgctcaacctcatccagtcctgggctgacgcgttccgcagctcgcccgatctgacaggtgtggtcaccatctatgaggacctgcaggaggaaaggcctggagttccccatgactgacctggacatgctgtcacccatccacagaacaccagaggaccgtgttcaactcagagacacaatcaggacaggagactgtgggcactgactccagccagcaagaggactctggccagcatggctggcccgtctggccggcccgtccatactgtccggtgacacgccataggcacaaacacggaacagattggggaaa

SEQ ID NO: 357007 - DNA, 1222 bp, Homo Sapiens
  misc_feature (56)..(88): n is a, c, g, or t
  misc_feature (1184)..(1184): n is a, c, g, or t
acacccaaggaaagatgactatatggggactggagctgacgcggtggcggcgcatnnnnnnnnnnnnnnnnnnnnnnnnnnnnnnnnnatcaggccaaatcggccgagctcgaattcgtcgagagcggagctgattcccggggttggtggcagcggcggtagcagcaatggactttctcctggggaacccgttcagctctccagtgggacagcgcatcgagaaagccacagatggctccctgcagagcgaggactgggccctcaacatggagatctgcgacatcatcaacgagacggaggaaggtcccaaagatgccctccgagcagtaaagaagagaatcgtggggaataagaacttccacgaggtgatgctggctctcacagtcttagaaacctgtgtcaagaactgcgggcaccgcttccacgtgctggtggccagccaggacttcgtggagagtgtgctggtgaggaccatcctgcccaagaacaacccacccaccatcgtgcatgacaaagtgctcaacctcatccagtcctgggctgacgcgttccgcagctcgcccgatctgacaggtgtggtcaccatctatgaggacctgcggaggaaaggcctggagttccccatgactgacctggacatgctgtcacccatccacacaccccagaggaccgtgttcaactcagagacacaatcaggacaggattctgtgggcactgactccagccagcaagaggactctggccagcatgctgcccctctgcccgccccgcccatactctccggtgacacgcccatagcaccaaccccggaacagattgggaagctgcgcagtgagctggagatggtgagtgggaacgtgagggtgatgtcggagatgctgacggagctggtgcccacccaggccgagcccgcagacctggagctgctgcaggagctcaaccgcacgtgccgagccatgcagcagcgggtcctggagctcatccctcagatcgccaatgagcagctgacagaggagctgctcatcgtcaatgacaatctcaacaatgtgttcctgcgccatgaacggtttgaacggttccgaacaggccagaccaccaagggccccaagtgagggccgagccgcaggcttgaacttgattcgacatggggcccttgaaccagcagccaccggaactttttattncccagttggcagggattgaaacttgggtttcagcattg

SEQ ID NO: 357008 - DNA, 395 bp, Homo Sapiens
  misc_feature (31)..(31): n is a, c, g, or t
  misc_feature (47)..(47): n is a, c, g, or t
  misc_feature (79)..(79): n is a, c, g, or t
aatcgaaaccctggctggaaagctggcccanaaatggaaaattctgnccgaaacctcttgtccccttcccctgctctgnctgcatggggcccccatggctttggctggcccactgagggtagggtgtggaggtgtggaggccccctgaggaagctgcggcggccccaggtacgaagctgcaactctgcgcgcagtgggcgagatctcagtcagccccaggctgcaggtgaggcttcaggggatgcctgggccccactgcccctccgctgccttgccctccatccttcctctgttccttctggccgggcaccacagcactggggctcacctcttggttgatcctcttgtactgggagaggtgccttttgtatccccaattaaaggtagaaaaccac

SEQ ID NO: 357009 - DNA, 1453 bp, Homo Sapiens
  misc_feature (752)..(809): n is a, c, g, or t
agggtggtacaggtcggaagtttcgggatatcgtcgacccacgcggtcgcaaagcggctggcgcgccgtcgccgccaccgggccagtcccgaaccatggccgggccaaccgcgcaacctcgcgcctcccgtcccgtcgccgccctaggcctgcgctgcgagatgcagaaacagaggcccagagagatgaatagcctgcctggggtcccccagcccagatgctgcagagctgacatttgaatccagagaagagcgagctgaggctggagctgagcagagggcagggaggcaagtggtggcctgagaggccccaggctcccctccaggccccgcgattgccaccatgaagctgaacgagcgcagcctggccttctacgccacctgtgacgccccggtggacaatgcaggcttcctgtacaagaagggtgggcggcaacgcggcctaccaccggcgctggttcgtgctgcgcgggaacatgctcttctacttcgaggacgctgccagccgtgagcccgtgggcgtcatcatcctggagggctgcactgtggagctggtggaggccgccgaggagttcgccttcgctgtgcgctttgcggggacccgggcgcgcacctacgtgctggccgctgagagtcaggatgccatggagggctgggtcaaggccctgtcgcgtgccagcttcgactacctgcggctggtggtgcgcgagctgggagcagcagctggcggctgtacgtggcgggggtggcatnnnnnnnnnnnnnnnnnnnnnnnnnnnnnnnnnnnnnnnnnnnnnnnnnnnnnnnnnngccccagtcgcatcggctgccttctgccccgaagcccggtcccagcccgtgcccctgccccgctcggcccagtgccctcccgccccaaggaggaatggctgcgctgtctgcgagcacgtgagtgccaccattcagggcctggacccgaagccccgctcacaccaacggcttcgccgcccgggacctcgggcaccccgacggggcccctttgggaacaatgggcccgcctttcggccccgtgtcttgcaagcgaacgctgcatatggccatgggagatccgggggccgcttggcggttggcgcagggtgaaccatcaatcgaggccgggcgttccaaggcctcttggagggtcccaacaagggggaacgcctatgtatattacaagaggggggacgacaaacagcgtctaattagcacccgtccttgggtaccagaggcggggggtccttggaaaaagaatttgtgcgccaccacaagaaatcacttgaaagaggaaaatcaagtgggagaatggctacggcccacgaaaggcacatagacgtgggcccataggatttcgggggagaatgcaagacctcttagagagaaggatgtcgaaaaaactgatgtgcgcctttaatgtaccaatttacccagaaggccaa

SEQ ID NO: 357010 - DNA, 1114 bp, Homo Sapiens
  misc_feature (4)..(4): n is a, c, g, or t
  misc_feature (7)..(7): n is a, c, g, or t
  misc_feature (24)..(24): n is a, c, g, or t
  misc_feature (34)..(34): n is a, c, g, or t
  misc_feature (41)..(41): n is a, c, g, or t
  misc_feature (48)..(48): n is a, c, g, or t
  misc_feature (56)..(57): n is a, c, g, or t
  misc_feature (62)..(62): n is a, c, g, or t
  misc_feature (71)..(71): n is a, c, g, or t
  misc_feature (80)..(80): n is a, c, g, or t
  misc_feature (101)..(101): n is a, c, g, or t
  misc_feature (126)..(126): n is a, c, g, or t
  misc_feature (144)..(144): n is a, c, g, or t
  misc_feature (178)..(178): n is a, c, g, or t
  misc_feature (196)..(196): n is a, c, g, or t
cacnctnatacctcgtgggctctnaaccacatanaggcatntgggcgntgaagtgnntcagngactgtcantcacctcgnatcgcacctacccgccccgcngccaccaccccgacccgctgccgtnccgccgtcagtgcagccntgcagcccggccgccccgagtcgccttctctccngaggcccctggtccaggnggcccggctctccaggggcccccgcggccctggcttgcccggtcgcccccggtcccccttgggtccctggatgaaaggaggaagaaggttggcgctgaagtcctgcatgaattacagggcggccgtgctgggtaccggggtgtgcgcctttgcaacccgggggctccccgccgggcgcggcagtgtaagggtcgcagatcatgcggcaggtgcccatcatctcatagtgcccggcgcctcggggcgccgcctgcagcagcagcggcacggcgatgagcagcccgagcgccatggccaagagtacgccgacggccgccaggcaggcacgccgccgccgctgccacagccgggaggcgaccgccaccagctcctccttgccgcccggggaggtaatggtggggcggcgcgggcggccccgctccccgcgctcggggaccggctccgcgggtcctggccgcgcccccgacgtggcgacccccagccccggctacccaactacttcagcgagaggcgccgggacctctgagcctgggcccaccgcgctggggctggtcgggagagccgcggacgcccgcgcgcatgacgtggggcacacaagacgaatccggcgccccgagggtccggcgccggccagggagtgcttgcgctggccggggagtctgcttgcggcgtccggcgctggctccgcggcgctgcctcccgccaggctcgcgctccgctgggtttagtggggctcctagcgcagtgagggcgccccggcaccgcggcgcgctctgctgtgctctctcgctgttcgctggctcccgcgcggaggggggaccccgctaccctgacgtaaggagtccggggctgagcggcggaggcggcgaagcagcgcgcgctgccatcactcgggagacggagccctcatgtcccgct

SEQ ID NO: 357011 - DNA, 617 bp, Homo Sapiens
  misc_feature (41)..(41): n is a, c, g, or t
  misc_feature (47)..(47): n is a, c, g, or t
  misc_feature (75)..(75): n is a, c, g, or t
  misc_feature (156)..(156): n is a, c, g, or t
tgtgcctccccctttaagggaatcaaacctggaacttgcanggcccnaaaaaaaagggagaaaactggccctcanaccctggccctacaaagccccttgtaacagggctccccaaccctgtgatgagtaaaggaatgtcacctttcctaaacaggncccaggagcccccaagttatccttgggacctcaagaagagaggaatttacccaactcataggtattggagggtacaaacccattgctgggcttgactttaaaaagtcttttctgatattccttatggaacagaattccatcagagccaattttaaaagcatatgtgaaaaataattattcttgctgtactttatgcaaataatcaggccaagtataagactaaagtttattttgcaaacaatcctattatgatttgtttttaacaaaaatgaagactggagagtttcaaaacttatcacacttgtcattaaattctagttttattagttgtttttaagtttttgtctgtattttagactaaccctacttattctgtgaaccaaccagtgatctctggctgaagctcagaagaaacaagggatggttaatatagaaatctggatctggatcaatattctaga

SEQ ID NO: 357012 - DNA, 178 bp, Homo Sapiens
aattgagtaaggtatactccagtgaacaaaatatggagagtatttgttcctctgctggtttctctagaattcagaaactattttgatctctaggctgaagctcagaagaaacaagggagtgggttaatataggaaatctggatcatggatcaatattctagaggaggcggaggtatgc

SEQ ID NO: 357013 - DNA, 859 bp, Homo Sapiens
gcagtcatttggaatagacaatatggctcctagttcctggtcatatattgagagtttacggtggtgttttgccttggtctgttgctttggactggctcacagaaaagccagaactgtttcaactagcactgaaagcattcaggtatactctgaaactaatgattgataaagcaagtttaggtccaatagaagactttagagaactgattaagtaccttgaagaatatgaacgtgactggtacattggtttggtatctgatgaaaagtggaaggaagcaattttacaagaaaagccatacttgttttctctggggtatgattctaatatgggaatttacactgggagagtgcttagccttcaagaattattgatccaagtgggaaagttaaatcctgaagctgttagaggtcagtgggccaatctttcatgggaattactttatgccacaaacgatgatgaagaacgttatagtatacaagctcatccactacttttaagaaatcttacggtacaagcagcagaacctcccctgggatatccgatttattcttcaaaacctctccacatacatttgtattagagctcattttgactgtaatgtcatcaaatgcaatgtttttattttttcatcctaaaaaaagtaactgtgattcttgtaacttgaggacttctccacacccccattcagatgcctgagaacagctaagctccgtaaagttggttctcttagccatcctacatggttctaaaaaacagcaaaacacatctttatgtctaagataaaagaactatttggcccatattttgtgccctctggaccttagtagggctttgggaaaatgtgaagaaaacttttgg

SEQ ID NO: 357014 - DNA, 411 bp, Homo Sapiens
  misc_feature (41)..(41): n is a, c, g, or t
  misc_feature (232)..(233): n is a, c, g, or t
gccaaaaacacctttatgccccaagataaaagaacccattnggcccaataattgtgcccccccggacctttagtaggcccttggtaaatgtgagaaaacttttgtagaattatccatataatgaattttgtaatgcctttccttaaatgtgttataggtgaattgcccatacaaagttaacagcctatgtaatttttacatacttaagagataaacatatcagtggtcccannagtagtgaaaagggaccctgttgaaggttaacataatgtgtatatatttgtttgaaatataatttatagtattttcaaatgtgctgatttattttgacatctaatatctgaatgtttttgtatcaagtagtttgttttcatagacttcaattcataaactttaaaaaacttttaataa

SEQ ID NO: 357015 - DNA, 1046 bp, Homo Sapiens
  misc_feature (8)..(9): n is a, c, g, or t
  misc_feature (18)..(18): n is a, c, g, or t
  misc_feature (22)..(22): n is a, c, g, or t
  misc_feature (24)..(24): n is a, c, g, or t
  misc_feature (48)..(49): n is a, c, g, or t
  misc_feature (60)..(60): n is a, c, g, or t
  misc_feature (62)..(62): n is a, c, g, or t
  misc_feature (100)..(100): n is a, c, g, or t
  misc_feature (104)..(104): n is a, c, g, or t
  misc_feature (149)..(149): n is a, c, g, or t
  misc_feature (898)..(898): n is a, c, g, or t
cgcggccnntatcatganagtnanaaaacatccagagctcggtcgcgnncacagctccangncaactcaccaagctagagctgggtctcctctggctgtnttcnaggatccaggttaagctcagttgaccaggattgaaggtcatctcntggtggcatgtggaatcccaggggcagctttggctggcacgcaggatccagagtcagctcagctgggctggaactcaggatcagctccatccggtgtgtagggtctagtgtaggggtcagcttggctgggccagggctcagagtcagctcttgcctatgcacaggatccaggttcagctgagtcaggctgggagccaaggtcacctgctgctaggttgcaggtggctcagtgccaggctggaggttaagaccccagtctccaggcagtagcatctcttcagaccacagtggctctcctcctgtagataacagccatgctgggctgtgccaggagggagggtggggttggagcagggaagggctgacagagtgcaggggggaccatgcatactggaactggggagtggtgggctgcactttgtcccacactcacctgatagcacaggtgacctggaagagacccatcccctatagagcagggcagatagatccaggtgtctaccccacattggagggaggctgggagtgatggatgagctgcttaaggctggggcagaacctaggagtcctggccccagcctgctctggctacaaatttgtcctcctcaggacctcccctcacagggggtctgtaaccaccaggtctataaaacagccgacccaatctacttgctggccttctgtcttccagtagtcctcctagtccaccaatgttgatgctggcctccgggatgttccgcgtcctagtnccgcacagctgggtatctcactcagtcgccacctcggactcctcggtccgacaacgttggcccccagcggtgcggcggatgttctgcagccgtcgcgtctgcggcacgccacggcgttctaaggcctcccagcacccgcgcgatcccg

SEQ ID NO: 357016 - DNA, 1739 bp, Homo Sapiens
  misc_feature (7)..(7): n is a, c, g, or t
  misc_feature (14)..(14): n is a, c, g, or t
  misc_feature (19)..(20): n is a, c, g, or t
  misc_feature (26)..(28): n is a, c, g, or t
  misc_feature (37)..(37): n is a, c, g, or t
  misc_feature (45)..(45): n is a, c, g, or t
  misc_feature (54)..(54): n is a, c, g, or t
  misc_feature (57)..(57): n is a, c, g, or t
  misc_feature (59)..(59): n is a, c, g, or t
  misc_feature (62)..(62): n is a, c, g, or t
  misc_feature (93)..(93): n is a, c, g, or t
  misc_feature (108)..(108): n is a, c, g, or t
  misc_feature (118)..(118): n is a, c, g, or t
  misc_feature (120)..(120): n is a, c, g, or t
  misc_feature (124)..(125): n is a, c, g, or t
  misc_feature (200)..(200): n is a, c, g, or t
  misc_feature (206)..(207): n is a, c, g, or t
  misc_feature (237)..(247): n is a, c, g, or t
  misc_feature (286)..(286): n is a, c, g, or t
  misc_feature (319)..(319): n is a, c, g, or t
  misc_feature (328)..(328): n is a, c, g, or t
  misc_feature (349)..(349): n is a, c, g, or t
  misc_feature (353)..(354): n is a, c, g, or t
  misc_feature (361)..(378): n is a, c, g, or t
  misc_feature (381)..(381): n is a, c, g, or t
  misc_feature (387)..(388): n is a, c, g, or t
  misc_feature (392)..(392): n is a, c, g, or t
  misc_feature (400)..(400): n is a, c, g, or t
  misc_feature (414)..(414): n is a, c, g, or t
  misc_feature (425)..(425): n is a, c, g, or t
  misc_feature (454)..(454): n is a, c, g, or t
  misc_feature (474)..(474): n is a, c, g, or t
  misc_feature (511)..(511): n is a, c, g, or t
  misc_feature (563)..(563): n is a, c, g, or t
tttaccngcttcgngaggnntttagnnngccatctgnccgtaaanggcccatcngtnanctntctatagggcttagtgtggtgtaggctaaangccataaggctggcngccctatctngntggnncctggctctccctggaactgcttccttgccatggaggactcacatgatctccgagggcctctggttttataagcntttttnntggccccttctacccctcagggattctaannnnnnnnnnntgtgtgcttgggggggttgactgttaactgaatagggcnggggtgggacagagtagttcctggtctggtaangtggcagcnggggaagggggaggcagtggngggnngtctggnnnnnnnnnnnnnnnnnnggnccgggnntggnctcctggngggtggggccagcncagccccagtnacagtggcagctggggggcttcctatctncttggttgccgtctggccanaggtgtagataggtttccttctgttctgggtctcgcngggcacagcgcccgtggacatggcaccgctggtgactgaaggacatcgctgncctggtcacattgatcacataggggcccaaggtgtccaccaggtagtcatggagatgccagcactcctcctgggacaggaacctcccagatctccggtgtgtgaggcggacataggccaggacaggcaggggatgtcggtgcccaacaagggccacacggaaggcctcctccaggcgatgtcggacaaaaggcctggtggtgggcaggtggcagcctgggtgggaggtagatgctggggaagagggcactggaggcggcccagagccaatgcagttgagtgttgcgggcaagggtggctgcatggcaacggccggtatagttggaagccatactatgccagccattgccacaggctgggtagtgatagaagccccagagtccatggggccgtagtgcctgggccacccgcagcgtatcctccatcagtgcacgggccgcctgctcaaagccagtataggccttgtagagctgctcctgagggtccaggtcagggaatacctgctgtgcccaagcccaagaggctgcctgataagctcggcggcggccccagttcccagcccagagtggacaccactcctcccaatccagcactgctgggccagcaaagccaggtctcaggctgtggtggatctggtaggcagccagtgccaggtggcggtcaaggggcaaagcctgggggatgcccccattgtgagctgtgcccctgggtccaaagtagggatagaggccgagttggttcttgtagaaaatggtcatgttctgaccgtgaaaatgctggccacggttggctatgatgcccagagcattgagtggcaggtgcacaccaaagcgggcctcacagtgtgctgagggtacattccacagcacagagaaggggcgttcagggacctgtggtaggggctggccacaacccaggcacagggccacccccagcaccagggctgggcccagttgcgtggtcattccccaaggatggaaacatgttgatgctggcctccgggatgttccgcgtcctagctccgcacagctgggtatctcactcagtcgccacctcggactcctcggtccgacaacgttggcccccagcggtgcggcggatgttctgcagccgtcgcgtcctgcggcacgccacggcgttctaaggcctcccagcacccgcgcgtcgccgcttagaa

SEQ ID NO: 357017 - DNA, 1481 bp, Homo Sapiens
ggaattcttgggatgttctaagcggcgacgcgcgggtgctgggaggccttagaacgccgtggcgtgccgcaggacgcgacggctgcagaacatccgccgcaccgctgggggccaacgttgtcggaccgaggagtccgaggtggcgactgagtgagatacccagctgtgcggagctaggacgcggaacatcccagaggccagcatcaacatgaggagagccactgtggtctgaagagatgctactgcctggagactggggtcttaacctccagcctggcactgagccacctgcaacctagcagcaggtgaccttggctcccagcctgactcagctgaacctggatcctgtgcataggcaagagctgactctgagccctggcccagccaagctgacccctacactagaccctacacaccggatggagctgatcctgagtaccagcccagctgagctgactctggatcctgcgtgccagccaaagctgcccctggattccacatgccaaccagagatgaccttcaatcctggtccaactgagcttaccctggatcctgaacaccagccagaggagaccccagctcctagcctggctgagttgaccctggagcctgtgcaccgccgacccgagctcctggatgcttgtgctgacctcatcaatgatcagtggccccgcagccgcacctcccgcctgcactccctgggccagtcctcagatgccttccccctctgcctgatgctgctaagcccccaccccacacttgaagcagcacccgttgtggtgggccatgcccgcctgtcacgggtgctgaaccagccccagagcctcttagtggagacagtggtggtggcccgggccctgaggggccgtggctttggccgccgcctcatggagggcctggaggtctttgctcgggcccggggcttccgcaagctgcatctcaccacccatgaccaggtgcacttctattacccacctgggctaccagctgggtgagcctgtgcagggcctggtcttcaccagcagacggctgcctgccaccctgcttaatgccttccccacagccccctctccccggccaccctggaaggccccaaacctgactgcccaagctgccccaaggggtcccaagggacctccattgccaccaccccctcccctacctgagtgcctgaccatctcacccccagttccatcagggcccccttcaaaaagcctgctggagacacaatatcaaaatgtgagggggcgccccatattctggatggaaaaagacatctgaggccatccagggcaaggaactgtctttctggttcaatagactgccccgacagtctacaagcctcagcccactgaccatacctcagcccctagcccctggggggcagctttaacctgggcatgtttcctgggtaccagtggggccaggaggtggctctggctcagagccgtcagtgtggctgaataaaggctctcttgggt

SEQ ID NO: 357018 - DNA, 898 bp, Homo Sapiens
  misc_feature (2)..(2): n is a, c, g, or t
  misc_feature (4)..(4): n is a, c, g, or t
  misc_feature (7)..(7): n is a, c, g, or t
  misc_feature (9)..(9): n is a, c, g, or t
  misc_feature (11)..(11): n is a, c, g, or t
  misc_feature (21)..(21): n is a, c, g, or t
  misc_feature (23)..(23): n is a, c, g, or t
  misc_feature (29)..(29): n is a, c, g, or t
  misc_feature (32)..(32): n is a, c, g, or t
  misc_feature (40)..(40): n is a, c, g, or t
  misc_feature (42)..(42): n is a, c, g, or t
  misc_feature (44)..(44): n is a, c, g, or t
  misc_feature (48)..(48): n is a, c, g, or t
  misc_feature (51)..(51): n is a, c, g, or t
  misc_feature (68)..(69): n is a, c, g, or t
  misc_feature (86)..(86): n is a, c, g, or t
  misc_feature (101)..(101): n is a, c, g, or t
  misc_feature (104)..(105): n is a, c, g, or t
  misc_feature (110)..(110): n is a, c, g, or t
  misc_feature (113)..(113): n is a, c, g, or t
  misc_feature (120)..(120): n is a, c, g, or t
  misc_feature (126)..(126): n is a, c, g, or t
  misc_feature (132)..(133): n is a, c, g, or t
  misc_feature (143)..(143): n is a, c, g, or t
  misc_feature (146)..(146): n is a, c, g, or t
  misc_feature (149)..(150): n is a, c, g, or t
  misc_feature (153)..(153): n is a, c, g, or t
  misc_feature (167)..(168): n is a, c, g, or t
  misc_feature (175)..(180): n is a, c, g, or t
  misc_feature (185)..(185): n is a, c, g, or t
  misc_feature (196)..(196): n is a, c, g, or t
  misc_feature (200)..(200): n is a, c, g, or t
  misc_feature (212)..(213): n is a, c, g, or t
  misc_feature (215)..(215): n is a, c, g, or t
  misc_feature (227)..(227): n is a, c, g, or t
  misc_feature (229)..(229): n is a, c, g, or t
  misc_feature (232)..(232): n is a, c, g, or t
  misc_feature (234)..(235): n is a, c, g, or t
  misc_feature (262)..(262): n is a, c, g, or t
  misc_feature (264)..(267): n is a, c, g, or t
  misc_feature (308)..(310): n is a, c, g, or t
  misc_feature (317)..(317): n is a, c, g, or t
  misc_feature (323)..(324): n is a, c, g, or t
  misc_feature (328)..(336): n is a, c, g, or t
  misc_feature (349)..(349): n is a, c, g, or t
  misc_feature (381)..(381): n is a, c, g, or t
  misc_feature (383)..(383): n is a, c, g, or t
  misc_feature (388)..(388): n is a, c, g, or t
  misc_feature (391)..(391): n is a, c, g, or t
  misc_feature (396)..(396): n is a, c, g, or t
  misc_feature (400)..(400): n is a, c, g, or t
  misc_feature (403)..(403): n is a, c, g, or t
gngnggnancnacctgaaagntnccccangantcgggggngnanaacnatnacaaatcaaaatataanncggggcataactggcgnccttaacgcggctgnaanngaacnaanagatcangccgcnggaggnngggggagaanaanggnnagngggcggggggaacnnggggccnnnnnncccanctgcctcactntcanaagtttaggcgnngnggcgcgtgaggncnccncnncaccaaccactagctcccactgccccnannnnattccttccacccggtccctgcgcaccctccgccccgttannncttcatnccctcnngttnnnnnnnnntcgccgcccccangaatacaattttatccgccctttaggcacgancncccanganccatncttnatncacactctaagacttccctgcaatccagggttgccacaatggacagatcgcagattttgaaaacaaccaaaattcattaaagtcagttaacagaaatatatacttgtagcccagtttgagttttctaacatatggtggtataggaaatgaatgagatatcagggcctgaaatgtgaaggtcaaatactccttggaaaggagaatttgaaatctgttgggatgaaaagtccagggaaatatagtttttcttaagtttggacacagacaattgccttgtcatctttcggttcagtattccctatgtgtaactgcaatgattgaaaaggcacctgaattaactttaaattgatttaaaagttgcggaacagagtcaccacaaccttgaataaaatcagatgttttcccttcatttaaaatgtaatatatttttcgctttagattttaatgattgatttggaatagattttctatatcattaaacatgtttatgcaaac

SEQ ID NO: 357019 - DNA, 1403 bp, Homo Sapiens
  misc_feature (64)..(80): n is a, c, g, or t
  misc_feature (1313)..(1313): n is a, c, g, or t
  misc_feature (1368)..(1368): n is a, c, g, or t
aaagccactatagaacaagtttgtaaaacaagcaggatggtaccggtccggatttcccgggatnnnnnnnnnnnnnnnnngaaaggacaaacaggttgttttgttctagttctaatttcttaaaaaccactacatggttacaaaattggaataacatttggggacaactgggttaactacaaagaagaggattttaagaggagatgtgttgtattgactcattttgtattattttcggcttacagttcccatagctgttagagtctggtttgtttttgtttttactctcaaaatcatagtaaagatctctcagtctcctggctaaagattgaaggaaggcaaatctatttctaattatacatatatcagtaaggatgatctcaacataatagtaatgtgtatcttttggtatccagttttatttttggccttctaagaaagtgtctcataacacagaacattgccatttgctcttgtaggcctcaaatatgaaagctattagtcatagagcctaggaaaaaaagaattgattaatggtccttttattttgtaaccttataaatgctgtagatattatcaaaaaaattttaatttcatattgtttacatcatgcaactaatctaagcctcaaactcgttattggggctataaagaaaacgtttacttacccagctgaaacaggttaagaatattcttaatctcattatagataattgcccccatgggacttgaaatacaacaccttgtgctgaaaacttcaggttggcaatatttgaaggtttcgttgtagaagagtttaacattaactcctattttgacttacaaatcttgtttctcatcactaaaatgcttttgaattaataatccaacccacatgagctgagagtttttcttttgttagaaaagaaacagacatctttctgtatgaaagtataaattgtatggttttagatacataagaattgacaaaagcgagcgaaatctttgtacttctgagttcttgctgtatgtatgttttgttttaaatctgattagggacacccagcagctggccgggattcttggattgctccttgggagttaagattgtcaatactcctgtgaagcaagggatttcagccatagaacaaagatttattgttgccacctgaaaagtttacaagtatttattgtgtatttgatacattgcttgaaaagatgaaatctgttaaagattcttttcgatgtccaggttaagaagaaacctccttgtattgagtgaaattatatgttaaatgtattagagaatgtaggtggtatagaaattgattttncttggtgtagaacaactcagttcggcaaagtttaaaatttgattaaacaagagangtggttcaggttgaagatggacttgttaggaagtg

SEQ ID NO: 357020 - DNA, 358 bp, Homo Sapiens
  misc_feature (61)..(70): n is a, c, g, or t
ggaggggaggtgagtgaaaattatgaggagtgtattaggaaagatgagtatgttgtggttnnnnnnnnnnttgaggtgggggccccccccggtttggctttctgatggggccgacctggtcagggacagagcccaaggaaagggacagaggaggtcgcaggaggcgccgcactgaaagcggagtttaggatgggcaggctcgccatcccagcggctagatttgacgagggggtgttctggagggctggggtccgaagagtcctcaaagggaatgcattggggaagagagaaacaaagggtttggatttacgggccagagaaggggaccgggatgaagggggagcagatgggagagatc

SEQ ID NO: 357021 - DNA, 944 bp, Homo Sapiens
  misc_feature (732)..(740): n is a, c, g, or t
gggccctataaaattgccaacatttaaccaccgtgacctatgagatatgctttaatataagaactcaaatttgacttcataggtttacttctgaataaacattgaacaatgaggtaacaaaaaaagctcaccctaggagtgctttctaagcacccggcccagagttcaggctttgcattgatcgtgtaatcctcgccacagccttttgaggtggtttatggcatcatcccatcttcacagaggaggaaatggacacgtagaagggttgcatctatgatgtgtgagtgggaagtcaggggcccacattcacagccagaccctctaacccggagcctacactcttcaccccagtgcctgctgcctttcacacatctgtgtcggaatgaaacagacacaggcccgctccggcctcctggcattctgctgatccatgatgcctacaatgcctgtgcatgtcagatgccctgcacccacatgccaggctgtgtgaagggcacccaagatgtgttttaatcaaacacaaagacacacagtcatggaaatgactgtcatgaagggaaaggttcatgctctcgggtccctgggaacaggaggcacacatggccccaccatgcagggccaaacagagaagcacaggggttggtaaggagggagagggcaattttttgtagattaaaagagaaaacatgggtgagagagagtagtattaataaatgtagtgggatctgggannnnnnnnnctgtaactaattatatggtgactggcaggggattggttaagtaagggggaagggccaggacatgagagcctgtagggtcatagtttgggtgtgtacttaagtgggtgctttgatatgacaagcacctggaagtgagttgtttttccctctaggattggcaacccgggtatggcgttccccacaacacaaagtccctatttaaaa

SEQ ID NO: 357022 - DNA, 2479 bp, Homo Sapiens
  misc_feature (1472)..(1472): n is a, c, g, or t
  misc_feature (1475)..(1475): n is a, c, g, or t
  misc_feature (2108)..(2116): n is a, c, g, or t
agcggcgtgaaacgcaacggatcgtttccggaagccggtagccgcctcagtcgtcagaccggtgctagcgacacgggagtggcaaacgcatcctcttgccgttcccggtgtttgggccttgcctgtgacggtgggaaaagaaaatggccttgctgtgctacaaccggggctgcggtcagcgcttcgatcctgagaccaattccgacgatgcttgcacataccacccaggtgttccggtctttcacgatgcattaaagggttggtcttgctgtaagagaagaacaactgatttttctgatttcttaagcattgtaggctgtacaaaaggtagacataatagtgagaagccacctgagccagtcaaacctgaagtcaagactactgagaagaaggagctatgtgaattaaaacccaaatttcaggaacacatcattcaagcccctaagccagtagaagcaataaaaagaccaagcccagatgaaccaatgacaaatttggaattaaaaatatctgcctccctaaaacaagcacttgataaacttaaactgtcatcagggaatgaagaaaataagaaagaagaagacaatgatgaaattaagattgggacctcatgtaagaatggagggtgttcaaagacataccagggtctagagagtctagaagaagtctgtgtatatcattctggagtacctattttccatgaggggatgaaatactggagctgttgtagaagaaaaacttctgattttaatacattcttagcccaagagggctgtacaaaagggaaacacatgtggactaaaaaagatgctgggaaaaaagttgttccatgtagacatgactggcatcagactggaggtgaagttaccatttcagtatatgctaaaaactcacttccagaacttagccgagtagaagcaaatagcacattgttaaatgtgcatattgtatttgaaggagaaaaggaatttgatcaaaatgtgaaattatggggtgtgattgatgtaaagcgaagttatgtaactatgactgcaacaaagattgaaatcactatgagaaaagctgaaccgatgcagtgggcaagccttgaactgcctgcagctaaaaagcaggaaaaacaaaaagatgacacaacagattgagtgggagatggaaggaaggctattacattatttccgaatttttaatactgtgtgaagtggtggcttgctgctgtaatcttttgttttgttgttgtgttactgaatgtggcatttcagggttaacattaggttcttaaaagccaaagtcagtttgtctttttgtgcctctcatctttcttttgtgttatgtaagattgattattcatttctccctactggtaggaaccatagttgtgtcctatacttgaagagggctggaaagtagcccataaccataattgcagtatttctttggatttctctgttaagcaaagaaatattaaggaacanttnttttatgtttttgtattattccataattagtaaagcaagatgaaatgtcaaattttaatcagttttttcatggatttgtgttcttacagtacttgaaaatatttaaggaagagatgaagctctgcagttttttctatgtgggatgattacttttttaaggaggattaattctgaggtagtatagtaactaaaggggaatatatgaattgtttaacaaattagaatttgtttacaactacttgaatttttaaattatgtcaaaacttacattacttgccaagcagtatgatgttaataggaaacataaataagattacagaggtatcaatttggttaaaattcaccattttataagactaagcaataatcttaacaacctctttcctgaatatttaaatgtgtttgtatggtgttatgactaattgttactgatttagagactaagccctcttaaaacctttagttaaatataaaaagaaattatatatatcttgcctccctgatggaaaactatataaaattgtagacttaaaaggtttgtggaaatacattaggatatcagaaaactaaatatatggagttgctttatgactattacatgttaaataaaaatagcttaattgttttggaagnnnnnnnnnaaagtcatgaagagcttcacaattctagtgatacaatgttgactatatattgtactttatattaaatataggtaatacaggaattagatcgttaggataggttttgagttagtgcagaactcaggaagaaaaattaagaaatattctgaaggccagaactctggaagaacttagaaagttagggaataaattaaacttatgtagatttaaacattgggtttatttcccaaaccccttgagtctttacttttccttggaatgtatggaattcttacagagagaaatttgcagaagtactattttcgtgaatataacatatggatcattctactaccattagcaaatacctaagttggttatttt

SEQ ID NO: 357023 - DNA, 887 bp, Homo Sapiens
  misc_feature (310)..(310): n is a, c, g, or t
  misc_feature (594)..(606): n is a, c, g, or t
aaaggggaaatgtttaattttcattaaaaccctacatttccaagtgaaaaatgtaatgatcccatgcatgaaaatgaaactgcagcttttcctgtagtatatattttaggatgaaactttcaaacactaaagtgctggagaacaagctagaaataaatggatgtaaaaataattcaaatatttagtaagctaaatatttataatgtgttgatactattttgtcttttgttcctaacatacactcactagaaaatcatatatctatacaattcagatgaaaatgttgccaaataaagagaaacaaaactanaatcactaagatataaagtctttgtcaattaaaaattgatattttcttcaggttgttgatcacttaatcaacaaattgtttagaaaacaaaatttgtaacatttttgtagaaactgtcgaccaaatgcacaaggtcaagggtggatagctgatggactgtgatgacaacatgtaatatcacagctacttgaaagtgctggaataggcagtgccttagaaacaagtggttagatggttattttagtcagaaaacagcagttatagttgaatatttagaaaaatgnnnnnnnnnnnnncctcatagtaccatttgaagatgtttagtggttctaacaccaatttaaagtctttccacaaaaatgaactccaaaccttttcgtacatcacttgaagttatctgaggagaaatgggaataaatgaacacttttgagtttactaataaaacctagtttttaaaactatgcaacagtaaattacttctaaaagatggtttcatctcaagttttccacacaaataaaaaaacgtgtgataatcaaaccacaacatttaaccctcacagcacccaaactaaattt

SEQ ID NO: 357024 - DNA, 1322 bp, Homo Sapiens
aaaaggcccttgtggctccaccactggggttctgggagagcctgaacaattgggcccgggcacacttggtgcccaagatgccccttcgaagtgttatctggaccgtctaagccataaagtctggcattggccaggtgcgttcccattatcaacgggtacactgtcgctccaggctaaggctctgaaggcaccagtgggtcgtgtgtgggtagctcactcactgtccagtgttttcacctgtctacacctgtggctctgagaggggcagtaatttgtcttggcccttttgggcccttgttctggatttggatttgcttttctaacccatcatgcctctcctgccatcaatatccatggaattctcaaatgccataaacatcatgtgacctcctcacatactgcacccaaccagagaattcactttacagctaaaagaagagtaacgggttgatgggcaggcattcactcatcttgtcaggaacccacaaaccagcagcagctgtcttgagagggtggtgaaatggtttgttgaaaattcaactatggcaccagaaacaacaccccgagaggctgggtcaggcctgcaggaggcagcatgcgcttggagccggcaaccatacctggcgctgtttctccttcagggataggacgcagtgtggacatggccctgctattgctagatctcaatgcttttctcatacccgaggtttaggtttgggactgggctggcgtggagagtttagtcccccagcaaggagcacatcctcaaagacgtagtagctattcaactgaactggaagctgaggcagccaccaggccacttcaggctcattataaagaagtcatcggagtatctagaatgatgaaccctatcaagggaaaatatgattgctgctacgtaaaagagggcaggagtagagatggacatggggggattcctggagtttgtcctgggactgccagtccaatagtaaatgcctgtcacacaggtaggaccactaatgagcttcagaactgaaggtttgggtccctccaccagatcaaaagtccatcatcataaacatgagttctcatgaccagttctagaaatggactgtagactttacccattcttccattcttgctgggttatacaattttggttgaatatggttaattttaccagttaatctacaggttgtagaatttcaaaatggaattgtgataaaactgaaagagggagattatccctaatgacactggactttggagaatagaagccgcgtcattacccctggaattcgaagttagatatgatcttgaattccctaagcagagagaaa

SEQ ID NO: 357025 - DNA, 1814 bp, Homo Sapiens
  misc_feature (165)..(241): n is a, c, g, or t
cctttaaggaacttacagtcttatggaagagacacagatggaagtgcacaattaccgaatatcatcaaaaagcctgagaaaaagttatgcaaaagctactgtgtgagcacagaggctgtaaacctaatcctaagttgcagggtgagcaacaaggcactattttgnnnnnnnnnnnnnnnnnnnnnnnnnnnnnnnnnnnnnnnnnnnnnnnnnnnnnnnnnnnnnnnnnnnnnnnnnnnnncaagttctctcctgttgccctgagtgcccactcccaggccctctgtatgagtgacacttcagtctgccatggaacctggccctgctctggcctggctcctgctcctgagcctgctggcggattgtctgaaagctgctcagtcccgagacttcacagtgaaagacattatctacctccatccttcaaccacaccatatcctggtggatttaaatgtttcacctgtgaaaaggcagcagacaattatgagtgcaaccgatgggctccagacatctactgccctcgagagaccagatactgctacactcagcacacaatggaagtcacaggaaacagtatctcagtcaccaaacgctgtgtcccactggaagagtgcttatccactggctgcagagactccgagcatgaaggccacaaggtctgcacttcttgttgtgaaggaaatatctgtaacttgccactgccccgaaatgaaactgatgccacatttgccacgacgtcacctataaatcagacaaatgggcaccacgctgtatgtcagtgatagtgtcctgcttgtggttgtggttagggctcatgttatagtggctcagtggctccatgtgttaatagcgatcatggggatctcgatggtccacagacctgcatgagtcattggcctgacagtaattacacatgtgagacacaacactcttggaggtcatcacagccaagcattgccacttaccatgaggaataaatgttgcttcattgtagccattttgagtctaaccgagactcatcaaagccttctgtcagtacagcccaagttccataccataaacgtttgttttcattccaagaagtagttctgcatttatcgagatctggggttcttaatttggaagaatacatgcatgagatgcagtaggtcctgagactgtaagatattaggagtatgttataggggcatgtatagatgtgggcttttcaggagaaaagtaaccattggtttaaatataatcatgagttcatttgtagctttagaattttaaaacattgactccaaactgaatggactatttccttggaaattctgactgagtccctggaagagtagtaattccaacaattccagccatttgttcaattaattttcccaacattcttctcccagtgctgggaatcacatttcctctgttctgtgcagaagacaaaaaggcaatcataaaagtttgttatatttgtgggggtgcctggaggaggatttccctcaacttaagggaaccactgtccataaaggggctgttatcccctcatataatgggggaagatcagcccttttccttgacttgccacctaattatgcttaatgagatcctagattccacctgagtcaattgggtccagagccccaaaccaggaagggagttgttttccccagatatggggttctattcagccatagataatctaaacagaggattcagaatgaaggaaaaagtgggggagatagtccctatttatttggagggccgcctaagggcttaaacagtattttactcaattgcaggttttacggcaaaaagctcccct

SEQ ID NO: 357026 - DNA, 801 bp, Homo Sapiens
ggcccaccaggctatggtggcgggatactcagctgacgatgctatacacataccctcgcggcaagatagagggcaatacagcggccgggtacggggcatcacgcaatcataccgctgaaccttggggaaaaaacctgccctcataataccgacggcgggggcgactcagcaccgggtgttttttcaacaaaaattacgaccaaaaacaaattactttcgaacggagggatgcaaaatagagttcttctcgcttcatatccagtattaagtaaggtattttcaccgcccactctattaagggcctgtgttagggattggggcttggtgcaaggtgtcaaaacctccgtttacccaacttcctgcttactcactaccacccccatacagcaaacaactgtgccctggcatgaatcactgggtgtcccagcaggaatgagattcaagatacaaacaggggagtggtttttaagctcttaaagagttagagcttttcaatcagacacttttacattcaattctacccgtaaatctctctcctagcagtccccttctctccctgcctccctcaatgcaggcccccatcttctccccactgtgtttctgcccccgcgtcctcactggtcttctgacctacagttcaaagatgcctctgcaagttacttacctgaccaccatggctgccatgactcccattgcccctcagcttggaggtcacatgcttccctcagtccgttatccctctgggctccgccccctcattaaatcctcccccacgccagcttcaacagcttcaagcctttc

SEQ ID NO: 357027 - DNA, 1548 bp, Homo Sapiens
  misc_feature (1153)..(1153): n is a, c, g, or t
  misc_feature (1417)..(1417): n is a, c, g, or t
  misc_feature (1460)..(1460): n is a, c, g, or t
tcgaggtgaacgatcccgaaggtggccccttctgagtctccgcgtagggacacaacccccgcgctaacgatacggggcgtgaagggaacgtgacgtccagccctggctcctctgtaaaggacacgggccctaaggccagctaccacggtgaaggaactgtcctgggctattctgtccgcttgtgcataaggccaagggcccccaaccaaccccaaccggtttgttggttcatgtccaaccaggctctccggaaaccgcggccttggccaaggtcaaccagggtgccggtcagtagtaacagctccctgtcacccaggcccaccgcccctgttcctagagactgcctacatctggatcggagccccctgccaagaaagagggtgtctttctgagtccagacgtagcacaggaacaatttgatgacgtttggtctgtctggtcactgaaaaagagttcctgaggttccaggaaaacgaattcacatcaacctcctgggcctccactgctccaaggcccccaggaaggtccgtggccaaggcatagcaggctgaggagctgcccgtgcagccaccgcacaggtctctgcctcccagatcgcaggacgacacaggagcggtgacagcctggcactctgtcggaacgagttcggcgtgggggacatccagggctcctgcaaggctcaactgggacagctgctccttaatcaagcaggtctgcagctcttctcggtcgttttccactcccagccacggctcatctagagtaggtgtcccaaacgagaggcctgccatcccagaggggctgggggccaaggtcccggcttcgccaccacaagccccattcactcccatagcaagggcagtgcatcaggaggctgccccccgccagctgacccttggcctggggcttggccacggcagccccagcccaaaggtctgaaccgctgggaccactgactcccatccgctctagctgggccttctgacacaggccacacatgccagcatcactgcccccatcctcagctgggactggagcttcagaatcttcgcaggaagcaaatggcttcacatccactggttcagacctgctttctcccagaagatcctgtccggggctctctattgccacaggttcctctctccccaaggcngtgatttgctggtccttgggcagcgcctgttcaccgtgcactggcaggcttccttctgggacattgtccacccctggagcaggctgaggtgagaggcaggaaaggagctggcctccagcaatcagctcagtctgagtcccggtgaagatgtcttggctttccatcagcttccggatctcatctcggggcacaacgtggccaccagcaagcacgacattaatccttggatctggcagcaacaccaaaaaagagcgtttgctcttnacaggcactccctaaaacgaatctgctcattcgcctggaactnactgagactgcttcacagcatgaccagcatcgaccacctctcaccaccccaggcgtcccaggtccaacccagcgccctcttctatccc

SEQ ID NO: 357028 - DNA, 1845 bp, Homo Sapiens
  misc_feature (1290)..(1291): n is a, c, g, or t
  misc_feature (1605)..(1605): n is a, c, g, or t
  misc_feature (1663)..(1663): n is a, c, g, or t
  misc_feature (1714)..(1714): n is a, c, g, or t
  misc_feature (1766)..(1766): n is a, c, g, or t
  misc_feature (1802)..(1802): n is a, c, g, or t
ctcaagtagcggacacggaacagggaactatcagcccgtcggcctccgggccctgcattctctagccatggaccgggaccttttgcggcagtcgctaaattgccacgggtcgtctttgctctctctacttcggagcgaacagcaggacaatccacacttccgtagcctcctggggtcggccgccgagccagcccggggcccgccgccccagcacccgttgcagggcagaaaagagaagagagttgacaacatcgagatacagaaattcatctccaaaaaagcggatctgctttttgcactttcctgggaatcagatgcacctgcaacttctgaaattaatgaagacagtgaagatcattatgcaatcatgccacctttagagcaattcatggagatacctagtatggatcggagagagctgtttttccgagatattgagcgtggtgatatagtgattggaagaaatagttctattcgggaattcggctttttcatggtgttgatctggttaggaagtggtatcatgagagatatagcccacttagaaatcacagctctttgtccctaagagatgtgccttctacagtaaccatggggatcccttatcatataccaaactggtgacatcattcgagctggaatcaaggatattgacagataccatgaaaagctagcagtatctctggatagctcttctcttccaccacacctatctggtattaaaataggtggtaataagctctgaaaagcttcctttatactacaggagaagtggtgagctaaatagcaattctttggagtcctatgaaaatgtcatgcagagttccttgggatttgttaatccaggagtagttgaattccttctagaaaaactaggaatagatgaatctaatcaaccatctttaatgagaggcctacaaagcaaaaatttctctgaagatgattttgcttctgcattgagaaaaaaacaatccgcatcttgggctttaaaatgtgtgaagatcggagttgactattttaaagttggacgccatgtggatgctatgaatgaatacaataaagctttggaaatagacaaacaaaacgtggaagctttggtagctcgtggagcattatatgcgacaaaaggaagtttgaacaaagcaatagaagattttgagcttgcattagaaaactgtccaactcacagaaatgcaagaaaatacctctgccagacacttgtagagagaggaggacagttagaagaagaagaaaagtttttaaatgctgaaagttactataagaaagctnntgctttggatgagacctttaaagatgcagaggatgctttgcagaaacttcataaatatatgcaggtgattccttatttcctcttagaaatttagtgatatttgaaataatgcccaaactttaattttctcctgaggaaaactattctacattactttaagttaggcattatgaaaaggttcctttttaaggaatagcttttccctaaatgggtttggacattgttcataggggccctttgtttttgtcctatatcggaaagtaaagataggcttggagaaaacctattaaccttaaattttggtatggtggttnttgagaaaatgtcctttataggagggctcacctgtgggggttttaaaattatatgggncttactttataattggcgccatttttaaaaacccttgttggacattatttnaaaatgcttctttctctgaaaaccgggaggaagatgggtttccaatgccttncttctctgaaatgggccactcgccttcttgtctcgngacatatgtgcggtggtattcccctcccacaacctggaaaaga

SEQ ID NO: 357029 - DNA, 897 bp, Homo Sapiens
  misc_feature (46)..(82): n is a, c, g, or t
aatgtatagatcactataggggcctgggtgaacgcggtggcggcgnnnnnnnnnnnnnnnnnnnnnnnnnnnnnnnnnnnnnatcaggccaaatcggccgagctcgaattcgtcgagagcgggctcttgcagcactctggttctgcctaattggcctgatatgccaagccctgtgctctgaagacggccacaagagaaggatccttactctgggcctgggatttctcgttatcccatttctccctgcgagtaacctgttcttccgagtgggcttcgtggtcgcggagcgtgtcctctacctccccagcgttgggtactgtgtgctgctgacttttggattcggagccctgagcaaacataccaagaaaaaggtatcaactgagagtggtgccagctgatgaacagaatgaccggatgcatctcactggtgacaattaccatgtctttctgttcttaagaaactcattgccgctgtcgtgctgggaatcttattcatcaacacgctgagatgtgtgctgcgcagcggcgagtggcggagtgaggaacagcttttcagaagtgctctgtctgtgtgtcccctcaatgctaaggttcactacaacattggcaaaaacctggctgataaaggcaaccagacagctgccatcagatactaccgggaagctgtaagattaaatcccaagtatgttcatgccatgaataatcttggaaatatcttaaaagaaaggaatgagctacaggaagctgaggagctgctgtctttggctgttcaaatacagccagactttgccgctgcgtggatgaatctaggcatagtgcagaatagcctgaaacgggttgaaagcagcagagcaaagttaccggacagcaatttaaccacaagaaggaaataccaga

SEQ ID NO: 357030 - DNA, 2020 bp, Homo Sapiens
agcggagagtttccgcacccgggagggagatgcggccggggctcaggctccttgcagattcctaaccagcataatgctggagccgggagccaccaacctgcagttttcagaatggccgtgttggacactgatttggatcacattcttccatcttctgttcttcctccattctgggctaagttagtagtgggatcggttgccattgtgtgttttgcacgcagctatgatggagactttgtctttgatgactcagaagctattgttaacaataaggacctccaagcagaaacgcccctgggggacctgtggcatcatgacttctggggcagtagactgagcagcaacaccagccacaagtcctaccggcctctcaccgtcctgactttcaggattaactactacctctcgggaggcttccaccccgtgggctttcacgtggtcaacatcctcctgcacagtggcatctctgtcctcatggtggacgtcttctcggttctgtttggcggcctgcagtacaccagtaaaggccggaggctgcacctcgcccccagggcgtccctgctggccgcgctgctgtttgctgtccatcctgtgcacaccgagtgtgttgctggtgttgtcggccgtgcagacctcctgtgtgccctgttcttcttgttatctttccttggctactgtaaagcatttagagaaacgtaacaaggagggagcgcattcttccacctttctgggtgcctgctgagtatctttctgggagacagtggccatgcttgtgcaaagagcaagggatcactgtgctgggtttaaatgcggtatttgacatcttggtgataggcaaattcaatgttctggaaattgtccagaaggtactacataaggacaagtcattagagaatctcggcatgctcaggaacgggggcctcctcttcagaatgaccctgctcacctctggaggggctgggatgctctacgtgcgctggaggatcatgggcacgggcccgccggccttcaccgaggtggacaacccggcctcctttgctgacagcatgctggtgagggccgtaaactacaattactactattcattgaatgcctggctgctgctgtgtccctggtggctgtgttttgattggtcaatgggctgcatccccctcattaagtccatcagcgactggagggtaattgcacttgcagcactctggttctgcctaattggcctgatatgccaagccctgtgctctgaagacggccacaagagaaggatccttactctgggcctgggatttctcgttatcccatttctccccgcgagtaacctgttcttccgagtgggcttcgtggtcgcagagcgtgtcctctacctccccagcgttgggtactgtgtgctgctgacttttggattcggagccctgagcaaacataccaagaaaaagaaactcattgccgctgtcgtgctgggaatcttattcatcaacacgctgagatgtgtgctgcgcagcggcgagtggcggagtgaggaacagcttttcagaagtgctctgtctgtgtgtcccctcaatgctaaggttcactacaacattggcaaaaacctggctgataaaggcaaccagacagctgccatcagatactaccgggaagctgtaagattaaatcccaagtatgttcatgccatgaataatcttggaaatatcttaaaagaaaggaatgagctacaggaagctgaggagctgctgtctttggctgttcaaatacagccagactttgccgctgcgtggatgaatctaggcatagtgcagaatagcctgaaacggtttgaagcagcagagcaaagttaccggacagcaattaaacacagaaggaaatacccagactgttactacaacctcgggcgtctggtaagcgcggggtgccctgtgcctgtggaaggaaagatgggttattttcttatttataataaaatgacatagtgagaccaactagccataccttttattaaagtctttcacatgtttctatctag

SEQ ID NO: 357031 - DNA, 1600 bp, Homo Sapiens
  misc_feature (886)..(886): n is a, c, g, or t
  misc_feature (904)..(904): n is a, c, g, or t
  misc_feature (932)..(932): n is a, c, g, or t
  misc_feature (936)..(936): n is a, c, g, or t
  misc_feature (941)..(941): n is a, c, g, or t
  misc_feature (946)..(946): n is a, c, g, or t
  misc_feature (950)..(950): n is a, c, g, or t
  misc_feature (952)..(952): n is a, c, g, or t
  misc_feature (957)..(957): n is a, c, g, or t
  misc_feature (959)..(960): n is a, c, g, or t
  misc_feature (963)..(963): n is a, c, g, or t
  misc_feature (972)..(972): n is a, c, g, or t
  misc_feature (976)..(976): n is a, c, g, or t
  misc_feature (1009)..(1027): n is a, c, g, or t
  misc_feature (1031)..(1031): n is a, c, g, or t
  misc_feature (1034)..(1034): n is a, c, g, or t
aaagacaataacgataagggggcccacgaaaaccaaaccacagggtatggggggaaaaaacagcagggggataaataatgtagatacatagctttaccaaatttaagggagtgaatgttttgggctggggtaatggggcaggaacctaagacacggacaaaaaagggagttaatctatctaaaaatgcagggcaaacaaacagaagtaagttgttgatgcaccttacaataaaatcagaaggatgccatcccgcaaatctccaaacaggccagttttcataagcgtgataagaaagtcctctctttttaaaccctataaacaaaagaaactttgtgaaatgatcaacacacattgtattccacagttaagctttctatagaacctttaagcctataaaaatacacttcctatgctaaactaagtgaagcagtattccattttatagaatgaaatgctgcccaattctggaatcactaataagagccaattagatcttaacatttgttgaaattttgtctttgacaacattactagttatattattctgggtatccttttccccatctgtaaaatggacatagcgatatccttcccatcagatttttctcattaatagaagtaatacattcaaaacgctgagccaggctcacaccagtgagcaacttgttaatattactcagaagcatattatagatattgacagaacagcaactactgttcctaattaggggaagaaaatctaagagagtacctaagagtttgaatttagattataacatttgctcagtagtattttacattacagcctttggggggaaaagtacaaatgagatctgagaacagtggtactcatctttgaggaattatggaaaacgtaatagaacnctaaacatgggaaaacancggccttcaggttgaaaagtggaaatcncaancccanaaaanaatntnttttntnnacnaagtaactntttngcccattggtgccatttaaccaaaagaagaagnnnnnnnnnnnnnnnnnnnaaangcnactgagacaaaagaatagactgaatttgccaaaagagtgcttaaatggagacctaagtcttcaaagctaaggtgatgagaaaagaacaggtcttaaatttcttcagagcttcaagaggcaaagcttgaaagaagaaaaaattttattcttaggtaagatgtaggggtagaatggtggcccctgcaaaaggtaagccttccccctaatcctagaatcgtggatggtacctaatttggataaaaaggtctttgcagatgtaattaagaaccttgagatgaggagatcatcctggattatctggtggactgtaaagtcaatgacatgtattcatatatgacagaagagaagacatggagaagaggagggagtagttgtgaccgtggaggcagagaatggagtaatgtgatcataaatcaaggaatgctgacagccactaaagctggagaaggccaaggacagatattcaatcctcccgtagaagtacagccctgctaatgcattgattttggacttctggcctcagaactgtaagagaataaatttctattgttttaagccttcaaaaa

SEQ ID NO: 357032 - DNA, 899 bp, Homo Sapiens
  misc_feature (75)..(85): n is a, c, g, or t
  misc_feature (169)..(177): n is a, c, g, or t
ccgagagttcatgtgatttacaagggttgataacccatatatgggccaggcaggttgtcgaaaaataatttttgnnnnnnnnnnnttgcatggggggaagaaacagggatgggttgaaaacaataatttatggaaaaagtttgtggacataaaaaaaacccatgggcannnnnnnnntggttaaagaccccttttcggaagagtggtaacaggaaaaggtcctttacctaaattaatatgataaacctctgagccctggaagaaagctgtttgaaaccagggtttttgggcctaaagccagcatttcttcagtctccctttgtggttagaaggatatggactattgcaatacatttcttccttcgagtcctgccaatgttttgttggcccacagctaataggacctcaaaataagccatgctgctttgcacacacactagccttcttttgtacttttcattctggatgggcttggccaaaacaggctcaggccaaagacctcccaagctgtatgtacttccagtatcctgaaacagtgtttggtgaccataatgcccaagggtaaacaagcctgatttaggcactgctttatcccaggggcttcacccatgaaattaataaaacttatctgagtcacttgaaacttggttcccagaaaacacatttctggtttataatctccttttatgctcacctgacattaattatctatccttgatgatgtgtttaaactgagtagcagaaaacagaggccacactttctgggaaattttaaaggaagaaaccatttttaatgagatgaaaatatttaacgaatttaaaaagctaatgacaattttgagaaaaggtttgggatgtatattgctatgtaatttaataaacgtattttaggatataaa

SEQ ID NO: 357033 - DNA, 806 bp, Homo Sapiens
  misc_feature (796)..(796): n is a, c, g, or t
gaagaaatgaaaaggtgaccgcacctggaagccttctttgccaaaagacctttaaatggggatgggtctcactcttcaatgagtatcctggggtgtagcagaagctaagcatatgcccttgtgttcggatcaaggcccacagggctgctcaaagagtagagtaattgtaaccgaggtcagagctctggggttggcaaagatgagtggccaaatctgggggtaaaagaagaaatcctgtcctcttggtgggaggttaccttacctgaagaccatctctcccaagcactgtagttctgagcatgtttttggggtggactctgtcccctagggtccctagaagggcaaagaccagagagttgacaagtctgttattaggaataatccttagccatgtaatggagaaaggagcagtcagcattcttccaatttgccccaccaaccacctcctcgggcttcattttctctatttagagatggcagagagtgaggtagtggcgagaaagctgactccattcatcagatccagtttatgagggttgggggtgagcaagggctgtctgcagaaacccccatcaagagctgctgaatgaagtgtcccttcccatcagtttgattcaattaaaatgcatcatttgacataaagcacttgttcacagatctccaaaaccaggaattgttctagtaaaactggaaatttgtatgagtggggggagttaaatctgttcagctgttattaaactgtcatttctcccgctaaatgaaaaccgtgttgttataaagcttaatgcaaccttgnttaaaaaaaa

SEQ ID NO: 357034 - DNA, 1691 bp, Homo Sapiens
  misc_feature (1295)..(1295): n is a, c, g, or t
  misc_feature (1297)..(1297): n is a, c, g, or t
  misc_feature (1316)..(1316): n is a, c, g, or t
  misc_feature (1411)..(1411): n is a, c, g, or t
  misc_feature (1419)..(1419): n is a, c, g, or t
  misc_feature (1466)..(1466): n is a, c, g, or t
  misc_feature (1468)..(1468): n is a, c, g, or t
  misc_feature (1471)..(1471): n is a, c, g, or t
  misc_feature (1477)..(1477): n is a, c, g, or t
  misc_feature (1515)..(1515): n is a, c, g, or t
  misc_feature (1533)..(1544): n is a, c, g, or t
  misc_feature (1593)..(1593): n is a, c, g, or t
  misc_feature (1610)..(1611): n is a, c, g, or t
  misc_feature (1613)..(1613): n is a, c, g, or t
acagggataacagcctttattgttccagatggtcagatgctgacaaacaagaaagagggtctatgtacattaagattcggttgtaataagaatgcaatatgaaggcttaaaaaaacggtctattaataggcttcggtggaaccataatccccaatttggctattggctcctgatgtcgcttgaaaagtatgtgaggctgaactggatccaatgatgctggaggatttcgttttggaagatatctttctacatgtggcagaccccccctttgccttggaaccactggaagcagtttttctcctcttagacctttgggaggctggcatctttttcctcttcctttcatttctggttttacttgcaaagtagtgggaagatacgggtatttcctcgtcgagctcctcagcggcacttcttccggggcctctgctgctggacaggcttatccctggggaactgtcttcagctggcgatgtccattcagagtatttctgtaatactgaaatcacttccgcaccatatttttccagtttgtcttcagtaacaccatcaatttgaagcaaaacctcaggatcagaagataaagattctgcaagcttcttgagagtgacggtattaaaaatattgaagtaatggacaccaaaaactttccccagagatttgcagacttctgtaagttctccaagacattttttaaccatctcttccctctgagacacttttgctactaacgctttttgttttttcacactgctggaattttctgtttccataaagtctacctttaaattgccatttagtacagtttgggctttatttccgagcatcacataagcgatcgcctggtcattggcattgatatataagtcttcatccaaaatcttgtcaagtatcagctttttaaaaagtctttcggcattgtgtcgtgaataagcagatccttttccaaatatacctgactggatttttgcactcttactccccaagaaaatgtcgaccagccatattcatagtaaatcttccagaaggacctacatgttttatatttctcattccttgtgatgaactatgttctttgaacaaatcttacaatacttttcacatcgtcagtcacattctcttgttttataatcctttgttttacagcaattatcacaagaaacatctgggtgtttcttacaaaaatcaggattaaatccattttcaccaaagtaggccaaaagctgtattctcctgcattccgttatattttcacagtaatgtaccatgctatacaaattattgaagtgagtttntnttgtatgatggtttccatntttttccactaaaagagatgaagactatagtaagacatacttataggggaaaaatagagcatatcatagaaatatttagaatagattcatataantttaaatnttaaataagaaaattactgttaacagcattgtcaacatggcattctntnttntaattnactgagtattaatgttcatcctcaagattttagtactntaggaataaatgttaggnnnnnnnnnnnncaaatcttcattatccccaatgatgatggtttgacttatatttgctgtntttatcagtcgagcatnnancgaactgaacatcctgaggaagcagagcctgagattacggcagtggccatgcacttctctgagtatctgaggtcaaag

SEQ ID NO: 357035 - DNA, 1003 bp, Homo Sapiens
  misc_feature (48)..(107): n is a, c, g, or t
  misc_feature (557)..(614): n is a, c, g, or t
  misc_feature (707)..(707): n is a, c, g, or t
atacgcacgatgagggattacaaaaagtaactggaaatataacacttnnnnnnnnnnnnnnnnnnnnnnnnnnnnnnnnnnnnnnnnnnnnnnnnnnnnnnnnnnnntttaggactggaaaaataatggaggtggaggaaagaaatgaaggtaaatacaaaaaggcaaacgagaagtggattgtgggtgaaagatctaatggggacaacccgggcaccgtaaagaagtaaagagtaatgaacttaaacgccgggacacgaaacagttggggaaatagcgaggggtgcacggcaaaggtaagggttaattactatgcacctttgagtatattgacaggggaggttaggttatcaaggcagacgaatgcaaaataacccaagaatacctccagaatgctccagagttccatggcaaaaaagggtaggaagtggtgatttaaccatgtaaatgtagtgcataagcctctgcgtaacctttataaaatcatgctcacaagttacgttatagatacctaaatgcaatgtaaaatactgcacaaaatagggagaactgatttnnnnnnnnnnnnnnnnnnnnnnnnnnnnnnnnnnnnnnnnnnnnnnnnnnnnnnnnnntaatcctggttggtcgaatccagggatatgcagcccgcagatacacagggccctccctgtaaacgttcaaataacgctcgcccaccctagtgntccgctaaagcagaacataaaggcacacctcagtttcccgcgcgctttgctttattgagcttcacttcgcagatcttgcattttttacaagtttacaagttttttacaagcaaccctgcatggaagcaagtctgttggcaccatttttgctcgcttcgtgtctctctcttacattttaatctattactgtgatctatgatcagtaatctttgatgttactattgtaattattttggggcatcacaaactatgcccataaaagatggtagtcctaataaatgttgtgtgtgcttcac

SEQ ID NO: 357036 - DNA, 940 bp, Homo Sapiens
atttattattcgaaaggaagagaaaattggggtgtcagatccaagaggtaaaaatgagagctattttccttaaaaaaacttaactacagtgtggcacggaaacttggggcaatttcatcaaggccacttaatgtacagagggtaaatgttagaaataaaattgagggggagccatccatgagagagttttaacttataggtgccttaaaggtgtcaccaaaccgcgttggtagcttgttggaaatggagtttgcgaaaccaaccagcaagggccaaatactgcggggtgtgcatgagaatggcagaccttttagagtgtggtactgcctgaaagtagtgtgcagaaaattgtattatttaatttgcctcaaaacatccacggtaatattaaatgcaccttttttgaagcatgaactctgaattatgtttttataaatctgactaggcaaacctagatttctggtttcacaatggatttattttctctctcagtctccattttaacagtgcttttgaagtttatacagaaagctttaaaagttagtttgtgcccttggtttttattcttaaaactgctaaaatacctctgtaagccttatcctttattctttcatatgttgtataataaatgtatagatttcattgaccaactaaaatgttgggtgtctgtaaatgagaccaaaacgtgggttgcttttttcataaaataatttctattgggggttactgttcaatgacagcaggtaacctataactgtgaatgcttcgtgtcgtcagtatttgcattacattcataaaagtgtgcaagtcctgtgactcccagcttaactgaaatactgttatgccacctaacttgagtacagcaaactggttttaggtttcaatgacattgatgtaaaatgatatcccatgaataaaaagtatttgtgtttggtttcag

SEQ ID NO: 357037 - DNA, 834 bp, Homo Sapiens
  misc_feature (159)..(211): n is a, c, g, or t
  misc_feature (787)..(787): n is a, c, g, or t
tggatatctttgaagttatgtgacttatggtccagccaatagtctattcatggggactgggaggtacatgaaaagaatgtaattttcaatgtgggtatggtgttctgtaaacaacaattaggtcatgttgactggtgtggttcatatcttctatacagnnnnnnnnnnnnnnnnnnnnnnnnnnnnnnnnnnnnnnnnnnnnnnnnnnnnnttttttgatgcccaagttgtatataaaatggtgtagtagttgcattataacctatgcacaaccttctgtatattttaaaccatctctagattttttataatacttaatacaatgtaaatgctatgtaaataattttaatactgtattttaaaatttgtatttttttactgtcattgtgttttttctgaatatttgtgcattgctattggttgaatctgcatatatgaagagctgattacatatactactaaatttcttgcctacaagtgctatcaattactgagatataattgtggatttccaattatgcttgtggatctatttcttttgttctgttagtttttgcttcataaaatttaacactctcattataggttcatactagcatacatattcctgatgaacacagtcatgtgtcatgtaataacattttactcaatgatggacacatatacaatggtggtcccataagattacaatggagctgaaaaattcctatcacttgtggacgttgtcatgcaacatatcactcaggtgtttgtggtgacgctgctgtaaataaacctactgtgcttncagttgtataaaagtatagcacatgcaattatgtatagtacgtaata

SEQ ID NO: 357038 - DNA, 1005 bp, Homo Sapiens
  misc_feature (3)..(3): n is a, c, g, or t
  misc_feature (18)..(18): n is a, c, g, or t
  misc_feature (22)..(22): n is a, c, g, or t
  misc_feature (28)..(28): n is a, c, g, or t
  misc_feature (31)..(31): n is a, c, g, or t
  misc_feature (35)..(35): n is a, c, g, or t
  misc_feature (42)..(42): n is a, c, g, or t
  misc_feature (53)..(53): n is a, c, g, or t
  misc_feature (61)..(62): n is a, c, g, or t
  misc_feature (65)..(65): n is a, c, g, or t
  misc_feature (69)..(70): n is a, c, g, or t
  misc_feature (76)..(76): n is a, c, g, or t
  misc_feature (83)..(84): n is a, c, g, or t
  misc_feature (88)..(88): n is a, c, g, or t
  misc_feature (90)..(90): n is a, c, g, or t
  misc_feature (99)..(101): n is a, c, g, or t
  misc_feature (109)..(109): n is a, c, g, or t
  misc_feature (115)..(115): n is a, c, g, or t
  misc_feature (118)..(118): n is a, c, g, or t
  misc_feature (130)..(130): n is a, c, g, or t
  misc_feature (138)..(138): n is a, c, g, or t
  misc_feature (140)..(140): n is a, c, g, or t
  misc_feature (157)..(157): n is a, c, g, or t
  misc_feature (179)..(179): n is a, c, g, or t
  misc_feature (189)..(189): n is a, c, g, or t
  misc_feature (200)..(200): n is a, c, g, or t
aanttacaaagtttcccngttncggggntgncttnagaaccnatatatagaancctatacnnccntcannactggnaatttannaacncnttctaagtnnnccagatcnttgatnaantaagggaaaatntttggaantntgaaaagtgacacagcntatcaaaattggaaggatacantaaggcaganttgagagaatnttaagtacttaaataaaaaaaggagaaattcatagcagcattattcacaataaccaagaaatacgtacaacccaagatgttcatcagtggatgaatggataaacaaaatgtggtaatatgatttggatatttgttccctcaaaatctcacacggacatgtgacccccagtgttggaggtggcgcctagtgggaggtgttggattatggggtggatctcatgaatggcttggtgtcctccacatggatatgagttcatcctatagctagttgtttaaaagagcctggcacctcctccctctcccttttgttccctcttgccatgtgatatgctagctctccctttgccttctgccataattgtaagcttcctgaggcctcaccagaagcagatgctggcactatgcttcttgtacagcctatagaaccataagctaaataaaccatttttctttataaattacccagcctcaggtattcctttatagcaacacaaaacagactaatacatgtggcatatacatacaatgtaatattattcagccttggaaggaaattttgacatatgctacaatgtggctgaaccttgaggatattctaataagccaatcacaaaaagataactacttatgattccactcatatgaagtatctagagtagtccacctcataaaatcagaaagtattactggtctcccacttttaggctattaacgcttgtagtgagagtttgtaggtttcttgtcgtggttgccaggggctgggggcagggggaaaagggtagttattatttcatggatatagttt

SEQ ID NO: 357039 - DNA, 497 bp, Homo Sapiens
  misc_feature (158)..(362): n is a, c, g, or t
ttggaaatccacaattatatctcagtaattgatagcacttgtaggcaagaaatttagtagtatatgtaatcagctcttcatatatgcagattcaaccaatagcaatgcacaaatattcagaaaaaacacaatgacagtaaaaaaatacaaattttaannnnnnnnnnnnnnnnnnnnnnnnnnnnnnnnnnnnnnnnnnnnnnnnnnnnnnnnnnnnnnnnnnnnnnnnnnnnnnnnnnnnnnnnnnnnnnnnnnnnnnnnnnnnnnnnnnnnnnnnnnnnnnnnnnnnnnnnnnnnnnnnnnnnnnnnnnnnnnnnnnnnnnnnnnnnnnnnnnnnnnnnnnnnnnnnnnnnnnnnnnnnntatagaagatatgaaccacaccagtcaacatgacctaattgttgtttacagaacaccatacccacaattgaaaaattacattcttttcatgtacctgaacagtccccatgatagactattgggctggaccataag

SEQ ID NO: 357040 - DNA, 1994 bp, Homo Sapiens
  misc_feature (1518)..(1615): n is a, c, g, or t
agcggggggggctcccggcgtgcagcttggtggcggctgagccggcagcgggccgcctcaggcagccccggccgggccgcccgggtccccggcagcggggtaggatggcgctaaagcggatccagaaggctgtacaagaagcatggtgccagcatctgcttctggtgaggcctcaggaagcttacaatcatggcagaaagcaaaggagaagcaggcgtgtcacctggaatttaatcgacttgcagagggatcctcctgcccagtgttctgcaggacctgtcggtgatgacttgttccactggcaggccaccatcatgggcccgaatgacagtccttaccaaggaggtgttttcttcctgaccatccactttcctacagattacccgttcaagcccccaaaggttgctttcacaaccaaaatttatcaccctaatatcaacagcaatggcagcatctgccttgatatcctgcggtctcagtggtctccagcgttgactgtgtcaaaagttctcttgtccatctgctcgctgctctgcgaccccaaccccgatgaccccctggtgccagagatagcacacacctacaaggccgacagagagaagtacaacagactagcaagagagtggacacaaaaatatgctatgtaagtgccttggaggttttacatgagacactgtccaagagaagctggcagagaggtcttcccttaaaactttgggctgttggctgagccattcaaagagcatcatgttgttcttcaaacaaatgttggtcacccactctctccagctgcagcatgttggtgccattttcagcaattacggcgttgacagtgccacctctttgatgccaaatcagcaaccattgtgttatgatctgcagtcttcctggtgacactggaatctctctctctgccgcctcagtttgtctgctggtctcttggggggccaggccctgcacgtctctcctacccggcctcaaatggtgctgctgcccatgatggtaccacaccagggcctcagcctggcccctcaccacataccctttgccttttagaactcagtgccatcctgggtgcccagggcagagcaggctttgttcgcacctcatctgctgcagaaccacatcctgaggagtctcagcttatcctggagggaattgggaacagtgtcactgggaagtgaaggcctagccctgtggcttccaccagtctcctcctgcagtgccacgtggtggcatttctcgcctcacaccaagaagcagcaagtggaaaatttcaggatacaaagcacataacaccccataagagatgattatgtttttagaagcaagagcaaaattatgaaacctctagagatttgggtcatgttactccatttgatgaagattctcactaccgcccgctcctcccataggagcctacactaagtccaagtgtgagccattcacagactagaacacaaggagggagagagactcttaaacgtaaataaaaatgcaattcactcacaactcctnnnnnnnnnnnnnnnnnnnnnnnnnnnnnnnnnnnnnnnnnnnnnnnnnnnnnnnnnnnnnnnnnnnnnnnnnnnnnnnnnnnnnnnnnnnnnnnnnntaagccaactacaccacaataacagcaacgcaaaagaaaagaataaaacgcatactacaaataaataatcacaaacatatcaaaactaattcaagacgctctcgccccaccccatcgttcttctatcctcgatcctgggactctctcatatcactctccgttccctcttcactttctaatctaatcatgtcatatgaactatccttactgcaaccgatactctcttcacaatcaatcatcttagtgtcatgcagtatcaacgaatataacactaaacccttgcttcttcgctcttttaatcattctagctctactcacttcttgtactagactttctctcacttttttgggtctcgatgtacctattcccccacctccc

SEQ ID NO: 357041 - DNA, 541 bp, Homo Sapiens
  misc_feature (319)..(319): n is a, c, g, or t
  misc_feature (449)..(449): n is a, c, g, or t
aatttccttccaaggctgaataatattacattgtatgtatatgccacatgtattagtctgttttgtgttgctataaaggaatacctgaggctgggtaatttataaagaaaaatggtttatttagcttatggttctataggctgtacaagaagcatagtgccagcatctgcttctggtgaggcctcaggaagcttacaattatggcagaaggcaaagggagagctagcatatcacatgggcaagagggaacaaaagggagagggaggaggtgccaggctcttttaaacaactagctataggatgaactcatatccatgtnggaggacaccaagccattcatgagatccaccccataatccaacacctcccactagggcgccaccttcccaacacggggggttcacatgtccgtgttgaggttttgaggggaacaaatattccaaatcctntttaccacttttgtttattcctttcttccattgtgaactttggggttgtacgttttcttgggtattgtggattatgctgcttggatttctcc

SEQ ID NO: 357042 - DNA, 1307 bp, Homo Sapiens
  misc_feature (103)..(103): n is a, c, g, or t
  misc_feature (114)..(115): n is a, c, g, or t
acatcgtccgactgctggacgtggtgcacagcgagagaaagctctatctggtgttgagtttcctcagccaggacgtgaagaagtacatggactccacgcaggnctcagagctcnncctgcacgtcatcaggagctacttcttccagctgctgcagggggtgagtttctgccactcacatcgggtcatccaccgagacctgaagccccagaacgtgctcatcaatgagttgggtgccatcaagctggctgacgtcggcctggctcgcgccttcggggtgcccctgcgcacctacaccatgaggtggtgacactgtgtatcgcgccccgagattctcttggcaaccaggttctataccacagctgtggatatctggagcattggttgcatctttgcagagatggtgactcgaaaagccctgtttcctggtgactcttgagattgaccaagctctttcgtatctttcgtatgctggggacacccagcgaagacacatggcccggggtcacccagctgcctgactataagggcagcttccctaagtggaccaggaagggactggaagagattgtgcccaatctggagccagagggcagggacctgctcatgcaactcctgcagtatgaccccagccagcggatcacagccaagactgccctggcccacccgtacttctcatcccctgagccctccccagctgcccgccagtatgtgctgcagcgattccgccattgagaatgtcaaggccacactcagatcctttctcgagcagctgctgccccagctgcctcctacccattgccaagagaggatgcatctggggagagcaaagcactaaggaattcagcatcagcctgcagagggctgagtctgggttagtcctgcccgcaggttagcgagatcctgtgttgttttttgggttggacggtgccgtttcaaaatagaggcacagatgctccatgcacgaggggtccccgggcactggaacaagtgccaagttgaaggcagggggcctgccagagctgggtgtgggtattcaggccctcacctgccctgcctgcagggccagaccctgaggaaagggcgccccctgctggtctttttggatttaaaatgtttgggggaagagttgagttccagttcagtcccaagttaaacaggagggagtgagggagaggagagagggcgttccccggatcccaggagagctgggctatgactgcaataaggagttgttccttcacctgagatgtgcttcttttggttcatttctgaattgacaacaataaataaacgaggaatgttcctg

SEQ ID NO: 357043 - DNA, 1058 bp, Homo Sapiens
  misc_feature (10)..(10): n is a, c, g, or t
  misc_feature (27)..(27): n is a, c, g, or t
  misc_feature (48)..(273): n is a, c, g, or t
  misc_feature (723)..(723): n is a, c, g, or t
  misc_feature (939)..(939): n is a, c, g, or t
  misc_feature (1045)..(1045): n is a, c, g, or t
  misc_feature (1048)..(1048): n is a, c, g, or t
acttcaccangctgagtgcagtgtgtntcacggtcaatgcacctctgnnnnnnnnnnnnnnnnnnnnnnnnnnnnnnnnnnnnnnnnnnnnnnnnnnnnnnnnnnnnnnnnnnnnnnnnnnnnnnnnnnnnnnnnnnnnnnnnnnnnnnnnnnnnnnnnnnnnnnnnnnnnnnnnnnnnnnnnnnnnnnnnnnnnnnnnnnnnnnnnnnnnnnnnnnnnnnnnnnnnnnnnnnnnnnnnnnnnnnnnnnnnnnnnnnnnnnnnnnnnnnnnnnttcacaatgaaataattaattatatttagtgccaatacaatttcaaataatgatgctggaatgacacccgataccacagtaggcaatgattttgatctctattagtttactagttatagtgggttaaatagtgacttcccaccaaaaatgcccacatcctaattcctgtaacctgtgaatgtgaccttatttggaaaaagggtctttgcagatgtaactacgttaagaatctcgagatgagaccatcctgaattatctggttggtccctaaagccaaagacaaatgtccttgacaacaaaaagaagagaagagggcacagacacagaggagaaggcaagtgaagatgaaggcagagactggagttacgtggccacaagccaaagaattcctgaagccaccagaggcaaggaaggattttctcatagagccttgggagccaggacacaccngctgacaccttgattttggaattttagtctccagagcagtgagagaatacatctctgtttgagcattaagtttgtggtaatttgttacagcagacctaggaaactaatatgttagttcgtactgattatttaattaaaggctctttttgtattgttttgttttctaaatagtctgcagaaacctacctcaatttttgtctccatccaatagagacncctgtctgtctgttgagatttggtggaaatccaagggttagtgtttctgggttatttgtcgcctaccacagatagtgctgaaagcccatttagtacacaaatatanacntctgaataaa

SEQ ID NO: 357044 - DNA, 1168 bp, Homo Sapiens
  misc_feature (766)..(1019): n is a, c, g, or t
atgtgtatttcagctgtgtatgcatcacagccctcctttttgctgtgctgtggctacagttttctcactgttctcttcacaccatgtcatttcacatggtatattgtaggttttgatgagaaatcggtattttaaatgcactgcaagattggttttaactggagattttgcatatcaatataattttctgatcagttaaattaaaacaaaaagcatacagtgtccacagatgaaaggattaaatcatttagcgttgtttttctctgtttgttaaagaataatcttattaaattcttacacaaagtgtggcaaatataaaatttgcttgaaaatatatcttagaaattaaacttttaatttaattttctacagtatacttatgccacaatgtacgtttccatgcaaaatcttctgtttgtaagtgtgaacattaaacattgcaaaatagtaaaatgacctctgtgattttgaaacctggagtaatatttcttttccatattcatattacaatttgaaagaaattttctcagttttatatgtttttttagtgggtgaagttcagtctacagtttttacatttagtcacctaactctagccaacttcttggtcatattctctggaaaacattcgaagatcatggcagcttttagataaaaacattttctattattttgcgtgcaaacttgtttactgtgttcacagagtggccagtcatgagaccataagaaacagctgcccttttagtgtctttcataccgtctgtannnnnnnnnnnnnnnnnnnnnnnnnnnnnnnnnnnnnnnnnnnnnnnnnnnnnnnnnnnnnnnnnnnnnnnnnnnnnnnnnnnnnnnnnnnnnnnnnnnnnnnnnnnnnnnnnnnnnnnnnnnnnnnnnnnnnnnnnnnnnnnnnnnnnnnnnnnnnnnnnnnnnnnnnnnnnnnnnnnnnnnnnnnnnnnnnnnnnnnnnnnnnnnnnnnnnnnnnnnnnnnnnnnnnnnnnnnnnnnnnnnnnnnnnnnnnntctaaacccctcttttttccaaatatgttggcatctggtggtcaccattttattctccacttcagttagattaatttttctagaatcatgtaagtgaaataatttggttaatctatgtaattaaaaataataaatttttttattttaaa

SEQ ID NO: 357045 - DNA, 1025 bp, Homo Sapiens
  misc_feature (854)..(854): n is a, c, g, or t
  misc_feature (866)..(866): n is a, c, g, or t
  misc_feature (868)..(868): n is a, c, g, or t
  misc_feature (873)..(873): n is a, c, g, or t
  misc_feature (882)..(882): n is a, c, g, or t
  misc_feature (913)..(913): n is a, c, g, or t
  misc_feature (917)..(917): n is a, c, g, or t
  misc_feature (926)..(926): n is a, c, g, or t
  misc_feature (931)..(931): n is a, c, g, or t
  misc_feature (934)..(934): n is a, c, g, or t
  misc_feature (948)..(948): n is a, c, g, or t
  misc_feature (956)..(956): n is a, c, g, or t
  misc_feature (966)..(966): n is a, c, g, or t
  misc_feature (973)..(973): n is a, c, g, or t
  misc_feature (981)..(981): n is a, c, g, or t
  misc_feature (984)..(984): n is a, c, g, or t
  misc_feature (1010)..(1010): n is a, c, g, or t
cctgggtggcgaattcggcacgaggcacgtggacgcgtctgggctgctggaggcagcccgagccgccgccgtcggtgtcgccgccaccaccaccatcggagtcacgagtcccgcgtctgtccgaagtcgccgctctcgggctgctcacgtctcttcggagagcgcgcacatggcgactcaggcgcactccctcagctacgcagggtgcaacttcttgcgccaacgtctggtcctgtctaccctgagcgggcgccccgtcaaaatccgaaagattcgggccagagacgacaacccgggcctccgagattttgaagccagcttcataaggctattggacaaaataacgaatggttctcgaattgaaataaaccaaacaggaacaaccttatattatcagcctggcctcctgtatggtggatctgtggaacatgactgtagcgtccttcgtggcattgggtattacctggagagtcttctttgcttggctccatttatgaagcacccgttaaaaatagttctacgaggagtgaccaatgatcaggttgacccttcagttgatgttcttaaggcaacagcactccctttgttgaaacaatttgggattgatggtgaatcatttgaactgaagattgtgcgacggggaatgcctccccggaggaggaggcgaagtggttttctcatgtcctgtgaggaaggtcttgaagcccattcaactcacagatccaggaaaaatcaaacgtattagaggaatggcgtactctgtacgtgtgtcacctcagatggcgaaccggattgtggattctgcaaggagcatcctcaacaagttcataactgatatctatatttacacagancacatgaaaggngncaacnctggggagncaccgggctttgggttgtcactggttgctgngacnaccagtggnaactnacncagtgctggactgncatccaanccccgggccngggggcngcgtactnccnggggacttggcggggactgtgaccgntgctgctggggggaa

SEQ ID NO: 357046 - DNA, 1492 bp, Homo Sapiens
ctccgtcttcctgttccaaaccacgtggacgcgtctgggctgctggaggcagcccgagccgccgccgtcggtgtcgccgccaccaccaccatcggagtcacgagtcccgcgtctgtccgaagtcgccgctctcgggctgctcacgtctcttcggagagcgcgcacatggcgactcaggcgcactccctcagctacgcagggtgcaacttcttgcgccaacgtctggtcctgtctaccctgagcgggcgccccgtcaaaatccgaaagattcgggccagagacgacaacccgggcctccgagattttgaagccagcttcataaggctattggacaaaataacgaatggttctcgaattgaaataaaccaaacaggaacaaccttatattatcagcctggcctcctgtatggtggatctgtggaacatgactgtagcgtccttcgtggcattgggtattacctggagagtcttctttgcttggctccatttatgaagcacccgttaaaaatagttctacgaggagtgaccaatgatcaggttgacccttcagatagaatttttgcggcatttgaagagctttttccagattatgtttaaaattgaaaccaagccatgtggtgaagaactcaagggtggggataaagtgctgatgacctgtgttggcattggtttctccaaccttagcaagaccctcaagtgataaccatcacaagataaggccccaatgcctacagacaaagcagaagctgccacggacaccaatgggaccaagtccaaatggattaatccaggacagaatagccacttgcttaattttctgtgaagaaatatcaatatacaaataaaagacatccctgtagcatatggtttccagctgtttctccagtggcattgccattgcccaggaggggcccagtcaccatgagagctcccttgccttacctggaggaagaatgtgccttcaggccacagtcgtgctgctagaacagtctcatagctgcagttcagctgtgcttcctcagcctactatcataggcttcctcagccctctgtcatatggctgttttccaaacctgtggagtctgttactgttctttctgcaaggactcacctccttgagccttggtttttgttgtagggattaaatgagataatatgagtggcagctcttcatgagtcctgcagtgctaagcaaatgtcagaaattggtgtattagactatttatctttgatcttctgaatggattgctgtcatggacacggacacggatcttcatctggttcattgtatttatatgtgagggatggatggctgcggggctccaagtaagttattgggatgttttttatattccaggtgtgctgtacattcttattttattttcacaatagctctgtgatgtaaatgctatctccatgagaaaattcataaagggtgttttgttcctttaaaatgtataatgtaaagaccattaaatctcctcatttaagg

SEQ ID NO: 357047 - DNA, 1141 bp, Homo Sapiens
  misc_feature (3)..(3): n is a, c, g, or t
  misc_feature (21)..(21): n is a, c, g, or t
  misc_feature (23)..(23): n is a, c, g, or t
  misc_feature (30)..(30): n is a, c, g, or t
  misc_feature (32)..(32): n is a, c, g, or t
  misc_feature (38)..(38): n is a, c, g, or t
  misc_feature (47)..(47): n is a, c, g, or t
  misc_feature (52)..(53): n is a, c, g, or t
  misc_feature (58)..(58): n is a, c, g, or t
  misc_feature (72)..(72): n is a, c, g, or t
  misc_feature (79)..(79): n is a, c, g, or t
  misc_feature (93)..(93): n is a, c, g, or t
  misc_feature (96)..(96): n is a, c, g, or t
  misc_feature (106)..(106): n is a, c, g, or t
  misc_feature (112)..(113): n is a, c, g, or t
  misc_feature (116)..(116): n is a, c, g, or t
  misc_feature (119)..(119): n is a, c, g, or t
  misc_feature (127)..(127): n is a, c, g, or t
  misc_feature (129)..(129): n is a, c, g, or t
  misc_feature (145)..(145): n is a, c, g, or t
  misc_feature (154)..(154): n is a, c, g, or t
  misc_feature (168)..(168): n is a, c, g, or t
  misc_feature (177)..(177): n is a, c, g, or t
  misc_feature (180)..(180): n is a, c, g, or t
  misc_feature (196)..(196): n is a, c, g, or t
aanaaaaaaatttttcccccntnccataancntgcccncccagtttntctcnnaaaanttttgaaacaaacnaacaaanagacagcacctganagntgccccaggntccctnnganggnaactctgntnccgggagggcacaagntctagaaanccccttcactttcncctagtgtnttntctctggacccttctnaagcagagaccggacaagagcctgcagcgcaagggactctggcctgtccctgaggctggctgggggcaggacaacacagctgcttccccaggctgcccactctggggacccgctgggggctggcagagggcatcggtcagcggggcagcggggctggccatgagggtccaccttcagccctttggcttcaaggatggagatggttttgccctccctctctgccctcgggtggggctggtgggtctgcagctggtgtgggaacttccccacggatggcggtggaggggtttcgcaccgtgctgggctccccctcactctaccaccgagtgttcgggctggggcccagctccaggagggcttgagagctcagcctgcctgggagagcccttgtggcgaggcattaaaacttgggcaccagcttctttctcggtggcagaaattttgaagtcagagagaaacggtcctttgttggcttctttgctttctcgtgggtcctttggcaggcctccctttggggagagggaggggagagaccacagccgggtgtgtgtctgcagcaccgtgggccctcaagctttcctgctgtcttctccctcctcctcctttcccctttctctttcctcatttcctagacgtacgtcaactgtatgtacataccggggctcctctcctaacatatatgtatatacacatccatatacatatattgtgtggtttcccctttctttcctttttttaagcaacaaaactatggaaataataccccaacagatgagcgaaaatgtattattgtaaagtttattttttttaatactgttgtctataatggggaaaaaggacattggccccgcagtgccctgccccagtcagcctggctgggctctggtgggggctcctgatccgcatccaagcttaaccaaggctccaataaacgtgctaggaagc

SEQ ID NO: 357048 - DNA, 579 bp, Homo Sapiens
gggcttccaaggcttttttgccgctggtgtcaggagtattttcatattccaataccgataaatctttgaggtttctgggtgtctctggggagcccctgggccagattttcctctagactccagcccatctcttcagagcagctctgcttgagttcacagatgactgccaagcttcagacaccctacagaaaaagggttgagacccagtgtggccatgccagctaattggacctcacctcagaaatcctcagccctggctccagaggatcatggcagctcctatgagtgttaaccttgatgcctgaaagaactggaaattatgaagatagattcagaagtcaaatatgttaactaactgcattgaagagtagaagaaaacaatagcctagtaggtttttactgggattagtgaaacaactgctatgttctcagcaacccactccaaagccaaagtcaaaactaaaattgtaaaatatctcaaaaacaataaaaatggtatatatatatcagaagctctggtatatagcaaaactgtactaaaaataatttagaaaaataatttatctcatgccaatgaat

SEQ ID NO: 357049 - DNA, 1940 bp, Homo Sapiens
  misc_feature (53)..(53): n is a, c, g, or t
  misc_feature (71)..(71): n is a, c, g, or t
  misc_feature (115)..(115): n is a, c, g, or t
  misc_feature (246)..(247): n is a, c, g, or t
  misc_feature (259)..(259): n is a, c, g, or t
  misc_feature (261)..(261): n is a, c, g, or t
  misc_feature (278)..(278): n is a, c, g, or t
  misc_feature (283)..(283): n is a, c, g, or t
  misc_feature (449)..(449): n is a, c, g, or t
  misc_feature (511)..(512): n is a, c, g, or t
  misc_feature (540)..(540): n is a, c, g, or t
  misc_feature (554)..(554): n is a, c, g, or t
  misc_feature (560)..(560): n is a, c, g, or t
  misc_feature (571)..(571): n is a, c, g, or t
  misc_feature (574)..(574): n is a, c, g, or t
  misc_feature (582)..(582): n is a, c, g, or t
  misc_feature (623)..(623): n is a, c, g, or t
  misc_feature (626)..(626): n is a, c, g, or t
  misc_feature (683)..(683): n is a, c, g, or t
  misc_feature (1099)..(1108): n is a, c, g, or t
  misc_feature (1320)..(1328): n is a, c, g, or t
cccttgtgagccgcctaaaaaccgtcctgtgagcatctcatccccacactggngctgccaccacgcacggnccttccaacttacgacactgttccatttatctctatgtgctttncagcccatacacattaggaagattgctctgtaagaaggacttatcggagtgaaactccacagtgcggttcaaagacacagcttaagatgccccgggatggagagaggactgagcttggactggaattcctnnaacaaacgaganantgtgagcttgtcccagncactnaggacagcatactcttcccgacaagggcatctgggtcgagagaaggtggagcgggtcttcggcaaaggcgaaaccctggagaacgctgccccaccccaccctgtaagcgatggacgagtaataatctcccggcctcagtttccaccctctgcttatatcaattttnagaagctttattttttctaagatgattttccctacatatttcttgtctccctcactgccatnnccgcccctcccccccaaaatacattgtnaatctttttcctcntacggntaattttaaanaancacaaaantttgcataagacagaatttacctacccatatatttctgttnaangtggaaaattgtttttacgtggcaagttttatttctattgatttctaaaaattctantctggaaagaatttggctcatgagctaaataatatagttaccatttgcttaataatttttaagctctaggcattgaggtaaatgctttatatattttttcttagtctgagaaaaaccatgtaaaatagggtttttccttctgtttttcttcctccctctcttctttccaatttgaaaactgaggcagagacattaaatggctttcacaaaggtatagagctagtaagtagcagaggcagagtctgaacacaactaccaaccgctaagtggaagctcttagcagaggtcagccgagttttcaagtgaggctataactgctgaagagtagcccttcaacctatggtacttggttgcccattataaaggaaagctgtgtagtaatttgactttttataccttaagaaataatcacggcnnnnnnnnnnccctaaaaataatctttagctgttaagcaatcatcatattgctagttgtagtgctgttattcatattttgcaactgtttatatattatgagataaagcaagtaagtcattatattggtgtcttacagaactgaaatttttcattataagtaaaaaggagatacaggtggaagattattgaaatcaaataaaaatcttatagccctggaaagnnnnnnnnnggaaagctatggttaagaagcaagagtagaagctgtgagtagttactaccagtacagaaagcttgaaacagacttgtattcccaccccaatcaatgcttctcacaggagcacatggaatcctctgttatgttaattctggcaatctctatgtcttctgggtcctacccatcaaacctctgaaagcaattcaaatattttgcccactccctttgaccgtttattttttaaatctgagattagaattgtggaacacatagtggattgatataaagaggaaaatcaagcaccaggaataaagattataaaagagttagctccttgaaggttgttggtaatagaccaatcatgccaacataaaaaaaattaaatacgtacgtttaatgaaatttcatacttttaataaattactttcatcttgttagttctgatctagaatatctttgtatttaacgataaatgagataaaattataaagagattcatcctctattttccattataacatgcataaagtaaaatttcaaaaatttaaataaatgtgtcagaatattcatggaaagtattcagctgtgagattatgtacttatttgaataaagtgtctttttacaat

SEQ ID NO: 357050 - DNA, 706 bp, Homo Sapiens
agcggggcgccacccgcccacccagcccatggctccaggcccacctggcgaactgactctcagcccgcgcctgggctaagcctggctaggagccgcgcaggtactcgagcagtgggcgcccaggctccgagtgctctgcgcccagcgcaccgagggagccaaggccgtcgggccggcgctttcagctgtctctcgcagcagctcagggccgcgccccctgggctggcgtcgtgccctagccaaggagaaggtgggcaccggaacgtggccgcagcgcttatctgtgaagcaagtattaaacctcagaacaggggccgcgcggcgtaaggcaggagagcagagcggaggtttcagggagcttcgtttgccctccacactcacaagagtcacgcgttagttgctacacagctttatctgttccacgccttgattggcactcctggggtaataaaagcccgcaggaaatgcttgggaagaaaagttgctggggatgaacagtgaagagcaacttagggagagtcgatgaagaaggaacgtctgaaccatacaacggacccatagatctcactgtctctaccctccttccttcccatgagacctttgaccctttgccttttctacttcttcctcaggtttcagtctcgtgccagactttctcttagttacgatctggtggatggtccacatctcaactaacaggtatcga

SEQ ID NO: 357051 - DNA, 2609 bp, Homo Sapiens
atctcaatctgggacatatccacgtggtctggtgcagccaggaatggatcagtatggtttgagacaacctggtgcatatcagccaggcttgatagcaccaggcacaaagcttcgtggctcttcaacattccaggcagattctacaggttttatatcagtacgtccatatcaacatggtatggtacctcctggcagagaacaatacggccaggtgtcaccactcctagccagtcaaggtttggcatcacctggtatagatcgaaggagtttggtaccaccagaaacttatcagcaaggtttgatgcatcctggcacagaccagcacagcccaataccactgagtacaggtttgggatctacacacccagatcaacagcatgtggcatcacctggcccaggtgagcatgaccaggtatacccagatgcagctcagcatggccatgctttctctctctttgacagtcatgattcaatgtatcctggttatcgtggcccagggtatctaagtgctgatcagcatggccaggaaggtttggatccaaatagaacacgagcctcggaccgacatggaattcctgcccagaaggccccaggccaagatgtcactcttttcaggagtccagactccgtcgaccgagtcttatcagaagggagcgaagtctcgagtgaagtcctgagtgagcgacgcaattcactgcgtagaatgagttctagtttccccacggcagtggagacatttcatctgatgggagagctcagtagcctctatgtggggctaaaggagagtatgaaggatctggatgaggagcaggccggccaaaccgacttggagaagatccagttcctgctggcacagatggtcaaaaggaccatacctcctgaactgcaggagcagctgaagaccgtaaagacgctagccaaagaagtttggcaggagaaagcaaaagtggaaaggctgcagaggatcctggaaggggaagggaatcaagaagcagggaaggaactgaaagctggagagctgagattgcagctgggtgtcctcagagtcaccgtggctgacatagaaaaggagctggccgagttgagggagagccaagacaggggcaaggctgccatggaaaattctgtctctgaagcctccctttacctgcaggaccagttggacaagctcaggatgatcattgagagcatgctgacctcctcctccacgctcctgtccatgagcatggccccgcacaaggcccacaccttggctcctggccagatcgaccctgaggccacctgtccagcctgcagcctggatgtgagccatcaggtcagcacgctggtgcggcgctatgagcaactccaagacatggtcaacagcctggccgtctcccgaccctccaagaaggccaagctccagagacaggacgaggagctgctgggccgtgtgcagagtgccatcctgcaggtgcagggtgactgcgagaagctcaacatcaccaccagcaacctcatcgaggaccatcggcagaaacagaaggacattgctatgctgtaaccagggtctggagaagctcgaaaaggaaaagccaacagggagcacctggagatggagatcgatgtgaaagccgacaagagtgctctggccacccaagtgagccgtgtccagtttgatgccaccacggagcagctgaaccacatgatgcaggagctggtggccaagatgagcggggcaggagcaggactggcagaagatgctggacaggctgctcacagagatggacaacaagctggaccgcctggagctggacccagtgaagcagttgctggaggatcggtggaaatcgctgcgacagcagctcagggagcgccccccactctaccaggcagacgaggcggctgccatgcggaggcagctcctggcacatttccactgcctctcatgtgaccggcccttggagacacctgtgactggacatgccatccccgtgacccccgcgggtccaggcctacctgggcaccattccatccgcccctacacggtgtttgaactggagcaggtccggcagcatagccgcaacctcaagctgggcagcgccttccctcggggtgacctggcgcagatggagcagagcgtggggcgcctgcgctccatgcactccaagatgctgatgaacattgagaaggtgcagatccacttcgggggctccaccaaggccagcagccagataatccgcgagctgctgcacgcccagtgcctgggctccccctgctacaaacgcatgatgaggtgaacatcttgggcctggatggccacatttacaagggacggatggacacaaggctgccaggcatcctccgaaaagacagctcagggacctcaaagcgcaagtcccagcagcccaggccccacgtgcacaggccgccatccctcagcagcaatggccagctgccctctcggccacagagcgcccagatttcggctggcaacaccctcaaaaagatagacctttcctcccgaggggcgtcctctcccagccggaacacaggcccaaccgcccaggtttccgccgcgggtgggaaaaacagggggggctgggaaaaggcaccctggacatgccccc

SEQ ID NO: 357052 - DNA, 1168 bp, Homo Sapiens
  misc_feature (25)..(25): n is a, c, g, or t
acttaaatcgtgaagcacattgagngcatttctagtggaatctgccttgtctttccgacctaatacttcttgaaacaatgtgtctgcagtattacttgctctgttcagaacattctccagtttctgcgtcatggatccttctactttttccgttccatctgcttctagtttttgatggatggctgagagggcatcctgtgcttcgaagaatgtactgagaccgcctttcacataggccaggctgccctcactcttcttgttagcctgtctctttaggttggtgactgccattttgagctgctcaaaactggtgtttgagtgattctctataagataccaggctgctgagaaattctcacttgtaaaatcagcactcattccatggaatagcatttctaagtccttctgcgaaaaattaattttttcaatctcaatgccaagcgggttagcaggacgtaaggaccaagggcgaaattcctttgttccggtcaggccgcatatcataataattcatttcatcaacccacacagcagactgatccaaaatgcctattttctcagggttgagtagctgaaaagagactgttgaggttcctctgccaccggacttagtggtgacaataatgtctccttggtcatttttggattgtcccactcgacatactattttacttgcagacatccattctgccgtcaggaggcaattatgtccacaaatggtcaagcctatgaggtcggtggggccagtccccagattttctcccctgattgtgaccttcgtccatggtatcccttcatttggagagatgccggtcacaagggggggttgtcgtgatcgagacattgtgctttgtggagcaaactggtgatcctgttagagaagtaatcttccctccagccctctcacaaaatgcttccgtttccactccggttataagaagagtaggcattccactgctgaaacttcttagtattcttctcctaagctgaaatccagtcttccccagtcctgtgtccagtgttcgttccattattggcaccaagatttactccagccgtcctgccgcagctcacggccggcacagacaggacccggtaggtctcgccgaagactccgcggccgccagccgccggcacctcaccctcgtgccgaattcgccacccaggc

SEQ ID NO: 357053 - DNA, 1322 bp, Homo Sapiens
aaacactctaataatgccatcactcgcaccaaccacaatgtcaccattgtcgagcacacagcagcaccatatagactgagctggaagtcggatagtttgagcacattccccatgtttccagattctcagagatctgtcctctgctgttgtcacaaagtctctacaatttggaaaaacggatatgctataaatataatttgtatgtccataatatacttcaagacactcgccagtgatttgccaccttctaatactagcatcatttgcacaggaaagaaattctgtttcactcaaaattgccaaacctcttacacagtcttcatgccctggaaaaagtcctcttcacatcttccaggccttccacagttttaacagtcttgtctggctgatccagttcaacattaagccctgttcaggtaagatctttaccgcccacactgcagctgtatgaccctggcaaggtcatcatgcacttgtcatttcagccagactttagcagtggtgtcccatgaaccactaagtaatgtcccaaattttccagatgatagactacaaacagtatttttgtggccttttagaatataaagtggcattggactgtccagtgagaaaatgcatatattgtggtcatttccaccggtggcaattaggccatgagggtagatgtcacttgagggtatgatgcatacacaagatacaaaattggaatggccactcatacagtgcatttctgtaaagctcctgtttggactgtctggggcccagaggcgggtggtgcggtctcgggacacggacacaaaggctcccggcggataggcgcagcacaccaggccccgtacgtccagctcgtggccccggagcgagcagctcagccggtacctggttgcgccgctcgtcatggccagtgtctgtctggcgcccggtgcccaggcactgtgcgagaccagtccgcaggggcgactcggagagcgccgggccgcggcgggagaagagcctgcaaataaggggcggccggagaccggaagagcccgagagccggtacggaagggcggctgggaaggggcgcgccgagcgggccgagtgacacagcaagcctgacaggcactccggaattcatcatcggcctcagccctccatgacgcagagtgtgtgcgtcccaaccgccgacgccgatgcggagctgagctggctttcctccagggctctggactccctgctgagcaagagagaaagaggcccgcccttccaccaggacgcctgaccctggggtccttcccaaacccgggtctcttccgactccgggcccaacagtttgtggtccc

SEQ ID NO: 357054 - DNA, 1901 bp, Homo Sapiens
  misc_feature (1266)..(1310): n is a, c, g, or t
  misc_feature (1553)..(1565): n is a, c, g, or t
  misc_feature (1649)..(1711): n is a, c, g, or t
  misc_feature (1790)..(1790): n is a, c, g, or t
  misc_feature (1886)..(1886): n is a, c, g, or t
gcactaggtctagtacgagcctagtgttattcggcacgagggcgcaacctgacagatgcgtgtgcgggagtcactgagaatctggaagaacacagagaaggagaacgcaacagtggcccacctggctgggggctctcaggtcctgccagatgaacctggtggctgacctggtacaagaggttcagcaggcccgtgacctccagaacaggagtggggccatgtccccgatgtcatggaactcagacgcatctacctccgaagcgtcctgatgggccgctgctttgcgctggtggaccacaggcatctacacagcctggactttggttctctccaggaaggtagcccagcactgctgaagacccagcaggaagccaggctgagtgagccacagaccacctgcttctgaactcaagctgcgtttattaatgcctctcccgcaccaggccgggcttgggccctgcacagatatttccatttcttcctcactatgacactgagcaagatcttgtctccactaaatgagctcctgcgggagtagttggaaacttggaaccgtgtccagcacagaaggaatctgtgcagatgagcagtcacactgttactccacagcggaggagaccagctcagaggcccaggaatcggagcgaagcagagaggtggagaactgggatttgaacccccgccatccttcaccagaggccatgctcaaccactggggcgttctgctgcccctgcagttggcagaaaggatgttttgtcccatttccttggaggccaccgggacagacctggacactagggtcaggcggggtgctgttgtggtggggagaggcatggctggggtgggggtggggagacctggttggccgtggtccagctcttggcccctgtgtgagttgagtctcctctctgagactgctaagtaggggcagtgatggttgccaggacgaattgagataatatctgtgaggtgctgatgagtgattgacacacagcactctctaaatcttccttgtgaggattatgggtcctgcaattctacagtttcttactgttttgtatcaaaatcactatctttctgataacagaattgccaaggcagcgggatctcgtatctttaaaaagcagtcctcttattcctaaggtaatcctattaaaacacagctttacaacttccatattacaaaaaattttctataaaaaagacaacacacaacgccaaaacactaacccactacaaacatcacaataatacaaaacaaaccnnnnnnnnnnnnnnnnnnnnnnnnnnnnnnnnnnnnnnnnnnnnntttgggacccctccgcccccgcaaaaaattttccacaaacccttttcttggcggcgcgccgcccaaaacaggaaaggcgaaactgggccccaaccttttctctccaagaaaaaaccccggcacctacaaatcagcggcctcgggtttcccacacaacaaaaacaaccccccggtccggccacccgagggttatcctaaacaacccccaaaaaggggatcctccggcgcgccccttactgggannnnnnnnnnnnngggaagtcccacagacgcgttccgaatattaaaaattaaacctgccgcccgccggcagaatatttttattagaaccgggcgttnnnnnnnnnnnnnnnnnnnnnnnnnnnnnnnnnnnnnnnnnnnnnnnnnnnnnnnnnnnnnnngctatcgtgtgaaacacgccgcgctatatcgcccacgcgcctaaaatttacaccacccttttgctctccgcttacgcgncggtaatatatatatttcccgcccctggtgaataacaaccgccgaccacttagaaaaacccttcttcctccatacgccgccgcgccaccccttcanacattatctaacggt

SEQ ID NO: 357055 - DNA, 1577 bp, Homo Sapiens
atcaggccaaatcggccgagctcgaattcgtcgagagcgggatttcctgtagtgaatcaggcaccggagtgcaggttcgggggtggaatccttgggccgctgggcaagcggcgagacctggccagggccagcgagccgaggacagagggcgcacggagggccgggccgcagccccggccgcttgcagaccccgccatggacccgttcctggtgctgctgcactcggtgtcgtccagcctgtcgagcagcgagctgaccgagctcaagttcctatgcctcgggcgcgtgggcaagcgcaagctggagcgcgtgcagagcggcctagacctcttctccatgctgctggagcagaacgacctggagcccgggcacaccgagctcctgcgcgagctgctcgcctccctgcggcgccacgacctgctgcggcgcgtcgacgacttcgaggcgggggcggcggccggggccgcgcctggggaagaagacctgtgtgcagcatttaacgtcatatgtgataatgtggggaaagattggagaaggctggctcgtcagctcaaagtctcagacaccaagatcgacagcatcgaggacagatacccccgcaacctgacagagcgtgtgcgggagtcactgagaatctggaagaacacagagaaggagaacgcaacagtggcccacctggtgggggctctcaggtcctgccagatgaacctggtggctgacctggtacaagaggttcagcaggcccgtgacctccagaacaggagtggggccatgtccccgatgtcatggaactcagacgcatctacctccgaagcgtccctgatgggccgctgctttgcgctggtggaccacaggcatctacacagcctggactttggttctctccaggaaggtagcccagcactgtgaagacccagcaggaagccaggctgagtgagccacagaccacctgcttctgaactcaagctgcgtgtattaatgcctctcccgcaccaggccgggcttgggccctgcacagatatttccatttcttcctcactatgacactgagcaagatcttgtctccactaaatgagctcctgcgggagtagttggaaagttggaaccgtgtccagcacagaaggaatctgtgcagatgagcagtcacactgttactccacagcggaggagaccagctcagaggcccaggaatcggagcgaagcagagaggtggagaactgggatttgaacccccgccatccttcaccagagcccatgctcaaccactgtggcgttctgctgcccctgcagttggccgggggtcagctcttggcccctgtgtggagtgagtctcctctctgagactgctaagtagggggagtgatggttgcccagacaaattgagataatatctgtgagggggctgatgagtgattgacacccagcactctctaaatcttccttgggaggattatggggccctggaattcctacaggtttcttacgggttttgggatcaaaaatccctattctttctggaaaacagaaattggccaagggcagcggggatcctcgtatacctttaaaaagcccgtccc

SEQ ID NO: 357056 - DNA, 2881 bp, Homo Sapiens
  misc_feature (1019)..(1019): n is a, c, g, or t
  misc_feature (1023)..(1023): n is a, c, g, or t
  misc_feature (1319)..(1319): n is a, c, g, or t
  misc_feature (1430)..(1431): n is a, c, g, or t
  misc_feature (1434)..(1434): n is a, c, g, or t
  misc_feature (1436)..(1436): n is a, c, g, or t
  misc_feature (1438)..(1440): n is a, c, g, or t
  misc_feature (1445)..(1446): n is a, c, g, or t
  misc_feature (1457)..(1458): n is a, c, g, or t
  misc_feature (2004)..(2004): n is a, c, g, or t
  misc_feature (2169)..(2169): n is a, c, g, or t
  misc_feature (2207)..(2207): n is a, c, g, or t
  misc_feature (2483)..(2483): n is a, c, g, or t
gtcggggtttcatcagagctagggagcgacagtcgggaacagcgagtctgccgaagccggctgttgtgtgagggtgtgagacggcggggcggtgaggggccaccgcggcttgggggatagtgcgtgtggggttgaccgtgtgtctgcttgagaggctgtgaagatatggggggcagatatgggagaaatgctcgggcctgaagtccccagcccaccgtgctcaagagtagcggacgttttgccaccatccttgtctgtgctactgtctgctgcagcttccgtgccccgttctcctggagcaggcaagacctggagtgagggcgtaaaagcggcttgcattcaattagcagcgaagctcgcgggcgctggcgggacaggcgcgtgaggccacaacacatgcgtgtatcttgcttgggctatcttccctgctctgccacgccgggtctggagaaggggtttcagccccaggacatttactgagagtcggcgaatattgggagccgcgatgttcccccttcgggccctgtggttggtctgggcgcttctaggagtggccggatcatgcccggagccgtgcgcctgcgtggacaagtacgctcaccagttcgcggactgcgcttacaaagagttgcgtgaggtgccggaaggactgcctgccaacgtgacgacgcttagtctgtccgcgaacaagatcactgtgctgcggcgcggggccttcgccgacgtcacacaggtcacgtcgctgtggctggcgcacaatgaggtgcgcaccgtggagccaggcgcactggccgtgctgagtcagctcaagaacctcgatctgagccacaacttcatatccagctttccgtggagcgacctgcgcaacctgagcgcgctgcagctgctcaaaatgaaccacaaccgcctgggctctctgccccgggacgcactcggtgcgctacccgacctgcgttccctgcgcatcaacaacaaccggctgcgtacgctggcgcctggcaccttcgacgcgcttagcngctngtcacacttgcaactctatcacaatcccttccactgcggctgcggccttgtgtggctgcaggcctgggccgcgagcacccgggtgtccttacccgagcccgactccattgcttgtgcctcgcctcccgcgctgcagggggtgccggtgtaccgcctgcccgccctgccctgtgcaccgcccagcgtgcatctgagtgccgagccaccgcttgaagcacccggcaccccactgcgcgcaggactggcgttcgtgttacactgcatcgccgacggccaccctacgcctcgcctgcaantggcaacttcagatccccggtggcaccgtagtcttagagccaccggttctgagcggggaggacgacggggttggggcggaggaaggagagggagaaggagatggggatttnntgncncnnncccanncccaaacgccnnctccagcacccgcttggccggcgcccccagccacaccgagcttcctggccctcgcaaatggctccctgttggtgcccctcctgagtgccaaggaggcggacgtctacacttgccgtgcacacaatgagctgggcgccaactatacgtcaatacgcgtggcggtggcagcaaccgggcccccaaaacacgcgcctggcgccgggggagaacccgacggacaggacccgacctctgagcgcaagtccacagccaagggccggggcaacagcgtcctgccttccaaacccgagggcaaaatcaaaggccaaggcctggccaaggtcacaattctcggggagaccgagacggacccggaggaagacacaagtcagggagaggaggccgaagaccaaatcctcgcggacccggcggaggagcagcgctgtggcaacggggacccctctcggtacgtttctaaccacgcgttcaaccagagcgcagagctcaagccgcacgtcttcgagctgggcgtcatcgcgctggatgtggcggagcgcgaggcgcggngtgcagctgactccgctggctgcgcgctggggccctgggcccggcggggctggcggagccccgcgacccgggcggcgacccctgcgcctactctaatctgtgtccagcggggggcggcgcggcagtgcagtggtcccccgtagaggaaggcgtcaacgcctactnggtttccgcggcctgcggccgggtaccaactactccgntgtgcctggcgctggcgggcgaagcctgccacgtgcaagtggtgttttccaccaagaaggagctcccatcgctgctggtcatagtggcagtgagcgtattcctcctggtgctggccacagtgccccttctgggcgccgcctgctgccatctgctggctaaacacccgggcaagccctaccgtctgatcctgcggcctcaggcccctgaccctatggagaagcgcatcgccgcagacttcgacccgcgtgcttcgtacctcgagtccgagaaaagcntacccgcaggcggcgaggcgggcggcgaggagccagaggacgtgcagggggagggccttgatgaagacgcggagcagggagacccaagtggggacctgcagagagaggagagcctggcggcctgctcactggtggagtcccagcccaaggccaccaagaggagttcgaggcgggctttgagtacagcgatccggttggccctgtggcgcccgaggcggtcaacaatcgcccagaagattaatgggcaccttcagggcagaacgggaggttttgaaccttccggcccgtttcgggcccgccccattctccggaacttccaccttagggttgcccttgggaacccccatctcttaaggcctggcaagggacttatatgttcccccggttccccaaacctt

SEQ ID NO: 357057 - DNA, 1182 bp, Homo Sapiens
  misc_feature (859)..(863): n is a, c, g, or t
agcggctggtacggtccggaattacgggatatcgtcgacccacgcgtcgagctgaacccctacccaaccccgtctccaccacctgctgctgtggcccagcgcacagcctttggacgcgatgccctccctgagctgcagcgccattttgcccatagccccgctgacagagatgaggtggtccaggcaccttctgcccgacccgaagagagtgagcttttgctacccacagaacctgactctggctttcccagggaggaagaagagctgaacctgcctatcagtcctgaggaagagcgccagagcctgctgcccattaacaggggcacagaggaggggccaggcacttcccacaccgagggcagggcctggccactccccagctccagtcgcccccagcgcagccccaagaggatgggggttcaccacctgcaccgcaaggacagcctgacccaggcccaggagcagggcaacctgctcaactagggcccctgctggccttcctgccattgctgcaccaggactgcaaggagtccccacaccttggcagctcagggtccccagtccaagcccttgacctctcctctatccagacccgcacagctgtttcctgtgtggatggggtcaggttgtgggccatgccaggcctgtcagctgcgttgactgactgcagcagcttgcctcatggttttccctttttcttagaatatttattcttcagaggtaacatgcagttgggtctcaagacctttcctccaatcagcccaacccagcccagactgggcttttctggggagctgaggagtttatcagtattcatcttccatcctttcatagtcacaagtttgtcattctgtaactnnnnngggggtgatggtgtaattgttaacctcatttccgtttcctacctgtttgcttccccccccagtcctccgcatgagctgttgccctccaggggcctggcacagctggccttggggacgagggagaggactgattcagggccccctcagctgtctcctccctccctctggaaaggagggtggggctcaggggcctcaagctgggctctgtgtgaggcctggcccccactcccaaccttggctctagactgttactcttaagctttgagaaattttcacattgatgactattttaaaatcaaataaaactattattactggt

SEQ ID NO: 357058 - DNA, 1573 bp, Homo Sapiens
  misc_feature (706)..(724): n is a, c, g, or t
gtttctgaaatctctgtttccttagtagaaatgaccttgacaacttattttctgagataccactaggcctactgtctttcatgccattttatataaacattttgatagatactctgtcttttgttttttatctcttctcttttcaagagtcacttgactttttcaaatattcttaaaagatagatttagttattgtattttggtctacaattttggacttggcagtttgttttactaatgcagaattattctttttgtttcaaacatagtttgccatcatctggctactacctaatcatgttgtactagttattgtggaaagaaaattgtacatacatttccttgtcctttgggagatgtctttgagtcaaacccacaagcatgaactctcacctgaaagaaaactggaaaaggagaaactttaaatcagtatgttttgaaaggaagagatttccagactttttaaagcaaattggaatcgttttatttttttgtttgggccttaggcacaatagaagcaaatgttgcaatattaaatataatagggagagttcactgtttcctgggacattgtggtcatgtccttaatccttcattgtgatgccccttcttggagttggcattttgtgacaattcatagagatcttgcagcaatatttggctattggttttattaacttaaaattcaacagaaatggagtaattnnnnnnnnnnnnnnnnnnncagagaagaattgcaaaatctgaagtggaatggcacttccttgggtatgtaagggttgtttttagataaaactcccgatttgttcttcctacactttaatagtctcaaattctttctggggaagcaacgtcagtgtctacctccacagtaactatgatataggaaattgtcctttcagtggtttctaggtataacaaacaagccgttaaaaatgagtgaccattttgtaggttacagcctcagcaatctgtgtcatttgaaagcaaatatcctgatatttttaaataaggtgagcagggcaggcaggaaaccaatatttagtacttttgtgattaaacattctagaccaggcttgttgatatgtatgccaatagcctagaatttttggcttagtgtaaaataaaaatgtcttttctattgtggtctgatatccgtttctgtaataagatcagtttgttgtcctctgtgcaccagtggttttgcccttaattttttttggctagcatcaccaagatctgtcatccagagctgctgagaaaaatacatgttgccaaacttttcttaaaattgtgctgccagtggtattttcccagatgtgaaaaataataatctaataaaggattaatatctaataacaataccattgttgaacatgctcatggaatgtccaccttcttctgattccttttttgtatttgaaaatgcaatggtgtgttccaaattattgttggtgttgttaatgtcatgactctcctttgaatagaataaaataaccccttttgttttgtgttttctactgaattagattttcctctagtcctatgtgaataaaaagctatttgaaataaa

SEQ ID NO: 357059 - DNA, 451 bp, Homo Sapiens
  misc_feature (11)..(11): n is a, c, g, or t
  misc_feature (32)..(32): n is a, c, g, or t
  misc_feature (43)..(43): n is a, c, g, or t
  misc_feature (52)..(52): n is a, c, g, or t
tttcctaatgnggtctgaaaacccgtttctgnaaaaagggacngtttgttgncccctgtgccaccagtggttttgccccttaaaatttttttggcctagcatcacccaagatctgtcatcccagagctgcctgagaaaaatacatgttgcccaaacttttccttaaaattgtgcctgcccagtggtattttcccagatgtgaaaaataataatctaataaaggattaatatctaataacaataccattgttgaacatgcctcatggaatgtccaccttcttctgattcctttttttgtatttgaaaatgcaatggtgtgttccaaattattgttggtgttgttaatgtcatgactctcctttgaatagaataaaataaccccttttgttttgtgttttctactgaattagattttcctctagtcctatgtgaataaaaagctatttgaaat

SEQ ID NO: 357060 - DNA, 461 bp, Homo Sapiens
ttccttctccctgggaaggatggcaggtgcttggagccaggcctgtcttgagagccagggctctgggtcttcctcctccagtgccctgttccacgccttcagtgcacaaagcactcccctcctgggatctcttcagggatccccgggatgcaaactggccagggattagaattccacatttgagcaaacagactgagagtggagaagcacccagttggacatccttttaggtgttcctggcagaggcccttgctacttgtctgtgcccaaaggccctagagggtcctagatgtgggacaaggtctcagcagggctccagtcccaggcctggaaacagctgggggtgggggaagctggctgggtgggtgtggttatcttttcccagcttgtggctccgaggtgacagaaccaatctcaggaggctttgtttggttaataaaatctactgaatggtttatttt

SEQ ID NO: 357061 - DNA, 895 bp, Homo Sapiens
  misc_feature (97)..(97): n is a, c, g, or t
gaggtggttctccaataccatgccaagtgacaagacatgtaactgtgtgtgttccaaatccaaatatgtatcatcaattcctcagagagtgccttcnaaaaggcatgtgtaggagataatgcaaatgcttaaaacgaggcccgcccaaagcctacgagtcatccacagtgagtcaaggcaaagacttaaggcatatgttcagtatttcatgactccagttatttgactgaaatgaaagatttcgtttgcttcaagtaactgagcaactgacttgaatcttcactttactagaccagactttgacaacaaactatctaacgtaggttatactttaagcatgtatgaattagaccctttccaaaattctacacatctcttcaggattagcatgtggtacaattaattgaagttatatcaaaaactttttacttgttcagttaatttcccaaaatatattttatctgatcacctgaaaacacatgcaatattactcatcatcaatgtaaacatttttaaaaatacatttttaaatcaaaggggtttattaggaaatgtcataataaaatatgcaatctttatatgtctttttaaaaataaaacatgaaaacaagaactatgaaaaaagcaactatgatggaggtaaacataatgtattatgatgaaactattgttctttatttcttggaagaatttattaagaaatagaggccagttatcttttcaggacagcagctcttacaggtagtaaaaaaacaaatctctcttgtttttcaatctgtgccatgactttaaaaattgatccttgatcatatcaaatttctgcttttcgtgcactgctctggctgtatttgttccatcaaaaggttcttctacacagatgtatttatttctccat

SEQ ID NO: 357062 - DNA, 1144 bp, Homo Sapiens
  misc_feature (25)..(25): n is a, c, g, or t
  misc_feature (968)..(968): n is a, c, g, or t
  misc_feature (978)..(978): n is a, c, g, or t
  misc_feature (981)..(982): n is a, c, g, or t
  misc_feature (984)..(984): n is a, c, g, or t
gtgaactgtgctggtgcatcacggntggtgcatgggctcgccgtgtctcagcctctgccagcgccaaaaaaagcaaaagagcctcccaccagagccgggaggaaaaggccccctgcaatgtggtgacacctccccctttcacactggatccatcttgagccacagtcactggattgactttgctgtcaaaactactgacagggagcagcccccgggccgctggctggtgggcccccaatgacacccatgccagagaggtggggatcctgcctaaggttgtctacgggggcacttggaggacctggcgtgctcagacccaacagcaaaggaactagaaagaaggacccagaacggcttgctttcctgcatctctgtgaagcctctctccttggccacagactgaactcgcagggagtgcagcaggaaggaacaaagacaggcaaacggcaacgtagcctgggctcactgtgctggggcacggcgggatcctccacagagaggaggggaccaattctggacagacagatgttgggaggatacagaggagatgccacttctcactcaccactaccagccagcctcagaaggccccagagagaccctgcaagaccacggagggagcgacacttgaatgtagaataggcagggggccctgccccaccccatccagccagaccccacgctgaccatgcgtcaggggcctagaggtggagttcttagctatccttggctttcagagccagcctggctctgccccctcccccatgggctgtgtcctaaggcccatttgagaagctgaggctagttccagaaaacctctcctgacccctgcctgttggcaggcccactccccagccccagccccttccatggtactgtagcaggggaattccctccccctccttgtgccttctttgtatataggcttctcacggcgaccaataaacagctcccagtttgtaaaaaangcacccgaanccnncnaactccagggctcctatgtcgggggcgggaaaaagaagtaatgaaaacggcacatgggcaattagcttgttccctgcaaccagcttttcttggaacaaaggggggaaaatcgggccgggtccccccaaaaggggggtccctattaaatttccataagccc

SEQ ID NO: 357063 - DNA, 2934 bp, Homo Sapiens
tagcgaggcctgggtggcgaattcggtacgagggcctttggtttatctgtggccagcattggtgacatcaaccaggatggatttcaggatattgctgtgggagctccgtttgaaggcttgggcaaagtgtacatctatcacagtagctctaaggggctccttagacagccccagcaggtaatccatggagagaagctgggactgcctgggttggccaccttcggctattccctcagtgggcagatggatgtggatgagaacttctacccagaccttctagtgggaagcctgtcagaccacattgtgctgctgcgggcccggcccgtcatcaacatcgtccacaagaccttggtgcccaggccagctgtgctggaccctgcactttgcacggccacctcttgtgtgcaagtggagctgtgctttgcttacaaccagagtgccgggaaccccaactacaggcgaaacatcaccctggcctacactctggaggctgacagggaccgccggccgccccggctccgctttgccggcagtgagtccgctgtcttccacggcttcttctccatgcccgagatgcgctgccagaagctggagctgctcctgatggacaacctccgtgacaaactccgccccatcatcatctccatgaactactctttacctttgcggatgcccgatcgcccccggctggggctgcggtccctggacgcctacccgatcctcaaccaggcacaggctctggagaaccacactgaggtccagttccagaaggagtgcgggcctgacaacaagtgtgagagcaacttgcagatgcgggcagccttcgtgtcagagcagcagcagaagctgagcaggctccagtacagcagagacgtccggaaattgctcctgagcatcaacgtgacgaacacccggacctcggagcgctccggggaggacgcccacgaggcgctgctcaccctggtggtgcctcccgccctgctgctgtcctcagtgcgcccccccggggcctgccaagctaatgagaccatcttttgcgagctggggaaccccttcaaacggaaccagaggatggagctgctcatcacctttgaggtcatcggggtgaccctgcacacaagggaccttcaggtgcagctgcagctctccacgtcgagtcaccaggacaacctgtggcccatgatcctcactctgctggtggactatacactccagacctcgcttagcatggtaaatcaccggctacaaagcttctttggggggacagtgatgggtgagtctggcatgaaaactgtggaggatgtaggaagccccctcaagtatgaattccaggtgggcccaatgggggaggggctggtgggcctggggaccctggtcctaggtctggagtggccctacgaagtcagcaatggcaagtggctgctgtatcccacggagatcaccgtccatggcaatgggtcctggccctgccgaccacctggagaccttatcaaccctctcaacctcactctttctgaccctggggacaggccatcatccccacagcgcaggcggcgacagctggatccagggggaggccagggccccccacctgtcactctggctgctgccaaaaaagccaagtctgagactgtgctgacctgtgccacagggcgtgcccactgtgtgtggctagagtgccccatccctgatgcccccgttgtcaccaacgtgactgtgaaggcacgagtgtggaacagcaccttcatcgaggattacagagactttgaccgagtccgggtaaatggctgggctaccctattcctccgaaccagcatccccaccatcaacatggagaacaagaccacgtggttctctgtggacattgactcggagctggtggaggagctgccggccgaaatcgagctgtggctggtgctggtggccgtgggtgcagggctgctgctgctggggctgatcatcctcctgctgtggaagtgcggcttcttcaagcgagcccgcactcgcgccctgtatgaagctaagaggcagaaggcggagatgaagagccagccgtcagagacagagaggctgaccgacgactactgagggggcagccccccgcccccggcccacctggtgtgacttctttaagcggacccgctattatcagatcatgcccaagtaccacgcagtgcggatccgggaggaggagcgctacccacctccagggagcaccctgcccaccaagaagcactgggtgaccagctggcagactcgggaccaatactactgacgtcctccctgatcccaccccctcctcccccagtgtcccctttcttcctatttatcataagttatgcctctgacagtccacaggggccaccacctttggctggtagcagcaggctcaggcacatacacctcgtcaagagcatgcacatgctgtctggccctggggatcttcccacaggagggccagcgctgtggaccttacaacgccgagtgcactgcattcctgtgccctagatgcacgtggggcccactgctcgtggactgtgctggtgcatcacggatggtgcatgggctcgccgtgtctcagcctctgccagcgccaaaacaagccaaagagcctcccaccagagccgggaggaaaaggcccctgcaatgtggtgacacctccccctttcacactggatccatcttgagccacagtcactggattgactttgctgtcaaaactactgacagggagcagcccccgggccgcctggctggtgggcccccaatgacacccatgccagaagaggtggggatcctgcctaaggtttgtctacggggggcacttgggaggacctggcggggctcagaccccaacagcaaaggaaactagaaaagaaggacccccagaaacgggcttggcttttccttgcatcctcttggtgaaagccctcc

SEQ ID NO: 357064 - DNA, 487 bp, Homo Sapiens
gaaaaaaaatcgttagcctaaaaccaactctctctaaatttaaaagagtgattatttatccttagtatttatagaagtatgagattatcagaaggtgcgatgcacaatgctcattattttatcctagtacaagacacgtataacatctaacagtaaagaagatggaatctttctataaaaacaattctgttattaatagttgactgacttcagtaactttgaggagtagaatgaaacttattaggcaagatctttccacatacactacattgtattgttcaaaattcatagaaattacttgcaatatattgatttaagccttatgtagtgactgttgctatatttgaagtagcatttttagtttgctgtttttcctcactgcttaatcctacaaaaaccagccatctgcctaaaaaataaaagagcaaaaatgaatcagtgcaaccggtatacgaaaaataataattattaataaaactgtaaaggg

SEQ ID NO: 357065 - DNA, 1640 bp, Homo Sapiens
  misc_feature (1177)..(1185): n is a, c, g, or t
  misc_feature (1198)..(1198): n is a, c, g, or t
  misc_feature (1208)..(1208): n is a, c, g, or t
cgctcccgcaactgggggcacggcagaggaggcaggccgacggcggtgggcggtgcgttgcgcaggctcgggcctcccgctcgccgctgcgttgggaccgcgcagcccggtaactgcgcacggctggcctcccggagtcctgcgccgtcgctcctcctggacccgggttcccaggacaacgcctcccggaacgcagggagcaggccgaggccgccgcgtgggcctgcagcgcctcgccgctctctcttccccaggcccgcactcccacttgggctccagggccccagggctgacgttccccccagcttagaccctgagtcgttttcccccgtttcccggctgaattaggttcttcttctccacaggtgtgtgcagtggcctcagggatccggaaagtctaggactgaacttctcctaacatccagtaatggggacctggaacctgggcgtactagagtgccgcgcgtagggctccaggtcgctggcttctgcgctttcttcctctccaaagttgagtatctcctatctgtgtcctcatacatactgccgcctgaggtgccatggcccccaagccgggggccgagtggagcacagccctgtcccatctggtgctgggagtggtgtctctgcacgcagccgtgagcacagccgaggcaagtcgactggggctgctgcagggtgcgcatccccatacctcccaaaccacaatggacctagtttcctgaattagagacaggttggtgggaagtgcgtctaagaccaggtctccatggaagccccaaaacctttcctgtttaaaagggtgaccccgcctctttttcccacgtgttctctcctaccctgtgttgacaggcaagtcgaggggctgctcgctggcttcctgctccaggtcttggctggcaacaccacgctggccccagggctgagcacacatgaagactgccttgctggaacctgggaccgccaccggcatcccccttccggccttcgatttccactgggtgaatggggaccgctcctctgccaacctgctcctgggaggaggcatggtgctggcagtggctggcggccacctcggccctgagggccgctctgtggctggtcaggcaatgctgttggtggtcgcagtgaccatcctcattgtagctgtcttcacggccaacacttatgggatgtnnnnnnnnncgatgctgggtgnggcaggcctnctgagccggctggaggaggacaggctgctgctgctaccgaaggaggatgtctgtcgctgggccttggctgtaggcagctgggcttactgccgggccctgcatacacagcgcctccagtgggagtgacagttggatacagccaggcagggtttctgccctgccgaacactttccctcccacctgcctgctcctggcgccttctccctaggggtagactcttctgcctactgaagtgggtttgctgcacattgactggtcaggggcagagtctgggtgctgtcctttggccacgtgtggggacttgtctagaccagaatgaaagggacagggtcccagacacgtttgggggtcctgattctgggctggacacggttgtggatccagagaagaggcctagtctccaataaatcttaggaattttgcaggaatatg

SEQ ID NO: 357066 - DNA, 2062 bp, Homo Sapiens
  misc_feature (1883)..(1916): n is a, c, g, or t
  misc_feature (1958)..(1958): n is a, c, g, or t
ggagaaaaaagaagcatagctggtatagaccagtggctagaggtgttctgtgagcaggaggaaaagtgggtatgtgtagactgtgtgcacggtgtggtgggccagcctctgacctgttacaagtacgccaccaagcccatgacctatgtggtgggcattgacagtgacggctgggtccgagatgtcacacagaggtacgacccagtctggatgacagtgacccgcaagtgccgggttgatgctgagtggtgggccgagaccttgagaccataccagagcccatttatggacagggagaagaaagaagacttggagtttcaggcaaaacacatggaccagcctttgcccactgccattggcttatataagaaccaccctctgtatgccctgaagcggcatctcctgaaatatgaggccatctatcccgagacagctgccatccttgggtattgtcgtggagaagcggtctactccagggattgtgtgcacactctgcattccagggacacgtggctgaagaaagcaagagtggtgaggcttggagaagtaccctacaagatggtgaaaggcttttctaaccgtgctcggaaagcccgacttgctgagccccagctgcggggaagaaaatgaccctgggcctgttttggctactgggcagacagaaggagtatcagcccccagtggccgtggacgggaaggtgccccggaacgagtttgggaatgtgtacctcttcctgcccagcatgatgcctattggctgtgtccagctgaacctgcccaatctacaccgcgtggcccgcaagctggacatcgactgtgtccaggccatcactggctttgatttccatggcggctactcccatcccgtgactgatggatacatcgtctgcgaggaattcaaagacgtgctcctgactgcctgggaaaatgagcaggcagtcattgaaaggaaggagaaggagaaaaaggagaagcgggctctagggaactggaagttgctggccaaaggtctgctcatcagggagaggctgaagcgtcgctacgggcccaagagtgaggcagcagctccccacacagatgcaggaggtggactctcttctgatgaagaggaggggaccagctctcaagcagaagcggccaggatactggctgcctcctggcctcaaaaccgagaagatgaagaaaagcagaagctgaagggtgggcccaagaagaccaaaagggaaaagaaagcagcagcttcccacctgttcccatttgagcagctgtgagctgagcgcccactagaggggcacccaccagttgctgctgccccactacaggccccacacctgccctgggcatgcccagcccctggtggtgggggcttctctgctgagaaggcaaactgaggcagcatgcacggaggcggggtcaggggagacgaggccaagctgaggaggtgctgcaggtcccgtctggctccagcccttgtcagattcacccagggtgaagccttcaaagctttttgctaccaaagcccactcaccctttgagctacagaacactttgctaggagatactcttctgcctcctagacctgttctttccatctttagaaacatcagtttttgtatggaagccaccgggagatttctggatggtggtgcatccgtgaatgcgctgatcgtttcttccagttagagtcttcatctgtccgacaagttcactcgcctcggttgcggacctaggaccatttctctgcaggccacttaccttcccctgagtcaggcttactaatgctgccctcactgcctctttgcagtaggggagagagcagagaagtacaggtcatctgctgggatctagttttccaagtaacattttgtggtgacagaagcctnnnnnnnnnnnnnnnnnnnnnnnnnnnnnnnnnntacgaattgaaattaaggaaatgttagtaaaatagatcagtngtaaactagattgtattcattactagataaaatgtataaagctctctgtactaggaggaatgacttttatacattttgagaaaataataaagcatttatctaaa

SEQ ID NO: 357067 - DNA, 362 bp, Homo Sapiens
  misc_feature (183)..(231): n is a, c, g, or t
caagttcactcgcctcggttgcggacctaggaccatttctctgcaggccacttaccttcccctgagtcaggcttactaatgctgccctcactgcctctttgcagtaggggagagagcagagaagtacaggtcatctgctgggatctagttttccaagtaacattttgtggtgacagaagcctnnnnnnnnnnnnnnnnnnnnnnnnnnnnnnnnnnnnnnnnnnnnnnnnnaaggaaatgttagtaaaatagatcagtgttaaactagattgtattcattactagataaaatgtataaagctctctgtactaaggagaaatgacttttataacattttgagaaaataataaagcatttatct

SEQ ID NO: 357068 - DNA, 1702 bp, Homo Sapiens
gctcagttctcggcgaatagggtctggtgttgtatggcatgttcgtcttcttgcccatgtttggacttgtgcagatctctgtttctggtgatggtgaccactagcctccggatctcagttactacggacgcccaccccagaggcgattctcctggcccctcgccattgcttcttgctttgcccggacccccccacaggctggcagcccgccagttgggccttagtggccacaccactgtggtccctctatggcgctcagctcacagctgctcaaatgggtacaggtgggaactgctgcttcttttccctttggtcttcttggcccacccttcagcttctgctttcttcatcttctcggtttgagccaggagcagccagtatcctgccgcttctgcttgagagctggtcccctcctcttcatcagaagagagtccacctcctgcatctgtgtggggagctgctgcctcactctggacaggtggcagtggtgggaggacacaggcgagggttagtaatcagataccaggaagccccatgaagaggcagcaagttcccagcctgccctaagctgtgtaactctgggaggacaagggcatgggacagggcagggagagagccccagacccttcttactgagccgtcccagcctggggtgcatccaagcagacactggagcacctgctacgagctgagtgcaggggaacacaaggatgatggctgggcaggaagctgccctctaggagcacactgcctcatctggggaagcctgtgattcgtgccttgcatttgctacctcatttctggaccaaagcacatgatgtcttgaacgggcaagatgcacagttcagccctcggagccctaagatctgaggcggcactccctgccagctgggatggctagggagggtttggatggagaaggcggcaaggagctggtcagaacataaagtcagatgaagggcttttctccaccagagggactggaatgaggagcgtgacaaaaaatgttgaaaggcaaacaggcagcacagagggttggagagagggaacaaaacatgccagagcagtttctgctgtgtctgacacagcactgactataccatgtaactgggcctagggtccatctgccccagggaggggcccccttgagggctgcatgtcaaattcacacctgtgtccaagcctggcctggcacatggcaggtgctgtgagagaggtactgagcgggccactgcaggcctgcagcatggtcacaggcactgggaacactggaaggcggaagggtgcaccaaatgcaggacacttggccctccctaatgtgttcagcgccaaatcagacccatggcattgctcatgtggacagtagaaacggggacactgggacagggcttggggcagaagagccagctgaggcctcactccagggacacctttcccaacaaggtaaaaacaagcggccttagagacagaagactgaggtgtcctaacacaaagctatccctgacttgaggctggggcagaatctgggccaggcctttctgagctgcatctccaagaaactgaccctgagcttgtcttctctgcaaagaacctgcactgaccttgggcccgtagcgacgcttcagcctctccctgatgagcagacctttggccagcaacttccagttccctagagcccgcttctcctttttctgcaggcaaa

SEQ ID NO: 357069 - DNA, 1639 bp, Homo Sapiens
cgcgaccgccggggacgagcttggaggaaaaggaaccgggagccgcccacccgggggcgctctccggacccccaggtcctagcgcgcggcccttaccgatgcctgggcgcccggatttcggcagcggatcgcctttccgggttggcggcccgcctgattgggaacagccggccggttgccgggggaacgcgggagtcgggcccgacctgagccacgcgggcttggtgcccacctgtgcgcgccgcctgcgaagaaggaacggtctagggagaaggcgccgccggccgcccccgtccccaccgcggccgtcgctggagagttcgagccgcctagcgcccctggagctccccaaccatgaagcccaacttctccctgcgactgcggatcttcaacctcaactgctggggcattccgtacttgagcaagcaccgggccgaccgcatgaggcgcctgggagactttctgaaccaggagagcttcgacctggctttgctggaggaggtgtggagtgagcaggacttccagtacctgagacagaagctgtcacctacctacccagctgcacaccacttccggagcggaatcattggcagtggcctctgtgtcttctccaaacatccaatccaggagcttacccagcacatctacactctcaatggctacccctacatgatccatcatggtgactggttcagtgggaaggctgtggggctgctggtgctccatctaagtggcatggtgctcaacgcctatgtgacccatctccatgccgaatacaatcgacagaaggacatctacctagcacatcgtgtggcccaagcttgggaattggcccagttcatccaccacacatccaagaaggcagacgtggttctgttgtgtggagacctcaacatgcacccagaagacctgggctgctgcctgctgaaggagtggacagggcttcatgatgcctatcttgaaactcgggacttcaagggctctgaggaaggcaacacaatggtacccaagaactgctacgtcagccagcaggagctgaagccatttccctttggtgtccgcattgactacgtgctttacaaggcagtttctgggttttacatctcctgtaaaagttttgaaaccactacaggctttgaccctcacactcgcacccccctctctcatcaccaagccccgatggccactctgtttgtgaagcacagccccccacagcagaaccccaactctacccacggaccagcagagaggtcgccgttgatgtgtgtgctaaaggaggcctggacggagctgggtctgggcatggctcaggctcgctggtgggccaccttcgctagctatgtgattggcctggggctgcttctcctggcactgctgtgtgtcctggcggctggaggaggggccggggaagctgccatactgctctggacccccagtgtagggctggtgctgtgggcaggtgcattctacctcttccacgtacaggaagtcaatggcttatatagggcccaggctgagctccaacatgtgctaggaagggcaagggaggcccaggatctgggcccagagcctcaaccagccctactcctgggggcagaaggagggggacagaactaagaacataaaggttggcctttta

SEQ ID NO: 357070 - DNA, 1781 bp, Homo Sapiens
  misc_feature (186)..(186): n is a, c, g, or t
  misc_feature (252)..(252): n is a, c, g, or t
  misc_feature (583)..(632): n is a, c, g, or t
  misc_feature (1388)..(1388): n is a, c, g, or t
  misc_feature (1714)..(1714): n is a, c, g, or t
atttaggaggatttcccaatttggtgcccggaaaattaagggaaccattttttccccaccaacagggaagcgagcctaagattttggccttttttaatatcctatatccatatatcaccccccataatgtccatttaaccaaaaaagctatgaatccactcacagcttccccatattgcacaacangatacattacgagaaagttacatagttataaggtgagtactatatggcaataggctaagacaatcntgagttctatcaagtaaagaatgcggctcataactaaaaacaaatccaaagactatatgttagaaagttttaaaaaatgtgcatatttattgatacaaatgtgaagcaaggctgaaattcactttggaacttgctatggcaatcaattgttatgacggtgctttccactcagcatagtgcattttagttactgtttttgcaagtactgagtaacagaaatattcagctgtcaacagaaggtaagaaaaactggtgatgcagtacaatgtttcactaacaaattgaactcactgtgagagcttctactggctctaggtctgaactaaatatnnnnnnnnnnnnnnnnnnnnnnnnnnnnnnnnnnnnnnnnnnnnnnnnnnttaagccttagctgattacaaattaaagtcattacaacaacttagaaaaattatattttcagaagcagcatacatatacacaaatataagagttaaagcttttctgagcttggtttcatggactagttataaggtcccatagtggaatcaaggataaaagagtatttggtttcagcaggtaatatcattgctactacacctattgagcactatgaaaacattaagaaatatctaatatctcttaatgccttagtttaaatactcatatatcaaagtagactgttactacatctagaaatgtaaatgtcgaagttttccttgtatgaagtgattaaaaaaatacagcaaactgaatgccttcacatcattcaaaatgatttaaagaaaaatacgcacaaaataactatctcccacttctgttttttctttgttttacttaataaatttcttagaataagctaacaaagatttgcatgaaattagaggtttagtctttttgttgttttaacagtggtaagcattctagagctgaggctattcataatcttttgatattctgttcttaataaatagcaagaacaaactatgaaataaaccagaaaagctaacacaacaaaatgagcagataggtgtaaaacaagcctctatgcacatgccacacaatgcgtatatgcaaacatgctacataaaataacttcctagagggggtagtgacagttcccttcaagccggaacctttgatagcctgttcccccnaatatcagtaaatggaaagatgaagaagaaagtgctgcggcttaacatgtcaaataaaaacaaacaatagcttaaaagcattatttgagtgatcagcatcacttaaaggaaaaatagaaagtggactggcaaacacgattttgtcaatcaagtacaagcatgctgtgcccagcgcagctttgctgaactacaggttcctacatgtacacccattcacatacatacccaatttccccaaatcctttaacatgtaaacaggacatttaaaactctgttttctttaatctctttagaatcatttaaaacaaaagactgaacaaaatagnaaaaaatgtaaacatcgaggagccactggcactttgattgctgccaagggttatcagtcagttcccc

SEQ ID NO: 357071 - DNA, 1807 bp, Homo Sapiens
ggcctgggtggcgaattcggcacgaggtaggtgtccagagcacgggactttctgctttcttaagaccggcgtccgcgatggcccgaataaaggaaagagcttctacgtgtgccgggcagacacgtgcagcttcgtgcgggccaccgacattcctgtttcccattgcttattgcatgaggactttgtggtagagcttcagggtttgcttctgccacaggacaagaaagaatacagattgttcttccgatgcattagaagtaaggcagaggggaaacgctggtgtggaagtattccatggcaggatcctgattccaaagaacattctgtatccaataagtctcagcatgcatctgagacatttcatcattcttccaactggctgagaaatccattcaaggtacttgacaagaatcaagaaccagctctctggaaacagctcatcaaaggtgaaggtgaggaaaagaaggctgataagaagcaaagagaaaagggagatcagcttttcgatcaaaagaaagaacagaagcctgaaatgatggagaaagacctctcatctggcctggtaccaaagaaaaaacaatctgtagttcaagagaagaagcaagaagagggagcagagattcagtgtgaggcagagactggaggcacacacaaaagagacttttctgaaattaaatctcaacagtgccaaggtaatgagcttacaagaccatctgcatcttctcaggagaaatcaagtggtaagagtcaagatgtccaaagagaatcagaaccctctgagagaaaaggttacccagcttttgcctcaaaatgttcacagtcacaactcaataagcaagccccagaaagggggacccctcaacaaggagtacacgaactggggaggctaaagaaaaaaaggcaaaggatggcccctagcatacaggcccacccaaaaaagcctgcctcaggggcatttccaagagcggccggagacccacagtgtgcctgctcctggaggaccagcggctcaggctgcaccagcagcaccagggctttccctgggtgagggccgtgaagctgccacaagcagtgacgacgaggaggaagatgatgttgtttttgtttcctctaagcctgggagccccctactctttgactcgactctggacttagagacgaaggaaaacctccaattccctgatcgaagtgtgcaaagaaaggtgtctcctgcctcaggtgtttccaagaaggtagaaccctcagacccagtagcccggcgtgtctaccttacaacacaactgaaacaaaagaagagcacactggcatcagtgaacatccaggctcttccagacaagggtcagaagttgatcaaacaaatccaggagctggaggaagtactcagtggtcttaccctttccccagagcaaggaactaatgagaagagtaacagtcaagtaccacagcagagtcacttcaccaaaactaccactggccctccccacctggtgcctccccaaccccttcctcgtcgtggtacccaacctgtgggttctctagaactaaagtctgcctgccaggtgactgctggaggatccagtcagtgctattcgagccatacaaaacaagatcacgttcatgcagtgtggaaaatcacaagtgaaagccatcgggcaactgcatcgcttacttgagtcttgtcctggtgaggacgggcgggccaaaaaactcccggtctttaagtgttcttttctccaacaccagaagcagcgtttgtttttgtttcttttggcggaaatgtcctaaccccaaagagggatcttgtcaa

SEQ ID NO: 357072 - DNA, 1323 bp, Homo Sapiens
agcggggaggcggagaagaaggcggtggtggcgggtggaggttcgagcagctgttctcgctccggagccgctgcacatttcggaatcttctgcggcttgtccatagtgtgaataaaaactaaatcacatctataattctactgaactggtcatacagacgctgccatatatgtcacagtacactgaaaaggagccagcagcaatggaccaagaatctggtaaggctgtctggcccaaaccagcaggagggtatcagacaattacaggcaggagatatggaagaagacatgcttatgtcagttttaaaccatgtatgaccagacatgaaagaagcttaggtcgggctggtgatgactatgaagtgttggaactagatgatgttccaaaggaaaattcctcaggttccagtcctttggatcaagttgattcttctttaccaagtgaacctatatttgaaaaaagtgaaacagaaattcccacttgtggttcagcattgaatcaaaccactgagagcagtcaatcctttgttgcagtacatcacagtgaggaaggcagggataccttaggaagcagtacaaatcttcataatcactctgagggagagtatattccaggagcttgtagtgcttcaagtgtccaaaatggaattgcattggttcatacagactcttatgatccagatggcaaacatggagaagataatgaccatcttcaacatttctgcagaagtcgtggaaggtagtagataccaggaatcattaggcaatacagtatttgagttggaaaacagagaggcagaggcatacactggtctttcaccaccagttccctcatttaactgtgaagtaagagatgagtttgaagagttagattctgtaccattagtgaaaagttctgctggtgatactgagtttgtccatcagaatagccaggaaattcagaggtcttctcaagatgaaatggttagtacgaaacaacaaaataatactagccaggaaagacagacagaacattcacctgaagatgcagcctgtggtccagggcatatttgtagtgaacaaaataccaatgatagggaaaagaaccatggaagcttttctgaacaggtagtgaggtcataagttagaaatctgcttagttcaagccagttggtaccaagaaacagtccgtaataggcatgaggcgaaacatagaagtttttaaagatggtgagaggttttgtaagttgaggaaagtggtttacatcacttttcaataatatgcgaagattatgttggcatagctgacttttttccctcgtgtcccccattctgtatagttttt

SEQ ID NO: 357073 - DNA, 1422 bp, Homo Sapiens
  misc_feature (773)..(773): n is a, c, g, or t
cgaccacactccaccatctcagacagcagcacctcctcttctagcagccagtcctcctccatcctggggtcgctgggcctgcttgtgtcctccagcccagcccacccgggcctatggagccctgcccacagcccctggtcatctgatatcagagcctgcgtcgaggaagatgagccagagccagaactagagacgggcacccaggctgcagtgtgtgagggggctcctgctgtgctgctgagccgcacacgccaggcctgatgactgtcagggtggcagtgcccatcatgtggctagaacaatacagagggagcagcacgccaggcctgatgactctgggggtggcggtgcccatcgcgtggctggaacgatccagagggaatagcacagcaggtgtccaggtatttcccaggattttagacattccctaacattttcaaacaaatttataactttgtcttatttaaaaaacaaaccttccacttccacccaagacaacagcataggaaacagacctaaaacaagacaaaaaagactaaacatgaaacaaaagatgtcaagacacaagacatttggcaacaaaggaccgcgatccctgagagacaggaaaacgggaggtgagcccggtgatggcctcagacctccctccgccttgagagtttgcaggcctcagtgcagggaggggcccaggaagagcccagcagcctccgtgagttgaagagaccaagtcagcaggagttggcaggtcagagtgccagagagagatgcctgcnatggggaaagactcaccagatcagcccctccagcacctagtgggttgctacccattcgcacactcaaacagggaggctaccaaggctgggagcaacctttgaaaagaccaaagatcaattcctggtactcatgtgggctggggacaggacccgttcccaccagccagactagggaaactctcaatagatcaattcctgatactcatgtgggctggggacaggacccactcccaccagccagactaggaaaactcccaatctgtgagcattaggtggagttctcagaaaatcttgcctcaggaatggggataattagccctagactgagccctgctcctgactcgcctacaaaatcataaaagcaagacctaaaatgatcaaaccattcccagataattcactttatcccagaacaaagctccagatgatctaggggttaccaaagtgtccacaccctgcaaggtaaactcacagtgcctgacctcggagtgccaggcgtgcagaggagcagccaagggcaaacactccaaggagagtcgcctggcaaagccaaccacccagagccagcgtctgtgctagaatcacagaattcaaactgtggctgaaatcgcagcccaagcgtccagaaagttaaagttaagaaccttat

SEQ ID NO: 357074 - DNA, 1685 bp, Homo Sapiens
  misc_feature (23)..(23): n is a, c, g, or t
  misc_feature (488)..(504): n is a, c, g, or t
  misc_feature (1053)..(1090): n is a, c, g, or t
ggccctgggttctccagtgtttnaagcccctccctccgtagtgcttccagggacccggccaaggtgaaggcccctcccaggtgaacccaggcctgctccctcctgtagcttgctcaagccccaagctgcttctcctgtagctgctgcaaccaatagctgctcctcccgccacagctgcatctgcagctggacctgcccgccaccggtcctcccagcagcagctgctcctgggccaggcacagctggacctcatggagcctcagcagttcgggggcccagggccggcatggggtcccctgctccacagccttccatgtgcccagcaaggaccagcaccagctcagaccccggagcagtggccggcaccggtctcgaggctgcctgtggctgctctggcctggccaccctggggtgtccctgaggtgctggctcgatgctggtcacgtgccctgtaggggccacccccgcttcaccctgagggccccctnnnnnnnnnnnnnnnnnctcgacctcagggccctgctgcccagctgccggctgggccctgcctgccctcctggcccggggtttgcgaactcgacttcgtttcccagacatggccctggatccagcgcctccttcaccaggtgtctgctccccaggggccctggctcatggaccagccggcctcaggccagctcagagggcgtccctggaggctacagtggccgtgtgctcccacgccaggcttggccccctgttccaggtcctgccccttgctgagcccgcagcaccgcagctcgggactctgctctgcctatgggcctcactgaccccactcggtggggccaggccacgccagggagtttatagggactccacggcgcggtggctcgcctgggctgagaggctgactaacgcgctgacacggcggcacggggctttacaggccacgggccctgccggcgagactgggagggaggctgagaagctggaggaggcagcgcagcagccagagtgcctgctgtgcgcagcaacgggcgtgcctggtcctgccctgggcggcaccaatgnnnnnnnnnnnnnnnnnnnnnnnnnnnnnnnnnnnnnncagctggtcgagggaaactcaaactgcaggccacagggccaggagctgcatcctggtcgcactgaccctcagggcccagaccctccctggccacagacaacctgagcccagctggccatgggaacccgcagcccatgcactctggagggctccagggcagctagcacgcccacaggagccccgctggggtttggtggagacaaaggacccagggacccggtgggagctagggcagggttcgggccactgcactgcggctggctggagagactgggccctcaaagccctgcgtggcactttgtgaactgatgtggggccccgaggaaagtcctggcggtcatggaggtggggcgggggctcttggtgccatcctggctgggggctggctgtcctgcactgcactgcaacaagggcctgactggatcagagctgcctttgggtctccgggctggaggtgggggtgcagggctagccccaaatgccggcgtcctctgggcttcttgttgggagggtgggctccaggtggcctcctccctagtgtttccccagcccggggctgctgatcccgggaattccggaccggtaccagcctgct

SEQ ID NO: 357075 - DNA, 408 bp, Homo Sapiens
tttttgaaggtgtaattgtgaatgttaattttgtttaacaaagcataagaattttctgtgaaacagctttgtttttatgtattttttatattacaatatataatccaactcgcgtctaatttttttcttcaacaaatggttgtatatctaaatcacttattaatttacaggaagatattgcatggtctgctcttgtgaagttgtttgatcccgtgaaatctcccagatgttatgctgttattgccctgaagaagcagcagtgatttccattgaagcaaattattagatgtatttctctatgagacctgttgctgagattgcttttctaaacatatatgtcctgttatacaaaaatttttaaatgactgttatgtattttaaataataaaataatggctaacaacaaaa

SEQ ID NO: 357076 - DNA, 557 bp, Homo Sapiens
  misc_feature (147)..(180): n is a, c, g, or t
gggatagaacaactagcttggatctcgtgccgtgtaattcaatgtttcattccgctgcctccatcatgtaatagaatcgctttccagaaaggcagttaactggaagcagcagaggctcccagccgtgagaggactgctcaacaatgnnnnnnnnnnnnnnnnnnnnnnnnnnnnnnnnnnttgtgttttccctctgaggggcccaagggttatggctttcatgtctaggtgtggggacagaggagggagaggcagatcctgggccgggagaggatggcctggtctgaatctggagtaattaatgccacccaaagaaaaggccctgccaggtccaatgttgtcttagatctgatgatgctgctatttacaaaacactgatcgtccgaaagcttgaatctgttcctcctcgaatgaccctgtagatgcctgacctccaccgtacctccacatcactattcatgtccttctaggaaaatgtgcacatgcctcacgcactatgtgggaagggcgtgtttttaaattaataaagtgtgtcaccattagccatacgaaaaaaa

SEQ ID NO: 357077 - DNA, 400 bp, Homo Sapiens
ccccaccccctcgcacccccttgtgttttcccctctgaaggggccccaagggttatggctttccatgtcctaggtgtggggacagaggagggagaggcagatccctgggccgggagaggatggccctggtctgaatctggagtaattaatgcccacccaaagaaaaaggccctgcccaggtccaatgttgtcttagatctgatgatgctgctatttacaaaacactgatcgtccgaaagcttgaatctgttcctcctcgaatgaccctgtagatgcctgacctccaccgtacctccacatcactattcatgtccttctaggaaaatgtgcacatgcctcacgcactatgtgggaagggcgtgtttttaaattaataaagtgtgtcaccattagccatacg

SEQ ID NO: 357078 - DNA, 1356 bp, Homo Sapiens
  misc_feature (260)..(260): n is a, c, g, or t
  misc_feature (339)..(339): n is a, c, g, or t
  misc_feature (345)..(345): n is a, c, g, or t
  misc_feature (448)..(448): n is a, c, g, or t
  misc_feature (696)..(696): n is a, c, g, or t
  misc_feature (1178)..(1178): n is a, c, g, or t
aacaaattgggaacaaaaattgagttacctaaaaaatatgctatttgattttttgcaatattctgaacagttaaatgattatgtccaacattttattagttcactctcttaatacacaattgaggaaatggagggtggtttaatatctctctgtgtttacggtaactgagcactggataaatgcttctcccagaaggtaaaatcagaggtgaaaataagaatagctattttatgttcccattccaacagactcatcaaanataatcttgtttttcgttagactttttagttgataagtacttcattggcagttcctaagtctctagcatgatatttatnactaanatctttaatggctttgtaaaatatgcattcattttaagcataaatccagagataggggacttttgttggggaggggtatcatgtactcctttgaagtatctgncaccctctttggaccttcaactccagaaaaatgcacatatacacaaaatttattatccagttggggagttcatgatccttctgaccttgtgtatgaacttggcttgtggaaccctgctttaaaggaaaatggctttacacagcaaattctacttcagttttggttgttactctgaaaagaatcctagtagtgattatagaatatattgcagaaataggagtattcattagtaggcagaaattacaggngatgtgattaagataattcactcttaatgtagtttttcagctgaccaaagcaaatgacatacaggcaataagtagtacagagagcttttgtggtcttactgctctaataaaggcagaaactgtcttaatttaacagccttctgttaaatgtagcttataaacttcccaattagttattattctatatactctgtaaaaacataaatttataatgtacagtatgtcatgtgtcacacaacctacataataaatgcacatttaagtaaagtatgttttgttccccaaatcatatactttatatatctctagggtattggtcctaatgaaagacattttaaagtaatttataagaaatctttaatattttgcatgtctaatttttcttttcagagtatattttggaaaaagtttaaaagagttcagatactttctctttggggtgagaaacatttcaaatgtattctatcaggggatttattggngaccattatgctgggcgttttactttgtcagaatggggccttgaattttaaagaaaaaaggaattttttcttttggtctacaccataatttatgtcctggggttttggcaatcttggaaaggtttcccacggaaatttaaaagggtttcttagagagagaacctcttatatttttttt

SEQ ID NO: 357079 - DNA, 2038 bp, Homo Sapiens
gccccctgcatgatccatggggcacccccaggccccaagtcctcctctcaacaagtccaagctcatctgagaggctcccacttccccttgagctcggcccatctggagcaaagagggtggcccaggggctcaagcaagtaatccaacacaagccctcctggaaacaggggctgcaggtgtgtctccctgaccagaaggctggctccctcccatcatggtcacagcccgtggcactgctaagtgtaatcaggtgcagagtggtgggcagcccagccagctaacccgaccagcagagctgaccgtgctcggggcccaggccacagctggcgggggcagtgtggggggccaggcagccctgccagatgccctgctctcagacccctgccggggacagcccagcccagcacccgcagcccctcagcaccctcctccagaggtgtggatgcagctgagcccagaactggctcccaactcctgtgctccctaggaggctggttgctttggattttatatggatagagggtaagaaaaagatgttgtttcacactgttttcgagcaaaagtgtttatttttctccttcagatatacaatctattggggattccgtgccactgaccaccatgtacaaggaagggattcacaggcaagggggacaggtgagggcagcccccacttcactcaaggaacagggcaagggggcccagtacagagaacagaaatctcttacgacagcatcgtgccctggcagaagattctgcataatcacctagaaaattcaattctaactgaattgatggaataatagatttgaaccaaaataatttacccagttctaataagtacagaaactatacaattcacagctgggcagtcccaagcagtctgctttccagtgggaggtggaggaggctggggccttcccctcccaccaagggctgtgttgtgcccactggggacgagtcccactgaaatctccaggagaagaatgaccccgccctccgcagagcaggcttagggctggacgggagagcggtctgcatgccaggggtgagcagagccacaggtctccatggaaatcatggagaagggagggaagtgggcaggagagagggcagcctctccagctggaggagctgcacttgtctccacagggtgggcgggcagccagggtttctatgcccaacacacaccttatcctcactcacagcagcccactggcatggggggcatgtctgctcacctaacgttttctggcggatttctcatggcccagcgcaacaactgacattccctactgagcaagcagtccgccagtgtgccctgcccccagcgtcccgccgtctctcagcccctggatgagcccagggaaccggcactctactgaggacaaagcagggctcacctagcaatggaagctcttcaatacttaaggtagctaattcaatgtttgtaaaaggcatttacaacagaaaaccaaagattgaacttcagcttcagatttgtaaaccattcacatctctgcaacttaaaacagtaaataaagattatcaatgcacaagccaattgcaaatgaaacctttgtccgataattttttttaacatatcttttcatcagggaacggaaaagctggcattcaaggcactgtacttctgcagggtgacgacaaggttctaaccatcaactcaagtataggaagtgggtgtggagacggcgcgtggaccacaggaacctaggagcgaacagggtctgaagccgcaaaggaagcagtcttgctgcccacccgctgtccccctcgcggctgagtgctgtgcccacagcaggcggtgggggggactcggaggccaaaccacacctggtttctccgggcggttccgagggcgccatctggcaagggacagggcagaaggctacgtgatccgcagccgggggccaggcatgctgaccacaggtggctgcaagaagactggcagcacgggcacctggggggtgttccagctgacctgtgcccccagctggcccacctggcctgcccaggg

SEQ ID NO: 357080 - DNA, 1378 bp, Homo Sapiens
  misc_feature (221)..(275): n is a, c, g, or t
gcggccgccggacggcccgcgggcagccagcgccatccctgtcacctgcctgctggactctgggcatcaggcccagcttgtggagttcctcatcgtgcactacgagcagatctttgggatggatgagctcccccaggccactgagcccccgccccaagactccagcccagcccctgggcccctcacaaccagctcccaaccgccacccccgcaccttgacnnnnnnnnnnnnnnnnnnnnnnnnnnnnnnnnnnnnnnnnnnnnnnnnnnnnnnnacagtaccctggagcagcatcccacggccacacctaccgagattccaactccacagagtgaccagagagaggacgtggctgaagacaccaaagatgggggaggggaaggtcagtatgttagagagaggctcagaagttctgggggtcccctggccccaggggggcttgctaaaaaatgactcctggggggaaatacagaaaaacttgaaggtgctctgcactgaccacccaccccgtacacagtgtccagccaaggcccagaggactcactcctggggacacagtctcgtggccacttcagccgccagccagtgaagtatccccggggcggtgtgaggcctgtaacccaccagctgtccagtctggccctggtggcttccaagctgtgcgaggagacccccatcacatcagtgcccagagggagtttgcgggggcgggggcccagccctgcagctgcctcccctgagggcagccccctgcgccgcaccccgctgcccaagcattttgagattacccaggagacagcccggctactctcgaaattggacagcgaggctgtgcccagggccacctgctgcccggacgtccagcctgaggaagccgaggaccatctctgaccaccctggcaccttaaataaggaagaggcccagattgtgaagacggacccatatatccctacctcccaccacctagtggccaaacaccccgccaggagttcaatgctgggagaggtccagagggttcctataaggaaaaactatttaatacatgacctaggggaggcctaaaacccttttggggataatgtcccagagtccccccactagacacaggtcactgccaagcatcagggccactcgggctcagaggtcactcagggtcaatactcagggtcagtgcaggttatgagatccttggggtccaccctagtctctgacacctgggacaggggtgcttttgctactttggttgtggtcactcccccacacctgcctgcctccttcacggactcgaagtgaccttcctggaggaggtgggcagctcagactccacatgctggtggtgcctgaggtctgatggcctctaataaactgtgtcctat

SEQ ID NO: 357081 - DNA, 2203 bp, Homo Sapiens
  misc_feature (1554)..(1563): n is a, c, g, or t
ttttttgggcaagagacagagatttaattgaataaaaactccaggctgtgacacgggtgggaagacacaaacgagtaattaacaacataatattttaaatgacagtgcaattaattaacgtcctgggtaagcgcagagggggaggagggcgtctttcagcccggaaacactgctaaataaaggagaagggaacttttcatgttttttaaaaaaacctatgtgcaaatggccctggttatcacaacttcatcaaagctcacagcaacaacccgagaggtttctccggccagagaaagccaacaaatggatcaactttgtatttcattttcttcttctctgtgagggaagagatactgggctagataatgaagttggcagatgttcaggtttcattcatgattcaggctgaggagtagtctaccttgagggtgctggggatgaggctgcaggagataaaagcctccctggggtgggctcccaagcctgtaggaattgacccagactgctagagcagcagcggttgcagttggccagggtggtgtggggctggctagaatctgttcaggacatgattttctgaaaccactgggatgttcactcatgggagatagctgcttggatataagaggaatgtctcagatgagcaatactattgtgattcacattgatcacactcccttctccaagaggttagaatgggttatactcacctgcctaagggtttaacgatgacagctggacatgaattttgagttcacttccagaaggaccttctcacactaatttctggactccttatgacccagggaactcagttgtctcctttgtaatggcaaggccttcagcatctgttcactgacggaaacgactatcttgatggggtcagtctagagtcagaatcataatgaagtctgtcacctgccaggaatcttgtcatgaccttgggttttttctcactctcaggagaacacccaaatgtaggactaccagactaggaaggcctgtcaatgacaagatatctggggagaaaagtcatctttacacatgagtccctagcctaaggctcagtacagggtggagtttaggtttatctacatttacttttctaagcagaaaattccttttgccacaatatcctgttaactcatgcccaacctggtcatttttagggctagaagatactatgcagcgttctatcagcagagaaatctgacaacttggtttaaaatgagggatactttattggtcgctgctcctctaccatgtagcatatataaagaataagacacaggtgtgtgaacagattttctgttcttgattttccactgttaaaagaaggggttcttcagcagacttgcctcttgcaagtagtacacacagctcaggaaactggcactgtgtcgccacaagtcgaagtagaaactcacctccatgcgcttactggggttatacaaactgagattgagcaaatcaacctggttttaggggttggtgggaagaccactattaactcaacagaaatgtgctattacaacacagaatagttcaaacaannnnnnnnnncctaaactgagtttggcctaaggtaaagatctaaaggaaacaagaaaccctcacaaccactgaaacaaacaacactgaagtacttagtaatttatagaactaaagtttaagatgaatattgtcaaagagccaaaggggctgaaataggcttacgctgactcggtttcaatcaaaaacatactcttcatagaaagatggactcaaactgctatttggatttcaaaactccccatttggaaaagaacatttaatctaggtttttctttaatctgtttaggcattttaaacagcagcttgatacttcatggaattataaagctatgtataatgcagaaatcattccagaacatatgtttctctcttactttacaatcaagattatttctgaggacaaagatcctgttttcaaacaaatgtgatcattaactgtggcgcatcagaaaacatatggcgtgtttagtttcggctgaactgaatcattcctaaagaaagtgactaagttcccatgaggaatcaagacgttttcaattcatggggaaagccagcgaggaaggggagcgaggaaccctgcacatcagctgaaggctcacaagcgcctcagaggtcttgtgatttcaacacgggactgagggtcccagcg

SEQ ID NO: 357082 - DNA, 1457 bp, Homo Sapiens
  misc_feature (193)..(243): n is a, c, g, or t
  misc_feature (801)..(812): n is a, c, g, or t
caggcggtacggtccgcaatgcccgtagaatgatttttctaaattactatgtcaggttgtaaaagtcagtgcaataacaaaccttcctttttaagaagaaaatgtttctattactttcccattcactaggtaaagaatcatggacagaacttacactactttttaccatgtttcatcttggcataacatggtnnnnnnnnnnnnnnnnnnnnnnnnnnnnnnnnnnnnnnnnnnnnnnnnnnncattgatatgcatctctgcaggtcctcattcatgttgtaaatttttgcagcaagcagtcaacattccacaaacgcacaaacattatacctcttctgatagttttattaagcatggagaaattgccaatttttaaaaactgcagttttccaaacttttctgccaacctcttactctgaattcagtgctgctttgggacatatacttgacctagcttggtttaccagtgatggaaaagtattttgatatcattaactttttcaaaagatccaactttttctctatgcctttgccacattctcttcagggtctctttccacagtggataaatgttttttctgtattatgacagtattgttgtgatggccatctgctggaaactcctgaagagcattatgtattacagtgagcagttgtattgcctgtttggtgcccaatggttaagtcattgtcacttagctttatattgtcagtttgatatttattttaacattgtggaactagatgcataaattcacatttctgccttttccttttgcatcttctcatatattgtgtgnnnnnnnnnnnncctagaaaaaatatttaaagcattgtttgacagggtagaaactcatgtatctgtagtccatgagttatatcctggctcagtggagtgatatttatgtattatttttacttttctctcagtgtcttatattaagattaacatgttgttaataattgctttgttgattaatctctcttgttggtgttttaataaatgaaataggcttgcctttagatcgggtgctgatattgcctgtttcctagtaatgggctgatcaaatgatcagtggaattcttggtttgatgataaccttattaattgaaattttttactgatgtggctttaaaagaggtttattttgtatatgtttagaactctctgattttgatgaattatatgggaatgagaaacagaagaagtggtatttgctggcgagttaaataggcaaggtacccagtgataacaccaaccaaaccactcctatctgcatgattctgaacatctggatgcctgttgttttactgtgtatattttatttttaatatattaactttgtggattcatttaaggtctactcaaaagtaacactgtcaaaaccactaatatgtatgtaaaaattgtgctgtatactacaataaagttgttacttggatttgttaaaaaaaa

SEQ ID NO: 357083 - DNA, 921 bp, Homo Sapiens
agcgggcggctctggcctcgccggtcttggggggatggttccatcatggcgtcaatgcagaaacgactacagaaagaactgttggctttgcaaaatgacccacctcctggaatgaccttaaatgagaagagtgttcaaaattcaattacacagtggattgtagacatggaaggtgcaccaggtaccttatatgaaggggaaaaatttcaacttctatttaaatttagtagtcgatatccttttgactctcctcaggtcatgtttactggtgaaaatattcctgttcatcctcatgtttatagcaatggtcatatctgtttatccattctaacagaagactggtccccagcgctctcagtccaatcagtttgtcttagcattattagcatgctttccagctgcaaggaaaagagacgaccaccggataattctttttatgtgcgaacatgtaacaagaatccaaagaaaacaaaatggtggtatcatgatgatacttgttgatgccactgttatcatcctcctagcagaagatagtcctactgagaaaatgagcactttgatcattcagtctttgaactttaacctttgactggaagtgacctataggcaatgaagactacttccttttactgcatttttactcgtgtgcattctgggcgcatgttgatcgctggttcagtccaggcaactgacatgcttttattagtcatacagtattaatgcaggtgtcaggaaatgtcaaatataattccattttgtatatgtatatttttcaacgctttcggaaaagctccaggtcctcatgtatggtgcaataacaatgacttccttggcggttaaggtaacgttcatcgccgggaatgggcgtagtaacaaggaaaaagttccattaatcctgcaatcactgattactgctggata

SEQ ID NO: 357084 - DNA, 1121 bp, Homo Sapiens
  misc_feature (886)..(905): n is a, c, g, or t
ttttttttgttaaaacattaagcctctgtcaaaaatgtatttcttattttagggtacaggattaaaggacaagatgatactcacaagtaaagaaaatttacaagaaaaaacttaacaaaagtttcaataaaagtattgtaacattcaaacttgacttataacaaaagaaacaagattgcaaacaaaaatgtttacggggtttccaaacataaataaatgaaatagtgtttaggccagtagggctcatgctgatggctagcaggaagttaacagagtgtaacttacttggaaaaaatctttaatgtacaaataacaagcccaaattatggactgcagcaatttaatcatcactgccatttttcttacttccaaaataaagccttgattaaaccattcataccctatattactcatacctttacttcagagattgaggaactatatacaacaaattaatttattttcaccatagggataacatactgtacctctctgccaatgttacttgaaaatcttccatgtcaaaacaacttgacagtagatataaacaattcaataaatatgcaatgatctttcattacagtcctttaaagacgcatgttaattcatgctgttaaccttaggatcacagtgcatagaatccaaatataaacagttggggagacttttaaagtaatgctggatccctcactttatttatattcccactataaccagtaagctcatttcataggcccttatcatgcattaatcattgaatggcaggaagtaatgaaaacttttcctgttacaacgcccattgccggcaatgaacgtaccaaaaccgccaaggaagtcattgttattgcacaatacatgaagacccggaagcttttccaaaagcttnnnnnnnnnnnnnnnnnnnntggaattatagttcaaagactgaatgatcaaagtgctcattttctcagtaggactatcttctgctaggaggatgataacagtggcatcaacaagtatcatcatgataccaccattttgttttctttggattcttgttacatgttcgcacataaaaagaattatccggtggtcgtctcttttccttgcagctggaaagcatgctaataaaactcagc

SEQ ID NO: 357085 - DNA, 1752 bp, Homo Sapiens
atgtatacaggccctgaatccaggcaagaagttcccatgtatacaggccctgaatccaggcaagaagttttaatacggacagaccctgaatctaggcaagaaattatgtgtacaggccatgaatccaaacaggaagttcccatatgtacagatcctatatccaagcaagaagactccatgtgtacacacgctgaaatcaatcaaaaattacctgtagcaacagattttgaatttaagctagaagctctcatgtgtacaaaccctgaaattaaacaagaagaccccacaaatgtggggcctgaagtaaagcaacaagtaaccatggtttcagacactgaaatcttaaaggttgctagaacacatcacgtccaagcagaaagctacctggtgtacaacatcatgagcagtggagagattgaatgcagcaacaccactagaagatgagcttgaccaggccttacccagccaggccttcatttactcgtcccattcgacagcgggtctactcactcttactggaggactgtcaagatgtcaccagcacctgcgctagctgtcaaggagtggtttgtgtatcctgggaacccactgaggcacccggacctcgtcaggccgctgcagatgaccattccagggggaacgcctagtttgaaaatattatggctgaaccaagagccagaaatacaggttcggcgcttggacacactcctagcctgtttcaatctttcctcctcaagagaagagctgcaggctgtcgaaagcccatttcaagctttgtgctgcctcttgatctacctctttgtccaggtggacacgctttgcctggaggatttgcatgcgtttattgcgcaggccttgtgcctccaaggaaaatccacctcgcagcttgtaaatctacagcctgattacatcaaccccagagccgtgcagctgggctcccttctcgtccgcggcctcaccactctggttttagtcaacagcgcatgtggcttcccctggaagacgagtgatttcatgccctggaatgtatttgacgggaagctttttcatcagaagtacttgcaatctgaaaagggttatgctgtggaggtttcttttagaacaaaatagaatctcgggctcaccaaattccacaacctgaaggcagtcgtctgcaaggcctgcatgaaggagaacagacgcatcactggccgagcccactggggctcacaccacgcagggaggtggggaagacagggctccagctaccacaggacgggctctgggtatagccgttccagtcagggacagccgtggagagaccagggaccaggaagcagacagtatgagcatgaccagtggagaaggtactagtcaacctccagaaagagtatggagagaaaaagaggcacacctggacgcagagccctgccagcgccctcctctgctgttgcagctgcaaggagaccatgcctgtgggagccaggcctcgcttgcatgaagaaggaacgatgcctttttcaatggtgtctccctcccattgtgcagaagagcttttgttggcttctctcccgagcttgtgcctgattctgtggcccaaaacaatcattgttaacatcttcatgtgtttcattctgatctttcattcatatatatgatgcctagctaatttcattttaaaataaatgggaatctgttgtattctgattttttattagcaacactagattatgaggggttatctcctgttattaaaagtcagaaaacactata

SEQ ID NO: 357086 - DNA, 1133 bp, Homo Sapiens
  misc_feature (230)..(239): n is a, c, g, or t
  misc_feature (411)..(458): n is a, c, g, or t
  misc_feature (464)..(512): n is a, c, g, or t
ccccccgggtaaaaaaattgttttttcatcaatgcaccaatacccgttattaacacacattttttcttcaccccaccacaaacataaatcgaccccaggtttgtttttcaccccacttttagtaaccgccttaacaatttcttatatatttttgccccctttcagagagcggcttttaaattatcttctcgttgtggaggatattttgtcccaccccaatatttgtgctnnnnnnnnnngccagcaattaggtttctccttttaccacaaattttttccactgtatggcggcgtggttttccaccactctccaaacgttgtttaaaatcccgggctcctcctgctttctgcgtataataaaatgcacgctccatctataggggggccccctcttttcacacaaaaacaccnnnnnnnnnnnnnnnnnnnnnnnnnnnnnnnnnnnnnnnnnnnnnnnncccccnnnnnnnnnnnnnnnnnnnnnnnnnnnnnnnnnnnnnnnnnnnnnnnnnatctcagaggtaaaactctttaatctcagagcgcccctcccaactgccgatcccccaacccctcactctctcccccacaccagggccggagagtgagggcccctgccccccaccttgggtggacgagggccctttaaggcacctgtggaggtggggggcgaggggcgggagctggtaccatcctggatgcagggacgggcttcgattggcaggctgttgtggggatggatggaaccaatgaaagggggtgccagaggcagggacagtttggggccatccctgagggggtcagggaacaagttgtcgggacgtgggcaaagacgaccccagtccccgtagtgtaaagaacgtaaattgaaggccccgggccaattctgggaagaggagggcttggccacgcccccaggaagctggagccaattgggagggagaactcaggaaaagcggacggtgactatgtagagactggtcaagccctttacaggatttgagccaatcaaaaaaagagctgtccagcgactaggggatggagccaatgccgtgcgagcaaatcccttgtcgctaggcggaaaacaaaggagcctcgtgccgattcgacacccagcctcgcacctagccgta

SEQ ID NO: 357087 - DNA, 828 bp, Homo Sapiens
acctcagccctcccagagtagaacaaaactctcaggggcattgccatcacagctgggccagtatttgcgtcttgggtaaaaatgggtattccctgaaatccctaggctgggctgaaaatcctgggctcaagaaaatcatgcatcagcctcccaaaatgttcaggtacgggcataagacagcatgccaaatcctgttattgcattttagtgacgcaaattgtaatgttaactttttaaattatgaaagcatctaaaatataaaattatttgtgaactccactgtaattttgggcttctataaatgaatatacatctaaaatgtaggggtttagcttaattgattgttttccatagaaactaggttttatgggaagatggttggatagacttgtttcacttaaaggtctgatttgtgtaggacaaacccacatatgtaatcgtgccagtctgttctctgcatgacataattttccagcaatagctgtgtggtttttgtaatcatatcatctagtcagttcaagatcttgcaacactgtgtgattctttgctccgtagttcagtcttgttgaacataacacaggtgtttactttcctgttcttgcatctagtttcattctaataatgttctctgttgaaaaagctggcttcaatttattgagcaagatgctggtgttatcatctaacataaaacctatcttataataaaggtgttgacacatgtaatgagtactgtactgaaaaatggtggtatgtatatggtttgtactgattatgtatcgcttttataccatcaaaaagttgaaaaatcataaagttgaatcatcctaa

SEQ ID NO: 357088 - DNA, 1405 bp, Homo Sapiens
  misc_feature (57)..(65): n is a, c, g, or t
ttgccaaaaactggtgatttatagaaatcaccctggtttatttttttcaacaaaggnnnnnnnnncatggttcaataattcagcatttgggactctggcaagtactgtctgcattgttcaaaataagtgttcctggctgtgagctctgcaacacatactgatggcccaggaaccttcttccatggttctaataaaacaaaggacccacacatggaggttacgtgagtcaacaaaagatgctctattcacaatgtgcgtaaaaagcaagtctttgaaaaatatccagatctctaaaggaatacaaacactcctatttggttttgtttttgttcatcttcagtattatattttagttgttgaggaaaattttttttactgtaaggaaggagttatatgactttataagtgggaaccaacaggctgccggctaatacatacgctttccctccaagtcaagtagctttttccccccgaaagcctctttcatgattttcattatggttcagaaaagtaaagaaaatgatttcaagtattcaattcctataaaaattggtatcaaaagtaatagaggacctaatttctttataattccatgttttaaaaaataacttaagaagcaagaggtccggccctttactttgtataaatacagcagcagaactagagtttcttaagacactgtggagaagagtctgtgttcagcacctcaatcatcgaccttaacgttggaaacgttcctgaaactgatggaagagtcttataagaaggtgaaatacttttcaagttcatccagcttttggcgactttgctaaaggcctctgaaccaggggctgtcatagcttcaaagtcgactaacttccctttgggaatttttcctgctacttcttttccacttgccatcagtgctcccacgatgacacgagtaagcaattacaactggatcctcgagagagtggcattaaattataaaagtaataaactaaggataagattaagttgcagacagcatcagcctccccaaattctgatgaaagaatcaatacttttccttttgctgtcaaatctttataaagtgcatctatttcagcatgatataattgtgtcctttcttccgtggtttgagtttccacagaaaataatatattgccaactttgtctcctgtaatcgtgattgtgaatccatcatattccttcccttggtctttaaggctgggaacttttgtgttcacggtgaacccatccttcgttttagtattaaactgcttcataatcggaagaaggtcttctactttgtgtaccttttccagggcttcccgaacttccagcaatcctttaggattattagctccatgataaacaagaattctgtctttaataaaatgaagtattttctcaaaatattcta

SEQ ID NO: 357089 - DNA, 609 bp, Homo Sapiens
  misc_feature (468)..(481): n is a, c, g, or t
aaagtgtttgggtattaaaagaggttgaatccaatgaggaggggaatcgggtaaaaaaatttacatattgataattacagaataagagtattgatttttgggaagttcagactttaaaaaaagatccatcttgcttacaaaatacgatggttgctggaaataactaaaattgtgaattatattgcttgacttgtacctcagagtattcgtttcatgacttaatagtgctttgagtttggtatatttttctaatttaacctacagaaattcttcgttttactacagatataaaaattttaaaatagaaaatgcttgcttttactttgtaaggtaagagagtatccacatgcttagatgtgctcgtttctaaaattctagaggttaatacaatcagctcatgaatgcacagctatgcttcttgtgatagattgtacataacatcagcagttgaaaggtaaaacaattgcnnnnnnnnnnnnnngcttttgttacgtgactatggtactttgtgattccttactctataatgagtcgctccacatttatttgggtgtccttttgagagggaaaatacagtaataaaagacgtgaaataacataatgagaaaa

SEQ ID NO: 357090 - DNA, 389 bp, Homo Sapiens
  misc_feature (89)..(138): n is a, c, g, or t
tccttgaactggatcccattgctaacagccctgagactcttcaatgccctttcccgaaaactggtttcctagtaaagcccttgaatgannnnnnnnnnnnnnnnnnnnnnnnnnnnnnnnnnnnnnnnnnnnnnnnnncgtcctacactttaagctgcctcctttggtatgactctatacttatggaaatgtagaaacaaacatttttaaatagctgctgtacttttcacattttgatttattaggtactagcactgaggaaaaaaaattcagcacttggactatcataggatgagtaaaacttttcttgtacaaagtgaattaactgatttgtgaagttaaaaggttgtactcattgtatttacaaagaataaaaatatattgaattt

SEQ ID NO: 357091 - DNA, 1012 bp, Homo Sapiens
caggatatcctggtattcacggagccctgaagatggatggtgccaaggccttggtcattcttcaaggagggtcacatgcgtcccaccaaactccctggcgtctccaatcacagctgtttacccttgtcgttgcggtacaaatccctatggcgttatgccaagtatgttccaaggactcggatctcaagatatgcattgccaagtatgataaggcacccttcgtggagctgggacccgcaaagcccggagaagaaggaagccccaaggagccatggagacccccggccacccaagaagcctgtgcaaggcggggcgagccacccccgtggtggggcctgtccaagggccaggtcccggggcatgccgccgatgactcaggcgccccgcaattatgcaccaacatgccgggccaagccgccctacatgccgccccctggtatgatccgccccgccaggcttgcacctggccagatcccaccaggggccatgcccccgcagcagctttatgccaggacagatgccccctgcccagcctctttctgagaatccaccgaatcacatcttgttcctcaccaacctgccagaggagaccaacgagctcatgctgtccatgcttttcaatcagttccctggcttcaaggaggtccgtctggtacccgggcggcatgacatcgccttcgtggagtttgacaatgaggtacaggcaggggcagctcgcgatgccctgcagggctttaagatcacgcagaacaacgccatgaagatctcctttgccaagaagtagcaccttttccccccatgcctgccccttcccctgttctggggccacccctttcccccttggctcagccccctgaaggtaagtccccccttgggggccttcttggagccgtgtgtgagtgagtggtcgccacacagcattgtacccagagtctgtccccagacattgcacctggcgctgttaggccggaattaaagtggctttttgaggtttggtttttcacaaaaaata

SEQ ID NO: 357092 - DNA, 1026 bp, Homo Sapiens
  misc_feature (170)..(181): n is a, c, g, or t
  misc_feature (410)..(410): n is a, c, g, or t
  misc_feature (542)..(542): n is a, c, g, or t
  misc_feature (628)..(661): n is a, c, g, or t
  misc_feature (666)..(912): n is a, c, g, or t
  misc_feature (921)..(921): n is a, c, g, or t
  misc_feature (926)..(926): n is a, c, g, or t
  misc_feature (955)..(956): n is a, c, g, or t
  misc_feature (971)..(971): n is a, c, g, or t
  misc_feature (984)..(984): n is a, c, g, or t
  misc_feature (992)..(992): n is a, c, g, or t
  misc_feature (996)..(996): n is a, c, g, or t
  misc_feature (1002)..(1002): n is a, c, g, or t
  misc_feature (1005)..(1006): n is a, c, g, or t
  misc_feature (1018)..(1018): n is a, c, g, or t
cttggataaaatatttctcctgatttaagtaactataatttcagtcatgattcattgttcccagcaggatctgtatctgtgtaagtgggcatagtattgattttttttcaaaagagaagataggtgatctcattaatttccttttcacatcaaagctttccttttagggnnnnnnnnnnnnccttctctcaaaaaaaatactgaatgagtcagggtgctaatctgctttgctctagtaaattctatcttctcattgtagagatgtttttcaccgtagtaataatttgcttagctgcttggtatttactcatgtattcattcacagttctttatcaggcttcaggtatgtacccaatattgtgccaggtgaaatgagattcaaaggtgtctcctagcctagaatgtaaatnctataaggaccttctcactcggagcacagtattggcacattatcagaaatctatacagatgcatttaggatgcatttctgtaacaatggtcacttgtgaggggccatgcctgaccttcaagtattgcctganactcaaacacaagttgagggtttgagcctttgtacttgtttcctacagggcagttattcttcaaaatgcccaggtttaatgatacnnnnnnnnnnnnnnnnnnnnnnnnnnnnnnnnnngagannnnnnnnnnnnnnnnnnnnnnnnnnnnnnnnnnnnnnnnnnnnnnnnnnnnnnnnnnnnnnnnnnnnnnnnnnnnnnnnnnnnnnnnnnnnnnnnnnnnnnnnnnnnnnnnnnnnnnnnnnnnnnnnnnnnnnnnnnnnnnnnnnnnnnnnnnnnnnnnnnnnnnnnnnnnnnnnnnnnnnnnnnnnnnnnnnnnnnnnnnnnnnnnnnnnnnnnnnnnnnnnnnnnnnnnnnnnnnnnnnnnnnnacaggcatnagcancatgcacggcgatacttattttagtagtnncatgaaaaattattntattagtgcaaanaattcaanaatntgctgnatnncccgtccacagnagaatgat

SEQ ID NO: 357093 - DNA, 1137 bp, Homo Sapiens
  misc_feature (16)..(16): n is a, c, g, or t
  misc_feature (904)..(952): n is a, c, g, or t
  misc_feature (1027)..(1082): n is a, c, g, or t
tcccgggatcgggaanagaggcctaggatgcctggggcccagcggcctcttccctcctggcgtccccggctgccctcgctcccaggccccgcattctcatttgccgcttccgacgcgtgaccccggcgcgctagcgtccgggaccggtgacaggcgcggggtgcgccaagcagtcccatgtgtcccctccctctcgcagccgccgcagtcgctgcgccccgagcccctctccggctcctcaacagagggctcgccgccgccatgtctaccgcccagtcactcaaatccgtggactacgaggtgttcggaagagtgcagggtgtttgcttcagaatgtatacagaagatgaagctaggaaaataggagtggttggctgggtgaagaataccagcaaaggcaccgtgacaggccaagtgcaggggccagaagacaaagtcaattccatgaagtcctggctgagcaaggttggaagccctagttctcgcattgaccgcacaaacttttctaatgaaaaaaccatctctaagcttgaatactctaattttagtattagatactaatagaagagaaaaattgtaacacactgaacaatagatactgtatgttcttaagactatgtatactagaataatagtagcagagtagggtgaaaaggaactttctgttctgaaagctaagcgactgtacgtgctactaaaaatgtctgacactgaaataattttactcaactatgttttcaacaagcaaaaatatagtattctaagattaaaatgtcattacaaaatatttagtgtgaacatttaatttaaacttgtctcatggaatctttaatttcaatgaacattacagcatatatatgttatttggcgagacatcaaataaagttaaccatttaaaaattannnnnnnnnnnnnnnnnnnnnnnnnnnnnnnnnnnnnnnnnnnnnnnnnttttcttttccggccttttttttctcccgggggggcgtcccttcgaaaagaccctcccgcgcggtttcctttttnnnnnnnnnnnnnnnnnnnnnnnnnnnnnnnnnnnnnnnnnnnnnnnnnnnnnnnntttttaatttttgtgagggggggcccaattctaaaacaactgcctttggagacaa

SEQ ID NO: 357094 - DNA, 768 bp, Homo Sapiens
  misc_feature (94)..(94): n is a, c, g, or t
  misc_feature (664)..(684): n is a, c, g, or t
tcagaacagaaagttccttttcaccctactctgctactattattctagtatacatagtcttaagaacatacagtatctatgtttcagtgtgtancaatttttctcttctattagtatctaatactaaaattagagtattcaagcttagagatggttttttcattagaaaagtttgtgcggtcaatgcgagaactagggcttccaaccttgctcagccaggacttcctataaaaaaacagataaataaataaaattagcatacaaagtatacatggatcagctaaaatgagcccacagtaggtattaatgggagtttacctttactaagtaatttttgcatatatgtgatatttaaatttgtttacattgtatatatcactctaagaataccacagagtataatgtataattaaatacagatgaagaaaatctaataaattaagcacagtcaattcctgatgattttatattagggttatctcccccacccgccaacttaaaacactccaaggccactgttacctggctcttatactcaaaacgatcaaaatatttttataaggagcttagtaataaaaacaattcactattgtttcctcattactcagcacgtggtagatgtttcatgtatttatgtgtatatagagagatacatatatctctnnnnnnnnnnnnnnnnnnnnngacatatatataatgaaagagatccatacttaaagaataaagaagaaacataatttttgaaaaatattaagaaaaaatgcggcc

SEQ ID NO: 357095 - DNA, 467 bp, Homo Sapiens
gccaaccccaggaagcccgggctgagccaggtgggaagcccctggtcctcgccatgacccgcacaaacttttcctaatgggaaaaacccatcccctaagcttgaatacccctaattttagtattagatacctaatagaagaggaaaattgtaacacactgaacaatagatactgtatgttccttaagactatgtatactagaataatagtagcagagtagggtgaaaaggaactttctgttctgaaagctaagcgactgtacgtgctactaaaaatgtctgacactgaaataattttactcaactatgttttcaacaagcaaaaatatagtattctaagattaaaatgtcattacaaagtatttagtgtgaacatttaatttaaacttgtctcatggaatctttaatttcaatgaacattacagcatatatatgttatttggcgagacatcaaataaagttaacaat

SEQ ID NO: 357096 - DNA, 1114 bp, Homo Sapiens
gtgcaggtgcacgctggtggggacattaggagcctgtcaagagtgggtctgcctgctggcacttactagacgggaaataccccctaaagagggcttaaaaagcatcttctccctagcacggggcatgctggcacagggtgctgtgtgacagaggcttggccgctgggccccgctgctgagaaggctgctccgcccatgcctggccctgtgggcagtgccagccatggatccctgagaccctgggctggaacctggggccccgtcccagccctacctgcagctcactaaccctctctgggttctgctcagtgtctgaagtgatggaaagaccccagggttggtggctgtagcggcccccaggggtggcagaaccctttgggaggccaagtgttctttcccaaagctgcgcgggtgccatcgcctgccaggccctggctgtggtgacagacgtgggctggggtgaggctgcatctgcttcctctaacagccgtggctgcctgcgggctctggcctccgctctggcagattctgcacattccctgcaggcgcaggggtgggtggggatacctatggcctcggaggaacagccagctgccctcagctcagatggcccccaagagcccccagctcctgttcactgctcttccagttagtgacccccgtgtcagcatcattgtcagagttcctgggcttgtgggggctggagaagggaaggcgctgaggagggaaagatgagtgcaggttttgttgaaaccacccgacccgcgttttcagggggacgaggccactgccttggcccaaggacctgcaggcttgggggaccccctcgatgtccactgggctgcggatgaaacatcacactgtggtaggaaaggaaggggagcacccccagacgggggggtcctgcagagaccccaaccccttacctacctagttgagacacccatggggagcagccccaacagcatgtcggagtccctaggcttgcggggtcatgctctgttgagggcccttcctctaactggcgagcttgtttacagctgagctcgcctggtcagatgggcccagtggctttatctaataaaggctggacatgtccacttcatgagcaaaa

SEQ ID NO: 357097 - DNA, 2144 bp, Homo Sapiens
  misc_feature (603)..(611): n is a, c, g, or t
tgacacaccacgcacgcagagacacacggtcactggaattccattagaaaaaagtgagcccagcaaagaatagcgggagaagatttttttgaatcttgtcttcgtcttggtgcgaaagaagcgactccagtctctcgtcctcgaagctccgactggattgttcttgggcgctgacacccgtctgtggatttcttttctatttgcattttattccgaccccctccctcgccgcttccttccagcccttcactcgcaaatcgcctctctccccacctccccaggcccctcctgggaagcgcaggggaattggacccgcggggactcacgccttcccggacgattggaggggagggctgaccccaggactgggctgttggcttagaaagccgatacacagatacgcgtatatttgattgtagcgggcaaggggggcgtcgagaggcagcagcccatcgcccgcctctcaccccaccccctccagccagaggcgagaatcgcaggactcgggatcttcatcgggtggactagctgggatctccgcattggatttggggctgattaccactgcttggctattattattgttgttgttactactattannnnnnnnnacccaagggagaaagacaaaaaaacggtgggatttatttaacatgatcttggcaaacgtcttctgcctcttcttctttctagacgagaccctccgctctttggccagcccttcctccctgcagggccccgagctccacggctggcgccccccagtggactgtgtccgggccaatgagctgtgtgccgccgaatccaactgcagctctcgctaccgcactctgcggcagtgcctggcaggccgcgaccgcaacaccatgctggccaacaaggagtgccaggcggccttggaggtcttgcaggagagcccgctgtacgactgccgctgcaagcggggcatgaagaaggagctgcagtgtctgcagatctactggagcatccacctggggctgaccgagggtgaggagttctacgaagcctccccctatgagccggtgacctcccgcctctcggacatcttcaggcttgcttcaatcttctcagggacaggggcagacccggtggtcagcgccaagagcaaccattgcctggatgctgccaaggcctgcaacctgaatgacaactgcaagaagctgcgctcctcctacatctccatctgcaaccgcgagatctcgcccaccgagcgctgcaaccgccgcaagtgccacaaggccctgcgccagttcttcgaccgggtgcccagcgagtacacctaccgcatgctcttctgctcctgccaagaccaggcgtgcgctgagcgccgccggcaaaccatcctgcccagctgctcctatgaggacaaggagaagcccaactgcctggacctgcgtggcgtgtgccggactgaccacctgtgtcggtcccggctggccgacttccatgccaattgtcgagcctcctaccagacggtcaccagctgccctgcggacaattaccaggcgtgtctgggctcttatgctggcatgattgggtttgacatgacacctaactatgtggactccagccccactggcatcgtggtgtccccctggtgcagctgtcgtggcagcgggaacatggaggaggagtgtgagaagttcctcagggacttcaccgagaacccatgcctccggaacgccatccaggcctttggcaacggcacggacgtgaacgtgtccccaaaaggcccctcgttccaggccacccaggcccctcgggtggagaagacgccttctttgccagatgacctcagtgacagtaccagcttggggaccagtgtcatcaccacctgcacgtctgtccaggagcaggggctgaaggccaacaactccaaagagttaagcatgtgcttcacagagctcacgacaaatatcatcccagggagtaacaaggtgatcaaacctaactcaggccccagcagagccagaccgtcggctgccttgaccgtgctgtctgtcctgatgctgaaactggccttgtaggctgtgggaaccgagtcagaatatttttgaaagctacgcagacaagaacagccgcctgacgaaatggaaacacacacagacacacacaccccttgc

SEQ ID NO: 357098 - DNA, 837 bp, Homo Sapiens
  misc_feature (770)..(770): n is a, c, g, or t
tccggaattcccgggatacaggcgcgagtggccgctggggttcttaacttgggtctttgaatcgccttaagaagtgtctctgaatctgggaattgcaagcaacgtttctgtgaggaccttcacacagttcatccactcttcgaagagtatggaccgaaaaaggcatagagcattcactgcacgtagagaaaatcagcaacccctgctccccaccctcagcctgaggtgcctacctccacgtggggtcaggaggcggaagcgaaaccagaagaaaaaaccctgagatctataaggcagttcaggtccctagtgacatgagctaaagagaacttggacgccaggactgtagcagacagaatccggcttcggggttcgcatcagtcgcacggaaggtggaaatagcccccaagttgtaacccgccgcggtcttccctcaacagcgcaggcgccaggactgctaggacgccgcgcacctcccgcgatgccccgccccggcgcgaggcaagacgggaaagtcaagatggacgcgtccatttgaacgtctcgcacgccttcctgccattagcactcgagcccgctgctgtagcccgaactaccaccggaaaaagggagggagagggaatgagaagctgctgcggcccaagagtcactgtgaaggaccccgccgctgccctcgggcctcctcggcccctgcgcctccggggagcagccggggctcgccgcgcctgacgcgtcccgagttatacagaaataatgttgatatttggganccatgtcgaacttctatgaagaaggacaacgatgattgcagcaagggatttgcaggaatttgttcct

SEQ ID NO: 357099 - DNA, 1813 bp, Homo Sapiens
  misc_feature (5)..(5): n is a, c, g, or t
  misc_feature (37)..(38): n is a, c, g, or t
  misc_feature (42)..(42): n is a, c, g, or t
  misc_feature (48)..(48): n is a, c, g, or t
  misc_feature (51)..(51): n is a, c, g, or t
  misc_feature (70)..(70): n is a, c, g, or t
  misc_feature (74)..(74): n is a, c, g, or t
  misc_feature (82)..(82): n is a, c, g, or t
  misc_feature (85)..(111): n is a, c, g, or t
  misc_feature (113)..(187): n is a, c, g, or t
  misc_feature (550)..(550): n is a, c, g, or t
ccttnatcccaacccttgggagttcgagttggggggnncctngggctnggntcccagactgacctgggcnacgnggggaganaannnnnnnnnnnnnnnnnnnnnnnnnnnannnnnnnnnnnnnnnnnnnnnnnnnnnnnnnnnnnnnnnnnnnnnnnnnnnnnnnnnnnnnnnnnnnnnnnnnnntaaaacgcttctgcgttggcaattgagatgatttggcgagtgtgtcttttttcattgctaaaaatctgtcacgttggctctcacagaaacttgtgatacctgaagacacaggtaatgggataaagattagcactctgggaaaaggttccacaattttattaatcatacaccatctgtgtccgcccttttaaagaaatgggcgcaatcagccaacgacctcggctttacacctgttctccaagaggccctagttgttccctactgtaagctgccccagaaaaggtccgcatcaattaacccacgggaacagcccggggctggaggatgccccaggaatccggcctcccgccgcgcctcctcccnccacaagcagttccttcctgcctgccggaagctcaggctccgcccacttcggcaactctgaagccaccgccggaaacacctggcctcagccaatagttagcttcccaggaaacgttacctctgacctcggggctaatcagagacagtgggacgcacccctcgcgagaggtgaggttgaagctgcctccgccatcttggagatgggagacgggcgatggctgtggtccttctgctaatgcaaacaacaaaacgggcacactagtcacccccgagggaggccaccatcactgtaactgttggccaaagctacaaaagaagcgagggaatccaaccgagcgcagcgacactgagaacagcttcccctgccttctgcggcggcagaagtgaagtgcctgaggaccggaaggatggtgcagtcctgctccgcctacggctgcaagaaccgctacgacaaggacaagcccgtttctttccacaagtttcctcttactcgacccagtctttgtaaagaatgggaggcagctgtcagaagaaaaaactttaaacccaccaagtatagcagtatttgttcagagcactttactccagactgctttaagagagagtgcaacaacaagttactgaaagagaatgctgtgcccacaatatttctttgtactgagccacatgacaagaaagaagatcttctggagccacaggaacagcttcccccacctcctttaccgcctcctgtttcccaggttgatgctgctattggattactaatgccgcctcttcagacccctgttaatctctcagttttctgtgaccacaactatactgtggaggatacaatgcaccagcggaaaaggattcatcagctagaacagcaagttgaaaaactcagaaagaagctcaagaccgcacagcagcgatgcagaaggcaagaacggcagcttgaaaaattaaaggaggttgttcacttccagaaagagaaagacgacgtatcagaaaagagttatgtgattctaccaatgactactttgaaatagttgaagtaccagccataaaaaaatgaaatggggattgatttctaatggggcaatacccacatatcctccttctaccctgtaaaaggagtttcaatttaaaaaaataacatttgattacttatataaaaacagttccgaatatttttttaaaaaaattctatatatactgttaaaattataaatttttttggttggaaatttcaggttttttacattttaaccaaataatttt

SEQ ID NO: 357100 - DNA, 889 bp, Homo Sapiens
gggagacgggcgatggctgtggtccttctgctaatgcaaacaacaaaacgggcacactagtcacccccgagggaggccaccatcactgtaactgttggccaaagctacaaaagaagcgagggaatccaaccgagcgcagcgacactgagaacagcttcccctgccttctgcggcggcagaagtgaagtgcctgaggaccggaaggatggtgcagtcctgctccgcctacggctgcaagaaccgctacgacaaggacaagcccgtttctttccacaaaaagaagatcttctggagccacaggaacagcttcccccacctcctttaccgcctccctgtttcccaggttgatgctgctattggattactaatgccgcctcttcagacccctgttaatctctcagttttctgtgaccacaactatactgtggaggatacaatgcaccagcggaaaaggattcatcagctagaacagcaagttgaaaaactcagaaagaagctcaagaccgcacagcagcgatgcagaaggcaagaacggcagcttgaaaaattaaaggaggttgttcacttccagaaagagaaagacgacgtatcagaaagaggttatgtgattctaccaaatgactactttgaaatagttgaagtaccagcataaaaaaatgaaatgtgtattgatttctaatggggcaataccacatatcctcctctagcctgtaaaggagtttcatttaagaaaaataacatttgattacttatataaaaacagttcagaatatttttttaacaacaaaattctatatatactgtaacaattatcacatttccggttgtaatttcaggttttttacattttaacaaaatatttaacaagttataaactaacctcagacct

SEQ ID NO: 357101 - DNA, 632 bp, Homo Sapiens
  misc_feature (376)..(398): n is a, c, g, or t
tatacgtcttagatctggattcaagtacactaattgaacatacattaaggagtcttgttgtttgatgactatttggttaggtttttaagaaatttggaggaaatcataaatctcggatttgctcagaaataacggatggggttgtaggcgatgaatgggatcaacgtgaagtaagatcacatcctcgaaaggttgggaaaatgggtccattagataaaattttttacaatgtagaaaatgaaacaaagacctgcgaagttcacctggattattgtgacagtcaactggtcatcttcctctcctgtctattttcagcatcagccagggtactgattttgaaatggattatagcactgtttcaaatcctgcaacaggnnnnnnnnnnnnnnnnnnnnnnnaaaatagcctccccattgtacctgcagccgtttttaactcaatttttctgacttctgcgctatagctgaattgacctggctaatcctctataccaagcactctgtcattaagcatttaagttgtcgttttccctttggaatgctctcagctgagctgtgtggctaatttcacttaccttcaggtctattcagtgaatcctgccttgaccaccgtattaaaaatagtagaccggc

SEQ ID NO: 357102 - DNA, 1362 bp, Homo Sapiens
  misc_feature (504)..(504): n is a, c, g, or t
  misc_feature (510)..(510): n is a, c, g, or t
  misc_feature (515)..(516): n is a, c, g, or t
  misc_feature (548)..(548): n is a, c, g, or t
  misc_feature (557)..(557): n is a, c, g, or t
  misc_feature (564)..(564): n is a, c, g, or t
  misc_feature (566)..(566): n is a, c, g, or t
  misc_feature (585)..(585): n is a, c, g, or t
  misc_feature (588)..(588): n is a, c, g, or t
  misc_feature (605)..(606): n is a, c, g, or t
  misc_feature (608)..(608): n is a, c, g, or t
cgagctcggtacccagcctttccggcgggctcccatccatctcaccccaatccccatcccacgcctcttgcccccatgctacgtggtcagtcagctccttgaaggttttcctgctctgaaccaagaaacttaagagtgtgtctttcttgctactcagccaggcaattcgtgtcccccggaagaactcctttccgctgccctcgctcactcctggaacctgctaagtctccgtggggcatgagctcagttaaagaaggggtccaagttctcttccatgttgacgtccggcaccagctggtcagacacttccttagcaccatatgctgaattcgagacgctaaaatctgtagaaaaccaaggatggtccagaatttcctgcgaggtcagccgctctgagggctcccgacgcagaatgcttcggatgaggcacttggccttgggcgacagagtctctggaatgttgaactggccacgccggatcttgctgaagagggagctgggttnaatgtnatggnnagggtcccgccccaccaccatggtgtcccgcntcccccccnggctccncncgtcggctgctttgcccgngtngctgccactggtgttcnngntctctgggcttacgtaagccgggcacccatgcttgtcggagagggaatcatcatctccccgcagaatgtaggcgtcttccaggctttccagcttgaccccgagtcctctcttcgtccttaaagatgaatttccgcagcttgaggtcccgcagcaccagccccccgtcatggcagtgggccacttgccgaggcaatctggtagcacagtctggctgcctcctcctctctcagcttcttgcaggtgcggacgaaggaatgcatgtccccatagcttcgctcaaagaacacataggctttggtctcacccaggataatttcagtgatttggttgatgttactatgagcagacaggcaaaagcacggtgccagggattcctggtagcagctgatatcaaacaccttgcacaccagctcctctccgctgtgcagatgcacggcacgaaaaacgtggtctccctccagaggttccaacaataagtatttcccgatacaagaaacgcaatgcgacaagttcggagtctcgggcgggctcggggagccgaggttcgggctgaaactctggctggctccgcggaccttatagacgacaactcttcgaaatcctgggttttgttccgcgatctcccatatctcgctattgtgatgggggtagacctgtgtatgcctcatgagtgtgaggatcgcacacgacaacaaaaataaacccgctggagagatgagtcgcatccttacactccagaccagtaccagcctt

SEQ ID NO: 357103 - DNA, 1697 bp, Homo Sapiens
  misc_feature (564)..(564): n is a, c, g, or t
  misc_feature (577)..(639): n is a, c, g, or t
  misc_feature (732)..(732): n is a, c, g, or t
  misc_feature (1424)..(1424): n is a, c, g, or t
  misc_feature (1521)..(1521): n is a, c, g, or t
  misc_feature (1564)..(1564): n is a, c, g, or t
  misc_feature (1657)..(1657): n is a, c, g, or t
  misc_feature (1677)..(1677): n is a, c, g, or t
cccgggatcggggacgcagcagtgccggggacacagaggagccgacctgggggtggcacagcccaccggggcacagccagagcagcacccaggtgcttctgaccccggcatggaggaagcgcccgcgttctcggcccaggcccgcagccagggctgctccgcccgctgcgccccaggtaagccgggccagcgtgggggagtaacggggcctgggctgcggagggggccgccctgacccgcgtctccccccagggcaaaagccccgcaaggcagtgtgagctggagccgccagcctggggacctcttttaagatgacccgtacggaccctccggacctgctggcgtcgaccgtgtaccaggacatcaaggtggcgaccccgggacccccctacaagtgctccccatgtgagcgatccaaggcccggcctgctgagcccgcgcctttcaacaagcgccactgccgcagcttcgacttcctggaggcgctggacgggccggccatggagaccctgccggagccaccgccgccggagtccgctgtgccgcgcgcccggacccgcgaancgagccacgccgnnnnnnnnnnnnnnnnnnnnnnnnnnnnnnnnnnnnnnnnnnnnnnnnnnnnnnnnnnnnnnngccggtgttgccccgccgagggcgggagggcccagcgtgcggcgcgggccgaggcatcgccgcgccggggagcccgcgtacccggcgctccgnccctttgccaacgagctgcatcccatcaagttgcagccgcagcggggcggccccggccgcgtcgcgcccctgtgcgccgccgcgggccgctgcgcaccgcccgagccacccgcgggtcccgccccccacgtgcgctgccgcctggacatcaagccagacgacgcagtgctccagcacgccacccggggctcgcggtcctgcgggcccaccgaggccgcgcactgggcccgccccgccccgcagttccacggcctcacggtgcccgggccccgccacatggcgctgtcgcgcaccccgacgcccagcgactcatactgtgcggatccccgggcgttctactgcgacgggcccctgcccgggccccgggactacgccgagcgccgcagtctgcccttcaccaccccgccgggccccacccagttcttctatacagaggagccccaaggcttccggggcagctttgcagccagtcccggcccaaccttcgacgcctactaccccaggccctatccgtccgaggagctctcggggcccagtccaaggcgcatgggcggctactacgcaggagaggtgcgcaccttcccaatccaggaaccgccctcccgctcctactatggggaggctccacgagcctacggcctgccctacgggccccgctatgtccccgaggagccccgggcccactccaccgnccgccccttttacacggaggacttcggaaggtaccgcgagcgtgacgtcctgacttcggacgtacccgcacccgcgcagaagccccggcctgggcgngactggggccccgcgaaccgtaccgcaccctgcaaaggggtgnccgcccctctgaccccgacccgttgctcgccttctggcacgggggcaccggcaacagtccgccccggctggccaccgacagccgccactactngggctcctgggacaacattntggcccccggggccgcgccg

SEQ ID NO: 357104 - DNA, 1396 bp, Homo Sapiens
  misc_feature (40)..(40): n is a, c, g, or t
  misc_feature (1347)..(1348): n is a, c, g, or t
  misc_feature (1351)..(1351): n is a, c, g, or t
taatgttgcatactacttagttagtgtatggtgaaaatanaagtacacaatagaactgacgtaaacatcctcaggagaaccgtggtccagataggtagtgatccaccactccaaaactatggtcgcggccgcatacagcggaaatacggggaatgagatataggtggagacagtgagacgttagcgaagtgatagaatttgtcgagctgggtgcagggtgctccgccataatcgtatcagagagggcagtgtggatcgcttgcgcgaacacgaggaggagcacggaacccacgcagcagggagtggcacgcgaaccggtgggtggttgatggggggtgtgcaccgcaaggcgcatgcttgagaattgcctaggctgggtattatctgctccattgctagcgtgagagcgagcctacgtatgttgtgtacatgcgggggcgttcttcgtcgtgttggggaagttatcatgaaatgttgctcgacatctgtatctacctatcggcctctgagggaggcgcgaggtcgttattacgttaattgtaggaggggaattactgcaattcgcccgcgttcggccctatcccgaaggaggggggccagcgaacatcttggcagtaggtccccggagccccccgacactatcccacgggcaagccgggagcgcacctgactccgtagggccatggcggccaccgcctagataagcgctaccctcccgtcaggccaggggcaaaccgcgggatgtgaaagcagggaagtgggagggcaaggcaacggagggcgcgcggaggggccactcttggagccgcggccctggcgaagcttagtgggcgtttccgggttccgggtcgtgcggctacagcgtattccgggcggcggcggctccgacaaggtcgtccatgcccggccggtccaggagcctccaggaagtcgaagctgcggcactggcgcttgctgaaaggcgcgggctcagcaggccgggccacggatcgctcacatggcgagcacttggacgcgggtcccggggtcgccaccgtgatgtcctggtacacggtcgacaccagcaggtccggagggtccgtacgggtcatcttaaaagaggtccccaggctggcggctccagctcacactgccttgcggggcttttgccctggggcgcagcgggcggagcagccctggctgcgggcctgggccgagaacgcgggcgcttcctccatgccggggtcagaagcacctgggtgctgctctggctgtgccccggtgggctgtgccacccccaggtcggctcctctgtgtccccggcactgctgcgtccccgatcccgggaattccggaccggtaccgacnngcnccggcgccgccccgagggcccggcagggagagtgttagatgatat

SEQ ID NO: 357105 - DNA, 902 bp, Homo Sapiens
aaatacataaatatgcctctcatcatgcagcattgaccaacttgcctccaccacaggaaaattcctgtatgttgctactcctaaaggccactgaaaaacatccacgtcagtaatcccaggggctgtcatatattatgaaaagcagctccacgaagcctccatttcttttgaggaatgggtttatccactcattatcacaatgttcatttccgagcaaaaacaacagcaagatgctggagtttttgaatttgcactaaattttgtgcataaagtaaccactgggtggcataaaagatctttgctttttctcgttccatttaaaaatgagtaccacattattcacatcaacggagaagtaccctggtattacagctggaccagtgatgaagctgtactgtgttcttcctacgattgactttccttctctccattgagcagtcacatcgctgggatcaagtaagccttcaaaaatatgctcccagagatacaagccaatggcagctttgccccagatttgtacactgagatctgtttttcctttcgtggatttatctaatatttgaaggctagttttaaatctgtgttgttgctcatttttttcatctccttcccaaggattccattcttcactttccaaagtggactgttctcggccgcgtctctcccgcgcgggggccgcccccttcctgaggccccgcggggacccggccggcgcctggcggcggcgcccgaagaagacgtggtaggcagcgtagagggagaataggcagtacagggcgataagaaacgagcagagccgcttccgcgtcagccgcatcccactcgggcttccagtcaggcatccaccgccatggagcgggcggaaagagaatccgcgacaccggcggcgtccgaggcaggcc

SEQ ID NO: 357106 - DNA, 953 bp, Homo Sapiens
aggccttctccatccatgccaggcatttgaaccaaacttgccctcccacccccaggaaaaattccctgtatggtgcttccttcctaaagggccactgaaaaaccatcccagtccattaatccagggggctgtcatatattatgaaaagcagttccacgaagcctccatttcttttgaggaatgggtttatccactcattatcacaatgttcatttccgagcaaacaacagcaagatgctggagtttttgaatttgcactaaattttgtgcataaagtaaccactgggtggcataaaagatctttgctttttctcttccatttaaaatgagtaccacattattcacatcaacggagaagtaccctggtattacagctggaccagtgatgaagctgtactgtgttcttcctacgattgactttccttctctccattgagcagtcacatcgctgggatcaagtaagccttcaaaaatatgctcccagagatacaagccaatggcagctttgccccagatttgtacactgagatctgtttttcctttcgtggatttatctaatatttgaaggctagttttaaatctgtgttgttgctcatttttttcatctccttcccaaggattccattcttcactttccaaagtggactgttctcggccgcgtctctcccgcgcgggggccgcccccttcctgaggccccgcggggacccggccggcgcctggcggcggcgcccgaagaagacgtggtaggcagcgtagagggagaataggcagtacagggcgataagaaacgagcagagccgcttccgcgtcagccgcatcccactcgggcttccagtcaggcatccaccgccatggagcgggcggaaagagaatccgcgacaccggcggcgtccgaggcaggcccagcccgtttccaggcagtccccagccaaggctcctccgaccccccgct

SEQ ID NO: 357107 - DNA, 1060 bp, Homo Sapiens
cggcttccttccggctctgcgctcctggctggggctgctgggcggctggggccgggtccccgcacccggctctcaatgtccgggattacccgcagggcctgagaagcgctttgccccctacagcctctcgagccagcccttggctcggaattggagaatggtcctcattcttacccagatctcacacgccgtccccgctcccgatcccagggggtgacaggcgcgcacgcctttcaaacacgtgttaaaatccaagacgtcgtctcaaatgccagagatttgcgggaatgctcctggaaggcctcaaaatcgccgcaaggtttaagacatccgtttccatgttgaaacaaagccctctctaatcctgcagtgaccataaggcagactttacctccaaattctggtcccctgtcctgtgttttaacttgtgttaagatcagactcggctctctctttccctttattcagaattttgcacgatagtatctaagactggtgaacactacactctgaagtcagttttttgtgcataggttacctgtatacaatggataaaaataattgcaaaagttaagcttggaacttgatacatattatcctgttatttttaaaaggttctgtgttggggaagagaattttcctgtctcaaggtagcattttatttctaagacttttcagagtaaaaaaagttcagtaaaacaaattgcccgattttccttcttggttttcattggggattaccagtttaaattcacgttgctgtacctctcaaaaaattaaagttagggtggaaatttgaactaaccacttaatttaaatgattttgaatttaccctacaacttgcaataaaacccttacgggggaaaacaactttcctctttttttaaaaaaagaaacagttcccaccttttgggaaaatgtgaaagaaatgcgaaatccctttgtgggaaagggtagaattgaaaaataaatatgcggcccacccaaccccccggatatttttaaaaacctgagcgcccttctcaaaatattttggaacataaaatccctcccgaaagc

SEQ ID NO: 357108 - DNA, 1076 bp, Homo Sapiens
  misc_feature (750)..(750): n is a, c, g, or t
  misc_feature (969)..(969): n is a, c, g, or t
tggtaccggtccggaattcccgggatcgaggtaggactgggtcggcggcttccttccggctctgcgctcctggctggggctgctgggcggctggggccgggtccccgcacccggctctcaagtccgggattacccgcagggcctgagaagcgctttgccccctacagcctctcgagccaccccttggctcggaattggagaatggtcctcattcttacccagatctcacacgccgtccccgctcccgatcccagggggtgacaggcgcgcacgcctttcaaacacgtgttaaaatccaagacgtcgtctcaaatgccagagatttgcgggaatgctcctggaaggcctcaaaatcgccgcaagaacagtccactttggaaagtgaagaatggaatccttgggaaggagatgaaaaaaatgagcaacaacacagatttaaaactagccttcaaatattagataaatccacgaaaggaaaaacagatctcagtgtacaaatctggggcaaagctgccattggcttgtatctctgggagcatatttttgaaggcttacttgatcccagcgatgtgactgctcaatggagagaaggaaagtcaatcgtaggaagaacacagtacagcttcatcactggtccagctgtaataccagggtacttctccgttgatgtgaataatgtggtactcattttaaatggaagagaaaaagcaaagatcttttatgccacccagtggttactttatgcacaanatttagtgcaaattcaaaaactccagcatcttgctgttgttttgctcggaaatgaacattgtgataatgagtggataaacccattcctcaaaagaaatggagggcttcgtggagctggcttttcataatatatgacagccccctggaataatgacgtgggatgtttttcagtgggcctttaggagtagcaaccatacaggaaattttccctggggtggnaggcaagttgggccaaatgctgcatgatgaaaaagccaatatttatgtaaattccttaggaaccgatttatgaaaaattcatcccgaacaggccactaagtgaacct

SEQ ID NO: 357109 - DNA, 1876 bp, Homo Sapiens
  misc_feature (3)..(3): n is a, c, g, or t
  misc_feature (21)..(21): n is a, c, g, or t
  misc_feature (24)..(24): n is a, c, g, or t
  misc_feature (37)..(37): n is a, c, g, or t
  misc_feature (47)..(47): n is a, c, g, or t
  misc_feature (74)..(74): n is a, c, g, or t
  misc_feature (97)..(97): n is a, c, g, or t
  misc_feature (133)..(150): n is a, c, g, or t
  misc_feature (154)..(154): n is a, c, g, or t
  misc_feature (159)..(159): n is a, c, g, or t
  misc_feature (203)..(203): n is a, c, g, or t
  misc_feature (217)..(217): n is a, c, g, or t
  misc_feature (250)..(250): n is a, c, g, or t
  misc_feature (312)..(312): n is a, c, g, or t
  misc_feature (443)..(443): n is a, c, g, or t
  misc_feature (692)..(692): n is a, c, g, or t
agnaggcaggagggagggagnatnccaagggggaganaagggctggnccccctgcaaggaaaacaaggcttcanccttccctactcccagacctgcngggaaggctgggagcacagttcatggagggtctctnnnnnnnnnnnnnnnnnntgangtgtncctctgcccacaggtgaatgtgacctgcgtcctgaggatcccgngtatcaggagagcnggcagaggaagtcatgcagaggcaaagccaggngccccgaaaggagatccccagtgtgtcagagatgcaggtggccgccattgcaaactcccggngctcatcactggtctccagggcgatgttgtggaaggtgttcacgtaggctgcgcctcccaggagcccctcatacagaatgatcaggaagacgaggtagatgcttggcagaaagccgaaccacacgtctgcnagcaggaacaccaggttgaggcactgcagcagggccagggcccaggtgaaacggatgcgacagcagcggagagaagagcgggaggcaaagacgccagcctggtacagcatctggtaccagcggtattgctgagcgtgactcagggaagtgttccagaaaaagaggagttcaaactgcaacaaataccagacaggggagatggacggggctgtgtgggtcccagccccaatcgccacctccaaacccctnctagaacccctcacttacaagtccctggttaatgaaatactcggcaaagtaaactacgaccaagggaacaatgtaccacagcagaccctggaaaaggcagaagatataagcggggggcctggaggtgagcaagccccacagggacataccccagccatcatccgaaccttgaacactgtccacctttcccgaagaggagaggctggagctggagcctggcttcgactccggggcctcggttcttatgaggggctgccgggctgcgctctctgcttcttcttcccctccagggtcctgggcctcaggagatgtgagcaacaagaaatagctggccagcagcagggcagggatacccagcatggacagcagggtctgctgaggggagaggccggcctgggtgaggcccaggtaggacagggcccccagcagcccagctcccccagtccctgaggaccaccaggagatcacggccctggggtagaaggcagtgagggagaggaaggtgacctccccaaggcctgatgagatgctagcgaagaccacaccacacaggctggtccccacagaatgagaaaaggcaaccaggacgaagcttccagcagcacaaatcccactgacgagaacccgggggctgtagggcagcaggtgaaggccaagaggagccaacaatttgatgacgagtgtggggaggatgtccgccaggagcacagcagccgtagagacagagttgcagtcaaatcgtgatgagctgttgtgggggatcggcgttgggcctgggtccacatggctctggtttcccgatgtcctcttgtggctaaggatgtcgtgggcggcactcagcatcaccacataagagaagttgttgcaaaggcccagcagccagaagcccaccgcgttcttccaatgcgcgccctgatggtccaacagagggagccggggctccgggacggtctcctccccctcggaatccgaaaagcgccgccgcgagcctgcacagcctcccatcgcatcaagttcaggtcccccgagggtccagggtcatagagtgtccaaagggggctcccacgggagggatgagggtctttaagagcagcagaatgttctgcactatgcagaggccgtcgatcgcaaaatccgcccggcccttctggttttcttagtgttctcagcttcctcgtccccct

SEQ ID NO: 357110 - DNA, 1095 bp, Homo Sapiens
gacaaacggcctctgcatagtgcagaacattctgctgctcttaaagaccctcatccctcccgtgggtagccccctttggacactctatgaccctggaccctcgggggacctgaacttgatgcgatgggaggctgtgcaggctcgcggcggcgcttttcggattccgagggggaggagaccgtcccggaacattctgctgctcttaaagaccctcatccctcccgtgggagccccctttggacactctatgaccctggaccctcgggggacctgaacttgatgcgatgggaggctgtgcaggctcgcggcggcgcttttcggattccgagggggaggagaccgtcccggagccccggctccctctgttggaccatcagggcgcgcattggaagaacgcggtgggcttctggctgctgggcctttgcaacaacttctcttatgtggtgatgctgagtgccgcccacgacatccttagccacaagaggacatcgggaaaccagagccatgtggacccaggcccaacgccgatcccccacaacagctcatcacgatttgactgcaactctgtctctacggctgctgtgctcctggcggacatcctccccacactcgtcatcaaattgttggctcctcttggccttcacctgctgccctacagcccccgggttctcgtcagtgggatttgtgctgctggaagcttcgtcctggttgccttttctcattctgtggggaccagcctgtgtggtgtggtcttcgctagcatctcatcaggccttgggcgaggtcaccttcctctccctcactgcccttctaccccagggcccgcgatctcctggtggtcctcagggactgggggagctggggctgctggggggccctgtcctacctgggcctcacccagggcggccctctccctcaacaaaccctgctgtccatgctggggtatccctgccctggctgctggcccagctattttcttggttgctcacatcctcctgagggcccagggacccctgggaggggggaagaaaggaagcccgaagaagccggtcagccccggggaggcccccctccatagaacaacccgcagggcct

SEQ ID NO: 357111 - DNA, 1753 bp, Homo Sapiens
  misc_feature (42)..(67): n is a, c, g, or t
tctcagggtccctgctgtagacggggcgggggagagtacgannnnnnnnnnnnnnnnnnnnnnnnnncgctcgagatggagcccccagcttccttgatggatcgcggggcgcgagtgccctagacaagccggagctgggaccggcaatcgggcgttgatccttgtcacctgtcgcagaccctcatccctcccgtgggagccccctttggacactctatgaccctggaccctcgggggacctgaacttgatgcgatgggaggctgtgcaggctcgcggcggcgcttttcggattccgagggctgctgggcctttgcaacaacttctcttatgtggtgatgctgagtgccgcccacgacatccttagccacaagaggacatcgggaaaccagagccatgtggacccaggcccaacgccgatcccccacaacagctcatcacgatttgactgcaactctgtctctacggctgctgtgctcctggcggacatcctccccacactcgtcatcaaattgttggctcctcttggccttcacctgctgccctacagcccccgggttctcgtcagtgggatttgtgctgctggaagcttcgtcctggtttgccttttctcattctgtgggggaccagcctgtgtggtgtggtcttcgctagcatctcatcaggccttggggaggtcaccttcctctccctcactgccttctaccccagggccgtgatctcctggtggtcctcagggactgggggagctgggctgctgggggccctgtcctacctgggcctcacccaggccggcctctcccctcagcagaccctgctgtccatgctgggtatccctgccctgctgctggccagctatttcttgttgctcacatctcctgaggcccaggaccctggaggggaagaagaagcagagagcgcagcccggcagcccctcataagaaccgaggccccggagtcgaagccaggctccagctccagcctctcccttcgggaaaggtggacagtgttcaagggtctgctgtggtacattgttcccttggtcgtagtttactttgccgagtatttcattaaccagggactttttgaactcctctttttctggaacacttccctgagtcacgctcagcaataccgctggtaccagatgctgtaccaggctggcgtctttgcctcccgctcttctctccgctgctgtcgcatccgtttcacctgggccctggccctgctgcagtgcctcaacctggtgttcctgctggcagacgtgtggttcggctttctgccaagcatctacctcgtcttcctgatcattctgtatgaggggctcctgggaggcgcagcctacgtgaacaccttccacaacatcgccctggagaccagtgatgagcaccgggagtttgcaatggcggccacctgcatctctgacacactggggatctccctgtcggggctcctggctttgcctctgcatgacttcctctgccagctctcctgatactcgggatcctcaggacgcaggtcacattcacctgtgggcagagggacaggtcagacacccaggcccaccccagagaccctccatgaactgtgctcccagccttcccggcaggtctgggagtagggaagggctgaagccttgtttcccttgcaggggggccagccattgtctcccacttggggagtttcttcctggcatcatgccttctgaataaatgccgattttatccatggaaaagcaacaagacaaacacacac

SEQ ID NO: 357112 - DNA, 1073 bp, Homo Sapiens
cctcaggtccctgctgtagacggggcgggggagagtacgatgggtggggcgtggtgggtcgtagggcgctcgagatggagcccccagcttccttgatggatcgcggggcgcgagtgccctagacaagccggagctgggaccggcaatcgggcgttgatccttgtcacctgtcgcagaccctcatccctcccgtgggagccccctttggacactctatgaccctggaccctcgggggacctgaacttgatgcgatgggaggctgtgcaggctcgcggcggcgcttttcggattccgagggggaggagaccgtcccggagccccggctccctctgttggaccatcagggcgcgcattggaagaacgcggtgggcttctggctgctgggcctttgcaacaacttctcttatgtggtgatgctgagtgccgcccacgacatccttagccacaagaggacatcgggaaaccagagccatgtggacccaggcccaacgccgatcccccacaacagctcatcacgatttgactgcaactctgtctctacggctgctgtgctcctggcggacatcctccccacactcgtcatcaaattgttggctcctcttggccttcacctgctgccctacagcccccgggttctcgtcagtgggatttgtgctgctggaagcttcgtcctggttgccttttctcattctgtggggaccagcctgtgtggtgtggtcttcgctagcatctcatcaggcctttggggaggtcaccttcctctccctcaactgccttctacccccagggccgtgaatctcctggtggtcctcaaggactgggggggaacttggggcttctgggggcccactgaccaaccgtggggcccccaaccaaggtgggctctatcccttaaaaaaactcctgccgtgcccatggcgggggaaaattcctgccgctgtattggaaggcgccacgtttattcacttggggtgggcctcccgactttctcttggagggcgcccagggtacccgcctggacggggggggaagggaggcgaagcttacttataagcggcgaacaaccccgggc

SEQ ID NO: 357113 - DNA, 1669 bp, Homo Sapiens
  misc_feature (112)..(112): n is a, c, g, or t
  misc_feature (119)..(119): n is a, c, g, or t
  misc_feature (124)..(124): n is a, c, g, or t
  misc_feature (185)..(185): n is a, c, g, or t
  misc_feature (200)..(200): n is a, c, g, or t
  misc_feature (219)..(219): n is a, c, g, or t
  misc_feature (224)..(224): n is a, c, g, or t
  misc_feature (245)..(245): n is a, c, g, or t
  misc_feature (247)..(247): n is a, c, g, or t
  misc_feature (293)..(294): n is a, c, g, or t
  misc_feature (351)..(351): n is a, c, g, or t
  misc_feature (365)..(365): n is a, c, g, or t
  misc_feature (370)..(370): n is a, c, g, or t
  misc_feature (403)..(403): n is a, c, g, or t
  misc_feature (429)..(429): n is a, c, g, or t
  misc_feature (433)..(433): n is a, c, g, or t
  misc_feature (435)..(435): n is a, c, g, or t
  misc_feature (546)..(546): n is a, c, g, or t
  misc_feature (594)..(594): n is a, c, g, or t
  misc_feature (655)..(655): n is a, c, g, or t
  misc_feature (704)..(704): n is a, c, g, or t
tgctcctctttgtaatgcaggggagggaagacctaggagcgtggtcctcataagaatcacctgggctgcttgttcaactcctgtttcctgagcctcatacccagtgattcanatcccanaaaantggggagccccagattctgaattgttaacaaacaccctaggaatttgctacaggtggaganatattgagtttaaangtatttgtcatgcaaaaanaaaancacaaagatcaatgattaaanangggacctaccgaacattttggtcttccaagaaaaaatctttctcannccacactctggagactggcattagggaacctgtaccgtgtgccaggcagtgtagaangtatgacttggaangacangctcttgtggttgaagaaacactctccacccangctcctgcccaatgtgggagcctcanccananccttacagcgtccctgccaaagggtcttctggcctctgctcgaatgccttcaacatcaaagaactcacctctcaaagcagcccacactatgttggattcgccctgtttatnaatcctttctcaaatggagctaaaatctgccaccaccataatttccanacattggtgccatatacagtaagactacttcttccttctggttataacacctttaaatatntggaaatagtattctcgtctccagactaaacactcatccatttgtgcanaagtattctttgaacattttctgtgaatcaggattgtcctagatgctggggagatacaagagagacaggcagggtacctgctgggatgtcctaggggggatggctagatcataagcatgtaaatgaacagaaagtggcagatagtagttagaagagaataaaacaggctagcagcatggtaggtattggctggaggtgccacactagataagagatcagataaggcttctctgagaaggtgacactgggactgaggcctgcaggacaacagagagccaccctggagggagtgttccaggcacagaatcatcaaggccctaaagcgggttgagctggatgtgttcagcaggcagaagggaggctgccggttcacgccatgaggcccaacagaggagtgggcagagtctgcagcagatggtgggccttttaggccgggagaaagactttgaattttatatttcaaatgaaaggggaggccgctgccctacttgtttatgccacagttcagaagccttttccctgcctggccctcccctggatgtgcgcagtgccagtgccgcccttcagctgggtctgatgagcacagagcagttgccccagctgctgtcctctcaagcacataaagcagttttgcaggaatttatttttcctttttagagaaatgaataggttcacaaaaatatttttacacataaaccctcagaagaattaattagtgccattgagtccaaaatccagaattattccccattgtataaaaaaatactttaagaacttttttgggagagtaggactttaacctatgcggtacctgatgtccggagctgtaatggcctggagctctgtgtctggtatgtagagacacccaagcttaagtttttccctgttcaggaaaacatattggaacttgaaacaagaaggctgtgttcctttgtttttgggggaaaggtgaggaccttggagaa

SEQ ID NO: 357114 - DNA, 1085 bp, Homo Sapiens
  misc_feature (967)..(967): n is a, c, g, or t
  misc_feature (992)..(993): n is a, c, g, or t
  misc_feature (1006)..(1006): n is a, c, g, or t
  misc_feature (1024)..(1024): n is a, c, g, or t
  misc_feature (1026)..(1026): n is a, c, g, or t
  misc_feature (1030)..(1030): n is a, c, g, or t
  misc_feature (1037)..(1037): n is a, c, g, or t
  misc_feature (1043)..(1043): n is a, c, g, or t
  misc_feature (1050)..(1051): n is a, c, g, or t
  misc_feature (1054)..(1054): n is a, c, g, or t
  misc_feature (1060)..(1060): n is a, c, g, or t
  misc_feature (1066)..(1066): n is a, c, g, or t
  misc_feature (1069)..(1069): n is a, c, g, or t
ggaattcccgggattcggccggcgctgacgcagccatggcggaggcggctttggaagccgtgcggagcgagttacgagaattcccggccgctgcaagggagctctgcgtgcctcttgctgtgccctacctggacaaacccccaactccgctccacttctaccgggactgggtctgccccaacaggccgtgcattatccgcaacgctctgcagcactggccggccctccagaagtggtccctcccctatttcagagccacagtgggctccacagaggtgagtgtggccgtgaccccagatggttacgcggatgccgtgagaggggatcgcttcatgatgccagctgagcgccgcctgcccctgagcttcgtgctggatgtgctggagggccgggcccagcaccctggagtcctctatgtgcagaagcagtgctccaacctgcccagcgagctgccccagctgctgcctgatctggaatcccatgtgccctgggcctccgaagccctgggaaagatgcccgatgctgtgaacttctggctgggggaggcggctgcagtgacttctttgcacaaggaccactatgagaacctctactgcgtggtctcaggagagaagcatttcctgttccatccgcccagcgaccggcccttcatcccctatgagctgtacacgccggcaacctaccagctaactgaagagggcacctttaaggtggtggatgaaggaggccatggagaaggtgccctggatcccactggaccccttggcgccagaacatagcacggtaccctagttacagtcaggcccaggcccttcgctgcacggtgcgggccggtgagatgctctatctgccggctctgtggttccaccacgtccagcagtcccagggctgcatcgcagtgaatttctggtatgacatggaatacgacctcaagtatagttacttccagctgctcgactccctcacnaaggcttcaggccttgactgatggnnactggtgacacancaagcacgctcgggggangngcanccctccntggcangtcattnnganaagctngagttnatntggtgttgcccgggtc

SEQ ID NO: 357115 - DNA, 1003 bp, Homo Sapiens
  misc_feature (801)..(801): n is a, c, g, or t
  misc_feature (847)..(847): n is a, c, g, or t
gccgtgcattatccgcaacgctctgcagcactggccggccctccagaagtggtccctcccctatttcagagccacagtgggctccacagaggtgagtgtggccgtgaccccagatggttacgcggatgcagtgacttctttgcacaaggaccactatgagaacctctactgcgtggtctcaggagagaagcatttcctgttccatccgcccagcgaccggcccttcatcccctatgagctgtacacgccggcaacctaccagctaactgaagagggcacctttaaggtggtggatgaagaggccatggagaaggtgccctggatcccactggaccccttggcgccagacctagcacggtaccctagttacagtcaggcccaggcccttcgctgcacggtgcgggccggtgagatgctctatctgccggctctgtggttccaccacgtccagcagtcccagggctgcatcgcagtgaatttctggtatgacatggaatacgacctcaagtatagttacttccagctgctcgactccctcaccaaggcttcaggccttgactgatggagcactggtgaacaccaccaagcacgcctcgggggacggagccagcccctccctggccaggtcaattctcgagagagcctggagtgtgcatgctggctgctggccccgggtccagcatggcttgagatcagctttggaggatcttggaatgtggtcataaggactcaaggtcccaggcaggtcctgggtgagggttcctcaggaagttgcccacacaggtgagcagagtggggatncaggtgcagcggcacctctccccagcgctgtgatgttgggcgagtncactgcgtctcgggcattggtgtcctgtcagtaaagagataataatggctgtacctcgcggggctgttgtgggcttggagatgatgtctatgaggaccagcatggagctggcacacaggacatgttgaataaaaggtagctgtgagtcgtatgtcc

SEQ ID NO: 357116 - DNA, 2449 bp, Homo Sapiens
  misc_feature (11)..(11): n is a, c, g, or t
  misc_feature (33)..(33): n is a, c, g, or t
  misc_feature (70)..(70): n is a, c, g, or t
  misc_feature (105)..(105): n is a, c, g, or t
  misc_feature (2284)..(2284): n is a, c, g, or t
  misc_feature (2329)..(2346): n is a, c, g, or t
  misc_feature (2348)..(2348): n is a, c, g, or t
gcgacttccgntcttccccgccccccgccatgngcagcccggggagcagaacgctgcggaccgcggcganggacgctccggcccctgagccggccgagcggcgancggaccgcgagatgaggaaaatgaggcccaaagaagtgatgccacttggttaaggtcccagagcaggtcagaatcagacctaggatcagaaacctggctcctggctcctggctccctactcttctaaggatcgctgtcctgacagaagagaactcctctttcctaaaatggagtcgagtaaaaagatggactctcctggcgcgctgcagactaacccgccgctaaagctgcacactgaccgcagtgctgggacgccagtttttgtccctgaacaaggaggttacaaggaaaagtttgtgaagaccgtggaggacaagtacaagtgtgagaagtgccacctggtgctgtgcagcccgaagcagaccgagtgtgggcaccgcttctgcgagagctgcatggcggccctgctgagctcttcaagtccaaaatgtacagcgtgtcaagagagcatcgttaaagataaggtgtttaaggataattgctgcaagagagaaattctggctcttcagatctattgtcggaatgaaagcagaggttgtgcagagcagttaacgctgggacatctgctggtgcatttaaaaaatgattgccattttgaagaacttccatgtgtgcgtcctgactgcaaagaaaaggtcttgaggaaagacctgcgagaccacgtggagaaggcgtgtaaataccgggaagccacatgcagccactgcaagagtcaggttccgatgatcgcgctgcagaaacacgaagacaccgactgtccctgcgtggtggtgtcctgccctcacaagtgcagcgtccagactctcctgaggagcgagttgagtgcacacttgtcagagtgtgtcaatgcccccagcacctgtagttttaagcgctatggctgcgtttttcaggggacaaaccagcagatcaaggcccacgaggccagctccgccgtgcagcacgtcaacctgctgaaggagtggagcaactcgctcgaaaagaaggtttccttgttgcagaatgaaagtgtagaaaaaaacaagagcatacaaagtttgcacaatcagatatgtagctttgaaattgaaattgagagacaaaaggaaatgcttcgaaataatgaatccaaaatccttcatttacagcgagtgatagacagccaagcagagaaactgaaggagcttgacaaggagatccggcccttccggcagaactgggaggaagcagacagcatgaagagcagcgtggagtccctccagaaccgcgtgaccgagctggaaagcgtggacagagcgcggggcaagtggctcggaacacaggcctgctggagtaccagctgagccggcatgaccagatgctgagtgtgcacgacatccgcctagccgacatggacctgcgcttccaggtcctggagaccgccagctacaatggagtgctcatctggaagattcgcgactacaagcggcggaagcaggaggccgtcatggggaagaccctgtccctttacagccagcctttctacactggttactttggctataagatgtgtgccagggtctacctgaacggggacgggatggggaaggggacgcacttgtcgctgttttttgtcatcatgcgtggagaatatgatgccctgcttccttggccgtttaagcagaaagtgacactcatgctgatggatcaggggtcctctcgacgtcatttgggagatgcattcaagcccgaccccaacagcagcagcttcaagaagcccactggagagatgaatatcgcctctggctgcccagtctttgtggcccaaactgttctagaaaatgggacatatattaaagatgatacaatttttattaaagtcatagtggatacttcggatctgcccgatccctgataagtagctggggaggtggatttagcagaaggcaactcctctgggggatttgaaccggtctgtcttcactgaggtcctcgcgctcagaaaaggaccttgtgagacggaggaagcggcagaaggcggacgcgtgccggcgggaggagccacgcgtgagcacacctgacacgttttataatagactagccacacttcactctgaagaattatttatccttcaacaagataaatattgctgtcagagaaggttttcattttcatttgtaaagatctagttaattaaggtggaaaacatatatgctaaanaaaagaaacatgatttttcttccttaaacttgaacaccaaaaaannnnnnnnnnnnnnnnnngnggggatagctggacatgtcagcatgttaagtaaaaggagaatttatgaaatagtaatgcaattctgatatcttctttctaaaattcaagagtgcaattttg

SEQ ID NO: 357117 - DNA, 582 bp, Homo Sapiens
aggccaaatagttgcatcacatgtatctaatccgagagtctcatgcttctggtagctcctcagtgaccagctcctgctcactgccctcagaaagcccaaccctcaggcaatggcggccttgttcctgtctgccccaccccaggccgaggtgaccttcgaggacgtggctgtgtacctctcccgggaggaatggggccgcctgggccctgctcagaggggcctctacagggacgtgatgctggagacatacgggaacctagtctcactggctcttgggaccagaactgagtacaaggagttgacttcacaggagacatttggtgaggaagatccccagggatctgagccagtagaagcctgtgaccacatcagtaagtcagaggggagcctggaaaagctagtggagcagagacgccccagggcagtcacactgaccaacggggagagcagcagggagtctgggggaaacctcaggttgctgtcaagacctgttcctgatcagagacctcacaaatgtgatatatgtgagcaaagttttgaacagagatcatatctcaacaaccataagcgtgtacacaggtc

SEQ ID NO: 357118 - DNA, 1088 bp, Homo Sapiens
  misc_feature (760)..(821): n is a, c, g, or t
  misc_feature (847)..(847): n is a, c, g, or t
  misc_feature (851)..(851): n is a, c, g, or t
  misc_feature (858)..(858): n is a, c, g, or t
  misc_feature (885)..(885): n is a, c, g, or t
  misc_feature (914)..(914): n is a, c, g, or t
  misc_feature (944)..(944): n is a, c, g, or t
  misc_feature (965)..(965): n is a, c, g, or t
  misc_feature (968)..(968): n is a, c, g, or t
  misc_feature (972)..(972): n is a, c, g, or t
  misc_feature (981)..(981): n is a, c, g, or t
  misc_feature (987)..(987): n is a, c, g, or t
  misc_feature (993)..(993): n is a, c, g, or t
  misc_feature (996)..(996): n is a, c, g, or t
  misc_feature (1000)..(1000): n is a, c, g, or t
  misc_feature (1014)..(1014): n is a, c, g, or t
  misc_feature (1016)..(1016): n is a, c, g, or t
  misc_feature (1018)..(1018): n is a, c, g, or t
  misc_feature (1029)..(1029): n is a, c, g, or t
  misc_feature (1037)..(1037): n is a, c, g, or t
  misc_feature (1040)..(1040): n is a, c, g, or t
  misc_feature (1052)..(1056): n is a, c, g, or t
  misc_feature (1070)..(1070): n is a, c, g, or t
  misc_feature (1074)..(1074): n is a, c, g, or t
  misc_feature (1076)..(1076): n is a, c, g, or t
  misc_feature (1080)..(1080): n is a, c, g, or t
  misc_feature (1086)..(1086): n is a, c, g, or t
tcgcaggacctcatgagtaagctgtggcggcgtgggagcacctctggggctatggaggcccctgagccgggagaagccctggagttgagcctggcgggtgcccatggccatggagtgcacaagaaaaaacacaagaagcacaagaagaaacacaagaagaaacaccatcaggaagaagacgccgggcccacgcagccgtcccctgccaagcctcagctcaaactcaaaatcaagcttgggggacaagtcctggggaccaagagtgttcctaccttcactgtgatcccagaggggcctcgctcaccctctccccttatggttgtggataatgaagaggaacctatggaaggagtcccccttgagcagtaccgtgcctggctggatgaagacagtaatctctctccctctccacttcgggacctatcaggagggttagggggtcaggaggaagaggaggaacagaggtggctggatgccctggagaagggggagctggatgacaatggagacctcaagaaggagatcaatgagcggctgcttactgctcgacagcgagctctgctccagaaggcgcggagtcaaccttcccctatgctgccgctgcctgtagctgagggctgcccacctcccgccctcacagaggagatgctgctgaagcgcgaggagcgggcgcggaagcggcggctccaggcggcgcggcgggcagaagagcacaagaaccagactatcgagcgcctcaccaagactgcggcgaccagtnnnnnnnnnnnnnnnnnnnnnnnnnnnnnnnnnnnnnnnnnnnnnnnnnnnnnnnnnnnnnnccccatggtgcgctactgcagcgganacangggttcnccctttccttccacctggcgtcccgcnccacgggagtgtctcagcggcatcccctnaggcccgccgccgcgctgctctgtcccggntgtcccatccgggcgctacgnttntccngacaggcanggactntgtgtnttngtgntccgctcaacttgngntngggtggggggncgggggcntgntcgccctttggnnnnnaggccttaaccggntctngnccgncccatncc

SEQ ID NO: 357119 - DNA, 1192 bp, Homo Sapiens
  misc_feature (139)..(187): n is a, c, g, or t
  misc_feature (677)..(677): n is a, c, g, or t
  misc_feature (688)..(726): n is a, c, g, or t
  misc_feature (747)..(747): n is a, c, g, or t
  misc_feature (809)..(809): n is a, c, g, or t
  misc_feature (822)..(822): n is a, c, g, or t
  misc_feature (826)..(826): n is a, c, g, or t
  misc_feature (831)..(831): n is a, c, g, or t
tggaccggtccggaattcccgggatcaggacctcatgagtaagctgtggcggcgtgggagcacctctggggctatggaggcccctgagccgggagaagccctggagttgagcctggcgggtgcccatggccatggagtnnnnnnnnnnnnnnnnnnnnnnnnnnnnnnnnnnnnnnnnnnnnnnnnncatcaggaagaagacgccgggcccacgcagccgtcccctgccaagcctcagctcaaactcaaaatcaagcttgggggacaagtcctggggaccaagagtgttcctaccttcactgtgatcccagaggggcctcgctcaccctctccccttatggttgtggataatgaagaggaacctatggaaggagtcccccttgagcagtaccgtgcctggctggatgaagacagtaatctctctccctctccacttcgggacctatcaggagggttagggggtcaggaggaagaggaggaacagaggtggctggatgccctggagaagggggagctggatgacaatggagacctcaagaaggagatcaatgagcggctgcttactgctcgacagcgagctctgctccagaaggcgcggagtcaaccttcccctatgctgccgctgcctgtagctgagggctgcccacctcccgccctcacagaggagatgctgctcnagcgcgaggannnnnnnnnnnnnnnnnnnnnnnnnnnnnnnnnnnnnnnagaagagcacaagaaccagantatcgagcgcctcaccaagactgcggcgaccagtgggcggggaggccgggggggcgcacggngcgagacggcggngagngacgngctgcggatccggcccccatggtgcgctactgcagcggagcacagggttccaccctttccttcccacctggcgtccccgcccccacggcagtgtctcagcggccatccccctcaggcccgccgccgcgctgctctgtccccggctgtccccatccgcgccgctacgcttgctcccgcacaggccaggcactctgtagtcttcagtgctaccgcatcaacctgcagatgcggctgggggggcccgagggtcctggatccccccttttggctacgtaaggcccttaacccggactctgcgccccgtcccatgcccgctcttgagtatcttccccaccctattaaattacatccggtgctaaaa

SEQ ID NO: 357120 - DNA, 871 bp, Homo Sapiens
ggctgtaccggtccggaattccgggatatcgtcgacccacgcgtcgacaggacctcatgagtaagctgtggcggcgtgggagcacctctggggctatggaggcccctggagccgggtaagcgcgaatagatcaagcaatttaggtcgtgttagaaaagaagtcccgttcttgctcctcggagagtccaggtacttcggccacaggtggcaaggagaaaggcggtgctgttgttatggtaacagcgagtactgcgggaagggtgggatccagtaggggcttaggttattcagggcttcccctgccaccctccggccaaacactgtcgacaggctttccttccacaggagaagccctggagttgagcctggcgggtgcccatggccatggagtgcacaagaaaaaacacaagaagcacaagaagaaacacaagaagaaacaccatcaggaagaagacgccgggcccacgcagccgtcccctgccaagcctcagctcaaactcaaaatcaagcttgggggacaagtcctggggaccaagagtgttcctaccttcactgtgatcccagaggggcctcgctcaccctctccccttatggttgtggataatgaagaggaacctatggaaggagtcccccttgagcagtaccgtgcctggctggatgaacgaaagtaatctctctccctctccacttcgggacctatcaggagggttagggcggtcaggacggaacgaggaggaacagaggtggctggatgccctggagaagggggagctggatgacaatggagacctcaagaacgagatcaatgagcggctgcttactgctcgacagcgagctctgctccagaaggcgcggagtcaaccttccccta

SEQ ID NO: 357121 - DNA, 1327 bp, Homo Sapiens
  misc_feature (20)..(20): n is a, c, g, or t
  misc_feature (923)..(1045): n is a, c, g, or t
  misc_feature (1058)..(1173): n is a, c, g, or t
  misc_feature (1209)..(1209): n is a, c, g, or t
  misc_feature (1217)..(1217): n is a, c, g, or t
  misc_feature (1221)..(1222): n is a, c, g, or t
  misc_feature (1224)..(1225): n is a, c, g, or t
  misc_feature (1237)..(1238): n is a, c, g, or t
  misc_feature (1240)..(1240): n is a, c, g, or t
  misc_feature (1242)..(1242): n is a, c, g, or t
  misc_feature (1249)..(1249): n is a, c, g, or t
  misc_feature (1257)..(1257): n is a, c, g, or t
  misc_feature (1268)..(1268): n is a, c, g, or t
  misc_feature (1281)..(1281): n is a, c, g, or t
  misc_feature (1288)..(1288): n is a, c, g, or t
  misc_feature (1295)..(1296): n is a, c, g, or t
  misc_feature (1312)..(1312): n is a, c, g, or t
  misc_feature (1316)..(1316): n is a, c, g, or t
  misc_feature (1321)..(1321): n is a, c, g, or t
gaacctgtaaacgctctcgnaattatggcggcggtggatatccgagacaatctgctgggaatttcttgggttgacagctcttggatccctattttgaacagtggtagtgtcctggattacttttcagaaagaagtaatcctttttatgacagaacatgtaataatgaagtggtcaaaatgcagaggctaacattagaacacttgaatcagatggttggaatcgagtacatccttttgcatgctcaagagcccattctttttcatcattcggaagcaacagcggcagtcccctgcccaagttatcccactagctgattactatatcattgctggagtgatctatcaggcaccagacttgggatcagttataaactctagagtgcttactgcagtgcatggtattcagtcagcttttgatgaagctatgtcatactgtcgatatcatccttccaaagggtattggtggcacttcaaagatcatgaagagcaagataaagtcagacctaaagccaaaaggaaagaagaaccaagctctatttttcagagacaacgtgtggatgctttacttttagacctcagacaaaaatttccacccaaatttgtgcagctaaagcctggagaaaagcctgttccagtggatcaaacaaagaaagaggcagaacctataccagaaactgtaaaacctgaggagaaggagaccacaaagaatgtacaacagacagtgagtgctaaaggcccccctgaaaaacggatgagacttcagtgagtactggacaaaagagaagcctggaagactcctcatgctagttatcatacctcagtactgtggctcttgagctttgaagtactttattgtaaccttcttatttgtatggaatgcgcttattttttgaaaggatattaggccggatgtggtggctcannnnnnnnnnnnnnnnnnnnnnnnnnnnnnnnnnnnnnnnnnnnnnnnnnnnnnnnnnnnnnnnnnnnnnnnnnnnnnnnnnnnnnnnnnnnnnnnnnnnnnnnnnnnnnnnnnnnnnnnnnncgtggtggcgggnnnnnnnnnnnnnnnnnnnnnnnnnnnnnnnnnnnnnnnnnnnnnnnnnnnnnnnnnnnnnnnnnnnnnnnnnnnnnnnnnnnnnnnnnnnnnnnnnnnnnnnnnnnnnnnnnnnngagactttgtctcaaaaaagaagaaaagatataacncccatcangatnncnngtgaatatttgnnanangtcttcngtaacctntcctctcccgnacttgagcaaccnacacacncacaggnncactggtagatatggnaaangcaanataaag

SEQ ID NO: 357122 - DNA, 937 bp, Homo Sapiens
  misc_feature (23)..(23): n is a, c, g, or t
  misc_feature (498)..(532): n is a, c, g, or t
  misc_feature (535)..(535): n is a, c, g, or t
  misc_feature (844)..(852): n is a, c, g, or t
acattgcactgtaaatccctgtnaagtggattccttttgccttggcttagaggctgcagcacttcatttttcagttatctgggtgactatcagttagcttcttggcagcaccccaggcataactgaagattgcacttagttggaggcaaaaaatgttaaacatatgtattaaaaaaatctttgatgaaatgacagttgctgctatcccatagcctctgaaaacttggtgcaccaaggtccctggcttaagtgggagccatggccatagcgtcttaattgtttaattgtacaatgtcaagagcatctttgggacatccgccctggccctcagagctgcccctttaacagcccgctcccttctgcttgcttcgccaaccagacctgcttgaaaactgaaacaaaacagcagcaataataaaagaataaggcccctactttgagggcccttccaaaataaagtcccaaatagcctccccagactgccatttggcaatctgnnnnnnnnnnnnnnnnnnnnnnnnnnnnnnnnnnnaantcccagcaaaatggttttccattaaacaggggtagcgtgttctgctgtgctgaattacgtcctgttcttattttgtgggtaattttttctgtatcaaatatccttttggttgtgtatctttttcaccttttcttgtactaaaactaaagcatgatctgtatttttttacatcccccagttgacaatgtacagcgctcggttagagatgttaccctgctgaaacgtactgtggtcgtgtagcccgggccatctgctcattgtacgctgcttttgttctgttgcccttccgaagcatggtgggcccagccnnnnnnnnngtatcgggtgcatgacgacattgttacacacagaatccactaatactaatatacaatctctcaataaagaactagttttcctata

SEQ ID NO: 357123 - DNA, 1615 bp, Homo Sapiens
  misc_feature (1335)..(1335): n is a, c, g, or t
  misc_feature (1355)..(1355): n is a, c, g, or t
  misc_feature (1369)..(1369): n is a, c, g, or t
  misc_feature (1372)..(1372): n is a, c, g, or t
  misc_feature (1540)..(1540): n is a, c, g, or t
  misc_feature (1542)..(1542): n is a, c, g, or t
  misc_feature (1544)..(1544): n is a, c, g, or t
  misc_feature (1547)..(1547): n is a, c, g, or t
  misc_feature (1558)..(1558): n is a, c, g, or t
  misc_feature (1560)..(1560): n is a, c, g, or t
  misc_feature (1565)..(1565): n is a, c, g, or t
  misc_feature (1579)..(1579): n is a, c, g, or t
tgcacttcccaggccccaccagccgcggctccggctcgtagcccacagcccactgccggcggctgggcgctgccgaggctcggggcgcgcgcagttggcgtctgccagtgccaagactgtgccgcccccacagccgaggcgcgaaagggggacgcccggcctctgggccgctgccttcgctttctcttcgttgttgcgaacgccgtccgctcaggaggcgccccgcgaccggcgcgatgagtgccaacgaggaccaggagatggaactagaagcattacgctctatttatgaaggagatgaaagtttccgggaattaagtccagtttcttttcaatataggataggtgaaaatggtgatcccaaagccttcttaatagagatttcctggacagaaacatatccccaaacacctccaattctatctatgaacgctttttttaacaacaccatatcatcagctgtaaagcagagtatattagccaagctacaggaagcagtagaagctaatcttggaaccgctatgacctatacattgtttgaatatgccaaagacaataaagagcagttcatggagaatcacaatcccatcaattccgcaacatcgataagcaatatcatctcaattgaaactcctaatacagccccatcaagtaagaaaaaagacaaaaaagaacaactttcaaaagcccagaagcgtaagctggcagacaaaacagatcacaaaggagaacttcctcgaggctggaactgggttgatgttgtgaagcatttaagcaaaactggctctaaggatgatgagtagcacttggaatttgagacaaggaaagagcattctttaaagagtaaaactgggttcaaaatctttcattactattttctggtattgaggcgactttttataaaacacaattttttgtatgtttcttacattaaaaaggttgtaagttgaaagttcatgaagagatcttgttgtattaaattattttcacaaacttgccttaataaaaggtgaaaatgttactgtttagtatactttatgaagccccttgagctttataaatggacaggcatggggaataagaatcagtgttaatttaaatgatcttaccctggtggatgtgcgattttcttaaaggagtatgaagcccttctcaaactatcatcccagtggagcggagtactcagtgaacagttactccatagggcaatccatattaataggcttcttctcttaagtcttcatctcttcttttgcttaattactgaaccgtaaattacttcagagaaatttaaatgctggtatttgaactttatacatgatactttttgtagtntcttttaatttttgaaacangaactgcttccgtntanataaattaatatctatttatacttttctcttgatttgggtcaagatgtttgatcatgagtgctttgagtggtatgtggaataggagaatataaaaacaaatctgccaaatacactagaaagcattttagtaagaaatgctggccctttcttaaaacatttctcttgcntntnccnggatgggagtnanagatnccttaatatttagnttttgtattgttggagacattgattttaattaaatc

SEQ ID NO: 357124 - DNA, 1736 bp, Homo Sapiens
ccggaattcccgggatcgcggtgggtgcggctgtgagacggcaggagacttctgccccgcggtgcacgcgaccctcgagacgacagcgcggctactgccagcagcgaaggcgcctcccgcggagcgcccagacggcgcccgctcgcccatgccgagctgagcgcggcagcggcggcgggatgctggcgctgctggccgccagcgtggcgctcgccgtggccgctggggcccaggacagcccggcgcccggtagccgcttcgtgtgcacggcactgcccccagaggcggtgcacgccggctgcccgctgcccgcgatgcccatgcagggcggcgcgcagagtcccgaggaggagctgagggccgcggtgctgcagctgcgcgagaccgtcgtgcagcagaaggagacgctgggcgcgcagcgagaggccatccgcgagctcacgggcaagctagcgcgctgcgaggggctggcgggcggcaaggcgcgcggcgcgggggccacgggcaaggacactatgggcgacctgccgcgggaccccggccacgtcgtggagcagctcagccgctcgctgcagaccctcaaggaccgcctggagagcctcgagcaccagctcagagcaaacgtgtccaatgctgggctgcccggcgacttccgcgaggtgctccagcagcggctgggggagctggagaggcagcttctgcgcaaggtggcagagctggaggacgagaagtccctgctgcacaatgagacctcggctcaccggcagaagaccgagagcaccctgaacgcgctgctgcagagggtcaccgagctggagcgaggcaatagcgcctttaagtcaccagatgcgttcaaggtgtccctcccactccgcacaaactacctatacggcaagatcaagaagacgctgcctgagctgtacgccttcaccatctgcctgtggctgcggtccagcgcctcaccaggcattggcacccccttctcctatgcggtgccagggcaggccaacgagatcgtgctgatcgagtggggcaacaaccccatcgagctgctcatcaacgacaaggttgcgcagctgcccctgtttgtcagtgacggcaagtggcaccacatctgtgtcacctggacgacacgggatggcatgtgggaggcattccaggacggagagaagctgggcactggggagaacctggccccctggcaccccatcaagcccgggggcgtgctgatccttggacaagagcaggacaccgtggggggtaggtttgatgccactcaggcatttgtcggggagctcagccagttcaacatatgggaccgcgtccttcgcgcacaagaaattgtcaacatcgccaactgctccacaaacatgccgggcaacatcatcccgtgggtggacaataacgtcgatgtgttcggaggggcctccaagtggcccgtggagacgtgtgaggagcgtctccttgacttgtagccgccttctcctctgtccaggaggccggggatcaggcctggtgccatggaagttcagggccatagactgccccacttaaactccttgtcatcctggggctcagggttccccagaggttctttcccccaggaattctctaaaaaacaaggggttggggggcaaggggcttgggcccccggggctttggtttgggttccccccaacacaaaaaattctgtgtgtggcatctggttaggaaaaccacaaacgggcccaccgcgt

SEQ ID NO: 357125 - DNA, 582 bp, Homo Sapiens
  misc_feature (30)..(30): n is a, c, g, or t
  misc_feature (492)..(492): n is a, c, g, or t
  misc_feature (547)..(547): n is a, c, g, or t
cctgaacgcgctgctgcagagggtcaccangctggagcgagccaatagcgcctttaagtcaccagatgcgttcaaggtgtccctcccactccgcacaaactacctatacggcaagatcaagaagacgctgcctgagctgtacgccttcaccatctgcctgtggtgcggtccagcgcctcaccaggcattggcaccccatcaagcccgggggcttgctgatccttggacaagagcaggacaccgtggggggtaggtttgatgccactcaggcatttgtcggggagctcagccagttcaacatatggggaccgcgttctttcgcgcacaagaaatttgttcaacatcgccaactgctccacaaacattgccggggcaacatcatcccgtgggtggacaataacgtcgatgtgttcggaggggcctccaagtggccgtggagacgtgtgaggagcgtcttcttgacttgtagccgccttctcctctgtccagggngccgggatcaggctgttgcatgggaattcagggccttagattgccccattaaatnttgtcatctgggtcaggttccagagtcattcccag

SEQ ID NO: 357126 - DNA, 1210 bp, Homo Sapiens
agctgctggatgccaagaacaccatcaacaagctggaagagctcaatgagcggtaccggctggactgcaacctggctgtacagctcctcaagtgcaacaagtcccacttccgaaaccacaagtttgccgatctgccctgtgagctacaggacatggttcggaaacatttgcacagtggtcaagaggccgccagcccaggtcctgctcccagcctagccccaggggctgtggtgcctacctcagtcattgcccgagtgttagagaagccggagtctctactgctcaattcagcccagtcaggcagcgccgggcgccccttggctgaggatgtctttgtgcatgtggacatgagtgagggtgtcccaggtgatccagccagtcccccggcccctggcagccccaccccacaacccaatggggagtgccactctctgggtactgccaggggctccccggaggaagagctgcccctgccagcctttgagaagctgaacccctacccaaccccgtctccaccacacccactgtatcctggccgcagggtaatagagttctctgaggataaggttcggatcccccgcaacagcccccgtgcccaactgcactgtacgctaccacgccaggccatttccctagagcctggtagaggaggggagtgagcgggcccggcccagtccagtgcccagcacccctgtctcagcccaggcctcatcccatcaccagcccagcccagcaccgcctaacactcagatgccccagctagcatctgccaggctctgaacgaggaacctgcatgcgtcagactaggcagcaggcgcatagagtcagaccagtactccagccacgctgctgactgtggacccagcagcacagcgcattatgggacgacgaactgcgcagctccactgagactgcatgcagccattttagcaccagtatgccgccgctgaacagagcatgagagtggatccgagggacacctttcgtgcccagacgccgaaagcagagtgagcattaagcactaacgcagaaggaacgctgactcttcgacattccacagaggcaggcaagcatgacgctgaaccttgccatatcagctcatgagggaagagcggcaaggagcccatgatgtccgattaaacagggagcaacagaaggagggggccatggacttccacaaccgacgggcagggacctaggacaacatccg

SEQ ID NO: 357127 - DNA, 853 bp, Homo Sapiens
  misc_feature (81)..(81): n is a, c, g, or t
  misc_feature (147)..(147): n is a, c, g, or t
  misc_feature (164)..(164): n is a, c, g, or t
  misc_feature (609)..(609): n is a, c, g, or t
aaggtaaggaaggtctaagcccagtaacagcatagcatattgaatagcagtttcataaatgcaacaatcagctgtatactncccctttttttgactatggaggtaactttttgaaagcattcctaagcaagttatactacatctacnctactatgtggtagtanaatatagcagtagtaaagccagttctttagcttagaaaagaaactaaaactacattttcctttttagtaccttccactttcctacccttccattcagaaaagacaagcagggcatgttaattcaaaagacaaaatgattacaatgccagataccgatctaaaatgtattctgcgttgaatatggtctacatccatccatttatacttttgccatggccatatatatcactggtcaagtacttgggcttccttacacaggaaaagtcagttgcttggcacctaggaaagcctgtcagtgaggtggaactgagtaaatcctagctcctacgtggtctgctcatccataagccctagccagaagtgtgataaacattcagcaatggggccctactgggctcctgatcccaaatccagagggaaatctcccagagtttatggtcaaagnatgtacaccggagtgtacaagtttaggtcaaggttacctgaatcgcactgaacttttgggggaatgcttgataagtgagtgtgggttatagttaggctcattttatggtttatttctatttgaacagaatttaaggatgacttagctgagatccacctgggcacacaggtacttattaataaagtcaaaggatattaatctaaagaccattacacaaaggctatttacagagagaaacccaaga

SEQ ID NO: 357128 - DNA, 856 bp, Homo Sapiens
  misc_feature (49)..(68): n is a, c, g, or t
  misc_feature (76)..(131): n is a, c, g, or t
gaatttgagaccagcctgggcaacataagttagacccccatcttctacnnnnnnnnnnnnnnnnnnnntatacccnnnnnnnnnnnnnnnnnnnnnnnnnnnnnnnnnnnnnnnnnnnnnnnnnnnnnnnntgcttgagcccaggagtttgaggctgcaggaagccatgatcgcgccaccgcatttcagcttgggctacagagccagaagccggtctcaaaacccaaccaaaccaacaacaacagcagttaacaacaaaactaagtaaaaggaacaagttatgaatgactttcacaagcaacaattggaggatggttactaaccaaaatcacccatgccaaaccccacagaaactgctgtaccaacgtgctccacacgtgctccacagatgaaacaagacagtcataagaactacacgctctgaccactgcccacaacggtaagtttcaagaagttttcctgggaaatgtgggccatcagagtgctgataaaacactgctggcccacctgtcaaatggggcttcacagggaagctcatcacatagatgttacaacaaagtctgcaactttcaaggtgggcaggaccagagaagctctccaggtatgcaggatagacctccagggccatccctttatgtgtttgaatatttcatcaggattcttcaagagtaggtagaacaaagcctcagtcctccaaaaaaatgactcaaaatttcttaagttaggttcaagtttctgacataggatgggattgtgaactctgccaaaaattagtgaaagggctgggtgtggtggctcacgcctgtaatcacaacactttgggaggtggaggcgggtagatcacctgaggtcagga

SEQ ID NO: 357129 - DNA, 1170 bp, Homo Sapiens
acttgcaattgtgaccaaatatattacaaagggctggaaagaagttcatgaattgtataaagaaaaagcactctctgtggagactgaaaaattattaaagtatctggaggctgtagagaaagtgaagcgcacaagagatgagctagaagtcattcatctaatagaagaacatagattagttagagaacatcttttaacaaatcacttaaagtctaaagaggtatggaaggcttgttacaagaaatgccgcttactgcattactaaggaatctaggaaagatgactgctaattcagtacttgaaccaggaaattcagaagtatctttagtatgtgaaaaactgtgtaatgaaaaactattaaaaaaggctcgtatacatccatttcatattttgatcgcattagaaacttacaagacaggtcatggtctcagagggaaactgaagtggcgccctgatgaagaaattttgaaagcattggatgctgctttttataaaacatttaagacagttgaaccaactggaaaacgtttcttactagctgttgatgtcagtgcttctatgaaccaaagagttttgggtagtatactcaacgctagtacagttgctgcagcaatgtgcatggttgtcacacgaacagaaaaagattcttatgtagttgctttttccgatgaaatggtaccatgtccagtgactacagatatgaccttacaacaggttttaatggctatgagtcagatcccagcaggtggaactgattgctctcttccaatgatctgggctcagaagacaaacacacctgctgatgtcttcattgtattcactgataatgagacctttgctggaggtgtccatcctgctattgctctgagggagtatcgaaagaaaatggatattccagctaaattgattgtttgtggaatgacatcaaatggtttcaccattgcagacccagatgatagaggcatgttggatatgtgcggctttgatactggagctctggatgtaattcgaaatttcacattagatatgatttaaccataagcagcagcacgatccagagatccattgccatcagtgatctcactaaaaatatacagctacttcccagctaatctccacccaatgaatgatgatggtatagtatgtgcataatggaaagttaccttactg

SEQ ID NO: 357130 - DNA, 1151 bp, Homo Sapiens
  misc_feature (6)..(7): n is a, c, g, or t
  misc_feature (18)..(18): n is a, c, g, or t
  misc_feature (23)..(24): n is a, c, g, or t
  misc_feature (31)..(31): n is a, c, g, or t
  misc_feature (44)..(44): n is a, c, g, or t
  misc_feature (46)..(46): n is a, c, g, or t
  misc_feature (50)..(50): n is a, c, g, or t
  misc_feature (53)..(53): n is a, c, g, or t
  misc_feature (65)..(65): n is a, c, g, or t
  misc_feature (67)..(67): n is a, c, g, or t
  misc_feature (75)..(75): n is a, c, g, or t
  misc_feature (79)..(79): n is a, c, g, or t
  misc_feature (97)..(98): n is a, c, g, or t
  misc_feature (101)..(101): n is a, c, g, or t
  misc_feature (104)..(104): n is a, c, g, or t
  misc_feature (115)..(116): n is a, c, g, or t
  misc_feature (125)..(125): n is a, c, g, or t
  misc_feature (129)..(129): n is a, c, g, or t
  misc_feature (132)..(132): n is a, c, g, or t
  misc_feature (137)..(138): n is a, c, g, or t
  misc_feature (152)..(152): n is a, c, g, or t
  misc_feature (183)..(183): n is a, c, g, or t
  misc_feature (208)..(234): n is a, c, g, or t
ttttgnnttgtttatttnttttnntaagganagtgcccccgagngntggnaanccggcccccttntnaaacaccnaagnaaacaagcctttcaaagnnatntcngccattgactnnttctaaggngccngtnttggnnattacagatgcctnatgaaatggtctacaaaacttttcttcttcnaagtaataaaacacatagcatgatnnnnnnnnnnnnnnnnnnnnnnnnnnngcccaccccctgctagtttccaggagaatacttctctaaaattcatttttttctattttggaataaattatctttatacagtaattcaaacactgatttccattaacctttggccctgagttttcttctaacatagaagagttcattttgagaggcactcagttaccattcaatctgggctgtaagtatgggactttgtacaaatgccctttttgagggccaaaaatttcaatacactttgtcccaccttgtgaaccaggtctggagcggcacagagaaagtaatgctgagctgtccaaagagcccgctcaggtcaccctccaaaccctcctctgccttcccctagtttgcttaccctcacgtctgacactgaggagtgcatagtcttcaactgaaatggcactacagttagttctcattggaaacaaacaagtgtatttctggaacctgctcgtctaaaatagtcaatgcctttgtaaagactcagcatattcaatatctattgtatggtagctagctatatacatagattgactatttttagacctggtttgtgtattgttgagctatagtagtttgctttatccatttgtgggattaaacaatactgtttaatggttgtaaacttttataaaatgctctttgggttttttgtttgacccaaacataatgtaagtcttaatgacaaaatacacaaagttaaccagaggtgagtgaaaatatagcccttccccagttttgtctgcccctataatgcacgtgcattgctttgtaatatgctctcgctagcatgaatgtgctatgactacttcatgaggttttgtttcacctataattgtgatggaaaatgctgtattgctgacaacaatgaactgtaaccacagttatttactgcataaactatttgtgtactaacc

SEQ ID NO: 357131 - DNA, 1705 bp, Homo Sapiens
  misc_feature (984)..(1042): n is a, c, g, or t
  misc_feature (1254)..(1280): n is a, c, g, or t
  misc_feature (1524)..(1524): n is a, c, g, or t
  misc_feature (1614)..(1614): n is a, c, g, or t
gatcatgaatggcaccacactatccactagctgtacaatttacagagaagcacaagattcatcttgtcacctacaattcgtcttgaacatgttcatatttagtactcagaaactgtgtaagctcctcccaatacagaaaatattttttaaggcagcatatgtatttctgatttactaaaaacgattgtcattctcctctcattcttctttttggtatgaaccaaaagcggctaggagcaatgcctcaaataaccagaaatgaccttttgttgatacaaattgtatctctttttttcctgattgtatagaaacaaatgtacaaaactcatctgaagctaggtttggcactgaattttcaccatgaggtttgtggcactgtgtgtcacagggaagtagctcaggggttgtgagggagcttttatttctaaagggcagtagtaatttatagacaaaaacaatttttcaaggcctctttattaccactgcacagctatcatgtgtaaaatttcaagcattatattgcataagttctctttagcctattaaatttaatatgtccttgcaaaagggattttgtgtaaaaagtgtcagtgttagtgactcatctgcaagaatctacaaatggagctatacaactatgaatacataaatacagcatggttcctagttattagagaaacattttctttatattgaggtctacgcacttcttgactttccattttgtctgtaattataaaacagcaaataacaaagaagcattggggaccccctcggctgccttgataataaaatcaagcttccttcatgggactaagcatgtgtccttcaggatacttacctctaagcactcagcaggggttactacaaagcgttttgtgtggttttcaaaaacagtgtattttgcaagaggtgctttgtaatttaattatttcactgattttctgacctcataggaagtctgtgcctgttgaggccttcaannnnnnnnnnnnnnnnnnnnnnnnnnnnnnnnnnnnnnnnnnnnnnnnnnnnnnnnnnngatctaaaggagaagtgtgaccccggagtggcatggtcaatccagggcaccctttctgtaagacaactcaaaggaaaagaagccttttcaaaggtaatatcgagccattgcactctctcttaaggtgccaggtatgggagaatgacagatgccttatggaaatggtctacaaaacttttcttcttctaagtaataaaacacatagcatgatnnnnnnnnnnnnnnnnnnnnnnnnnnngcccaccccctgctagtttccaggagaatacttctctaaaattcatttttttctattttggaataaattatctttatacagtaattcaaacactgatttccattaacctttggccctgagttttcttctaacatagaagagttcattttgagaggcactcagttaccattcaatctgtgctgtaagtatgggactttgcacaaatgccctttttgagggccgaaaaatttccaatacactttgntctactttgtgaacccagtctggatctgcacagagaaagtatgctgagctgtccaagagtccgttcaggtctcctcctaaccttctctgncttccctagtttgctatcctccgtctgacactgagagtgctagtcttcactgaaatgcactacaagtagtctatatggacaaacaagggtt

SEQ ID NO: 357132 - DNA, 1375 bp, Homo Sapiens
  misc_feature (345)..(377): n is a, c, g, or t
  misc_feature (727)..(754): n is a, c, g, or t
  misc_feature (1157)..(1176): n is a, c, g, or t
tcaagttgttctcacctcttatctggacaactgccacagctgcttaactgatttccctccctgcaggctgtgcttcacatgacagcaagaattatcttcctaaaaaatgaactagaacatggcactcccttgctttaaaccctcactggttaaccacagagatatcacaacagaaacttcactgaccccatactgcaaagaatacacacctcacaaaaatagttggaaaagtcacaaatagttggctccagccctcaataagcaaaaatcagcaatctctgaggcatgacagaattagattctcagttaccacaatgtaatactcataatgtccagttctcaacnnnnnnnnnnnnnnnnnnnnnnnnnnnnnnnnnccatggtccattcacaggaaaaaaaattgacaggcaccatccttgaggaagtccagacattggaattattacccaaagacattaaatcaactaccttaagtatgttcagcgagctaaaggaaaacatggacgaagaactaaaggaaatcaggaaaaccatgcatgaacaaaatgagaatatcaataaagagatagaaattataaaaaggaaccaaacaaattctagagctaaaaagtataatccctgaaatggaaaacccactagagggattcaacaaagatttgggcatgcaaaagaagagaacagtgaatttgaagagaaaataattgaaattatccaaaggagaagnnnnnnnnnnnnnnnnnnnnnnnnnnnncctgagagagctgtgagacatcatcaagcatactaatgtactcatatattcatatagttattatattcattagtatattcatactcatatactcatataggaatcgcagaaaaagaaaagggacagaaagaatatttaaagaaataatgatagaaaatttcccaaatctgatgaaagacatgaatctacacatccaaaaagctcaataaaatccaagcaggatgaactcagatccacaccaagacatgttatattaggattgtcaaaacctgaagacaggattttgaaagcagcaagagagaagcaactcgtcacacagaatttttgacaagattaacagccgattcctcatcaaaaatcttggaagcccaaaggcagtgagatgacatatctaaagtcgtgnnnnnnnnnnnnnnnnnnnncctctaaaccaagatttctgtatatggcaaaactattcttcaaaaatgaaatgagaaatccagacatttccaaataaaattgaaggagatcattattagtagacatgccctaccagaaatgctaaagggagtccttcatgctgaaatgaaaggatactgaacagaaacttgaagccataagaaaaaataggccaggtgc

SEQ ID NO: 357133 - DNA, 1252 bp, Homo Sapiens
  misc_feature (1003)..(1003): n is a, c, g, or t
  misc_feature (1018)..(1018): n is a, c, g, or t
  misc_feature (1042)..(1042): n is a, c, g, or t
  misc_feature (1149)..(1149): n is a, c, g, or t
  misc_feature (1157)..(1157): n is a, c, g, or t
  misc_feature (1176)..(1176): n is a, c, g, or t
  misc_feature (1199)..(1199): n is a, c, g, or t
  misc_feature (1204)..(1204): n is a, c, g, or t
  misc_feature (1209)..(1209): n is a, c, g, or t
  misc_feature (1219)..(1219): n is a, c, g, or t
  misc_feature (1233)..(1233): n is a, c, g, or t
atcaggccaaatcggccgagctcgaattcgtcgagagcgggctgatcgcagcgcgcaccaggcgccggggcggcggccgaatggagagaaagggctcggcggccggggccaaggggaacccgagcccgcccgcggccggagaggggcagcggccaccgccgccgctgtgcgtcccgggcggcggcggaggagccccagcgaggggccaggtcggggcggcggccgagccggccgagctcatccgacgagcgcacgagttcaaaagccaaggggcgcagtgctacaaggacaagaaattccgtgaagccataggcaaataccaccgggcgttgctggagctgaaggggctgctgccgccccccggggaacgggagcgggactcgcgcccggcctccccggctggggccctgaagcccggccgcctctcggaggagcagagcaagacggtggaagccatcgagatcgactgttacaacagcctggcagcctgcctgctccaggctgagctggtaaactatgaacgagtcaaggaatattgcctcaaagtcttgaagaaggaaggggagaacttcaaggccctttaccggtctggtgtggccttctaccaccttggggactatgacaaagcactctactacctgaaagaagcaaggacccaacaaccaacagacaccaacgtgattcggtatatccagctgacggagatgaaactcagccgatgctcccagagagaaaaagaagccatgtaaccaggaagcagctccagagctgcgcccacgcctgaccggggacttccaggcatcccctggcagagagccccgtcctggattctgtccctttctccccacttcttctggctcctcatttttcctcctgttgcaccccagctctttgtctcctcccagtacgaaaaggagagatgcaaatttggaatctggtaggtcgcccagacaatggagacatcctctcctcttagcaggtcagcgactgagaggggcctganttctgctggggacanttgggagagggagtctcatggggntggggatgctgtttgttggcttttgatttttggccagttgtttcttgacagagggcggctggggccaaagttttaaccattcccacaggcagcaggcacacagcccntggttggnattcccttccacatttttncttgacagaccagaaccagagcnttttngaggnaatttttagnaattccaggggacnagacaaacagagaagcttt

SEQ ID NO: 357134 - DNA, 1405 bp, Homo Sapiens
  misc_feature (1376)..(1376): n is a, c, g, or t
caggagtataatgtctcaggaaggcgattatgggaggtggaccatatctagtagtgatgaaagtgaggaagaaaagccaaaaccagacaagccatctacctcttctcttctctgtgccaggcaaggagcagcaaatgagcccaggtacacctgttccgaggcccagaaagctgcacacaagaggaaaatatcacctgtgaaattcagcaatacagattcagttttacctcccaaaaggcagaaaagcggttcccaggaggacctcggctggtgtctgtccagcagtgatgatgagctgcaaccagaaatgccgcagaagcaggctgagaaagtggtgatcaaaaaggagaaagacatctctgctcccaatgacggcactgcccaaagaactgaaaatcatggcgctcccgcctgccacaggctcaaagaggaggaagacgagtatgagacatcaggggagggccaggacatttgggacatgctggataaagggaaccccttccagttttacctcactagagtctctggagttaagccaaagtataactctggagccctccacatcaagggtaagaggatgctgggtgtcaaggagctgttgaattgcccttgagagtctctcctccgtgaaacaaggagggcagcctagaatagtttctgagaactcttctttgtgttcttaactactttcaggaaaaaaattcttgacaggcaagtgcattagtataacagcagactgtatacttaactcaggcagagcgtgtgttctcaaaaccctgtagctcaaccccttatatcactatagcacgatgtttagcattatttaactttttaagatgaagcttgatgagtaacagtttatcaacaaggtagcaaatacttgacaacagtagtagttctccatgggccctggaccagcagcttcaagaatcatatgaaaattgttaaaatgcaaattctcggggcccattacgaattcattaaattggaatatgagggtgagatcatgcagtatgtgttttcacgagcccttgaggggattatactgaacagtcaagtttgagaaacactgcttaaaagaatggttttagttaatggtgaagaagaagaagaaaaaacaaaatagtgcatgagtgcaaatagatgtttcagttatggatcaaaagatggcattagtttgctatcattattcctcagggagcacctgcaggaggaagagcaggagctctagaatctgctttctggcctcaccactcatttgctgtatggattgttaacacaggacctaacattctctgaattttagtttgctcatctttaaactggaaatgcagaaaaatgggagcaaatatatgaagtaaccagtgtaatatatncacaggcagaaaaatagaactttatcacc

SEQ ID NO: 357135 - DNA, 1094 bp, Homo Sapiens
  misc_feature (878)..(878): n is a, c, g, or t
  misc_feature (1023)..(1023): n is a, c, g, or t
gatccgtgatccgaggcaagcgttggttctgtgcgcctcaggagtataatgtctcaggaaggcgattatgggaggtggaccatatctagtagtgatgaaagtgaggaagaaaagccaaaaccagacaagccatctacctcttctcttctctgtgccaggcaaggagcagcaaatgagcccaggtacacctgttccgaggcccagaaagctgcacacaagaggaaaatatcacctgtgaaattcagcaatacagattcagttttacctcccaaaaggcagaaaagcggttcccaggaggacctcggctggtgtctgtccagcagtgatgatgagctgcaaccagaaatgccgcagaagcaggctgagaaagtggtgatcaaaaaggagaaagacatctctgctcccaatgacggcactgcccaaagaactgaaaatcatggcgctcccgcctgccacaggctcaaagaggaggaagacgagtatgagacatcaggggagggccaggacatttgggacatgctggataaagggaaccccttccagttttacctcactagagtctctggagttaagccaaagtataactctggagccctccacatcaaggatattttatctcctttatctgggacgcttgtttcttcagctcagtttaactaccgctttgacgtggactggctcgtaaaaccagtatccaacagagttcaggaagaagccaatcctgctggtgcatggtgataagcgagaggctaaggctcacctccatgcccaggccaagccttacgagaacatctctctctgccaggcaaagttggatattgcgtttgggacacaccacacgaaaatgatgctgctgctctatgaagaagcctccgggntgtcatacacacctccaacctcatccatgctgactggcacccagaaaactcagggaatatggttgagccccttatacccacgaattgctgatggaacccacaaatctggagagtcgccacacattttaaagctgatctcatcagntacttgatggcttatatggcccttctctcagggagtgggatgatgtcattcccaagccgatctctctgaaa

SEQ ID NO: 357136 - DNA, 1364 bp, Homo Sapiens
  misc_feature (23)..(23): n is a, c, g, or t
  misc_feature (60)..(60): n is a, c, g, or t
  misc_feature (66)..(66): n is a, c, g, or t
  misc_feature (201)..(252): n is a, c, g, or t
  misc_feature (864)..(896): n is a, c, g, or t
cgcgcctcgccctgcgcggcagnagcacagcgccgccatgctgcccgaccagcccccgcncccgcncgcgcccgccgcggccctcggcaagctgctgcagcgctagacgccgccccgccgctgcccccggggaaggagcgcaccccagaccgtcctggcttcgaacccagctcttccaccttcagaccaccaccgcatatnnnnnnnnnnnnnnnnnnnnnnnnnnnnnnnnnnnnnnnnnnnnnnnnnnnncgttacgattttatacataggataaacgcaagattaaatggatatttggaaaacactcggctggttctcactcaacaccaccgcctttcccctcttgcttccgccccaggctttctgctgtgcgctccccacggaggcgggaggcgcctgcaccgtcctcggggactccgatcgccgttggaccgaaatcacctcggtggggaggacctgaccactcggagttcgccgacttgcgctcgggggtgacgggggccagggctgccgcgcgcaggggtctggggagcctccgggcggacgacccagcgagaccccgccggctcccggagtgtcctggggaccgccacctccaggagccccggtggtgatctcggtgaagcaggaggaggggaagcaggggcgcacgggcagaaggagccaccgagccgctcctccttgcggttttgcccgcacgcgcgtctgcccgcccacctttcctggggcggatgcgttcccgcagtgaccgcactcgcgattgtagaaaattcgctcccaattgttgaatgcttacataaactgcatagttacccatattttctactgttctcataagggaaaaagaaatgatttggaagnnnnnnnnnnnnnnnnnnnnnnnnnnnnnnnnnccagcagccctggctaagcttttgataatggaaccattataagctgacaagctagatttttcacctgttggatttgctggacatgagcacaagcctaggcttccaatttgaatttcagggctgtagtcactgatgtgtcacatttagtgaaggctctcggccccccggcagccgcctggtcctgggtcactggggagaattctgggtgggtggaagaggcgaggagcactgtgatgggcgctgttcacactccggctccacccagcgccagctgcgacaaagccctttacccctcccaggccaggtgtttcttctgtgtgaaagaggagcttgatccctactcacaggttccttaattcattgctcaaatagggaaacggcaaggaaaaagacaaattctgttctcatgaagcttaccttctagtgggggaagagacaacaggtaactggtatataagagggtagaag

SEQ ID NO: 357137 - DNA, 1774 bp, Homo Sapiens
  misc_feature (1620)..(1620): n is a, c, g, or t
  misc_feature (1757)..(1757): n is a, c, g, or t
agcgggaggaggcggggtcacgagccgccagccgccgggtggagggtcccggccgggagccgcggaaagagtagggctccccagacaacggggtccgacgagcagttgggcacgggctgagtccgcctgccggcagaatgtccctggctgcttattgcgtcatctgttgcagaagaataggaacctctacttccccaccaaaaagtggcacacactggagagatatcagaaatataataaagtttactggatcacttattttaggaggttctttatttcttacatatgaagttctggccctgaagaaggctgtgacattagatactcaagtggtagaacgagaaaaaatgaagtcatatatatatgtgcacacagtttctttagataaaggagaaaatcatggtattgcctggcaggcaagaaaagaacttcacaaagcagtaagaaaagtattggcaacatcagccaagatactgcggaatccatttgctgatccttttagtacagttgatatagaagatcatgagtgtgctgtgtggctgctcctacggaagagcaagtcagatgacaaaaccacgcgactcgaggctgtgcgggaaatgtcggagacccatcactggccatgattaccagtataggataattgctcaagccctgtgatccgaaaactcttatcggcttggcacgaagcgaagaagagtgatcttcgctttatttctcctaccacctcctattgccatcttcaaaagaagatacttccactgaagaagagctcagacagttgctggcttccttacctcaaacagagctagatgagtgtatccagtattttacatctttggctcttagtgaaagcagtcagagtctagctgctcagaagggtggtttatggtgttttggaggaaatggacttccttatgctgaaagttttggagaagttccttcagcaacagtggaaatgttctgtttagaagctatagtaaaacattctgagatatccacacattgtgataaaatcgaagcaaatggaggcctgcagctacttcagaggctgtaccgacttcacaaggactgccctaaagtacagagaaatataatgcgtgtcattggaaatatggctttgaatgaacatcttcattcttctatagttcgctcaggctggttttccatcatggcagaagcaatgaaatctccccacattatggagtcctcacacgctgccagaatcctggcaaatctagaccgagaaactgtgcaagaaaaatatcaggatggcgtatatgtgctgcatccccaatatcgaacaagcattcaaaacatggcgccagcaggacagtgagcaggctgtaattgaaaaacctatggaggatgaagacagatatacgacgtgctggcccaagacatggttagcaaaagactgtcctgctctccgaattatatctgtggagtatgacaccagcctcagcgactggagagcaaggtgccctatggaaagaaagtccattgcattcagaagcaacgaacttcttaggaagctcagagctgctggtgttggggataggcccagtggttttggatatcacatagcatggggaggtctttctggtcaaaaagatgctngttggaagcctctacgaagcccagaaatgagtactggtatcaacaatacaagaggggataatttttatagtgtccctcatcatggatcaccgttggctgaataactctgtaatatccgctatcttctctcccctcgntggaagtcaagaactca

SEQ ID NO: 357138 - DNA, 1732 bp, Homo Sapiens
  misc_feature (1684)..(1684): n is a, c, g, or t
  misc_feature (1727)..(1727): n is a, c, g, or t
atgccaagcatgatgtcaggagctgggaatacagggtgaatcagctaagccctgcttccaagagcggcatgctgttaaaggggaaagacgcttatgtggtaactatgcaactcaagtgtcactactagaggatatggaggtatatttgttagtaaaggcatggctacctatgtttggaaacagccaatatgctgaggtgacagaaacagaaagcagaagttgtgagagcctgtgcatgagttagtcacctatgaggaacactgatgtgctgaagaggaggctgcagaggcctcatgtacacgagcctgagcgtggtgagccaagaagggagctgcagactgactggatggggtacagcctgagattcctgtggtctctggttcagggccctgcttctcatgctggggacgtctctaccatgggtaataccccaggaatcctcaccacctaacctgatccacctggaggaaccccggcttgggagatggcagggcagatgctcttggcagcattcaggcctgggcttaagttactccctgatgtggccatctgctatgccccagggataggaaggaaaaatgggcctgaaggaaaggaggtaaaagaagtagaatgagggtcaacacactcagggagcacaaggcaggaaagtagagagaccaactgagagagtggagggcgtacccttgttgagtctggaaggaaagaggaggagctgtggagaggcaccaggataaccctgttctgaagggcaaggtagagagaccccagagtgagggtctataaaaatgtcctgatccccccagctcccaggacaaggggatggaagccagcgagaagcagagtgaagtcctgaagctgagcgttgtaatgtctcggtagacctgtgggaaagctggctgcagcctcaggatggaggtctggaagacagaaggtacacaaggggcccctctccatccactcaccagggcttgttgcttctgggcttcctcctgccagaggctccagatcttcactgccatctgggtgggaggtcaggttgggtcttggggggtctgcagggagagaaaagcattgtcacccaaccaggacatggaggaccatccagacactcagtgagaacctcctggctctcctgacttttctatgctttatcctgcacgtggctcctgtgtgtggacgaggtgctgcactgggcgactctggggatgcctgtcctgtagggttcccagtccagtgatggagagggagccaaacaatcacaatccagggtgatcaaagctgtgacagctggggctggggatacaaaggacttgtgacagctctttaatgggcaggatctgccaggtggagaggcacgtacttccttagccattcatgatttattcactgacccatgggccacacattgcctgaggcccccatgggccagggacagaaaatgtcagggccccagagcccaagcaggcctgagccataccctccacaagcttccccaaggaagggaacagagtcaccatccaggagggatacaggccacagcggagaaaacgccactgctgtctttgaagactgagaagccatgagtcaagcaatacaggtgacctccagaagctggcaacgggccaggaaggactatctacgtgctggagcctccagaaggaacatggtggccctgccaacncctcgcctccagcccagccacatgcatttggaacccctggccncacag

SEQ ID NO: 357139 - DNA, 744 bp, Homo Sapiens
cctcagggcttccacaccgaccccgaggccctcaagagcttccaccccgacccctaggccctgaagggctatcacacctaccgccacagcctgaagaccttgcaagccgaccgccacaatctctgttttgaaggaaaccttaccccaaagcttctacactctgacttagctcctactctgctggagtgaaaatctacccacgacgctcacaaacttataattcctcctcaccacaagtttatgtgttaaaaaccatcatcataaaaggaaatgagacccgtatctgaaggaaacagatgttcggtacacggacgacgccgactctcccatcacccaagctgccctcggttgccccaggagagccacagtgccttgagaacataagcaatttagtgaacagagttcttttcagaatttcctttttcttaagtaagcatctctgttacttaatttctcaccacagctagatgtctataatctgccccaaaaagaaaagaaagcgtgtagatgatttacctcttaagtctcaatctcatggtgaaactcctcacacggtacctgcttctgttggccggaggacgatgccctgaacctcttggagcctttttctgttttaattaaatgcatggcctgcctttatatggcctcaaataagtgggttccagaactccatccctgggaagttaccatgggaagtcccaagaggaatactgcttctttcataaacatggtcctctcctaaaa

SEQ ID NO: 357140 - DNA, 465 bp, Homo Sapiens
gcttaccctacctctcggacaaagatggcagctccagccacaggaggcccacgtcgaaagccgagtgccccaatctctgttttgaaggaaaccttaccccaaagcttctacactctgacttagctcctactctgctggagtgaaaatctacccacgacgctcacaaacttataattcctcctcaccacaagtttatgtgttaaaaaccatcatcataaaaggaaatgagacccgtatctgaaggaaacagatgttcggtacacggacgacgccgactctcccatcaccaagctgccctcggttgcccagggagagccacagtgccttgaggaacataaggcaatttagtgaacagagttctttttcagaattttcctttttcttaagtaaggcatctctgttaacttaattttttcaccacaggtaggatgtctattaattttggccccaaaaggaaaaggaagg

SEQ ID NO: 357141 - DNA, 1457 bp, Homo Sapiens
  misc_feature (598)..(663): n is a, c, g, or t
  misc_feature (673)..(773): n is a, c, g, or t
tgagcacggtgccagcctccgtcatagtttctaaaacacccacaccacaacagtaatcttgactcaacttcagctcctcatcctgtgtctaagccaagtttagccgaagaaaacatctgccgagaaagtaaaaacaaaaacatctgccaaaggcaagaacccggtgggaagccccctgagcccagtggcctgcagagtctgttctagtgacaaagcaggcaactggaagagatcagggctgcgagacagcgtgggtgggtttttatctgctgcttctgtaaattcattgcatgatacgtctgtttttcagaggtcccaaagcaaagaaacaaagccccacagagttcacccagagggaaggccttcactggatcaggctataagagaaggactctcccctgagaaagataaatacttattttggggccgtgtttagagaaaaaggaagaacgatggctttcccatagaaacatttacttattttgtgatttgaaaatggacttttatgttttaggaattatgtggatgggatgttttcttgggtgatcgatttgaaattgcagaggggagcaggtgccatgtgctggcaatggccggnnnnnnnnnnnnnnnnnnnnnnnnnnnnnnnnnnnnnnnnnnnnnnnnnnnnnnnnnnnnnnnnnnaccccccgtnnnnnnnnnnnnnnnnnnnnnnnnnnnnnnnnnnnnnnnnnnnnnnnnnnnnnnnnnnnnnnnnnnnnnnnnnnnnnnnnnnnnnnnnnnnnnnnnnnnnnttcattttgtttgttttaatgagtgagagtaaagagaaagaaaagaactgtttttattttttgtctacctttattgtaaggagagagtgaggataccatgccacacatgcagggtcctgagcagagggctgcaccctgcttagttctaaagacacctagactttatcctgaaagccactgagaggcccatattttgaaacactcagcctctcagaagaggatagaatgggttgccagtgtaatagggagagaaatcgaacatagctgactccatgttgcttctgactcctcaagctaactgcttttaggcacttctgcacacgggccaagttaatcatggaaagaacttagattacagtttaactggaaagcaaggatgataagcgttcctttccaaaactaacctctgaggagataagaagggcatgcacacaagtaacaatgttatattgaagacttgtaggagcgctgtgacctgagcaaggacaaagttttgcaatctccttgggcccctgctgatgcccaagtgtctgtggtcaccagccacccccctcacctcagtctcctccttgttccccttcagtgtaccccttcaatgtacaaagaagcttgagattcatgcctttaaagatggttcgttaggacatgggtccagtatcttcctgacttgctggctctccaaat

SEQ ID NO: 357142 - DNA, 1952 bp, Homo Sapiens
  misc_feature (101)..(101): n is a, c, g, or t
  misc_feature (676)..(676): n is a, c, g, or t
  misc_feature (1142)..(1142): n is a, c, g, or t
  misc_feature (1153)..(1154): n is a, c, g, or t
  misc_feature (1158)..(1158): n is a, c, g, or t
  misc_feature (1169)..(1169): n is a, c, g, or t
  misc_feature (1175)..(1177): n is a, c, g, or t
  misc_feature (1205)..(1205): n is a, c, g, or t
  misc_feature (1297)..(1297): n is a, c, g, or t
  misc_feature (1317)..(1358): n is a, c, g, or t
  misc_feature (1362)..(1362): n is a, c, g, or t
  misc_feature (1365)..(1365): n is a, c, g, or t
  misc_feature (1389)..(1389): n is a, c, g, or t
  misc_feature (1392)..(1392): n is a, c, g, or t
  misc_feature (1394)..(1395): n is a, c, g, or t
  misc_feature (1398)..(1398): n is a, c, g, or t
  misc_feature (1574)..(1642): n is a, c, g, or t
gtatccgaaataaactgctttcaacggtggcccctgcgccataatttttttcattaaacgaaacatatctttgggttccatccattagatacgtcattttncaaagcctccagttccctcattggctgtgagttcacctgcatccaggggctgcagggtccttctctttgtgttcgccattcactttagcactgatagcagagtcagtaaaagcatctctttttgcataactggagtccatatctttaaactgtaccacaacaaagtctgaacatttgaacaaaatactctccattatttcttcacgtttcggccccgaactggattctgtacttttctcatgtgcggcatcaagtaccaaatcacacttcggactgtaagttttaaaaactccttcatatatacctccatttttcacttgtacttcacatttggagccaacaactgatgtaagtatatgaaccatcctcatatttgcatagattccatcaaaagaaatcgtagactgaggcagtcctttgttactgtttcgacctcgatgttccacaggcgccttctccactgcggcctcgaacagcaatgcggatcggccaccacccgcgcgccggagaggtctggcgggggaaggaggaaggccgggacggggccgggcactccccaccccttcccttccccnaggtgggggagggtggaacgctgccggagcccacatggagccccacgatttcaggggagttcgggagcccccgccgccgcctcggacacgaacgcagaggggtgcgggggccaaggcccacttgtctccaccccgtcctccgatctttcccaggacccggagggggcggggagagagccccgacagaccctgatgattccggaggagcccggtgcctacccctttaaccggcacgggggacgcggccctaacttctcccctccagagatgtcccccatggagggggacatgttccggaaaacgccaccacagcctccagacccctccaacgttcacacctaaaccgggagtggaggagctgcccgagcatccccacgctgcgggcggaggatcgtgcggaagggggagccggggctgaccatcgccgctacccgagaacccctcccaacacgcgtgggaaggggangccacccgctnncatnacaacaaaacnaccggnnnagggagaggagatgctgcgggaggctgnacaggcctaacaatcccagaggaccccgctgcgcccaccggccgagcctcggggctcaggcccgagcgagtctcccccgcgctgccggcccncagcccaccccgggtagccnnnnnnnnnnnnnnnnnnnnnnnnnnnnnnnnnnnnnnnnnnaggnaangccgggcccggagcggagggaaanggnannccnacacccacctgcccaggccgggcctcccgccgccggaggtcgccgcgaccaccgaggagggagccggggccgaggacgaggagaccgaggacgaggacgccgaaggcgcggcggcgggcgacgctagaaggcctgctgccgccgggcttgcggacattggcagccgcggtcggcgnnnnnnnnnnnnnnnnnnnnnnnnnnnnnnnnnnnnnnnnnnnnnnnnnnnnnnnnnnnnnnnnnnnnngggcttcagcgacatggtgaggggcccatacaccggctcgcacgccgggcggggacagccgggagccgggcgcgccaaggagacgccggtacgcggcggggacgcacgggcgctcgagcggggaggctgcgggttggcgcggccggaggggcgccctgggctggcgagggggagaaggacgacgacgaaggggcggggaggcccgccgagaccaaggagccgccgggagccgggccgaaacgcgccgccgccgttgccgttgctaccaaaacagtctgaggcggagggaggcgagctctgcccgcccgct

SEQ ID NO: 357143 - DNA, 1701 bp, Homo Sapiens
  misc_feature (1517)..(1517): n is a, c, g, or t
  misc_feature (1556)..(1556): n is a, c, g, or t
  misc_feature (1569)..(1569): n is a, c, g, or t
  misc_feature (1677)..(1677): n is a, c, g, or t
tgacagagcccccgtctccgcgcgtcttcgccgccctgcgccgtgacccgctgtggcactgggccacgagtggaggctgcgcccctccagttctgccttcatagttctctgcctttgcccaaaactgcagaaaatgaacaaatcccagggatcagtttcattcacggatgtgactgtggactttacccaggaggaatgggaacaactggacccctctcagaggatcctatacatggatgtgatgctggagaattatagcaacttactttcagtggaagtgtggaaggctgatgaccagatggagagagaccacagaaacccagacgagcaggcgaggcaatttttaattcttaagaaccaaaccccaattgaggaaagaggcgatctctttggcaaagcacttaatctgaacacagactttgtttctttaagacaagtaccttataaatatgacttatatgaaaaaactttgaaatataattcagacttgcttaatagtaatagaagctatgcaggaaagcagactgatgagtgtaatgaatttggaaaagcacttctctacctgaagcaagagaaaacccacagtggagtagaatattctgaatacaataaaagtggaaaagccctcagccataaagcagccatttttaaacatcagaaaataaaaaacttggttcaacctttcatttgtacttactgtgacaaggctttctcctttaagtcactcctcattagtcataagagaatacatactggagaaaagccatatgaatgcaatgtatgtaagaaaaccttctcccataaggccaacctcatcaaacatcagagaattcacactggggcagaaacctttcgagtgtccggaatgtggaaaagctttcacccaccagtcaaacctcattgtacaccagagagcacatatggagaagaagccctatgagtgcagtgaatgtggaaagacatttgcccaaaagtttgaactcaccacacaccagagaattcatacaggagagcgaccctatgagtgtaacgaatgtgcaaaaaccttctttaagaagtcaaaccttatcatacatcagaagattcacacgggggagaaacgctatgagtgcagtgaatgtggaaaatcctttatccagaactcacagctcatcatacacatgagaactcatacaggagagaaaccctatgaatgtactgagtgcggcaaaactttcagccagaggtcaactcttagattacacttgcgaatccacacaggagagaaaccatatgagtgttccgaatgtgggaaggcctttagcaggaagtcccgactcagtgtccatcagagagttcacatcggggagaaaccctgaaactccagccaggtcttactgtggaaaactcctgccagaactcttcaagcgggtgaaaaacctcatgacagtattgagggaacatgggaattcatactgagatgcaatctctcaactcaaaaatgtattaaaaataggatcccatgagaacattatacntggagttacatgtgatacccagctaaagaatacatatcnagatatatccagntgtaaatagccatacccagttgtactacaatgagctttttaaatctttgaatgattgagtattttagaacagcgcataagaatatacaacagtatccctgaatttagnggtttatgtgaatatgcccaaaac

SEQ ID NO: 357144 - DNA, 1739 bp, Homo Sapiens
  misc_feature (113)..(113): n is a, c, g, or t
agacacaaatttaaaacattgctaaaaatagtagtgtaggcatgtcttcaccccacttgtaatttggctctgaaaatgtatcagggctccaggttcagaagagagactttccnaagcaggagaaaaaattcacctaagggagctcactcaaatggaaatgagttcatggaccagagagcaaagcaaaacattgctcttaaaagcaagctcaacggacacacatgatgaaactcacagttgaacactcttacatcccaaagtcaccttccataaccagttcaaataaactactgtcttttaataggatcttttcaggaacaccataattttggtgctttttcaaggtgaaattgtgctgttatacctaagatgtttaaaaacagaggaaaaccaaaagtttcaaataagccaatgtgtgatggatttggcctaaagtagataaagcaaattccactaagtcctgtaagagggttgacttgaagaaccacttcttctagtcatatatagtagatatgatgattcagcagtcataatttaggaaggcaacagtatactatacatgtcattattttcctcttaagtttgcatttatagaagaaggtggtgggggacaatttaaacttgagttctcaagttctaccttaatgaaataaaacaccattggataagtagtggagattctaatttataaaatattcaccttcatcaaatttctttcattatcaacttttcacggatacttctaaattactattctttatgcacttaaatcttaagagaaatcttgactaacctagaatatttatctttacataattatcatttcaacaggtttaatatacgttaaacttattactttgatttatcttgaagttaaaaaagtcatcaacgcaagcacacaaacaaaagtctgaaacaatcttaattattccttcacagtaaggctactaaactagcaactaaggcagcacttaacaatccccaggtcagcatctttaattcacgatggggcctctccattcatctcacaattccccaactatcactgctcctgctgtcagaagattgttgatacatggcccaggagagttgctgccaacttcccctttccaagttcagaagttcctctaatcaaaaatgaaaacaagaccaaaaacgactaactttcacccttttacatgttccagcccaaatttacgaaaggtcacatttaaaatacacttatctggaaacaagggttgtttaaaatgggctcaagaaaagccgtacacccttgttatgttcctacacaaacaactgtgtcccagatgtggaaaaaaacaacctgatggtcttttacctgcagaatcacatcacccggagagcacaaactgggacacatcctcaacagtgccccagagcactcacacagaaccccagcagcctcgcgcttcagttcttaaaggctccacatttactggctttagcaatgaattcctttagcagagggccatccatttgccaaaatgctgcagtctgtgtaacttctgtcaaatgattgatgcaaaacttaaagcagaattcttctaaatcctctgcatcatatctgactgcagcagagaatagcgaaaaggcattctccacagtaattcctctcttgataatgtgctgacaaagttttttcagtctgttttcacagtaagatgtcgccaaatccagaagacctatagcatcttctggcggcaggtcgactgtgtctg

SEQ ID NO: 357145 - DNA, 1237 bp, Homo Sapiens
  misc_feature (9)..(9): n is a, c, g, or t
  misc_feature (59)..(59): n is a, c, g, or t
  misc_feature (85)..(86): n is a, c, g, or t
  misc_feature (113)..(113): n is a, c, g, or t
  misc_feature (140)..(140): n is a, c, g, or t
  misc_feature (156)..(156): n is a, c, g, or t
  misc_feature (158)..(158): n is a, c, g, or t
  misc_feature (185)..(185): n is a, c, g, or t
  misc_feature (212)..(212): n is a, c, g, or t
  misc_feature (216)..(218): n is a, c, g, or t
  misc_feature (222)..(222): n is a, c, g, or t
  misc_feature (248)..(248): n is a, c, g, or t
  misc_feature (252)..(252): n is a, c, g, or t
  misc_feature (333)..(334): n is a, c, g, or t
  misc_feature (345)..(345): n is a, c, g, or t
  misc_feature (351)..(351): n is a, c, g, or t
  misc_feature (362)..(362): n is a, c, g, or t
  misc_feature (383)..(383): n is a, c, g, or t
  misc_feature (391)..(392): n is a, c, g, or t
  misc_feature (398)..(398): n is a, c, g, or t
  misc_feature (411)..(412): n is a, c, g, or t
  misc_feature (414)..(414): n is a, c, g, or t
  misc_feature (480)..(480): n is a, c, g, or t
  misc_feature (547)..(547): n is a, c, g, or t
tcgttctanatattacataaatacagcttacatactagagtatcaaacactctgttccngtaagaagttcaagagtacatttagnnctatcttaagaaatatgaatactttgncttccattattacattagatgacaaantcaattcaaataagantngtcatatcctgctatgattaacaaaanaccacgtcgggggagtgggggggtgtntttnnnaganataaagataatcaaatgctttttganaganctgttctcttcactgccacacatattcatacaaatgacttagtaatctaatatgggaggtggtccttcacttatattaggnncttggtaagtntttgtngaatgagtggnctatctatgggtatgggtttnctactttnntttgtnctttttttgttanntngttttcaagtaagagcaatagtaaacatactgagttcacattttgctcagatcataagcctataanacagtgattgttacaaacaccacccatcatagcacaaatcaatgtgcatttctgaagctagtaaganaagttctatcatgttgtagaacgaattctaaccgactaattcactgggcttcaatcacttgtgatatggtcaagaaaagggggctgggcctcctaggcctgaatctatttcagctatcagtgaatccctatctttagggcctcactccccttccccaccccaatagacacaaatttaaaaacattgcctaaaaatagtagttgtagcatgtcttcacccacgtgtaatttgcctctgaaaatgtatccaggctccaggttcagaagagagactttccaagcaggagacaaaattcactaagggagctcactcaaatggaaatgagttcatggaccagagagcaaagcaaaacattgctcttaaaagcaagctcaacggacacacatgatgaaactcacagttgaacacaataggatcttttcaggaacaccataattttggtgctttttcaaggtgaaattgtgctgttatacctaagatgtttaaaaacatcggaaaaccaagagtttcaaataagccaatgtgtgatggatttggcctaaagtagataaagcagattccactaagtcctgtaagagggttgacttgaagaaccacttcttctagtcatatatagtagatatgatgattcagcagtcataatttaggaaggcaacagtatactatacctcgtgccgaatccggcacgag

SEQ ID NO: 357146 - DNA, 248 bp, Homo Sapiens
aaatacactctcttatttttctacttgtttttttgttaatcatagcaggatatgacaactcttatttgaattgattttttcatctaatgtaataatggaagccaaagtattcatatttcttaagatagccctaaatgtactcttgaacttcttactggaacaatgtttgatactctagtatgtaagctgtatttatgtaatatttagaacgacatgttaataaacaaagtaacattaaaacaggaaaa

SEQ ID NO: 357147 - DNA, 674 bp, Homo Sapiens
ggcagaattggttcctttttacaggacctacgatatcaaattgtaggcaaaaagaaggaggggaaggtgatcctggagagcgaggaccgatgagcactgacagtccccagctcctagtagtgagctaggaggcacttcctaagacccattcctcaggactgccctgggagatcattcctgaccaacacgccctggcagcaccagcagctcttgccacctccagctgccaaacagcagcctgccgggcagggagcagccccaggccagagaggcctcccggtccagctcagggatgctcctgccagcacaggggccagggactcctggagcaggcacatagtgagcccgggcagccctgcccagctcaggcccctttccttccccattgaggttggggtaggtgggggcggtgagggctccacgttgtcagcgctcaggaatgtgctccggcagagtgctgaagccataatccccaaccatttcccttggctgacgcccaggtactcagctggcccactccacagccaggcctggccctgcccttcaccgtggatgttttcagaagtggccatcgagaggtctggatggttttatagcaactttgctgtgattccgtttgtatctgtaaatatttgttctatagataagatacaaataaatattatccacataaa

SEQ ID NO: 357148 - DNA, 956 bp, Homo Sapiens
  misc_feature (19)..(19): n is a, c, g, or t
  misc_feature (28)..(29): n is a, c, g, or t
  misc_feature (36)..(36): n is a, c, g, or t
gaggtggactcctcagagnacgacaccnnagaaagngccttgagaacagccagggtgcacaggagctgagcttggcacctcacccagaagtgagccagagtgtgccccctaaaagagcagaagagagtggggaagaggatcctttcccgtccaaagaccctaggagcctgggcccaatggtcccaagcctattgacagggatcacactgggcctcccagaatggaaagtcccagtggtccccacaggaggctcgggagcccacaagccattgaggaggctgccagctcctcctcagcaggccccaacctaggtcagtctggagccacagaccccatccctcctgaaggttgctggaaggcccagcacctccacacccaggcactaacagcactttctcccagcacttcgggactcacccccaccagcagttgctctcctcccagctccacctctgggaagctgagcatgtggtcctggaaatcccttattgagggcccagacagggcatccccaagcagaaaggcaaccatggcaggtgggctagccaacctccaggatttggaaaacacaactccagcccagcctaagaacctgtctcccagggagcaggggaagacacagccacctagtgcccccagactggcccatccatcttatgaggatcccagccagggctggctatgggagtctgagtgtgcacaagcagtgaaagaggatccagccctgagcatcacccaagtgcctgatgcctcaggtgacagaaggcaggacgttccatgccgaggctgccccctcacccagaagtctgagcccagcctcaggaggggccaagaaccagggggccatcaaaagcatcgggatttggcattggttccagatgagcttttaaagcaaacatagcagttgtttgccatttcttgcactcagacctgtgtaatatatgctcctggaaacc

SEQ ID NO: 357149 - DNA, 915 bp, Homo Sapiens; identical to SEQ ID NO: 216372

SEQ ID NO: 357150 - DNA, 784 bp, Homo Sapiens
  misc_feature (5)..(5): n is a, c, g, or t
  misc_feature (7)..(7): n is a, c, g, or t
  misc_feature (16)..(16): n is a, c, g, or t
  misc_feature (27)..(27): n is a, c, g, or t
  misc_feature (35)..(35): n is a, c, g, or t
  misc_feature (52)..(52): n is a, c, g, or t
  misc_feature (62)..(63): n is a, c, g, or t
  misc_feature (67)..(67): n is a, c, g, or t
  misc_feature (79)..(79): n is a, c, g, or t
  misc_feature (86)..(87): n is a, c, g, or t
  misc_feature (91)..(91): n is a, c, g, or t
  misc_feature (119)..(119): n is a, c, g, or t
  misc_feature (138)..(138): n is a, c, g, or t
aaaananaaaaagttntcaaaggatgntcaaatcntcaaccataactcaggnttttgtcccnncctntcttccagagangggcacnntgtntttcagggagccttcactacctaaatgngggctaaagattaaaaaanaatctctttaagcttaagaaaaggaaatagtttgctttaaactcatggtttccaacttgttgagttaaaaacaaaccaaaccaaaccaggacatgacaacaagatagttctgaactgtaggctctagggagcaactggtccttcttttagctttaactgtgtcctatttagagtgcctaacaggtatactaggggaactttaaaaaactaaatgtataaagagaatgagcagagatatctgttctgctaattttgaaaaaaagttacactctaaaatgtccattcaaagaattaactgtgatgacttacagcaaagttttacaaaaccaaatgaaacaccctggctcctgaagtatgtagaaaatgggaacttcagcagctgcacctccaattcacctatcctaggacctagaaggtgcttggtttctcactccaaagtcaggcagtttgctataaatggccaagttattctccttatctggtagctctacctttgcatgctgaagcactcacagttttcttaggtcctgggggatcagagcaaactggctgtaacttgacatcatccttaggcactgtttcctgggggagagggtgcaatggcttcatggtgaaaacattttacactcaatttactttaaaaagg

SEQ ID NO: 357151 - DNA, 934 bp, Homo Sapiens
tggtctctccgcagctccgcctctggcaccaacttgctaaagcagcccgtggagcagggcctcctgggcagaaaatgggctcaccaagtaaagagcatctccaaggccaccctgtctaggcactgctcttgcccaaggcaaccccaggggtagaacagaagagcccgacgttcaccccaggagtggcaaaagaggacttgtcgctcgccacggcaatgtcgcagctggcaaccagttgacagccggcagccgtggccaggccattgaccatggcaatgacggggacggggtggttccggatgtgcatcatgaccttggaacaggtctgaaatacttcggcatggtaatcacggccttgctcctctgtcagctcctttaagtcatgcccagaagaaaacacaggcccctcagccgagatgataatgactttcagatcgttgctgtcagcgtcatgaagaatgtcactttggagagatttcagcattgcaagtgacaacgtgttcctcttcttgggattgctcaagacgatgttccttatgccgtccagctgccgcgcgctggtgggccgcggctccgactcccgccgccccgccccggccgggtcccggctgcagaagcgggcggggagctgggcccaggggccgcgccggagacacatgggcccacttgccccgaaggcccgcaagacggcgacggcggccatagcattcgggatggccagacgccgcaggatcgcgctgcctggccggccgcaggtgctgggcgctccgagggcgctgctgtgagcagggccgggacggaactcgacggaactcgacggtggccgagacccggacggaaccgcctgacaggcccaggcttcgcggggacgccccaggccaggcccagtccgtactacgccccgatcccgttacccgaggcgtaccagcctgcc

SEQ ID NO: 357152 - DNA, 1216 bp, Homo Sapiens
  misc_feature (977)..(977): n is a, c, g, or t
  misc_feature (1035)..(1035): n is a, c, g, or t
  misc_feature (1118)..(1118): n is a, c, g, or t
  misc_feature (1134)..(1134): n is a, c, g, or t
gctgggtggcgttcaaaaacgaggctcggccccaggccgttgcggaactcctttcgggagctgtcgccgtgggcccgcattgtctgcaggaactctccggaatcgggagggggaggactggatcgcgcttccactgggattcgtcaagagttccggcggcagctgcggcggtggcggagactccctttgtcctctcaggacctccctctctccctccctgtcagctggtgggtcccgctgccgcaggcgccggcgtctcagctgctcgccgccccccaccccagagtgcgtgcagggtgactcccgccacctttgcgaccctcctgagcttaggggactgcgagcgggagggagtctcaggcccccggccgcaggatggtggcggagcggtccccggcccgcagccccgggagctggctgttccccgggctgtggctgttggtgctcagcggtcccggggggctgctgcgcgcccaggagcagccctcctgcagaagagcctttgatctctacttcgtcctggacaagtctgggagtgtggcaaataactggattgaaatttataatttcgtacagcaacttgcggagagatttgtgagccctgaaatgagattatctctcattggggtctctcctccagcaactattattttccccactaacctggacacacaggcgcaaattcagtaaagggcttcggcaggaattttacaacccggtctgccccccagccgggtacaagtaccttattattcccgcttacgcgcgacccaccacaactcccctaaaatgttacaccagagttgccacgaaaaaaggcccacgcaggcgttcccgaaacgacgcctttcaccacgtccacagattacatttcggcgctccttctaacacccacacttaccccccgtctttgtatcatacgcgtacccccgcgcgatatcccaataccatccacacaccctcactctgcacccatntatccgcgcctaagtgaaattcgccccccaaaccgccacacataaaatagaggagtgntaataaagcgacggcctgataagagccgcgcgaatagtgtatgttgtgacgcaactgtgacgccgccccggcataccacgctncatcataaggaccggnggcgacgccccgcccgccatatgtaatctcccccgactctctttcttcggacaaagtaataggagaaaactaccgatcttac

SEQ ID NO: 357153 - DNA, 1033 bp, Homo Sapiens
  misc_feature (818)..(818): n is a, c, g, or t
  misc_feature (820)..(820): n is a, c, g, or t
  misc_feature (822)..(824): n is a, c, g, or t
  misc_feature (832)..(832): n is a, c, g, or t
  misc_feature (835)..(835): n is a, c, g, or t
  misc_feature (846)..(846): n is a, c, g, or t
  misc_feature (862)..(863): n is a, c, g, or t
  misc_feature (876)..(876): n is a, c, g, or t
  misc_feature (887)..(887): n is a, c, g, or t
  misc_feature (891)..(891): n is a, c, g, or t
  misc_feature (894)..(894): n is a, c, g, or t
  misc_feature (899)..(900): n is a, c, g, or t
  misc_feature (911)..(911): n is a, c, g, or t
  misc_feature (922)..(922): n is a, c, g, or t
  misc_feature (931)..(931): n is a, c, g, or t
  misc_feature (933)..(933): n is a, c, g, or t
  misc_feature (935)..(935): n is a, c, g, or t
  misc_feature (939)..(940): n is a, c, g, or t
  misc_feature (942)..(944): n is a, c, g, or t
  misc_feature (946)..(946): n is a, c, g, or t
  misc_feature (950)..(950): n is a, c, g, or t
  misc_feature (955)..(955): n is a, c, g, or t
  misc_feature (967)..(967): n is a, c, g, or t
  misc_feature (969)..(969): n is a, c, g, or t
  misc_feature (978)..(978): n is a, c, g, or t
  misc_feature (980)..(980): n is a, c, g, or t
  misc_feature (984)..(984): n is a, c, g, or t
  misc_feature (988)..(988): n is a, c, g, or t
  misc_feature (996)..(997): n is a, c, g, or t
  misc_feature (1005)..(1007): n is a, c, g, or t
  misc_feature (1010)..(1011): n is a, c, g, or t
  misc_feature (1028)..(1028): n is a, c, g, or t
gcgtccggaattcccgggatcggataacctgggactgaccgttccctggggatccgacgggccccagaggacccacgcctgagccccgtgcgactcgtggcctttgggctagaagccatggacgccttcacccgcttcaccaaccagacccagggccgggaccgactcttcagggttcagactaggcaatgtggtacatgctatacaggcaactgagcagagcattcatgccactgacctggtacctcgcttatgcttaacattagccaacctgaaccgtgtgatttatttcatctgtgacaccatcctctgggtgaggagcgtaggtctcacctctggcatcaacaaagagaaatggcgaacgagggctgctcaccactactactattctcttctgctgagcctggtcagggatctgtatgaaatctccctgcagatgaaacgagttacatgtgacagggcaaagaaagagaaatcagcatcccaggatcctctttggttcagcgtggctgaggaggaaacagaatggctccaatcctttctacttcttttattccgatctctgaagcagcatcctcccttgctcctggacacagtgaagaacctttgtgatatcctgaaccctttggaccagctggggatctataaatccaatcctggcatcattggacttggaggtcttgtgtcctctatagcaggcatgatcactgtggcatatcctcagatgaagctgaagacccgttagggtgttttttaggcttggaactagtacctactttaaaagatggcctcttgggggggacagacatttgtattantncnnngccatgtnatnatgtgcttaanttcttgttcatgtganntttaacaactgtnatgtgggcganatgngcnaacannggaaagggggngcatgaaagtnttttttttngngnctgnntnnntntganttctnaaatttccctcnancaaaatgantnaaancctnagggatannggggctannnttnntgaagaaaaaaatgaangaaaa

SEQ ID NO: 357154 - DNA, 1144 bp, Homo Sapiens
  misc_feature (13)..(13): n is a, c, g, or t
  misc_feature (15)..(15): n is a, c, g, or t
  misc_feature (18)..(18): n is a, c, g, or t
  misc_feature (21)..(21): n is a, c, g, or t
  misc_feature (25)..(25): n is a, c, g, or t
  misc_feature (27)..(28): n is a, c, g, or t
  misc_feature (31)..(31): n is a, c, g, or t
  misc_feature (38)..(38): n is a, c, g, or t
  misc_feature (50)..(50): n is a, c, g, or t
  misc_feature (52)..(52): n is a, c, g, or t
  misc_feature (67)..(67): n is a, c, g, or t
  misc_feature (112)..(173): n is a, c, g, or t
  misc_feature (187)..(206): n is a, c, g, or t
  misc_feature (717)..(821): n is a, c, g, or t
  misc_feature (986)..(1100): n is a, c, g, or t
ccatcttgccaananagnaancccntnncantaaaaanacaaaaaattancnggcgtggcgcgggcnctgcaccccagctactcggagccgaggcagaagattgcgtgaccnnnnnnnnnnnnnnnnnnnnnnnnnnnnnnnnnnnnnnnnnnnnnnnnnnnnnnnnnnnnnngacactccatctcnnnnnnnnnnnnnnnnnnnngtttcggcaaattccatctaagaattccaccagagttctgttgtctccaatgtcatcttccacagatttcaagttgtgaagccctgaactgttaatttatcttgagaatgtatatttaagcttaatttaagactatatacctaaaaattgagcatgtaatttctataatttgtttatgtaagtttctgtaagtcataagtatgtggtttccaagtgtataatttatctgaatgtaataggcattaatatattttacattactgggaccatagtacagaaatttctaaatggtttgtaaaataacttgttatttgtgttgttgtaaaagcagttaatacaatggaaaaactcgtaataagaagatacagtttaacatcaaaaagtttacccaaggtaattatgagtactacctggcaaaacttcacggaagctgtggtatcacttttatgatggaagaatggtgtttgcattttgtgtaaaagtacttgcggctgggcgtggtggctcatgnnnnnnnnnnnnnnnnnnnnnnnnnnnnnnnnnnnnnnnnnnnnnnnnnnnnnnnnnnnnnnnnnnnnnnnnnnnnnnnnnnnnnnnnnnnnnnnnnnnnnnnnnttagccaagcttggtggtgtgagcctgtagtcccagctacttgggagactcacgctggaggatctctcgagcccaggaggcagaagatgaataaataaatggaagcaactgaatgggatgaggtctctcttgaaggagagagcaaaagagatttaaatagtaacnnnnnnnnnnnnnnnnnnnnnnnnnnnnnnnnnnnnnnnnnnnnnnnnnnnnnnnnnnnnnnnnnnnnnnnnnnnnnnnnnnnnnnnnnnnnnnnnnnnnnnnnnnnnnnnnnnncgttggcccaacacggtgcttggcccaacggagcgttggcccaa

SEQ ID NO: 357155 - DNA, 1275 bp, Homo Sapiens
  misc_feature (30)..(30): n is a, c, g, or t
  misc_feature (61)..(61): n is a, c, g, or t
  misc_feature (91)..(91): n is a, c, g, or t
  misc_feature (162)..(162): n is a, c, g, or t
  misc_feature (166)..(166): n is a, c, g, or t
  misc_feature (196)..(196): n is a, c, g, or t
  misc_feature (243)..(243): n is a, c, g, or t
  misc_feature (272)..(272): n is a, c, g, or t
  misc_feature (282)..(282): n is a, c, g, or t
  misc_feature (339)..(379): n is a, c, g, or t
  misc_feature (1252)..(1252): n is a, c, g, or t
ggattgaaaacaaacactaacgatggcggngcgggaagcgaacggctgctgggcttaaagngggagtgaccgcttaaccagtgagggaagnactgaagagcgccagtcgacgtgggtgcgacaactcgcggagtcttaggagcaaaacgtctggggcctgcnaacnaggacccttctgaagccttaggtgtctatnggcgaagtgtacggtcactgcagctccggagcgcggaaccctcagcnaggaggcgcggctggtcggtcccaagtcncggcctccgnaatgaaagcccggaaccactctttgtgccgcaacttcgcagcatcttggactcaagnnnnnnnnnnnnnnnnnnnnnnnnnnnnnnnnnnnnnnnnnattcctataggcaatggaaactgatctcaattcccaggacagaaaggacctggacaagtttattaaattttttgccctcaagactgtccaagtgattgtccaggctcggcttggtgaaaagatttgcactcgttcatcatcttctccaacgggttcagattggttcaacttagcaatcaaagacatcccagaggttacacatgaagcaaagaaggcactggcaggacagctgcctgcagtcgggaggtccatgtgtgtggagatttcacttaagacttctgagggagattccatggagctggaaatatggtgtcttgaaatgaatgaaaagtgtgataaagaaatcaaagtttcctacacggtgtacaacagactgtcattgctgctgaagtcccttcttgctataactagggtgacaccagcctataggctctccaggaaacaagggcatgaatatgtcatattatacaggatatattttggagaagttcagctgagtggcttaggagaaggcttccagacagttcgtgttgggacagtgggcacccctgtgggcaccatcactctttcttgtgcttacagaattaacttggcattcatgtctaccaggcaatttgagaggaccccacctatcatggggattattattgatcactttgtggaccgtccctatcccagctcctctcccatgcacccctgcaattacagaactgctggtgaggacactggagtaatatacccgtctgtagaagactctcaagaagtgtgtaccacctctttttccacctccccaccatcccagcttttcaagctcttcggccttttcctattcaggcctggtggccctggggggtttgggattcagctggaacnggggtttattccagttagtgttt

SEQ ID NO: 357156 - DNA, 951 bp, Homo Sapiens
  misc_feature (601)..(601): n is a, c, g, or t
tgggtggcgaattcggcacgaggacactaacgatggcggcgccgggaagcgaccggctgctgggcttaaggcgggagtgaccgcttaaccagtgagggaagcactgaagagcgccagtcgacgtgggtgcgacaactcgcggagtcttaggagcaaaacgtctggggcctgcgagccaggacccttctgaagccttaggtgtctatcggcgacgtgtacggtcactgcagctccggagcgcggaaccctcagccaggaggcgcggctggtcggtcccaggtcccggcctccgtaatgagagcccggaaccactctttgtgccgcagcttcgcagattcctataggcaatggaaactgatctcaattcccaggacagaaaggacctggacaagtttattaaattttttgccctcaagactgtccaagtgattgtccaggcttcggcttgggtgaaaagatttgcactcgttcatcatcttctccaacgggttcagattggttcaacttagcaatcaaagacatcccagaggttacacatgaagcaaagaaggcactggcaggacagctgcctgcagtcgggaggtccatgtgtgtggagatntcacttaagacttctgagggagattccatggagctgggaatatggtgtcttgaaatgaatgaaaagtgtgataaagaaatcaaagtttcctacacggtgtacaacagactgtcattgctgctgaagtcccctcttgctataacctagggtgacaccaggcttatagggctcttccaggaaacaaggggcatggaatatgtccataataataccaggataatatttttgggagaaatttccacctgaagtgggctttaggaaaaagggcgttcaagaaaccgtttcctggtttggggaacattgggggccacccccctggtgggggcgacccatcaacctcttttccctta

SEQ ID NO: 357157 - DNA, 1549 bp, Homo Sapiens
  misc_feature (1112)..(1112): n is a, c, g, or t
ggggatcaaggaggaggtgggcgcaccgggcatagtggttggagtttctgtagatggaaaagaagtctggtcagaaggtttaggttatgctggtgttgggaaccgggtaccatgtaaaccagagacagttatgcgaattgctaggatcagcaaaagtctcaccatggttgctcttgccaaagtgtgggaaggagggaaactggatcttgatattccagtacaactgtatgttcccgaagtcccagaaaaagaatatgaaggtgaaaaggtttctgtcacaacaagattactgatttcccattgaagtggaattcgtcattatgaaaaggacataaaaaaggtgaaagaagagaaagcttataaagccttgaagatgatgaaagagaatgttgcatttgagcaagaaaaagaaggcaaaagtaatgaaaagaatgattttactaaatttaaaacagagcaggagaatgaagccaaatgccggaattcaaaacctggcaagaaaaagaatgattttgaacaaggcgaattatatttgagagaaaagtttgaaaattcaattgaatccctaagattatttaaaaatgatcctttgttcttcaaacctggtagtcagtttttgtattcaacttttggctataccctactggcagccatagtagagagagcttcaggatgtaaatatttggactatatgcagaaaatattccatgacttggatatgctgacgactgtgcaggaagaaaacgagccagtgatttacaatagagcaagattttatgtttacaataaaaagaaacgtcttgtcaacacaccttacgtggataactcctataaatgggctggtggtggatttctgtctacagtgggtgaccttctgaaatctgggaaatgcaatgctttatggttaccaagttgggctgtttaagaactcaaatgaaaatcttttacctggatacctcaaaccagaaacaatggttatgatgtggaccccagtccctaacacagagatgtcttgggataaagagggtaaatatgcaatggcgtggggtgttgtggaaaagaaacaaacgtatggttcgtgtagaaagcaacggcattatgcttcacatacnggaggggcagtgggtgccagtagtgtcctgctggtccttcctgaagaactggatacagagactataaataacaaggttcccccaagaggaatcattgtttctatcatatgtaacatgcaatctgttggcctcaatagcaccgctttgaagattgcccttgaatttgataaagacagatcagactgataaccttaacaccataggtgcaaaatgagttgttctgaggtttttttgaaacattaaagttccaaaacatgacatttttaagaataaatttgaaatagagtataattgaatgcagagaattatgtacctctaattgcttaattttgtaatggtcttttattgtagaattggttctttatactcagggaagtaattatattgtttttactttttgaaaaaagtgttaactcttgaaataaaatatttctgat

SEQ ID NO: 357158 - DNA, 1069 bp, Homo Sapiens
  misc_feature (197)..(197): n is a, c, g, or t
  misc_feature (697)..(697): n is a, c, g, or t
  misc_feature (845)..(845): n is a, c, g, or t
tggccaggcagaggtctgtggagtggagaggcgaggctcacggtggaactctcagatgacagcatgcaggcaccaagagagtggacgcacatacagaagacagccatgcactgagctggggacatgcaacaataacaggtgagttccaacaaattggttcaaaaagaggggggataaacacgctggcccatgctggnaagcatggcaccaccttccaggcactgtcttcttctgatcagcactctgggtgtctttgcacttaactgcttcaccaaaggtcagaagaacagcacgctcatcttcacaagggaaaacaccattcggaactgcagctgttctgcggacatccgggattgtgactacagtttggccaacctgatgtgcaactgtaaaaccgtcctgccccttgcagttaggagcgaaccagctacaatgggccatctgaccatctggttcacggacacatctgcgctgggccacctgctgaacttcacgctggtccaagacctgaagctttccctgtgcagcaccaacactctccccactgaatacctggctatttgtggtctgaagaggctgcgcatcaacatggaagccaagcatcccttcccagagcagagcttactcatccatagcggtggggacagtgactccagagagaagcccatgtggttacacaaaggctggcagcccatgntatgtaatatctcattccttagatatggctcttttcaacagggactcagccttaaaatcatatagtattgaaaacgttaccagcattgcccaacaactttcctgacttttcttactttagaaccttcccaatgccaagcaacaaaagnctatgttgtcacatttatttactagcataataactgtgtccagctgccctggaactttggcaaatgatgaataatttgcagaaggaatctggaaataaggccgtgagataggtatccctacccacaactgtgcctctctccgcaggctccatttgcaacacagccacacataccaataaccagctctctgttctgctctgtgcccaactgcgagaacacttttg

SEQ ID NO: 357159 - DNA, 1149 bp, Homo Sapiens
  misc_feature (720)..(720): n is a, c, g, or t
  misc_feature (1092)..(1092): n is a, c, g, or t
  misc_feature (1111)..(1111): n is a, c, g, or t
ctaaattcaactaaagttataaataaagagaaaaactcattcagaaatcatggattttaaaaatattttactgcagccaagttttcatttcaaaatgtaatttcagtttggagcttttaggcattatgtatatttaaaaaatatattcttcaaaaatggcattttgggcatggtgggatggatgttggcaaaagatatccggagcctccagtctgtcattaactgatatggtaaatcacctctcttctttgggtctcaattttttatttatctatatggtaaactcagagatcactccttaggggtgagtcctattgcaatatgaccgacaaagaagacaaaatagcattgaaactaacccatacaaaatatccaactctggattctgtgaataagtatcttgaccataaaaagtcattgctgttcttgtttctaatgtaaatagtgtccattagtaaaagtgaaattcagtcttaagtagggtgaattggatcaccatttacacaagagatggctttttcctttgcttgaaaaacattttggatcacctccaaagaatgaaaaccaggagtacgttttagtcatattagtcaggatgagatactataagatgtgtgtaacatttggaaatgcaccaaagtgagcgtttaaatcttcttattttattgaaaactaggagcagaaatgtaaaaatgctcatgaagggttctgaatgccacnaagatattttagaatcaatttattaaaggggtattccattcattacccttctaaaattggaaaaggggggataagaaaatctaaaggtaacccaaccttatcttttgaaacattatatattcgtggaattggggctttaaaataaaacccatccggatttgaaattctaattaagcctatttgtggggggtgggatccccccaatctataatggtggctgctttccattaactagcctctgaaacgcctttgtttgaaatatataaatagggacctttatcttttaccaagagggttcttttaagaaaatacccctgctacaagggctacttggaacccggaagttttactataccttcgaaattatttatnccggccctgcgaacatctngctgtagtgtttttaacaccaaataaaaccaggtatat

SEQ ID NO: 357160 - DNA, 1841 bp, Homo Sapiens
  misc_feature (789)..(789): n is a, c, g, or t
aggcagctcttgggcgccggcgggctcggggcgggcgccgtggagggctcggtcccaattctctcgggctcggtccccgctcctctctcgggctccgtctccgcttctctctcgggctcaggcgccggccctgggggccccttctcctcatccgggagcacgggcggcgtcggctccgcttccttcgggacactgcgttctggcccgtcgcgagcagagggcgcctctgaggtggcggcggggtcagtctcggggggagtcgtgtccccctcagggatggcggtgggaaacgggctcgcgacgtcttcgggagcacagaccacctcctccgccttgtccgtggccggggcacacgggcctgcggggggcgcctccccatcctgctttccgccgtcgggaccgggattcggggggccctccggcggggacgggggctccacgcggagagtgggggccgactcgggctcggcgagctccggggtggccgggcggcttgaggggtcctccccggggacgcccccctcctccacgctggccgtgagcgcggaggagtgctgcaggcgggcgcgtctggcacgggcccctccgggtggcggcaagggcgccggtggcccaggctcagggcctctgtctggcggccacgtcctgctgcccaagagctggggcgctcttctgggctgactcccaaaaggggcttctcctcgttttcctcctccttcgggggtgcacgtcaggtcgctcagggattcagactgagcgcgcgatgagagccgcctcatcttactcganccgctggtggcggggcttgacctggagcttgtgctaagctgcagaattgtccaggccaggagaaggattctgcaggataactgtaagtcaagccactggtgccaggctgttgtctgagatccgggcagagacggtgctgtcgctcacgtggtctggagacacgacagagacctttatggtggtaccaggaccccacgtcgtgcagcagagacatctctggggggctcctgggcagcccgtcgtcctcagagctcatgccggcatcctctcccccgcttggcaggaagcccccctggaggaggtggtggccccattttcacattacactgtatttttaactgcagagctttaatccgatcacacacattttcttgggaaaacacccgcacaggccgagtagcgtcctgtccggactcaggaatgaaaatactgtcgtgagaaagggcccggctgcccagcgtgcccctcgactcctccagctcatcctcggagtcgtagcccactggcccggattcgatggcaatgacctcattcctcgtctgactttgtttccaggtgctacttcctgtggacgacggcgattcttttctcttcttcttcccaaaaaacttcttaaaagttttgaatttagattttttctttcctgtgctgtcctccccaaggccttctgcagcctcccgaagcttaatgtccatcacccttgtggaaatcatgtcaagctcgctgggacaggagcgtggcccgggctcggcgagacgcgcagagaagggcaccttccgcggggtgcggcgagccggggctgctcccgccgcggtgcgcgtctagccccagcccaaagccggggcgacgcagcaggtggccgcgcggcctccagacagcccgggtctgcggccgaagagctggacgcgggcgctgacactaccctcccgcggccggcccggccctgcgcccggcgcgctcccagctcccagctcccagctgcaggcgcgccggcttcgctcggctccgctcgactcggcgggggcgatcccgggaattccggaccggtccac

SEQ ID NO: 357161 - DNA, 968 bp, Homo Sapiens
  misc_feature (112)..(167): n is a, c, g, or t
atttaaaaaattgttttgtaatttaggaaaaaaggagaataccgggtgttatgggttcaacacccgagaagaggacgattttttggaacataaaaaacacatatggaagggnnnnnnnnnnnnnnnnnnnnnnnnnnnnnnnnnnnnnnnnnnnnnnnnnnnnnnnnggggatgaggcaaataatttaaaaacttttgtaaaaaataataacttgtaatgcattagtgtagtaagagcttttagattggaaccatttaatcacagtttaaatgtaaaaataattgacatgaattatcccattccattaagcataatatgttgtgcactttctcctccttttttcatttggaatacatttccggaaaatgatccaaaaacataagaacttacgacttgtaactcgtttaaagccattaattgtgcagtaatgtgttacaggattcaatcagcttctcttaagaaacaagtgtcattgtatcagtttcctgttctgtgacacgccctttaaaagtaaaagataatataacatattttaatacattgtgtgtaatgtacatatgcatattgtctatgtactatatacacattgtttataatattgttattacagtttgtcattcacctgaaaggagaaggaaaagtacgaaaggtttctctgcttgggaaaaggtgaatggtgttatatcaagaacgattacacacatggatctcatacatgtttttagaacattgttcttctgattgaagaagtctgatgctcctgaaaaatcttaaaatatctgacttgtattgaagaaaattatttaattaaatttttaaaggctggttgaaaaagcctgacagctctgagaattttttaaatgtctgaattgtaataaaaaaatggtttactttaaacttctaaaaactaatgaccttgtgactaaagaaaaatcatttaaggtgtattaagaatatagcaataaca

SEQ ID NO: 357162 - DNA, 1802 bp, Homo Sapiens
  misc_feature (451)..(451): n is a, c, g, or t
  misc_feature (514)..(514): n is a, c, g, or t
  misc_feature (557)..(557): n is a, c, g, or t
tctcagcgccaggcctttcaggagacccgcggttacatccaggcccggctccacctgcagcatgagaatcggcagcaggagcggctgctgctgtcggtattgccccagcacgttgccatggagatgaaagaagacatcaacacaaaaaaagaagacatgatgttccacaagatctacatacagaagcatgacaatgtcagcatcctgtttgcagacattgagggcttcaccagcctggcatcccagtgcactgcgcaggagctggtcatgaccctgaatgagctctttgcccggtttgacaagctggctgcggtgagggtgctgggccttgggattgggcctgggtgttgaccgtggtgagagcatagctttgctggcagcagctggggatttgagggcagatagagtatgcgtggagggtggtgggccatgcaggctgggtgggcaaganagtaaaggttacccttccctccaattccttcccattcaggagaatcactgcctgaggatcaanatcttgggggactgttactactgtgtgtcagggctgccggagnccgggccgaccatgcccactgctgtgtggagatgggggtagacatgattgaggccatctcgctggtacgtgaggtgacaggtgtgaatgtgaacatgcgcgtgggcatccacagcgggcgcgtgcactgcggcgtccttggcttgcggaaatggcagttcgatgtgtggtccaatgatgtgaccctggccaaccacatggaggcaggaggccgggctggccgcatccacatcactcgggcaacactgcagtacctgaacggggactacgaggtggagccaggccgtggtggcgagcgcaacgcgtacctcaaggagcagcacattgagactttcctcatcctgggcgccagccagaaacggaaagaggagaaggccatgctggccaagctgcagcggactcgggccaactccatggaagggctgatgccgcgctgggttcctgatcgtgccttctcccggaccaaggactccaaggccttccgccagatgggcattgatgattccagcaaagacaaccggggcacccaagatgccctgaaccctgaggatgaggtggatgagttcctgagccgtgccatcgatgcccgcagcattgatcagctgcggaaggaccatgtgcgccggtttctgctcaccttccagagagaggatcttgagaagaagtactcccggaaggtggatccccgcttccgagcctacgttgcctgtgccctgttggtcttctgcttcatctgcttcatccagcttctcatcttcccacactccaccctgatgcttgggatctatgccagcatcttcctgctgctgctaatcaccgtgctgatctgtgctgtgtactcctgtggttctctgttccctaaggccctgcaacgtctgtcccgcagcattgtccgctcacgggcacatagcaccgcagttggcatcttttccgtcctgcttgtgtttacttctgccattgccaacatgttcacctgtaaccacacccccatacggagctgtgcagcccggatgctgaatttaacacctgctgacatcactgcctgccacctgcagcagctcaattactctctgggcctggatgctcccctgtgtgagggcaccatgcccacctgcagcttttcctgagggcttctttccaatgagacctttgatgggctggactgtccagctgcaggggagggtgggccctcaaatatatggacccctgtggattcttgctggtgtttggcgctggcgcctgtata

SEQ ID NO: 357163 - DNA, 1012 bp, Homo Sapiens
  misc_feature (916)..(916): n is a, c, g, or t
  misc_feature (923)..(923): n is a, c, g, or t
  misc_feature (934)..(934): n is a, c, g, or t
  misc_feature (945)..(945): n is a, c, g, or t
  misc_feature (965)..(965): n is a, c, g, or t
  misc_feature (970)..(970): n is a, c, g, or t
  misc_feature (977)..(977): n is a, c, g, or t
  misc_feature (984)..(984): n is a, c, g, or t
  misc_feature (990)..(990): n is a, c, g, or t
  misc_feature (999)..(999): n is a, c, g, or t
  misc_feature (1010)..(1010): n is a, c, g, or t
ggggaggtggtggcgcttggtggccactggcggccgaggtagaggcagtggcgcttgagttggtcgggggcagcggcagatttgaggcttaagcaacttcttccggggaagagtgccagtgcagccactgttacaattcaagatcttgatctatatccatagattggaatattggtgggccagcaatcctcagacgcctcacttaggacaaatgaggaaactgaggcttggtgaagttacgaaacttgtccaaaatcacacaacttgtaaagggcacagccaagattcagagccaggctgtaaaaattaaaatgaacaaattacggcaaagttttaggagaaagaaggatgtttatgttccagaggccagtcgtccacatcagtggcagacagatgaagaaggcgttcgcaccggaaaatgtagcttcccggttaagtaccttggccatgtagaagttgatgaatcaagaggaatgcacatctgtgaagatgctgtaaaaagattgaaagctactggaaagaaagcagttaaagcagttctgtgggtctcagcagatggactcagagttgtggatgaaaaaactaaggacctcatagttgaccagacgatagagaaagtttctttctgtgccccagacaggaactttgatagagcctttttcttacatatgccgtgatggcaccactcgtcgctggatctgtcactgcttcatggctgtcaagggacacaggtgaaaggttgagccatgcagtaggctgtgcttttgcagcctgtttagagcgcaacagaagcgggagaaggaatgtggagtgactgctacttttgatgctagtcggacacttttacaagagaagatcatccgtgtcacacagcactgacaagcagaagagagagatcatgaacaatgcagatgcnagaaagnacatctgtctnagtgtgtattntggatggagttttcccacangtatntttgagnacagggnaatttntctatcaanagaccttgcanta

SEQ ID NO: 357164 - DNA, 797 bp, Homo Sapiens
cgcttggtggccactggcggcgaggtagaggcagtggcgcttgagtggtcgggggcagcggcagattgaggcttaagcaacttcttccggggaagagtgccagtgcagccactgttacaattcaagatcttgatctatatccatagcatggaatattggtgggccagcaatcctcagacgcctcacttaggacaagctgtaaaaattaagaatgaacaaattcacggcaagagtttcacggcagaaagaaggatggtctcatggttccagaggccagtcgtccacatcagctggcagacagatgacagaaggcgttcgcaccggaaaatgtagcttcccggttaagtaccttggccatgtagaagttgatgaatcaagaggaatgcacatctgtgaatgatgctggtaaaaagatcgaaagctactggaaagaaagcagttaaagcagttcgtgtgggtctcacgcagatggactcagagtgtggatgaaaaaactaaggacctcatagttgaccagacgatagagaaagtttctttctgtgccccagacaggaactttgatagagccttttcttacatatgccgtgatggcaccactcgtcgctggatctgtcactgcttcatggctgtcaaggacacaggtgaaaggttgagccatgcagtaggctgtgcttttgcagcctgtttagagcgcaagcagaagcgggagaaggaatgtggagtgacctgtacttttgatgctagtcggaccacttttacaagagaacgatcattccgtgttacaaacaggcactgaa

SEQ ID NO: 357165 - DNA, 590 bp, Homo Sapiens
ggctgccccatctccagtccctgcgcggcagggcacagtctgcagccccccagcctaggcagccgtcgggagcgagcaggagcgggaggtgggaccagcccgggccttggctagtctggggcctctgcctggctcccatggcccaaagcctgtcccaggagcaagatgctggctgactggcttgagtgggaggcatgctggtcccaggagcttccggggaagctctggcacagccgagagtcaaaagactacagcatccctgagagcagggagaggggccttttcctcgttttgcgttttcccctggagccagcaatgtgtcagtaacttgtctatgaaagaacctgaggtgtagccacatgtccagctgccttctgcgcacgcctggcctccctccaggctaccccttctatgggtgcgcatggtgctgctgttggttctgggcggggcctccactctgatggttccaccctgggaaagctggccttccatcctgccaaaccagatgacctcagtcccaccacctccaggaagcctctgtagatcttcattctgggttcttgtccattaaaaatacccaccatggcctg

SEQ ID NO: 357166 - DNA, 2577 bp, Homo Sapiens
  misc_feature (642)..(652): n is a, c, g, or t
  misc_feature (818)..(831): n is a, c, g, or t
  misc_feature (852)..(913): n is a, c, g, or t
  misc_feature (1099)..(1107): n is a, c, g, or t
  misc_feature (2519)..(2519): n is a, c, g, or t
  misc_feature (2553)..(2553): n is a, c, g, or t
ccgtgtgtattggggcaaaggacccatccccgcaccgtcgtcccccctcactcgcggggtgtgtcgtgggagacaaaaaggacggttgtgcgtgtgtgctgcggagccctacagctccctgcgggcacgcagatgttccctccccgcctcccttcgtacgatattggaaagagcgcgcgcgcccccataagtgggaacacatagtgtttttatctcctccgccggaggtgttctgcgctgcgagggggttggaggattcttatttgtttcgcgctttcgtggggggccaagacaggtggctgtgaacttctcccccctcgaggggagactgagcagggttttttcgcctgctaggccccccgttttcgagctcagagcagttgtcctcccacatctcgcggccgcaagaaagaggggctccataagtcaatattttccacaccacccggctccccttccgccaacaaagatattgccaaatggcccagggggcgagcgataattttctatatttagggggctcctcgtctggtgcactcccgccgttcgttgaaggaacccccgcgcaatacgctcccccagaccaaccgcccttcggagcgtttttgacgaaacagggcgcggcgtggcccgcgggcgggnnnnnnnnnnnggtggggaaattcaaggccgttattcatgatcccagtgttttcttatggaaacaagtgagggccgcgtgtcgctttccctcttaggggcccggcgccccaaaaaaaggtttttgaaaagtttttttgaggggcggagggcggcccgccacagacctctctctttcnnnnnnnnnnnnnnctggcgtgcgccgggttatgnnnnnnnnnnnnnnnnnnnnnnnnnnnnnnnnnnnnnnnnnnnnnnnnnnnnnnnnnnnnnncataatttaaggatctctttatgttcgtcacaaaggttatcaatgcttttaagagcatctgcatagttttgttatttaacctttacacacaatacatgtttttcaaactgcaaagttgataactaatatcattttcaaataggcatagtataaccttaaatattacatgattcaaattattattannnnnnnnnacaaagaaataaacctgtaaaggatcactgcactacagttgtccattaattatctgcggcaaaactgggatcctagtagaagcttcagcatatggatggttcctctactgcctgggcaccctctgtgacagctttgacacatttggccattgtctgtgaggctctgctaattgaatctgtcatgtagaagtcttttatagttagctgaggtggaacaagtgggtcagcaagaagctgctggttcactagctttgagagctcatttgcttgctggaagtaattagccccttcaatatcatcatatcgaacaagattaggagagacttcttccaatctgttccttacttgatccagagtatcatatggaagagtcattccagcaatctcagagagtgctcttataattttccagtcttctcttgccaagccaggaggtgtcactgctaccttagtctgctgagctctaccctcagtgttgacatatgtagcagacttctctgtgtaagcagctcctgggagaataacatcagctatgggagccccaacatcaccatgatgtccttgataaataatgaaacaatcctttggcaaatcctgtcgtgtgatacaacctccatctgctcccaggagaaacagcaccttgggagggttcttccgaattgcttccaccccaggcttatagccaaggtccaaagcagctacttgacttgcaatcctatgaaggatattcataactttccaatcaccagtaacaccactagtcatccgaatcttttgtgcaatgctagaaacagctgcaagaattgctgctccatcatttctttggagtgcagaactgcctaaaaccaccattggttttttagcttcctttaggacctggctaaatggatggcttcccgaagcaatgtcttgaagaattttgggggggtctcccaggtggtcatatgtgtaagtgaggtccactggactgcctataagggccacttttaagtcattatgcagccagctctttcgaattctagcattaaacagtggtgcctcaaaacgtgggtttgtaccaaccagaagaacaacatctgcctcttccacaccagcaattgtagtattaagaagataattggaacgcaaatctgtgccagctcctgcagtggggaagacctcttcagtgcataaggtgtcagagtccactctattaagcaaatctttgagagctaccagggcttcagcatccaccaagccacctgcaattgctgccacatctttgccttgaaaactctgcaacattccactacgcgagagagcgcatcctcccaagaagtataggttaaaagccctttttcatttctgaccattggctcggtaagtctttgacgttttagcccatcataggcaaatctggttttatcagaganccactcttcattgatgtcctcatgcatacgtggnaaaatcctcatcacttctccagtt

SEQ ID NO: 357167 - DNA, 1079 bp, Homo Sapiens
  misc_feature (225)..(259): n is a, c, g, or t
cccgggattgctcttcacaagaacatctggccaggcattaacaattagtaaatttttttgcatatgaacagtatttttctggtcatgtagatgggtgcacatgacactaaacagcattgtttagtgttatccctcttaactggtgggttgtatttggggtggaggctgtagccgaggagaagacattcacctctgtactcgagaaactttgtgtaggaatttagnnnnnnnnnnnnnnnnnnnnnnnnnnnnnnnnnnnactacttttactgttagcacaatgctataattgagctaatctttgtagtttggtgcaggaccaccaagtttgtgtgacccattacctactttttccatgctcagccattaccctgtcctggggcatctgagggcagtaaggaacaggtgtccaaaggaggaatgttggtgcctatgagtatgttttccagttgtattgaatttcttacttggtgtatttttgacttgtcttagtttctttccttgtggtctatgctattttacttgcgatttgttggatattctccctgtcattaaagagttgtaaaatggaagttagtttctctatgcaaatgctttaatggatgaagctgataggtttagcattgatttttgctggtgtccttcaacaagcatgaaggtgataaatgtgtttccatggctttagactcatttttgaagtcttggattgtgtgaacattcttagaaacaataaaatgttttaattaaaagccctcgactaccagctgaattcagtgtctactaggaaaatgggtagatttgttacattgtccctttgctctctatgactttgttccagttgtcaaggaacttaaatgggtattcaggaaaaagaattcttgtttccctttcctcaccttgccagttaaataactcctggtgacacttcaggtggtaggaattgaaacacaaacctgacttctgaccacatgggtcaaaggcaaaaggcaaatggcttcaaagcccttagtgtgcttatccagttcaggcagtgaggagataacctctgctttcctccctgaggagtttggagtatttaa

SEQ ID NO: 357168 - DNA, 1781 bp, Homo Sapiens
  misc_feature (74)..(75): n is a, c, g, or t
  misc_feature (78)..(78): n is a, c, g, or t
  misc_feature (97)..(97): n is a, c, g, or t
  misc_feature (179)..(179): n is a, c, g, or t
  misc_feature (233)..(233): n is a, c, g, or t
  misc_feature (475)..(647): n is a, c, g, or t
cggcatcattccaagctctaaaaaattcaagcaccatccccccaaaagtgcacattatttaatgcaaaagtgannaancaatgcagataataaatgncagcaagaaagggctctttaactcagctgctgttatggtgactgtgcctgacctgtctccataggctctctggctgggacanaactgtgagaaacacattctattctgtgtttacggtcaggactctggggtccanagtgtggcggtttgggttcctcggaaggctcctcacaggtgagaggtgcatggggccagggaaagtcagtgggcttggtgacctttactgtttttcttgttgaacacctatgcaggctctgcagcccctgatgctttatgtgatgagggcccttgcatgctagaaatgtacagaatctgctctaggtttggtttccaaaaatctagttttggctgggtgcagtggctcatgcctgtaatctnnnnnnnnnnnnnnnnnnnnnnnnnnnnnnnnnnnnnnnnnnnnnnnnnnnnnnnnnnnnnnnnnnnnnnnnnnnnnnnnnnnnnnnnnnnnnnnnnnnnnnnnnnnnnnnnnnnnnnnnnnnnnnnnnnnnnnnnnnnnnnnnnnnnnnnnnnnnnnnnnnnnnnnnnnnnncctgaccaaccccaggagttcaaagctgcactgaactataaaagcgtgccaatgcactccagcctgggtgacagagcgagaccttatctatttaaaaatatatatataattttcaaagcagcagaaacctttccaacctcaatgataatacaggtgaaaggggtcctgaaataggcagggtcttccttgctttgaggtagaaccacatgacacagatctattatttaggaggtaaatacagatgaacaggaccgaataaattttttaaaaatctgcaggtgggaggaattagtgatggtgatgatggggaaagtaaaatgccactgtcttggggtaggagtagaaagtttagaaagtctacactagactgaggcatttagatacaaaaaaaagatatacaaagcaaagtctggtgtttacttcataacatctaagaattatattgacaaagatggtctacatctactgcctgtctaacaagcaaaaacactgtggaccagttagaccagcaggtcatgatgattccacaaggcagtctgaccttcagactgctggttcctgctcatcaccatgcttctgatcaaacctaaaaaagctctgcagccaattcctaactttaaactgtgtttgatgatacaggaagtattatttgaaatgcaggtgagataagcctcattccctgaattcatcaatctaccccagtcacacactccccaggagtgctggctctatcagaaggaagcacccaagtggctaggaaggctgaggaatttctcaggaagatgacaaaagttccactgtcatgaatgcaaggtgctgaacagatctccagtgaggaaatgtgtatacaagcactgcagctaacacaagcacactattcggcatctactatggaaaagtgatcccctaaaaaggaagtcccatgctcagcctctctgtgcccaggacaagtgtctgacaggacagggtctggggaccatctattttttcccctttctctttccttcctttcatgttcctccaatgttatgtcagttttctgattttgagtacttccttaaattctgtacccgggtcacccctatttgcctgcatctctaaagtcaatcctgggatgtttttcttttttccatc

SEQ ID NO: 357169 - DNA, 2434 bp, Homo Sapiens
  misc_feature (509)..(522): n is a, c, g, or t
  misc_feature (607)..(617): n is a, c, g, or t
  misc_feature (845)..(845): n is a, c, g, or t
  misc_feature (905)..(905): n is a, c, g, or t
  misc_feature (1415)..(1415): n is a, c, g, or t
  misc_feature (1517)..(1517): n is a, c, g, or t
  misc_feature (1836)..(1836): n is a, c, g, or t
  misc_feature (1840)..(1840): n is a, c, g, or t
  misc_feature (1846)..(1846): n is a, c, g, or t
  misc_feature (1849)..(1849): n is a, c, g, or t
  misc_feature (1856)..(1857): n is a, c, g, or t
  misc_feature (1879)..(1879): n is a, c, g, or t
  misc_feature (1917)..(1917): n is a, c, g, or t
  misc_feature (1921)..(1921): n is a, c, g, or t
  misc_feature (1924)..(1924): n is a, c, g, or t
  misc_feature (1926)..(1927): n is a, c, g, or t
  misc_feature (1931)..(1931): n is a, c, g, or t
  misc_feature (1933)..(1933): n is a, c, g, or t
  misc_feature (1938)..(1938): n is a, c, g, or t
  misc_feature (1950)..(1951): n is a, c, g, or t
  misc_feature (1953)..(1953): n is a, c, g, or t
  misc_feature (1958)..(1958): n is a, c, g, or t
  misc_feature (1965)..(1966): n is a, c, g, or t
  misc_feature (1971)..(1972): n is a, c, g, or t
  misc_feature (1981)..(1981): n is a, c, g, or t
  misc_feature (1989)..(1989): n is a, c, g, or t
  misc_feature (1991)..(1992): n is a, c, g, or t
  misc_feature (2011)..(2011): n is a, c, g, or t
  misc_feature (2360)..(2360): n is a, c, g, or t
  misc_feature (2386)..(2386): n is a, c, g, or t
  misc_feature (2424)..(2424): n is a, c, g, or t
gccttgcttctgttgcgccatgatgttgatgccctactctggcaacacactcaagcaaacaagatgatatgtggaagcacatccaactttcaatgctttaggctatgtccaagcatcaaagagagacaaaaaatttttcgcctgtgctccaaattactcgtatgcagccctttgtgagtgccttcgtcgagtattcatctatcgtcagcctgctcccatgtccactgtactttacaacagaaaggaaggcaggcaagtaggacaggttgctaagcagcaagtagcaagcctagaaaccaatgatcctattttaggatttcaggcaacaaatgagagattatttgttcttactaccaaaaacctctttttaataaaagtaaatacagagaattaattattctaacatattggcctctttgtactggaaaagtattcagtggtacctggaggtctggacagttatactgtaacctcttaagttttaatgtgctaaatatatcttgtatgannnnnnnnnnnnnnaataacattggaaatatattcaagagattatgattctgtaaagctgtggaatgaagctgcagatttagagaacattggcttctgnnnnnnnnnnngagtgaagatagtactagcaagtatacttattttttaaaacaggctagaatctcatgttttatgtgaaagatgtacaattcagtgtttaaaaataaaaatatttattgtgtactctgttcgttgattagttgctacaggctgtacctataagatgtacagggtaatagttaaatgttgagtattgtacatatgtatttaagtggattgaataactgagtctacatggnggaggaaatgctagagaacagcaggtctaatattttttaagtttactgagagacctttanttattattttcaaattaagtatagctttatgtaacttttagccagttgctctgccacagacatagacaaagagagataagatttcacattatccatcactgcataacaaaccacaccaaaactcagtggtttaaaacaaggacttttattatttttcacgattcagtgagttggctgtctctgctgtacagggcctctcagcctccagtagactagacgaatcttctttccatagtagagaaaacatcttaagagagcaagctccaatatgcaagagcttatcgatcctgtacatctatcatatatactaatgttccattggacaaagcaaatcacatggccaagtctagagtcagaatgaggggactacacaagctgacagcggatggtatgactcattgggggccattgatggaacaatcttaccacacaaggacaaattataatttagccttgtggctctctttatttttctaacaacttcaacaaaataatcctgtttatatgttnatagtctcttcgccacaaattttgttttttcaaacttacctttccaggtctgttttagtatgtatgaacctggaaacttatattactgtttatagccatccncaagatacgtacctcatataaaccccaagttggattttatatcttaataaggaagttaagaccttcatttaagaggcaggagattaagataagaaatataagatagaaaagctttgttcctaacatatcttttgcctgtctgggcaagtatttgacccaaccaaattttaatgaacgaatgaatgacagagaggaggaaaaaagatgaggattgcatacatgttctaaaccctttgtcagattgcagtttcctagagagtattgaggggctaggtagaaagttaggaaaggtcctgaagactggtattgacaattggancccnaatagnacnctatccnnattaggaaagagagactagatnccaaacatcacgagatcatagagatcgaaaactgtatngtanccnanncccnanccacncatatccccacnncnttccnctactgnnctaannccccctgtncccaaccncnncccaaatactgaattattnaaaatctttatgatgggaaagtagatctaaattttctctaaaatgttccccaaagataatatcctcttagggaacataagaaaaatgtataataaaaatgtggtgcttaattaaccatgactatgtatatattgccaattttagtaatcaatattctttgtgcatgtgatttttttgcatgattaatgttgaattgaaagctctcaggataattaatcctaaatattgtcgcatgttgacctacgttaaaagatgaataggtctagagccgtgatttcaagctattttcctgaaatggcttcaggggattccataaaacatttaaacaatgtttctaagggtacatatnacttagggaccattggaggacatatnactacaagtggctagggattataggtaccctggtattnttcgttggat

SEQ ID NO: 357170 - DNA, 1336 bp, Homo Sapiens
  misc_feature (47)..(55): n is a, c, g, or t
  misc_feature (132)..(132): n is a, c, g, or t
  misc_feature (934)..(986): n is a, c, g, or t
  misc_feature (1091)..(1121): n is a, c, g, or t
  misc_feature (1127)..(1229): n is a, c, g, or t
  misc_feature (1250)..(1264): n is a, c, g, or t
tgtttaaaaagcccagtgattttcccaaacttgaacaatccggaaannnnnnnnnaatttagaaagggaacatgccaaacaccctgcaagtctcccttgtgccctgtgcttggggggtgccaacaccaccancccactctagtctgatgatgtactaggagattcacagactcagcctgtagtcatactcatggctatgttttactacagcgaaaggctaggaagcaaaatcagcaaaggaaaaaagcgcatggacaaagtccagggaaaccaggtgtaagcctcccacagtcctctcccagcagagtcacataggacacaattcctccagcaatcagttgtgacaacccatgtgcaatgttgtatacaagggaagctcattacagactcagtgttcagggttctcattgggagctgctcacctcatcctctgcctaacacatatgaaaatctgactcccagaaggaaagcagatgttgggcataacccacattgtttgtacaaacagtttaggcacagtgagccactcttatcatttagggagtaatgagaaccctcctgaaatccaagctttcagatgccagccaagggccagccttgcaaacaggcctgctttctcatctcttttcacacagtccatctccttattgaggcttctttacagcaaaattattattagtaggaccacatgcaaaagggtgagaccaacctcaaatatggacctcagttcttcctggtaggggtcctggacttaaccagctaaaataaatcccattaaccataaagtctaattcttaggaaagccacggtggcttcctccttaaattcctttttgttgttgttgttgaagattggaagtcttggctctgtcaacccaagggctggaagtgcaaatgggcgtgaattcttgggctcaactgcaagcctccaaccnnnnnnnnnnnnnnnnnnnnnnnnnnnnnnnnnnnnnnnnnnnnnnnnnnnnngctaacaaggtgcaacaaccaccaacaacccaagctaaattttttgtaatttttgtaagggagctaacacaggtgcaacaaccacaccaacaacccaagctaaannnnnnnnnnnnnnnnnnnnnnnnnnnnnnnaaccannnnnnnnnnnnnnnnnnnnnnnnnnnnnnnnnnnnnnnnnnnnnnnnnnnnnnnnnnnnnnnnnnnnnnnnnnnnnnnnnnnnnnnnnnnnnnnnnnnnnnncttaaattgctgtttgaaccnnnnnnnnnnnnnnncaacctgacctgaggcatcaatcctcgtgccgattcaccaccagcctcgtacctgccgtagttctatccttc

SEQ ID NO: 357171 - DNA, 927 bp, Homo Sapiens
aaaaaggaaattaaggaaggagagccccgctgggttgcctaaagataaactttatgggttaatggggattaactttaagccgggttaagtccacggacccgctccagggaaggaactgaggtcacatatttgaggttggtcttaccccttttgcaggtggtcctactaataatatatttgctgtaaagaagcctcaataagaagatggactgtgtaaaaagagatgagaaagcaggcctgtttgcaaggctggcccttggctggcatctgaaagcttggatttcaggagggttctcattactccctaaatgataagagtggctcactgtgcctaaactgtttgtacaaacaatgtgggttatgcccaacatctgctttccttctgggagtcagattttcatatgtgttaggcagaggatgaggtgagcagctcccaatgagaaccctgaacactgagtctgtaatgagcttcccttgtatacaacattgcacatgggttgtcacaactgattgctggaggaattgtgtcctatgtgactctgctgggagaggactgtgggaggcttacacctggtttccctggactttgtccatgcgcttttttcctttgctgattttgcttcctagcctttcgctgtagtaaaacatagcccatgagtatgactacaggctgagtctgtgaatctcctagtacatcatcagactaggaggtggtggtgttggcaccccccagcacagggcacaagggagacttgcagggtgtttgtcatgttccctttctcaatctgggtgtggtttacagatttgttcagtttgtgaaaattcactgagctctatgaacaattataatatgtacatttttttctgtaagtgtattaaatttcaataaaaagaattcacactataggggtacaaaataacttaaaa

SEQ ID NO: 357172 - DNA, 1641 bp, Homo Sapiens
  misc_feature (785)..(812): n is a, c, g, or t
  misc_feature (1130)..(1142): n is a, c, g, or t
  misc_feature (1453)..(1462): n is a, c, g, or t
ggcctggctggtggtcctgagttgcccagcaatcccagttaccctctcacaatttggaaagagagtgttcactcagaaaggggacatgctagcatagatgagcagggaccaccaatatacagcacaggctgtgtcagctgagaaagagcatccggggacaaggggagacctggcgggctactgtaatctgcccctgagccacggtatgaccacagcccaaagcccaccctcaggaggggggctgctcccactgtccatcatcagccagctaactcttgcatttcatacccatattcaggggcagatagagcccctgttgtcaagatgttacagtctcagagggattggaacagaggcatatgtaaccaatggaaatcacgcacagatccataaaactgttaaaacagtgctacctgctccttgaacactgggtcgtatcttaataagaagagatgatggatggcgggagggtattatagaaaggcatggcagaggtggagaaaaggcaaggtgccagccagccatctcacattaaggaggcttctgccctggcctctccttccaggccctcatgggtgacagcaggttcagaagatctctgggtctgtttccccctggggaagaaacattagattttttttaacattagagggcacccatgagcactattcatcagagggcagaaacttcattgttctgttcaagtcattatgaattaattacatgtatatatgcttggtctgatgaaaatgaaatcactgaagtttgttttccctctcttctcnnnnnnnnnnnnnnnnnnnnnnnnnnnngtgagctacagaatcatacaatgacccaacacagcagttagtgcaagtacagtctctcaaggagaattgattttgtggcacaaaaagggaacatgttttactctttgcacgaaactttcattgttaatgtatattattcagaaacattgtattgtaccataaaacttgtattatcaaactgttggatgttcatgtgtttgaacttttgcgcaccggatagaccccttgtatataaagtgttgcacatgtattatgtcgtctgatactaaaatggtcttataaagacaagtggacttgggccctattcaggcaagattnnnnnnnnnnnnngactatgaccaaaatggcttaagataaagtatttttaaggaagaaagattaaaaacaactgttatacatgagactatggttggacttccttttctttacacttaagcctagaatttctctttaggtatatcagcgcttaaatccaagactattttttattgctgaagattcttgcaaaccatgaagagatgttctcacagaacagaaccccacagctggataaggcccgtatatatatatttgtaagccttgcaatgtgacaggtagcatcactatatatgcaatagttgttatgtagactgtcaaagaannnnnnnnnncctggatacatttgaagctttgagtgttcaaggttttccttaatgatttcacgcagccaaattcttgaatcagttgaactaacctgtatgttactgttattaatgtttactctgcagtctgaacctggagattactggaattgttttccaagaggaaataaattcagtttaccattagg

SEQ ID NO: 357173 - DNA, 1671 bp, Homo Sapiens
  misc_feature (55)..(55): n is a, c, g, or t
  misc_feature (98)..(98): n is a, c, g, or t
  misc_feature (421)..(430): n is a, c, g, or t
catttgaagacaggactggagtatcaatcttaccactactaaacctgctccaatnttaggcaagtaaggctttcttcatcaacagtgttaataaccangggtaggtgtgaggattaaatgacaacctccttagtgtgatgcttttacaaagtaaacactgaaagagtaggtttaatggttatcaccctaaggtcccatggaagtctcagttgttctaattcaagattaccatgtagcaccctaggcaaacaggttacattattccctgattgtagctatctggggattgtaatcctcaaccctttctagaggttctgggtccccactgtgttgtattcacttagcagacctctgtgataaccccagtggtaaactcagactacacctatgtcaggttctttgctatgttctgttaaagccnnnnnnnnnnggaccaagacaaggtccctgctatgtgtcccgaggagaatggaacagtcacagaaacaaatcaagcagcagagcaaatgcacagttcagggaggctacagagattgggagccctgaagcaaggctgtgtcacagaagtgaggtatgaacacgtaggggctggacttgtcaaagagcatagaggtattcaagagataaacagtatgggtaggatacctaaccaatggttaagactggatcataagggtcttgtaataccatgctgaatttggacttcactgtgtaggcccagggaaactttaaaccatgaagtgacaagaccagaaagatcactccaatggtctcatgaaagatggactggcaacaacagctcaggactggaaagtgagagctgaaacattaggccaagagcccaggctcacctcctccagagggcctgccctgagcaccacacagccgggctgtgctgtgaaacatccctttctgctctcagaagaccttccacataccacattcatgacgtgaatagaaattatccaaatccatattttgcctcaacagaaaaaggaatcgctctatgtttatgtatttccagagacagcaccgaatctgccatatagagaatgtgctgaatggctcaatggctcaatgagtcattctgctgttggggcagaagaatgagtccaacctgaaacttcatctgagataaatgcctgtgggacaatttggagatgtacaccggaggacagtgggacatgccatctggcagtcaggagagaaggtctaaacgagaggtccagatttggaagtgaagacgtgggaaacgtaatctagggcagtgacagggcctgaggacaggtcaggcaggccaatgtggcagaagagaagccaaggtaaggagaagctctagaaaagggatgaacagaggaccaatgagaatggcaggcagagatccacaaagtgatccagaagatttctggtctcaagtatgctgtttacataaaaacgagttaccagttgttggtattaattcaactcttgggaaatttataataatgttattttataacattattataggataacaaagcaagacagaaatcaatttagcacatgcatgtttatctctttaattcctctgtgaatctaacatacagatgactaggtcccataggacacgggaaaaaaagcaacatgttgcgaacaagtgtcaaaataaagcactgaattagtctttaagcc

SEQ ID NO: 357174 - DNA, 1657 bp, Homo Sapiens
  misc_feature (241)..(241): n is a, c, g, or t
  misc_feature (257)..(258): n is a, c, g, or t
  misc_feature (261)..(263): n is a, c, g, or t
  misc_feature (265)..(265): n is a, c, g, or t
  misc_feature (267)..(267): n is a, c, g, or t
  misc_feature (281)..(281): n is a, c, g, or t
  misc_feature (283)..(283): n is a, c, g, or t
  misc_feature (285)..(285): n is a, c, g, or t
  misc_feature (287)..(317): n is a, c, g, or t
  misc_feature (895)..(895): n is a, c, g, or t
  misc_feature (1088)..(1114): n is a, c, g, or t
  misc_feature (1621)..(1622): n is a, c, g, or t
agaaaggccctcatggcgttgagacttggtcgtaggaacccaaccttaggggaagaagttaaattggcccaaagccaaagtacataagtgggcattccaaaaagctttttttaagaggcagaggctaccctgaaattaaaggatttcccccttttctctgaatatatgggattttgcagcccttcctcctgtgaattcaggttaatctaggcagcaattcggaatttgcctggggtactanccagaaaagagaaggnnatnnncncncacacacacacacncncncnnnnnnnnnnnnnnnnnnnnnnnnnnnnnnnccaaggaagaacatgaacttcatgggaaagtccttgcacttgtttctcctcagcaaaatcctcccctggcctcctgggactgcagtcaccaggctgtcaaagcctcaataccccactgagttccagagaagggtctcaaagctgggagaggatcaaactaacatggtaagctgctctttgccaactccccaaatacattatttcaacactaggaaaaacaacaacgaggctgtctccttacgttgtggttctgcctcctccactttagctagctacacaatccgatttatcctaatgctgacagattgcccacttcaaagtagtggtggtgtgtgtggggctgaaggagttgagaaactgtctataccactcaaaggcctttcttcctttaggagtagagaattgaactgtgaaaaagaagcccgagattccccagcgacgtggtgttgcagccccgttgaaggagtcaacatgcaagctgttaaagacctcaagtcattagcatcagctgctgcactaaaggggcaagtcagcgcctctaagtggcttagcgcacaaacgaggctcccgagacggcntcggcaactccatcccctcctccaccacccgctggatgtgaaaagctttccggagcccatcttggtaatcatttttatttttaatcacccttgccccccaaccccaagacctcagagtgccaacagtacccattatagactccctctggggtgcgcagaacgcaccaagcagagggggggaaaaaccccacgnnnnnnnnnnnnnnnnnnnnnnnnnnnaggaactgtttgagtccagtaacctgcgctcttcccaccaacctcccacaccccacctccgcccacgtacccgtgtcctgggactaggaggtaccgttatgtccccttccgaggtctggtgacattctcactccaacctcatctcccaagccacgggaaggctgagccaagttctcaccaaagcgcatcctttctgaattttgcagggggaagcttggtagtgttggcgctcctgaagagagacgacgcccgtttatcacccccaggcaactagtgcgcaaatcagcggtggctccagggctagagaatccctggagctaaccgcacccctctccctttcacggaacgcggactccggggaaatacgcacggggtccgcacgcgctgggtgtccagctctctgtcacagcttctccaagtgcctagtgaaacggggaaaggccctctccaatcattttggtaccttcctttccaatcctgaaacgattttcccctcctagcagtccnngagggcccgagctttaggaggaggcgatcccggga

SEQ ID NO: 357175 - DNA, 1465 bp, Homo Sapiens
  misc_feature (55)..(55): n is a, c, g, or t
  misc_feature (984)..(984): n is a, c, g, or t
  misc_feature (1013)..(1013): n is a, c, g, or t
  misc_feature (1102)..(1102): n is a, c, g, or t
  misc_feature (1112)..(1113): n is a, c, g, or t
  misc_feature (1135)..(1135): n is a, c, g, or t
  misc_feature (1146)..(1147): n is a, c, g, or t
  misc_feature (1174)..(1174): n is a, c, g, or t
  misc_feature (1179)..(1179): n is a, c, g, or t
  misc_feature (1182)..(1182): n is a, c, g, or t
  misc_feature (1258)..(1258): n is a, c, g, or t
  misc_feature (1282)..(1282): n is a, c, g, or t
  misc_feature (1286)..(1286): n is a, c, g, or t
  misc_feature (1296)..(1297): n is a, c, g, or t
  misc_feature (1303)..(1303): n is a, c, g, or t
  misc_feature (1307)..(1307): n is a, c, g, or t
  misc_feature (1339)..(1339): n is a, c, g, or t
  misc_feature (1374)..(1374): n is a, c, g, or t
  misc_feature (1402)..(1402): n is a, c, g, or t
  misc_feature (1451)..(1451): n is a, c, g, or t
atgggtgggtagtacatagagtgtagatacccagacaaagaaatgattcacagcncaggcaggacagagcagatcacacaagatttcatcacagtactcagaaaaccacaccatttaaaagttatgaattgtttatttctggaattttccatataatatttttgaccacagtttcccatggataactgaaaccatgggaagtggaactgtggataaggcaggactactgtaactatgacatcaatggtaggaacctgaagcataattctgctgtagtggattttttcaaaagaaactcatgaatgaaaaataatttattagatataagaaaggatgcatttgtatctcaaactttacttattctggaaataaatgaaaagccaacacctattacataccaacaaaaatgaaaaaataaataaatgtaaagccatagttcagtactgatggaatctgagaaaatttatatgaccgcgaacccatatctctgtactgaatgtgggaaaggctacacttgtcttgcatccctgacccagcatcagaaaacacatattggagaaaaaccttatgaatgtaaaatatgtggtaagtcctttacccggaacagtaatcttgttcaacatcaaagaatacatactggagagaaaccttatgaatgtaatgaatgtgggaaagcttttagtcagagcactaatcttattcagcatcaaagagtccatactggggagaaaccttatgagtgtaatgaatgtgaaaaaacctttagtcataggtcatcccttagaaatcatgagagaatccatactggagaaaaaccctatccttgtaatgaatgtgggaaagctttcagccatatctctgcccttactcaacatcatagaattcatactggaaagaaaccatatgaatgtactgaatgtggaaaaaccttcagccgcagcacacacctaattgaacatcagggaattcattctgaggaaaaancctaccagtgtaagcaatgtcggaaagtnttttgccacagtacatcactaatccgacatcagagaacccacacaggagagaaaccatatgaatgtaatgaatgtgggaaagctcccanccataccccnncccccattcaacatcaaagaantcatactggannaaaaccctatgagtgtaatgcatgtgnaaagnccntcaatcggagtgcacatcttactgaacaccagagaactcatactggagagaagccctatgtttgtaaagaatgtgnaaaaaccttcagtcgaagtacacncctnactgaacaannaaaaantcantcttgtgtgaaaccctatcaatgtaatgaatntcagaaactgttttgctatagaacatcactaattngacatcagaggacgcatacaggagaganaccctaccagtgtaatgaatgtgggaaatccttcagcttaagctcagcnctaactaaacataa

SEQ ID NO: 357176 - DNA, 888 bp, Homo Sapiens
  misc_feature (12)..(12): n is a, c, g, or t
aggtttactggngaaatggtgctcagatcacatctcctcatgataaagaaatctaaatgtatagaagaatgtgtggaaccctggaatggttcctggaatgataatttagtggataccagccccgctgaaaagagaccctctgcaggacatttgcaggagatacatggaagatctgaaaaagatctgtttttacagggagttaaactcgaagaccaccttgaaatttgtgcacacatcttttcatggggtcggacatgactatgtgcagttggcttttaaagtgtttggttttaagcctccaattccagtaccagaacaaaaagatcctgatccagacttttctaccgttaaatgtccaaatcctgaagaaggagaatctgtgctggaactttccttgagactggcagagaaagaaaatgcccgggtagtgctagccacagatcctgatgcagacagactggcagcagcagaacttcaggagaatggttgttggaaagttttcacagggaatgagttggcagctttgtttggatggtggatgtttgattgctggaagaaaaataaatcaagaaatgctgatgtgaagaacgtttatatgttagccaccacagtctcttctaaaattctgaaggcaattgcacttaaagaaggatttcattttgaagaaacattaccaggttttaaatggattggaagtaggataatagacctcctggaaaatgggaaagaagtcctttttgcatttgaagagtctattggttttctctgtggaacttcagttttggataaagatggggtgagtgcagctgttgtggttgctgagatggcatcttacctggaaaccatgaatataacattaaacagcaacgtgttaggttagaaaaaagt

SEQ ID NO: 357177 - DNA, 1001 bp, Homo Sapiens
  misc_feature (6)..(6): n is a, c, g, or t
  misc_feature (35)..(35): n is a, c, g, or t
  misc_feature (53)..(53): n is a, c, g, or t
  misc_feature (70)..(70): n is a, c, g, or t
aacatnccaggtttaaatgattgaagtagataatnacctcctgaaaatggaangagtccttttgcattgnagagtctattggttttctctgtggaacttcagttttggataaagatggggtgagtgcagctgttgtggttgctgagcatggcatcttacctggaaaccatgaatataacattgaaacagcaactggttaaggtttatgaaaaatatggttatcatatttcaaaaacttcctatttcttgtgttatgaaccacccaccatcaaaagtatatttgaaaggcttcgtaattatgattctccaaaagaatatccaaaatttggtggaacatttgctatattgcatgtacgggacattaccactggatatgacagtagccagcctaataagaaatcagtgctgcctgtgagtaaaaacaaccaaatgattacatttacttttcaaaatggactgtgttgctaaccttcgcacaagcggaacagaaccaaagataaagtattatgcagagatctgtgcgtcacctgaccagagtcacactgctttactggaggaagaacccaagaaactcaatgatgctctgatagagaattttcttcagcctagtaagaatggactgatctggcgttctgtttaggggtacaccaatacgtcatgacactgtgtgggcatatggaacagagcaaccgagaactgcatacattgaaccttgtgttagcattctctctctatctcatctggccgagtatctttttccttttattttctttctttttggtcaactggctagactaaacaaagtataagtttgaaatgaaatggtctagagggaaatgattcaaattttttcataattcaaacaaaagttattacactaaaagtattatagtaacgtattgtccttccgttaacagaaacatcacaattcaaaagtgagttttcttattatagtgtgattaagcctagttctgtatctcgtaattgtgtatagcatggta

SEQ ID NO: 357178 - DNA, 665 bp, Homo Sapiens
  misc_feature (221)..(247): n is a, c, g, or t
  misc_feature (533)..(533): n is a, c, g, or t
ccatgctatacacaattacgagatacagaactaggcttaatcacactataataagaaaactcacttttgaattgtgatgtttctgttaacggaaggacaatacgttactataatacttttagtgtaataacttttgtttgaattatgaaaaaatttgaatcatttccctctagaccatttcatttcaaacttatactttgtttagtctagccagttgaccnnnnnnnnnnnnnnnnnnnnnnnnnnnatactcggccagatgagatagagagagaatgctaacacaaggttcaatgtatgcagttctcggttgctctgttccatatgcccacacagtgtcatgacatattggtgtacccctaaacagaacgccagatcagtccattcttactaggctgaagaaaattctctatcagagcatcaatgagtttcttcagttcttcctccagtaaagcagtgtcactctggtcaggtgacgcacacatctctgcataatactttatctttggttctgttccacttgtccgaaggtnagcaacacagccattttgaaaagtaaatgtaatcatttggctgtttttactcacaggcagcactgatttcttattagggctggcactgtcatattccgtggtaacgtcccgtacatgcaatatagcaatgtt

SEQ ID NO: 357179 - DNA, 1138 bp, Homo Sapiens
  misc_feature (13)..(13): n is a, c, g, or t
  misc_feature (970)..(970): n is a, c, g, or t
  misc_feature (974)..(974): n is a, c, g, or t
  misc_feature (982)..(982): n is a, c, g, or t
  misc_feature (1026)..(1026): n is a, c, g, or t
  misc_feature (1054)..(1065): n is a, c, g, or t
  misc_feature (1104)..(1104): n is a, c, g, or t
  misc_feature (1108)..(1108): n is a, c, g, or t
ccataattgaggnagtggaaggtattgaaagggaaggtaagcaaaatttgccagcaagcttcggtggaagagccaatattcattaaagggaaaagtcaggctgttttgattaaattgcaataaggtgcagtattttcagtccattaagtagatgggatgggtggggagaaagcagatggcttagctacacagatgaaagtctaaaatagaaaggtcaaggctttgcctttcatcccagttctggtttttataggcctgaaatagaaacggtttacaattgcgtttctcaatggaattgttccgaaataatgacagaggagaatactagtaagtctctgaaaacattggtaaacctgggaagtcttttgccattcagctgatagttgtaatgaaaggtgttactctggccacccaaaaagtttactactgcaagattcgctgtaattaagttcaaactcacttttgggattttctcaaaagcctaaagaaaagaagggcctggaaagtaaacctgttttgtcttcatccaagctaatagacacctgatcagatcattctcctgttaaagcagcagtttatcaataggggaaaatcatttaacaaatcttccatagaagtggactgtgttggtatttcataatataagctatctaaaatttaattttaaaatactgttcaattacagtattaccgtcaattagcaaggtaatgatgctttttgagaaacgtaaaatataaaatggcgtgtaataccaccacccagagataaacagtattaacattttagagtatatctggtctttgtgaactatcatagacaagggcttctgagatgtaattttttacagtatttaaagataaagctccctgcttaaaataaaatggaaatgtttattaagggaatttatcttagcagcagactggctctatcttgacagttaattcttacctttacaaatgcagttagcanaaanaaaccaanacaaactttagaaagtgcccaaataaggtcattattttagtacncccctgaacatttgccatgtaagaaggnnnnnnnnnnnnaacttatttaaagatgatggcaagaagatgtgtgttttntcanaaagaagcggccaggagcggtagctcaccc

SEQ ID NO: 357180 - DNA, 817 bp, Homo Sapiens
  misc_feature (22)..(22): n is a, c, g, or t
  misc_feature (120)..(120): n is a, c, g, or t
  misc_feature (147)..(147): n is a, c, g, or t
  misc_feature (785)..(785): n is a, c, g, or t
ctcatgggctgggggccgggcnccgttcctctccagggcaactgaaggagcgttcactcaacgagcgcacgtgcccatgcctcagctcccgcagggcctcgtctgccctccgactgcctncgggggccccacggggatctcggtccnccgcatgtggccgggtccctgcctgctgggccgcatagtactgcgagtgggctttggcctcgctcataggtggccagctcctctcccgtgctgggctgtgggcatagccggtagagggtgttctctgccaggtggttctcaccgccctggtgctcctggccctggggctcctgcctggtggcctgctgcagcacctgactgtcctctggggccaggatctccagggaggcctgggggctccctgtacccccagttccagccccacccctcagggcctgctgctggatggctagcagcgtgcgcgtctcagtcaggttgccgtagcgcagctgctcctggatgaggcggtgcaggactgtccccgaggagtcttccagtgtcctcatgcttctttggcttgcacacagctgcctggacaatggccggtggcacctggccccagagcaccgctgcggcccgagggtgcccagcgcagtcagaccacaacctccggctcggcccagctcagctcggcggcgaagatgtgttctcggccgtggcgccgacgctctggctgttcgcgccccagcgcgcagccccagggtcggcccgcgccggaggcggctgctatgccaggaatgtgagagtttcagcgttcncccctcgggatcaaagcgaaccacaaataacc

SEQ ID NO: 357181 - DNA, 1162 bp, Homo Sapiens
  misc_feature (232)..(285): n is a, c, g, or t
  misc_feature (381)..(604): n is a, c, g, or t
  misc_feature (700)..(766): n is a, c, g, or t
attcccgggatccgcaccctacccggtccgcaggcaccttcctcctctctctcaggcacgtcctcgacctcagttgccacgtgcacatgctggtgccttccaggtcggtctttctccaccagactccacctggaactttcttccttttcgtcctgtgctggcctaacccctgctcggcctcggccctcagctgccggctctaacaaagcctctgtctttcccagacccctgnnnnnnnnnnnnnnnnnnnnnnnnnnnnnnnnnnnnnnnnnnnnnnnnnnnnnntgggctcaagcgatcctcccacctcagcctccatatagctggtggggaccaagtttctaacacatgaatgttgggagacacattcagaccatcgcnnnnnnnnnnnnnnnnnnnnnnnnnnnnnnnnnnnnnnnnnnnnnnnnnnnnnnnnnnnnnnnnnnnnnnnnnnnnnnnnnnnnnnnnnnnnnnnnnnnnnnnnnnnnnnnnnnnnnnnnnnnnnnnnnnnnnnnnnnnnnnnnnnnnnnnnnnnnnnnnnnnnnnnnnnnnnnnnnnnnnnnnnnnnnnnnnnnnnnnnnnnnnnnnnnnnnnnnnnnnnnnncccaagatatttaaaaactcatcagcacctgctttctgcatctggaccctgatcttctggtgggtttaccagttacttgtagagtgtccctgtgannnnnnnnnnnnnnnnnnnnnnnnnnnnnnnnnnnnnnnnnnnnnnnnnnnnnnnnnnnnnnnnnnnaaggaccatgtttttggaggagactgttttatgagtgaatttcaggggacacattcagatcatggcagtggcattataaagagagacacaaaagcttgctctctctgccatgtaagactaccacaagaagactgtcctcagaaaatcagaaagcgggtggaccctcatcagacaccagatgtgcctgcaccttgatcttggacttgccagccttcagaacagtaagaaagaaatgtatgttgtttaagccacccagtactatggtaaccttgctatagcagcccactaggagaccccaagatatttaaaaactcatcagcacctgctttctgcatctggaccctgatcttctggtgggtttaccagttacttgtagagtgtccctgtgaaaaagta

SEQ ID NO: 357182 - DNA, 1361 bp, Homo Sapiens
ggatggcccgggcctggcggaacggggcagaccgggaggggacctggatcatggctgccgcgccgccgctacgggaccgcctgagctttctacaccgggtgagtgagggcggtccgcccgggccccggtcccacggctcctctcgagcgccgcattccccggactcgccccgggccggagccattgaccttgcgtctccgcgccgggtagctgctcctggccccttcgcccgcgccgacgcccctgagctgcccgcccgccgcgccgtcccggggccttccaagccgggccttccaagccggacccgccgagcgcaagggcgatgggcacagccagaccctgggggaacgaacaggcctcggccagcattcagtggcctccgacgggagggaaggagcggcggacccggtggacgtggagccgctgtgtccgtgctgctggcgcccaggtgggctggcagcccgccgtcctccctgacggtggcgtttcagaggactccggtcctggagaggcacccctgggttgcagagaacacagacgtctcgaagggacagagaaggacgcaccattgtaagcccctcttagtaaaccctctgagaagtagaggccggggcgagttcccaggtgtcgtcctgagcaaactgccctcttttgtcagccctgagctttcctgggctggacctcagagggggctgggtggtcccagggcgcgaccttgggctgccagaagccacgctagggttggtcaaggctctcagtgcaaggtttcgacatagtcgttctgtgctgcgttctgcagttgtcagctgtcacctgcaaacctcagcagctccccttagggcgtggtgggcaaacagtgtcagtgatgcgtgtccacagcctcgggaaacacttcaggtccacgttttcgtatgttgtcactagatctcggcccttccgaccgaaaggcttcggcacctcacgcggtgggtcccatgcttgtcctgttaaatactcttgaactctattctgtcctgatactgaataatgcaagaatgggtggttccagttttcatccctataaaccgtacatctttgtgccagtaagtaagcatgaaacaaataaatacgtctgcgctaagcgaacgtaaaacacacgacatcaatcggttctcggggagcgatggagctagtcacgctgagcggctgtcactctgccattccggcctctggggaggtggaacgattcatagtcccctgtgtggaaaaggggcttgcctgggcctggtatggctttgctagtcagtaggtaggtacaggagaggtaccttcaaatagccttacatgctggtaagtgcagggaggctgggggctgtgtccct

SEQ ID NO: 357183 - DNA, 1136 bp, Homo Sapiens
  misc_feature (788)..(800): n is a, c, g, or t
  misc_feature (858)..(858): n is a, c, g, or t
  misc_feature (862)..(862): n is a, c, g, or t
  misc_feature (864)..(867): n is a, c, g, or t
  misc_feature (869)..(869): n is a, c, g, or t
  misc_feature (873)..(874): n is a, c, g, or t
  misc_feature (876)..(877): n is a, c, g, or t
  misc_feature (879)..(889): n is a, c, g, or t
  misc_feature (993)..(1046): n is a, c, g, or t
ggcctgggtggcgaattcggcacgaggctggatcatggctgccgcgccgccgctacgggaccgcctgagctttctacaccggctcccgattctcctgaaggggacgtccgatgatgatgtcccgtgtccgggctacctgtttgaagagattgctaaaatctcccacgagtctccgggcagcagccagtgcctgctggagtacctcctgagccgcctgcacagcagctccggccacgggaagctcaaggtgctgaagatcctgctctatctgtgcagccacggctcctccttcttcctgctcatcctcaaacgcaactctgccttcatccaggaagctgcagcttttgcagggcccccagatcctctgcacgggaacagcttgtaccagaaggttcgcgcggccgcgcaggacttggggagcaccctgttctcggacaccgtgttgccgctggctccctcccagcctctggggaccccgcctgccacaggcatgggctcccaggccaggccgcacagcaccctccagggtttcggctacagcaaggaacacggccgcacggctgtgaggcatcagcctgggcaggccgcgagggggctgggatgagcctggacagcggccccagctctcacaattcctcccagaacagtgtacctgagcagggtctcgaactcggggaagtccttccggctgcgaccgccttttcaggcgtcctgccggagaccccccttgaatattgccacacgaggcctctttccccgcagccttcacccggctcgtttccagtcgnnnnnnnnnnnnntccacttttactccacttctccctccgaaaacccctctctcgcttgttaccgcctcangctntnnnngngccnncnngnnnnnnnnnnntgggtctttcgcccctccttctccgcctcccctcccttttttcgttcccctacctttcccccgccactgcccgtgtgctgtttcgctctgtcctccccgggccnnnnnnnnnnnnnnnnnnnnnnnnnnnnnnnnnnnnnnnnnnnnnnnnnnnnnnattcaccgctcccttaccctcctcccctgccacgtttcctaccttctattaccccccctcccataccgcatataccgttttccctcccgc

SEQ ID NO: 357184 - DNA, 1570 bp, Homo Sapiens
  misc_feature (71)..(315): n is a, c, g, or t
  misc_feature (327)..(384): n is a, c, g, or t
  misc_feature (477)..(512): n is a, c, g, or t
  misc_feature (966)..(966): n is a, c, g, or t
  misc_feature (1010)..(1010): n is a, c, g, or t
  misc_feature (1125)..(1125): n is a, c, g, or t
  misc_feature (1129)..(1129): n is a, c, g, or t
  misc_feature (1151)..(1151): n is a, c, g, or t
  misc_feature (1161)..(1161): n is a, c, g, or t
  misc_feature (1182)..(1182): n is a, c, g, or t
  misc_feature (1231)..(1231): n is a, c, g, or t
  misc_feature (1259)..(1259): n is a, c, g, or t
  misc_feature (1293)..(1293): n is a, c, g, or t
  misc_feature (1325)..(1325): n is a, c, g, or t
  misc_feature (1349)..(1349): n is a, c, g, or t
ctttaggaccttggaaagggtaaccagggttttacaaaaagtacaaccggtgggcacaagggctcccaccnnnnnnnnnnnnnnnnnnnnnnnnnnnnnnnnnnnnnnnnnnnnnnnnnnnnnnnnnnnnnnnnnnnnnnnnnnnnnnnnnnnnnnnnnnnnnnnnnnnnnnnnnnnnnnnnnnnnnnnnnnnnnnnnnnnnnnnnnnnnnnnnnnnnnnnnnnnnnnnnnnnnnnnnnnnnnnnnnnnnnnnnnnnnnnnnnnnnnnnnnnnnnnnnnnnnnnnnnnnnnnnnnnnnnnnnnnnnnnnnnnnnngagaatccgtcnnnnnnnnnnnnnnnnnnnnnnnnnnnnnnnnnnnnnnnnnnnnnnnnnnnnnnnnnncaaatttcagactatatgaaaagcaataattcattaaataggaagaaacagatctctagtagaagtaatagattataatgtgactctgtctcnnnnnnnnnnnnnnnnnnnnnnnnnnnnnnnnnnnncatgtgaaattgccggctcacatgaaacaattcaggtatgtcaagaaaaaccgagttcagaatcaaattattctgaaagaaaatattcaactgtaaagctgcagttcagaacatggttgaaattttaaagaaacggctctgggtgggtgaagcaagagagggtcttgcaagaggggcagcaagggatccaaaacaatccccccgccgcaaggcaaaagaccagagaagatcccaggactgtgggccctgggcgttgacacctcagagcacaccaagtccggagcggcccaaagtcatggaagctctggagctccggagccggggaaggcctggagagtcggcggaatggaggctgcccggagatcccagagcttgggcaggggaaaaggcttctggcactcccgcgaggaaacagggtggcgccgcggaggtccagcgagtggcctaggcgcangcaatcacggaaggctctaagaggccaacagaaggcgcaaggcngcgggcaacggtgcttgggcgtagacacggagagcaacccagccagacctccggcgagcggctcccgggtcccgataagatccccatggcactggattagaggtggcgcatggantcgnacgggcgtggctgagccgcgcntttggggcanacaggctgcactaccggcgtntaaggccataccaccccgaaggcgtccggtctcctctgatctcgtgaanataagcagggtctgggccagaccgctanttagatgaaacgccacttgagaaaaccaggagangcaggcttgtttagacttcaagttcctccctntttaccgtttggtcgccgtacttntcaaccgcaccgtaaatctgctcccttttttcacacgcccaagcccacacaacagcccgggaccgcttagtgtgggctaacctgcagcacagccaggcaacaacatcacaactattcaggatgggcggcgcaacacgatgaaaccggatccagcagaaacaccacgcctcagatcactaaggtgcaggccaggattccctgccgttcgcggtgccatcccg

SEQ ID NO: 357185 - DNA, 918 bp, Homo Sapiens
  misc_feature (151)..(151): n is a, c, g, or t
agctggacgatgaagactccccccatggcgtggcctctccggcagcattggcagcaatgcaggtgaaggcaccactgtcctgagatgtggtgatgaagatgtccagggtgccattgtcatagacagcggtcctgaggagttccctaccagncggtcatcgggggctacccagtggataagggggctggggtccccaatggctttgcacttgagtgtggccgcctggccctccagaaccagcaacttgtgtgtgtgctgggtgatgagaggcggctcgcacacaaactcctcctcacgcacatgccagaagtagcgacccttgaggccccctggggagccacaggtttccaggtcatcgtcccgctcgagcctccgcagccagagaagctcacaattgcagtgaagtgggttacccccaaaactaaaggacaagggtggggcaaagggtgtggctgtcaaagccgaagcctgggagcgggcaaagatgggatcagggggcagcttctgcagccgattggaggtgagatccaggcgggccagtttctgcaggtctgcaaaggtgccctcggcgatgtgatccagcaggttgtggtccaggctcagctggtggaggttgaccatgcgtcgcacggagtcccacggcaggccatggaggttgttgtaggagaggtcccagatcctccaatgtcagcaggaagtcctcaaaagcctcatctgcgatgccgcccagctggttgttgttcacgataaggtgctgcaggttgaccaggccccggagggtgtcctccccaaggcttggcagccgattgctgtcaagatgcagggagcggaggctctcgaggtccagaaaggaaaagggctggatgtggctgatggtgttcctggacagggtcaggtccaccagccccgtcatgttgg

SEQ ID NO: 357186 - DNA, 995 bp, Homo Sapiens
  misc_feature (824)..(824): n is a, c, g, or t
tttcaaagctggtgcgttagtggctcctgttgtcaggtcttaatttcacacctttaacacccgcagtggccatgtgctgagtgacagttgcagttgtaagagccagtgatgtaaatggcagtggggtgttgagttcacttggcttcagcgctagggaggagcagggccgtgcgactcacaggacgctatgggaactgctgaattcatgtgaaatgccgtttgcaaacccagtaagaacatttcactgattcagagccttcttacactttcagttgggatgacctggggggaagtcagtttttatgatttaattcaataccttttctccatctatttagtatgagatcatcacaacaaacagctttcagcacaataaaaagttcagtttcaaactggagtcgatggaagttgatctctctccttctccgattagaaaatctgagatagcagccggccctgcgagaatctccatgattagtccacctcaagatggacgaatgggcagcgtctcctcccggggccccgagcatcccggcctgacaacgagtcagaggagcgtgggaaagcctctcaggattccacctctgcaaattccctacaagggacccccactaacgccaacaccacagttaccagggagagcaggaagaggggactctccaagcttcgggggctcccaggccaggctgcccccccggccgcccatcagcatctccagcctgctgcagaggcagtgtttagtgtgaagttttgaagtcatttcaaagacaaagttgtgtttttaccgcgacttccatgcctcctgcgggacctgctcaccttgngggcagtgacacctgaaagaagagcacccagccacccgctctgcccccttccagtcctccagccttcgtgcccaccagcatgtgtacgttagacagccagtgcgactgtactttccctcttgttgaaataattaagtaatgtagtggaataaagtatttttctgattaaaa

SEQ ID NO: 357187 - DNA, 1150 bp, Homo Sapiens
  misc_feature (53)..(53): n is a, c, g, or t
  misc_feature (79)..(79): n is a, c, g, or t
  misc_feature (102)..(102): n is a, c, g, or t
  misc_feature (160)..(160): n is a, c, g, or t
  misc_feature (527)..(540): n is a, c, g, or t
  misc_feature (578)..(586): n is a, c, g, or t
cagcaggcggcagaacagcaacagcaaggccagcgcccaccccagggaggacngcagcgccaggctcgcgcagcgcccnccggcgcccgggcatcatcagcngcagccgaagtggcccccggccgggcggcctgcatcgggactggtggaagccggcgcncggggtgaaaggccggccccggcgcgaacggcgcggaagggcgcaaaggaacgcgcggagctcgcagcagcctccgggggccttcgtccccggctctgacgttcaaggccagggtcgttctcagaagaaaggcgcctgtgaacctggaacatccatgctgggcgagctccgctgtccgcgaagttgctccaaacgcccagagcaaaatactcccagacgtctcttttgaaaattagacacccttaaaagcaccggtcgcttctcttcttttagattctttcttttctttccccaattccctccaagtcttaatattgaatggcgtgaccactttcataatgacaggagcgaaaaaaacaataagttnnnnnnnnnnnnnngaagaagaagactgggatggctgggacgaagagagggnnnnnnnnngcttgagaatttgatgatttaggagctgtggttccagagtccccagttggggaactgtccggttcccgcagggctagaagaggggcctccggcccgggtctgtgtgtctgctcctctggacctcggactggtggagcggctggcgcttgcgcttatttattaaattgcggtgtccgcgctcgctcaaaggacccggggagacgcgctgggtttcccagctgcgcctggagctcggctgagggcgcaaacacggacgtggggcgccacctgcgggtgcccgggcctccctgccgcaggctgcggaccggcggactccgacagaagacgggggagtcctggccgcaaggctgaggtttgctgatggtcttctttcaccccaaaagcagcgctgacctaaaacatgaagtgaaagccagtgacatccacgctctcctttttcacaaaagatgttgagatgctcaagaaaatgaaaatatgtcccagcagatctgaagaatgttgtccagtaaattcaattcatttctcttttatatctaattcacttaggatctatccaatgacaga

SEQ ID NO: 357188 - DNA, 1755 bp, Homo Sapiens
  misc_feature (178)..(178): n is a, c, g, or t
  misc_feature (191)..(191): n is a, c, g, or t
  misc_feature (1439)..(1497): n is a, c, g, or t
ccttagggctggattcgccagcattctgtctgtcttgggtgtaaggataatctgtcggacagcggccgcccgtggcttctcccagcattgccgcaccacgctgaagcggcccctctggatctgtgtctggaatgcaaaggtctttgtgctgggcaggggttgggctgaccgcccctgngctctcctcctcnagaggccaggtggctgggcccccccaggagaacttgctccgagggggctgctgtagggacccattcctgccttgctgacacatgccgtgcggaaggtgtaggtgccaccccgggagagcttgctggtcaggtagcagcagtcaaagatgtcggaggccagtgtggtccagctgccgccttctaggctgcactgcacaatgtaggtcacagggccgtaggattccacgggcttccagaccagcagcaccccatccgcgtacacctccccgatatccgggcatggcgaagatgaggggcgctctgccttccggaggacgcccgtggtggtcactgtccccagcgcattgctcacgctgcaggtgtacacacccaggtcctcagccaccaccaccaggatggtcagaagctggaagttcttgagggtggcagagatgaggacacggctgctgctctccaggggggctccgtctttgctccaggtggcctgggcagctggctgggctgacacctggcaggccagtgtcactgactggcccaggaccacagtctcatctgagagctcccttaggaatgtcggcgctcggtcccagctcttcagacctgagagccggaaggaagcaaggcctggcttcttcctggggggcccctccttctccagaccttccggcctgcccttcaggatccgggagatgtgctccacggaggccttcactctctcacgcagccccagctctgcaggctcggccagcggcaggtgcctcccaagggaagtggaagaggctgcgtgacggcgaggaccacttgcgcttcctgcccacggcagcctctgccagcagcgcgtccacatcctctgactcctctgtgatctcccaggcctgcgtgggggcccagttcacctggccagggccacgtgggctccgggaactcggccagctcctcctcagccatgggggagggcggctctggctgagcggacttggggactttcctgaagatcataaactcgaatgggaggtacttgatatcgtacaggtctgagaggttgaggtaggcggggtccacctcggaaatgtccagggatattgtgtcggccgcctccgcatcacctgacaggtcccggatctgcaccagggagacctgcccgatgtcctcccatggggtgggctctggagagctcctggtgggagccctgccgacctcaggcacaggccttgcactgacctggggcagtgggctctcagccctggnnnnnnnnnnnnnnnnnnnnnnnnnnnnnnnnnnnnnnnnnnnnnnnnnnnnnnnnnnngactgggacacagcccaggctatcctggcccacatgggcccctgccccagcatgccccctgcatctccaccaaaggcaaaggtgccatagccagccacgcctgcgtagcccccgcgaccacccagggagaacttgcgcatggtcacctgttcctgaggccgctgcaaggtgggtgtggagtcggacagatcctcagcctcctgggtccagccctccgcatccagggaggggccaggctctgtgcccacctgggaggag

SEQ ID NO: 357189 - DNA, 1573 bp, Homo Sapiens
  misc_feature (752)..(752): n is a, c, g, or t
  misc_feature (797)..(797): n is a, c, g, or t
  misc_feature (958)..(958): n is a, c, g, or t
  misc_feature (979)..(979): n is a, c, g, or t
  misc_feature (991)..(991): n is a, c, g, or t
  misc_feature (1115)..(1115): n is a, c, g, or t
  misc_feature (1186)..(1186): n is a, c, g, or t
  misc_feature (1215)..(1215): n is a, c, g, or t
cacctggacacgtccgggtcttgcgagaagagcagcagaatgtgctgggtgttgagaaagagcgcccagcaagggaggcagcaaagaagcaggttcagcgcgccccgctgcaggatcacgcccacgtgcttcttgttggggctgccgaagctctgcaaaacagcccgccccgcgtcagccgtttccactgcccgggacattcctaaatcccgcgcggggagcgggctgtcagcggcgccaacggtgtgtggcggacccggcggcctctggtgaccacagcctggcgcccgcagcctgtaatggcacagcggccttcctgagcctgggcctaccactgtctccactgttcttccaaagctccaaggaggacgaaggcacatggggcttcatcacatgtcagcggcaggttaagtggagccaggacaaagcccaggtccaccgtgaagctaaaacccccagggagaggtgaggccttgccgctttgtgaccccatggccacctgggcagcccctgctggactgcaggcccctgcaagcagggaggttccttctgtgtccccttggccttcgacacatgcctgcatgtaggcagccgaacttaggattgaggctggggaaccggttgtctttctctacttggtgacctcctctgggggaaagagatcagagaactgtctccaccatctccacccctttctcctggcccagactctttaaaaggggagggtctgtttccctgacagcctgtggtcnttggaggtagggcaggggcagctgaccccagggcccattgctccnagatcactctgtgcgcccctcccacctgccatctccatggcacctgtggaattggctctgcccttgcctggcttcctgcccagctccaggaggccacccacctgagacatcaaggtgtcacatgccgaagacaaaccaactcctacagaaactccgcaganattgacaaactggcgccacanacaggaggaaanaagagcttgtcaggtgaggcctgaagagaggcccctgcatctgggctgagccagggtcaggaaatgctgcccagcaggcagcggtggcagaggctctgctcagcagcctcatgtgctgtgtgcnccagggccagaccgcctccatctccggccctcaggttccacctgtgaaggcagctgtccagccacgtgggntgtgtcttcccatccctgaccagccaccnaagacgggcccacccgggaacccggtggagaagcctggggagagaacgtccctgctctgggccaagctgggtactcacggccaccgcgagggtcaccgatgccagctccaccttgcccaggtgcccgcagaacacagtgctcacgatgtagatcataaaagtcagcacctggaacaggaacaggggtccagaaagggcaaagagagtccacatctcagtcccaaagcctctgggaaccagcctgctgagggcagggcagcagcccccatggtccagggccactgtgtcctggaggctgtccattcctggccggggcactggctatcccgggaattccggaccggtaccagcctgcttt

SEQ ID NO: 357190 - DNA, 1693 bp, Homo Sapiens
tttccaatagaggggaggcccgaccccctataagtaccccaaggggtatttccccattggcttccaccctttatggttttccattccccctcaggaaccgcccccctttgttcaagcaagagtttcaaggaggtgggaaacaccataaattggaaacccctgagcccccaggataaagatgtctcgtcgggtagtaaaagttaccccacgtgttctttgcagtttaacagcaggacactaaagggttcagcaaagagcactgtaatcaccaggaaacggtagaggacttccgtgcctgctccatgtttccagcacccagagcgtttcctacccggacactggcagccacactgaagcctgcaggggaccatgtacacaatgatggccagttcatacacgatggactgagcgcccagctccaacatgccgaggatgccactgaggaagctcccgacctcataggcccaccactccatgcacagcatgagcatgctggggatggccaggcggaggaaggaggcccagtcctgcaggcactcgagggaccagcctccccatgtagcttgatgcagttttttcccgaggatgtagagaaagaggagtagagccagggtgtactgggaaatcaagtttgccagtgcagagcctatcaccccaagatgcaagttgatggagaaacagatagttggcgagggcattgacaaggttggctgcaactccagttacgatctggggcagtacaattccctggttgagcaaatatttaacttgtaacatataaagaaaggttgcaggaagagctggaatgaagatcgtgacatatggtctgggtaagcctggacacatccgggtcctgccggaagagcagcaggatgtgctgggtgttgagaaagagcgcccagcaagggaagcagcagaggagcaggaccagcgcaccccgctgcaggatcacgcccacgtgcttcttgttggggctgccgaagctctgagacatcaaggtgtcacatgccgaagacaaaccaactcctacagaaactccgcagacattgacaaaggccaccgcgagggtcaccgatgccagctccaccttgcccaggtgcccgcagaacacagtgctcacgatgtagatcataaaagtcagcacctggaacaggaactcttccaaaagggcagccgcaaatcctcctgcatccaggggacctgggcctggggtctctgttatgtgaaaccagctgcttccagctgacagggcctctggggagagcagtcacctgctggccttggcctgtcacctcctgtcgcagcattgcagtgagccctgcagccagaagcaatacttcttgggagcccatggcgatgggggtgttcagggagcccacacgtggaggtataggcagaagaatccatctcactccaggtcacttttaatgaggacagctggttcccgtgcccccaccaagctggaaggtgttcagtgcagacgccccgccatcagctcggtgacatcaggctttatccagagctgaccagtgttcagcactcagctgcacaggacaaaggtcgggtcatcttcccgagggccagtcctaggccgagcatctccaaaatcccttctcaggaacattcccaggatttttgtgatagaagccaaatgcattcctacattttctcctcgtgccgaattcgccaccca

SEQ ID NO: 357191 - DNA, 1402 bp, Homo Sapiens
  misc_feature (1065)..(1065): n is a, c, g, or t
  misc_feature (1313)..(1313): n is a, c, g, or t
ggggtggtggctgggtatggaggcgaaggcggcacccaagccagctgcaagcggccgacgtgctcggtgtcggcagaggagaccgaaaagtggatggaggaggcgatgcacatggccaaagaagccctcgaaaatactgaagttcctgttggctgtcttatggtctacaacaatgaagttgtagggaaggggagaaataaagttaaccaaaccaaaaatgctactcgacatgcagaaatggtggccatcgatcaggtcctcgattggtgtcgtcaaagtggcaagagtccctctgaagtatttgaacacactgtgttgtatgtcactgtggagccgtgcattatgtgtgcagctgctctccgcctgatgaaaatcccgctggttgtataagagctgtcagaatgaacgatttggtggttgtggctctgttctaaatattgcctctgctgacctaccaaacactgggagaccatttcagtgtatccctggatatcgggctgaggaagcagtggaaatgttaaagacctatctacaaacaaaaaaatccaaatagcaccaaaatcagaaagttcagaaaaggaatgtcagaaatcttgaacatgttctgatgaaagaaccaagtgacccaaagtgacctggacaagattcatagactgaaagctgttgacatcgttgaatcatatgtttatatattgtttttaatctgcaggaaaatggtgtctctcatcatttgctctgataagggaacaaattagcactttttagaagtctgacaattgtaaacagttattagcttttccagaagctgattcccattttaagatgggggaaaattaaggtttgaggttttagaaattagcaagtagtgcatacccttctagccaaaagtgcccagtccaggcaagtgctgacttcttagagaatgtgtgggccagacccagggacctgaagtgtgtttggactgcagtttgccaccctgagaacaccttctccaggactggcatttcagaatcagattcttcattttttgcagctacgatgttcttccagggcactgggggctgngacttctctataaattgtatataagttgtgtatatagagaccataattatatggtccttagaaaagactttgcttttataaagcatttagaaaaaatgcatacttttaaaacaagtgcttgagttgtcacttaaaaattatagcatattgctataataaaaccttatttatgtcttatttgaagatgaatagtcttaaaagataaagacataaatgggacaattgttattgagcaaaaaccaaatttnccaccctcatggagcttatatctagcaagggagatggtatgatagatacacagttaattgggaggacataagagttatggcaaaagcaa

SEQ ID NO: 357192 - DNA, 1559 bp, Homo Sapiens
  misc_feature (800)..(823): n is a, c, g, or t
  misc_feature (1382)..(1399): n is a, c, g, or t
tgttggcatcagtggttaaaaacagaaagttctgtttcgggaatagtgaggagggggtgttgtaacaaaattggacaacttaaaagaatggtgtgtgctgggtgaaagacaaagactaaagaatgaggaaacaaacgtgatgcctggccagtgactgtcatataaacctttcttatttgagctaggcttgaacagacgtgacctagaagaaactgaacataaagagaagggggtggggggctagttttcaagttggggaacctgatagtgaaaagtcacagatggagaaaattgctctcagaaaaactgtttggattgctttcctcttgttgcacatgtaccatgcatttctcagcttggggtactacattttgtggaaagttaatctatcatctatctttccacatctgaattaatcattctaggaaagaatacttattcctactcatttcctttatgatgtccaaatggttgcaggatcataatctattgtgccacctttatttctagaagtacaactaatatgttcacattttcaaataaataatactccccgtaagtaataactgcaaccaatcagtgttattcagtgctatgcctccttgtaatgggtagttattaattattttcagagctttccggaaatactgtcctaactggctatgtttaggatctttgttatctctgaagacaaagaaagaagctaggactcttaattttggggtgcttcttgactcttagttgggaaactgaaaatatttccaaccttttacccacgtcaatggcatattctgggaatnnnnnnnnnnnnnnnnnnnnnnnnagaaagaggctggaggctcctgtaccctgttcattccttaagggccctgcttcccttaataagtaagtaagttggtctacggccctaaatatgcaaatgagagctgaaggtttttaaaaggtagaaaggaaaagggcaagggcttccacccctgctttaaaatgatttatttattctctgcttgtatttcttgtggagagagtaaggatagaaccaacaaggggctgagtagctgagaaaggggccacccaagagtgaaacatactttataccagaggagcagtggagcctcatgcagcacattatcatttgttatttgggtttaataataattttgacatcttttcactcatacacaaaaaaagtcagaactggtgttatttactgttgatttcatcctcctgtgtatgaaataacaagcctagaggaatgaactagtgctactgaactgtttaaattatttttgtgttaatagtacactttgagtatctttttccacattaaaaactttctgaattataaatgttttccttacattatttaacaatgtacactgttnnnnnnnnnnnnnnnnnntcaaactttgggggtttctcagcagccgttaattgtacattttgcactaactctgggtgttgcgcttcttgtaagattgcgctttgtgcttcagtttgttacctttgtagacttatttaatgaaaccattcaaataaaccaaacttgcttttgttgaaaa

SEQ ID NO: 357193 - DNA, 294 bp, Homo Sapiens
tcgagctcggcaccccagcccactagcctcatgttggttctatccttactctctccacaagaaatacaagcagagaataaataaatcattttaaagcaggggtggaagcccttgcccttttcctttctaccttttaaaaaccttcagctctcatttgcatatttagggccgtagaccaacttacttacttattaagggaagcagggcccttaaggaatgaacagggtacaggagcctccagcctctttctgtggtagtggcggtggtggtggtgattcccagaatatgccattg

SEQ ID NO: 357194 - DNA, 1632 bp, Homo Sapiens
  misc_feature (20)..(20): n is a, c, g, or t
  misc_feature (50)..(50): n is a, c, g, or t
  misc_feature (54)..(54): n is a, c, g, or t
  misc_feature (100)..(100): n is a, c, g, or t
  misc_feature (125)..(126): n is a, c, g, or t
  misc_feature (173)..(173): n is a, c, g, or t
  misc_feature (180)..(180): n is a, c, g, or t
  misc_feature (260)..(260): n is a, c, g, or t
  misc_feature (1146)..(1146): n is a, c, g, or t
  misc_feature (1215)..(1215): n is a, c, g, or t
  misc_feature (1229)..(1229): n is a, c, g, or t
  misc_feature (1234)..(1234): n is a, c, g, or t
  misc_feature (1238)..(1238): n is a, c, g, or t
  misc_feature (1241)..(1241): n is a, c, g, or t
  misc_feature (1243)..(1243): n is a, c, g, or t
  misc_feature (1246)..(1247): n is a, c, g, or t
  misc_feature (1255)..(1255): n is a, c, g, or t
  misc_feature (1269)..(1269): n is a, c, g, or t
  misc_feature (1278)..(1278): n is a, c, g, or t
  misc_feature (1324)..(1324): n is a, c, g, or t
  misc_feature (1340)..(1340): n is a, c, g, or t
  misc_feature (1347)..(1348): n is a, c, g, or t
  misc_feature (1353)..(1353): n is a, c, g, or t
  misc_feature (1356)..(1356): n is a, c, g, or t
  misc_feature (1361)..(1361): n is a, c, g, or t
  misc_feature (1367)..(1367): n is a, c, g, or t
  misc_feature (1370)..(1370): n is a, c, g, or t
  misc_feature (1399)..(1399): n is a, c, g, or t
  misc_feature (1407)..(1407): n is a, c, g, or t
  misc_feature (1416)..(1416): n is a, c, g, or t
  misc_feature (1444)..(1503): n is a, c, g, or t
  misc_feature (1606)..(1606): n is a, c, g, or t
cgataagatccgggtctccnctgcgcagctccccactcaggtcagctggncctnctgccaggatgaaggagacaaaaatgccttctccatcctctcctcntacgatgttgaagcccaggctgtgnnagcctttgtgcaggatgatcttgcgaggctctctggtgaagtcctcntcagcangcatgtgctggggaatagaagagtagcgggtggggggaacctgaggaggagcagggtagctgaccttgctctccacagcnccgagataacccaggctggaattatggcttatgtggttgtcagccaaggcagtaaaagtgctggcgtagtcagggggagcgtacatgtcgttgaggtggaggctgcctggcttggccaccttcaaatacaccatatcagatgtgttcttcagtgaggccacagcttcctcgtgcctcacatcctgcagattggtgttgttcaccgccagcagccggtccccaatctgtaggcgtccatccttctgagcagcacccccctcaatgatcttggtgatgtagatgctgttgtctcctgggatgtgctggttgccaatacccccagcaatgctgaaacccaggcctttgggccctttgagcaggttgacctccatgatggtctcgggtggaggctgtcgcctccgcaccaccaatcgcaccacagggcctgcctccttcagcgcctccaccgcccggctgtgtaccacctccaacacgtccacctcattcacccgcagcacacagtcattcacccccagcctcccatccatggcagctgctccacccagggataatcttggtaataaagatgccagggtcatcagggacatggggattgtcgatgccacctgcgatactgaagcccaggccagagttgcccctctcaagtacgatttcctcatatttgaacatgccatcactgccattcacctgctcataccagtcccggttggtacaggtgcactctggccaccagctggggccgctgccgttgagtttgggggtgctcttgcccgggactggcttaggaggcaccggccccacatcccggccggtggggatgagcttggccttggtgcgaggggtgggggtggcccccgcctgcgagggcaaggtctgcgagctgtancccctataacccgcgttggcgccgttgcccccacctggcccgtaagggtcggggacttgccagtcgccntagcccggaggttngaggngcgnagngngtnncaggcggntcacctcatagcantcagggcanttacagcagtgctggtgcttgtgcatggcactgccccccgcggctnggaccccccagcccangccggannccacnccnccgcnaccgcngcnaccaccgccgccgccgccgccgggctccntggcacantcacactgntcggaccaagaaggggggggcacccgtnnnnnnnnnnnnnnnnnnnnnnnnnnnnnnnnnnnnnnnnnnnnnnnnnnnnnnnnnnnnacgctgccccgcacccacggctccccctccagcactggcggctccgtgtcgcccgtcgtggcttctgggccgaggcccagcggcaaagaagaagcgggagctnaagcagagaatgggtgctgtgaggac

SEQ ID NO: 357195 - DNA, 1913 bp, Homo Sapiens
  misc_feature (12)..(12): n is a, c, g, or t
  misc_feature (56)..(56): n is a, c, g, or t
  misc_feature (66)..(66): n is a, c, g, or t
  misc_feature (91)..(91): n is a, c, g, or t
  misc_feature (98)..(98): n is a, c, g, or t
  misc_feature (123)..(123): n is a, c, g, or t
  misc_feature (129)..(129): n is a, c, g, or t
  misc_feature (156)..(156): n is a, c, g, or t
  misc_feature (162)..(162): n is a, c, g, or t
  misc_feature (175)..(175): n is a, c, g, or t
  misc_feature (177)..(178): n is a, c, g, or t
  misc_feature (220)..(220): n is a, c, g, or t
  misc_feature (265)..(265): n is a, c, g, or t
  misc_feature (269)..(269): n is a, c, g, or t
  misc_feature (274)..(274): n is a, c, g, or t
  misc_feature (280)..(280): n is a, c, g, or t
  misc_feature (286)..(286): n is a, c, g, or t
  misc_feature (291)..(291): n is a, c, g, or t
  misc_feature (293)..(293): n is a, c, g, or t
  misc_feature (297)..(297): n is a, c, g, or t
  misc_feature (304)..(304): n is a, c, g, or t
  misc_feature (310)..(310): n is a, c, g, or t
  misc_feature (337)..(337): n is a, c, g, or t
  misc_feature (340)..(340): n is a, c, g, or t
  misc_feature (353)..(353): n is a, c, g, or t
  misc_feature (375)..(375): n is a, c, g, or t
  misc_feature (403)..(403): n is a, c, g, or t
  misc_feature (414)..(414): n is a, c, g, or t
  misc_feature (422)..(422): n is a, c, g, or t
  misc_feature (431)..(431): n is a, c, g, or t
  misc_feature (433)..(433): n is a, c, g, or t
  misc_feature (548)..(548): n is a, c, g, or t
  misc_feature (563)..(563): n is a, c, g, or t
ctcatcattcanacgcctgaaacacatgtatcttccaagttcttatcaagaaaatnactgtcaggncaaccatgggtcaacaagaccaccngaaaacnccccaggagacagccatagaaaatntacacntcagaagagaaatgtaatcagagaacncaaaanaggaaaatatatnanntatgccccccgaagggtaaaaacatttttattcatatgcatnacattattcacatagatggtcatatataccagtgccctcaatgcnaccnaaacntccctnaaaacntagcncntatnatgtgtnagacancccacactggggagaaaccctataaanctnatatgtgtgaganaacccttgtccaaagcccacancttacttcacaccaaaggatccacaatnaccagaaaccntataaatntagcaaatntnagaagagcctttggcatcacttagcgctttcaggacatcagagaacacatgcaggtaaaaaattctatacatgtgacatttgtggcaagaattttggtcagagttctgatctgcntgtccaccagcgaancaatactggcgagaaaccatatctatgtagtgagtgtgacaaatgcttcagtagaagtacaaacctcataaggcatcgaagaactcacacaggtgagaaaccatttaagtgtctcgagtgtgaaaaagcttttagtgggaaatcagatcttattagccaccagagaactcacactggggaaaggccctacaaatgtaataagtgtgagaaaagttaccgacaccgttcagccttcattgtacataaaagagttcatactggggagaagccctataagtgtggtgcctgtgaaaaatgctttggccagaaatcagaccttatcgtgcaccagagagtccacacaggtgaggaagccgtattaaatgcctggaattgtatgagaaattttactcggagtgccaacctaattaggcaccaggcaactcacactcacacttttaaatgccttgaatatgaaaaaagctttaactgtagctcagatcttattgtacatcagagaattcacatggaagagaaaccacatcagtggtctgcgtgtgagagtggcttcctcctaggaatggactttgttgcccaacagaaaatgagaactcaaacagaggagctacactataaatacactgtatgtgataaaagcttccaccagagttcagcccttcttcaacatcagacagtacacattggtgaaaaaccgtttgtctgtaatgtgagtgaaaaaggtcttgagcttagccctccccatgcgtcagaagcctcacagatgtcttgaccaggcgagaagctgtaataccaatattaaaaattatttatgtatcagagaactcattaagatgaggacaaatctcagactttgctcagagctcagaattcagtggggaccagagagcctgcaattggaaatatgagaaattctttgcccagagagctgccccaacagaacacttcatcctcactccaacgagaaatctacagatgcccagaggttttgaaaacttaccgtctgagctcaaatttgatcactcacaagaggattcatacaagtgggaaaccttagaaatgcactgagtgtgagagagctttctactaatgctcagcccttctcgttgtaagagaattcacaccggagaacgactttttaaatgccttcagtgtcagttgtgctgcagacagtatgaacatctcattggacctcagaaaacccaccctggggagaagccccagcaagtgtgaaaaaagcttctaacaaaactctgacttacccatcagagaagccatactggtgaaaaattgtatatttgtcttaagtatggcaaaagcattcattggagagccttacttgggtttgcaccc

SEQ ID NO: 357196 - DNA, 1129 bp, Homo Sapiens
tggaacttgctggactcccaaggtggctaaagagcctgagaaggtcctgttcttcacagggtctggaccaggattctgtaaggctggaccagagtttcgttcatcagtgtcaatggcactgaaccctgtttcaggcccatcagtgtttccataagtcctgtttggacggggtcgggtggagaaccccattggtctcaaggcctggtgctcatgtggcaggtggccaggaggctctgctccaggctgggataaaagttgcagcaaggcggctgtcacggctgggttcaactcctggggggcgctggaaagatcgccttcaaccagagggggtggaggtggcggcggtggaggtccggggggctcagggggcctcttctctggtggaagaatgtgaggaggacatgctgtggaagggttacttcttttaaacaccatcttaaaaagcacatgtgattataaacacaaacacacacactgtgcaacataaacaaatatcaatataagtaaccagatatataaagaataaaatcttgggatcagaaaatggcaattataaataaatcaagtgattaaaagtaaaacagttgcatcctggatctaacagctagtgtaaaaatatcatatgtttcaaatgattatcctgattttggtctaagatttcctccatttccttcctttaaagaactgttctaacatgcagggctgttggcagactccctgcccctttttgctgttagatggaaacattaaaacaaagcagaaggaaggaagatgaggagggaacaatatacatgctggtggtcacatttctaggacataatctggctctacaacagagaccttgcatggacttggctaacacatttaacagaatgtttgatgacataggttaacctgaaataaaacttaaagaatatataggagagataaaataaagtaaaaagttttcattactgtcatgtataaaaatacacttgcttctccaaactttagtcacgtctccccaaaatcatagtctgaaaggattgtaactaccatattatcattcagcttcctatgttacagtaattttaaagactaatttctatcataattttctattttgttttcctaactgctgcattttttt

SEQ ID NO: 357197 - DNA, 862 bp, Homo Sapiens
ggcaaggtggagtctggggctggggatgcaataggccttgctgacatcacacaacagctgaatcaaagtgaattggcagtgttattaaacctgctgcagagccaaaccgacctgagcatccctcaaatggcacagctgcttaacatccactccaacccagagatgcagcagcagctggaagccctgaaccaatccatcagtgccctgacggaagctacttcccagcagcaggactcagagaccatggccccagaggagtctttgaaggaagcaccctctgccccagtgatcctgccttcagcagaacagacgacccttgaagcttcaagcacaccagctgacatgcagaatatattggcagttctcttgagtcagctgatgaaaacccaagagccagcaggcagtctggaggaaaacaacagtgacaagaacagtgggccacaggggccccgaagaactcccacaatgccacaggaggaggcagcagcatgtcctcctcacattcttccaccagagaagaggccccctgagccccccggacctccaccgccgccacctccaccccctctggttgaaggcgatctttccagcgccccccaggagttgaacccagccgtgacagccgccttgctgcaacttttatcccagcctgaagcagagcctcctggccacctgccacatgagcaccaggccttgagaccaatggagtactccacccgaccccgtccaaacaggacttatggaaacactgatgggcctgaaaacagggttcagtgccattgacactgatgaacgaaactctggtccagcccttgacagaatcccttgggcccagaaccctgggtgaaaaaccagggaccta

SEQ ID NO: 357198 - DNA, 509 bp, Homo Sapiens
cggggcaaaaaattaaaggccttccatttataggggtatggcagcaagttgttaaaattcattggctgcggaaactataaaaaggtgctactgagcaatatcaagcccattcaaacagaggcatgggaggaagaaaggcacctacgatcaaactctggagttccgtaggggaggtgatggccagcccaagacgatccactcggccaacccaacagttttaccaaccaccccgggctcggaactaataggaaaagactctttgtgaagaaacgagccagtgactgaaacaccctggtggaaacctgttgacagaccttccactttctcttcagaataagtagctgtggtggatattattatttgaagaaagaaaaaacagattttagggtggaaaaaacagtcaactcacacaaagaatggaaaaaaatactgagttaaattaagcaaataccttttacaagtgaaaggaagaatttttcttctgccgtcaataaaaccattgtgctatt

SEQ ID NO: 357199 - DNA, 753 bp, Homo Sapiens
  misc_feature (627)..(655): n is a, c, g, or t
taccactatgcaggggaaaaatggaccaatgaacccagatccttgggatggatcatcagaagaaggaggaggggaaacgtaaactgcaataggtaaaatgaaccgccgaaataaattctctcaaccaaactgatggtcagtgaatggcgtaacaagaatccgaacttttacagccgtccttaaagtagccaatgcaaagatgtaatccttaaaagaactgggcaatggcaaaaaaaactgtcggttgatgtgtcctgaaaattattggagttatgacagaagtgcttttttgatcaaatgagtttgtgttacgcagatgcatttatcacaagaaaacacagctttaatctccagaagaaaaccaaaataccatgggatttatgctgtattgacatcttgccctaaacgtacaacatcatagtaatttgtcatgggcaacatgaccagagagaagatttttgtcatgattttaaatacactgacgcgatactgttggttaaatttaaacatgttttacccgcagaaattctctcacaaataacctgcaataacttgaaatgcatacccttttgggcacttccttttctcatgtataaattaaaatgtttgctgcattttgcaaaatgnnnnnnnnnnnnnnnnnnnnnnnnnnnnntctgtacctgcagtgtagtaaaggtttagacgaaaccccataattatagtggcatactgtcacttaggtttcaagcagcaaaataaacagtgcagctc

SEQ ID NO: 357200 - DNA, 410 bp, Homo Sapiens
  misc_feature (267)..(295): n is a, c, g, or t
ccaaaataccatgggatttatgctgtattgacatcttgccctaaacgtacaacatcatagtaatttgtcatgggcaacatgaccagagagaagatttttgtcaatgattttaaatacactgacacgctactgttggttaaatttaaacatgttttacctgcagaaattctctcacaaataacctgcaataacttgaaatgcatacccttttgaacacttccttttctcatgtataaattaaaatgtttgctgcattttgcaaaatgnnnnnnnnnnnnnnnnnnnnnnnnnnnnntctgtacctgcagtgtagtaaaggtttagacgaaaccccataattatagtggcatactgtcacttaggtttcaagcagcaaaataaacagtgcagctcagaaattgtaaaaaaaa

SEQ ID NO: 357201 - DNA, 1132 bp, Homo Sapiens
  misc_feature (459)..(512): n is a, c, g, or t
  misc_feature (1049)..(1061): n is a, c, g, or t
ctggaccggtccggaattcccgggaccacgatgagcaaatgagcgcgagcgagggcatgaaatttaaattccactcaggggagaaagtgctgtgcttcgagcctgaccccaccaaggcgcgagtgctgtacgatgccaagattgttgatgttattgttgggaaagacgaaaaaggcagaaagatcccagaatatctgatccattttaatggttggaacagaagctgggatagatgggcagcagaagatcatgtgcttcgtgataccgatgaaaatcgtagattacagcgtaaattggcaagaaaagctgtagctcgcctgaggagcacaagaagaaagaagaagcgctgcaaggttgcctggtgtggactctgtcttaaaaggcctccccactgaagaaaaagatgaaaatgatgaaaactcattaagcagttcctctgactgtagtgaaaacaaggannnnnnnnnnnnnnnnnnnnnnnnnnnnnnnnnnnnnnnnnnnnnnnnnnnnnnaccagagcttcaaacaagaagggaaatggaagaaagaacaataactatagaaatccctgaagttctgaagaagcagctggaggatgatttgttactacattaacaggaggaaacggttagtgaaacttccatgccagaccaacatcataacgattttggaatcctatgtgaagcattttgctatcaatgcagccttttcagccaatgagaggcctcgtcaccatcacgttatgccacatgccaacatgaacgtgcattatatcccagccagaaaagaattgttggacctttgtaaaggaaatggtgggatggattaagaaataaccctttgaatacacccctcccggtgggtttactctatccatatgaaccagctcagtataaaaaggtgacttcgcctaaattttttttcttcaattaaggaaagtggcccaagcacctaacgggagcccggagggaactctcctcccagctcgcctttggtgaatccatccccggcccaagtccaaggaagaataagcccgaacacggggggannnnnnnnnnnnnaaaaggggccaagctttgacccgaaacctttgcgtctcttggaggggggtccaccggccccaaggggccaa

SEQ ID NO: 357202 - DNA, 2343 bp, Homo Sapiens
atcaggccaatcggccgagctcgaattcgtcgagagcgggtccacttgggggaaaaaaatgaaaggaaaaatatttcaaaccggctgtcggtctaaaaaaggagagaatgctttctttaaaaaagggtctgtgaattagttttcctgatctaacttctaattttctgtatgttctgccattcgtgggaaatatttcttcgtttcaaattgttgatgttattgttgggaaagacgaaaaagagcagaaagatcccagaatatctgatccattttaatggttggaacagaagctgggatagatgggcagcagaagatcatgtgcttcgtgataccgatgaaaatcgtagattacagcgtaaattggcaagaaaagctgtagctcgcctgaggagcacaggaagaaagaagaagcgctgcaggttgcctggtgtggactctgtcttaaaaggcctccccactgaagaaaaaaatgaaaatgatgaaaactcattaagcagttcctccgacagtagtgaagacaaggatgaaaaaataagtgaagaatgtgatattgaagaaaagactgaagtgaaagaagaaccggagcttcaaacaaaaagggaaatggaagaaagaacagtaactatagaaatccctgaagttctgaagaagcagctggaggatgattgttactacattaacaggaggaaacggttagtgaacttccatgccagaccaacatcataacgattttggaatcctatgtgaagcattttgctatcaatgcagccttttcagccaatgagaggcctcgtcaccatcacgttatgccacatgccaacatgaacgtgcattatatcccagcagaaaagaatgttgacctttgtaaggagatggtggatggattaagaataacctttgattacactctcccgttggttttactctatccatatgaacaagctcagtataaaaaggtgacttcgtctaaattttttcttccaattaaggaaagtgccacaagcactaacaggagccaggagaaactctctcccagcccacctttgttgaatccatccacgccacagtccacagagagtcagccgaccaccggtgaaccagccacccccaaaaggcgcaaagccgagccacaagcagtgcagtctctgaggcggtccacgccccacaccgccaactgtgacaggctttctaagagcagcacttcacctcagcccaagcgccggcagcaggacacatccgccagcatgcccaagctcttcctgcacctggaaaagaagacacctgtgcatagcagatcatcttcacctattcctctgactcctagcaaggaagggagtgctgtgtttgctggctttgaagggagaagaactaatgaaataaacgaggtcctctcctggaagcttgtgcctgacaattaccccccaggtgaccagccgcctccaccctcttacatttatggggcacaacatttgctgcgattgtttgtgaaacttccagaaatccttggaaagatgtccttttctgagaagaatctgaaggctttattgaagcactttgatctctttttgaggtttttagcagaataccacgatgacttcttcccagagtcggcttatgtcgctgcctgtgaggcacattacagcaccaagaacccccgggcaatttattaaaatgttgttggttctgtaagagcaactgctctgtctagtttggcgctctgggttccaggtgaataactaacaaggtggtgggtctttacccacagcgcaaacacaatgcccaccttggggctctgttgtttgagttgcccacatactgcagttattctgttaggaatgattccctgggtgcctgaaagtgctctgacacgacacttgttactttgcaggccatctgtgatggcaaggaaaaagcaactatgttcacagtgaaatattcgtggaataggttaggccatttcagtagacattgcagttagttagcaagaaccacattgtctctttatttgttagcattaaacaaattttttttgtgcaaatgggttttatttttttgatgaagccgagcaactctgtccaaaaaggtttagtttgtactcggaaaccacaaagtagtctcaaagtattttagagggaatcgatattgatggcaaaagaaaatttgcagctatgcatttgcttctaacggttccctctctgtgaaacattatttttggtgatctaaagaaagcattgcctttcttatttgagattttacagctatactttgttgtgtaatgttatggttccctttctgtaaaatgttatttttggtgatctaaataaagcctgtcttgtttgaaag

SEQ ID NO: 357203 - DNA, 626 bp, Homo Sapiens
cctcctggtaatgtagtaacaatcatcctgccagctgcttcttcagaacttcagggatttctatagttattgttctttcttccatttcccttcttgtttgaagctctggttcttctttcacttcagtcttttcttcaatatcactttcttcacttatttcttcatccttgttttcactacagtcagaggaactgcttaatgagttttcatcattttcatctttttcttcagtggggaggccttttaagacagagtccacaccaggcaacctgcagcgcttcttctttcttcctgtgctcctcaggcgagctacagcttttcttgccaatttacgctgtaatctacgattttcatcggtatcacgaagcacatgatcttctgctgcccatctatcccagcttctgttccaaccattaaaatggatcagatattctgggatctttctgcctttttcgtctttcccaacaataacatcaacaatcttggcatcgtacagcactcgcgccttggtggggtcaggctcgaagcacagcactttctcccctgagtggaatttaaatttcatgccctcgctcgcgctcatttgctcatcgtggcggagggcgaggctccggggcagccccgct

SEQ ID NO: 357204 - DNA, 1675 bp, Homo Sapiens
  misc_feature (1303)..(1353): n is a, c, g, or t
acaatacttcaacaagcatttattaaacgcctactatgtgctcagcactatactaggcactcgggggtgcagagatacaaatgtaaaagttattattcctgccctcaaggagcttacaatttaattttggaaataaatacaaatatgaaactgtaacacagagtgctagaaaataattacaaagcaacatattagtaagtacatggaccacagtacaaactcaaaagataagtgctgaggcagcacagaatgagggaggtcatcgcatgaggtgatgtcaatcagggagagctcagtcagaagatataaaggaagaaaggctttgaagggagtgatgaacatgagctgggaccaaagagcaatctaagcaaaaagaatagcatgagaaaggcacagaggcaaaagcttataagacatcagtagaaggctgtaggaagtttgaatctgttgaatcaaggtgaatatgctagagagtaatgaaggctgatgaatattaggcatagaggtaatggagaatttggaacaccactgctccataggaattatctactgggtgttacttagtgaaaatgaaattttacaatagagatattgtaaaaatgggtgtttgaggaggatcgtctttgaaaaattatctactgggtgttactgaaaatgaaaattttacaatacggatattgtaaaaatggagtttgaggaggagcaccttagaaactttatacaagatggggatcctgggagcaaggaaattggaaaaaaaagaattacagtaacctgggcctcagatctacatgaaaagctataatgggatgagagaaatgggagatcaagcctcaaggagaaaactgattaaaaactggactgacagcaagtttttggacatggagaatggagagcagaaaaagataactccaaggctggggtaaaaatataaaggtggtgacacttttcagggcaaaggaattacgcaatgaggcctgtttaaaaagaaaacgggggctggggatatatggtgatgaatcctgttttcaaatatcaagctgtacaggtacctgtggaaaattccaaaagtcacaaactgacccacagggtgggaaaaatgaagtcattcgaatacaaatagtaggtataaacaatcaaaatggataaataggagtatagaaaatgaagtgaataaaagacagggagattattctcagtggagaagaggagaaaggggagtgggtggaaagatcaactaaaaaaagaaagacagatattagagaaaaaggatcccacaagccaaaggagggagaattcaacnnnnnnnnnnnnnnnnnnnnnnnnnnnnnnnnnnnnnnnnnnnnnnnnnnnggccttattatttgtccactggtgagtctaagaacatttcactggaatgctaagtatgaaagccagtaaaaagaagttttaagaacagattaatgaaaaaggggggttgaaaaatcaaagatatgtttgaaaaaccatgaacaatagaggagaaacagaatggtagttggaaatgggcaatgaggatgaaagcatttcacattttatgctgtagatgaacttactattgtcatcctaactgaccatctgcctggcctggtacatggatatttcatttccctccacaattctactttccctttggcagtttggagaaaaatat

SEQ ID NO: 357205 - DNA, 584 bp, Homo Sapiens
acgtatgaaaatgaaaatataacaatacgatatagtaaaaatggagtctgaggagaattaccttagaaactttatacaagatggggatcctgggagcaaggaaataggaaaaaaatagaattacagtaacctgggcctcagatctacatgaaaagctataatgcagagatgccaattcaaggctggataatgtaaagtgtgttacttgagtataggataatatggagtgatggggattgtggcagactgaagaatacatgcttaatctaagagactgtttaacagtttctgttgatgaggaaatgctgggctagagttgctcgaccttctgaatttcttttagaggctagaaatgtgtatccaaactattatatgttggccactaaattgcaataaaaatatgtgtatggactaatgaaaacatttgtgggtgaactaatacaaagaggttgatattcaaagtgatctggtttagctgacccactcaatatctgaagaacatataagaggtgatatgaatagatctgtgattttcccctgtatgaactgtcactgtctatatttgccttttaaaatagacgcat

SEQ ID NO: 357206 - DNA, 1237 bp, Homo Sapiens
  misc_feature (246)..(256): n is a, c, g, or t
  misc_feature (422)..(422): n is a, c, g, or t
  misc_feature (882)..(882): n is a, c, g, or t
  misc_feature (905)..(944): n is a, c, g, or t
  misc_feature (1042)..(1042): n is a, c, g, or t
  misc_feature (1132)..(1132): n is a, c, g, or t
  misc_feature (1155)..(1155): n is a, c, g, or t
  misc_feature (1180)..(1180): n is a, c, g, or t
  misc_feature (1196)..(1196): n is a, c, g, or t
  misc_feature (1201)..(1201): n is a, c, g, or t
  misc_feature (1212)..(1212): n is a, c, g, or t
  misc_feature (1220)..(1220): n is a, c, g, or t
taacaagaggctgcgtggaaaaagggattctggcctccgtaagaatgcatttggtctttaatgtttaggacagaggggacctgaaaattgtgcgtaagaaaataagtagatgggtacctaatataagctatggtcaaatatgggtaaagagaaattaacagggcgctatgtgtcaatataaattgaaccaaaaaatggtaaatgaaggaagcgttctaaataaaaagagattgatggtagagggtnnnnnnnnnnnccgatggatgtgaagggaatgctaaacgtgcttgtgagattacggcacttataaattcaaggaccttgaaaaggcactagagattataaagtctttaaagaaggcaataacggaattgatcaagatatagtacgtctcagattttgtttagtgtcttcagcatcantgtgtctgtatttcaagtgcaaatgtttttagaaaggattctttatacatatgtgctgaactgattttaaggaagttgcatgatcctgtaggagcacagtttttacctaaaaaatgcgtaactttatagtagttctaattgttcaaggattttaaaattgtatttcagggagtatatcttctgtggttatgaaggaggtgagttctgtatgtgccttacagtactgtaattctaaaataggaatctttggctgcaaaattttaatgaaatgttaggaagtaattttcgtgctaacattaaaattataactttttgaaaggtaatagattttccagaagtaaaatctgatggttctaaatcaatcaatgtgatagttcatttttaactcttagaagaattcagaggaaattaacccagctaagtaaaaaatctgtcttgattttgttacttattcctcagnaatattaaacattgatcacatannnnnnnnnnnnnnnnnnnnnnnnnnnnnnnnnnnnnnnncagtcatatgtttggcactgttgtttctattttcgtagttttagataaaatgttaaaatgccaaaccctaccttcctacactttttcttttgccaggnaactggaaacatgtcagttctcctgggtcttgattatacaggactcaagagttatcccagttatcccccttcctaaaggttttacctatncacagttgtgcattgtctgagantggcccatattatttgaaacacttnagggacaatgtctcgngattngggttactttnccaggttntgcagtggaaaacagaa

SEQ ID NO: 357207 - DNA, 1696 bp, Homo Sapiens
  misc_feature (189)..(278): n is a, c, g, or t
  misc_feature (533)..(550): n is a, c, g, or t
  misc_feature (1083)..(1083): n is a, c, g, or t
  misc_feature (1577)..(1577): n is a, c, g, or t
  misc_feature (1684)..(1684): n is a, c, g, or t
tatcatctttctttttcatctatctcttggatctgtctatttctcgttcctgtccttgtccggtccctttccttctctgtgtctcgatccttctcatgctctttttcccgttctctctctctgtccttttccttgtctttttcccggtccttttcccgttccttgtcccggtctttgtttttacaccgnnnnnnnnnnnnnnnnnnnnnnnnnnnnnnnnnnnnnnnnnnnnnnnnnnnnnnnnnnnnnnnnnnnnnnnnnnnnnnnnnnnnnnnnnnagtgtcttttctcttgtcccgtgaatgcgaacgactccttgacttccgtctctcccttgatttagagcgttttttatgtgggctcttagatctacgtctgtctttctgtcttgaacgtgatctattatgggatctactcctgtgttttgattgtgatcttttccttctagaatgggattttgagctagacctggattttgagcgagtatgggaacgagatcctcgtgccgaattcggcacgagctagtctcgagnnnnnnnnnnnnnnnnnnaaacaaacaaaatttattaaactttcaaaatacaaaaacatcagcaaaaagtcatagcatttctatacattagtaactatctcaaaatgaaattcaaaaaaattccatctacctaactatagtttgaagtaaatttaaccaaaaagttgaaacaccttacattctactctaaagaacattatacaaattaagtaacacataaatggaataatattactcattcatgaactggcattgttaatagttaaatatttctataacacaaaatgatctgcagatataatgcaacctctatcacaatccctatttcatacctcatattatttattaaaaagtatatcttaaattcatatgtttctactacccaccttttatttacaaaacttaaacacataatatctctttttcctcccttcctcacccattttctcaaacgcctctctaccatacaattttttccctccactaatcttctctcaatttatcccctttcattccctctttaatatttatatcttcactcttcatcaccnttataatactcttctctatgttatcatatatccccctctcccccttcctatcccttatacggtaatttctatttattactttttctctactccaatcaatctctcacataccttccctcttattacaccttaactgctcaataacatacactttattccttcttaattcctctcttcacagctcccattacctgttttatcgtacttcacctctctaccctcatacactatttcgttctctacacactctacttacatcccgtatacctctcactctaatatttgtatcttaacaataccacatcctacacctacccctgtctactttcttgtcatctttcttgacttcttcttataccttctattatctgcctcgccgccctgttccgaccaaaaccactaccaaatctatttttctcctttctgttctacttctactacttactcttcatcattatattatatactcttattttcactcgctccaactctcncttcttactgcctctctataactctctcatcttctacactctatctcccctctcccgtctattatatactacctacttttcctcttttctatctattcactttcttnttcagtcctctg

SEQ ID NO: 357208 - DNA, 769 bp, Homo Sapiens
ggcctcctgggcaccagggttttctcgtgtgatatcgtcgacccacgcgctcggaagtagaacgccggctcgcatgcctgcccgcccgccagcctgccgggtacggtcttttccgccggggcttccaggtcaaagaattcgcctttgccgctaccgctttcttaccctccgcacccgttaagttctccggtcgggcggcagtctctgaacacttagccgcgccatccggggtcacaccgcctggaaggaggtgacgggggcggcgcggggcggagcactccccgctgagagtccgcctgccatggactcggaatattacagcggcgaccagtcagatgatggtggtgctaccccagtacaggatgaacgggattcagggtcagacggtgaggatgatgtaaatgagcaacactccggatcagacactggaagtgtaggaacgttcattcagaggaatgaaaacttagttgattcgagaagatgggcctccccaaagggacatcatgttgacagattttgagaacgatgagcccttaaaatcttaatgctagtgactctgaaagtgaggagcttcacaggcaaaaggacagcgactctgaatctgaggaacgtgcagagcctcctgcaagcgattctgaaacatgaggattgtcacatcagcatgggagcgactctgagagtgaagagaccagtgaaattacctggtaatgacctctgcaaaatgaggaacttccttaatgggcatgcaagtgactcagaaaaagacaga

SEQ ID NO: 357209 - DNA, 1647 bp, Homo Sapiens
  misc_feature (1214)..(1267): n is a, c, g, or t
  misc_feature (1433)..(1487): n is a, c, g, or t
ggggcaaaaggacagcgactctgaatctgaggaacgtgcagagcctcctgcaagcgattctgaaaatgaggatgtcaatcagcatgggagcgactctgagagtgaagagaccaggaaattacctggtagtgactctgaaaatgaggaacttcttaatgggcatgcaagtgactcagaaaacgaagatgttgggaagcatcccgccagtgattctgagattgaggagctccagaagagtcctgctagtgactctgaaacagaagatgctctaaaacctcaaatcagtgactctgagagtgaggaacccccaaggcaccaagccagtgactccgaaaatgaggagcctcccaaacctcgaatgagtgattctgaaagtgaggagcttcctaaacctcaggtcagtgattcagaaagtgaggaacccccaaggcaccaggccagtgactctgaaaatgaggagcttcccaaacctcgtatcagtgactcagaaagtgaggaccctccgaggcaccaggccagtgactcagaaaatgaagagcttcccaaaccccgaatcagtgattcggaaagtgaggatcccccaaggaaccaggccagtgattcggaaaatgaggagctacccaaaccccgagtcagtgactctgagagtgaggggcctcagaaggggcctgccagtgactcagaaactgaggatgcgtccagacacaaacagaagccagagtcagatgatgacagcgacagggagaataagggagaggatacagaaatgcagaatgactccttccattcagacagccatatggacagaaaaaagtttcacagttctgatagtgaggaggaagaacacaaaaagcaaaaaatggacagtgatgaagatgaaaaagagggtgaggaggagaaagtagcgaagagaaaagctgctgtgctttctgatagtgaagatgaagagaaagcatcagcaaagaagagtcgtgttgtctctgatgcagatgactctgacagtgatgctgtatcagacaagtcaggcaaaagagagaagaccatagcatctgacagtgaggaagaagctgggaacagaaaagtcagacaaaaaaaatgaagaccatagcatctgacagggagtgaaaaagacacaggaaaagaacagagaaaaacatacggcaaaaagagcaggagaagcatcgagacaaagagaaagaagaaggaacaggacnnnnnnnnnnnnnnnnnnnnnnnnnnnnnnnnnnnnnnnnnnnnnnnnnnnnnnaaggataaaaaatccagaacaccacccaggagttacaatgcatcgcgaagatctcgtagttccagcagggaaaggcgtaggaggaggagcaggagttcttccagatcgccaagaacatcaaaaaccataaaaaggaaatcttctagatctccgtcccccaggagcnnnnnnnnnnnnnnnnnnnnnnnnnnnnnnnnnnnnnnnnnnnnnnnnnnnnnnnaccgggacaaggaacgggaaaaggaccgggaaaaagacaaggaaaaggacagagagagagaacgggaaaaagagcatgagaaggatcgagacaaagagaaggaaaaggaacaggacaaagaaaaggaacgagaaaaagacagatccaaagagatagatga

SEQ ID NO: 357210 - DNA, 1155 bp, Homo Sapiens
acgaggttattctgagacttgctggaggttggcagtggcctttgtcaaacacactgagaagatggaagggccagcacttaagagcagaactgtacccttagagaaacggacagaggcgagtggcaaacttcagacggttccaatggtcttgcagtttgaaatgtgatgatctaccattggttttgagtacgtgaatacttcctgtcctactgtttcccctaccctattctcaccttctctccgcccacatcctcaccaagagattgtgtggggacatgaccttgaaatgctgggcgatgatccacactggggatatcatcgctggcgactgcactctcaggagcccaaaatcaggagtgaaattgccacttctagtccccttatttcctatggaaacaacgccttccgcacccctagcacctgccgtcctcactgtaaaggttcatcaggatcgtccaccgtgtatattatacgcttcagatcatgttgcttatattgttgctgcaatgaccatcgttttcactttgctggtaaccacttgattgctgacagctacagtcaatgaacctgctgatgacttttttttaatgtagtacaacagtgacagttatgacaggcttaccttggaagagttgtcatttttactgccaattttttggatgaagatgtttttataaacctttcaaaatggtctgcaaaacagagcaggaattgcacaattaactcaataatgctgtgtgttctcaagaagctcccttagtgaggccgatcttaagatggccgattctgcccgttgaaggcatccctgggaaagaaaacaagcatcccagcgggcatctcaccacgacttctccctggagtcctcacacggtcactgacaactacagtcagttttaggaactagagtgccgtatcatcagacttaccctgtcctgccccaccttccctgctaacatcgaggtgtgtgcagttaccttctgagcttggaacaagcagactggaattttcctctgctacctcttgtgtataaaatcttgtttataaaatttcaaaaggaagtagatacactagggaagaaccttaattctaaatttggttcatgtgtggcaaagttcttagcttctaagagtataaaataaatttttcaaaaacaga

SEQ ID NO: 357211 - DNA, 903 bp, Homo Sapiens
  misc_feature (53)..(53): n is a, c, g, or t
  misc_feature (666)..(666): n is a, c, g, or t
  misc_feature (669)..(669): n is a, c, g, or t
  misc_feature (672)..(672): n is a, c, g, or t
  misc_feature (675)..(675): n is a, c, g, or t
ttttctatgctccctgactcctgaaaccaagaattgttggctaaagttttggnatacctgaaaagaagtcatgtaaataaaatagacataaaaaggtaaaattagaatttaccacatttctttttttcttgtctgaacatctccagaagttggcatgcaacctcaatagggttctcaaatagaagtatttttcttcttcctccgccactaaaaaagaattataaaatatttgatatatttacatacctatatggatctacatcagcctgcttccttgtgtgggcttgtctatcaggtagcaatgtacagataaagagtactttaacgcccatgcgtgttcaagactgttcaagactggtgatttggagtagtttacaagattcctcattcagagtgccctcttgtgtgactggggtgatgtgcagcttccataatggatgggacagagagctgggatctaatgtacaagtgaagggcttggtcttccctgagacattccagccattggaataggagaggagcatatatggcagaggtgatggctggtgggtaaatgtgatagtaaattgtagaaacctcttctgattgattggatttccttaataaaatcggaagcaaggttaggctgagtgagggtgagtaaagaggagaggaggttttggaggnagnagnagnaactgctcggaagaccattggcagatggaccataaaaacagcagttagttctctttatgacattaaatagtcgtacaacatatttttaatggttcacaatctcattttacgggcttaaaataaattatgggtctatggatagtttgaaaccagcttgtctatggcgagacacttggcgagcaggttgctccctttgttaaataaacggaaccaattccggttgctata

SEQ ID NO: 357212 - DNA, 1800 bp, Homo Sapiens
  misc_feature (838)..(838): n is a, c, g, or t
tgcagaggggctccagctgttcagagtaacggattactaggtaggtggttgtttcccctccttcccagggcctctttcctctctttgagattgcctttcttactcctgagcacaggagccgggcgggttttctgtcccttgccctggacagcactgcctggatggccgctgtccggcagctgctctttgtccacccaaaaagatgtccccacgactcagtagtaaccagacggtccccacggaccactgcggccaaatttccgccatccccgctgtgggaatcaggcttttcccgcagaaaaccccaggaatctagagaaaactccttaagtccctagtctccatagagaaaaccaggagacactccccccaaaccccgctgtgaatacaggcacagcagccactggggctgcaaagtgatgagtgcgttcttcccgtcgcaaacatagggtaataaatagcatgcatcaaagacgttactaggaagagatagctctttaagtcacgagcggggagaaatgtttgccccgggaaaatttgcctggggaataaaatttgccagactgctgcacgggtgagctcggtgagaaggaagaaacccggactggaggaggtgaggtcgagagccaggttcaggtgcaggagctagatgcgtggacgccggtgcgtggactggaggtttccaggtaccgcgcttagcgtgcctgttgaagtcaaatgcatggttaaggaggctagcgaggaaggctagtgagggaagcttgtggaaacggctacgagcccagaaaaggcatgactcgtccagttgtccaagtttttggaagggaaaagcgggaancgccacgatcccacctactgtgaggaggaatctgcgagtctcccagctccaccccctccacagtgatgcagaggacaaacaccgacgtagggagaggaaaaaataaaactccagggagcggggagtaggcaaccagcagtcttccggcaatagggcgggagggagcgcgtcccaaggaaacaagcaccgcataaatacttgagttgggaacccagtgcttccggaagctcggagctcaccttcccgacctcgccgaagttgaaaaaaggcagagcagggagaggggccagctcaccctgctgagagctgctcagtgggcaggcgggacgctgctccgggagacgcccactggagggatcgcagagcccggcaagctgcgagcgcgccaaagaccctgcgcttcggacgaggagcccaagtcctccgagacggggagggagcggcccgcgagggctggagctccgaagagggccgagtaggagctgcatggacagcatgcgtctctccgccggtcccgacgcggggccctcgggcaactccagcccatggtggcctctggccaccggcgctggcaacacaagccgggaggccgaagccctcggggagggcaacggcccaccgagggacgtgcgcaacgaggagctggccaaactggagatcgccgggctggcggtgacttttcgcggtggccgtgctgggcaacagcagcgtactgctggctctgcaccggacgccgcccaagacgtcccgcatgcacctcttaatccgacacctcagcctggccgacctgggccgaggcattctcacaggggctgccgcaaatgtgctggaacatcacctaccgctttcccggacccgactggctgtgcccgggtggtgaagcacctgcaggtgttcggcatgtttcgcgttggcctacatgctggtaggcatgacagaccgacgtacattcccgggtgtgc

SEQ ID NO: 357213 - DNA, 1806 bp, Homo Sapiens
  misc_feature (959)..(959): n is a, c, g, or t
  misc_feature (1774)..(1774): n is a, c, g, or t
  misc_feature (1795)..(1796): n is a, c, g, or t
  misc_feature (1801)..(1801): n is a, c, g, or t
cctggtttgagaataaccagggggaatgaacccccttggtaaagtaatcttcaggtggagctgaggtttgtacaaaaaagagctcccagttcttccatatccattgaaaacaaccttgctaaagccctttattttactaccatgtaaaacatccagggccggtccttgagatgaaataaatttcccataaatggcagtactcagtctcaggacaaacccgccatttggcatttcactttttgccacaagagggcgctttctaaaatagtatttagtccacctttgactaatttaggtccaacccccagtcctgttgcctgatcgtggaccttcaagttagcatgatcgtggaacttcttaatctgaatatagggtagagtagcgtgaactctatgaaagctgaaaccttcccttgataattcaggtattctcagtgttctagggctgttgtgttcaatgacagtttgtcattgtttagggctaggatatgtatgtggattaaatacagtaaaggtctgaacatgtgctcatctctaaacatatttcttcccacttttaaaaatagggtgcaacaaaattatagttaattgaggtttccatggactgttttttggctaaaataatctaacagtgtcctagctcacaagatactctatcttggtcttgctgaagctttcacggaagaggcgttttcctgccaaccttgaagaaaatgttgagttttgtttgtttttcagaatttagacttaaagagctgaagcagacctcagacatcagctattcctaccacttcacattataggtagtgacactgagacccacagagttaaaaggcctcctcacagctggtacagagctggtcagagcagccatctcattttgtccctttgagggtcagatgtatgcttcttctgcttaaggcacagcctttagggctgccatctggatttctacagagnctcatgcaggagaaaaatagccagagcttaagtgctgttgcatagttcagtttatacacctattgtcccatgcctgtttgtgtgtgaggcttccctcgctccgtgggagcaccaggctcatgccctttcataaacctatttgacagaatagagagttttccctcattggtgtagtcaagacaacatgtgtgttcagcatggaaaaaaggtttcaggtcataaacccccttatccctaatgcttactttcataaagaacaacagtggctccactgtattctaaaaggaaaaaggagctctaatgagaaatacgcaattaaacagctatttaggcggcttagaccctttcaggaacaaataaataaatccgtggttttacaaccctgaagtttgataatagctctcttggatttttgtggttacctcatggcaatctcactaagaagcaggggagcaagctcttggcacatgaaggaataggctcatgaagattcatttcttttcccgcttggccttttggttctctaataagctgtgagctgaggtccatgcagggaaaacaaggagggtaacggcaaatgtaaagtgaatttttctggagaaggatgctgattattttatagcatctacactatcctatgatgaaagaggcatagagccgggtggcaatgtgagttcttgggtgatttaataagccatcgagtggatttaatttctaagtaagacatttgtttattctttgtacaagtccatggagttgtgatcttaaagagttctgtgttatttgcattgtgcctcatttctccccatcaaccnttagcttgagatttggatgannaaaanaaata

SEQ ID NO: 357214 - DNA, 1742 bp, Homo Sapiens
  misc_feature (274)..(347): n is a, c, g, or t
  misc_feature (444)..(557): n is a, c, g, or t
  misc_feature (632)..(684): n is a, c, g, or t
  misc_feature (1303)..(1303): n is a, c, g, or t
  misc_feature (1312)..(1312): n is a, c, g, or t
  misc_feature (1319)..(1319): n is a, c, g, or t
  misc_feature (1322)..(1322): n is a, c, g, or t
  misc_feature (1324)..(1404): n is a, c, g, or t
  misc_feature (1406)..(1408): n is a, c, g, or t
  misc_feature (1411)..(1411): n is a, c, g, or t
  misc_feature (1417)..(1417): n is a, c, g, or t
  misc_feature (1421)..(1421): n is a, c, g, or t
  misc_feature (1423)..(1423): n is a, c, g, or t
  misc_feature (1428)..(1428): n is a, c, g, or t
  misc_feature (1441)..(1443): n is a, c, g, or t
  misc_feature (1449)..(1450): n is a, c, g, or t
  misc_feature (1453)..(1453): n is a, c, g, or t
  misc_feature (1464)..(1464): n is a, c, g, or t
  misc_feature (1468)..(1468): n is a, c, g, or t
  misc_feature (1474)..(1474): n is a, c, g, or t
  misc_feature (1476)..(1476): n is a, c, g, or t
  misc_feature (1486)..(1486): n is a, c, g, or t
  misc_feature (1489)..(1489): n is a, c, g, or t
  misc_feature (1492)..(1495): n is a, c, g, or t
  misc_feature (1503)..(1503): n is a, c, g, or t
  misc_feature (1507)..(1508): n is a, c, g, or t
  misc_feature (1510)..(1520): n is a, c, g, or t
  misc_feature (1534)..(1535): n is a, c, g, or t
  misc_feature (1537)..(1537): n is a, c, g, or t
  misc_feature (1542)..(1543): n is a, c, g, or t
  misc_feature (1545)..(1545): n is a, c, g, or t
  misc_feature (1547)..(1548): n is a, c, g, or t
  misc_feature (1552)..(1552): n is a, c, g, or t
  misc_feature (1556)..(1556): n is a, c, g, or t
  misc_feature (1560)..(1560): n is a, c, g, or t
  misc_feature (1565)..(1565): n is a, c, g, or t
  misc_feature (1567)..(1567): n is a, c, g, or t
  misc_feature (1569)..(1569): n is a, c, g, or t
  misc_feature (1600)..(1600): n is a, c, g, or t
  misc_feature (1607)..(1607): n is a, c, g, or t
  misc_feature (1614)..(1614): n is a, c, g, or t
  misc_feature (1619)..(1619): n is a, c, g, or t
  misc_feature (1621)..(1621): n is a, c, g, or t
  misc_feature (1630)..(1630): n is a, c, g, or t
  misc_feature (1632)..(1632): n is a, c, g, or t
  misc_feature (1636)..(1636): n is a, c, g, or t
  misc_feature (1649)..(1649): n is a, c, g, or t
  misc_feature (1659)..(1659): n is a, c, g, or t
  misc_feature (1662)..(1662): n is a, c, g, or t
  misc_feature (1664)..(1664): n is a, c, g, or t
  misc_feature (1666)..(1666): n is a, c, g, or t
  misc_feature (1690)..(1690): n is a, c, g, or t
  misc_feature (1693)..(1694): n is a, c, g, or t
  misc_feature (1699)..(1699): n is a, c, g, or t
  misc_feature (1705)..(1705): n is a, c, g, or t
  misc_feature (1709)..(1710): n is a, c, g, or t
  misc_feature (1723)..(1723): n is a, c, g, or t
  misc_feature (1731)..(1731): n is a, c, g, or t
gtaagcgtgcgctttagcaggaaggagaattaccccagaagagcacactgggccctcctacactgggcttcagatccatggattcaaccaagcagactgaaaatatgtttaaagccaaagcaatacgaaataatacatattttaaacaatccagtataacagctatttacagagcatttacattgttttagggactataagtaatcttgatttaaactacacagtaggatgtgcgtaggtaatgtgcaaatactgtgccattttatatcaagtnnnnnnnnnnnnnnnnnnnnnnnnnnnnnnnnnnnnnnnnnnnnnnnnnnnnnnnnnnnnnnnnnnnnnnnnnntagtacatgtgtagtccatgtatgcatgtgtgaatccaagcaaacattgtataaaaataataatggaaagaacaggcttggtgcggtggctcacacnnnnnnnnnnnnnnnnnnnnnnnnnnnnnnnnnnnnnnnnnnnnnnnnnnnnnnnnnnnnnnnnnnnnnnnnnnnnnnnnnnnnnnnnnnnnnnnnnnnnnnnnnnnnnnnnnntttagccagatgcgatggtatatgcctgtgaggcccagctacccacgaaattgaggtgggagattgcttgagctnnnnnnnnnnnnnnnnnnnnnnnnnnnnnnnnnnnnnnnnnnnnnnnnnnnnnttgacaaaatgagaccccatctctaaaaaaagaacagtctactaacaaaacgaaaatactggacaataatcctctctaagttgggagaaggataattagagttacagtgttctgggtctttttattttggggagaggggttaaaatattgcttaacattaggtcttcttatgttgaaattgcattaaaagtgattagccatttaaaagtgaaatagtgtgtatatattccaaattagcaaggaggaaaaacataatacaaaaaaattcattaagaaactaaaaagtaagaaagggagggaaaggcgagagaaaccatgcaagtacagaactgtctccaggaacagcggggtaagaccctcagtccaacgaccccagagaaaacaactaaaatgatggataactcgctttaaaaacaattcctcaaagcgtaaaagaactaagaaaaacagtaaaaaaccaccagtcccacaccgtggtgcaaaacacaacaatggaaactgaaattgttcaaaccagccgcctcctgagagcaaccatcaaaactggagagcgctccacgaaaccgtccagggcactgggacctctaaggaccctctgacccctcggggctctccaccnacaaccccngacgggntcngnnnnnnnnnnnnnnnnnnnnnnnnnnnnnnnnnnnnnnnnnnnnnnnnnnnnnnnnnnnnnnnnnnnnnnnnnnnnnnnnncnnnccncacacnctcncnacaanacaaaaaccaaannncaaacnnaancccaaaaaaanacanacaatntnacctcccacnccnaannnnaaaccccnaaanncnnnnnnnnnnnaacaacaccaaccnncnttttnngnanncaanccancccnaaaancncnacattcccttaaatgaattaattttatccanacaccgngacaccnataananaaaattacntntttncttaaggaatttnatttaatttnaanananacaaaagtcctcactgcacggtantcnnatggntccggntcannaaaaattattacnaagcccangatcggatttt

SEQ ID NO: 357215 - DNA, 796 bp, Homo Sapiens
  misc_feature (366)..(441): n is a, c, g, or t
ggagagggtgcggcacgtgggatccataagggagaaaaaagaaccgcccacaaaggaaggggaacaaacatatgggaaaagagcgtgaaaaagcgggaaggaagggagcaaaggatggtggtatatcccggtgggacaagcgtgttatgacaacaaatgaaaaaaaagctcactggttctcgggcgtcaagattgagagaactaacatgaaagggaggttgcccctccaaactccacccctaggttctccgccctttggcctctgactgaattccaccaccagcttttcagggtctccagcttgcaggcggcagatcgtgggacttcttggcctccataattatgtaagccaattcccataataannnnnnnnnnnnnnnnnnnnnnnnnnnnnnnnnnnnnnnnnnnnnnnnnnnnnnnnnnnnnnnnnnnnnnnnnnnntgattctgtgtctctgaggaaccctaatacacctccagaactgtgagatgatacatttctgtggtttaagccactcagaaggtggtactttgtttcaccaggcctagcaaactaatacaagtgcatggaaggtgactactcatgactgcaactcagagaacaagggttataataaaaataaaagtgttatacaaaggtggcaagataaatgacaataaatgaaaatattaacatgtgaattaaaaagtaaagatatttttcctagcattctcccagaaagtagagacgcgtctctcttgtttgccatcatatccagcaatggcaagataagttctaggcacttcataaaaatttg

SEQ ID NO: 357216 - DNA, 1178 bp, Homo Sapiens
  misc_feature (927)..(1048): n is a, c, g, or t
ggtgggaaaagctacagaaagatgacacagatccggggcaactgaaaggcctctcagcgcatactcatgtggaacttccatattactctaagttcattctaattgctgcataccttgcttcatacaatccagcaagaactgacaagaggttttttcttaagcatcatggaaaaatcaagaaaaccaactttctaaaaaaacacgaaaagacaagcaatcatctccttgggccaaaaccatttccactagacagattattagcaatattatatagtatcgtggacagcagagttgctccaacagcaaatattttttcccagattacctctctagtaacccttcagctgttaaccccggttggccatgacgatcagcttgatggaccaaaatacaaatgcacagtgtctctagacttcatcagagctattgcaaggacggtgaacctttgacataataaaatacttgtatgatttcttgtgaaaacaagcttcaaagccatatggacactgtgacaatgactaagccaagctgtgttcatccagctacttagctggccaaggagaggagttctttggctctagtggatttgtccaaacaggtgctgacccagcatggaatctgatgaaaatattctgattggtctgggtggatgtgagcagaagactagtaatccagggaacctggagtatatggaagcaacgtgttaaatataaacagcagggtttgagcacaatctgttctactcttaatgatgttatcttaacactgaaattgcctgaaacccatttacataggaacacattattgctcatgtgaactatactcctgcgctttgaacagtgccagcagccctagtttataagcccattcttttcactttgggctagcccaaagtgaaaagacccatacctcactgctgtatagcannnnnnnnnnnnnnnnnnnnnnnnnnnnnnnnnnnnnnnnnnnnnnnnnnnnnnnnnnnnnnnnnnnnnnnnnnnnnnnnnnnnnnnnnnnnnnnnnnnnnnnnnnnnnnnnnnnnnnnnnngctttttccttttctgtgcttcatatcggataagcagttatggctatgcctattaaattcacaaatagttatgtcaacaatatctaatctgccataaaaaccgtcacatgtatatagacactattgggat

SEQ ID NO: 357217 - DNA, 423 bp, Homo Sapiens
ggcagcgcaggggctgctgctttgccacgaaagagcttcccgtgccgtgggagcaagtctgggaccgctggtcggaccggagagtcgcagctgtgtgttagggctaggatggctccgggatgcgcgtgacgcaagtgaccttgcgtgtaaagggatacatgatcccttaattcaggctcaggctgaagaactgacccacttacgacagaagacacaggaagggagaggtgtctgctaccttttcacccagcatgtgaagaacacagtcaagtcttttgagggccttctcaggaacactggcattgcctactaccagagacagagattctgtgagcaaatggtacaaggaagccagctgacagagatccttgtcagaaaacttgccacagaatcaaccccaatgctcactaacaaactgagaag

SEQ ID NO: 357218 - DNA, 499 bp, Homo Sapiens
agaccggcgttgcgagggtagggatagaaggggaacaaggagcagggggcgcagtgaaacaaaaggtaatgtacgaggccgggagaaacggggactggatgcgtgccttcctggggctcttcttcatcgcctcgcggtatagcacattgcttctgcgctggtggcaatagggcaacaaagccataggccagagggcggggggatgtccctgcctccctgccaccccccctgcctgagcccaggacccactggagccagccccaccctaggcaggaagacccctgctgagggcccccccgtgcagtccgcatacccccctgtccagcagggcactgtgggtggctcaccctagattgtggcccagatctcaggagtctctgccttcagggtcatccaaaagtggaccttgggagcagtgggggtgtctgtggagtgcatgactcagccccccgactcgcagccttaataaagcgatggttgacgtctgctgtgggaaaaa

SEQ ID NO: 357219 - DNA, 1305 bp, Homo Sapiens
  misc_feature (1073)..(1073): n is a, c, g, or t
  misc_feature (1076)..(1076): n is a, c, g, or t
  misc_feature (1079)..(1079): n is a, c, g, or t
  misc_feature (1091)..(1091): n is a, c, g, or t
  misc_feature (1093)..(1093): n is a, c, g, or t
  misc_feature (1096)..(1096): n is a, c, g, or t
  misc_feature (1105)..(1105): n is a, c, g, or t
  misc_feature (1110)..(1110): n is a, c, g, or t
  misc_feature (1123)..(1123): n is a, c, g, or t
  misc_feature (1130)..(1130): n is a, c, g, or t
  misc_feature (1132)..(1132): n is a, c, g, or t
  misc_feature (1135)..(1135): n is a, c, g, or t
  misc_feature (1138)..(1138): n is a, c, g, or t
  misc_feature (1152)..(1152): n is a, c, g, or t
  misc_feature (1154)..(1154): n is a, c, g, or t
  misc_feature (1194)..(1194): n is a, c, g, or t
  misc_feature (1215)..(1215): n is a, c, g, or t
  misc_feature (1245)..(1245): n is a, c, g, or t
  misc_feature (1259)..(1259): n is a, c, g, or t
  misc_feature (1267)..(1267): n is a, c, g, or t
  misc_feature (1302)..(1302): n is a, c, g, or t
ccgcgcgccgggagctgagagttcggcgccgggagggtcccggggacagaagagcgcctcgcccggttgccaaggcaaccccacgcggctggagaagccggcgctcgcagcccggcccgggccgctgccggaagtgacgcgagttcacctgccgagcgggggctgggaggaggggcggagggtgcagaggtgccgccgccgccgcgagccagtcgggagcgcgcgaggcgcggggagcctgggaccaggagcgagagccgcctacctgcagccgccgcccacggcacggcagccaccatggcgctcctgctgtgcttcgtgctcctgtgcggagtagtggatttcgccagaagtttgagtatcactactcctgaagagatgattgaaaaagccaaaggggaaactgcctatctgccatgcaaatttacgcttagtcccgaagaccagggaccgctggacatcgagtggctgatatcaccagctgataatcagaaggtggatcaagtgattattttatattctggagacaaaatttatgatgactactatccagatctgaaaggccgagtacattttacgagtaatgatctcaaatctggtgatgcatcaataaatgtaacgaatttacaactgtcagatattggcacatatcagtgcaaagtgaaaaaagctcctggtgttgcaaataagaagattcatctggtagttcttgttaagccttcaggtgcgagatgttacgttgatggatctgaagaaattggaagtgactttaagataaaatgtgaaccaaaagaaggttcacttccattacagtatgagtggcaaaaattgtctgactcacagaaaatgcccacttcatggttagcagaaatgacttcatctgttatatctgtaaaaaatgcctcttctgagtactctgggacatacagctgtacagtcagaaacagagtgggctctgatcagtgcctgttgcgtctaaacgttgtccctccttcaaataaagctggactaattgcaggagccattataggaactttgcttgctctagcgctcattggtcttatcatcttttnctntcntaaaaatctcananaanaaaaatatnaaaangaagttcatcacnatatcangnaanatnttccacctccaaananccttacttccacttccataatctacatcttcattaatcantcaacccttttttccatttcncctccaacattttaattatattccaatacncattaaaaccaatnacaatttnatacttttaactcacccccatattcttcccccccncct

SEQ ID NO: 357220 - DNA, 2487 bp, Homo Sapiens
  misc_feature (1974)..(2008): n is a, c, g, or t
tacatcacagccttctaggatctccagagtggacaggaatctcacttggagggaccatggagcagtatacagcaaacagcaatagttcgacagagcagatgttgtccaggcaggacagattcagcagcaggtccaagggcagccattaatggtgcaggtcagtggaggccagctaatcacatcaactggccaacccatcatggtccaggctgtccctggtggacaaggtcaaaccatcatgcaagtacctgtttctggaacacagggtttgcagcaaatacagttggtcccacctggacagatccagatccaggtggacaggctgtgcaggtgcagggcccagcagggccagacccagcagatcatcatccagcagccccagacggctgtcactgctggccagactcagacacagcagcagattgctgtccaggacagcaagtggcacagactgctgaagggcagaccatcgtctatcaaccagttaatgcagatggcaccattctccagcaagttacactccctgtttcaggcatgatcactatcccagcagccagtttggcaggagcacagattgttcaaacaggagccaataccaacacaaccagcagtgggcaagggactgtcactgtgacactaccagtggcaggcaatgtggtcaacttcaggagggatggtcatgatggttcctggggctggctctgtgcctgctatccaaagaatccctctacctggagcagagatgcttgaagaagagcctctcaacgtgaatgccaaacaataccaccgtattctcaagagcaggcaagcccgagctaaaatagaggcagaagggaaaattccaaaggagagaaggaaatacctgcatgagtctcggcaccgtcatgccatggcacggaagcgtggtgaaggtggacgatttttctctccaaaaggacacacaggatagtccccatatgcaggatccaaaccaagccgatgaagaagcaatgacacagatcatccgagtgtcctaaccccacgccatgtgatggagctgatcaaggtcatgtttctcactgttccaggaaattgatcaactcttccaatgggacattgatgatcacattctgccctttactacaggacagaaaccacttagtttttaataagtggctcagtattacaattgcagcgatgcctggcaaattgaagttgcaagcctttgtcttactctttcagtcaggacctatttcagactgttgatgacattgacatttcatggattcggatgatgcaaggagacacatgccaccccagcagtacacaaagcacttaccttgactggtgaagtcagccagccatctcagcagggaagaacaaccttctcaaccaaaactgcaatcaggaaagcagcagcccactccttcccatggaatctagacagcatttatccctctggtgggggaatctcacactgactaactgaatggacgctttgtattcagagatggcttccaggcaaggaagttctatcttgtgatacggaaacaataaattcctgagatacattcttccaatctgtggtaataataagaattcctctctgcccagatggtaggttgatatttctggactctagccaagaaaaagctaattctggcgatagaatgataaaagactcaagcactaaaaatatacattgcccaaatctcccttttctacctttgaaaagttgtggcccgcttgtccctctgatgactggtcatctggaccatcgtacttgctgtggctacttctaagacaatgtagagggttattaaaccttgaaactgcctttcctaagtagagaacaagactattcaacaacttctttgctgaagcactgaggagatttgtaatactcctaaaggaagggccaaactagagattttcaatcatagactttgtgacagcatttggggaactaaaagattcatgtgtttcagcctagtnnnnnnnnnnnnnnnnnnnnnnnnnnnnnnnnnnncatgtatacccgtatgttatcatagagcacgattctccagtggatggatacctggaatggatcattaagatgaagagagtaattcacatttactctagaacctttaacaagcactgaaaggaagaagcctgagatttgatccttgacaatttctggaaagcactggtcagtcacactgtcctggacagagtccaagttacccactaaagcttgaggtggatgttggcttcactcctgcagcacaatgctggccctagaaagcgagcattttcattcttcccatggcagctgattctttggtgccagtcttcatgttttctccataggccttgtgcagaaaggttttctcattgcatccatactgtgagaataaactgcagactgaaagaaacatgcctgcagggtcaggaactgggccactgttcccagaacgggttgtgcctcagaaatctaattcccctttagatgttgaaccctga

SEQ ID NO: 357221 - DNA, 1857 bp, Homo Sapiens
  misc_feature (425)..(425): n is a, c, g, or t
ggcctaagcagctaccatggcccaggtggccggtcgcggcgttgtcccaggcgggttggtatctttcagatgaaggcattgaagcttgcacaagctctccagacaaagtcaatgtaaatgacatcatcctgattgctctcaatatctgagaacaattggcaagaaattcctccccagtgacatcaatagtggaaaggtagaaaaagctcgaaggtccatgtgttttgcaaattcaaaaaattcgcaatgttgctggcaccaaaggataatgaagaatctcaggctggcaccaaggatgctgcgattacagatgactgatggtcatataagttgcacagcagtagaatttagttatatgtcaaaaataagcctgaacacaccacctggaactaaagttaagctctcaggcattgttgacataaaanatggattcctgctcttgaatgactctaacaccacagttcttggtggtgaagtggaaaccttattgagaaatgggagttacagagaagcttatcaaaacacaatagaagcaatattggaactgaaggtggaccaccgccttttgtgccttttggacagaagtgtgtatctcatgtccaagtggatagcagagaacttgatcgaagaaaaacattgcaagttacaatgcctgtcaaacctacaaatgataatgatgaatttgaaaagcaaaggacggctgctattgctgaagttgcaaagagcaaggaaaccaagacatttggaggaggtggtggtggtgctagaagtaatctcaatatgaatgctgctggtaaccgaaatagggaagttttacagaaagaaaagtcaaccaaatcagagggaaaacatgaaggtgtctatagagaactggttgatgagaaagctctgaagcacataacggaaatgggcttcagtaaggaagcatcgaggcaagctcttatggataatgggcaacaacttaggaaggcagcactgaacgtacttcttacaagcaataaacagaaacctgttatggggtcctcctctgagaggtagaggaaaaggcagggggcgaataagatctgaagatgaagaggacctgggaaatgcaaggccatcagcaccaagcacattatttgatttcttggaatctaaaatgggaactttgaatgtggaagaacctaaatcacagccacagcagcttcatcagggacaatacagatcatcaaatactgagcaaaatggagtaaaagataatcatctgagacatcctcctcgaaatgataccaggcagccaagaaatgaaaaaccgcctcgttttcaaagagactcccaaaattcaaagtcagttttagaaggcagtggattacctagaaatagaggttctgaaagaccaagtactccttcagtatctgaaagtatgggctgaagacagaatccaaatgtggatagacccgtattcctagatatgacagaactaaagatacttcatatcctttaggttctcagcatagtgatggtgcttttaaaaaaagagataactctatgcaaagcagatcaggaaaaggtccctcctttgcagaggcaaaagaaaatccacttcctcaaggatctgtagattataataatcaaaaacgtggaaaaagagaaagccaaacatctattcctgattatttttatgacaggaaatcacaaacaataaataatgaagctttcagtggtataaaaattgaaaaacatttctaatgtaaatactggattatcagaaatccagttccgaagtaataggtttccatggggggtccccaaatgggagaaataaaaaaatgcccactgaaaagggaagaacaattagggaccctatttaagcccggc

SEQ ID NO: 357222 - DNA, 467 bp, Homo Sapiens
ccaaccccctccacgaacagcgtcctctccaccagcacaaatcgaagcaggaattccccacttttggagcgggccagcctcggccaggcctccatccagaatggcaaagacagcctaaccatgccagggtcccgggcctccacggcttctgcttctgccgcagtctctgcggcccggccccgccagcatcagaaatccatgtcggcctccgtgcaccccaaaaaggcctctgggctgccccccacggagagtaactgtgaggtgccgcggcccagcacagccccccagcgtgtccctgttgcctccccatccgcccacattcacccctgcccagagattcccccttctcctctcccctactggaggcaaaggaaggggagggtggatgggggggcagggctccccctcggtactgcggttgcacagagtatttcgcctaaaccaagaaattttttattaccaaaaag

SEQ ID NO: 357223 - DNA, 2116 bp, Homo Sapiens
  misc_feature (18)..(18): n is a, c, g, or t
  misc_feature (23)..(23): n is a, c, g, or t
  misc_feature (1591)..(1591): n is a, c, g, or t
tttgatggacagaacctnaaggnactgcgggaacgggtactgaggggaaaataccgtattccattctacatgtccacggactgtgaaaacctgcttaagaaatttctcattcttaatcccagcaagagaggcactttagagcaaatcatgaaagatcgatggatgaatgtgggtcacgaagatgatgaactaaagccttacgtggagccactccctgactacaaggacccccggcggacagagctgatggtgtccatgggttatacacgggaagagatccaggactcgctggtgggccagagatacaacgaggtgatggccacctatctgctcctgggctacaagagctccgagctggaaggcgacaccatcaccctgaaaccccggccttcagctgatctgaccaatagcagcgccccatccccatcccacaaggtacagcgcagcgtgtcggccaatcccaagcagcggcgcttcagcgaccaggctggtcctgccattcccacctctaattcttactctaagaagactcagagtaacaacgcagaaaataagcggcctgaggaggaccgggagtcagggcggaaagcagcagcacagccaaggtgcctgccagccccctgcccggtctggagaggaagaagaccaccccaaccccctccacgaacagcgtcctctccaccagcacaaatcgaagcaggaattccccacttttggagcgggccagcctcggccagggcctccatccagaatggcaaagacagcctaaccatgccagggtcccgggcctccacggcttctgcttctgccgcagtctctgcggcccggccccgccagcaccagaaatccatgtcggcctccgtgcaccccaacaaggcctctgggctgccccccacggagagtaactggtgaggtgccgcggcccagcacagccccccagcgtgtccctgttgcctccccatccgcccacaacatcagcagcagtggtggagccccagaccgaactaacttcccccggggtgtgtccagccgaagcaccttccatgctgggcagctccgacaggtgcgggaccagcagaatttgccctacggtgtgaccccagcctctccctctggccacagccagggccggcggggggcctctgggagcatcttcagcaagttcacctccaagtttgtacgcagacctcacgtggtgggcagtggcggcaacgacaaagaaaaggaagaatttcgggaggccaagccccgctccctccgcttcacgtggagtatgaagaccacgagctccatggagcccaacgagatgatgcggggagatccgcaaaggggctgggacgcgaacaggctgccaaaaacgagctgcatgagaaagtacatgctgcttgtgcatgcaccgcacgcccgggccacgaggacttcgtgcagtgggagatggaggtgtgcaaactgccgcggctctctctcaacggggttcgatttaagcggatatcgggcacctccatggccttcaaaaacattgcctccaaaatagccaacgagctgaagctttaacaggctgccaggagcgggggcggcgggggcgggccanctggacgggctgccggccgctgcgccgccccacctgggcgagactgcagcgatggattggtgtgtctcccctgctggcacttctcccctccctggcccttctcagttttctcttacatgtttgtggggggtgggagattgttctccagccccccacattcacccctgtcccagagattcccccttctcctctcccctactggaggcaaaggaaggggagggtggatgggggggcagggctccccctcggtactgcggttgccagagtatttcgctaaaccaagaaatttattaccaaaaagaaacatgaaaaaataaatcccagcggccagcctttcctccctgccccatggggacagtcgagactggcatctgtggggttacccgggagggctggctccagggctggaacacgtctcaggcaagatgggtgcaagctccccgtacaggccgctccgtcagggcccactgggagggagattccaccccactgtcgacgccaccatcacccatccaaagagaaaaa

SEQ ID NO: 357224 - DNA, 1226 bp, Homo Sapiens
gcctcagatccgtctggatgtcccattggggtcaggagcgaaggtggccgctggaatcttttgttctattgttcttggttgctcataatgacttctttggtttacggcgaaattactctgtggcaacctgcagtacccgacgcgggagcctgcccgcaccgcatccaccctccccttcctttgcctccagtaggggagaggagaagggggaatctctggccagggtcgaatgtgggagcaaactgagaagggccagggacggggagaagtgccagcaggggagacacaccaatccatcgctgcagtctcgcccaggtggggcggcgcagcggccggcagcccgtccagctggcccgcccccgccgcccccgctcctggcagcctgttaaagcttcagctcgttggctattttggaggcaatgtttttgaaggccatggaggtgcccgatatccgcttaaatcgaaccccgttgagagagagccgcggcagtttgcacacctccatctcccactgcacgaagtcctcgtggcccggcagtgccagtacatgcacagcagcatgtacttctcatgcagctcgctctggcagctgttcgcgtccagcaccttgcggatctcccgcatcatctcgttgggctccatggagctcgtggtcttcatactccacgtgaagcggagggagcggggcttggcctacccgaaattcttccttttctttgtcgttgccgccactgcccaccacgtgaggtctgagcgtctccactcggtctttgctttcaggttcattcaggttcctgcgtacaaacttggaggtgaacttgctgaagatgctcccagaggccccccgccggccctggctgtggccagagggagaggctggggtcacaccgtagggcaaattctgctggtcccgcacctgtcggagctgcccagcatggaaggtgcttcggctggacacaccccgggggaagttagttcggtctggggctccaccactgctgctgatgttgtgggcggatggggaggcaacagggacacgctggggggctgtgctgggccgcggcacctcacagttactctccgtggggggcagcccagaggccttgttggggtgcacggaggccgacatggatttctggtgctggcggggccgggccgcagagactgcggcagaagcagaagccgtaaggcccgggaccctcctcgtcttggattcgccacccagg

SEQ ID NO: 357225 - DNA, 1290 bp, Homo Sapiens
  misc_feature (5)..(5): n is a, c, g, or t
  misc_feature (8)..(8): n is a, c, g, or t
  misc_feature (22)..(22): n is a, c, g, or t
  misc_feature (26)..(27): n is a, c, g, or t
  misc_feature (33)..(33): n is a, c, g, or t
  misc_feature (36)..(36): n is a, c, g, or t
  misc_feature (39)..(39): n is a, c, g, or t
  misc_feature (46)..(46): n is a, c, g, or t
  misc_feature (52)..(52): n is a, c, g, or t
  misc_feature (54)..(54): n is a, c, g, or t
  misc_feature (61)..(62): n is a, c, g, or t
  misc_feature (66)..(66): n is a, c, g, or t
  misc_feature (69)..(69): n is a, c, g, or t
  misc_feature (72)..(73): n is a, c, g, or t
  misc_feature (75)..(75): n is a, c, g, or t
  misc_feature (81)..(82): n is a, c, g, or t
  misc_feature (91)..(91): n is a, c, g, or t
  misc_feature (96)..(96): n is a, c, g, or t
  misc_feature (98)..(98): n is a, c, g, or t
  misc_feature (100)..(100): n is a, c, g, or t
  misc_feature (116)..(116): n is a, c, g, or t
  misc_feature (122)..(122): n is a, c, g, or t
  misc_feature (124)..(124): n is a, c, g, or t
  misc_feature (131)..(131): n is a, c, g, or t
  misc_feature (135)..(135): n is a, c, g, or t
  misc_feature (143)..(143): n is a, c, g, or t
  misc_feature (146)..(146): n is a, c, g, or t
  misc_feature (151)..(153): n is a, c, g, or t
  misc_feature (156)..(156): n is a, c, g, or t
  misc_feature (162)..(163): n is a, c, g, or t
  misc_feature (166)..(167): n is a, c, g, or t
  misc_feature (171)..(171): n is a, c, g, or t
  misc_feature (173)..(173): n is a, c, g, or t
  misc_feature (186)..(187): n is a, c, g, or t
  misc_feature (212)..(212): n is a, c, g, or t
  misc_feature (230)..(230): n is a, c, g, or t
  misc_feature (235)..(235): n is a, c, g, or t
  misc_feature (238)..(238): n is a, c, g, or t
  misc_feature (241)..(242): n is a, c, g, or t
  misc_feature (253)..(253): n is a, c, g, or t
  misc_feature (257)..(257): n is a, c, g, or t
  misc_feature (260)..(260): n is a, c, g, or t
  misc_feature (273)..(273): n is a, c, g, or t
  misc_feature (276)..(276): n is a, c, g, or t
  misc_feature (283)..(283): n is a, c, g, or t
  misc_feature (285)..(285): n is a, c, g, or t
  misc_feature (287)..(287): n is a, c, g, or t
  misc_feature (289)..(291): n is a, c, g, or t
  misc_feature (293)..(294): n is a, c, g, or t
  misc_feature (310)..(311): n is a, c, g, or t
  misc_feature (324)..(324): n is a, c, g, or t
  misc_feature (336)..(337): n is a, c, g, or t
  misc_feature (351)..(351): n is a, c, g, or t
  misc_feature (359)..(359): n is a, c, g, or t
  misc_feature (362)..(363): n is a, c, g, or t
  misc_feature (366)..(366): n is a, c, g, or t
  misc_feature (368)..(371): n is a, c, g, or t
  misc_feature (374)..(375): n is a, c, g, or t
  misc_feature (379)..(379): n is a, c, g, or t
  misc_feature (381)..(381): n is a, c, g, or t
  misc_feature (384)..(384): n is a, c, g, or t
  misc_feature (388)..(388): n is a, c, g, or t
  misc_feature (390)..(390): n is a, c, g, or t
  misc_feature (395)..(395): n is a, c, g, or t
  misc_feature (398)..(399): n is a, c, g, or t
  misc_feature (401)..(401): n is a, c, g, or t
  misc_feature (408)..(408): n is a, c, g, or t
  misc_feature (419)..(419): n is a, c, g, or t
  misc_feature (424)..(424): n is a, c, g, or t
  misc_feature (440)..(440): n is a, c, g, or t
  misc_feature (444)..(444): n is a, c, g, or t
  misc_feature (448)..(448): n is a, c, g, or t
  misc_feature (453)..(453): n is a, c, g, or t
  misc_feature (459)..(463): n is a, c, g, or t
  misc_feature (466)..(466): n is a, c, g, or t
  misc_feature (468)..(470): n is a, c, g, or t
  misc_feature (474)..(474): n is a, c, g, or t
  misc_feature (481)..(482): n is a, c, g, or t
  misc_feature (487)..(487): n is a, c, g, or t
  misc_feature (491)..(492): n is a, c, g, or t
  misc_feature (495)..(495): n is a, c, g, or t
  misc_feature (497)..(497): n is a, c, g, or t
  misc_feature (499)..(499): n is a, c, g, or t
  misc_feature (509)..(509): n is a, c, g, or t
  misc_feature (516)..(517): n is a, c, g, or t
  misc_feature (521)..(521): n is a, c, g, or t
  misc_feature (533)..(534): n is a, c, g, or t
  misc_feature (539)..(539): n is a, c, g, or t
  misc_feature (541)..(541): n is a, c, g, or t
  misc_feature (552)..(552): n is a, c, g, or t
  misc_feature (554)..(554): n is a, c, g, or t
  misc_feature (558)..(558): n is a, c, g, or t
  misc_feature (560)..(560): n is a, c, g, or t
  misc_feature (563)..(563): n is a, c, g, or t
  misc_feature (574)..(574): n is a, c, g, or t
  misc_feature (584)..(584): n is a, c, g, or t
  misc_feature (586)..(586): n is a, c, g, or t
  misc_feature (592)..(592): n is a, c, g, or t
  misc_feature (602)..(602): n is a, c, g, or t
  misc_feature (608)..(608): n is a, c, g, or t
  misc_feature (615)..(615): n is a, c, g, or t
  misc_feature (621)..(621): n is a, c, g, or t
  misc_feature (624)..(624): n is a, c, g, or t
  misc_feature (629)..(630): n is a, c, g, or t
  misc_feature (633)..(633): n is a, c, g, or t
  misc_feature (642)..(643): n is a, c, g, or t
  misc_feature (656)..(656): n is a, c, g, or t
  misc_feature (667)..(667): n is a, c, g, or t
  misc_feature (672)..(672): n is a, c, g, or t
  misc_feature (675)..(675): n is a, c, g, or t
  misc_feature (683)..(684): n is a, c, g, or t
  misc_feature (687)..(687): n is a, c, g, or t
  misc_feature (692)..(692): n is a, c, g, or t
  misc_feature (708)..(709): n is a, c, g, or t
  misc_feature (712)..(712): n is a, c, g, or t
  misc_feature (714)..(714): n is a, c, g, or t
  misc_feature (1099)..(1099): n is a, c, g, or t
  misc_feature (1125)..(1136): n is a, c, g, or t
  misc_feature (1158)..(1158): n is a, c, g, or t
ccctnggntaatacactttcantaannaaaatngancanattgtancaattntngatacanncctntangannantttaannattggtttncattncntnttttaaaatttttttnaccttncntacttanttantacatatnttnctttnnnagngggagnnaanntttncncatctcaaactcnnccctatataagggggagaagcactntttctcatataaattatntaggntanatnnttatagggctngtcnttnggggagaattttnganaaagatnancnannntnnaggctatatcataaanntactaagacatantaagtaataatnntttttattaaatcnaattttanttnnatnannnntgnngggnanggngggntngggcnttnncnaggcatnttttagggaanatganaatgaaaattatttgngggntttntggcnttttgnnnnnggnannngtgntttcccnnttttntttnnggntncnccattgttcngttgctnngaanaatgcattactnncagtncntatggggtccngngtcngngcntttccccaaanccttggcctntnaacccnttacacatanacaaancaaaccnagaccnggnccgcnnganaaggggggnntaatgtgatgtantctggcaatgngaaanggnttttaatnntgnttttncctgattgattttggnnaangntttcccaaaatgtgaattattgtttttatgaatagttacggaggatgtgatgacaatatgccagataatctatgtaattctttattcctggatacaagcacatggtggactgttttctcacaaccgattaaaattggatttatttttgcatgagaattgtaagggagccacaaccatgagtagtaacataattaatatacagtgtcaatattttatatttaatgagacatgttattctataatcagttcttatttataaagaggcgcaaatcaatttcaacctgtaattacctctgtgctttgtgactcaggcacaatctaaacccagcttaatgaatcaaagagatgtttcttggcacagatattttcattaaagttatttggnaagggcaattaactgcaaaagggacnnnnnnnnnnnnaactgacaagatactatctaanctaatagtttaaaataacattgcttttatgtcaaagcactttggtaacttggcctcacatgctgacagttttggctaaatattacaaatcttgatcccagaagagccaagagaggaaagttttactaaatat

SEQ ID NO: 357226 - DNA, 1935 bp, Homo Sapiens
tctacactcctacccctggtacaccacaccactacatcttcactcctacgtgtccccgctcttcttcccccctcctcaatataccccaacccagctggtaccggtccggaattcccgggatgagccgccctgggtgtcagcggctcggctcccgcgcacgctccggccgtcgcgcagcctcggcacctgcaggtccgtgcgtcccgcggctggcgcccctgactccgtcccggccagggagggccatgatttccctcccggggcccctggtgaccaacttgctgcggtttttgttcctggggctgagtgccctcgcgcccccctcgcgggcccagctgcaactgcacttgcccgccaaccggttgcaggcggtggagggaggggaagtggtgcttccagcgtggtacaccttgcacggggaggtgtcttcatcccagccatgggaggtgccctttgtgatgtggttcttcaaacagaaagaaaaggaggatcaggtgttgtcctacatcaatggggtcacaacaagcaaacctggagtatccttggtctactccatgccctcccggaacctgtccctgcggctggagggtctccaggagaaagactctggcccctacagctgctccgtgaatgtgcaagacaaacaaggcaaatctaggggccacagcatcaaaaccttagaactcaatgtactggttcctccagctcctccatcctgccgtctccagggtgtgccccatgtgggggcaaacgtgaccctgagctgccagtctccaaggagtaagcccgctgtccaataccagtgggatcggcagcttccatccttccagactttctttgcaccagcattagatgtcatccgtggggtctttaagcctcaccaacctttcgtcttccatggctggagtctatgtctgcaaggcccacaatgaggtgggcactgcccaatgtaatgtgacgctggaagtgagcacagggcctggagctgcagtggttgctggagctgttgtgggtaccctggttggactggggttgctggctgggctggtcctcttgtaccaccgccggggcaaggccctggaggagccagccaatgatatcaaggaggatgccattgctccccggaccctgccctggcccaagagctcagacacaatctccaagaatgggaccctttcctctgtcacctccgcacgagccctccggccaccccatgccctcccaggcctggtgcattgacccccacgcccagtctctccagccaggccctgccctcaccaagactgcccacgacagatggggcccaccctcaaccaatatcccccatccctggtggggtttcttcctctggcttgagccgcatgggtgctgtgcctgtgatggtgcctgcccagagtcaagctggctctctggtatgatgaccccaccactcattggctaaaggatttggggtctctccttcctataggggtcacctctagcacagaggcctgagtcatgggaaagagtcacactcctgacccttagtactctgcccccacctctctttactgtgggaaaaccatctcagtaagacctaagtgtccaggagacagaaggagaagaggaagtggatctggaattgggaggagcctccacccacccctgactcctccttatgaagccagctgctgaaattagctactcaccaagagtgaggggcagagacttccagtcactgagtctcccaggcccccttgatctgtaccccacccctatctaacaccacccttggctcccactccagctccctgtattgatataacctgtcaggctggcttggttaggttttactggggcagaggatagggaatctcttattaaaactaacatgaaatatgtgttgttttcatttgcaaatttaaataaagatacataatgtttgtatgagataag

SEQ ID NO: 357227 - DNA, 1160 bp, Homo Sapiens
  misc_feature (67)..(79): n is a, c, g, or t
  misc_feature (254)..(255): n is a, c, g, or t
tccaaatgtgtgttcaaaaacatcttccagaggaagtatgtatcctccctgagaatgtcagaagccnnnnnnnnnnnnnggtatatggtaaagcattaatttctggcttccactgccatgatttcataaaatttagaggaaacaagaatgtggtgagtcctatgttgaaaaagacatgttttgtgaaaagcttgtaatttctttaggttatataccttttgcaaaagtagtatatggaccttatgttaaatttnnttttccagaaaattatgacttacctgtttgacttcccacatggccccaaggtaccgtatgtgactcaatagaccactgctttaataacagtgaatgcatttaatcattctggaatattaagggggaaagaattggtcagaacccacccagaaaagtcctactttttaagcctattgtctaatcttcattaacattagaagtaatccaggagctagtagaatttaaaatcaaattgctaatttagagtccgcaacttgaatacttaatagacagaaataaaagggatattcatgtgatatttagtaggatgggatcagaataattttatgcccaagaagttctatgcaaaattaagtttgtgtggcaatgaaaggaattttcaggttgtggatgatatttgattaacagaaacagaaaatgtatgtgtattcttgacaacttctagattttgtattagttgttgctaagtttttgccaagagagcactcagccttgatatttagcagagaagtcttcatttctgcagtacggctgcacttaggtttaaggaatactccttgcaacttagtcacatacttacagaattttagtcctagactttagtgaataaacatcagcaaatccctgttttgagaacacctgaaatcacagtgtgcagtgcccttcaggttggtcttaaaagggtaatgccagggttccatttcaggatagtcatgattttaaagggcataactcagtattgtgattagctaacactgtgagccaaaagccagtgtgtacctagagccatcattctgagaatgtaaccagtaaaattcccaaaagttccatgttagtttgtatacttcagctctgatgcctgcctctgtcttaactgtcccctggggattgatttgcaacccccc

SEQ ID NO: 357228 - DNA, 521 bp, Homo Sapiens
gcagaacgtgtagccgcgtcccctccagtccgctccgggcagctgctgatgcaaggaatcccctgggctcccgtccactccactgctgaccagcccattcgcctgtgctgagtcttcctgcaggcctttccttgcctctgtgggaccctgtgggggtccatccggctggagaagaaaagcctctcatgctaacgttgcagaccccagagggtgagagaaagggggacttcattcagtcttgaaacctgtgtgctcagcccccaaggcatcaggaattcttcctgcccagagaatcaaggcagcttcatttttttcgtaccttggtcagtggttctcaacctttttgttatcaaggcactttttgttgtacatatgtcctgttgccccctgcatttttatctgccaaactgtactgatggagtaaccattgacttttcccttcctaaattaaggaagacgtctatgatgcagtgtacaataaaatcagtgtcccaatgattcgtatgatgtcatcaacaacc

SEQ ID NO: 357229 - DNA, 964 bp, Homo Sapiens
tggatactgggggactgggcaccgactggcctttggtgttcactgggatttcaatcttgggcttcttcacacccattgccgcttgcctgctctctccgagagctgccgctttctgggcttgttctcagccgtgggagtttccaccaagcttgagtcttggggcagtgggtcgcattcagccccaaagggtccgaaatcacatcgtgctgccccagcacgggcatctcccacagggactggttggtgaatcggttgaagtagtagggacgattctccctccggctccagcacttctcccagcctgcatgcaccagctcctctgggaggtcctgaaccaggcggattggctttggagaacagggctggctctgattggaggtacctggggagtgactcagcagggacgcttcctcccgggggctgccgtgattctcattggccatctccacacccacacaggaccctctggggtctgcaacgttagcatgagaggcttttcttctccagccggatggacccccacagggtcccacagaggcaaggaaaggcctgcaggaagactcagcacaggcgaatgggctggtcagcagtggagtggacgggagcccaggggattccttgcatcagcagctgcccggagcggactggaggggacgcggctacacgttctgctcgaccgcccgttttgccgcctccgcctcgccctccccagcgccgctgccgccatcttgtgtcccgggccgggactccccgctgcgcatgcgctggtaccgcctctgagggacctcgccgcggccgcgccgccatcttgagtgtggcagggtcggctggctcctcgcacccagcttgctttcggccccctccccttcttcccatccgtccctgctgttccttgtggcgctgaggaaggggagacagctttgtaggcctgcgggtggactgaggaaggaatgaattcactggc

SEQ ID NO: 357230 - DNA, 1091 bp, Homo Sapiens
  misc_feature (679)..(716): n is a, c, g, or t
tggaccggtccggaattctcgggatgggacacagatggcggcagcggcgctggggagggcgaggcggaggcggcaaaacgggcggtcgagcagaacgtgtagccgcgtcccctccagtccgctccgggcagctgctgatgcaaggaatcccctgggctcccgtccactccactgctgaccagcccattcgcctgtgctgagtcttcctgcaggcctttccttgcctctgtgggaccctgtgggggtccatccggctggagaagaaaagcctctcatgctaacgttgcagaccccagagggtcctgtgtgggtgtggagatggccaatgagaatcacggcagcccccgggaggaagcgtccctgctgagtcactccccaggtacctccaatcagagccagccctgttctccaaagccaatccgcctggttcaggacctcccagaggagctggtgcatgcaggctgggagaagtgctggagccggagggagaatcgtccctactacttcaaccgattcaccaaccagtccctgtgggagatgcccgtgctggggcagcacgatgtgatttcggaccctttggggctgaatgcgaccccactgccccaagactcaagcttggtggaaactcccccggctgagaacaagcccagaaagcggcagctctcggaagagcagccannnnnnnnnnnnnnnnnnnnnnnnnnnnnnnnnnnnnnagtgacacccacaggccagtcggtgcccagctcccccagtatcccaggaaccccaacgctgaagatgtggggtacgtcccctgaagataaacagcaggcagctctcctacgacccactgaggtctactgggacctggacatccagaccaatgctgtcatcaagcaccgggggcccttcagaagtgctgcccccgcatcccgaagtggaactgctccgctctcagctcatcctgaagcttcggcagcaactatcggggactgtgcccaccaacgagaagggcattgagccctcccccgggagtctttcaaaccgctggatgctggaaacccaaagggggtaaaaccaaaggatctgaacccccctgttgcccaaca

SEQ ID NO: 357231 - DNA, 1375 bp, Homo Sapiens
  misc_feature (718)..(726): n is a, c, g, or t
  misc_feature (1107)..(1148): n is a, c, g, or t
  misc_feature (1167)..(1226): n is a, c, g, or t
  misc_feature (1230)..(1231): n is a, c, g, or t
  misc_feature (1238)..(1238): n is a, c, g, or t
  misc_feature (1240)..(1240): n is a, c, g, or t
  misc_feature (1250)..(1250): n is a, c, g, or t
  misc_feature (1252)..(1253): n is a, c, g, or t
  misc_feature (1262)..(1262): n is a, c, g, or t
  misc_feature (1267)..(1268): n is a, c, g, or t
  misc_feature (1277)..(1286): n is a, c, g, or t
  misc_feature (1304)..(1304): n is a, c, g, or t
  misc_feature (1310)..(1310): n is a, c, g, or t
  misc_feature (1318)..(1318): n is a, c, g, or t
  misc_feature (1325)..(1326): n is a, c, g, or t
  misc_feature (1329)..(1329): n is a, c, g, or t
  misc_feature (1337)..(1337): n is a, c, g, or t
  misc_feature (1344)..(1344): n is a, c, g, or t
  misc_feature (1351)..(1351): n is a, c, g, or t
  misc_feature (1358)..(1358): n is a, c, g, or t
  misc_feature (1366)..(1366): n is a, c, g, or t
aggttggaatgagacccccaacagtcacttcctgcatgctgtcccagcacccagggcacccaggtgtggagcaggtgcacctcagattggccccagttctgtaaaatcaagcaccctgtgcaaggaaagccgaaaaagggaatgcagtgtaaattcttgctttcctggggagggaggaaggaatgaggcagcgtcccccagtggcttataactcagaagctgcctggctcacccacctggtggagagagtagaaacaggtgccagggcaggagggggctggggcagcatccactgttatttcggcgcactggaaagtgtctgttcctggccaggcctgaggtcggcgagggtggctgaggctgttgtgcagtagggcactgggcctgtggagaacacctaccccagtccttcgctgacccccacctctgtttggtcccccatgacctcctcccaccctccccctgctccccaccattctcccttggcacagtgccttacacaagagtggtcataagggggtttgaactgagtcccactacctcgggggacacctctcctccccacttgttcaggcttctaaaccaggaggcctccattacctcttcctgtcccaaccctgcagaggcctgaagctgggcctgggcaccccattcactcccgttctcatttacatctgttttcctgttgtatatatcacctttgttgacaataaattannnnnnnnnattaagagttccgtctgggccatcattgggggaaagggtttgctagcaggatacctggccacctagagcaaccctgaggggcaggagggttggaagatggtcctggggggagccagggagccacctctcctgaaggtgggacagcaccagggcaggcctctgtggagcccaggaacgagggctgacttgtgctatcagtcacctgtgggcgtctcaccccctcccttcctctctgctctggaaagggggtcagaaacaattttctttaacattgtaccttctggctcacctggtaggcctctgcccaaaagaggtcactgtagaagcccaggggtgctcacaaccagggagctgggaattagcctgagcttgcttgcttgnnnnnnnnnnnnnnnnnnnnnnnnnnnnnnnnnnnnnnnnnngagacagagtttcattctnnnnnnnnnnnnnnnnnnnnnnnnnnnnnnnnnnnnnnnnnnnnnnnnnnnnnnnnnnnngttnnagtgatncnccgtcccagncnncccagtagncgggnntacaggtannnnnnnnnntgtccctgtcccgtctantttttntattttangtagagnnagngtttaccnatgaggntacggtnggtcccnaaaccccngaacccggg

SEQ ID NO: 357232 - DNA, 949 bp, Homo Sapiens
cacacacacacacatatttatacacatatatatctgcattttatatgagtgcctccatgtttggctttcaaaataagatacacaaaatattacattatacacatataacactgatatatgtataaataagtacttcaccaaaattgcattatttgatcttctcaaatccaaatgaaggatttacttttataatctccattttatttagtacgtaacttcattaaaattaatattgttcttaggaggggacaggacttgaaccacagtcctatgactccaaagaccacgacttaaaaaatcactaatatgacttcaataagtggctttgaaagaaaaacatggattcattaataaataatatatatcatttgagttgatataaatttgacaaatgtttttatacaatttcaaatttgtagaaaatccataatcattctaatagataatgtattaaagtttgagttaaaagttgaaaaattgaccatttctgtaatgatatactgtgattaccgtgcaagtaaggcaaaaaatcaaatagatatacaaaggcatacagagaagtacaatgaaagaatatcccaggtgtgttggaaaaggaccactgcaaagaccagaaggattattttgtaaatatgagctgaactataatatggtttctgtggaactgcacttggtctaacacaggggcatattaatgaggactccatgttcaacaaaacataacctcccaataacaacacagctgaggcaagagaaatttcagtatttacatacacatgttcaggaggtcaccacttcctgttcctcaaaactccctcaaagtctgtctctccccaaagaaacaagcatatacgccactctctacaaatttatcggagtaattaaaataaatataaaatacttttaaaagcttttatgtgtccctgaaaaaccacttaattcttaacat

SEQ ID NO: 357233 - DNA, 2684 bp, Homo Sapiens
  misc_feature (57)..(87): n is a, c, g, or t
  misc_feature (161)..(263): n is a, c, g, or t
  misc_feature (2661)..(2661): n is a, c, g, or t
  misc_feature (2666)..(2666): n is a, c, g, or t
ggaccggtccggaattcccgggatcttggcgaaggggggatcaggaagtgcggaccnnnnnnnnnnnnnnnnnnnnnnnnnnnnnnnagcccggagcgcaggccggaggctcccggcccgccggccccggagcggagcggagcggaggatgcagcagccgnnnnnnnnnnnnnnnnnnnnnnnnnnnnnnnnnnnnnnnnnnnnnnnnnnnnnnnnnnnnnnnnnnnnnnnnnnnnnnnnnnnnnnnnnnnnnnnnnnnnnnncctgcctgaggcgagagctgaagctgctcgagtccatcttccaccgcggccacgagcgcttccgcattgccagcgcctgcctggacgagctgagctgcgagttcctgctggctggggccggacgggccgccgcgggggccgcgcccggaccgcatctccccccacgggggtcggtgcctggggatcctgtccgcatccactgcaacatcacggagtcataccctgctgtgccccccatctggtcggtggagtctgatgaccctaacttggctgctgtcttggagaggctggtggacataaagaaagggaatactctgctattgcagcatctgaagaggatcatctccgacctgtgtaaactctataacctccctcagcatccagatgtggagatgctggatcaacccttgccagcagagcagtgcacacaggaagacgtgtcttcagaagatgaagatgaggagatgcctgaggacacagaagacttagatcactatgaaatgaaagaggaagagccagctgagggcaagaaatctgaagatgatggcattggaaaagaaaacttggccatcctagagaaaattaaaaagaaccagaggcaagattacttaaatggtgcagtgtctggctcggtgcaggccactgaccggctgatgaaggagctcagggatatataccgatcacagagtttcaaaggcggaaactatgcagtcgaactcgtgaatgacagtctgtatgattggaatgtcaaactcctcaaagttgaccaggacagcgctttgcacaacgatctccagatcctcaaagagaaagaaggagccgacttcattctacttaacttttcctttaaagataactttccctttgacccaccatttgtcagggttgtgtctccagtcctctctggagggtatgttctgggcggaggggccatctgcatggaacttctcaccaaacagggctggagcagtgcctactccatagagtcagtgatcatgcagatcagtgccacactggtgaaggggaaagcacgagtgcagtttggagccaacaaatctcaatacagtctgacaagagcacagcagtcctacaagtccttggtgcagatccacgaaaaaaacggctggtacacacccccaaaagaagacggctaaccctggagtatcacccttcctccctccccaggcaccactggaccaattacctttgaatgctgtatttggatctcacgctgcctctgtggttccctccctcatttttcctggacgtgatagctctgcctattgcaggacaatgatggctattctaaacgctaaggaaaaaaaacaaacacagaactgtttcaagtactcaagactgacttacagaccaaccaaccaccttgctggaacccttgctagcaggcattcttataaaagaaactttcgagcctccttatattgctggaaactcagctgtgctccagactagagcctccttacctatgctatggatttttaatttattttctcttatttcatgtacactgctttttttggttacagtgtatgatggatgtgtatgaaaaaaatgtatctttgggaaaacaattacagtttgttaatttgaagatgctggtcttgactcatctttatttttattcgcacatcccaccccatcccctggaactacttggggaggtggggaggggtacgagtccactgttgccttggtaggagatgagaggccgcattttgctgctaaagcaagagaaacttggagctgaagcacacacctgggctgcccccagatttctcctcaaggcctctggagcaaccagcacctgcccccttggaatgcagagcctggcctgccaaactacaatgtggtaggctgaaacgatggtgttaattcttaggaccgcttttctagtcacagatgttttcaaatttctaagaaaaagaaaatgaggctcaagaggctgcttcgtagaattccttttgaatgaattgagtggggatggggacacagtctccaagtgtgtatgtggtcttttctgatctcagctgtgtggctgcaactcttcgctgttcattggttcctctcctggaaagtggcttctaaccagcactggatggtgatcattggtaagctttgctcacctccctctctcttgcttcatttggctttatcaaaaagaacagacctagctctgaatttgtttggcttgggaaattatggattctttcaagccactcccacaaggtgggtcctactagaaagggttagcattttaaggggggttgttctatacacctgtgtccttaccccagggctcagggaactgccagggaggggaagatgaggttgggggagttctgtaactgaggatgggaactgttcagtgctgtgttgttangtaantgccgttgttaaaagttt

SEQ ID NO: 357234 - DNA, 1113 bp, Homo Sapiens
  misc_feature (675)..(778): n is a, c, g, or t
gggtggctgcaactcttcgctgttcattggttcctctcctggaaagtggcttctaaccagcactggatggtgatcattggtaagctttgctcacctccctctctcttgcttcatttggctttatcaaaaagaacagacctagctctgaatttgtttggcttgggaaattatggattctttcaagccactcccacaaggtgggtcctactagaaagggttagcattttaaggggggttgttctatacacctgtgtccttaccccaggctcaagaactgccagggagggaagatgacgtggggagtctgtactgagatggaactgtcagtgctgtgttgtatgtacttgctgttgtaaaagtttgggcatgactttgcatctagcgggtgctgcctgcatctctttgtctgtaagcttgctccgggaactcagcctcttaggacctaagatgccagtcagctctcattaacagtgaaaatgacataaggccaaaagattggccaatgttgaagaacccaaattcttcaataaaaaaccctaaacctttggggacaaacccggccctgggggtaaaactaagggaaatggccttagaaaacataagttttccctgggtaaaatggggcttttctgcgaaacaaacccactctactcccaaatttcttttttcaaaacnnnnnnnnnnnnnnnnnnnnnnnnnnnnnnnnnnnnnnnnnnnnnnnnnnnnnnnnnnnnnnnnnnnnnnnnnnnnnnnnnnnnnnnnnnnnnnnnnnnnnnnnagcgaaagaggagaaaacacttttctttaaaaaaaggagcgttttcttgccccgtcgcccatgtttttaaaacggagtggcgaaaattgggtaaaaaacaaaatcctcgcaaaccacaaatagtttcccatccccccatgcctctaatggttctctggggtcccccctctaacagcgctcataacaatccccactatacatacaaaaaatctctataatattatcatggggcggaggaatcgttacatatttcaaacaacgcatggggcctgtagagagtgtttttagaaaaaatatacaaaaaaaccggggtacacatacatagaagggggcgg

SEQ ID NO: 357235 - DNA, 670 bp, Homo Sapiens
  misc_feature (56)..(104): n is a, c, g, or t
  misc_feature (473)..(473): n is a, c, g, or t
  misc_feature (486)..(486): n is a, c, g, or t
gttttaaattatgtaaaatgtttacttattctgagcttagagagaatggggagggnnnnnnnnnnnnnnnnnnnnnnnnnnnnnnnnnnnnnnnnnnnnnnnnnaagattataggtattaggtttgtttttgtttttccacttatcttgagttcactttgatgttaaatctattgctacttcagttgtaaaaccagccaaaagtttctggatgaaggtcaagtttgaccttttaggagttattgtacataaaggcttcatccacgaaccatccagcgcacagaagcaagtgcaaaaatgacacaagcacaactctccagacgtggctccttctcctttctcagtgcagactctcactgaaagctgctattttcatcctccttgtggttgcttttcttgtttctcttccattgtacatgtgggttatatacccatatgttaaatatgcaataaagtgtttacaggatgcccttnctgaagggtagtncctttgtaaagctgtacagactttgcagtttaagacaatgtgcacatgttagttttatatacagcaaaacttgattttttgcagatggaaaggtattttgtttctatacaaagtaaatggattgtttgtgcttaatgtaaagccgctttataaaactgtaaaataaagtttttttcttaaaaaa

SEQ ID NO: 357236 - DNA, 957 bp, Homo Sapiens
  misc_feature (43)..(43): n is a, c, g, or t
  misc_feature (163)..(204): n is a, c, g, or t
gatctttgtcccgctcctgccaccccacgaagacagacgtganggtcaggggagccgcggtgctaactgccactctgggcgggcacaggcgagggctgtgcagcacccgggcacgtggggtcttcggaggggctgctccccacaccacttcccctgcccctgnnnnnnnnnnnnnnnnnnnnnnnnnnnnnnnnnnnnnnnnnngctgccctgggtgagagccaggagggacactgggcaggcagatgccaccccaggtgtggggacccccgctactgagtggccgggaggagcccacaggctccccacatgcagctgagcccagggttgtggtcgtgggtcgtgggtcaaggatggtggctggtgtggttgggggagaggctcaaggcccgcctgccaaccttgtcacctatgtgggggtgaggggagcccgccagaggccagagcccccactgtcccttcccaccctccagccaggctccaggccttctagggccagagtatctgagctttctctcgcttgccgggcctgtggtttgggggtttgtgtggagcctggtccaggagccctccttcctgatctgcactggctggcccttctgacagtccaggcccccgtgccctctgccaggaggtgccttgccactaggcatggcccgtcacgggtgggacatttgggttgaatgcacgtcaatggaggcaacatcattctgtctgaatgaatggagttttcaggctcccactgctcctctgtgtgaggattctgaacgtcttggttagtacagtgtttttctcttcggctagtagcacccaccctgaccgggtgctgggttaaggcgcccaaagctggtatgggagggcttccttccttatggtggtagcttgcgaattccctgactgttgtccctcaggcccctgctttgctccctttctgcagacaggcgtcccttgggaagt

SEQ ID NO: 357237 - DNA, 1562 bp, Homo Sapiens
  misc_feature (1370)..(1370): n is a, c, g, or t
tcagcatggaggacggcttctccagctacagcagcctgtacgacacgtcctcgctgctccagttctgcaacgatgacagcgcttctgctgcaagtagcatggaggtgacagaccgcattgcttcactggagcagagagtccagatgcaagaagacgacatccagctgctcaaatcagctctagctgatgtggttcggcggctgaacattactgaggaacagcaggccgtgcttaacaggaaaggacctaccaaagcaagaccactgatgcagaccctgcctttaagaaccacggtcaacaatggcactgtgttaccaaagaaacctactggctctctaccatccccctccggggtcaggaaagaaactgctgtgccagcaaccaaaagattaaacagatctgtgagtcttctcaatgcttgcaaactgaatagatcgacaccaagtaacatcaagaggaccagctcttctgaacgagtgtctcctgggggtgcgaagggaaagcaatggggattccagaggaaaccggaatcgcacaggctccaccagcagctcttccagtggcaaaaagaacagtgaaagcaaacccaaggagcctgtattcagtgcagaagaaggctatgtaaaaatgtttcttcgtggacgccctgttaccatgtacatgcccaaagatcaagtggattcttacagcttggaagcaaaagtagaacttccaaccaagagactcaagctggaatgggtctatgggtacaggggtcgagactgccgtaacaacctgtacttgcttccgacgggagagaccgtctacttcatcgcatccgtggtggtgttatacaacgtggaggagcaactgcagaggcattacgctggccacaacgatgacgtgaagtgcctagcagttcatcctgatcggatcacgatagcaacaggacaagttgcgggcacatcgaaggatggaaaacaattgcccccacatgtgcgcatctgggattctgtgacattgaatactctccacgtcattggaataggtttttttgaccgagcagtcacctgtattgcattctcaaaatctaatggaggaaccaatctctgtgctgtggatgactccaacgaccatgtgctctctgtatgggactggcagaaagaagaaaaactagcagatgtgaagtgctctaatgaagctgtgtttgctgcggatttccaccccacggacaccaacatcatagttacttgtggaaaatcacatctctacttttggacactagaaggaagctcccttaataagaaagcaaggattattcgagaaacaagaaaagcccaaagtttgtcctctgtgtgactttctctgaaaacggtgacaccattactggnagattcaagtgggcaacatcttagtatggggaaaaggtacaaatcgaataagctatgcagttcagggggcccatgaaggtggcatttttgcactttgtatgttaagagaggccacactgttgtcgggaggtgggaaaagaccgaagcttatttctttggagcgggaacttttcaaaacacttggtaaaacgg

SEQ ID NO: 357238 - DNA, 1191 bp, Homo Sapiens
  misc_feature (5)..(6): n is a, c, g, or t
  misc_feature (22)..(22): n is a, c, g, or t
  misc_feature (25)..(25): n is a, c, g, or t
  misc_feature (27)..(27): n is a, c, g, or t
  misc_feature (29)..(29): n is a, c, g, or t
  misc_feature (33)..(34): n is a, c, g, or t
  misc_feature (40)..(40): n is a, c, g, or t
  misc_feature (44)..(44): n is a, c, g, or t
  misc_feature (47)..(47): n is a, c, g, or t
  misc_feature (50)..(50): n is a, c, g, or t
  misc_feature (76)..(76): n is a, c, g, or t
  misc_feature (82)..(83): n is a, c, g, or t
  misc_feature (96)..(96): n is a, c, g, or t
  misc_feature (109)..(109): n is a, c, g, or t
  misc_feature (145)..(145): n is a, c, g, or t
  misc_feature (150)..(151): n is a, c, g, or t
  misc_feature (191)..(191): n is a, c, g, or t
  misc_feature (199)..(200): n is a, c, g, or t
  misc_feature (202)..(202): n is a, c, g, or t
  misc_feature (205)..(206): n is a, c, g, or t
  misc_feature (236)..(236): n is a, c, g, or t
  misc_feature (242)..(242): n is a, c, g, or t
  misc_feature (258)..(258): n is a, c, g, or t
  misc_feature (264)..(264): n is a, c, g, or t
  misc_feature (273)..(273): n is a, c, g, or t
  misc_feature (280)..(280): n is a, c, g, or t
  misc_feature (284)..(284): n is a, c, g, or t
  misc_feature (288)..(289): n is a, c, g, or t
  misc_feature (295)..(297): n is a, c, g, or t
  misc_feature (301)..(301): n is a, c, g, or t
  misc_feature (307)..(307): n is a, c, g, or t
  misc_feature (314)..(314): n is a, c, g, or t
  misc_feature (321)..(321): n is a, c, g, or t
  misc_feature (323)..(323): n is a, c, g, or t
  misc_feature (333)..(333): n is a, c, g, or t
  misc_feature (360)..(360): n is a, c, g, or t
  misc_feature (363)..(363): n is a, c, g, or t
  misc_feature (381)..(381): n is a, c, g, or t
  misc_feature (389)..(389): n is a, c, g, or t
  misc_feature (409)..(409): n is a, c, g, or t
  misc_feature (411)..(411): n is a, c, g, or t
  misc_feature (421)..(421): n is a, c, g, or t
  misc_feature (431)..(431): n is a, c, g, or t
  misc_feature (443)..(443): n is a, c, g, or t
  misc_feature (509)..(509): n is a, c, g, or t
  misc_feature (518)..(518): n is a, c, g, or t
  misc_feature (535)..(535): n is a, c, g, or t
  misc_feature (546)..(546): n is a, c, g, or t
  misc_feature (554)..(554): n is a, c, g, or t
  misc_feature (575)..(575): n is a, c, g, or t
  misc_feature (578)..(578): n is a, c, g, or t
  misc_feature (581)..(581): n is a, c, g, or t
  misc_feature (593)..(593): n is a, c, g, or t
taaannaggattacgctccctnctnangntggnnaccagntttntcngtnccctcatcttcctcctctgcaatgancacctnnttcagggtacgtnctcgaagtttgcnctccactaaaaccttgcacgtactggaaggaagtanacttnntccacgtagcgacccctcaggaacaaaactatatactctncgtccaannanagnncgtgggcttggcacaggttccgtgcttccntgagtncatccagggccaagangttgancatgaagcncagaggnaagntttnntttttnnnggtnttaaangtacganttaagtngnctaggttttnttggcgggtatggtccatatggtattntanagtgtaatttggtaggtngggtaggntttggtgcagacggaacatntnggcagcattnttctcttggnaggtagcatctnttgccaaggttttgttgaggggcgggcaggcgcgcagggtagcaggtagctgtagattcttatgtngggtttccntcgagctcaggttatanagcagaaagangccctggnaggtgggttggtgggggtgcngcnggngccccgcgcgtngagcgccgcagcgagccgaagccctcctgcacctgggcctgcagcagcaccgggtccgcgggtccccgcgccgcgtcggggcccgagccgcgccactacggccagcagcgtggccagcgccgcctccagcaccaccgctgcctcggcgtcgcccgctccctgcagcgccaggtccaggcgcacagctcgcaagcggtctgccacgaagctggccacctcggcgcgggcgatgtcggcgctctccgccacctcaccggccaggtagcgcacggtggccagcagcacggagggcggacgcaactggctgggcgggggccggggcttgccggcggcgggtcggctgtactccttcaccgcgcgctgcggatccgcgcggggcgggtcctggcggcaacccggcaccacctccaagcggtgcaggcggtgctccctttcgcgctgggcgcgctcggcggccgggcacatgtccgggcaggtgcccacgggcagctcgcagccgggcatgagggggctgcggggagcctcgtcccgaattcgccacccaggcctcgctacgtaggaaatatataggctattgggaaagggggggaggggatgg

SEQ ID NO: 357239 - DNA, 1547 bp, Homo Sapiens
accggtgtatcatgggagcggcccgggctacacgttaaaaacactaaggggagcgcgcgaagctgaacttggcgctcgatgggggccgttagccgccctagagcgcgcggagccgcagaggcgtagctggactacaacgcagtgcatctcgggaggccaactcgactggactgggtgagaggacagaggtggctcgatgggcggcccgaaggccggggatcatggcgggaaggcgggcccagccaggttcagccccgccccgacccgccgctccccacccccggccggcctcgcgtgccttcccgcagcactgccgtccccgggatgctgagcgcccaccgtctccccgcagccccctcatgcccggctgcgagctgcccgtgggcacctgcccggacatgtgcccggccgccgagcgcgcccagcgcgaaagggagcaccgcctgcaccgcttggaggtggtgccgggttgccgccaggacccgccccgcgcggatccgcagcgcgcggtgaaggagtacagccgacccgccgccggcaagccccggcccccgcccagccagttgcgtccgccctccgtgctgctggccaccgtgcgctacctggccggtgaggtggctggagagcgccgacatcgcctgcgccgaggtggccagcttcgtggcagaccgcttgctgagctgtgcgcctggacctggcgctgcagggagcgggcgacgccgaggcagcggtggtgctggaggcggcgctggccacgctgctggccgtagtggcgcggctcgggcccgacgcggcgcggggacccgcggacccggtgctgctgcaggcccaggtgcaggaaggcttcggctcgctgcggcgctgctacgcgcggggcgcccgggccgcacccccgcaaacccgccttccagggcctctttctgctctataacctgggctcggtggaagccctgcatgaggttctacagctgcctgctgcccttgcgcgcctgcccgcccctccgcaaggccttggcggtagatgctgccttccgagagggcaatgctgcccgcctgttccgtctgctccagaccctgccctacctgccaagttgcgctgtgcagtgccatgtgggccatgcccgccgggaagccctggcccgcttcgctcgtgcctttagcacccccaagggccagaccttgcctctgggcttcatggtcaacctcttggccctggatggactcagggaagcacgggacctgtgccaggcccacgggctgcccttggacggagaggagagagttgtgttcctgaggggtcgctacgtggaggaagggctaccgcctgccagtacgtgcaaggtgttagtggagagcaaacttcgaggacgtaccctggaggaggtggtcatggcagaggaggaagatgagggcacggacagacctgggtccccagcctgaggagggagcgtgagcctcccagagccccaggactgggccagagcacttaggtttctttttccatggtttccaggtaataaaaggaacttgttttgttggtaaaaaaa

SEQ ID NO: 357240 - DNA, 1571 bp, Homo Sapiens
  misc_feature (1509)..(1509): n is a, c, g, or t
cccgggatctttgagcagtgtgaccgctaccagctgcagctgctggcacatgatgggcctcatgagggccgtgccaacctcacagtgcttgtggaggatgtcaatgacaatgcacctgccttctcacagagcctctaccaggtaatgctgcttgagcacacacccccaggcagtgccattctctccgtctctgccactgatcgggactcaggtgccaacggtcacatttcctaccacctggcttcccctgccgatggcttcagtgttgaccccaacaatgggaccctgttcacaatagtgggaacagtggccttgggccatgacgggtcaggagcagtggatgtggtgctggaagcacgagaccacggggctccaggccgggcagcacgagccacagtgcacgtgcagctgcaggaccagaacgaccacgccccgagcttcacattgtcacactaccgtgtggctgtgactgaagacctgccccctggctccactctgctcaccctggaggctacagatgctgatggaagccgcagccatgccgctgtggactacagcatcatcagtggcactggggccgagtcttccagctggaacccaggctggctgaggctggggagagtgctggaccaggcccccgggcactgggctgcctggtgttgcttgaacctctagactttgaaagcctgacacagtacaatctaacagtggctgcagctgaccgtgggcagccaccccaaagctcagtcgtgccagtcactgtcactgtactagatgtcaatgacaacccacctgtctttacccgagcatcctaccgtgtgacagtacctgaggacacacctgttggagctgagctgctgcatgtagaggcctctgacgctgaccctggccctccatggcctcgtgcgtttcactgtcagctcaggcgacccatcagggctctttgagctggatgagagctcaggcaccttgcgactggcccatgccctggactgtgagacccaggctcgacatcagcttgtagtacaggctgctgaccctgctggtgcacactttgctttggcaccagtgacaattgaggtccaggatgtgaatgatcatggcccagccttcccactgaacttactcagcaccagcgtggccgagaatcagcctccaggcactctcgtgaccactctgcatgcaatcgacggggatgctggggcttttgggaggctccgttacagcctgttggaggctgggccaggacctgagggccgtgaggcatttgcactgaacagctcaacaggggagttgcgtgcgcgagtgccctttgactatgagcacacagaaagcttccggctgctggtgggtgctgctgatgctgggaatctctcagcctctgtcactgtgtcggtgctagtgactggagaggatgagtatgaccctgtatttctggcaccagctttccacttccaagtgccccgaagtgcccggcgtggccacagcttgggtcacgtgcaggccacnagatgagatgggggtgccgatggcctgggtctgtattccctgccacctcttcccctattttg

SEQ ID NO: 357241 - DNA, 1434 bp, Homo Sapiens
aaaactaaaacccatagggccaaaggcccaaacctgaggaaaccttatttattgcttaatccaacataggctatgaaagttttgagtttcctcttgtgtattagaatttcattcctatttgttgtagagagtatagtacggggaatcagtaaattaaatgaagtaaactaaagattacaccttttctgctggtactaagcgaaaagcaaaaccagtggctgtctattatctcctgtgttttagacagtcaagtgttgagcacttgctcttattcctttattctctaggggaagcaagcacttatttggctacttggtgtccatggggaaagaattcctaatgctccttatgtgttagaggactttgttgagaatgtgaagtcggaaacatttccagctgttaagatggagctgctcactgctttgctgcgccttttcctctcccgacctgctgagtgccaggacatgctaggacgtttgttgtattactgcataggtgggtttttcagaaggaaatagtatttgccatgacccatagtaaaaattcttaatagctttcattgtttggtgagtcacgtctgggacccgagaagaaaatgtgaatgcttcctaggttttcctctctccttcatttttttctcctattatggttggcacaagagtaggaggaaagtggttttgtttttaatgaagtcaatctgttgtcttacctcagaggaagaaaaagatatggctgtacgggaccgaggtctcttctattatcgcctcctcttagttggcattgatgaagttaagcggattctgtgtagccctaaatctgaccctactcttggacttttggaggatccggcagaaagacctgtgaatagctgggcctcagacttcaacacactggtgccagtgtatggcaaagcccactgggcaactatctctaaatgccagggggcagagcgttgtgacccaaagcttcctaaaacttcatcctttgccgcatcaggaccccttgattcctgaagagaacaaggagagggtacaagaactccctgattctggagccctcatgctagtccccaatcgccagcttactgctgattattttgagaaaacttggcttagccttaaagttgctcatcagcaagtgttgccttggcggggagaattccatcctgacaccctccagatggctcttcaagtagtgaacatccagaccatcgcaatgagtagggctgggtctcggccatggaaagcatacctcagtgctcaggatgatactggctgtctgttcttaacagaactgctattggagcctggaaactcagaaatgcagatctctgtgaaacaaaatgaagcaagaacggagacgctgaatagttttatttctgtattagaaactgtgattggaacaattgaagaaataaaatcataacagagtctt

SEQ ID NO: 357242 - DNA, 935 bp, Homo Sapiens
ggaagtgacgggcagtcgtgaactgtctgggacagatagcacaagtcagagtttgagcaaaactagggtgctaccggcgctatgttgaaattgtctggaggcgggctttcccagcgagtctctcattcagcatctggaaaaagtgtaaccagaatggaggtgtctgactctcctgtgctctctcagcgccgagctctagctgcaggctgcctgggtggccttctcacaccctcccgtgcaggagactgcatttctctttcccacagcccagcagatagctcattggcttagcaatgggcacttaacagaatccagttgttgcagccagaattaaatgcaccagtctggcttaaaccaactggaactcatccctggggtgaaggtggctgggaattagacaagagtgtgtgttagccaaaaggcacatgcatgctgtcagcaggagaatgaggagcactggttctgggcaggcagtggcaggggctccctcaggcccctgattcccagcccacagctctttctactctgcagacagagttccttggagactggccctgcattcaggcagggagcagaggggtccctgcctgcagcacccagagctgaacctgaagctacaaagatgggctgatgaggtggcccatgaggtgtcagcaacatcccaaccccctgggtctccccagtgagtcagggcactgatttgctatagctggagctacatgcacctctcctcccctcagccaccttttaggggagaaaggagggcagatttgtaacctctggttctctgcagggatcctgggctggaagaaagttcataaatggatgaatgccttttaaaactccagcttttccaagcatcattcaccaaagcatttggttaggcttagagagaaaagctggatatgagaaaataggctgtcaaataggagggg

SEQ ID NO: 357243 - DNA, 1065 bp, Homo Sapiens
caaggctcctctgctcacggctgcgtggataaaacccaaagggaatccagaatcaagctcggcctcgcaggagtttataagcttttgtacttttccctcccttgtaacgaaaagctaatcgcaaacgtttctaggaacacatttttctcctgatagacgttcccaaggtggagggcgcgagaagactggcccgtggggtgaggagccccggcccgacctcagcggcgccacaaagccatgaagaggggaaataattttccaaggggctaagagttggactttctgaagccatcgaaacctgctgctaggctctcccgctggggttttgagagaggtaggtgaggagggatcaaacatctccacccgctcttgaaagaaccgccttgagctgcgcccaacttctgcaatcccggttttccccaagttcaaggggaagggccctggcgcccaatgcccagcctccccgacaacatcctcgccagggtgcgcctgccccgcgggtccgctgtccccggcgggcggccctgggttcgaggacccggcttcccggaggcgcgactctccagcaaacaagcggagccccagaaaaaacaccgacgcgaagggggtggacagagggtggggaagccgcggggttgtcgcccacccggaggcggaatgtaacgcgctgtgggaaacgtggcaggagccctgaggcggcgtctttttcctcaggcgcccgccgagggtcccgcggaaagcctcgcgggccgccctcgcggccgaagcccccgctctggcgccgagccggagcccatgcaacctggttccaacccctaaccctcccctgtccccggtgcgccgcccgcaagcgagccttcgacgtggccgcaggggcgacgggaccaccctcccccgatacccacagccccgccatgtttgcctttccccggcccggtcttctcaccgccgctgcggccggcgctctttgggcggagatttggggggccagaccgtgtcttggccgggaactgaggggtcggcttaaaggggccgggctgggaacagggagcgaagggcccttgt

SEQ ID NO: 357244 - DNA, 1796 bp, Homo Sapiens
  misc_feature (65)..(65): n is a, c, g, or t
  misc_feature (96)..(96): n is a, c, g, or t
  misc_feature (168)..(168): n is a, c, g, or t
  misc_feature (183)..(219): n is a, c, g, or t
  misc_feature (243)..(362): n is a, c, g, or t
  misc_feature (370)..(384): n is a, c, g, or t
  misc_feature (453)..(453): n is a, c, g, or t
  misc_feature (464)..(464): n is a, c, g, or t
  misc_feature (490)..(490): n is a, c, g, or t
  misc_feature (497)..(497): n is a, c, g, or t
  misc_feature (509)..(509): n is a, c, g, or t
  misc_feature (523)..(523): n is a, c, g, or t
  misc_feature (1072)..(1072): n is a, c, g, or t
  misc_feature (1153)..(1153): n is a, c, g, or t
  misc_feature (1333)..(1333): n is a, c, g, or t
  misc_feature (1336)..(1336): n is a, c, g, or t
  misc_feature (1340)..(1341): n is a, c, g, or t
  misc_feature (1346)..(1346): n is a, c, g, or t
  misc_feature (1359)..(1359): n is a, c, g, or t
  misc_feature (1366)..(1366): n is a, c, g, or t
  misc_feature (1369)..(1369): n is a, c, g, or t
  misc_feature (1387)..(1387): n is a, c, g, or t
  misc_feature (1403)..(1403): n is a, c, g, or t
  misc_feature (1427)..(1427): n is a, c, g, or t
  misc_feature (1429)..(1431): n is a, c, g, or t
  misc_feature (1438)..(1438): n is a, c, g, or t
  misc_feature (1443)..(1443): n is a, c, g, or t
  misc_feature (1445)..(1445): n is a, c, g, or t
  misc_feature (1461)..(1461): n is a, c, g, or t
  misc_feature (1463)..(1464): n is a, c, g, or t
  misc_feature (1484)..(1484): n is a, c, g, or t
  misc_feature (1486)..(1487): n is a, c, g, or t
  misc_feature (1491)..(1491): n is a, c, g, or t
  misc_feature (1496)..(1496): n is a, c, g, or t
  misc_feature (1512)..(1512): n is a, c, g, or t
  misc_feature (1516)..(1516): n is a, c, g, or t
  misc_feature (1521)..(1521): n is a, c, g, or t
  misc_feature (1526)..(1526): n is a, c, g, or t
  misc_feature (1541)..(1574): n is a, c, g, or t
  misc_feature (1576)..(1576): n is a, c, g, or t
  misc_feature (1581)..(1581): n is a, c, g, or t
  misc_feature (1583)..(1583): n is a, c, g, or t
  misc_feature (1585)..(1585): n is a, c, g, or t
  misc_feature (1606)..(1606): n is a, c, g, or t
  misc_feature (1627)..(1635): n is a, c, g, or t
  misc_feature (1640)..(1640): n is a, c, g, or t
  misc_feature (1642)..(1642): n is a, c, g, or t
  misc_feature (1652)..(1652): n is a, c, g, or t
  misc_feature (1657)..(1657): n is a, c, g, or t
  misc_feature (1682)..(1682): n is a, c, g, or t
  misc_feature (1697)..(1697): n is a, c, g, or t
  misc_feature (1699)..(1699): n is a, c, g, or t
  misc_feature (1701)..(1701): n is a, c, g, or t
  misc_feature (1703)..(1703): n is a, c, g, or t
  misc_feature (1716)..(1716): n is a, c, g, or t
  misc_feature (1785)..(1785): n is a, c, g, or t
gcacgatcaagtgaatgaaaatcaagagaaagaatgagtaacagaaagaacttgaggtgatccanatattggaactcttagataggcttttaaaanaaccgatttatgagtttaaggaaacagatgaagagatagagagttttaccagagaactggaatctataaaanagaatcaaatgaacnnnnnnnnnnnnnnnnnnnnnnnnnnnnnnnnnnnnngagatggagtttcactcttgtcannnnnnnnnnnnnnnnnnnnnnnnnnnnnnnnnnnnnnnnnnnnnnnnnnnnnnnnnnnnnnnnnnnnnnnnnnnnnnnnnnnnnnnnnnnnnnnnnnnnnnnnnnnnnnnnnnnnnnnncagctaannnnnnnnnnnnnnngtacttttagtagagacggggtttcgtcatgttggccaggctggtctcgaactcctgacctcaggagancctcccaaagngctgggattataggcgtgagcatggngcctggncaaatgaaaatnttaggactaaaaanacattagcttgagttacaaactcccaagcatgtgtttcacaaccactcaacacggaaaagatttgtgaattagaggactgatcagtaagaaatatctacagtcaagcaccgacaaatgaaagcatgaaaaaaatacagtgtagtggagacacaggacataatagaggggttaagacacatacaattgggttatactaagagaaaagagagggctaggagtgtcataagtgctaaaagtcaaggacagcaaaaaaaatctttaattgctagagaaaaaagatactaggttaagaggaataataagattggcagccgatttctcaatagataacaaaaagaggatttgtcaccagcaggcccattctgaaagaaaaaggaagttctcgtcgcagaaagaaaataataccaaagggaaacaaaatttcaagaaggaataaagaacagtggaagagtaaatatgaagaccaagagcagtgatgaccttttagctggaatggccagaggggtaacggtgactaatggtgttaaagggaaggaaagctcctgccnatctgcagcacttcggcatctgcccctgccatgaccactgtggagaacaaatccaagattagcacaggtatgggtgacatncaggctgagacttcaactgcttttttgtttgaataggcagcgatgcattgcgctgtttacagtgtaccatctcattataggaaattgtagacatacaaaagtagatggattgatatttcagcccaatacgctcatcacgctcatcaccattatcagctcacagccagttgtaactctgtnacncccnnccccnccccctattattntgaagcngantctggacatcatatcatntcacccataaatattntattatcctggaaagagaaggacncnnncaaaaanataancntaataccattatcagncnntaaaataattgataatcatncnntaantcatncgttattcaatgagtntttnttatntcttncagtcttataaatannnnnnnnnnnnnnnnnnnnnnnnnnnnnnnnnngntcagnantnccataggtccatatataattngctgatgtgtttcttaaatcnnnnnnnnnaaatntntgggtttaantcatnttcttgcagtttaatttttgtggangctggtcacgtgacntntngngtttctgagcatntggatttttatatcacaatatccccatgacgtttttgcccatcaccctttgttgtgtgtatttattgtntttggctttgg

SEQ ID NO: 357245 - DNA, 1695 bp, Homo Sapiens
  misc_feature (1646)..(1646): n is a, c, g, or t
  misc_feature (1655)..(1655): n is a, c, g, or t
  misc_feature (1676)..(1676): n is a, c, g, or t
gatgaaaaagcttcgaactatacttcaagttcagtatgtattgcagaacttgacacaggagcacgtacaaaaagacttcaaagggggtttgaatggtgcagtgtatttgccttcaaaagaacttgactacctcattaagttttcaaaactgacctgccctgaaagaaatgaaagtctgagagtctctaatggaatttgcccagccagagatacaaccacaagagtttcttaacagacgctatatgacagaagtagattattcaaacaaacaaggcgaagagcaaccttgggaagcagattatgctagaaaaccaaatctcccaaaacgttgggatatgcttactgaaccagatggtcaagagaagaaacaggagtcctttaagtcctgggaggcttctggtaagcaccaggaggtatccaagcctgcagtttccttagaacagaggaaacaagacacctcaaaactcaggtctactctgccggaagagcagaagaagcaggagatctccaaatccaagccatctcctagccagtggaagcaagatacacctaaatccaaagcagggtatgttcaagaggaacaaaagaaacaggagacaccaaagctgtggccagttcagctgcagaaagaacaagatccaaagaagcaaactccaaagtcttggacaccttccatgcagagcgaacagaacaccaccaagtcatggaccactcccatgtgtgaagaacaggattcaaaacagccagagactccaaaatcctgggaaaacaatgttgagagtcaaaaacactctttaacatcacagtcacagatttctccaagtcctggggagtagctacagcaagcctcataccaaatgaccagctgctgcccaggaagttgaacacagaacccaaagatgtgcctaagcctgtgcatcagcctgtaggttcttcctctacccttccgaagatccagtattgaggaaagaaaaactgcaggatctgatgactcagattcaaggaacttgtaactttatgcaagagtctgttcttgactttgacaaaccttcaagtgcaattccaacgtcacaaccgccttcagctactccaggtagccccgtagcatctaaagaacaaaatctgtccagtcaaagtgattttctttcaagagccgttacaggcagcaattcccccaggcaagcaaccgtcttcactagcttctccaaatcctcccatggcaaagggctctgaacagggcttccagtcacctccagcaagtagtagttcagtaaccattaacacagcaccctttcaagccatgcagacagtatttaacgttaatgcacctctgcctccacgaaaagaacaagaaataaaagaatccccttattcacctggctacaatcaaagttttaccacagcaagtacacaaacaccaccccagtgccaactgccatctatacatgtagaacaaactgtccattctcaagagactggtaagatctttgcatatgatatttggaagacttagagggacagccaattgaatggacagcaagtctaggaagtctgtagtgacactttagaagtattttcctgaccagtaagcaatatttctttacatgttcctccagtggttgagaaaaacctaagcccttttttgnggttaggtnacctataattttaatttttgnagagatagaacttagatga

SEQ ID NO: 357246 - DNA, 497 bp, Homo Sapiens
  misc_feature (341)..(341): n is a, c, g, or t
  misc_feature (426)..(426): n is a, c, g, or t
  misc_feature (455)..(455): n is a, c, g, or t
  misc_feature (461)..(461): n is a, c, g, or t
  misc_feature (472)..(472): n is a, c, g, or t
  misc_feature (481)..(481): n is a, c, g, or t
gggcttccagtcacctccagcaagtagtagttcagtaaccattaacacagcaccctttcaagccatgcagacagtatttaacgttaatgcacctctgcctccacgaaaagaacaagaaataaaagaatccccttattcacctggctacaatcaaagttttaccacagcaagtacacaaacaccaccccagtgccaactgccatctatacatgtaggaacaaactgtccattctcaagagactgcaaattatcatcctgatgggaactattcaagtaaggcaatgggtaggccttgccttttacccaggcacaggacggaatgtattttcccaggaccttantcaggccattttgttcaataggccgggggatctgtttaggaggggtggtacttcgtgggtgggggaggatttattaacccatttncctattcgggtccccgggggtggggtttnttaaangggtttttggntactttttngggggggtttcccttt

SEQ ID NO: 357247 - DNA, 877 bp, Homo Sapiens
  misc_feature (66)..(66): n is a, c, g, or t
ggggggccaaacttaggctaggtacgaggctgggtggtgaatcggcacgaggccagcatctgcganggatgactggaattccggggagaggttcacgtgcaccgtgacccacacagacctgccctcgccactgaagcagaccatctcccggcccaagggggtggccctgcacaggcccgatgtctacttgctgccaccagcccgggagcagctgaacctgcgggagtcggccaccatcacgtgcctggtgacgggcttctctcccgcggacgtcttcgtgcagtggatgcagagggggcagcccttgtccccggagaagtatgtgaccagcgccccaatgcctgagccccaggcccaaggccggtacttcgcccacagcatcctgaccgtgtccgaagaggaatggaacacgggggagacctacacctgcgtggtggcccatgaggccctgcccaacagggtcaccgagaggaccgtggacaagtccaccgagggggaggtgagcgccgacgaggagggctttgagaacctgtgggccaccgcctccaccttcatcgtcctcttcctcctgagcctcttctacagtaccaccgtcaccttgttcaaggtgaaatgatcccaacagaagaacatcggagaccagagagaggaactcaaaggggcgcagcctccgggtctggggtcctggcctgcgtggcctgttggcacgtgtttctcttccccgcccggcctccagttgtgtgctctcacacaggcttccttctcgaccggcaggggctggctggcttgcaggccacgaggtgggctctaccccacactgctttgctgtgtatacgcttgttgccctgaaataaatatgcacattttatccatgaaa

SEQ ID NO: 357248 - DNA, 443 bp, Homo Sapiens
  misc_feature (116)..(116): n is a, c, g, or t
tgcctggtgacgggcttctctcccgcggacgtcttcgtgcaagtggatgcagagggggcaagcccttgtccccggagaagtatgtgaccagcgccccaatgcctgagcccccaagnccccaggccggtacttcgccccacagcatcctgaccgtgtcccgaaagaggaatggaacacgggggagacctacacctgcgtggtggcccatgaggccctgcccaacagggtcaccgagaggaccgtggacaagtccaccggtaaacccaccctgtacaacgtgtccctggtcatgtccgacacagctggcacctgctactgaccctgctggcctgcccacaggctcggggcggctggccgctctgtgtgtgcatgcaaactaaccgtgtcaacggggtgagatgttgcatcttataaaattagaaataaaaagatccattcaaaag

SEQ ID NO: 357249 - DNA, 1754 bp, Homo Sapiens
  misc_feature (35)..(36): n is a, c, g, or t
  misc_feature (68)..(68): n is a, c, g, or t
  misc_feature (79)..(79): n is a, c, g, or t
  misc_feature (96)..(96): n is a, c, g, or t
  misc_feature (1214)..(1214): n is a, c, g, or t
  misc_feature (1223)..(1223): n is a, c, g, or t
  misc_feature (1279)..(1279): n is a, c, g, or t
  misc_feature (1305)..(1305): n is a, c, g, or t
  misc_feature (1309)..(1309): n is a, c, g, or t
  misc_feature (1313)..(1313): n is a, c, g, or t
  misc_feature (1321)..(1321): n is a, c, g, or t
  misc_feature (1326)..(1326): n is a, c, g, or t
  misc_feature (1334)..(1334): n is a, c, g, or t
  misc_feature (1370)..(1370): n is a, c, g, or t
  misc_feature (1419)..(1419): n is a, c, g, or t
  misc_feature (1456)..(1456): n is a, c, g, or t
  misc_feature (1473)..(1473): n is a, c, g, or t
  misc_feature (1478)..(1478): n is a, c, g, or t
  misc_feature (1482)..(1482): n is a, c, g, or t
  misc_feature (1508)..(1508): n is a, c, g, or t
  misc_feature (1518)..(1519): n is a, c, g, or t
  misc_feature (1521)..(1521): n is a, c, g, or t
  misc_feature (1524)..(1524): n is a, c, g, or t
  misc_feature (1534)..(1534): n is a, c, g, or t
  misc_feature (1559)..(1559): n is a, c, g, or t
  misc_feature (1566)..(1566): n is a, c, g, or t
  misc_feature (1568)..(1568): n is a, c, g, or t
  misc_feature (1614)..(1614): n is a, c, g, or t
  misc_feature (1622)..(1622): n is a, c, g, or t
  misc_feature (1654)..(1654): n is a, c, g, or t
gcaggagctggggctgcctccttcccaaacactgnnggctcctgttgacacagacttgaaaattctgngcgctcatggncatattagcatactacnaattatctaaaggggctgtaaaatatcactgagaagataagctttcacatgccctttgaagagtcacatcctattctgagaacccccattgtctgagccagcccatggggagcacaggcttcaggttctaagctcggtggtctgggaagtcccgggaagagaagaactgagccacggtcccaggaagagaaaaacagatagtggccaggctccatgtgtgccgcgccctgctctcctcatctcccatggatccatgttcctgatcctcacagctctagtcgtattctccactttctgcagatgggatttaaacccaggtcttctgggtccagcgttcctgctcttaatcatccaggcctaaggacacgggttgaaagtcattcactgctgcctctggaggttgagttgttttaaagtgctgcgatctactaagtcttcagaaattagttgatccaaccgtaatcttctgagcacatgagctttcttttcttgaagactcattacactttccttcagcttgttctcggcaggatgagtgactgcccgtcctggaggcctcctcagaagcctcatacctggctctccgatggagcccacggttcttctgtacttcctccctatggttcctgggcctggagtgtgggctggacagggcaaggcctggattgtgttcattaaacaagaagataagctcatggttaccacagggatgttctgtttgtgcccctgctagggttttgcttggctttggaagcctttcatgtgccccgaatgctataaacccttgcaataaatgtgaagtgtatatagtttctgctacttatgggaggcattgagggagttaagcacagtggcttttgtgtctgcagatttgagctgaaattccagttctgcagcatagggcttaacaggttcactccccttccccatcctctcatcccccagggccttactctctcttccttccacctggatagatgccctttctcatcttcacacagacagaacactggcttgttctgaagagctcgccctgctgaattcttcttccatgaagtcagaaagcccacttcacttataggatgagaacatggattaaaaatcagacaaatctgggntcataccgnccttttgctagctagacaatgattggagtttgtcagttcccttgagaaaaaaaggnataatgatattcctaccttttaaggntatngcanacattagnaaaanataaacanaaaattattagtagagatttgatgagtagccagtgntcagtaataactaggcaattcttgattgtgtctgaatgagtttgtgagngcatatgagagtgtgtgtatgtgagtgttatgcgagntcacacatgtgtctggnaaagngcanatattcatatagcagcacaggttggnggaaataatnncnttnaacttatatnctattgaacctcccagaactgagtnactggcntntctcacttttgacttctaatattgcgttggttaagagtgccttctntctccccnactctacagatattcagaagtaactgtgaagnaattgtggatgggatccatgtctacttggtatgtttgtctcctgagcatctgttgccagtgtaatttcatgacaatcatcaatatgtattgaaaaaaaca

SEQ ID NO: 357250 - DNA, 712 bp, Homo Sapiens
agcatggttccgacctttccactaatagactcaagttcccaaaaccagattagaaaacgcatcgtacttaaaaaggtgagtaaagtgttgcctgggcttatggttcctcttcaaatagcattgggagatatttacacacgacttaaaaatcttgttcgaactttcaggttaacaaatagaaatattatacacaaacctgcggaatggactttaattgctatggtgttgctgtcattactgaccccaattcttggcattcagaaacattctcaggaaggtatggtgtttacacggtttctagacaccctccttgaagaattacatctaaaaaatgaagaccttgaaagtctaaccatcatatttagaaccagctgtttaccagagtgatatattccatgaagacaaaatagaagatgaacttctattcaccgtttctggaattctagccgccatgatggtctgggtggtgactgataactagttttattcccaagacatacctttaccctctttaagtttcaatctcccatctcccagtccttcagtccccaactgcagaggatgacctccccagatagaggagaatcattactccaacaagaataaccaagtctttgtatccctagtacaagacatagtatttttattcgaaaatgaatgtttaagtattaaattgaaacttgaatgaatattcaagaaaatataatgatcc

SEQ ID NO: 357251 - DNA, 520 bp, Homo Sapiens
  misc_feature (28)..(28): n is a, c, g, or t
  misc_feature (33)..(33): n is a, c, g, or t
  misc_feature (76)..(76): n is a, c, g, or t
  misc_feature (83)..(83): n is a, c, g, or t
  misc_feature (132)..(132): n is a, c, g, or t
  misc_feature (151)..(151): n is a, c, g, or t
aatgaatgtgtgatgttacctgtgcatntgtcntcttgtctttccagaaggaccttagttctctgctgttatcctnccaaggncctgggccgagcctctacctgaagcaactctgctcttcctgtaagtctnaaagcacaaggaggttcancccaggaggaagccagctgcaatgtggagacacgtcctcctccccaacccacctcatgccaccgccaaccccctgccccaggagcgggcctgagccacgtcccctaggagcagctggagatggccaaaagagtgagctcaggactactggatcccatgcccaggtgtccagcagacctcaaggcagaagggtcacctaacccaggagtccacagactgatgtgacctcaggttcccacatcagtggccacagggcagggcccacctggtagaagtgttctggatatggccagggtgggtgtgtggctaagtgggcctgaacagagggaacctagggcccttggccaatgtgattaaagctgccatcttg

SEQ ID NO: 357252 - DNA, 1554 bp, Homo Sapiens
aacaggacaagcaaggacagaagattgtccccagctacggaaaacaagctccggctgcattaccgtagggccctcaggaacaatacagatccctacaagcgggccgtgtactgtatcattggcagatgtgacgtcaccgacaaccagagtgaagtggcggacaaaactgaggattacctgtggctgaagttgaaccaagtgtgttttgacgacgatggcaccagctccccacaagacaggctcactctctcacagttccagaagcagttgttggaagactatggcgagtcccactttacggtgaaccagcaacccttcctctacttccaagtcctgttcctgacagcgcagtttgaagcagcagttgcctttcttttccgcatggagcggctgcgctgccatgctgtccatgtagcactggtgctgtttgagctgaagctgcttttaaagtcctctggacagagtgctcagctcctcagccacgagcctggtgaccctccttgcttgcggcggctgaacttcgtgcggctcctcatgctgtacacccggaagtttgagtccacggacccaagggaggccctccagtacttctatttcctcagggatgagaaagatagtcaaggagaaaacatgtttctgcgctgtgtgagtgagcttgtgattgaaagccgagagttcgatatgattcttgggaaactagagaatgacggaagtagaaagcctggagtcatagataagtttactagtgacacaaagcctattatcaacaaagttgcttctgtggcagaaaataaaggactgtttgaagaggcagcaaagctgtatgaccttgccaagaatgctgacaaggtactggagctgatgaacaaactgctgagccctgtcgtcccccagatcagtgccccgcaatccaacaaggagaggctgaagaacatggcactctccattgccgaacggtatagggctcaaggaataagcgcaaataaatttgtggactccacgttctatcttcttttggacttgatcaccttttttgacgagtatcatagtggtcatattgatagagcttttgatatcattgagcgcttgaagctggtgcccctgaatcaggaaagtgtggaagagagagtggctgccttcagaaatttcagtgatgaaatcaggcacaacctctcagaagtgcttcttgccaccatgaacatcttgttcacacagtttaagaggctcaaggggacaagtccatcctcgtcatccaggccccagcgagtcatcgaggaccgcgactctcaactccgaagtcaagcccgcactctgattacctttgctggaatgataccataccgaacgtctggggacaccaatgcgaggctggtgcagatggaggtcctcatgaattaagtgccatgctttgtgggagtctgggtcggcacactgtcagtacatcaggcacatgggcccactaggctggggtttctggttttgtttctgttgtgttttgttttggtttctgtattatgtatttttgtcaacgccaataaatttctttgatttgcc

SEQ ID NO: 357253 - DNA, 2374 bp, Homo Sapiens
  misc_feature (1939)..(1959): n is a, c, g, or t
agcggcttgggccccgcgcgcccgcccaccccgctccgggcgcgctctcgggaaggcttggaccgacgcggcccagaggccaggaacattccgcgcgtggaccagccgggccaggcgatgctgcgggtgcggtgtctgcgcggcgggagccgcggcgccgaggcggtgcactacatcggatctcggcttggacgaaccttgacaggatgggtgcagcgaactttccagagcacccaggcagctacggcttcctcccggaactcctgtgcagctgacgacaaagccactgagcctctgcccaaggactgccctgtctcttcttacaacgaatgggaccccttagaggaagtgatagtgggcagagcagaaaacgcctgtgttccaccgttcaccatcgaggtgaaggccaacacatatgaaaagtactggccattttaccagaagcaaggagggcattattttcccaaagatcatttgaaaaaggctgttgctgaaattgaagaaatgtgcaatattttaaaaacggaaggagtgacagtaaggaggcctgaccccattgactggtcattgaagtataaaactcctgattttgagtctacgggtttatacagtgcaatgcctcgagacatcctgatagttgtgggcaatgagattatcgaggctcccatggcatggcgttcacgcttctttgagtaccgagcgtacaggtcaattatcaaagactacttccaccgtggcgccaagtggacaacagctcctaagcccacaatggctgatgagctttataaccaggattatcccatccactctgtagaagacagacacaaattggctgctcagggaaaatttgtgacaactgagtttgagccatgctttgatgctgctgacttcattcgagctggaagagatatttttgcacagagaagccaggttacaaactacctaggcattgaatggatgcgtaggcatcttgctccagactacagagtgcatatcatctcctttaaagatcccaatcccatgcatattgatgctaccttcaacatcattggacctggtattgtgctttccaaccctgaccgaccatgtcaccagattgatcttttcaagaaagcaggatggactatcattactcctccaacaccaatcatcccagacgatcatccactctggatgtcatccaaatggctttccatgaatgtcttaatgctagatgaaaaacgtgttatggtggatgccaatgaagttccaattcaaaagatgtttgaaaagctgggtatcactaccattaaagttaacattcgtaatgccaattccctgggaggaggcttccattgctggacctgcgatgtccggcgccgaggcaccctacagtcctacttggactgaacaggcctgatggagcttgtggctggcctcagatacacctaagaagcttaggggcaaggttcattctcctgctttaaaaagtgcatgaactgtagtgctttaaacaatcatctccttaacaggggtcgtaagcctggtttgcttctattacttttctttgacataaagaaaataacttctgctaggtattactctctactcctaaagttatttactatttggcttcaagtataaaattttggtgaatgtgtaccaagaaaaaattagtcacctgagtaacttggccactaataattaaccatctacctctgtttttaattttctttccaaaaggcagcttgaaatgttggtcctaatcttaattttttttcctcttctatagacttgagaatgtttttctctaaatgagagaaagacttagaatgtacacagatccaaaatagaatcagattatctctttttttctaaaggagagaaagacttagaacatacacagatcctaagtagaaccaggtaattgtctctttttctaataaggaatttgggtaannnnnnnnnnnnnnnnnnnnnaaaaataacctagactatgcaaaacatcaaagtgaattttccatgaatgtttttaatattctcatctcaacattgtgatatatgctactaaaaaccttttcatatacatcttacctcatttcaagtgaattattttaatcttttcctctctttccaaaaatttaggaatgtttagtgtaattggatttcgctatcagttcccatccttaagttttgatattcaatatctgatagatacactgcatctttggtcatctaagatttgtttacaaatgtgcaaattatttagagcatagactttataagcattaaaaaaaactaatggaggtaaaacctaaatgcgatgtgaaataattttagtgttgataccgtatgtgtatttttattctaataaacttttaagttcacgattgaa

SEQ ID NO: 357254 - DNA, 514 bp, Homo Sapiens
gcaccgaccggcacgagtgcacgcggaagcagcagagacggggcgatgctacgggtgcggtgtctgcgcggaggcagccgaggtgccgaggcggtgcactacatcggctctcggcttggaggatccttaacaggatgggtgcagcgaactttccagagcacccaggcagctacagcttcctcccgaaattcctgtgcagctgaagacaaggccacccatcctctgcccaaggactgccctgtctcctcttacaacgaatgggaccctttagaggaagtgatagtgggcagagctgaaaatgcctgtgtgccaccattcacagtggaggtgaaggccaatacatatgaaaagtactggccattttaccaaaaaaatggaggtctttattttcccaaagatcatctgaagaaggctgttgctgaggtcgaagagatgtgcaatattttatcaatggaaggagtgaccgtgaagcggcctgaccccatcgactggtcactcaagtataagactcctg

SEQ ID NO: 357255 - DNA, 913 bp, Homo Sapiens
  misc_feature (693)..(693): n is a, c, g, or t
ttcgattattgcctatataaatctttcacaaaaatcaggaagaagcctctggtgactttgcagagctgaggcagtgatgcacgtggtggggcctccctcctgagcgggaaccaggactgggagcatcacttgcaggcctccatggaggctgctgccccagctgagctgttagctagtgagtgcttctactgtgtgatgaatgagaaaagggaaagaggggagggcaatcagggttctgggggcacctcagtgagcccagaggcctggaggagaggctgtatgattccccagtcaggccttccttgggagtgtgccctctgtcaagatgactgggtttttgaagggcctcatttcctcacacaacaagcactgacagtcctgcagcccagggactgtcctgtggcacttgcccagccctcagacttcagaggacagttctgtggtcctgccagaagctcagctgttccacatgacccttaaacatttaaacaatttttttggttaaaggaaaaggaagccaatcaaaatgctttggaaacaaattaaagttgcaaattatttcccccacatagtaaatacatatccttgctacctgaaatgataatcatcactccccctgctggctgagagcgcttctcctcctttagactggctttgcccaaaagctaagtatttagaagaagttgttgccanagccttcacctttagcctggacaatgggcttttgagggtgaacacagggagtcagaggccccccctttcaaccattgacttggaggaaggccctgacaagaacacagcccccttgggggacagggggggcagaccttgcccttccaccctttggggcacctcaacccccgggtatgtgggccgcctcacacaaaaggcccctttggggcccttagggaac

SEQ ID NO: 357256 - DNA, 609 bp, Homo Sapiens
  misc_feature (252)..(252): n is a, c, g, or t
tttgggaaaaagctattcagtactttgaaagagcttctcttatacagcctacacaagtgaaataacagctgatggtacctagttgtttcagaaaaagtggtaactaccaaaaagcattagatacttacaaagatactcacagaaaatttccagacaaatgtcgcaatgtctgcgtttcttagttcgtctatgcacagatcttggattaaaaaatggctcaagaatatgccagaaaactgaagaggttggaanaaaatgaaaggaaataagggaacagtcgcataaagtcaggcagagatggcagtgggggctcccgtggcaaaagagaagcgagtgctagcggtgatagtggccagaactatagtgccagtagtaaaggtgaacgactaagtgccagactcagagctttacctggggcgaatgaaccttatgaaagtagcagtaacaaagaaatagatgcctcctatgtggacccacttggccctcaaatagaacgaccaaaaactgcagccaagaaaaggatcgatgaggatgattttgctgatgaagaattaggagatatttgcttccagaataatattcacttaattttataaagaaggaatgcct

SEQ ID NO: 357257 - DNA, 1190 bp, Homo Sapiens
  misc_feature (1121)..(1130): n is a, c, g, or t
cttcccaccattctttctccagaccttgctatgcctggaggaactgggttggagagtacttgccttatttctttgttactgctactttcataaggttccatttgtcccaagtaaagcttctgagtctggcacttagtcgttcacctttactactggcactatagttctgcccactatctgaaaacacgaaaataaaaatgcatttgttaatatgtgagaaaaacataaaactacattatgcatcttaaagcatacttatttgccaagaaacaagcaggttgtttaatttggaagccagcttcttagggatataattcttgttttctgaaatttaaaagaaatatcttgtgggaatctataatatagataaaacatcacttaagagtagtctgtatatgtattctttcaaatgtgtgcttacttataggtttcaaggttatggaagaacttaagagaaagtaagagatcaccctgactcgtataattgcccaaataggcaatggctgccttaggaaagaaatgtaaatatgtatcactgaggattttcagataaaactgaacactaacattaagtaggaaatgttagtagtactttttaaccagaaatttctgtgatattttctaaaagtactcctctagccccacagttttcctttcttccccttagaattcctagagtgatattttttctattatgtaagcctcacttttaatgagagtagtccactgataaacacactgaccatttcgtttttgaatatagtttgtcttttagtttactgataatgtctctgggaataaatcagaacaagatggtctttaaaatccccacattttaagattggccaactgacccaaaatagtaagtcttctctaaggttcttatccaaaaccgttaccatttcccctaccactgatgttacgggaaaataaagctctttagtgtactgaatatgtctacacactttagtatattttacattattttgtccctctctttttgttaaaacaaaagttaattttttccatgcagaaatgtatacgggtgtcttttaaactgcctgagtgagctcaagtcaataaagtttgaaaaacattgctctagggatatttcttttacnnnnnnnnnnctgaataatgtatatcctacctgtctccaaaaaggtttaagataagccaccaaatatata

SEQ ID NO: 357258 - DNA, 1025 bp, Homo Sapiens
  misc_feature (486)..(540): n is a, c, g, or t
  misc_feature (961)..(961): n is a, c, g, or t
  misc_feature (964)..(964): n is a, c, g, or t
  misc_feature (976)..(977): n is a, c, g, or t
  misc_feature (979)..(979): n is a, c, g, or t
  misc_feature (983)..(983): n is a, c, g, or t
  misc_feature (986)..(987): n is a, c, g, or t
  misc_feature (998)..(998): n is a, c, g, or t
  misc_feature (1000)..(1000): n is a, c, g, or t
  misc_feature (1002)..(1002): n is a, c, g, or t
  misc_feature (1015)..(1015): n is a, c, g, or t
gaatgacctaaacgcctgaaaaacacctccccaaatcctgaaactcctgaacccagatgaccggattctgattgtgggaccacacggcgtcccttcgatgctgaactccaatctttctgcaaagtttaccagaaaattattttggtgcccagaccagactatgcttccagatacgttctgtggaagcaaatcattgaacgcaatggaggagtcctcaccagtgccttgaatgtcagctgcctggcgaaggtcactgacggcttcacccaaggacatatagtcgaagtggttaaaggcgtgctcacagatcagagaatccggcggcaaattcataaacctctcactgcagttgagtttattacggcgataaccagcatgaatccagtgtacaaagaggaagaagagagctttaagaactggtatgccaaaactcctctgggtaaaaaacgtgccttggcgataacaggaggcagcacagaaaaggcnnnnnnnnnnnnnnnnnnnnnnnnnnnnnnnnnnnnnnnnnnnnnnnnnnnnnnntaatgcctttctgaagaaccatgcttgagtctctctgggatggagaggaccccaactcgccaaagaaaagattcaccattgcccgcctgaagaagccctcaggggaaggaacttagcagtgtgcaggtgagctgatgccgcaaacccgctaaccactgcatgtgctgttatgcctttcccaggctggacacctagctgggtgttcatcataactttccacagctttaatccacgccaagtttgtatataactgaaattcactcttgacaccctccacagtcttcccaagttggactctccctctcatcagtactagttgtcaaattcaaaatgtgacagttaaagaatattctagtttgacaattagtaagcaatgagtatatcatcagtacactagctttttattaatccattttcactntanagtgtctggcanntntgtnaannaatgaaggcgngntntagtaatagattnatataagaaa

SEQ ID NO: 357259 - DNA, 1697 bp, Homo Sapiens
  misc_feature (60)..(96): n is a, c, g, or t
gtgaataactcggaacccgctactttgggcgagatggagcgttatccgggtggcggccgnnnnnnnnnnnnnnnnnnnnnnnnnnnnnnnnnnnnnatcaggccaaatcggccgagctcgaattcgtcgagagcggagatctgaacctgatttgtgtgtgcaccgcgtctccagcgatcccggatccactgcgctgccaggggcctgggggtgggtctcttgctgtctctgcgacgacatccttacgtttcggcactctaatgctgggtttgtgcgtgtgtgtctgcttagcggtctagcgggctgttaggctccctcgcccccagctccttggctcgctcagctcctccaccgcagcccagcagtgagacgcgcgcgcagccagctccccacgagatggaacagaccgaagtgctgaagccacggaccctggctgatctgatccgcatcctgcaccagctctttgccggcgatgaggtcaatgtagaggaggtgcaggccatcatggaagcctacgagagcgaccccaccgagtgggcaatgtacgccaagttcgaccagtacaggtatacccgaaatcttgtggatcaaggaaatggaaaatttaatctgatgattctctgttggggtgaaggacatggcagcagtattcatgatcataccaactcccactgctttctgaagatgctacagggaaatctaaaggagacattatttgcctggcctgacaaaaaatccaatgagatggtcaagaagtctgaaagagtcttgagggaaaaccagtgtgcctacatcaatgattccattggcttacatcgagtagagaacatcagccatacggaacctgctgtgagccttcacttgtacagtccaccttttgatacatgccatgcctttgatcaaagaacaggacataaaaacaaagtcacaatgacattccatagtaaatttggaatcagaactccaaatgcaacttcgggctcgctggagaacaactaaggggcaccaaaccctctgaggttttactttaaggttcgctgtatgtttgccttggacaaaaaggctacctaccacgtgctatccagtaatatacttaaataagccaatacttagatctactgtaaggcagatgctaattataaggcattaagtaagcaaatagtgccctcagctactgcagaagaaaagtcccactgaggaaaagaaagtcttgtgatttttaaaggcaagttttcaagtgctctcatagttctatcctctaattccattaaatccatactaggagcgtcagtgagggttttcatagcttttggaaatactttggtctctgaactgtaattagcaagaagtaaaaacagaaacgtcaaacgtcaaatgtttgctttgttacctggaggactaaatgtagatgtctttagtatactttgtatgttcttaatattggaagataattttgtgaatctgtagattttattttttcagtcttaccttacaaatttcttttctatgaataatagaggaacttacggcactctgccatttgttaatgaaaggaagtgcagaggatttagaaaagtacatgatccccagaccacaacaaaccaaaacataaactcatgtctgtgtcccatggtcatagtcaaagattttgtactgctaaaattaccaaataatttaaataaagtggatttgaaccc

SEQ ID NO: 357260 - DNA, 1103 bp, Homo Sapiens
  misc_feature (42)..(42): n is a, c, g, or t
  misc_feature (844)..(844): n is a, c, g, or t
  misc_feature (928)..(928): n is a, c, g, or t
  misc_feature (950)..(950): n is a, c, g, or t
  misc_feature (952)..(952): n is a, c, g, or t
  misc_feature (954)..(954): n is a, c, g, or t
  misc_feature (958)..(958): n is a, c, g, or t
  misc_feature (960)..(960): n is a, c, g, or t
  misc_feature (965)..(965): n is a, c, g, or t
  misc_feature (967)..(967): n is a, c, g, or t
  misc_feature (977)..(977): n is a, c, g, or t
  misc_feature (988)..(988): n is a, c, g, or t
  misc_feature (995)..(995): n is a, c, g, or t
  misc_feature (1013)..(1013): n is a, c, g, or t
  misc_feature (1018)..(1018): n is a, c, g, or t
  misc_feature (1022)..(1023): n is a, c, g, or t
  misc_feature (1034)..(1034): n is a, c, g, or t
  misc_feature (1045)..(1045): n is a, c, g, or t
  misc_feature (1052)..(1052): n is a, c, g, or t
  misc_feature (1054)..(1054): n is a, c, g, or t
  misc_feature (1058)..(1058): n is a, c, g, or t
  misc_feature (1064)..(1064): n is a, c, g, or t
  misc_feature (1083)..(1083): n is a, c, g, or t
  misc_feature (1085)..(1085): n is a, c, g, or t
  misc_feature (1088)..(1088): n is a, c, g, or t
  misc_feature (1094)..(1094): n is a, c, g, or t
  misc_feature (1099)..(1099): n is a, c, g, or t
gggatgggggggagattgtttgcagcatagaagctccgcggnacgggaaggtaaactgagctccccagagacgctcatcctacagcctcagctcgggcccagccttctctctccagctgccaccacagcctggaggcgcctgcctccaccctcccgaatggtgctcctcctagcaggcctcggtccaggatccaagccccctttgccccctgccttggagctgttgctccgggtttgtcacagtggactccctgtggcgggaagggaagaacttttgcacagacaaggcttcagctctaggaaccccactgacaacttgaatctcaacctctaacctagtgtgaggttcttcctgtgcccaccttttctgccttttgagaagagaaactcttctcctggccatctagagcccaggaagccccaagctggggccctggtcccagcatgtcagtcctctcttgtgcatagggctctgccctccccctgtcagcatggctgagctcagacaggttccaggagggcgggagaccccacagggggagctgcggcctgaagttgtagaggatgaagtccctaggagcccagtcgcagaagagcctggaggaggtggaagcagcagcagtgaggccaaattgtccccaagagaggaggaagaactggatcctagaatacaggaggagttggagcacctgaaccaggccagcgaggagatcaaccaggtggaactacagctggatgaggccaggaccacctatcggaggatcctacaggagtcggcgaggaaactgaatacacagggttccccacttggggagctgcatcgagaaagcccggccctactatngaggctcggcggctggctaaggaagctcagcaggagacacagaaggcagcgcttgcggtacaagcggggcgtaaacatgcacangctgctcgagaaatggtgtttntngntgancngggcncntggctgacanaccgacttggncccccgngggaggagatgtggaacntgctncctnnaggggacttanggggaggagancggcttngngtgngtgggncaccacgagtgtctcggtntncanaggctnagctntggt

SEQ ID NO: 357261 - DNA, 1264 bp, Homo Sapiens
  misc_feature (656)..(780): n is a, c, g, or t
  misc_feature (797)..(908): n is a, c, g, or t
  misc_feature (931)..(944): n is a, c, g, or t
  misc_feature (984)..(1000): n is a, c, g, or t
aggcttaatacttagaaagtgctagagcagcctctattaggggatctcttctctgattgtactccacttgctgtaacaccaaaggatgcagaaccaggttctgtagcagaaattgctggtgtctgtggcaggggagggcacctgaggacagggaagaagaaacatatttttatctttatggagcagcacattgttcccaaataccttctgctttaagggacagaaatggatggactttttctgtcttttctgccagttgatgtcatgcttgcaggtaaacatgtggtactgacacccttaaaggcatattctcaagaggcaggtaaaaaaccaattccaaaaaagtattgcaacaaaaggaagcaccaaataactataatatctttatggcttgcaaaattaggcagaaaagggctttcttttctagggaagagcaaacaagattagaaaggaggtgggagaggaacagcaaatggagggtgaaaaagtcagattttagatcagagaatggcttaccctgaaatcagcatgttcttaggagggacataaaatggggttgtatgttgactcagactgagggtagcttgaatttcaggagcctgagagaagataaacttaagtaaaatttgattaagaaatattttattttaggctgnnnnnnnnnnnnnnnnnnnnnnnnnnnnnnnnnnnnnnnnnnnnnnnnnnnnnnnnnnnnnnnnnnnnnnnnnnnnnnnnnnnnnnnnnnnnnnnnnnnnnnnnnnnnnnnnnnnnnnnnnnnnnattagctgggcgttgtnnnnnnnnnnnnnnnnnnnnnnnnnnnnnnnnnnnnnnnnnnnnnnnnnnnnnnnnnnnnnnnnnnnnnnnnnnnnnnnnnnnnnnnnnnnnnnnnnnnnnnnnnnnnnnnntgacagagtgacactccatctcnnnnnnnnnnnnnntcataattgattttgactgctgaaggcaaattcagctggnnnnnnnnnnnnnnnnnaatgagaaaaaggagaaaatgtgcagagtgtatgtctggctgtgtgataggcaagaaaagggagcatcatcttaatcataacgggaagagtgtttctttccataaactgttcctgaagcacacaaaggaaggagaattttattaatcacaaatatttttcataattatctatgtgtttcatctttcctcatctcttttctttgttctatgcatttcttccactggcttttcctgggctgcatcttatatttgaaccagtaagca

SEQ ID NO: 357262 - DNA, 861 bp, Homo Sapiens
  misc_feature (53)..(53): n is a, c, g, or t
caacagcactgttcgtggttgtaccacaacgcactaaggcaaatgccctcctntaggtcagtcatccaatcggcagcaatgtctattaatccggccagtgcccctgatgccaatcctgttagtgttactactagccatcctgaccacgcatcatacaaactttttgtcatttcccatgctgattctttctttttgctgttgatccgtctatgcctttctctgtctttacatttttctcgcacccaatcaatagtatggaaatcatcatatgtaccaacacctggaattggttcatccaaaagatccagtaaatgtgtagaactgttaatgctgcctccatttgtcattgtataatgagttccaactgcagtgtcaccatctaataaattgtcatcttcagatgtttgaaagtccataataacacctgctccatctaaaagttcctcatcactacttgcacttgttatactgttgtagctgtttctatagtagcctctatggaacagctgctcagactccatttagctgtctgattatctcgcagctcagagacatagcaaaatcggtggctgttttgtgcgctgcctttggattctgcatctgtttcaaacctagaacctagctaccctcggagctccaccgaagaaagcctgacacagcgaaaactatcgcgatttaaaagatacctgacgttttctaccgcagaggttacgaaaattttgcccggtgggacttttattgtcctccttcaaacacgggagcacatgaagttaatcctctcgctctggagatccctagagtcaacctgcttctgcccaaaattaaaaataaaatctccagagcgagagtctccgtcgaact

SEQ ID NO: 357263 - DNA, 399 bp, Homo Sapiens
agtattcagaaggaggcttgtcaaagccacctggcacactgcagtattctgtagggtagataagtgtggtagaacggagaagatgatgcaaaaggttacaagacagagtgtaaccctgcttacaggttaaatgtagggttctttggagaatctttacaagctgctccctataaagaagcaacttccttccatccactcgagtaatctaaaaggagggaaaaaatagttgaagatatttcggttaaaagaacaagaaccaatcattaatgcaaagttcaatggttggccactaacatagtgcttctctaaatgactttagttaattttaggattgtcactttaactgcattctaataattaattgatttctaaaatcaaacacattttctgagcttaagc

SEQ ID NO: 357264 - DNA, 2346 bp, Homo Sapiens
  misc_feature (71)..(71): n is a, c, g, or t
  misc_feature (994)..(994): n is a, c, g, or t
  misc_feature (1846)..(1876): n is a, c, g, or t
  misc_feature (2166)..(2166): n is a, c, g, or t
agcaggctggtaccggtccggaattcccgggatcttgcaggcagcaaacacggtgcgagcgaacaggagtnggggggaaattaaaaaaagctaaacgtggagcagccgatcggggaccgagaaggggaatcgatgcaaggagcacaataaaacaaaagctacttcggaacaaacagcatttaaaaatccacgactcaagataactgaaacctaaaataaaacctgctcatgcaccatggtttttcaaactcggtacccttcatggattattttatgctacatctggctgctccgctttgcacacacaggggaggcgcaggctgcgaaggaagtactactgctggattctaaagcacaacaaacagagttggagtggatttcctctccacccaatgggtgggaagaaattagtggtttggatgagaactataccccgatacgaacataccaggtgtgccaagtcatggagcccaaccaaaacaactggctgcggactaactggatttccaaaggcaatgcacaaaggatttttgtagaattgaaattcaccctgagggattgtaacagtcttcctggagtactgggaacttgcaaggaaacatttaatttgtactattatgaaacagactatgacactggcaggaatataagagaaaacctctatgtaaaaatagacaccattgctgcagatgaaagttttacccaaggtgaccttggtgaaagaaagatgaagcttaacactgaggtgagagagattggacctttgtcaaaaaagggattctatcttgcctttcaggatgtaggggcttgcatagctttggtttctgtcaaagtgtactacaagaagtgctggtccattattgagaacttagctatctttccagatacagtgactggttcagaattttcctctttagtcgaggttcgagggacatgtgtcagcagtgcagaggaagaagcggaaaacgcccccagggatgcactgcagtgcagnaaggagaatggttagtgcccattgggaaaatgtatctggcaaagcaggcttaccagcaaaaaggagacacttgtgaaccctgtggccgtgggttctacaagtcttcctctcaagatcttcagtgctctcgttgtccaactcacagtttttctgataaagaaggctcctccagatgtgaatgtgaagatgggtattacagggctccatctgacccaccatacgttgcatgcacaaggcctccatctgcaccacagaacctcattttcaacatcaaccaaaccacagtaagtttggaatggagtcctcctgcagacaatgggggaagaaacgatgtgacctacagaatattgtgtaagcggtgcagttgggagcagggcgaatgtgttccctgtgggagtaacattggatacatgccccagcagactggattagaggataactatgtcactgtcatggacctgctagcccacgctaattatacttttgaagttgaagctgtaaatggagtttctgacttaagccgatcccagaggctctttgctgctgtcagtatcaccactggtcaagcagctccctcgcaagtgagcggagtaatgaaggagagagtactgcagcggagtgtcgagctttcctggcaggaaccagagcatcccaatggagtcatcacagaatatgaaatcaagtattacgagaaagatcaaagggaacggacctactcaacagtaaaaaccaagtctacttcagcctccattaataatcggaaaccaggaacagtgtatgttttccagattcgggcttttactgctgctggttatggaaattacagtcccagacttgatgttgctacactannnnnnnnnnnnnnnnnnnnnnnnnnnnnnncagctgtctccagtgaacagaatcctgttattatcattgctgtggttgctgtagctgggaccatcattttggtgttcatggtctttggcttcatcattgggagaaggcactgtggttatagcaaagctgaccaagaaggcgatgaagagctttactttcattctttagtaacaaatgagcatctgtcagttttataaactgcaacaataattgtttaagacaatcaattttggataaacaatcaactacagcagaataaatcaagatttttaaatcccattttcctttanacattttgcttctttttgttatgtgtttacttttaaaatatagttttaatgtgatgacataagcacagttaggctgcagtgtaatatataaagaaatatattgttctccaaatagtaagatttgatgaaaagcattgttcagtggactttgttaaaacaataaagtttttttgtaggtat

SEQ ID NO: 357265 - DNA, 837 bp, Homo Sapiens
agcaatctatcacggaacggcggtggccggtgcggcgtgttcggtggcggctctggccgctcaggcgcctgcggctgggtgagcgcacgcgaggcggcgaggcggcagcgtgtttctaggtcgtggcgtcgggcttccggagctttggcggcagctaggggaggatggcggagtcttcggataagctctatcgagtcgagtacgccaagagcgggcgcgcctcttgcaagaaatgcagcgagagcatccccaaggactcgctccggatggccatcatggtgcagtcgcccatgtttgatggaaaagtcccacactggtaccacttctcctgcttctggaaggtgggccactccatccggcaccctgacgttgaggtggatgggttctctgagcttcggtgggatgaccagcagaaagtcaagaagacagcggaagctggaggagtgacaggcaaaggccaggatggaattggtagcaaggcagagaagactctgggtgactttgcagcagagtatgccaagtccaacagaagtacgtgcaaggggtgtatggagaagatagaaaagggccaggtgcgcctgtccaagaagatggtggacccggagaagccacagctaggcatgattgaccgctggtaccatccaggctgctttgtcaagaacagggaggagctgggtttccggcccgagtacagtgcgagtcagctcaagggcttcagcctccttgctacagaggataaagaagccctgaagaagcagctcccaggagtcaagagtgaaggaaagagaaaaggcgatgaggtggatggagtggatgaagtggcgaagaagaaaatct

SEQ ID NO: 357266 - DNA, 1165 bp, Homo Sapiens
  misc_feature (327)..(496): n is a, c, g, or t
  misc_feature (560)..(568): n is a, c, g, or t
  misc_feature (593)..(638): n is a, c, g, or t
  misc_feature (718)..(801): n is a, c, g, or t
  misc_feature (849)..(996): n is a, c, g, or t
gggatccggcatgccccgcgcgcccgcgctcgcctccgcttgtattggtcccggggggcgcggcgggccggaggggctgggattgaagaccaccaggcgctgccaaacactaattcggcgtccagagcagtttcaaaccggaaccggccgcgctccctcgccctacttgatccagtcaacgaatgccgagcacctaccacgtgcaaggctccggagacacaaagacgggggagaagccttgtgcaaacgggaacaaaggctgtggttcatccatattgcgatcgtgcctacacaggaaaagattttctttttaatcactcaaggccnnnnnnnnnnnnnnnnnnnnnnnnnnnnnnnnnnnnnnnnnnnnnnnnnnnnnnnnnnnnnnnnnnnnnnnnnnnnnnnnnnnnnnnnnnnnnnnnnnnnnnnnnnnnnnnnnnnnnnnnnnnnnnnnnnnnnnnnnnnnnnnnnnnnnnnnnnnnnnnnnnnnnnnnnnccggggtgggggaatgttgaaaggaataatagattgtaaaattgttttgtgtttgtacaattgnnnnnnnnnctgaccttaaaaaaactaaaagtannnnnnnnnnnnnnnnnnnnnnnnnnnnnnnnnnnnnnnnnnnnnnatggcttgagcccgggagttccagaccagcctgggcaacatagggagacctcatctcttcaaaacattcttaaaaattannnnnnnnnnnnnnnnnnnnnnnnnnnnnnnnnnnnnnnnnnnnnnnnnnnnnnnnnnnnnnnnnnnnnnnnnnnnnnnnnnnntgcagtaagccatgattgtaagtacagtaagccactgcactctagctnnnnnnnnnnnnnnnnnnnnnnnnnnnnnnnnnnnnnnnnnnnnnnnnnnnnnnnnnnnnnnnnnnnnnnnnnnnnnnnnnnnnnnnnnnnnnnnnnnnnnnnnnnnnnnnnnnnnnnnnnnnnnnnnnnnnnnnnnnnnnnnnnnnntgtggagcccgaaaatttgagaaaggtctcagttaaccaggaagtttattttccaagggtgaggacagccccgtgaaaaaactcaggagtcctgacgaatttgcccagggcgttgggggatacttggtgttataaatttagggggaatgaggatccgcaaaatttttaa

SEQ ID NO: 357267 - DNA, 763 bp, Homo Sapiens
ggtgggtacaagatgacggagccgggcgcctctcccgaggacccttgggtcaaggcaagccccgtgggcgcgcacgccggcgaggggagggcgggtcgggctcgtgcacgtaggggggccggaagacgaggggcttccctcctgtccccaaagtcccccacgctctccgtgccccggggctgcagagaagacagctctcaccccgcgtgtgccaaggtggagtatgcctacagcgacaacagcctggaccccgggctttttgtagaaagcacccgcaaggggagtgtagtgtccagagctaatagcatcggttccaccagtgcctcttctgtccccaacacagatgatgaggacagtgattaccaccaggaggcctacaaggagtcctacaaagaccggcggcggcgcgcacacactcaggctgagcagaagaggagggacgccatcaagagaggctatgatgaccttcagaccatcgtccccacttgccagcagcaggacttctccattggctcccaaaagctcagcaaagccatcgttctacaaaagaccattgactacattcagtttttgcacaaggagaagaaaaagcaggaggaggaggtgtccacgttacgcaaagatgtcaccgccctaaagatcattgaaagttgaactatgagcagatttgtgaaggcacaccaggacagaccccatgaaggggcaggaccaggtctctgaccaggtcaagttcaacgtgtttcaacgccatcatggattccca

SEQ ID NO: 357268 - DNA, 1494 bp, Homo Sapiens
  misc_feature (1323)..(1323): n is a, c, g, or t
  misc_feature (1482)..(1482): n is a, c, g, or t
cgccacccgcttcctcgccgcaggggcccgcccgctggcccgtttccggtccggtgggtacaagatgacggagccgggcgcctctcccgaggacccttgggtcaaggtggagtatgcctacagcgacaacagcctggaccccgggctttttgtagaaagcacccgcaaggggagtgtagtgtccagagctaatagcatcggttccaccagtgcctcttctgtccccaacacagatgatgaggacagtgattaccaccaggaggcctacaaggagtcctacaaagaccggcggcggcgcgcacacactcaggctgagcagaagaggagggacgccatcaagagaggctatgatgaccttcagaccatcgtccccacttgccagcagcaggacttctccattggctcccaaaagctcagcaaagccatcgttctacaaaagaccattgactacattcagtttttgcacaaggagaagaaaaagcaggaggaggaggtgtccacgttacgcaaggatgtcaccgccctaaagatcatgaaagtgaactatgagcagattgtgaaggcacaccaggacaacccccatgaaggggaggaccaggtctctgaccaggtcaagttcaacgtgtttcaaggcatcatggattccctgttccagtccttcaatgcctccatctcagtggccagcttccaggagctgtcagcgtgtgtcttcagctggatcgaggagcactgtaagcctcagaccctgcgggagattgtgattggcgtcctgcaccaattgaaaaaccagctttactgaccggttcttggaaacctggagaacagccaacaagaggcccttgaatctctacgtggccactgaactgctgggcccgggagactggactacaacacctcacactggtcagctggtttctacttggtgtttggtttttcccagccccattttatcttcagcggagccgcggtgtttgttttgtgaaagcttctgattaatttattatattgacgataaaactcaaacctacccagccttccccccactccatggaagtccttgggaatgggcgtctgctctggacaccccaaagagctcctgccctctcagccctttattcaagcctcagaatttctgctcatgatctacatagatttggaaactgttttccctctgattttggcctcttggggcaacatttttggcccaagtttgggcaacatttggcccaagtttgggcattttggccgtagctgtatgggagaaaaagagtaagaggaaatattcccacagccatgaagggtgaaagggcaccttgtgcctangactagggctgcctggtcagtcccaggtgaggccaagggctttctggccatctcagggaggggccaccaggttcctcccctcaccccatattccatcaccttcctcctctgctctgggtggtaagggaagccctcccggttcccactaggctatgatgntgcatggcagag

SEQ ID NO: 357269 - DNA, 1665 bp, Homo Sapiens
  misc_feature (1513)..(1513): n is a, c, g, or t
  misc_feature (1533)..(1533): n is a, c, g, or t
  misc_feature (1538)..(1538): n is a, c, g, or t
  misc_feature (1571)..(1571): n is a, c, g, or t
  misc_feature (1595)..(1595): n is a, c, g, or t
  misc_feature (1604)..(1604): n is a, c, g, or t
  misc_feature (1617)..(1617): n is a, c, g, or t
  misc_feature (1648)..(1648): n is a, c, g, or t
acgcggaacctcggcgcggtgcttccagcagggtctctccgccactccagccccgcgcccctcgccgcggccctcgggcgtctgcgccgcagctgccgcccccgcctctttggagtctctcgcggcctcaaagcgcggcctgcgtcgcttccggcagttcccgaccgcgggcgatggctgccgctgggggcgcccggctgctgcgcgccgcttctgctgtcctcggcggcccggccggccggtggctgcaccacgctgggtcccgcgctggatccagcggcctgctgaggaaccgggggccgggcgggagcgcggaggcgagccggtcgctgagcgtgtcggcgcgggcccggagcagctcagaagataaaataacagtccactttataaaccgtgatggtgaaacattaacaaccaaaggaaaagttggtgattctctgctagatgttgtggttgaaaataatctagatattgatggctttggtgcatgtgagggaaccctggcttgttcaacctgtcacctcatctttgaagatcacatatatgagaagttagatgcaatcactgatgaggagaatgacatgctcgatctggcatatggactaacagacagatcacggttgggctgccaaatctgtttgacaaaatctatggacaatatgactgttcgagtgcctgaaacagtggctgatgccagacaatccattgatgtgggcaagacctcctgaactagaacaaataggaatattttcatggaattttacctatttttataattattatttcttaaagtgattaaatgagaacatggatgagtggacttcatattatgactagctttactattttaattcaccttgcataactactgaattttgtcattcttgaaagtatgcaatttttattttggttatattacaaaaatgtcaatcaaatattaaaaaatagttaatgtgatagaaaaaccttacatatttttttcttatgtttgtttagcgactttagcaaaatgttttcatataatctcatctgtttacctagaagataggttaaggaaatatattattattcctgtttgatgtgggtgaaggcagagatctaacctggcttgtttagggccataccactaattagaaaatctgtgctagaacctgtgtcttattcctataagctatgtgttcagactgaaactggagaaattatgactattttatttatagtagtagttaaatctgaatgtgtatggacaaaaatatttaattgctcagtaaactgcttaacttcaaagatagttattgaccttataaataaatatttcaaaattttgattcggaagactaagtctggacgtagacattataatgctatcaaagaagtttgatctctgttttgactaaactagaggaaaaatgattggatgtgtttattcttttctaagcagaatggtttaactttgtactctttgaaaaataatgctgatttataaatctctgcctataacagaatggaaacnttatgaatgaattgtgtttntctgncctgagctggagaagggaatgagcaggctgacncttgcacaccccccggtgccccantctctcacncaaggatggggcngcagggtgagcggcgtgggctgcagtgtggnagtcccaggagtgaggg

SEQ ID NO: 357270 - DNA, 1087 bp, Homo Sapiens
  misc_feature (646)..(646): n is a, c, g, or t
  misc_feature (876)..(876): n is a, c, g, or t
  misc_feature (881)..(881): n is a, c, g, or t
  misc_feature (904)..(904): n is a, c, g, or t
  misc_feature (915)..(915): n is a, c, g, or t
  misc_feature (934)..(934): n is a, c, g, or t
  misc_feature (942)..(942): n is a, c, g, or t
  misc_feature (953)..(953): n is a, c, g, or t
  misc_feature (957)..(957): n is a, c, g, or t
  misc_feature (967)..(967): n is a, c, g, or t
  misc_feature (976)..(977): n is a, c, g, or t
  misc_feature (982)..(983): n is a, c, g, or t
  misc_feature (986)..(986): n is a, c, g, or t
  misc_feature (990)..(991): n is a, c, g, or t
  misc_feature (993)..(994): n is a, c, g, or t
  misc_feature (1000)..(1001): n is a, c, g, or t
  misc_feature (1003)..(1003): n is a, c, g, or t
  misc_feature (1008)..(1008): n is a, c, g, or t
  misc_feature (1011)..(1023): n is a, c, g, or t
  misc_feature (1025)..(1026): n is a, c, g, or t
  misc_feature (1028)..(1028): n is a, c, g, or t
  misc_feature (1032)..(1033): n is a, c, g, or t
  misc_feature (1035)..(1035): n is a, c, g, or t
  misc_feature (1037)..(1039): n is a, c, g, or t
  misc_feature (1043)..(1043): n is a, c, g, or t
  misc_feature (1046)..(1047): n is a, c, g, or t
  misc_feature (1049)..(1049): n is a, c, g, or t
  misc_feature (1058)..(1058): n is a, c, g, or t
  misc_feature (1060)..(1061): n is a, c, g, or t
  misc_feature (1063)..(1063): n is a, c, g, or t
  misc_feature (1066)..(1066): n is a, c, g, or t
  misc_feature (1068)..(1068): n is a, c, g, or t
  misc_feature (1070)..(1070): n is a, c, g, or t
  misc_feature (1080)..(1080): n is a, c, g, or t
  misc_feature (1083)..(1083): n is a, c, g, or t
tcggtgtcctcctttgtaccacgggaataatcacccacaagggaactttcaccaagaaccatggaagggacacaaaggtgaccgagacatggctctggccttcatgagctcttgttttagtcgggaatgtaaaagacacaggctacggagtgtgccaagttggggaaatgcaggggtgctccaggaggctccatcccccagtggtggtcagggaaggcctcctggaggcggaagaccaagaagagaatgagacagggcaggacaggagaatcagaccccctacctgagggagggatatcccaggaggtggtgctgggttgtagggtgagggatgcagggtcgggggcacctatagctggagagggcaggggccaaaaggcagccagccttgtgggccacgggcatcctcctccagggtctgcgtgacgtgacaaatgcgtgaggtgcccggcgcagaggagggcttcctcctcacccctctcactccctcccggcccctctcactacttcccaggtccaagcatcagtcatcacccagggctgggtgggctcagagaccagccacctttcacagcactggtcagctctgttattttgacaatagccattctaacaggtgtgaggccatgtctcactgtggcttaantgagcatttccctgatgattcgagatggtgagcatgttttccacatacctggtggccatttgtgtgtctccctttgagaaatgtctacttgggctcctttgcccgttttttaaccgagtcacctggttttctgcctatggagctgggtttcttacgtatcctggatgtgaacccttgtcagaggtatgcctccatgaatcttttctcctactctgtgggtcatctcttcnctccnctgattgtttctctggctgtgcnagggtctcttngtttgacatcctgtttttntatttttncgtttgttgcntgtncttttgggancacctgccnnccacnnttntccnncnncatccnnanttttnccnnnnnnnnnnnnngnntntttnnanannnaggnttnngnttttttttnanncnccntnancgggattttntangggg

SEQ ID NO: 357271 - DNA, 1110 bp, Homo Sapiens
  misc_feature (855)..(950): n is a, c, g, or t
ctgtccaggaaatgagcagagattcacaagacagcactttgattctatgttgagtttgtttctatattagaaaagcagcaagtcagtaatcccccgtggcatcacagctaagtagctgtggccaccggcagtttcacagcatcctgaaagctggcactgatcgtgactatcagtgaaagaagtttaattttcaggttagaaaatgtgatctggcagtttatgcattcttcagagtaatgtaataatacctatgtgatgctgtaattttacttttcaacataagttgaacccgtagcagtctgtttaccttgtaaagggattacttagaagacatttttgtacatgctcttccccaaggattgtacgtattatacaaatagatggaaagaaaagtgaacacgtttgtagaactttcataagcacacagttgctgtgttgagttctctttaaaaacaaggacaaaaccaaccagcgttcaaaggaacctcccatcagagtcccctaaagtattttaggttcagtgagcatttgcctgaataaaacctaaaagagtagtcttaacacattactaactttttctaagagaaattgattcctgttttgtcatctgatgcaatttgctcttataaagagacattttcataggttcagagtaactcacctccatgggctgaccaaaggcttttctaatttttgttactgatgagatgaaacctatttgtaaggagatcttccccaggagcatttctgttgccttcttgacatcaatgaaaagcagcatattctcttatgaaatagcatgagaaaacacagggcatttctaggacagtaaaacgttaaagtactggtttaagnnnnnnnnnnnnnnnnnnnnnnnnnnnnnnnnnnnnnnnnnnnnnnnnnnnnnnnnnnnnnnnnnnnnnnnnnnnnnnnnnnnnnnnnnnnnnnnnagctttgtttaaatgttgaaaacccggttctattattatactaaaattcacctgattgcttattgcccgggccttgttattcaatttatctttgcgaggtctgtggcttgatcaaatgttcaatacctgttctgcgcgtataatgcattgtggcccaaga

SEQ ID NO: 357272 - DNA, 1348 bp, Homo Sapiens
  misc_feature (294)..(303): n is a, c, g, or t
  misc_feature (370)..(391): n is a, c, g, or t
  misc_feature (889)..(944): n is a, c, g, or t
ccacgtccactgagaatacaaagacccttcactaaaaaccaatcagggttttatttaccactttggcactcacatcttctctatattcagactgtaatttttcactgtattaattttaccatacagagcctacaaccttaaaaacgagattactaaatataaagtattcaccaaaaaagcgtcccataacataagacaactctcattttgagggggcactgccctattttttaatcacagttcaatttctgggtcagcaagctagtttataggagaagatattcgcttttattnnnnnnnnnnctttagaaaacttgctgtacttcttgaatggctttgcttaataattttgtgttaaacttcttcgtcnnnnnnnnnnnnnnnnnnnnnnttcaacactattcagccagggatccttacaccctgatttttttaagtatatgtttaacagttgagggtttctccagcattacaaagttcccattgcagtgtgcactcaccaatgttaaacaatgatcttagtcattccaagtatgtatcaacaacttaaaccaacctaacaatcgaacatcagttttttctgtgtctcttactaaattgtatactctttgaaaatataacatgcctttaatggccctaataacctagagcaggtgcctgttagacagaacatagtgttcaccgaatacaaaaagaggatctgagccctacactaacacacagctctgatcttcaggaagttcatttggtatcacatccaccaactgggtaattgattaaaatgaggaaaagaaaggaagctatcacttactctacgccagacacttatgtgcattttgctatttaattcttgcaataccctgaggaagctaactttggagaagatggnnnnnnnnnnnnnnnnnnnnnnnnnnnnnnnnnnnnnnnnnnnnnnnnnnnnnnnntcacagagttaaaactgcacacaggggatatgacaatacattgaccgatttaggaaaaataggatttggtggtaccaaggagtctgcccctaacttagcaaatgagtccttgagcagtacacacttgtattaaaatgttcctctgttagagggccaatcgtgtgtctggagctctctagggtggcaaaatgattatgagagcccaggtgtggtgtgtcttgctgtggcttccaagaatcttccaacctaccccccattatcaatgagagcccagatgccatgagctgagtagcacatgcccttctcaagggggagcctttgctcagctgtcactttgcagtatgatctgcaactttcttttagagaacaaatgttttcccacattctcaataaattccccaaag

SEQ ID NO: 357273 - DNA, 1297 bp, Homo Sapiens
  misc_feature (61)..(61): n is a, c, g, or t
  misc_feature (1211)..(1241): n is a, c, g, or t
taagcccggaggccttggggggtcaacgggggtaggatttatggaggcccaggaccccccnccagggttcaagtttgccatacttggggccagggcgagccgttggaaccctcggcatttctttggctggctcctttccatggggaaccaaccccaggaaccaaccccaatccctaaattgggtggctgcgggatcctaccaagtaagtgaaaaagggaggaggacacagccaaggagtgcttggcctacccagcccccttcttctaagcccataatcccaagggggtgagtatgatccagcagtactttgaaaagaaggcccggcctctgagcagtcactcattcctggtaaagcccctcgaagtcttgcagacttcatggcttggcagaaagtcacaactggtgttttgctgtgtcagtggcctgggagaaaaccagcagctgatgaggctggagaccactacataagatgctatcatcatccccgacatggcgagtgatacgaagcccaaaccacagaggatgcagagcagtgagaagccacccacagagatgaccaatcctgtccaatattatgacccccagcagagcagccagggtggtaagcaccacgatgagcaggaagaatccaacaggaacggccgacatgacaatgaacaccagcaaggtgaaggccagaaacggatggctgtccaagtactgacccactggagacttcataaaggccaccacctttgagttattctggaaggagtctatcagcagagacagcttcttctgcagttcctgcaagtcccttgagatactctggggctcctcttttgccattctgaagctcacttcaatctctttagggatgaattatcctaccagtaaattctccagtgcagcccgcggtccaatctctcatgtcgctctgtctcttgctgctcctgaccgccgagcagcccccaccgcgtttgcaggcgaagcgaagagaggcaggaggaggaacaagaggaagaaggaaagagcgtcccgagagggagccagagccgcctgcctccgccccctggcccgggcaccgcccctcggctcttctcctctgggctcgccccgcccgtggccggaaggatccggcaaaggcgcgccaaggcccggcgcccaaggctttgcaaagcgcgcttgctcccactggctttcggagccactagaacaagccctgagaggnnnnnnnnnnnnnnnnnnnnnnnnnnnnnnntgtcccttcccacacgactggcttggagtgagaaagctcagaccaccttcaagaca

SEQ ID NO: 357274 - DNA, 1182 bp, Homo Sapiens
ggttcctcctcctgcctctcttcgcttcgcctgcaaacgcggtgggggctgctcggcggtcaggagcaggttaccctccgtctgcatgcccaccatcaaggtatgaggatggtagaagccctcgtcgaaccagatggatgaagaccactaacggcttttgtttcctctggtaacagcaagagacagagcgacatgagagattggaccgcgggctgcactggagaatttactggtaggataattcatccctaaagagattgaagtgagcttcagaatggcaaaagaggagccccagagtatctcaagggacttgcaggaactgcagaagaagctgtctctgctgatagactccttccagaataactcaaaggtggtggcctttatgaagtctccagtgggtcagtacttggacagccatccgtttctggccttcaccttgctggtgttcattgtcatgtcggccgttcctgttggattcttcctgctcatcgtggtgcttaccaccctggctgctctgctgggggtcataatattggaaggattggtcatctctgtgggtggcttctcactgctctgcatcctctgtggtttgggcttcgtatcactcgccatgtcggggatgatgatagcatcttatgtagtggtctccagcctcatcagctgctggttttctcccaggccactgacacagcaaaacaccagttgtgactttctgccagccatgaagtctgcagacttcgaggggctttaccaggaatgagtgactgctcagaggccgggcttcttttcaagtactgctggatcatactcaccccttgggattatggcttagaagaagggggctgggtaggcaagcactccttggctgtgtcctctcgctttttcacttacttgtaggatcccgcagcagccaatttagggattgtgttgttcttgtgttggttcccatgtaaagaagcagcagagaaatgcgatggttcaacagctcgccctgccccaagtatgcagacttgaccttggcggggtcctgggcttctagagtctagcccgttgaccccaaagcctcagggcttatgtccaacggtcccattgggagcaacagtgattgtttatagttttttgttttcagaaatgagggcagctgttaattttttcactcatgtgaaacaaaatgaaaaaaaa

SEQ ID NO: 357275 - DNA, 1380 bp, Homo Sapiens
  misc_feature (60)..(191): n is a, c, g, or t
  misc_feature (246)..(307): n is a, c, g, or t
  misc_feature (1244)..(1244): n is a, c, g, or t
  misc_feature (1350)..(1350): n is a, c, g, or t
gttccccttgctgctgccatgtgaagaaggacatgtttgcttccccttctgccatcattnnnnnnnnnnnnnnnnnnnnnnnnnnnnnnnnnnnnnnnnnnnnnnnnnnnnnnnnnnnnnnnnnnnnnnnnnnnnnnnnnnnnnnnnnnnnnnnnnnnnnnnnnnnnnnnnnnnnnnnnnnnnnnnnnnnnaccacgcccggctaatttcatgctatttttaggtagagacagggtttcaccatcnnnnnnnnnnnnnnnnnnnnnnnnnnnnnnnnnnnnnnnnnnnnnnnnnnnnnnnnnnnnnntgagcacagcgcccggcccaaaaatccattcttaatggctttctcttctgatgcaaaatcctgattgccttcaaatattactattagatagaaatctccccacctttagctgaaagagataaggaggttttgcactgaggaaacaaacaaacaaacaagcaaacaacattcatcaatttttaaaaaaagtatgtattgaactatagtcaggttcaatgaggaaatgcattacattgtcactaaactggccttagttggagaaagaacactggcagattaattaaagttattagcgcttatggtaggaaactgcatgatatatgtgaaagatcttttagggactggaaacacagtgtaaattcaaactcctcccaaaactttaacaaggctggatgaaatgaaaggaatactgtgatttctacaattgacaacagtgtcaggcatgcaggaaacaaacaaaaccttttgatgaaggaaaagtaacttctggacaaagtataattggttacaggtaaacagatatgtcatccaggcagatatgacagtttataggaaaaatataatgttatgatctaaaaaaatgcaagccacaaacctattgcctgggcaataattagcctgaagttgggctactaaggagctggctaagcagcagtgataacaccagatactggaagaaacttctgtgatcagaaaccaatacaactagtgaacaattcacagtatttctaaatccgggcaccaaggaagttgtttggttagtcatgatggaagccaggaacaaatagatctcaaatgtgtgataataattatcaagcggaatgtctagaatattatagtgagtgccaagatttccatctaagacattaccaacatagcaactgaggcatgaattacaggttttacacaaaaaaagcattataagaaatatacatantatatattaacagttcaaaagtgaaacaaacatttatgaatgggctactcagatttaaataaatattgcctgttcattgatgctttctggatttactttctattgnatacctctctttctttctaagatactacta

SEQ ID NO: 357276 - DNA, 932 bp, Homo Sapiens
  misc_feature (577)..(577): n is a, c, g, or t
  misc_feature (579)..(579): n is a, c, g, or t
  misc_feature (582)..(582): n is a, c, g, or t
  misc_feature (586)..(587): n is a, c, g, or t
  misc_feature (589)..(589): n is a, c, g, or t
  misc_feature (593)..(593): n is a, c, g, or t
  misc_feature (595)..(595): n is a, c, g, or t
  misc_feature (597)..(597): n is a, c, g, or t
  misc_feature (599)..(600): n is a, c, g, or t
  misc_feature (605)..(605): n is a, c, g, or t
  misc_feature (611)..(611): n is a, c, g, or t
  misc_feature (618)..(627): n is a, c, g, or t
  misc_feature (630)..(630): n is a, c, g, or t
  misc_feature (633)..(633): n is a, c, g, or t
  misc_feature (637)..(637): n is a, c, g, or t
  misc_feature (639)..(639): n is a, c, g, or t
  misc_feature (649)..(649): n is a, c, g, or t
  misc_feature (653)..(653): n is a, c, g, or t
  misc_feature (661)..(661): n is a, c, g, or t
  misc_feature (706)..(706): n is a, c, g, or t
  misc_feature (722)..(722): n is a, c, g, or t
  misc_feature (734)..(734): n is a, c, g, or t
  misc_feature (859)..(859): n is a, c, g, or t
  misc_feature (864)..(864): n is a, c, g, or t
  misc_feature (866)..(867): n is a, c, g, or t
  misc_feature (885)..(885): n is a, c, g, or t
  misc_feature (890)..(890): n is a, c, g, or t
  misc_feature (894)..(894): n is a, c, g, or t
  misc_feature (920)..(920): n is a, c, g, or t
  misc_feature (925)..(925): n is a, c, g, or t
  misc_feature (927)..(927): n is a, c, g, or t
ataaagattatggatcccagcaattactcattttcacggtagaaaccggcactcagtagaaaacaggaaaacgtactgaaggcaaaccgttctgtaaaggatctctgtgggccgatatttatttcggtttgcactaaattagtcgtggcttcgcaagaaccctttgtctgtgggacggtgggtcccatcatggcaaccattatctattcgtggaaacgacatctgatgactccgcccgggctgggggtggggagggagcaccgcgtgtagagctcgactgagaattaaagtgagtgaacaaagagaactcccagcagccgccagccagctgcatcaggagatgttagtcacgcccggaaggctgttctagtccgcctccttggaaaagaagctcaagtaaataattgatggagaatgaccgaacccaggacaaagctttgcaggaaaccagtgcatccgtgttcgagcggttttgggatcctctgccaagtacgggataagagaatagagcaaggagtttgagcgctgctgccaatcttccatctcgggcgtggctctggcctttttgtctctttancncgnactnntncccncntncnnttttnccttcncgccttnnnnnnnnnnctnttnacantncctctctttngttnctctaccnatcgtccttgcaatccgccttctctctgcccagttcggtgaggtngctcatgacatctctnacttctggggangtctggccagcttggtactcgcgtgttagctgctgagagtgcactcagccagcgcgaccgcgggaagtcaccgctctggggcactgatctgacgtaccgcattgtttgagaatcgatggtgtgantgcgngnngagccaaggtatgtcagnggaantcgntacatatatgagtgacttctcgcgcnaaggnantataa

SEQ ID NO: 357277 - DNA, 1405 bp, Homo Sapiens
  misc_feature (1272)..(1358): n is a, c, g, or t
tcacgccactgccgctggtacggtccggaatcttccagactgggctccaacctgggtgatattataagactctggtctcaaggaaagaaaaaatgtctactcagtagagcagtgattggcaaagtgtgagaccccagaccggcaatattggcatctcctggagacttgtttaaaatgctgattactattttcaagaactttctaccttcatttttacttattttttgttttcaagggctcatggaatcagtcttccatgtgacagctttttaaatattttaagacaaaaactgagtcttctaatcttaattgtgttctagcagtagtcattgtaattatagttatttttataatttatttgtttagtgtatatctgtcactctagaatgtaggctccctgagataaaaactataattcttttgatggcagttacattcccaactcttagcacaagatctaggacatagtatgaactcaataaatttttgttgaatgaaagaaaaatgcaaatttataagccttttcagagacctactgaatcaaactctgagagtggagcccagcaatctgttgtaaaagctgtttgagtaatactgttgcactctaagcttgagaaccactgcaatagaactaagagaacattcatttcaccttcaggcctattctctgacatcacttgaaaaatcctctctgccttctgtaacccttaaccaacaacagtgccctgtccatgtaggggaaacttctgggctgtattacaagtgggtaggaaggtataaggatatcatagtgggaagtattgcttagaatgccagtacttgtttgctgtggaaggtttctaggaatggattgcttagtctaaagtaagcactaccaccatccacgttttcactcaacacagtgccttttaattggtgactaacatcaaaacaccttgacaaaccgttaaaacagtatcagaaaccatgtgtacatccctgtgcctcttagattgctaagttctgctctcattcttacttcaaaggacactttttaaagaattgttaatgcttttttataatacaagtcatagccctgttggcaaaaagaaaaaagattcagtgagaaagaaaaatcactgataattccatcatccagggagaaccactgttatttaagtatatggccttccagacttttctgtgcatttatagatatttttaatgggatcaaagtgtacatactgttttgtaactttttttcactcaacaataccatgactgtcttgctgnnnnnnnnnnnnnnnnnnnnnnnnnnnnnnnnnnnnnnnnnnnnnnnnnnnnnnnnnnnnnnnnnnnnnnnnnnnnnnnnnnnnnnngtttccaactttcattaataaagtgctttaaagaacattgtgttgct

SEQ ID NO: 357278 - DNA, 2003 bp, Homo Sapiens
gggagacctcatcttccaaccaagcttgctgggctagctttaatcaatgctggcctgagaacaggagcggaacattgcctagtagaccctgaggctttacaacagtgccactgacccctatgtgctgtatctgtgtcctgctgcctctcagcccatttccgggaccttgcaggatgaggagataactttgagctgctcagaggccagcgctgaggaagctctgctccctgcacttcccaaaacagtatctttcagaataaacagcgaagacttcttgctggaagcgcaagtgagggatcagccacgctggctcctggtctgccatgagggctggagccccgccctggggctgcagatctgctggagccttgggcatctcagactcactcaccacaagggagtaaacctcactgacatcaaactcaacagttcccaggagtttgctcagctctctcctagactgggaggcttcctggaggaggcgtggcagcccaggaacaactgcacttctggtcaagttgtttccctcagatgctctgagtgtggagcgaggcccctggcttcccggatagttggtgggcagtctgtggctcctgggcgctggccgtggcaggccagcgtggccctgggcttccggcacacgtgtgggggctctgtgctagcgccacgctgggtggtgactgctgcacattgtatgcacagtttcaggctggcccgcctgtccagctggcgggttcatgcggggctggtcagccacagtgccgtcaggccccaccaaggggctctggtggagaggattatcccacaccccctctacagtgcccagaatcatgactacgacgtcgccctcctgaggctccagaccgctctcaacttctcagacactgtgggcgctgtgtgcctgccggccaaggaacagcattttccaaagggctcgcggtgctgggtgtctggctggggccacacccaccctagccatacttacagctcggatatgctccaggacacggtggtgcccttgttcagcactcagctctgcaacagctcttgcgtgtacagcggagccctcaccccccgcatgctttgcgctggctacctggacggaagggctgatgcatgccagggagatagcgggggccccctagtgtgcccagatggggacacatggcgcctagtggggtggtcagctgggggcgtggctgcgcagagcccaatcacccaggtgtctacgccaaggtagctgagtttctggactggatccatgacactgctcaggactccctcctctgagtcctgctgtttcctccagtctcactgcacaccactgcctcatgcttcctggggcctccagcagctccactaatggaggagaggcagtagcctccgacacagaacgcatggacctcctactactgtgtgtgaggaacagtcactacccactggccagccacccagccaacaggtctctcctcttgggccctgatttcagagtcctctttctcactagagactcaatgacagaagagaggctgggacttggttgggcatgctgtggttgctgagggatgagggggaggagagaggtaggagctggagatgaagaggctgctagaagcagcaggaagcctgcccttctgccctctcccctccctgcccctgtgtgagtcttttgggagggtgctgggaggtgccccccgtcccacctttttcctgtgctctaggtgggctaagtgcctccctagaggactccatggctgagaggctcctgggcagatggggtcaaggctgggccagcccagatgaagcctatgggagtcaggaccctctccactctccctctccactccccttcctgttctcacctggctgtggctggccctgtgtggggtgggtacactggaaaacaagaaggttggagttggtctaggacattggttttaaatgacagttctgtgaactggtccaaggagttctgttattaaagtgatatatggtcttggtca

SEQ ID NO: 357279 - DNA, 1128 bp, Homo Sapiens
catgatgttgtcttagctaaaagatggtagcaactgccgtgatgagatgctgccctgaatgctgctgcatgtggtcaaacctccgctcccaatctacccggaccagaacctggcttcctggatccaggggtgtctgggtgaaatgatcagcctgttccccacggcgagtcactctcagcacagagatgtcattgattgtaccacggtcatcaggctgtcccccgccctcagggaaaagcactgtgtcttccagcaccacttggaaaccgctcagcacttctttcttgccgttgctcccttcagtctgcagctccgcgggacagcaagagaccacggtggtggtgaaatccaaatcatccatggcaggtggaggtctcttggtgctgaccttcttcaaaagctctgcataatgttccacatgagccagctccatctcttcatccccttcccagtctctccagttatcaaagtccacagacagccacactggcttgatatcctccttggtaagccgcggccagcccaccttttccttccatttttctcacaaaacaagtaatagagcgggaagagcgcttatcctgggagtcctttggagttcactttggcatagaactcaatctcattgtaccaactccactccatcggcattcttgcagctgaacacaatgcggtgatcctcaataagcacgtggacatcggtgctgtcctcaacacaaaactccatgaacacatacctgggcctgtcgtaccacaaggtccgggcgtgctgccgtgccattgcggctcccgctccagggtggcatttagagttccaggcaggggccgctatctttagatcctggggacgcccccagcagctgcctctccttatatggtcgggagagcagttgagaggaagagagaacatgacctggcagccaagggatctgcactctggagatactctgggacagcttcatccttgcagcccttcaccgtggggtcttcagaaatgcatagactgtttctccgacgcttactgctcagtgtctgattcacaataggcgctcaataaaacattattgtcctgaattaaattcccggggaaggcgcgccctcggggacttgggtacttcaggccccgcc

SEQ ID NO: 357280 - DNA, 1329 bp, Homo Sapiens
agcggacacgcctgcaggtatggcgttctggtgtcagcgtgacagttatgcccgagagttcaccaccaccgtggtctcttgctgtcccgcggagctgcagactgaagggagcaacggcaagaaagaagtgctgagcggtttccaagtggtgctggaagacacagtgcttttccctgagggcgggggacagcctgatgaccgtggtacaatcaatgacatctctgtgctgagagtgactcgccgtggggaacaggctgatcatttcacccagacacccctggatccaggaagccaggttctggtccgggtagattgggagcggaggtttgaccacatgcagcagcattcagggcagcatctcatcacggcagttgctgaccatctatttaagctgaagacaacatcatgggagttagggagatttcggagtgcgattgagctggacaccccctctatgactgcagagcaagtagctgccattgagcagagcgtcaatgaaaaaatcagagatcggctgcctgtgaatgtccgagaactgagcctggatgatcctgaggtggagcaggtgagtggccggggtttgcctgatgatcatgctgggcccattcgggttgttaacatcgagggcgttgattccaacatgtgctgtgggacccatgtgagcaatctcagtgaccttcaggtcattaagattctgggcactgagaaggggaaaaagaacagaaccaacctgatatttctgtctgggaaccgggtgctgaagtggatggagagaagtcatggaactgaaaaagcactgactgctctgcttaagtgtggagcagaggatcctgtggaaacagtgaaaaagctccagaactccacaaagatcctgcagaagaataacctgaatctgctcagagacctggctgtgcacattgcccatagcctcaggaacagtccagactggggaggtgtggtcatattacacaggaaggagggtgattcagagttcatgaatatcattgccaatgagattgggtcagaggagaccctcctgttcttaactgtgggcgatgagaaaggtggtggactcttcttactggcagggccacctgcgtctgtggagaccctggggcccagggtggctgaggtcctggaaggcaaaggagcagggaagaaaggccgttttcagggcaaggccaccaagatgagccggcggatggaggcgcaggcgcttctccaggactacatcagcacgcagagtgctaaggagtgagggcttagggcactcacctcctgtttccacaggaatcttttggtcaataaaatagattgactcagaaaaaa

SEQ ID NO: 357281 - DNA, 582 bp, Homo Sapiens
caggggtgtctgggtgaaatgatcagcctgttccccacggcgagtcactctcagcacagagatgtcattgattgtaccacggtcatcaggctgtcccccgccctcagggaaaagcactgtgtcttccagcaccacttggaaaccgctcagcacttctttcttgccgttgctcccttcagtctgcagctccgcgggacagcaagagaccacggtggtggtgaaatccaaatcatccatggcaggtggaggtctcttggtgctgaccttcttcaaaagctctgcataatgttccacatgagccagctccatctcttcatccccttcccagtctctccagttatcaaagtccacagacagccacactggcttgatatcctccttggtaagccgcggccaggccaccttttccttccattttctcacaaaacaagtaatagagcgggaagagcgcttatcctgggagtccttggagttcactttggcatagaactcaatctcattgtacaactccactccatcggcattctgggcctgccgtaccacaaggtccgggcgtgctgccgtgccattgcggctcccgct

SEQ ID NO: 357282 - DNA, 907 bp, Homo Sapiens
  misc_feature (79)..(182): n is a, c, g, or t
  misc_feature (884)..(884): n is a, c, g, or t
  misc_feature (887)..(887): n is a, c, g, or t
caaggtggaatatttgggaaaatgaaaccttcggtgataaaagagaggggaaaatgataagtgggggttgatatatcgnnnnnnnnnnnnnnnnnnnnnnnnnnnnnnnnnnnnnnnnnnnnnnnnnnnnnnnnnnnnnnnnnnnnnnnnnnnnnnnnnnnnnnnnnnnnnnnnnnnnnnnnaaaagtagttttgttataagcgcaggtgccctctttctgacttgtgatctaataaaagggaaagtatctcgtggtctgattttagttcagtcaactagatatcatggagtacgagaaataataggaagggggcgggagcctttttttaacaagtagtaaatgaattgtgtgcaacaacgtgctaaatgatacacaacctattacattcaccagtccttcattataccattgacctgaggctagcaagagattttgtcatgactgtaaagttgaaagtcaaaagcttatttctggtcccactcttaacagtgtattagatgtggaaataaaagtcattttgggtagctgctatgaaactttatgagcagattcttggctgcaccgatgtatgacagaatttatggagaggcctatggcaatatgagcaacttgaaaactcctaaggaagtgcaggtagctaacagcttggtgtggtgtgtgtgggtaacaatccacatcaaaagtgagctttacattgacttggattgttagacatcagtgggttattctgttgtttttataaaaggtttatactgtatcaatggaatgagtcatttatgatgaatttgcaataagcaaagcattaaaaatgaaatattcagtgtccattttgaggtagaattggtgtcaacacagaacgttcttcctactcaaggtgtaggntancgcttagtgtggtaataaaa

SEQ ID NO: 357283 - DNA, 674 bp, Homo Sapiens
gtgtgagacagtgcacctggccgaaatagctcaagtttctgaaaaacaaatctgaatctatttgttattcttagcgtcactggtctggctttcagaattaacatacaaggttgccacacctagttctgcccagctttatgtcttttattccagtattccaccaaagtttgttttcctgcattccagttctcaagtcttaagataaagattgtacttgacagtttagtatatccataaaactatttgaggtggttaaggttcttgggttcattttccttaatactttgctgaatattgtagattgtaggcaatgaaaaagtctactaaattaggaaaaccttgaataattaggtatcctaggtaagagcccctaaacatcaagcaatctgtgagtctgtaaagaaataaatattttttggattattcttatctaattccacccctgttggaagatgatttctttgttctttgcaactatggaagctgtgaaaatcatcacaagtgcctctgaaagcgagtgttaggttggttagagggtttaatattttctgcaatggtttgtaggaattttaataaatgtagtatattttctgagatgattttgtaaaagtactattttaaatatcaaatcaaccaataaattcacatttgtgttaggaacagaaatatggttt

SEQ ID NO: 357284 - DNA, 377 bp, Homo Sapiens
cagagcacaagaagtaccagtccaccaactcacattttctatattaataattcttaactaaaagaagttccatattcgacagcattttagttttttaatagtacttattagcatcaaccatcttgataatcaccaagggaaaaattaaaaatacctagactgcaataaacctttaaattggattttcagtgagaatttagaagcaatcactacctttctcgtttcatttgtgtaaccatgcagcataggcactgtgttacatcatctttacgctttggtatttgaacttattacagaattttttctctaaattggatgtttctttatatgacctggcaaactgaagggatcttagcattaaacaaaaatgctttttg

SEQ ID NO: 357285 - DNA, 981 bp, Homo Sapiens
ggtccggaattcccgggatcgacgggaaggagtgaaacacctctctgcgcctgcgcgctccgtgcctgcgaacaaaacccggcctcaccttttcctgcccgaagcagaagattctcgcagtcctggtttctccctccagaagaccccccacccaaatcctctgtagctcctggtagtgccctgacccctgctgccaccgtccttcagagagcaacggaagagcttcccggagggcgaggaaaagagggaaagtagccagcaatgtcgaacgcaatgtataataagatgtggcatcagacccaagaagccctcggtgctttactcgataaagagcctcagaagatgattgaaccacaaagaaatcaggttttcatctttcaaacattagccaccttctacgtaaagtatgtgcagatctttagaaacctagagaatgtctacgaccagttcgtccacccccagaaacgaatactgatcaggaaagtcctggacggggtgatgggccgcatcctggagctgaagaacgagatggtggagctggaactcacggagttccattatttcgatgatatcctgcaggatctcaagctggccccccaacaattagatattcccatacccaagtattttttgaaggagaagttggaagtaataaaaggaagagagaaaattcttgctcaaatattagcggacagcggaatagatacatctgacatgaaataccctgtaaagagtatccctttcgatgaggctgttaaattaatccagattgctgagagggcacggcaaggtcgcctaagggctttattcatgaagcaaatctatctgcaagaatatagagcaaagcaatccaagatgcttggcaagaaagtgacagatacctgggctgctgcactccgcattcagaaggtgtggcgacgtttccatcaacgtaaggaaactgaaaaactgagagaagaggagatgatcttcctgggtatg

SEQ ID NO: 357286 - DNA, 915 bp, Homo Sapiens
  misc_feature (43)..(43): n is a, c, g, or t
  misc_feature (131)..(131): n is a, c, g, or t
cgacaggcttcaaaccgctgggaaaaacgagccatggaaaaanaaaacaaaaagattcgggacaaagcaaggaaagagaagaatgagcttgtccgtcagctggtagctttcattcgtaaaagagataaaanagtgcaggcgcatcgaaaacttgtggaagaacagaatgcagagaaggcgaggaaagccgaagagatgaggcggcagcagaagctaaagcaggccaaactggtggagcagtacagagaacagagctggatgactatggccaatttggagaaagagctccaggagatggaggcacggtacgagaaggagtttggagatggatcggatgaaaatgaaatggaagaacatgaactcaaagatgaggaggatggtaaagacagtgatgaggccgaggacgctgagctctatgatgacctttactgcccagcatgtgacaaatcgttcaagacagaaaaggccatgaagaatcacgagaagtcaaagaagcatcgggaaatggtggccttgctaaaacaacagctggaggaggaagaagaaaatttttcaagacctcaaattgatgaaaatccattagatgacaattctgaggaagaaatggaagatgcaccaaaacaaaagctttctaaaaaacagaagacacaagaaacagtaaaccagcacaggatgtacctggcaaagattcatatctgcctgcagctcactttcagatggcttggggaaaaaagtgtgtgtagggagagagaagagatggagagagcgagcacaaatgtgccaaaatgttgcttgaaaacagacagaattatgatgaccatttcaatgtaaatggacctggagaaggagtacaggttgatccagaagatactaacttaaatcaagacagtgccaaagaataggaagatagtcctc

SEQ ID NO: 357287 - DNA, 680 bp, Homo Sapiens
ggaactctggaggtgagtgcccgcaagcagttcccctgctttgaaagaagatggtcagcccgctgcctccccagcggccacagctcctttgagtgtggggggtcacagccaggatgtattcctgacaataaggatccttttattttcatttctgcataatgaaagagcctttcgatttattagaagtggtttttcctccctacatctttaaattcttggttctctttagtcctcatcccttgaatggacttgtcagctacctccccaggaggagttcagaagcttctgttggccatcacttgagtagatgacaagctgtaaggtatctgctgctaacgtggctgcttctccgagagcacattgaggtccagacagatccaaaccttggccctaaaaaatgtgtgctgtaaagttacttgatgtatatttattataattatttatggttgcatttaacaaacttttcattcaatctgatgctatttacaccatgctgtgtaaaggaagctcactaaaggaaaaaagtcacaccaataaataaccttcatctaattttgatttaccttaagagttgtgtgatcatctactcttgctgagcaagttcaaaggctggcatgcttggatggctctgatatttaagtgctgccaagtggctaggaattaaagtgtttctaattaaa

SEQ ID NO: 357288 - DNA, 470 bp, Homo Sapiens
  misc_feature (436)..(436): n is a, c, g, or t
  misc_feature (443)..(443): n is a, c, g, or t
ttttttttgtaaatcaaaattagatgaaggttatttattggtgtgacttttttcctttagtgagcttcctttacacagcatggtgtaaatagcatcagattgaatgaaaagtttgttaaatgcaaccataaataattataataaatatacatcaagtaactttacagcacacattttttagggccaaggtttgggatctgtctgggacctcaatgtgctctcggagaaggcagccacgttaggcaggcagataccttacaggcttgtcatctacttcaagtgatgggccaacaggaaggcttctggaactcctcctgggggagggtaggctgacaagtccatttcaaggggatgagggacttaaaggggaaccaaggaatttttaaaggatgttgggggagggaaaaaccactttcttaattaaattcgaaagggncttttcnttatggcggaattgaaattaaagggtc

SEQ ID NO: 357289 - DNA, 975 bp, Homo Sapiens
  misc_feature (4)..(4): n is a, c, g, or t
  misc_feature (28)..(28): n is a, c, g, or t
  misc_feature (31)..(31): n is a, c, g, or t
  misc_feature (64)..(64): n is a, c, g, or t
  misc_feature (96)..(96): n is a, c, g, or t
  misc_feature (103)..(103): n is a, c, g, or t
  misc_feature (141)..(141): n is a, c, g, or t
  misc_feature (150)..(150): n is a, c, g, or t
  misc_feature (175)..(175): n is a, c, g, or t
  misc_feature (179)..(179): n is a, c, g, or t
  misc_feature (188)..(188): n is a, c, g, or t
  misc_feature (532)..(534): n is a, c, g, or t
  misc_feature (536)..(548): n is a, c, g, or t
  misc_feature (554)..(554): n is a, c, g, or t
  misc_feature (556)..(557): n is a, c, g, or t
  misc_feature (563)..(563): n is a, c, g, or t
  misc_feature (568)..(568): n is a, c, g, or t
  misc_feature (581)..(581): n is a, c, g, or t
  misc_feature (587)..(588): n is a, c, g, or t
  misc_feature (604)..(604): n is a, c, g, or t
  misc_feature (606)..(606): n is a, c, g, or t
  misc_feature (613)..(615): n is a, c, g, or t
  misc_feature (617)..(617): n is a, c, g, or t
  misc_feature (620)..(620): n is a, c, g, or t
  misc_feature (624)..(624): n is a, c, g, or t
  misc_feature (639)..(639): n is a, c, g, or t
  misc_feature (641)..(641): n is a, c, g, or t
  misc_feature (645)..(645): n is a, c, g, or t
  misc_feature (653)..(653): n is a, c, g, or t
  misc_feature (656)..(656): n is a, c, g, or t
  misc_feature (659)..(659): n is a, c, g, or t
  misc_feature (665)..(665): n is a, c, g, or t
  misc_feature (675)..(675): n is a, c, g, or t
  misc_feature (679)..(679): n is a, c, g, or t
  misc_feature (681)..(681): n is a, c, g, or t
  misc_feature (683)..(683): n is a, c, g, or t
  misc_feature (685)..(685): n is a, c, g, or t
  misc_feature (687)..(687): n is a, c, g, or t
  misc_feature (695)..(695): n is a, c, g, or t
  misc_feature (707)..(707): n is a, c, g, or t
  misc_feature (714)..(714): n is a, c, g, or t
  misc_feature (719)..(720): n is a, c, g, or t
  misc_feature (740)..(740): n is a, c, g, or t
  misc_feature (755)..(755): n is a, c, g, or t
  misc_feature (774)..(774): n is a, c, g, or t
  misc_feature (779)..(780): n is a, c, g, or t
  misc_feature (787)..(787): n is a, c, g, or t
  misc_feature (789)..(790): n is a, c, g, or t
  misc_feature (792)..(793): n is a, c, g, or t
  misc_feature (797)..(797): n is a, c, g, or t
  misc_feature (809)..(809): n is a, c, g, or t
  misc_feature (816)..(817): n is a, c, g, or t
  misc_feature (819)..(820): n is a, c, g, or t
  misc_feature (822)..(822): n is a, c, g, or t
  misc_feature (825)..(825): n is a, c, g, or t
  misc_feature (827)..(827): n is a, c, g, or t
  misc_feature (830)..(830): n is a, c, g, or t
  misc_feature (838)..(839): n is a, c, g, or t
  misc_feature (841)..(842): n is a, c, g, or t
  misc_feature (853)..(854): n is a, c, g, or t
  misc_feature (862)..(862): n is a, c, g, or t
  misc_feature (864)..(864): n is a, c, g, or t
  misc_feature (867)..(868): n is a, c, g, or t
  misc_feature (870)..(870): n is a, c, g, or t
  misc_feature (886)..(886): n is a, c, g, or t
  misc_feature (889)..(889): n is a, c, g, or t
  misc_feature (891)..(891): n is a, c, g, or t
  misc_feature (898)..(899): n is a, c, g, or t
  misc_feature (901)..(901): n is a, c, g, or t
  misc_feature (903)..(903): n is a, c, g, or t
  misc_feature (909)..(909): n is a, c, g, or t
  misc_feature (917)..(917): n is a, c, g, or t
  misc_feature (926)..(926): n is a, c, g, or t
  misc_feature (928)..(928): n is a, c, g, or t
  misc_feature (931)..(932): n is a, c, g, or t
  misc_feature (934)..(934): n is a, c, g, or t
  misc_feature (938)..(938): n is a, c, g, or t
  misc_feature (946)..(946): n is a, c, g, or t
  misc_feature (949)..(949): n is a, c, g, or t
  misc_feature (956)..(958): n is a, c, g, or t
  misc_feature (969)..(969): n is a, c, g, or t
tgcntgtcaactctgcaaaactagaacntanccactttaaatatacttaacacatgacagcatnctcagtcttggtttcttcttgcagatgaagtngaaaggnagctcaatccaactctcagacaaaaagctttgtcaganatgccaaantcccttttgtgagcctgtgtttgtnaganacccaaatngtggtcttgtgcacacccactgtgccgccagcagacacacaaaccccagctcatccagtcctggcactcggacttgaaaagcctggcccaagggtgcgaggggaactccgagttctttctgagcctgctggacatgaagagcagatgaccaccatgctctgtgtcagccaggacgaagggagacatctgggtgccagggagccttccgtccatacgcaacaaggactccccgctgctgaccaggctctatgaatgtacatggaaaacccctaaaaatccccaaaacagaaacatacaagagttcacctgtccaggtacatagtaatccaagacagaggtctacnnngnnnnnnnnnnnnngggagncnnccccantcagnccagcacccaggngggggnnccccaccacccccacncnccaaccnnnanacncatnttagcactggaaacntngctncaccatgnctngcnacaaantcctctcttncctntntnantntctatttnacatatccacanttttttnatccnntccctccttcataaacactnaccccacccactccncacactcaatttcccatancccanntgaaccncnntnncccncccactcccccnaaaaacnncnnanccntnaanaagaaccnnannacccgcagacnnccccaccngnacnnancccccaaaaaaacctnccntngtgaccnnancncccacncgtgtgcnaacaaactnancanncntgcnatcatgtnaanacctgtnnnaaaactataantcccca

SEQ ID NO: 357290 - DNA, 1141 bp, Homo Sapiens
  misc_feature (1090)..(1090): n is a, c, g, or t
cagccccgccccgctcgctggcctgccctcctcttgctaccctcccggcgcagagaaccccggctgctcagcgcgctccgcggtcatggagatccccgggagcttgtgcaagaaagtcaagctgagcaataacgcgcagaactggggaatgcagagagcaaccaatgtcacctaccaagcccatcatgtcagcaggaacaagagaggtcaggtggtggggaccagaggtggctttcgtggttgcacagtttggctaacaggcttgtctggagcgggaaagactactgtgagcatggccttggaggagtacctggtttgtcatggtattccatgctacactctggatggtgacaatattcgtcaaggtctcaataaaaatcttggctttagtcctgaagacagagaagagaatgttcgacgcatcgcagaagttgctaaactgtttgcagatgctggcttagtgtgcatcacaagtttcatatcaccttacactcaggatcgcaacaatgcaaggcaaattcatgaaggtgcaagtttaccgttttttgaagtatttgttgatgctcctctgcatgtttgtgaacagagggatgtcaaaggactctacaaaaaagcccgggcaggagaaattaaaggtttcactgggatcgattctgaatatgaaaagccagaggcccctgagttggtgctgaaaacagactcctgtgatgtaaatgactgtgtccagcaagttgtggaacttctacaggaacgggatattgtacctgtggatgcatcttatgaagtaaaagaactatatgtgccagaaaataaacttcatttggcaaaaacagatgcggaaacattaccagcactgaaaattaataaagtggatatgcagtgggtgcaggttttggcagaaggttgggcaaccccattgaatggctttatgagagagagggagtacttgcagtgccttcattttgattgtcttctggatggaggtgtcattaacttgtcagtacctatagttctgactgcgactcatgaagataaagagaggctggacggctgtacagcatttgctctgatgtatgagggccgccgtgtngccatatcttcgcaatccagagttttttgagcacaggaaagaggagcgctg

SEQ ID NO: 357291 - DNA, 1692 bp, Homo Sapiens
  misc_feature (49)..(86): n is a, c, g, or t
gccccaccccatgtgacgatatatggggaaccggtttacgggtggcggnnnnnnnnnnnnnnnnnnnnnnnnnnnnnnnnnnnnnnatcaggccaaatcggccgagctcgaattcgtcgagagcggactggggcttccttccgtctcgctcggagtttccctctgcgttcgctccgcgctgctggaggctgtcgtcccaatgctccccaaacggcggcgagcgcgggtcgggtcccctagcggcgatgccgcttcctccacgccgccctcgacgcgcttcccgggagtcgccatctacctggtcgagcctcgcatgggtcgcagccgccgggccttcctcacaggcctggcgcgctccaaaggcttccgcgtccttgacgcctgcagctccgaagcgacacatgttgtgatggaagagacctcagcagaggaggccgtcagctggcaggagcgcaggatggcagctgctcccccgggttgcacccccccagctctgctggacataagctggttaacagagagcctgggagctgggcagcctgtacctgtggagtgccggcaccgcctggaggtggctgggccaaggaaggggcctctgagcccagcatggatgcctgcctatgcctgccagcgccctacgcccctcacacaccacaacactggcctctccgaggctctggagatactggccgaggcagcaggctttgaaggcagtgagggccgcctcctcaccttactgcagagcagcctcggtgctcaaggcccttcccagccctgtcacaaccctgagccagctgcaggggcttccccactttggagaacactcctctagggttgtccaggagctgctggagcatggagtgtgtgaggaggtggaaagagttcggcgctcagagaggtaccagaccatgaagggcctcatcctgtaccaccagcaccagcacagctgctgtgacgtcccctatcccgcctggcccaacagagccacatggacgcttttgaggagaagtttctgcattttccgcctaccacaacctccaggggctgctgtggggggatcaacgaggccctgcccatcctggaaggccgtgagagtggacttggtagttgcacccgtcagccagttccctttcgccctgctcggttggactggctccaagcttttccagcgggagctgcagccgcttcagccggaaggagaagggcctgtggctgaacagccatgggctgtttgacccggagcagaagacatttttccaagcggcttcagaggaagacatcttcagacacctgggccttgagtaccttcctccagagcagagaaacgcctgagcctgcctgtgtcccccacttccactcaggaaattgggctgcccccaacctggccactgaaatgtctccaggcagatatgctgccccctgacacccaccttaacccctccccgccaaaggcctggatcttccgaaggtcaattgatccttgcaggatcagatagaagcaccctgactggtagtgctgcaagggtagtgatgagggtggaaagcaccagccagaaggcagacgtaatcaacaggagtagaacccaggggacagggctaagacaaccccaaggagaccacgtcccaggccctggataggaaggcgagtagggaccacaatcgagaagaaggaatggggcagcagacaaaagg

SEQ ID NO: 357292 - DNA, 1694 bp, Homo Sapiens
  misc_feature (307)..(307): n is a, c, g, or t
  misc_feature (395)..(395): n is a, c, g, or t
  misc_feature (574)..(574): n is a, c, g, or t
  misc_feature (576)..(634): n is a, c, g, or t
  misc_feature (669)..(669): n is a, c, g, or t
  misc_feature (677)..(677): n is a, c, g, or t
  misc_feature (685)..(685): n is a, c, g, or t
  misc_feature (689)..(689): n is a, c, g, or t
  misc_feature (693)..(693): n is a, c, g, or t
  misc_feature (697)..(697): n is a, c, g, or t
  misc_feature (731)..(731): n is a, c, g, or t
  misc_feature (1326)..(1326): n is a, c, g, or t
  misc_feature (1525)..(1525): n is a, c, g, or t
ccgagcgccgaggagccgagcggaggaggcgtcccagggacacgcaggggaggccggccggcctgcacggggcgctcccgcctcgggggccctgtctggcgcctcagcgcgcgccccgatggtcacctgcgcccacctgggccggcgcgcgcggctcccggcagctcagccctctgcctgcccaggaacctgcttttcccaagaggagagaatggctgctgggtacctgccccgctggtcccaggaattagtaacctttgaggacgtgtccatggacttctcccaggaggagtgggagttgctggancctgctcagaagaacctgtacagagaggtgatgctggagaactacaggaacgtggtctccctggaagccttgaagaaccaatgtactnatgtggggattaaagagggtccactttccccagcacaaacctcacaagtcactagtctttcctcatggacggggtatttactttttcaaccagtggcttcttcccacttggagcaaagagaagccctgtggatagaggaaaaaggaactcctcaagcctcctgttcagtctcgctcttntnnnnnnnnnnnnnnnnnnnnnnnnnnnnnnnnnnnnnnnnnnnnnnnnnnnnnnnnnnnggttcaaggcggattcttctgcctcagcctctttnaattacanattggatnactntacntaanaaaccaagacttcaacttacagaaggtggctttncaggaggaaccagccagtggtataaatatgataaagcttatcagagaagatgggggatggaagcagttaggggacagccatgaagacccccaggggcttttgagccaaaaggcatcccttcacgtagtggcacattcctcaggagaaggctactgcatggcatggatttggggaaaatggtaatctgagcccagcccttgttttatcacagggaagctctaaagggaaccacttgtgtggcagcgagttagatattacaagcttggcatccgattcagtcttaaaccaccatcagctgggatatgcagatcggagaccttgtgaaagtaatgaatgtggaaatgccatccgccagaacagtcactttattcaacacggggggaagatgtttgtgtatttggaaaatgggcagtcattgaaccacggtatggccctgactatccacaacaaaatcaacacggcagagaaaccctttgagtgccaccagtgtgggaaggtgttcaaccggaggcattctttgagcgaacatcaaagaattcacacgggggagaaaccctacgagtgtcaggagtgtgggcgagcctttacgcacagntccaccctcacgcgccatctgagaactcatactggagagaagccctacgggtgcggtgagtgcgggaaagccttcaacaggatctcatcgctgactcagcatcagaggattcatcaccggggaaaagccctataaatgtgaagactgtgggaaatccttctgccagagctcttacctgatcttgcacaagaggacacancaccggaaagaagccctacgaatgcagtgaatgtgggaaaggcctctagtgaccgtttctctctcaacagcacgagcgaactcacacggccgagaacccctatgaatgtaagcagtgttgggaaagccttcagcccgaggttcttcccttgggaagcaccgaaagactc

SEQ ID NO: 357293 - DNA, 2064 bp, Homo Sapiens
  misc_feature (1584)..(1662): n is a, c, g, or t
ccaagatggcggcccccgggagctgtgccctatggagctattgcggccgtgggtggtcgcgggcgatgcggggctgccagctcctcgggcttcgtagctcttggcccggggacctactaagtgctcggctcttgtcccaagagaagcgggcagcggaaacgcactttgggtttgagactgtgtcggaagaggagaaggggggcaaagaactcctttaatgtgaaagtttttgctggcatcacttcttctgggacatcttcaacctttttgtcacagctccatttcttgttcatgttgtctatcaggtgtttgaaagtgtggctaagaagtatgatgtgatgaatgatatgatgagtcttggtatccatcgtgtttggaaggatttgctgctctggaagatgcacccgcttcctgggacccagctgcttgatgttgctggaggcacaggtgacattgcattccggttccttaattatgttcagtcccagcatcagagaaaacagaagaggcagttaagggcccaacaaaatttatcctgggaagaaattgccaaagagtaccagaatgaagaagattccttgggcgggtctcgtgtcgtggtgtgtgacatcaacaaggagatgctaaaggttggaaagcagaaagccttggctcaaggatacagagctggacttgcatgggtattaggagatgctgaagaactgccctttgatgatgacaagtttgatatttacaccattgcctttgggatccggaatgtcacacacattgatcaggcactccaggaagctcatcgggtgctgaaaccaggaggacggtttctctgtctggaatttagccaagtgaacaatcccctcatatccaggctttatgatctatatagcttccaggtcatccctgtcctgggagaggtcatcgctggagactggaagtcctatcagtaccttgtagagagtatccgaaggtttccgtctcaggaagagttcaaggacatgatagaagatgcaggctttcacaaggtgacttacgaaagtctaacatcaggcattgtggccattcattctggcttcaaactttaattcctttcctatcatggagcatgaaccagtcatatcctgttgaaagcctggaactgaaggataatctggcaaatgagacagcagcagagcatctcctcttaaggatacgtgccttggactcatgtttgaatcgaacagtctcaaagtggaagaacaaattcttgtcacttttttacagctttctttggagctgcttcagtccatctcccagaggcatttggtctgtatctttgctcaactgctaatttctcttggctgtagggtgtgtggttaaggtacaaccacccctaaagctcagttttgaagtgagtgtatttatagcttctctgctggtgctgccttctagagggatgatagatcatttgaacccagtgacaatttttaaccagaaaatttaattgtacctgaatcaacctttcagcctaggacgaagtctaggcccaagtcagagtattaatgatcatgagaattgtgtgctgaaccagtaaacgagtttaccttttgnnnnnnnnnnnnnnnnnnnnnnnnnnnnnnnnnnnnnnnnnnnnnnnnnnnnnnnnnnnnnnnnnnnnnnnnnnnnnnntggcggcccgccccggcccccaaaaagtttccaaaaccatcctttggccgcggggccccaaaaggaaaggaaccagggcccaaactggttccaaaggaaacccggggcatgaataagggcttggaatcccccccataaaaaaaccccggggggaacccaaggttttgaaaaaatccaaaggggattccgggggcctttactgggttcaacaacggggggcccaggggagcttcaaattcaaattcacccccccgcccctgccatttattggaagaaggtggtgggaattccattaaacactttccgccccgaacgtggaaagcccttccccaaaaggggctgtgatagaacccgtgaaatctgccaagggcgggaaataacaaaaccctgtggggcgccccc

SEQ ID NO: 357294 - DNA, 830 bp, Homo Sapiens
ttagatcataaagcccgggatatgaggggattgttccactgggctaaaatcccagccagagaaaccgtccttctgggtttcagcacccgatgagtttcctggagtgcctgatcaatgtggtggcatcccgatccccaagggcaatgtgtaaatatcaaactggtcatcatcaaagggcagttcttcagcatctcctaatacccatgcaagtccagctctgtatccttgagccaaggctttctgctttccaacctttagcatctccttgttgatgtcacacaccacgacacgagacccgcccaaggaatcttcttcattctggtactctttggcaatttcttcccaggataaattttgttgggcccttaactgcctcttctgttttctctgatgctgggactgaacataattaaggaaccggaatgcaatgtcacctgtgcctccagcaacatcaagcagctgggtcccaggaagcgggtgcatcttccagagcagcaaatccttccaaacacgatggataccaagactcatcatatcattcatcacatcatacttcttagccacactttcaaacacctgatagactttgccccccttctcctcttccgacacagtctcaaacccaaagtgcgtttccgctgcccgcttctcttgggacaagagccgagcacttagtaggtccccgggccaagagctacgaagcccgaggagctggcagccccgcatcgcccgcgaccacccacggccgcaatagctccatagggcacagctcccgggggccgccatcaggtagtcgagtgacacctcgtgctctgatcgccacccaggcc

SEQ ID NO: 357295 - DNA, 924 bp, Homo Sapiens
  misc_feature (839)..(875): n is a, c, g, or t
tgatcataaacctggatatggaggggaattgttcacttggctaaattccagacagagaaaccgtcctgcttggttcagcaccccgatgagcttcctggagtgcctgatcaatgtgtgtgacattccggatcccaaaggcaatggtgtaaatatcaaacttgtcatcatcaaagggcagttcttcagcatctcctaatacccatgcaagtccagctctgtatccttgagccaaggctttctgctttccaacctttagcatctccttgttgatgtcacacaccacgacacgagacccgcccaaggaatcttcttcattctggtactctttggcaatttcttcccaggataaattttgttgggcccttaactgcctcttctgttttctctgatgctgggactgaacataattaaggaaccggaatgcaatgtcacctgtgcctccagcaacatcaagcagctgggtcccaggaagcgggtgcatcttccagagcagcaaatccttccaaacacgatggataccaagactcatcatatcattcatcacatcatacttcttagccacactttcaaacacctgatagactttgccccccttctcctcttccgacacagtctcaaacccaaagtgcgtttccgctgcccgcttctcttgggacaagagccgagcacttagtaggtccccgggccaagagctacgaagcccgaggagctggcagccccgcatcgcccgcgaccacccacggccgcaatagctccatagggcacagctcccgggggccgccatcttggtagtccagtccgctctcgacgaattcgagctcggccgatttggcctgatnnnnnnnnnnnnnnnnnnnnnnnnnnnnnnnnnnnnncgccgccaccgcgtaagctccagttcgccctatagtgatcttacatctt

SEQ ID NO: 357296 - DNA, 1008 bp, Homo Sapiens
  misc_feature (901)..(901): n is a, c, g, or t
  misc_feature (940)..(940): n is a, c, g, or t
  misc_feature (949)..(949): n is a, c, g, or t
  misc_feature (957)..(957): n is a, c, g, or t
  misc_feature (963)..(963): n is a, c, g, or t
  misc_feature (998)..(998): n is a, c, g, or t
gtcttgaggtctaatggcggacgccagtatgttggagttggtggtggcttaagttttgaagggaggtagcatccgttggatatccacaccatccttctcgctgcaggctttcttggactccgtactgttggtgtaaccaaggcctggaggtctgggtggctcaggtttcctgcagccatgtttctgtacaacttaaccttgcagagagccactggcatcagctttgccattcatggaaacttttctggaaccaaacaacaagaaattgttgtttcccgtgggaagatcttggagctgcttcgcccagaccccaacactggcaaagtacataccctactcactgtggaagtattcggtgttatccggtcactcatggcctttaggctgacaggtggcaccaaagactacattgtagttggcagtgactctggtcgaattgttattttggaataccagccatctaagaatatgtttgagaagattcaccaagaaacctttggcaagagtggatgccgtcgcatcgttcctggccagttcttagctgtggatcccaaagggcgagccgttatgattagtgccattgagaaacagaaattggtgtatattttgaacagagatgctgcagcccgacttaccatttcatctcccctggaagcccacaaagcaaacactttagtgtatcatgtagttggagtagatgtcggatttgaaaatccaatgtttgcttgtctggaaatggattatgaggaagcagacaatgatccaacaggggaagcagcagctaatacccagcagacacttactttctatgagctagaccttggtttaaatcatgtggtccgaaaatacagtgaacctttggaggaacacggcaacttccttattacagttccaggagggntcagatggtccaagtggagtactgatctgctctgaaaantataatacntacaaganctttgntgacagccagatatccgcggtcaattccaagaggncggatgacat

SEQ ID NO: 357297 - DNA, 1111 bp, Homo Sapiens
  misc_feature (959)..(959): n is a, c, g, or t
  misc_feature (984)..(984): n is a, c, g, or t
  misc_feature (998)..(998): n is a, c, g, or t
  misc_feature (1000)..(1000): n is a, c, g, or t
  misc_feature (1019)..(1019): n is a, c, g, or t
  misc_feature (1030)..(1030): n is a, c, g, or t
  misc_feature (1032)..(1032): n is a, c, g, or t
  misc_feature (1037)..(1037): n is a, c, g, or t
  misc_feature (1046)..(1046): n is a, c, g, or t
  misc_feature (1051)..(1051): n is a, c, g, or t
  misc_feature (1061)..(1061): n is a, c, g, or t
  misc_feature (1063)..(1063): n is a, c, g, or t
  misc_feature (1067)..(1068): n is a, c, g, or t
  misc_feature (1077)..(1078): n is a, c, g, or t
  misc_feature (1086)..(1086): n is a, c, g, or t
  misc_feature (1089)..(1089): n is a, c, g, or t
  misc_feature (1103)..(1103): n is a, c, g, or t
  misc_feature (1109)..(1109): n is a, c, g, or t
ggtaagcggctggtgatgctggaacaaacatggccgctctggcgcccgtcggctcccccgcctcccgcggtcctaggctggccgcgggcctccggctgctcccaatgctgggtttgctgcagttgctggccgagcctggcctgggccgcgtccatcacctggcactcaaggatgatgtgaggcataaagttcatctgaacacctttggcttcttcaaggatgggtacatggtggtgaatgtcagtagcctctcactgaatgagcctgaagacaaggatgtgactattggatttagcctagaccgtacaaagaatgatggcttttcttcttacctggatgaagatgtgaattactgtattttaaagaaacagtctgtctctgtcacccttttaatcctagacatctccagaagtgaggtaagagtaaagtctccaccagaagctggtacccagttaccaaagatcatcttcagcagggatgagaaagtccttggtcagagaccaggagcctaattgttaacccctgactacagcacaggcaaccaaaacccagaaagacacacagatggtggacaagtctaaaagaagtacagtggatacaaaggccatgggagagaaatccttttctgttcataataatggtggggcagtgtcatttcagtttttctttaacatcagcactgatgaccaagaaggcctttacagtctttattttcataaatgccttggaaaagaattgccaagtgacaagtttacattcagccttgatattgagatcacagagaagaatcctgacagctacctctcagcaggagaaattcctctccccaaattatacatctcaatggcctttttcttctttctttctgggaccatctggattcatatccttcgaaaacgacggaatgatgtatttaaaatccactggctgatggcggcccttccttttcacaagtctcnttccttggtgttccatgcaattgantaccactacatctncncccagggcttcctatcganggtggggtgtntntatanataatcacntttgnaagggggctntnttcnnaccattcanncatggcanggngggcttcataaganatcttntg

SEQ ID NO: 357298 - DNA, 515 bp, Homo Sapiens
tggatttcactttaaagtcttactgatgttttacattttgtccgtttctcctgtgcaccaatgtgctgagcattttaacgatacttaaggagaaagatgtacctcagaattgtgtggttactaagatcttaggcttaagagagactacctggatcctcatccaactacttcctagcttggtgcccttgggcaagttatttaacgtttctgagcctcagttttggtatctgtagaatgtggataatagaatctacattgtagaacatcataaggactgcatgagcttggcacagggccttacacgcagcgtgctcagtggccaggagcactgctttgaccttttttccttctgttttatttgaatgtagggtaagagtaaagtctccaccagatagctggtacccagttaccataagatcatcttcagcagggatgagaaagtccttggtcagagccaggagcctaatgttaatcctgcttcagcaggcaacctagacccagtaatacactagatg

SEQ ID NO: 357299 - DNA, 1275 bp, Homo Sapiens
  misc_feature (221)..(221): n is a, c, g, or t
  misc_feature (995)..(995): n is a, c, g, or t
  misc_feature (1048)..(1048): n is a, c, g, or t
  misc_feature (1115)..(1115): n is a, c, g, or t
aagcaccctatcttctccttctgggataaaaagatgcaaagccgagtcacatttgataccatggacttcattgcagaggagggtcactttcctccaaaggccattcagatcatgcagaagaagccttcctggagaacagaggatgagatccaggccgtctgtaacacttgcaggttctggatagctatcggaactacgcagagcccctgcagctgctcctngccaaagtcatgcgctttgaacggtttggtcgcaggcgtgtgatcatcaagaaggggcagaagggcaacagcttttatttcatctacctgggcacagttgcaataaccaaggacgaggatggcagcagtgccttcctagatccccacccgaaattgctgcacaagggtagctgttttggggaaatggacgttctgcatgcttcagtgaggaggtccaccatcgtctgtatggaagaaacggagttcctggttgttaccgggaggacttctttgctaataagctggaccaggaagttcagaaggatgctcagtatcggtttgaattttttaggaagatggagctgtttgcatcatggtctgatgagaagctctggcagctggtagccatggcgaagatagagaggttctcgtatgggcagctgatctcaaaagatttcggagagtcacccttcatcatgtttatcagcaagggcagctgtgaagtcctgcggctgttggaccttgggggcctccccttcctaccgtagatggatctggcagcacctggagcttgatagatggcagacctctgaagacccacctgagtgaatactctcctatggaaagattaaaggaattccagatcaaatcatatcctctgcaagactttagctccttgaaacttccacatctcaaaaaagcctgggggctacaggggacaagcttcagcaggaagatcagaacctcaggagacactctctccaagatgctgggcccgaagatccaatccaggcntgctcagtcgatcaaatgtgccatgatcaatatcaagcctggtgagctccccnaggaggctgcagtgggggcctacgtgaaggtgcacactgtggagcagggagaaattttgggtcttcnccagtccttccttccagagggtgaatgcgacacacgacccttgatcctgatgagcctgggaaatgagttgatacggataaggaaggaaatattttatgaactgattgacaatgatgacgagatgataaaaaagttgttaaagctcaatattgcattcccc

SEQ ID NO: 357300 - DNA, 1885 bp, Homo Sapiens
  misc_feature (365)..(609): n is a, c, g, or t
  misc_feature (630)..(683): n is a, c, g, or t
  misc_feature (1802)..(1834): n is a, c, g, or t
ggggataatctccttagtgtgtaaagtagcagctttctgtaaagggaggatggaattgcccgtgttgccggagccgttccggggacattggcggatgtgattccggtctgatccgtgccaagtgggagcctgcaagcggtgagttccaaccagcgatgagggattacattagtggaaaagctgctgtcaggcaggcacagtggctcacaacgtgcaatcttacgcacttttggcaagcccaggcaggaggttcacctggaggcccagggatttttgaggatgagcctgaggccaacattggcatatgacctggcgtcaatttggtgatgaatgatgaaagttaaggctgagcgtggtgggctcannnnnnnnnnnnnnnnnnnnnnnnnnnnnnnnnnnnnnnnnnnnnnnnnnnnnnnnnnnnnnnnnnnnnnnnnnnnnnnnnnnnnnnnnnnnnnnnnnnnnnnnnnnnnnnnnnnnnnnnnnnnnnnnnnnnnnnnnnnnnnnnnnnnnnnnnnnnnnnnnnnnnnnnnnnnnnnnnnnnnnnnnnnnnnnnnnnnnnnnnnnnnnnnnnnnnnnnnnnnnnnnnnnnnnnnnnnnnnnnnnnnngagagtaaaacgtccatctcnnnnnnnnnnnnnnnnnnnnnnnnnnnnnnnnnnnnnnnnnnnnnnnnnnnnnnctctggccttgactttcacagggctgctgtactgagccaccccgtatctgtggtcccgtatttctccagagtggcacagagcactggccctaagctggggctaggatcacctgtccccaaagcagcagaacgaaggttctgtatcacttggcagaaaatgaagcagaagggtcacagcaggctacactgggtaacctgaggtcttaggaacagagtatcaaccagtgagaagaggtggctcctctgtcctccagcacataagggttagggaaagacagaaccacccaatgactgctgcagggtctgctggccagcatcctcagcacttttctgtggtccagttctggaatggcaggtgacagggcacatacaaggcctctgctccactgtcattgtcaactcatctcagctctgattcatttgttcacctcgaatcaacaacaggggcactggctttacccaatacttatcagctggtgcccactgcgctgtcaggcagtgagatttctggctgacttggaggcgctctgggcccgctgaacaatggcagaacacttctcacgtcgcagcagcttgttgttctcaaagagaccttcattgcgggggattccatgagaaccatcagggaaagtcagcaggccaaaaccatctactctgccatttttaaattccccctcaaaggtcatgttgtcatatcgaatgaagactccgacgccattaaacttgccctgggcaaactccccctcataccttgaaccatctgagaaggtcaataccccaaagccattaaagagcccattctcaaaatgacccaggtaggtgccaccatctgcaaacatcagttgaccaaaaccatgcctgcggccctccttccactcgccacgatattcctccccactggagtaggtgaaggaaccttttgtcagggtcatggtgacagattacaggataaaaggatgaaactggggccggcctttcgggatgaccgtcacgcctggacgcagggttccagcgcctcggacttttcctctgatgggctcccggctgccaccttgctctccgccacctccaccagccatcgctcccgacgaattcgagctcggccgatttggcctgatnnnnnnnnnnnnnnnnnnnnnnnnnnnnnnnnnatgcgccgccaccgcgtgagcctcccagtcgccctatatgatcgatacatt

SEQ ID NO: 357301 - DNA, 943 bp, Homo Sapiens
agcggtacccagtgcggtcgcccaggatggcggcgtcaagtggggcaatcgctggtggaggtggcggagagcaaggtggcagccgggagcccatcagaggaaaagtccgaggcgctggaaccctgcgtccaggcgtgacggtcatcccgaaaggccggccccagtttcatcattttatcctgtaatctgtcaccatgaccctgacaaaaggttccttcacctactccagtggggaggaatatcgtggcgagtggaaggagggccgcaggcatggttttggtcaactgatgtttgcagatggtggcacctacctgggtcatttcgagaatgggctctttaatggctttggggtattgaccttctcagatggttcaaggtatgagggggagtttgcccagggcaagtttaatggcgtcggagtcttcattcgatatgacaacatgaccttttgagggggaatttaaaaatggcagagtagatggttttggcctgctgactttccctgatggttctcatggaatcccccgcaatgaaggtctctttgagaacaacaagctgctgcgacgtgagaagtgttctgccattgttcagcgggccccagagcgcctccaagtcagccagaaatctcactgcctgacagcgcagtgggcaccagctgataagtatggggtaaaagccagtgcccctgtttgttgattcgagggtgaacaaaatgaaatcagaagctgagatgacgttgacaatgacagtgggagcaaaggcctggtattgtgccctgtcaactgccattccagaaactggaccacagaaaagtgctgaagatgctggcccagcaaaccctgcggagtcatggtgggtcctgtcttaaccctaacccttatgtgctgagaacgaggaacccctctctcacgggtgatacttcgtcctaagacccaggttacca

SEQ ID NO: 357302 - DNA, 817 bp, Homo Sapiens
gggtttatcgatgccacacacatataatattatatatgtgtgtggtatccaaggaatcacttttatgagggctaaagataaagaatttggccagaaaatgcagccatccttgtgtgattaggagggtttcaggggccactggactatttgcaaggtgacagggactggagccatggctcagaggtgattcgggcagccagggacaggagccaccctccccaggcccaactctgctagcttcccagaccacccccatcgagtgcggagagagtgggagtgctcagggaaagaaggtgatttgtatttgtctccccgctgaaaagaacaggattcaagtccagagttttcatcttcagcctgtgatctgtccagggacccttgggatctggggcttcctggcctggccagagctggagcccccacagggtaaggaagagagagtgggaggcagagtgtgatggggaggagggacaggaagacccttttaatgatgagggtaactatttcagttgtgagccttctagggccccaggctgggaggctcagaggactgaatctgggacctgtgttccccccggcaggcagggacaagatggcatggcaagcatgggggcggggtgggtggggagggatgctgcatttctcagctgggcagtaatcaatttaatggtcctttaaaatgtctgtgtattaaaaatttaagaataccacactttaatattaaatattcataaggtctagtatcttgataataatgtagatgttttaataacaatttttgtccttcttaaaataaaatgaaagaaacttgaaaaaa

SEQ ID NO: 357303 - DNA, 931 bp, Homo Sapiens
  misc_feature (587)..(587): n is a, c, g, or t
aggaatgaacagttgttgaaccccccaggagacccatagtactccggggccctgctgaaaaagagaaggagtgggccctagcagtgtccagctcccagctttaacaccatagtgacggtgaatcaccatcaccctcaccaccagcaagttggtggggttcaagaagtagttgggggaactgggggagacttggcagggttccgccaccatgagaaaaatggtggggtggtgctgtttcccccctgggggaggctgtggtagtggcagtatgctactagatcgagaagaggccacagcctgccccctgcacagtgggatttgtggactgtctctatggaacagtgcccaaattaaaggaactgcacgtgcaccctccctggcatgcaatacccagacttacagcaggatgccaggctcaaagaaacccttctcttctcggctggaaagggcttcacagaccaccaaacccaaaaaagtgattacctcgagttaagggccaaacttcaaaccaagccggattacctcgaagtcctggagaagacaacatacaggttctaacagagagaagaaaatatattagtgctttntttttttcaaaagaaaaggaaaataaaagaaatatatcccttgctccctttacacttgtcccagtaactccatcctcacgatctttcctaccctgaacaaaactaaaaccgcatgataactagagaatacagatgtatgctctcccctctcagatgcgatttggaggaagggccatactcagatcattaatcaatgaaagtgccttcgcagacttttgccagcaaatgttatcattatttttttatactgaaacttgagactttgactgtgccatgtataagatagactggggatcattgtatggatcctaattaagtaaaattcaatggtcttttattcgcag

SEQ ID NO: 357304 - DNA, 2091 bp, Homo Sapiens
  misc_feature (1560)..(1561): n is a, c, g, or t
  misc_feature (1567)..(1567): n is a, c, g, or t
  misc_feature (1569)..(1569): n is a, c, g, or t
  misc_feature (1572)..(1572): n is a, c, g, or t
  misc_feature (1579)..(1579): n is a, c, g, or t
  misc_feature (1582)..(1584): n is a, c, g, or t
  misc_feature (1592)..(1592): n is a, c, g, or t
  misc_feature (1597)..(1597): n is a, c, g, or t
  misc_feature (1612)..(1612): n is a, c, g, or t
  misc_feature (1615)..(1615): n is a, c, g, or t
  misc_feature (1624)..(1625): n is a, c, g, or t
  misc_feature (1629)..(1684): n is a, c, g, or t
  misc_feature (1688)..(1992): n is a, c, g, or t
  misc_feature (1995)..(1995): n is a, c, g, or t
cgcatcattcctggaacatcaagagtgtgaagactgaagataacctgaggcctaccagacagtcctatattcaccaagatgcacatttattggtatgtgtgcctacattgttagcaaaaagttggttggttaatccttctaagaattagagggatgacattgggtaacaaagtcttcccagcctgttggcattgatagtaatttcttcgcaatagaaattcctatacgagatattatggccaggtgaagagagctattcttgtttattatcagttctatatttttagcgtgaagcaacgttagcccttaaaaaaccgccaaaatcaacttcttcctccaaattaagactctcccccaagagtttaatggtcactgctgtctcaaatgtttttctacttgacactgttatgtcagtctcatgtaactgaataattgttcataatttctgaagagcatttagtctttgccatctggcttcagtgccaaagtgattcttcaattcttgttctcggagactaatgacttttgccttcaatttattatcaaatttgccacattttagagctcacttttagaagttctgctatggttaatgaaaacaagctagaatgacacagtagaaatgggttaatacgtcacattttacatcactatttggtagaagatttttagtaagtttctctatttttattccttgccactctggattttacaaatattctgacctagttgatccatcacatggtctcatatcacaactgttgcatcgctatattcacatagatgtttttctgtttaatttagaagacagtatttctgaaaaagtatgaaacgaccccaaatccaaaagttatggtgcacaatgaaaatgtatgcttttaataatgctggcttctgcagtaggtgtagaccatgtttcaaataaccacagactaatcagaaactccacctgtgaaaggaacttgaaattgtgctattcctccaagcttataacaccagcaaattgggtcaataggttattcctttaaaataggactatgagcctacagaggctcactctgaagaactcagccgtggagttagttctgtactatatccatcacaacagacatgcttcatcccatagacttcttgacatagcttgaaatgagtgaacccatccttgatttatatacatatatgttctcagtattttgggagcctttccacttttttaaaccttgttcattatgaacactgaaaataggaatttgtgaagagttaaaaagttatagcttgtttacgtagtaagtttttgaagtctacattcaatccagacacttagttgagtgttaaactgtgatttttaaaaaatatcatttgagaatattctttcagaggtattttcatttttactttttgattaattgtgtgttatatattagggtagtacatttcctaccctacctgaagacttgagattatagtctttggggggatgggcaaagtactctctttttttgcatcttttaaattgtgatttttaaaaacacatataaattttactatcttaacccgttnnatgtgnanagnccaatgngannnagcccagncacantggtgtgaaacaganccncagaaggcnncccnnnnnnnnnnnnnnnnnnnnnnnnnnnnnnnnnnnnnnnnnnnnnnnnnnnnnnnncagnnnnnnnnnnnnnnnnnnnnnnnnnnnnnnnnnnnnnnnnnnnnnnnnnnnnnnnnnnnnnnnnnnnnnnnnnnnnnnnnnnnnnnnnnnnnnnnnnnnnnnnnnnnnnnnnnnnnnnnnnnnnnnnnnnnnnnnnnnnnnnnnnnnnnnnnnnnnnnnnnnnnnnnnnnnnnnnnnnnnnnnnnnnnnnnnnnnnnnnnnnnnnnnnnnnnnnnnnnnnnnnnnnnnnnnnnnnnnnnnnnnnnnnnnnnnnnnnnnnnnnnnnnnnnnnnnnnnnnnnnnnnnnnnnnnnnnnnnnnnnnnnnatngtttaacacagtactttattttcggtatttaatcatatggaatttttgtcaattatgttaaaggattttacaacaacccaactatagagttatata

SEQ ID NO: 357305 - DNA, 847 bp, Homo Sapiens
  misc_feature (20)..(20): n is a, c, g, or t
  misc_feature (24)..(25): n is a, c, g, or t
  misc_feature (81)..(81): n is a, c, g, or t
  misc_feature (94)..(94): n is a, c, g, or t
  misc_feature (118)..(118): n is a, c, g, or t
  misc_feature (140)..(140): n is a, c, g, or t
  misc_feature (156)..(156): n is a, c, g, or t
  misc_feature (222)..(234): n is a, c, g, or t
gctgcagatagggactttgnttcnnggggcagtggagggtcaggcaggtgggcatggggccactggaggcctgaggagggnccctcctggaggntctaggcaataccggttcctgggnggcagctccttccagaaaggantaagtcaggaggtganttggtggatggagtggggtggggcggctgggaagtggctggcagatgattgggatggcagtaggtnnnnnnnnnnnnncaatgggtgaggcaggtgtgggctgaggcaggaggtgcctgagagggcctggatgtggtggcggggggaggctaaaagatgccccctgctccaacatcctgtagtgaccatgggaggtccagatggagccaactgccatgaggctttgctggttcccctaagagtggactatggaaccttctccacatgctcaccaccttctctcagagccaggctacactggacccaggttcagagggagaagcccccagtcatcccgccacattgtctgccaggacttttcccatatgtggcttccacagtccggcaggggctgcaggggctgggggcaggggccagggagctgtgtccagcaaagaagagaccccaggccagcttctggtgtgaccccccacaccccatacaccaaatacacatgatggggtcgggcagggcctggagctggccacctccccatcatgtgccaagctcctgctgggcctgaccgctatgctgtaacagcgtactttccccttgttggttggtgaaattccagtggggagggggcctgtgggacctgggtgtgtaggcctcgtgccgaatttaacaccgagcctcgtacctagccgtagtt

SEQ ID NO: 357306 - DNA, 2732 bp, Homo Sapiens
  misc_feature (611)..(659): n is a, c, g, or t
  misc_feature (2145)..(2145): n is a, c, g, or t
  misc_feature (2199)..(2199): n is a, c, g, or t
  misc_feature (2202)..(2202): n is a, c, g, or t
  misc_feature (2204)..(2204): n is a, c, g, or t
  misc_feature (2258)..(2258): n is a, c, g, or t
  misc_feature (2262)..(2262): n is a, c, g, or t
  misc_feature (2276)..(2277): n is a, c, g, or t
  misc_feature (2285)..(2285): n is a, c, g, or t
  misc_feature (2302)..(2329): n is a, c, g, or t
  misc_feature (2334)..(2334): n is a, c, g, or t
  misc_feature (2364)..(2364): n is a, c, g, or t
  misc_feature (2367)..(2367): n is a, c, g, or t
  misc_feature (2372)..(2372): n is a, c, g, or t
  misc_feature (2417)..(2417): n is a, c, g, or t
agcgggcttttgccacttgttggctgagggtcgatttactcccttagctgcgtcactctactttctccactttctccacctgtaagaagagagattgatccgattacttctaagacgttttttagcccaacctggccacactgcggaggcgccggttctttcaccccgctaacccctccgtgtggcagccaatagaagcacttaaggatgggtaacgggaaagaaccactggccagtactaggggagacaagcttaaatcgttgttagaccccgagctagggttccccgagttagggttctcccttctgaggcgtgttttccccatctgcaaaacgaagggttaggcggaatgatttgcaaggtcccagttgactctgacttttggccatatgtttgacccaacagtttaaaccccctcagcagtctttctgtcgttgccctccacactgcgagactctggagggcgatctggaggtctggaagataaccgattcctgggagatttgggggtagtctccaatctgcccctggctcatcttgtgacccgaagccggcggccttgccaggagtattctagaatgagtgcacataaaaataccttcaaacggtnnnnnnnnnnnnnnnnnnnnnnnnnnnnnnnnnnnnnnnnnnnnnnnnnatgtttcacttcttcagaaagcctccggaatctaaaaagccctcagtaccagagacagaagcagatggattcgtccttttaggagatacaacagatgagcaaagaatgacagcaagaggcaaaacttcggacatagaggccaaccaacctttggagaccaacaaagaaaattcatccagtgtgactgtatcagaccctgagatggaaaataaggcaggccagactctggagaacagctcattaatggccgagctcctgagcgatgtgccgttcaccctggccccgcatgtgctggcagtacagggcaccatcactgaccttcccgaccacttactctcctatgatggcagcgaaaacttatcacggttttggtatgatttcactcttgaaaattcagtgctctgtgattcataacctttatgtctgtttgcaccttaacagctttaaaatatgttcgcctattttatctaacctgtttgatgttctttgccgtttcactgtttaaggtcctcagcaaggatcataaagcaaagaaaatagcattatgttcactactctatttttaagaaaaaggtacatttgtatacaaattgaacttaagttctacttcctttctcccatataataaatatacaaattaggctatgaaggttttaggaaaggactcgattccttcagatggtctctcaaaatataacacctcaaatttatcttagaagaactgtgaaaaagaattgtggcatttttcagtcactacagctccgaagtctgagcaagaagtgggtgtgaagtctcctctctggtttgtaggaagttgaattggtgttattcctgcatttttttcttccacagtgtttatgaatgaattcagaaaaaagttgccagttagcttaatttcttcagatgcattgatgtggaaatttaaaacttgtcctaaacagcagtgctagtttgctgatacaaggatgctagacctgctctgcgtgctctttctggagtggcccatttcggttttctgaaacccatggcagccctttccatcgtgaataatcgttgtgttcccacctttgttctctgcctttttgctacttcagtgtgctctctgaccagctttccaaagaactttccctgcttctgcctcggttgccatttgctctccttaccacatatgttcccagtttatgaagagatccacatttcctttcaacccctctgcctcctgaagaaaaacatctcaggatgaaacatattattgctgataacacccttatttagaaatttgtgggccacaatacagatggaaatgttttactgctggaaaaactgaaatcaactcatttccaattagagtataggcagaacacctagatatgacttttagttcttgaatatccattacttactttaatgaaaacagaactgccattggtcaataaactgtaaagggaagaggtaaattgtgatagagaattttccacgccacggnaaaccgaaatcacatccatcccgaacaccagcaacacgacccgtcaaccccgcnccnanccccaagcacacccccccacaaagacagagcgccacagcgaaaccaaacaccgngcanaaagggacaggaannaccccagngggaaagtattaggcannnnnnnnnnnnnnnnnnnnnnnnnnnntaagncaaaggcgatgtgagggaaaagggagaggnacntgtcnattgatttaaatatgcttcatttacatataatgttaccatatggngttaatgattaaattagatctttacatagttcttacaaagcatcagtctaggaaatatgacttattactgatgcaaatgtgaacattttgtagtagttttgtaaaagaacatccttttcaaatatctatgttaatgtacccttgaaattaaatgcaagcacatagtcagtttgtctaattttgtgtgaaattttgtcgaaaatacctaaacatttcatctatatttgtgcctaccatgttataaatgttcataagtaccttcatgtgtctataaaaaatgttatatttaaataaatgtgaattaaaataaaattt

SEQ ID NO: 357307 - DNA, 716 bp, Homo Sapiens
ggagttcttgaatatccattacttactttaatgaaaacagaactgccattggtcaataaactgtaaagggaagaggtaaattgtgatagagaattttctatgtcatgggaaattgaaatcacatttattttgattaccagcaatatgatttgttaactctgtgccaagttttaagtatattttttcacaaagatagagtgccatagtgaaactaaacactgtgcataaaggtacatgaattattccagttttaaagtattacgcatgtttgtttaataaatgtggcatggttttaatacaaatgctatgttatttaaaagttagaggaacatttctattgacaaaaatatgcttcatttacatataatgttaccatatggtgataatgattaaattagatctttacatagttcttacaaagcatcagtctaggaaatatgacttattactgatgcaaacgtgaacattttgtagtagttttgtaaaagaacatccttttcaaacatctatgttaatgtacccttgaaattaaatgcaagcacatagtcagtttgtctaattttgtgtgaaattttgtcgaaaatacctaaacatttcatctatatttgtgcctaccatgttataaatgttcataagtaccttcatgtgtctataaaaaatgttatatttaaataaatgtgaattaaaataaaatttttgattattttcagatccag

SEQ ID NO: 357308 - DNA, 837 bp, Homo Sapiens
taacatttgtcgtgtaatatagctgacagtccagtgtcgcaattttggaagccaagatgtgagagagacgagaaccattttaggcatagaactacagacatttctgaaaaggttggtgatgaagaacttcagtcttctgagtatacttcagtatactagtgcaacaagggacacaaagaaattctgtcttaataaagaaagctacttctcaagggtattatgtggactcagtccaagctctcctgtcccattgtgcattgtctgtgacatgcaacttacaaaactagcaattgtaacaataaatcacagccacttgacaagaaaggatattcattattttcaaatggcttttggactatcaaaaacagtaaggcttttgttcagaaatcacctttagtcaaaaggtttaagaagcaaattatttagtagcagaacttatctcaggaaaggaaaatatgcatggttggtgagaatctaataacattaaaatgctggggcaagatgcagtacaaagttgaagagactttattctcaataagttgatttactgatgatatgtcatatgatgcaaaaaaggttttgtgtcattaactgaaaagtagcagcttctctatccaggatgatgagtcaacaggtttcactaatatttgtcatgctgtagcatttgtaagatttgtaaatgatgaaattcaaagaaaactttttctattgctaggagcctgccagaacaaaggccaatatataatgttgtgacatcatatctgataaccagaggtctggtatctacactcctggtgccccatcagtggttgtctccataagtcattttgcgttatt

SEQ ID NO: 357309 - DNA, 2395 bp, Homo Sapiens
  misc_feature (1647)..(1647): n is a, c, g, or t
ccgggatcatgaagtgagaagggggctgggggtcgcgctcgctagcgggcgcggggggtcttgaagatggggtcatcggctcaacgtggacgggctcctggtctacttcccgtacgactacatctaccccgagcagttctcctacatgcgggagctcaaacgcacgctggacgccaagggtcatggagtcctggagatgccctcaggcaccgggaagacagtatccctgttggccctgatcatggcataccagagagcatatccgctggaggtgaccaaactcatctactgctcaagaactgtgccagagattgagaaggtgattgaagagcttcgaaagttgctcaacttctatgagaagcaggagggcgagaagctgccgtttctgggactggctctgagctcccgcaaaaacttgtgtattcaccctgaggtgacacccctgcgctttgggaaggacgtcgatgggaaatgccacagcctcacagcctcctatgtgcgggcgcagtaccagcatgacaccagcctgccccactgccgcttctatgaggaatttgatgcccatgggcgtgaggtgcccctccccgctggcatctacaacctggatgacctgaaggccctggggcggcgccagggctggtgcccatacttccttgctcgatactcaatcctgcatgccaatgtggtggtttatagctaccactacctcctggaccccaagattgcagacctggtgtccaaggaactggcccgcaaggccgtcgtggtcttcgacgaggcccacaacattgacaacgtctgcatcgactccatgagcgtcaacctcacccgccggacccttgaccggtgccagggcaacctggagaccctgcagaagacggtgctcaggatcaaagagacagacgagcagcgcctgcgggacgagtaccggcgtctggtggaggggctgcgggaggccagcgccgcccgggagacggacgcccacctggccaaccccgtgctgcccgacgaagtgctgcaggaggcagtgcctggctccatccgcacggccgagcatttcctgggcttcctgaggcggctgctggagtacgtgaagtggcggctgcgtgtgcagcatgtggtgcaggagagcccgcccgccttcctgagcggcctggcccagcgcgtgtgcatccagcgcaagcccctcagattctgtgctgaacgcctccggtccctgctgcatactctggagatcaccgaccttgctgacttctccccgctcaccctccttgctaactttgccacccttgtcagcacctacgccaaaggcttcaccatcatcatcgagccctttgacgacagaaccccgaccattgccaaccccatcctgcacttcagctgcatggacgcctcgctggccatcaaacccgtatttgagcgtttccagtctgtcatcatcacatctgggacactgtccccgctggacatctaccccaagatcctggacttccaccccgtcaccatggcaaccttcaccatgacgctggcacgggtctgcctctgccctatgatcatcggccgtggcaatgaccaggtggccatcagctccaaatttgagacccgggaggatattgctgtgatcccgaactatgggaaccctcctgnctggagatgtccgctgtggtccctgatggcatcgtggccttcttcaccagctaccagtacagggaaagcaccgtgggcctcctggaaggagcaggggatcccttgagaacatccagaggaacaagctgctctttattgagacccaggatggtgccgaaaccagtgtcgccctggagaagtaccaggaggcctgcgagaatggccgcggggccatcctgctgtcagtggcccggggcaaagtgtccgagggaatcgactttgtgcaccactacgggcgggccgtcatcatgtttggcgtcccctacgtctacacacagagccgcattctcaaggcgcggctggaatacctgcgggaccagttccagattcgtgagaatgactttcttaccttcgatgccatgcgccacgcggcccagtgtgtgggtcgggccatcaggggcaagacggactacggcctcatggtctttgccgacaagcggtttgcccgtggggacaagcgggggaagctgccccgctggatccaggagcacctcacagatgccaacctcaacctgaccgtggacgagggtgtccaggtggccaagtacttcctgcggcagatggcacagcccttccaccgggaggatcagctgggcctgtccctgctcagcctggagcagctagaatcagaggagacgctgaagaggatagagcagattgctcagcagctctgagtggggcgggtggggccataaacggttcctggtga

SEQ ID NO: 357310 - DNA, 944 bp, Homo Sapiens
gagcgatgtagatggagaatggacggagggacacgaggggcagcaggatggtgggctggagtagggtgctggcaatgagggagtctggctcagatgtgggatgtgtatggaagaatataaatgatggtgtggatgtcaggatgagggaggagacaaaaccacgatgacccctagctttgtggcctgaactgtgggtggctgaggggatcgttaattgaatggggcagactgaggcttgtgaggaagatcagagtctggttcttgacatgagatgcccttcagacatctcttcactcaggtccaactagggatacagaaacactgaatatttcaacagcagaaattgaatggggggattgatagcgctggcgagggaagcagctggaaagagacagatggcaccctgagacagcccagaggtgaataggacccccaggctgcagggataaagctcagtggtggtgttacctcaccggggaccagggtcacacagcaaagctggaacaacagaggcgtgttgtgggggagcctcagaggggacaaaacctctgcctgagatcccaccccaggtgggcatgggggccactgaggttggggatgaaaatgccggtaccgtcagtgcacagccctgttccagacagtgctgcctggaagatttctgggctctcctgaggcgccaccccgcacctgagccacctccttggactcctgtcctctaccccttgaggacctccctcccttctaccctagctgtcttcttgaacttgggactctcctttcccaagacttccatcactagctcctggagggactggactttgcatcttcccttcgcgtggagcctcagtgtgagaggccctagccaatgcgtgcatgtcagaggtggtggggaccacatcagaagaagaggggggtgatgaaattaacaaataaaaagtatgggg

SEQ ID NO: 357311 - DNA, 1416 bp, Homo Sapiens
  misc_feature (14)..(14): n is a, c, g, or t
  misc_feature (90)..(343): n is a, c, g, or t
  misc_feature (362)..(380): n is a, c, g, or t
ttagccagagaatnccaggccccaagaaaaagctgtgctgacttagccctcttggtgccctagaattttgtcttactgcaattaggctgnnnnnnnnnnnnnnnnnnnnnnnnnnnnnnnnnnnnnnnnnnnnnnnnnnnnnnnnnnnnnnnnnnnnnnnnnnnnnnnnnnnnnnnnnnnnnnnnnnnnnnnnnnnnnnnnnnnnnnnnnnnnnnnnnnnnnnnnnnnnnnnnnnnnnnnnnnnnnnnnnnnnnnnnnnnnnnnnnnnnnnnnnnnnnnnnnnnnnnnnnnnnnnnnnnnnnnnnnnnnnnnnnnnnnnnnnnnnnnnnnnnnnnnnnnnnnngagtgagatcctgtctcgnnnnnnnnnnnnnnnnnnntagaataacaaagcagtctagtcccatggagagataggaaggatcctcaaatgtggaagaccctaacccagacaggactgtggctgtctaacaaacaccagtctcaaaaaaagcaagcttaagaatgaacttattatagtatcaatgcggtgattacaaattactcaatatttcctaaagaccatgagaactccagaacccattcttacacaggccctgtggaagaatccaagcaggaataattggattatttccagccagtgactttcaggaggaccacatatcttcaatgtcttcacattgtatctgaaaaatgtatctgaagcactcaaacaccaagtctactcaaatacgcttcccaagcagcttttctgtacatctctgctgcttccagacgatcagctgctgagattatgccacgacctacaatgatgatatcggaacctcgtttgccaataacttcttgtgggctattgtactgttggccaagattatctcctcctgcttccaactgaactcctggagtcaagtgaagaaattctggtttcatgcttactcgggagccagaaataaaaccaacaacaaattcagagtgctcctcagccattctaaccgctgctctagtgtagtccccagtggccagggagccggtggagctcatttccgcaataaggaggcacccccgatgcaaaggcaggcccacttcttgcaggcctttcacaactcctgagcctggcaccacgtgagcatttactagatctgcccaggaagctattttaaagatacctcctgagaaaagagtcaccagagaagaaagcagagcttagagatggagagaaagcaagtcatgaagatatcactttgagcttcctggatcccaccccgccttgacaagcctgctttatgaattggcctttaatggacctgagacatttcctttttcttttctcaatttaaggctggattttctgatttcttggcaaattccctgaataaaacacttaccctttaaaaactgcttttttaacgtggggtt

SEQ ID NO: 357312 - DNA, 1941 bp, Homo Sapiens
  misc_feature (191)..(199): n is a, c, g, or t
cgcctctcggcccgcggcctggccggcaagcagggctgcagtcacggggcggcgcggagggccccagcccaggcgaggtgtgtggccgccgccaccgtaaggctaggccgcgagcttagtcctgggagccgcctccgtcgccgccgtcagagccgccctatcagattatcttaacaagaaaaccaactggnnnnnnnnntgaaattccttatcttcgcatttttcggtggtgttcaccttttatccctgtgctctgggaaagctatatgcaagaatggcatctctaagaggacttttgaagaaataaaagaagaaatagccagctgtggagatgttgctaaagcaatcatcaacctagctgtttatggtaaagcccagaacagatcctatgagcgattggcacttctggttgatactgttggacccagactgagtggctccaagaacctagaaaaagccatccaaattatgtaccaaaacctgcagcaagatgggctggagaaagttcacctggagccagtgagaataccccactgggagaggggagaagaatcagctgtgatgctggagccaagaattcataagatagccatcctgggtcttggcagcagcattgggactcctccagaaggcattacagcagaagttctggtggtgacctctttcgatgaactgcagagaagggcctcagaagcaagagggaagattgttgtttataaccaaccttacatcaactactcaaggacggtgcaataccgaacgcagggggcggtggaagctgccaaggttggggctttggcatctctcattcgatccgtggcctccttctccatctacagtcctcacacaggtattcaggaataccaggatggcgtgcccaagattccaacagcctgtattacggtggaagatgcagaaatgatgtcaagaatggcttctcatgggatcaaaattgtcattcagctaaagatggggggcaaagacctacccagaatactgatttccttcaacactgtagcagagatcactgggagcaaatatccagaacaggttgtactggtcagtggacatctggacagctgggatgttgggcagggtgccatggatgatggcggtggagcctttatatcatgggaagcactctcacttattaaagatcttgggctgcgtccaaagaggactctgcggctggtgctctggactgcagaagaacaaggtggagttggtgccttccagtattatcagttacacaaggtaaatatttccaactacagtctggtgatggagtctgacgcaggaaccttcttacccactgggctgcaattcactggcagtgaaaaggccagggccatcatggaggaggttatgagcctgctgcagcccctcaatatcactcaggtcctgagccatggagaagggacagacatcaacttttggatccaagctggagtgcctggagccagtctacttgatgacttatacaagtatttcttcttccatcactcccacggaagacaccatgactgtcatggatccaaagcagatgaatgttgctgctgctgtttgggctgttgtttcttatgttgttgcagacatggaagaaatgctgcctaggtcctagaaacagtaagaaagaaacgttttcatgcttctggccaggaatcctgggtctgcaactttggaaaactcctcttcacataacaatttcatccaattcatcttcaaagcacaactctatttcatgctttctgttattatctttcttgatactttccaaattctctgattctagaaaaaggaatcattctcccctccctcccaccacatagaatcaacatatggtagggattacagtgggggcatttctttatatcacctcttaaaaacattgtttccactttaaaagtaaacacttaataaatttttggaagatctctgaaa

SEQ ID NO: 357313 - DNA, 1293 bp, Homo Sapiens
agaattatccacagttcaagaaaatgtctgggactgtttcaaagcatgtgacagtggttggagaactgtctcgattggtcagtgaacggaatctgctggaggtttcagaggttgagcaagaactggcctgtcaaaatgaccattctagtgctctccagaatataaaaaggcttctgcagaaccccaaagtgacagagtttgatgctgcccgcctggtgatgctttatgctttacattatgagcgacacagcagcaatagcctgccagggactaatgatggacctcaggaataaaggtgtttctgagaagtataaagctcgtgtctgcagttgttgaatatggtggtaaacgagtcagaggaagtgacctcttcagccccaaagatgctgtggctatcaccaaacaattcctcaaaggactgaagggagtagaaaatgtatatacacagcatcaacctttcctacatgaaaccctggaacatctcatcaaaggaaggcttaaggaaaacctatatccttatttaggccccagcacactcagagacagacctcaggatatcattgtgtttgtaattggaggagcccacctatgaagaggctctaacagtttataaccttgaaccgcaccactcctggagtgaggattgtcctgggaggcaccacagtgcacaacacgaaaagtttcctagaggaagttctggcttctggactgcacagccgaagcaaggagagctctcaagtcacatcaaggtcagcgagcagaagatgaaacggtggttgggggaagggcacagcttcctctcttgtccccactacaggttttccctactaaacaaaggtgttggagagcagctttgggttctgtgctggttgttagaactcatctccaggtagccaacggatacgtggttggcacagacacaagactcccagagttgtcctaacaataagtctgagcccatctcaacccacttttctccggtagtctttatgtatctgttagcacaatcacttcagttactgatgaattttgttgggatctgacttggggaaagggttatcagagcctagaggggcttaaaaagtaatcatttgatgtacataccacactccttggcttcctttctcttcccttaaccctttctgcttttcattaaccacattcctgcacaactcatttctgaaaacctaccatgtttctttacagagccatccaaaaattttttgtccctacatagcaattttctgtggcactgagaaaccatgatgaccacaataaaaagccttttgtaaa

SEQ ID NO: 357314 - DNA, 1217 bp, Homo Sapiens
  misc_feature (994)..(1080): n is a, c, g, or t
  misc_feature (1083)..(1092): n is a, c, g, or t
cggatttcttgtctctgatacaggcaagcaactttctcattaggtgcagcaaatgggcctatagtatcagcaattccagaatcagtcaattcaaaaaggaaagtacttttgcatgggttatacaaattgtagtagaatcctcgcttgctacaggcttattcttctggtttccgctgaaggcagcagtccttttccatgggccttttttcctgcagtaaatgctcataagaactgtaccatttacctcaggatatcattgtgtttgtaattggaggagccacctatgaagaggctctaacagtttataacctgaaccgcaccactcctggagtgaggattgtcctgggaggcaccacagtgcacaacacgaaaagtttcctagaggaagttctggcttctggactgcacagccgaagcaaggagagctctcaagtcacatcaaggtcagcgagcagaagatgaaacggtggttgggggaagggcacagcttcctctcttgtccccactacaggttttccctactaaacaaaggtgttggagagcagctttgggttctgtgctggttgttagaactcatctccaggtagcccacggatacgtggttggcacagacacaagactcccagagttgtcctaacaataagtctgagcccatctcaacccacttttctccggtagtctttatgtatctgttagcacaatcacttcagttactgatgaattttgttgggatctgacttggggaaagggttatcagagcctagaggggcttaaaaagtaatcatttgatgtacataccacactccttggcttcctttctcttcccttaaccctttctgcttttcattaaccacattcctgcacaactcatttctgaaaacctaccatgtttctttacagagccatccaaaaattttttgtccctacatagcaattttctgtggcactgagaaaccatgtatgaccacaataaaaatccattttggtgaaaggnnnnnnnnnnnnnnnnnnnnnnnnnnnnnnnnnnnnnnnnnnnnnnnnnnnnnnnnnnnnnnnnnnnnnnnnnnnnnnnnnnnnnnnaannnnnnnnnncgccaaaagaattcaccccccggggggcgcccccgtacacagacaacccagcatttgtgctgaagcagaggggcacacaaaaagagagagagcataataatacgacagaacaagagcaagacgag

SEQ ID NO: 357315 - DNA, 922 bp, Homo Sapiens
  misc_feature (48)..(238): n is a, c, g, or t
ggaggtcattgctcctgttcaccggggctggagtgcagcggcgcgacnnnnnnnnnnnnnnnnnnnnnnnnnnnnnnnnnnnnnnnnnnnnnnnnnnnnnnnnnnnnnnnnnnnnnnnnnnnnnnnnnnnnnnnnnnnnnnnnnnnnnnnnnnnnnnnnnnnnnnnnnnnnnnnnnnnnnnnnnnnnnnnnnnnnnnnnnnnnnnnnnnnnnnnnnnnnnnnnnnnnnnnnnnnnnnntaagccaccacacccggccaggaatgacaatttcaatatatttactatctgttcttcattttattattattcagcttctgttaactcagtgttagctgaaacatcagaaagaaataaaacttatgagaagggtattagcaaatgtgtgaaaaagtcaagtactgtttatactccaaaaagtatttggagcttataattcccttaaaagtcatactgagggtcatagttggggatgcagcaccctgcacatcacatcaaaccgttatgatggtcccataaccatctgaatgtcaatagcacccattttcctctatgctggaagagttttatgttcccataccatttgcaaaagttgcttacagttttgaaaagttttctagacatatggaacctacaattgctatcttgtaatttcccaaaaagtccttcaagtacttgaagacattcttcataaacttttgttcccaatttaacatgctttttcttccagataccatattatagggttaccctttaaggttttctaaaagcaaacaatgcccttaccctcttaattatttttggatttcctctctagggatggccttggcattgccattaaaccttaacccagttccatggtggggttttaataggaatatcaacttcttttcaaataaagtgaattcacttttagcgttttat

SEQ ID NO: 357316 - DNA, 465 bp, Homo Sapiens
  misc_feature (29)..(29): n is a, c, g, or t
  misc_feature (59)..(59): n is a, c, g, or t
aaactggcaagatccccctttaggtatanatttaacaacccgcctgggacacgaacaancccacacttcctaactgcttctggcgaactgattttatttttaatctttttcaataaagatattcttagatactgaaagaaatagttaatgagtttgcatttgtgcttgagaaaatttggctcaagtccatttggctgtagtgtcaacgatgtttccagtagtgtttagatttggtgtcttcaaaggtagttgattaaaaccaagtgtgtctttaatatcttgtatcagaataactttgtatgttaccaacttaaattgctagaataaggtaaattgatacacaactgctatttttaatttagaactttgacctaatttgggttttcaaaaccattttggctacttgtattctttatgctgttgtttatttcaataaaaaattcacacctaaatgtatacttacta

SEQ ID NO: 357317 - DNA, 406 bp, Homo Sapiens
  misc_feature (162)..(180): n is a, c, g, or t
gtaaaattggagactgataggttgatcagaaactcaccctaaatctgaacgggtgccgctataatttgtgacatctggcaagatttccctttatgtatatattttaacaatccgcttggacacgaacaaagccacacttctaactgcttctggcgaactgannnnnnnnnnnnnnnnnnncaataaagatattcttagatactgaaagaaatagttaatgagtttgcatttgtgcttgagaaaatttggctcaagtccatttggctgtagtgtcaacgatgtttccagtagtgtttagatttggtgtcttcaaaggtagttgattaaaaccaagtgtgtctttaatatcttgtatccaggaataactttgtatgttaccaacttaaaattgctaggaataaggtaa

SEQ ID NO: 357318 - DNA, 1190 bp, Homo Sapiens
  misc_feature (1134)..(1150): n is a, c, g, or t
gtctgggcgagaagcaactagggccctcatcacttcgccgccgaatccccgtgcgccgcccagcggggcagagccaggccaggccgcccgcccaacctggtccgcatgcctcttcggccatggaagctgccggcagccctgcggctacggagacaggcaagtatatcgcgtcaacacagcgacctgacgggacctggcgcaagcagcggagggtgaaagaaggatatgtgccccaggaggaggtcccagtatatgaaaacaagtatgtgaagtttttcaagagtaaaccagagttgcccccagggctaagccctgaggccactgctcctgtcaccccatccaggcctgaaggtggtgaaccaggcctctccaagacagccaaacgtaacctgaagcgaaaggagaagaggcggcagcagcaagagaaaggagaggcagaggccttgagcaggactcttgataaggtgtccctggaagagacagcccaactccccagtgctccacagggctctcgggcagcccccacagctgcatctgaccagcctgactcagctgccaccactgagaaagccaagaagataaagaacctaaagaagaaactccggcaggtggaagagctgcagcagcggatccaggctggggaagtcagccagcccagcaaagagcagctagaaaagctagcaaggaggagggcgctagaagaggagttagaggacttggagttaggcctctgaggcctttggggaatagggaatggactgcagaacaaaccgtggggctctctggggtctgggggaatacgggcaacagcagtcaggaggggtaccccccatactggcttccacctcctgcggcccagctctgtcctccagagcctagcgtctccctcaatccttcccttttcttcccaacttctactttttggactttccccctcccattcccagtgttcaaaatctcagtgactaccccaggtacctttgctgctgatttgggtgtcttgtttaaaagaaaatcaggtgggtgggaatctcttggagaactgaggctgagggtagagggagtatgcccaagtcttggagtcttggttcctgttcgcggtgtttatgggttatttccctctccatccctcannnnnnnnnnnnnnnnnaaaaaaagcaaaaatgagaataaacacaagtagacatgtc

SEQ ID NO: 357319 - DNA, 770 bp, Homo Sapiens
  misc_feature (518)..(518): n is a, c, g, or t
agcggaggtagggtctccaaccgtccctagaaacacttgtgcgccccagtgcgttcctggagtttgtctgctccacgtcaccaagccgctctgagatctgggtgcaggccagagcctggatattcttcctttcttcatttataaggccccctttttgggtgcaggtgggccttgcgcccttttccctcgcaggtcctggacgtacgaggagttcctggggatgagagggactgtgcctcggaacttctcttggctccctgaggactgttttacaggcagcaagcgctcagtaatggcaagtatatcgcgtcaacacagcgacctgacgggacctggcgcaagcagcggagggtgaaagaaggatatgtgccccaggaggaggtcccagtatatgaaaacaagtatgtgaagtttttcaagagtaaaccagagttgcccccagggctaagccctgaggccactgctcctgtcaccccatccaggcctgaaggtggtgaaccaggcctctccaagacagncaaacgtaacctgaagcgaaaggagaagaggcggcagcagcaagagaaaggagaggcagaggccttgagcaggactcttgataaggtgtccctggaagagacagccaactccccagtgctccacagggctctcgggcagccccacagctgcatctgacagcctgaactcagtggcacactgagaaagccagaagataaaagaacctaaagaagaaactccggcaggtggaagagctgcaagagcggatccag

SEQ ID NO: 357320 - DNA, 1586 bp, Homo Sapiens
  misc_feature (1192)..(1200): n is a, c, g, or t
  misc_feature (1275)..(1308): n is a, c, g, or t
  misc_feature (1433)..(1474): n is a, c, g, or t
ggcctgggtggcgaattcggcacgagggacggcgccgggccggccatgctggctacgggcacggcgcggatggcgtcggggcgccccgaggagctgtgggaggccgtggtgggggccgctgagcgcttccgggcccggactggcacggagctggtgctgctgaccgcggccccgccgccaccaccccgcccgggcccctgtgcctatgctgcccatggtcgaggagccctggcggaggcagcgcgccgttgcctccacgacatcgcactggcccacagggctgccactgctgctcggcctcctgcgcccccaccagcaccacagccacccagtcccacacccagcccaccccggtcctaccctggccagagaggacaacgaggaggacgaggatgagcccacagagacagagacctccggggagcagctgggcattagtgataatggagggctctttgtgatggatgaggacgccaccctccaggaccttccccccttctgtgagtcagaccccgagagtacagatgatggcagcctgagcgaggagacccccgccggcccccccacctgctcagtgcccccagcctcagccctacccacacagcagtacgccaagtccctgcctgtgtctgtgcccgtcatggggcttcaaggagaagaggacagaggcgcggtcatcagatgaggagaatgggccgccctcttcgcccgacctggaccgcatcgcggcgagcatgcgcgcgctggtgctgcgagaggccgaggacacccaggtcttcggggacctgccacggccgcggcttaacaccagcgacttccagaagctgaagcggaaatattgaagtccagggagggagcgccccgggccgcgtccgccccgtcccacactacgcccccgccccactcccggggcctgctaatctgaggccgatccgggaccggcctccttgcgtctcccattcccaagattgtcccgcctcctgccaatccccgccgtccttccagcccacgacctgccgcgccgaggagcgcgatctgtcccgtttcccgattgggtatgccgtctctctccgcctagcgacacattccctccattaagggattggctcgctgagttctacgctccacatggggccactcccttggtttcccccctaccgacaagggatctgctccgtacggcattgcgctnnnnnnnnntattccctgggaccccctcctttcttggatggctccaatcccgctaacgggtttggcctaccctctcccttagtnnnnnnnnnnnnnnnnnnnnnnnnnnnnnnnnnnaccaagctgggctcccacctttcccggggggcgggggcccaataccctccttcttccccaataaatgggccccggggcccttctcattttccgccttctcccttctacaggcggaccggcgcgtnnnnnnnnnnnnnnnnnnnnnnnnnnnnnnnnnnnnnnnnnnttgtgattcctcccgcgggcatcgcggctcccaaacctgttgcgcctgctccttttgcgattccgcccctcttcttcgggttccccctcctattcccccctacgcattcccc

SEQ ID NO: 357321 - DNA, 1042 bp, Homo Sapiens
  misc_feature (266)..(288): n is a, c, g, or t
  misc_feature (877)..(877): n is a, c, g, or t
  misc_feature (879)..(879): n is a, c, g, or t
  misc_feature (901)..(902): n is a, c, g, or t
  misc_feature (927)..(927): n is a, c, g, or t
  misc_feature (939)..(939): n is a, c, g, or t
  misc_feature (944)..(944): n is a, c, g, or t
  misc_feature (946)..(946): n is a, c, g, or t
  misc_feature (960)..(961): n is a, c, g, or t
  misc_feature (966)..(966): n is a, c, g, or t
  misc_feature (976)..(977): n is a, c, g, or t
  misc_feature (980)..(980): n is a, c, g, or t
  misc_feature (998)..(998): n is a, c, g, or t
  misc_feature (1001)..(1001): n is a, c, g, or t
  misc_feature (1004)..(1005): n is a, c, g, or t
  misc_feature (1009)..(1011): n is a, c, g, or t
  misc_feature (1019)..(1019): n is a, c, g, or t
  misc_feature (1024)..(1025): n is a, c, g, or t
  misc_feature (1035)..(1035): n is a, c, g, or t
  misc_feature (1040)..(1040): n is a, c, g, or t
gcaggagaggctgcgggaggccgcggccttaggggacattcgggaggtgcagaaactggtggagagcggggtggatgtgaactcccaaaatgaggtcaacggctggacttgtttacactgggcatgtaaacgaaaccatggtcaggtggtctcttacctgttaaaatcaggagctgacaaagaaattcttaccacaaaaggagaaatgccagtccagttaacatcaaggagagaaatcaggaagattatgggagtggaagaagaannnnnnnnnnnnnnnnnnnnnnncaacctcccccagctgaagaaggagtcagaactgccctttgttcccaactatttggccaacccagccttcccttttatctatacacccacagcagaggattcagcccagatgcagaatgggggcccctccacaccccctgcatcaccccctgcagatggctcacctccattgcttccccctggggaacctcccctgttagggacctttccccgggaccacacctctttggcactagttcagaatggtgatgtgtcggccccctctgccatactcagaacaccagaaagcacaaaaccgggtcctgtttgtcagccaccagtgagtcagagccgctccctgttttcttctgtcccgtccaagccaccaatgtctctggagcctcaaaatgggacgtatgcaggaccagcgccacatctccagccatttttcttcactggagcatttccatttaatatgcaagagctggtactcaaggtgagaattcagaacccatctcttcgagaaaatgatttcattgaaattgaactggaccgacaggagctcacctaccaagagttgctcagagtgtgttgctgtgagctgggtgtnanccagatcaagtggagaagatannaagttacccatactctgttaaggangacaaggatgtngtcgntncaagatttccaganntggantggtctgatnnaantgaaataatttctgtcanaangcnnatcnnntgatgaangcctnntataaagggngcttnaa

SEQ ID NO: 357322 - DNA, 1045 bp, Homo Sapiens
  misc_feature (961)..(961): n is a, c, g, or t
  misc_feature (970)..(970): n is a, c, g, or t
  misc_feature (972)..(972): n is a, c, g, or t
  misc_feature (1011)..(1011): n is a, c, g, or t
  misc_feature (1029)..(1029): n is a, c, g, or t
  misc_feature (1033)..(1033): n is a, c, g, or t
  misc_feature (1036)..(1036): n is a, c, g, or t
  misc_feature (1039)..(1039): n is a, c, g, or t
cgagggggccggcgcccgagtccgggattcggccagtggtgctgagcgagtgctggaccagcggccgtcctgtgcacctggcctgtgcgcgtgcccgctgctcggcttcacccagactaaggcgcgggcagctgcgggaacaggcggggtgggcggagggagaccgggaggcacgggcgccctgtgcgcggaggaggtgaaggcggccggggccgggacgccatgtccatggaggaccccttctttgtggtgaaaggagaggtacagaaagcagtcaacactgcccagggattgtttcagagatggacagagctcctccaggacccctccacagcaacaagggaagaaatcgactggaccaccaacgagctgagaaataacctccggagcatagagtgggatctagaggaccttgatgaaaccatcagcatagttgaagcaaatcctagaaaatttaaccttgatgcaactgaattgagtataagaaaagccttcattacaagtactcggcaagttgtcagggacatgaaagatcagatgtcaacttcatctgtgcaggcattagctgaaagaaaaaatagacaggcactgctgggagacagtggcagccagaactggagcactggaacaacagataaatatgggcgtctggaccgagagctccagagagccaattctcatttcattgaggagcagcaggcacagcagcagttgatcgtggaacagcaggatgagcagttggagctggtctctggcagcatcggggtgctgaagaacatgtcccagcgcatcggaggggagctggaggaacaggcagttatgttggaagatttctctcacgaattggagagcactcagtcccggctggacaatgtgatgaagaaacttgcaaaagtatctcatatgaccagtgatcggcgccaatggtgtgccatagccatcctctttgcagtctgttggntgtgctcancncttcttagtgctgtgacggcggggctctgggtgcgagtnctcctgcatatgaaccgngggnggnggnagctga

SEQ ID NO: 357323 - DNA, 1319 bp, Homo Sapiens
  misc_feature (49)..(49): n is a, c, g, or t
  misc_feature (262)..(262): n is a, c, g, or t
  misc_feature (283)..(283): n is a, c, g, or t
  misc_feature (1234)..(1235): n is a, c, g, or t
  misc_feature (1295)..(1295): n is a, c, g, or t
gtgcagtaatgcatgccagcactttctgaaattaaaggttctaccctgnagaggtttcacatgcttacccaggaatgctccttgaaaaaataatctcctcagacaaaagcctggccacaaaaaagtctctctaaggatgcagagagactcatagaacttacaccaaaatttctactgaatgaatttccccaccttcttggtgattgtacacctgccttccttataaggagaacaaggaagtaaatcatgtagaagtagcatnaaaacacagcttttctgcttnacctgtccaggtagcctctgttttcatttcagtcttaatgaaaactttctaacttatatctcaagtttcttttcaaagcagtgtaagtagtatttaaaaagttaaacttcaagaaagaaagactttaacgatattcagcgttggtcttgtaacgctgaaggtaattcattttttaatcggtctgcacagcaagaactgaaacgaatggggattgaactgctttgcctgttctttctatttctaggaaggaatgatcacgtacaaggtggctgtgccctgggaggtgcagaaacctgtgaagactgcctgcttattggacctcagtgtgcctggtgtgctcaggagaattttactcatccatctggagttggcgaaaggtgtgataccccagcaaaccttttagctaaaggatgtcaattaaacttcatcgaaaaccctgtctcccaagtagaaatacttaaaaataagcctctcagtgtaggcagacagaaaaatagttctgacattgttcagattgcgcctcaaagcttgatccttaagttgagaccaggtggtgcgcaaactctgcaggtgcattgtccgccagactgaggactacccgggggatttgtattacctaatgggacctctccgcctccagggatgaccacctcaacacaataaaggagccgggcttcccggctttccaaaaagatggctaaattaaccagcaactttagactgggcctcggatcttttgtggaaaaacctgtatccccttttgtgaaaacaacaccagaagaaattgccaacccttgcagtattccatacttctgtttacctacatttggattcaagcacattttgccattgacaaatgatgctgaaagattcaatgaaattgtgaagaatcagaaaatttctgctaatattgacacaccccgaaagtgggatttgatgcaattatgcaanngctgctgtgtgtaaggaaaaaattggctgggcgggaatgatttccctccacctccttggntcttttgtgaagtgaatgctgatt

SEQ ID NO: 357324 - DNA, 490 bp, Homo Sapiens
tctcaaattgcatgaattttttctggctgttggaaacctgaatgcttttagacccaaatggaaaatttctgaaatgctggatatatctatttttaaacaagcagttgacttaaaactttctgtggcaacttctggttttctgacagttcccagtgagagaaatgctgaaagtacactgggatcactgggacactgtcttatgaaggtttgcttgggatgaaaaaggatattgcagcttcagcagtgttgaactgtgtgtttaaaaatgtgaattactgttattgtatactgtaattgattacatgggctgggggggtgtcaaagaacttgacaggttgtgttgatgctcttagttgagtcttgaaaagtaaatattaacgctacagaaatgcatgagtttcaatatattttttgtctttgtttgcattgtataactttaacgagtgagtttaaaattatttaatttccttagaaaaatagcaccatttgg

SEQ ID NO: 357325 - DNA, 1552 bp, Homo Sapiens
agcgaggcctgggtggcgaattcggcacggaggctggggacgactggctggtggaatccttgcgcttgtaccaggatttctatgcattcgacctgtcaggagccactcgagtccttgaatggattgatgacaaaggagtctttgttgctggctatgaaagcctgaaaaagaatgaaattcttcatctgaaattacctctcagactttctgtaaaggaaaacaagggcttattcccagaaagagatttcaaagtgcgccatggaggattttcagacaggtctatctttgatctaaagcatgtgccacataccagattgctggttaccagtggccttccaggttgttatctgcaggtgtggcaggttgcagaggacagtgatgtcattaaagctgtcagcaccattgctgtgcatgagaaagaggagagtctctggcctagggtggccgtcttctccacattggcacccggagtcctccatggggcgaggctccgaagtctgcaggtcgttgatctggagtcccggaagaccacgtacacctcagatgtcagtgacagtgaggagctgagtagcctgcaggtcctagatgcagacacctttgccttctgctgtgcttcgggccggctggggcttgttgacacccggcagaagtgggcaccgttggagaatcgcagccctggccctgggtctggtggagagagatggtgtgctgaagttgggagctggggccagggccctgggccaagcattgccagccttggctcagatgggcgtctttgtcttcttgacccccgggatctctgccatcctgtgagctcagtccagtgcccagtatccgtacctagccctgacccagagctgctgcgagtgacttgggccccaggcctgaagaattgcttggcatctcaggttttgatggtacagtccaggtctatgatgccacatcttgggatggaacacggagccaagatggaacacggagccaagtagaacctctctttcactcacagaggtcacatcttcctagatggaaatgggatggaccctgctcctttggtcaccacccacacctggcatccctgcagaccaaggactttgttatcagcaacaaatgatgcctctctgcatgtgtgggactgggtggacctttgtgccccccgctgacaccagcatctttccatctaggcctctagaaaggggaggagctgctgtagtagcaagggtgctgatgtaggactcaagtgactaccagtccctgttaccagctgtgtggccttgggcaagtctgccagcgtcacttagcctcagtttccttatctgtaaaatgaggatagtaagaactacctcgtagtgatattgcgaaggttagaagaaacgcatggcataattacttggtagctattgttagatctgggagtgtgaaatggtagcgttttgtccctgtcttcacactatcatagggagaatcaaaagagctaacaaatataaacatgctttgtgaatttttttaaagaaaaaaatgtagaggggccaataaacatgaaaaaatccca

SEQ ID NO: 357326 - DNA, 1136 bp, Homo Sapiens
gggatctcgcgagagccgcgcggcccccgaaggctcgcaggcggaagtgagacgccggaagcggtcgttgccatggatcctggggacgactggctggtggaatccttgcgcttgtaccaggatttctatgcattcgacctgtcaggagccactcgagtccttgaatggattgatgacaaaggagtctttgttgctggctatgaaagcctgaaaaagaatgaaattcttcatctgaaattacctctcagactttctgtaaaggaaaacaagggcttattcccagaaagagatttcaaagtgcgccatggaggattttcagacaggtctatctttgatctaaagcatgtgccacataccagattgctggttaccagtggccttccaggttgttatctgcaggtgtggcaggttgcagaggacagtgatgtcattaaagctgtcagcaccattgctgtgcatgagaaagaggagagtctctggcctagggtggccgtcttctccacattggcacccggagtcctccatggggcgaggctccgaagtctgcaggtcgttgatctggagtcccggaagaccacgtacacctcagatgtcagtgacagtgaggagctgagtagcctgcaggtcctagatgcagacacctttgccttctgctgtgcttcgggccggctggggcttgttgacacccggcagaagtgggcaccgttggagaatcgcagccctggccctgggtctggtggagagagatggtgtgctgaagttgggagctggggccagggccctgggcccagcattgccagccttggctcagatgggcgtctttgtcttcttgacccccgggatctctgccatcctgtgagctcagtccagtgccccagtatccgtacctagccctgaacccaaagctgctgccaagtgactttgggcccccaggccttgaaaaattgcttggccatctccaggttttgatggtacagtcccaggtctatgatggccccatcctggggaatggaaccagggaacccaaaatgggaaacccggagccaaagaaacaacctccccctccccttcccaaaaggccacattcttcctttaaatggaaaaagggggaatggcacccctggctccctttgtgg

SEQ ID NO: 357327 - DNA, 1040 bp, Homo Sapiens
  misc_feature (867)..(867): n is a, c, g, or t
  misc_feature (989)..(989): n is a, c, g, or t
cttcctggtcagggtcgcactctgacccgtcctctgcccgctccagctgggcagctggggagtcgggagtcgtgtggagcgccgccatcctccctgggagcgagcctccacgtggcctgaaatgcagatggacgccagtgacgggctgctctcagcacaccacacggtcccctcacagggtctcccgcagcctggcgggggcgcagggagcaggatttactcctcctgttatgtagttgaaggcaatggagatgagggaggaccgggccttcccacgatcttaccctgcaccatcaagacattctgtacccagaaaggctgccccaatggcccctccgcgtgacccctgggatgccagtctcagctccttttcaccaagaactacgtgcctggtgtgaactgctgctctttcctggagtaaatcaggcatttatcccagtctttatccacaaggaagcatcacacagcccgagggtggcccatgtttagccagaaggaaaagcccacctaatacacaggacaaagagacgcttacctggtcctcaacacacatgaaccaggccagcagggaacgccaagaggtctcagcacagacaggatgcaggcacttgcaaggcacaacggggctaggaggagagacaggtgccaggaagccggcaggtcaggcttcttccccagaagcagtggagagtctctgcctccaaagacgacactgagttctttctcccaagaagtccacccacggatgaccagagaaggtggaggaccagctcctgccggcagcagaagacagccgagcagcccaccggggctccttctgcagatgagggaaagcccggataaggcccccaaggtcacaaagcgggntcctggggcgacgggccgagcgcctcccgccccccagggggcgtccggagccgcctcctcctgcagagaccgcgcgggccgggctggccgagccacgggccggacaccggggccggggctgngggccggcggcggaccccgcgataaaaaaagtgacggcccgggaggcgcga

SEQ ID NO: 357328 - DNA, 1759 bp, Homo Sapiens
  misc_feature (254)..(254): n is a, c, g, or t
  misc_feature (342)..(342): n is a, c, g, or t
atcagaccaataaaccacacagccaggtactctctctgacccagagggcagggagccaggcttcgggaggaatacttagaggcctccttggaatgtggccaccgacaggaatatgtgggggtgcagtgaggaagctgtcagcctgggcctctgtcttcctgtacccttgagggactggtcacttacttttcctcattttcattcactctgatttgttactgacaaggcctagggaagttttcacagcctaaaanacagtcagtatacttactgttcttagaaacgtaacactccccgacgctgagatgcagacagctaagatgccagggattcaagtatgtnattgtgtgctctgagtctctgaccacctcttcttcccatacacttatgatgttgttcctgcagttacaagacctaagttccaagaagcagcagtcccacaacattctggatctgcttcgaacctggaatatccggatggtcaccatcatgtccataatgctgtggtatgtaaaagagacctgcctgaggcttccagacaaagcttcttgaagtggccattgggcctcttgtttacagacatgcctcagacaaaattcaaagcctatgtcatcagagagtgaaaaggatatgtcttgtgttagatggaaaaaatgggcatgtcacaattcttaatgggatggaacctcagaaaaggagaatgaaaacaattgtggaggctgttgtgggaaatatggactctcgtggggaatctctccagatcttaagatgaatccttgcccaatttgggtcatttagttcccgtctcctacccagttaccgacagtggctgaggagggccaggtagggcttttaagaaggatctgagtgaagacaccatgtcctgtaggctgcagaggctgccagttactttctggaaatgtggaagtgggatgtgctcctcctgggatgtccataaacggtcctggagtcagggctatagcctagatgtccttaccaggttcccactaatgaggcaaagtatgtcagaaagggatttgtgaattaccagggagaggaaacatgtccaagtgcacatcgctagcttttgctcagcggccgaaccctgggattctaggcgacttctggagcctggtgggttagcggtgagaagatgggcgaggagggcggacttcatctcagagtccttattactagtctcatccagctttgaggcagtcagccactgtgcctactgagggagtgctatgagtcacccgctcccaaggaatggcccaggatccctccaggcagttcaccattccctgagttggcctcaagacaggagcagcatgtagcctgcaccacagacatgcaagcctgtgatgagtcacccacttttgtgttcacccaggctctcctccctgctctggatttcctggggactcatgcacatactctttttattgtaccagctgtgtgttccacctgcagatgagtcaaaacagtctaatccataaaggtctggtttgtcaaagagtgtgggtcatcaacagagagaatgcctactggggatgcccaggtcaggggtactgcagggcatcctgatgagaggcagtgtgggcccttcattgggagccacctctctgctccacaagtaccgcgggcctggtgtcagctgtctctgaccagcctcttcctgactgggcaccacagtagtgtggggagggtctttttccagtggttggacctaaaggtggtcctttttgtatcttaaccc

SEQ ID NO: 357329 - DNA, 1271 bp, Homo Sapiens
cagaaacacgaaccccggagaggaagaggcacgcgagagcaaaacggggaagaaagcgagacaaaaggacaaagaacaggaaaagctggtaccggtaccgaatttccggggatcaagaggaattttgtgaataagatttaagaacaaaacagaaaagacacttaatatttcagactgtgacaggaaacaccctttagtctgtcagttgaattcagagcactgaaaggtgttaaattggggtatgtggtttgattgataaaaagttacctctcagtattttgtgtcactgagaagctttacaatggatgcttttgaaacaagtatcagcaaaaggatttgttttcactctgggaggagagggtggagaaagcacttgctttcatcctctggcatcggaaactcccctatgcacttgaagatggtttaaaagattaaagaaacgattaagagaaaaggttggaagctttatactaaatgggctccttcatggtgacgccccgtcaaccacaatcaagaactgaggcctgaggctggttgtacaatgcccacgcctgcctggctgctttcacctgggagtgctttcgatgtgggcacctgggcttcctagggctgcttctgagtggttctttcacgtgttgtgtccatagctttagtcttcctaaataagatccacccacacctaagtcacagaatttctaagttccccaactactctcacacccttttaaagataaagtatgttgtaaccaggatgtcttaaatgattctttgtgtaccttttctgtcatattcagaaaccgttttgtgcctgctgggagtaattcctttagcaattaagtatttggtagctgaataaggggtcagaacttctgaaaccagagatctgtaatcatctctattggcctggggtgcctgtgctataaatgagtttcttcacatgaaaaacacagccagcccaagatgacttatctgggtttaggattcaatagtattcactaactgcttattacatgagcaatttcatcaaatctccaaactcttaaaggatgctttcggaaaacacgctgtatacctagatgatgactaaatgcaaaatccttgggctttggtttttttctagtaaggattttaaataactgccgacttcaaaagtgttcttaaaacgaaagataatgttaagaaaaatttgaaagctttggaaaaccaaatttgtaatatcattgtattttttattaaaagttttgtaataaatttctaaattataaaaaaaa

SEQ ID NO: 357330 - DNA, 458 bp, Homo Sapiens
  misc_feature (436)..(436): n is a, c, g, or t
gttaaattggggtatgtggtttgattgataaaaagttacctctcagtattttgtgtcactgagaagctttacaatggatgcttttgaaacaagtatcagcaaaaggatttgttttcactctgggaggagagggtggagaaagcacttgctttcatcctctggcatcggaaactcccctatgcacttgaagatggtttaaaagattaaagaaacgattaagagaaaaggttggaagctttatactaaatgggctccttcatggtgacgccccgtcaaccacaatcaaggaactgaggcctgaggctggttgtacaatgcccacgcctgcctgggctgcttttcacctggggagtgcttttcgatgtggggcacctggggctttcctaggggctgcttcttgagttgggtcttttcacgtgtttgttttccctaaggntttagtctttccccaaataaga

SEQ ID NO: 357331 - DNA, 1438 bp, Homo Sapiens
  misc_feature (251)..(251): n is a, c, g, or t
  misc_feature (1001)..(1073): n is a, c, g, or t
  misc_feature (1181)..(1232): n is a, c, g, or t
  misc_feature (1255)..(1276): n is a, c, g, or t
  misc_feature (1312)..(1312): n is a, c, g, or t
  misc_feature (1321)..(1321): n is a, c, g, or t
  misc_feature (1369)..(1369): n is a, c, g, or t
  misc_feature (1391)..(1391): n is a, c, g, or t
  misc_feature (1393)..(1393): n is a, c, g, or t
  misc_feature (1396)..(1396): n is a, c, g, or t
  misc_feature (1398)..(1398): n is a, c, g, or t
  misc_feature (1404)..(1405): n is a, c, g, or t
agagcctctgaatcagacgtcagtacacgaagttcaagtgtcctcagctgagtctcacaaagatctaggaaagaaggacacagagacagtgtacagtgaagtccggaaagctgtccctgatgccgtggaaagcagatactctagaacggaaggctcccttgatggaacttagacagcaaggccagatgcacatccctggaaggacatccatgttccgagaagaacagataatccctgtatttcaagacctnctgtgcacttatttatgaacctgccctgctcccacagaacacagcaattcctcaggctaagctgccggttcttaaatccatcctgctaagttaatgttgggtagaaagagatacagaggggctgttgaatttcccacataccctccttccaccaagttggaacatccttggaaattggaagagcacaagaggagatccagggcaaggccattgggatattctgaaacttgaatattttgttttgtgcagagataaagaccttttccatgcaccctcatacacagaaaccaattttcttttttatactcaatcatttctagcgcatggcctggttagaggctggttttttctcttttcctttggtccttcaaaggcttgtagttttgggtagtccttgttctttggaaatacacagtgctgaccagacagcctccccctgtcccctctatgacctcgccctccacaaatgggaaaaccagactacttgggagcaccgcctgtgaaataccaacctgaagacacggttcattcaggcaacgcacaaaacagaaaatgaaggtggaacaagcacagatgttcttcaactgtttttgtctacactctttctcttttcctctaccatgctgaaggctgaaagacaggaagatggtgccatcagcaaatattattcttaattgaaaacttgaaatgtgtatgtttcttactaatttttaaaaatgtattccttgccagggcaggcaaggtgctcannnnnnnnnnnnnnnnnnnnnnnnnnnnnnnnnnnnnnnnnnnnnnnnnnnnnnnnnnnnnnnnnnnnnnnnnatgaaaccctgtctctactaaaaatacaagaattagccgggcgtggtggcgcatgcctgtagtatcagctactcaagaggctgaggtgagattatcgcttgaacccannnnnnnnnnnnnnnnnnnnnnnnnnnnnnnnnnnnnnnnnnnnnnnnnnnntgacagagtgagaatccatctcnnnnnnnnnnnnnnnnnnnnnnttgcttgctaaagaagtggtctcctgaggtcttaanacattcctnacagtgtcttgagtgggtgggagagaggttgctgtcattgcgctgtgnaatttcacagatgagaaccacncntancnaaaatnncttttcctgtttgcctcagtgacacagctgcag

SEQ ID NO: 357332 - DNA, 1979 bp, Homo Sapiens
  misc_feature (5)..(5): n is a, c, g, or t
  misc_feature (8)..(8): n is a, c, g, or t
  misc_feature (14)..(15): n is a, c, g, or t
  misc_feature (17)..(17): n is a, c, g, or t
  misc_feature (22)..(22): n is a, c, g, or t
  misc_feature (27)..(27): n is a, c, g, or t
  misc_feature (30)..(30): n is a, c, g, or t
  misc_feature (34)..(34): n is a, c, g, or t
  misc_feature (39)..(40): n is a, c, g, or t
  misc_feature (48)..(49): n is a, c, g, or t
  misc_feature (52)..(52): n is a, c, g, or t
  misc_feature (59)..(59): n is a, c, g, or t
  misc_feature (69)..(69): n is a, c, g, or t
  misc_feature (71)..(71): n is a, c, g, or t
  misc_feature (81)..(81): n is a, c, g, or t
  misc_feature (83)..(83): n is a, c, g, or t
  misc_feature (91)..(91): n is a, c, g, or t
  misc_feature (96)..(97): n is a, c, g, or t
  misc_feature (107)..(107): n is a, c, g, or t
  misc_feature (128)..(128): n is a, c, g, or t
  misc_feature (133)..(133): n is a, c, g, or t
  misc_feature (150)..(150): n is a, c, g, or t
  misc_feature (154)..(154): n is a, c, g, or t
  misc_feature (1166)..(1166): n is a, c, g, or t
ttttnctntggganncngaggntggtngtntgtnaaggnnggcataanntcnccccctntccttgttancntctgctggtncnaaatgccnggtgnnatttgagtcnattgatagaagggttgccctnttttntctgtaaaacttatagntganggaccagatccttcattcacagcacattgcagcacaatgtcctctccagactccaccaccttacttgacaggatagaaatctggacctcatccaccggggctatcaccttcaccctcagaacctcacttaacattttggcgtgggaatggcaattatctgcaacacactggtattcgacgtcttcagtggggttgtctttgaataccgcaggatcatttgagttcttggtactattctccaaaactttacttgtttttaaaagttggtaagaaataggcaaagttccactgatcgattcgcaacggacttcgatggtctgtccttttatgacctcaaactgggcatcataagaaatcctgggctgggagagcatttcacatacgactatctggactgtgttgcttttcttgaccactttgtcaatacctgcagtgcagatatacgtcccactgtccgactttgaggctatcttggtgaaatcttgagtctgtgacacaatcgtatcttccttctggatggtgaagttggctggaggtgctcctgggatggagcaggacaggttcagtctttcaccttggtccagatgtgtgaaggaagattccagttcgggcttggaaaatagttctgttatgttgaccacgatgctgctgaccttggatatgcggctggactccactttgcacgtgtagttgccactgtgctccaccatggccatgactgagtacacagccttgttgccatgtctgttgtgggccacaatcgccttgtccttctgaattatgatttctggaaactcctgggccaggtgagtcacttgaatagtgcacttaatgtggagctgagctccttccatgatcattcaggtggggctgatgtggaacttgggtgtagagaaggattccgtcacggtgaccagttcactcttggtagattctgaggtctgcatatggatccccagaaaatgatcctagcttgacatcggaaggataaaacgcggtcctgttcctcaancggggaattccagtatcacaaaattctggtctcgagaattcttctctcttttcagcttgaccaattttttcatttagttcaagtttttcaatttgtgaagtgttattggggccttttcctctgggacagaacagttgaccctcacgatcccaccttggatggcctctttcttgtccagtgtcaccctgggactgggcactccttccaccaacagctggtactctgcaggggttttctctttgttgttcacaatcacagtacatttatatgtccctgagtcatagatccggacttcaggaataaaataactctctgtgctcttcatggaggagatgttgtaaaacagcacgtcatccttatagaacagcatctggtgctgaggcttgacgtgagaggtggtgctgacatccgcgaagcactgcagggtcaggttcttcccattttgcaccgtccagtccggcaggctcttcatgtcaacactgttgattgtgaaagagttttcttgaccctcaaggcttgaacagagcagaagggtcagcaggactccaagccacatcgtggccccttgggcccacctcggctgcatcctgagagtgaagactgcaggcacagttagttctgccttcgggccatgactcgctcagcagaaggcactgcccacaagtcaccgttgagaaacccgccctgtgaaaagcagaaattgctctggtcacttctcccggcgcctgcagagagaccggctgtggcgctggtcaggtaatggcagccatggctggaaaccgggaacaatggggcctggatcccgggaattcc

SEQ ID NO: 357333 - DNA, 880 bp, Homo Sapiens
  misc_feature (362)..(397): n is a, c, g, or t
gtggcgaatgaagcttctcagcaattcactaagcttatccacagcaccctcccctgcaggcctgagacctcaccatccctgttggccctcagtccctctcacagcctgtggttctgaacaagctaaatgggagaagccttggaaaccaaagcgagttgaggtgcctctcagtgcctgacactgtgatgctcatagctggttacacactgctgtttggatggtggttacatcctttcctggccacagagccagctcaggaagggggctcttctgtgcaagcaagcactgtacagctgtcagaagttggtaaggtgggaggtgggtgaggaagaggaaggagtggggctcagactgtcagtaannnnnnnnnnnnnnnnnnnnnnnnnnnnnnnnnnnnatatgggatggggaatctggacagcattttagtgcctctgaggtttggtttctccatatcaatttcattatctggttggaaatgttataaactctgagtgttatcttctaaaagtaacatttaaattttgggccatttgtgtcactattctgtgactgcaaatggaagggctgtttgcaccagcctgtccctcactggctaacagaagcctggggtttacaaaggagcctgactctggcctatgttgacggacctgaactggcaagagggtccattgatatcagctgtcaaacaggctcccaatgagcttgcttagttaaaagtcttgccaaatataaaatgcactgagctcccatgagggcaaaggcaaacagtcatgactgctggagacttgggttgctttagaattttccaaaattgcccacagatggcactgtaccccgtggcatctagagtaagtagccatcactgcactacagatcc

SEQ ID NO: 357334 - DNA, 2845 bp, Homo Sapiens
  misc_feature (2193)..(2193): n is a, c, g, or t
  misc_feature (2780)..(2780): n is a, c, g, or t
  misc_feature (2808)..(2808): n is a, c, g, or t
  misc_feature (2822)..(2822): n is a, c, g, or t
agcaggctggtaccggtccggaattcccgggatgcggcggccgaggcaaagggccgccgagcggcggaggcaccgagtgcagagcattgtagaccaaggagccatggataggagaagtatgggtgaaacagaaagtggagatgctttccttgacctgaagaagcctcctgcctccaaatgcccccatcgctatacaaaagaagaactcttggatataaaagaactcccccattccaaacagaggccttcatgcctttctgaaaaatatgacagtgatggtgtctgggaccctgagaagtggcatgcctctctctacccagcttcagggcggagctcaccagtggaaagtctgaagaaagagttggatacagaccggccttccctggtgcgcaggatagtagatccacgagagcgtgtgaaagaagatgacttagatgttgttctcagccctcagagacggagctttggagggggctgccacgtgacagccgctgttagctcccggcgctcaggaagtccattagagaaagatagtgatgggcttcgtctgcttggtggacgtaggattggcagtgggaggataatctctgcccggacctttgagaaggatcaccgtcttagcgataaggacctgcgggacttgagagacagagaccgagagagggacttcaaggacaagcgtttcaggagagagtttggagatagtaagcgtgtctttggtgagcgtagaagaaatgattcttacacagaagaagaaccagagtggttctctgctggacccacaagtcagtctgaaaccatcgaactgactggctttgatgataagatactagaagaagatcacaaagggagaaaaagaacaaggcgacggacagcctctgtgaaggaaggtatagtagagtgcaatggaggagtggccgaagaggatgaagtggaggtcatccttgcacaggagcctgcggctgatcaggaagtgccaagggatgctgtcttgcctgagcagtccccaggagactttgactttaatgagttctttaaccttgataaggtgccatgcttggcttcgatgatagaagatgttttgggagaagggtcagtctctgccagtcggttcagtaggtggttctctaacccgagcagatcaggaagccgatccagcagtcttgggtcaacaccacatgaagagctagagagacttgcaggtctggagcaagccatcctctctcctggacagaactcggggaattactttgctcctataccattggaagaccatgctgaaaataaagtggatattttagaaatgctacagaaagccaaagtggatttgaaacctcttctttccagcctttctgcaaataaagaaaaacttaaagaaagctcacattcaggggttgtgctttcagtggaggaggtagaagcaggtctgaagggcttgaaggttgaccagcaagtgaaaaattcaactcccttcatggcagaacacctagaagagaccttgagtgccgtaaccaacaatcgacaactgaagaaagacggagacatgactgcgttcaacaagctagtgagcacaatgaaggcaagtgggactttgccttctcagcccaaagtcagccgaaaccttgagagccatttgatgtcccctgctgagattccaggccagcctgtccctaagaacatcctgcaggaacttctgggtcaaccagttcagagacctgcttcttccaatcttctgagtggccttatggggagcttggagcctacaacatccttactgggccaaagagcaccctctcctcccttgtcacaggtgtttcaaactcgagcagcctcagctgactaccttcgcccaagaataccatcaccaattggtttcacaccaggaccacagcagctactcggagatccattccaaggcatgcgcaaacccatgagccccatcacagcccagatgagccagctggagttgcaacaggcagctttagaagggctggccttgccacatgaccttgctgtacaggcagcaaacttctaccagcctggttttggcaaaccacaggtggacagaaccagagatggattcagaaacaggcaacagcgagtgaccaagtcaccagcacccgtgcatcgagggaattcctcttcccctgcccctgctgcctccatcacaagcatgctttctccttccttaanccctacctcagtgatccgtaggatgtacgagagcaaagagaaacgcaaggaggagccagcatctggaacagcagctcttggtgacagtaaagaggatactcagaaggccagtgaagaaaacctcctgtcatccagctctgtacccagtgccgatcgagactcttctcccactacaaattccaaactgtcagcattacagaggtcttcgtgttccaccccactgtcccaggccaaccgttacaccaaagaacaagattatcgacctaaagcaactggaagaaaaacacccaccttggcatccccagttcctacaacaccttttctccgccctgtccaccaagttccccttgtcccccatgtccctatggttaggcctgctcaccagcttcacccagggttggtacagaggatgctggcccagggagtacatccacagcatcttccaagtttgctccaaactggtgtgcttcctcctgggatgggacttgagtcatttacaggggaatatctgggccccatcctgggttcagccctttttaaccttttacctgcttgttagttcaccctcttctttaaaccttcgttcntgggggaacaactttggcatttgggcanttgggttgcaacangcagtttacagggtttcagggta

SEQ ID NO: 357335 - DNA, 458 bp, Homo Sapiens
  misc_feature (360)..(360): n is a, c, g, or t
  misc_feature (370)..(370): n is a, c, g, or t
  misc_feature (413)..(413): n is a, c, g, or t
acaggtgtttcaaactcgagcagcctcagctgactaccttcgcccaagaataccatcaccaattggtttcacaccaggaccacagcagctactcggagatccattccaaggcatgcgcaaacccatgagccccatcacagcccagatgagccagctggagttgcaacaggcagctttagaagggctggccttgccacatgaccttgctgtacaggcagcaaacttctaccagcctgggttttggcaaaccacaggtgggacagaaccagagatgggattcagaaacagggcaacagcgagttgaccaagttcaccaggcacccgtgcattcgaggggaattccttctttccccttgcccntgcttgcctncattcacaagcttgtttttttccttcctttttacccttacctnagtggtttcgttaaggtgttacggaggaggcaaaggggaaaagca

SEQ ID NO: 357336 - DNA, 1382 bp, Homo Sapiens
  misc_feature (134)..(176): n is a, c, g, or t
  misc_feature (198)..(249): n is a, c, g, or t
tcaaataccttggactagcggcagcacctgcaattatgagttatgcagaatgttctgtcccaattggagtgactgctccctcattgcagccagttcaggcccgaggtgctgtgcctaccgctaccattatagannnnnnnnnnnnnnnnnnnnnnnnnnnnnnnnnnnnnnnnnnngctcccaaaatgccaccacctnnnnnnnnnnnnnnnnnnnnnnnnnnnnnnnnnnnnnnnnnnnnnnnnnnnntgccatctttggtaaaaaagtggcagagtatccagcgtgagttagatgaagaggacaattctagttccagtgaagaggatcgggaatcaactgcacagaagcgaattgaagagtggaaacagcagcagctggttagtggcatggcagagagaaatgctaattttgaagcccttcctgaggattggagagcaaggctgaagagaaggaaaatggctccaaacacatagtttttaagtttttaaaacttttttgtattattgtttgttttgtgttcagttcaaagtcttaaccagttttattgtcaaataaactataaatgttatgggggagatcttataaatttcctgggcaagagtgtatgcatacaaagttttcacttttgtgaaatgtaatttttctgtttttgcaaagggatgaggtgattggaattgctttgaccatgctgcctttattctcaaactggcaaacttagcatgttaggtgtattaacctcatcagtcttgaagaacatgtggctcatgagtataacacttctgtagaggactccctgacaaaagtgaagatattaacttctcctccagaacaagtgcaattcagaaggcagctctgcattctaccttgcttgactggaattgtctgaagctttttctggcctcttttctctagtcggccacccctgaagtgctgaggtctaagtggtttacctcgtgctgatagatggccacactctttagagtaactctcataagttctagaactggtagctcggtcgtttcgcacactaggtggcatacaggcagcagcaggtgttcatatccttgattttgagaatttcccctcaagtatgtggcagtaaatacaacaagacactctatgtattaatgtctccattgtcttaaccctgttccaaaacaaaattcacctcctttctttatgtgaatgtattctccataaaattccagtatttaaaaagcagtttactgttctgtactttctgttgtatcacaatcaggtaaaagtcactttaaactgaggaaacggcaaattgtgttttaaagctctttgtatttctccagtttctgaccttgtaaatttgtatatatgcactaataaagctttttttataatcccga

SEQ ID NO: 357337 - DNA, 1324 bp, Homo Sapiens
  misc_feature (68)..(68): n is a, c, g, or t
  misc_feature (143)..(143): n is a, c, g, or t
  misc_feature (149)..(149): n is a, c, g, or t
  misc_feature (170)..(170): n is a, c, g, or t
  misc_feature (215)..(215): n is a, c, g, or t
  misc_feature (252)..(252): n is a, c, g, or t
  misc_feature (267)..(267): n is a, c, g, or t
  misc_feature (342)..(342): n is a, c, g, or t
  misc_feature (347)..(347): n is a, c, g, or t
  misc_feature (451)..(451): n is a, c, g, or t
  misc_feature (472)..(472): n is a, c, g, or t
  misc_feature (607)..(607): n is a, c, g, or t
  misc_feature (653)..(653): n is a, c, g, or t
  misc_feature (680)..(680): n is a, c, g, or t
  misc_feature (732)..(732): n is a, c, g, or t
  misc_feature (739)..(740): n is a, c, g, or t
  misc_feature (742)..(746): n is a, c, g, or t
  misc_feature (755)..(755): n is a, c, g, or t
  misc_feature (994)..(994): n is a, c, g, or t
  misc_feature (1073)..(1073): n is a, c, g, or t
  misc_feature (1103)..(1103): n is a, c, g, or t
  misc_feature (1150)..(1150): n is a, c, g, or t
  misc_feature (1172)..(1172): n is a, c, g, or t
  misc_feature (1193)..(1193): n is a, c, g, or t
  misc_feature (1219)..(1220): n is a, c, g, or t
  misc_feature (1230)..(1230): n is a, c, g, or t
tgttttcataggttctctttgtaaagaatccttttctggtcaagtttcttcttcatcactcatgccanttactccattctggaacctccttcagtcaaatgttcctgtgcttcaacctccattacccttggaaatgcaaccanccccanctccacctccagaatcacctncaccccctcctccaccacctcctcctgcggaagatggtgagatcnaggaggtagagatggaggatgagggaagtgaggagcnccctgccccaggaanagaggaagatacccctattagaaaccttcagcacaaaccacagttgtaactagccagagttcagttgattccacnatctntagttcttcttccactaaaggaataaagaggaaagctaaagaaattagcactgcagtggttcagaggtcagctaccattgggagttctccagttctctatagcnagttagctatagctacaggtnaccaggcagcagggattggaaaccaggcaacaggaattggacatcagacaataccagttagccttccagcagcaggaatgggtcatcaggccagaggaatgagcctgcagtcaaattaccttggactagcggcanacctgcaattatgagttatgcagaatgttctgtcccaattggagtnactgctccctcattgcagccagtacangcccgaggtgctgtgcctaccgctaccattataaaaccacaaacaccacctnctcctcnncnnnnnccaacaccnccagctcccaaaatgccaccacctgaaaagacaaaaaaaggaaggaaagacaaggcaaagaagagtaagaccaaaatgccatctttggtaaaaaagtggcagagtatccagcgtgagttagatgaagaggacaattctagttccagtgaagaggatcgggaatcaactgcacagaagcgaattgaagagtggaaacagcagcagctggttagtggcatggcagagagaaatgctaattntgaagcccttcctgaggattggagagcaaggctgaagagaaggaaaatggctccaaacacatagtttttaagttctttntattgtcaaataaactataaatgttatggnggagatcttataaacttcctgggcaagagtgtatgcatacaaagttntcactcttgtgaaatgtacttntctgtttttgcaaaggatgangtgattggactgctttgacatgctgnncttatctcanactgcaactagcatcgtagtgtataactcatcagcttgagacatgtgctcatgagatacactctgagagactcctgacaaagtgagaattactt

SEQ ID NO: 357338 - DNA, 1061 bp, Homo Sapiens
  misc_feature (879)..(879): n is a, c, g, or t
  misc_feature (897)..(897): n is a, c, g, or t
  misc_feature (902)..(902): n is a, c, g, or t
  misc_feature (927)..(927): n is a, c, g, or t
  misc_feature (938)..(938): n is a, c, g, or t
  misc_feature (947)..(947): n is a, c, g, or t
  misc_feature (958)..(958): n is a, c, g, or t
  misc_feature (961)..(961): n is a, c, g, or t
  misc_feature (972)..(972): n is a, c, g, or t
  misc_feature (984)..(984): n is a, c, g, or t
  misc_feature (986)..(986): n is a, c, g, or t
  misc_feature (1000)..(1000): n is a, c, g, or t
  misc_feature (1010)..(1010): n is a, c, g, or t
  misc_feature (1014)..(1015): n is a, c, g, or t
  misc_feature (1022)..(1022): n is a, c, g, or t
  misc_feature (1035)..(1035): n is a, c, g, or t
  misc_feature (1044)..(1044): n is a, c, g, or t
  misc_feature (1051)..(1052): n is a, c, g, or t
attcccgggatgcccgagtgactcactcggccaaggaaactcccagggcccgcccaggacccccaagccgccgcggacgcagcccaggatggcggcccaggtgactctggaggacgcgctgtccaacgtggacctcctggaggagctgcccctgcccgaccagcagccctgcatcgagcccccgccatcctcgctgctctaccagccaaatttcaacactaactttgaagacagaaatgcatttgttactggcatcgcaagatacattgaacaagccaccgtccactctagcatgaacgagatgctggaggagggccaagaatatgctgtcatgctgtacacctggaggagctgctcccgggccatcccacaggtgaaatgtaacgagcagcctaacagagtggaaatctacgagaaaaccgtggaggttctggagcctgaggtcacaaaactgatgaatttcatgtacttccagagaaatgccattgagcgtttctgcggggaagtgaggcgcctgtgccatgccgagaggaggaaggacttcgtgtcagaagcctacctgatcacactgggcaaatttcatcaacatgttcgctgtgctggacgagctgaagaacatgaagtgcagtgtgaagaacgaccactcagcgtacaagagggccgctcagtttttacgtaaaatggcagatccacagtccatccaggaatcgcagaatctgtccatgttcctggccaatcataacaagatcacacagtctctgcagcagcagctcgaagtgatttctggctacgaagagctcctggcagatattgtgaatctgtgtgtggattactacgagaacaggatgtatttgacgcccagtgagaaacacatgcttntcaaagtcatgggatttngtctntacctgatggatgggagtgtcagtnacatctataanttggatgcnaagaaaagatnaanttttcaaaatngacaagtacttnancaactccaggtggntcgctatttngggnntgcaaanaaactggcaaatntatcagacngcgcccnnacgagaaaa

SEQ ID NO: 357339 - DNA, 1050 bp, Homo Sapiens
  misc_feature (975)..(975): n is a, c, g, or t
  misc_feature (997)..(997): n is a, c, g, or t
  misc_feature (1007)..(1007): n is a, c, g, or t
  misc_feature (1009)..(1009): n is a, c, g, or t
  misc_feature (1015)..(1015): n is a, c, g, or t
  misc_feature (1025)..(1025): n is a, c, g, or t
  misc_feature (1032)..(1032): n is a, c, g, or t
  misc_feature (1044)..(1044): n is a, c, g, or t
gccgcgaagaccgggtgagacgctgcggctgccgaggcctgtcccgcgcggagtggggagtgggggtgccgcagggtcgggctggcgcgaccctcggctcaggagcatctatcggctgcacgccaacatcaacacaggcgaagatggtctccaagcgcattgcccaggagacctttgatgcagctgtgcgcgagaacatcgaggagtttgcgatggggccagaggaggcagtgaaagaggccgtggagcagtttgaatcgcaaggggttgatctgagcaacattgtaaagacggcacctaaagtctctgcagacggatcccaggagcccacacatgacatcctgcagatgctcagtgacctccaggagtctgtggccagctctcgcccccaggaggtgtcagcatacctcacccgcttctgcgaccagtgcaaacaggacaaggcctgccgcttcctcgcggcccagaagggggcctaccccatcatcttcactgcctggaagctggccactgcaggtgaccagggccttctgctccagtccctcaatgccctgtcggtgctgactgatggacagccagacctcctggatgcccagggcctgcagctcctagtggccacgctgacccagaatgctgatgaggctgacctgacctgctctgggatccgctgtgtgcgtcacgcttgcctgaaacatgaacagaatcggcaagacctggtgaaagctggcgtgctgcctctgctgactggtgccatcacccatcatggccaccacactgacgtggtcagggaagcctgctgggccctgcgtgtcatgaccttcgatgacgacatccgtgtgccctttggccatgcccacaaccatgccaagatgattgtgcaggagaacaaaggcttgaaggtgctcatcgaagcacaaagcgttctggataacctggcatctgagcgaccctgtggaccctgtccccctggccatngcaagagtctccaggagtcgtngactcggggncngacatntggtgtcctntagcgantgcatgacacanatgagg

SEQ ID NO: 357340 - DNA, 1084 bp, Homo Sapiens
  misc_feature (4)..(4): n is a, c, g, or t
  misc_feature (7)..(7): n is a, c, g, or t
  misc_feature (11)..(11): n is a, c, g, or t
  misc_feature (18)..(20): n is a, c, g, or t
  misc_feature (24)..(24): n is a, c, g, or t
  misc_feature (28)..(28): n is a, c, g, or t
  misc_feature (38)..(38): n is a, c, g, or t
  misc_feature (40)..(40): n is a, c, g, or t
  misc_feature (48)..(48): n is a, c, g, or t
  misc_feature (51)..(51): n is a, c, g, or t
  misc_feature (60)..(61): n is a, c, g, or t
  misc_feature (72)..(72): n is a, c, g, or t
  misc_feature (83)..(83): n is a, c, g, or t
  misc_feature (153)..(155): n is a, c, g, or t
  misc_feature (297)..(297): n is a, c, g, or t
gagnggnggcnttccctnnngagngtcntaagcaagtntnacaccctngancatcgcagnnacgacgacgtnaagatctattntcgtgctggtggacgagtccatcgtgctctatacccagcatctaccagcccccaggtgtgtgagcaagannngcggccctgtgcttcctggccctgcgtaagcccgacaacagccgcatcatcgtggagggtggcggggctgtggcagcactgcaggccatgaaggcacacccgcagaaggccggcgtgcaggtgggcagggcaggggatgggngcaggcaggctggtttggatgtgcagaaacaggcttgcatgctgatccgaaacctggtggcccacggccaggccttctcgaagcccatcctggacctgggggctgaggcactcatcatgcaggcccgatctgcccaccgtgactgtaaggacgtggccaaggccgccctgcgggacctgggttgtcatgtcgagctccgagagctgtggacaggccagaggggcaacctggcgccatgaccccaggcccagtctgggccgtgactctgggtgagtcgtgtgactcaggaatgggggtagatccatgtcctccactgtcccccattagttctgtccccttcacaatgagaagtgttttctggcaggccctaggtaaagggtcgggggaggggggagccttgtagggaggcctctacacagaagaaagcagcccccatgtcccagccacttctgggtcccagccagcagcacggatgttactgtcctgctccttcccccagccccacgccctaccagagggggcaaagggcacgtcccatcactcactgccctgtctgaaatgtggcagccactgtgggccaggctcagggcagggcaggcgattccagtggggttgggccccctggcgcctgctgcttactgcagtttcatgcaggcctctgctccttgtctttcttacctgtaaaatgggtctcagatgtccgccctgcttggccccagcttgtctgtctctgggtcctgggccagccaggatacctgataataaaagatcattgggtgaaaaaaaa

SEQ ID NO: 357341 - DNA, 2447 bp, Homo Sapiens
  misc_feature (14)..(15): n is a, c, g, or t
  misc_feature (21)..(21): n is a, c, g, or t
  misc_feature (25)..(25): n is a, c, g, or t
  misc_feature (33)..(34): n is a, c, g, or t
  misc_feature (36)..(36): n is a, c, g, or t
  misc_feature (41)..(41): n is a, c, g, or t
  misc_feature (44)..(44): n is a, c, g, or t
  misc_feature (51)..(51): n is a, c, g, or t
  misc_feature (58)..(58): n is a, c, g, or t
  misc_feature (87)..(87): n is a, c, g, or t
  misc_feature (130)..(130): n is a, c, g, or t
  misc_feature (132)..(132): n is a, c, g, or t
  misc_feature (167)..(167): n is a, c, g, or t
  misc_feature (228)..(228): n is a, c, g, or t
  misc_feature (253)..(254): n is a, c, g, or t
  misc_feature (294)..(295): n is a, c, g, or t
  misc_feature (315)..(315): n is a, c, g, or t
  misc_feature (340)..(340): n is a, c, g, or t
  misc_feature (486)..(486): n is a, c, g, or t
  misc_feature (499)..(499): n is a, c, g, or t
  misc_feature (524)..(524): n is a, c, g, or t
  misc_feature (528)..(528): n is a, c, g, or t
cctggctggccagnnccaganacanacaacccnncnccaancanggcgganatctganacccattttacaggtaagaaagacaaggngcagaggcctgcatgaaactgcagtaagccgcaggggccaggngncccaaccccactggaatcgcctgccctgccctgancctggcccacagtggctgccacatttcagacagggcagtgagtgatgggacgtgcccttcnccccctctggtagggcgtggggctnngggaaggagcaggacagtaacatccgtgctgctggctggnncccagaagtggctgggacangggggctgctttcttctgtgtagangcctccctacaaggctcccccctcccccgaccctttacctagggcctgccagaaaacacttctcattgtgaaggggacagaactaatgggggacagtggaggacatggatctacccccattcctgagtcacacgactcacccagantcacggcccagantgggcctggggtcatggcgccaggntgcncctctggcctgtccacagctctcggagctcgacatgacaacccaggtcccgcaggcggccttggccacgtcctcacagtcacggtgggcagatcgggcctgcatgatgagtgcctcagcccccaggtccaggatggggcttcgagaaggcctggccgtgggccaccaggtttcggatcagcatgcaagcctgtttctgcacgccggccttctgcgggtgtgccttcatggcctgcagtgctgccacagccccgccaccctccacgatgatgcggctgttgtcgggcttacgcagggccaggaagcacagggccgcgcagctctgctcacacacctggggggctggtcagatgctgggtcatagcagccacgatggactccgtcccaccagcacggacaatagcatctttcacgtcgtcgttgcctgcgatggctcgcagggtgctcagcacttgcttcacgagctcctgaacgccgctctggtccctcatctggtggtcattgcagtcggctagcagggacaccagaatgctcaggcccccgaggtcgacgacctcctggcagaactcgttgcgaatggccaggcgggacagggttccacagagctcgctcaggatgcccagggttatccaggaacgctttggtggcttcgatgagcaccttcaagcctttgttctcctgcacaatcatcttggcatggttgtgggcatggccaaagggcacacggatgtcgtcatcgaaggtcatgacacgcagggcccagcaggcttccctgaccacgtcagtgtggtggccatgatgggtgatggcaccagtcagcagaggcagcacgccagctttcacccaggtcttgccgattctgttcatgtttcaggcaagcgtgacgcacacagcggatcccagagcaggtcaggtcagcctcatcagcattctgggtcagcgtggccactaggagctgcaggccctgggcatccaggaggtctggctgtccatcagtcagcaccgacagggcattgagggactggagcagaaggccctggtcacctgcagtggccagcttccaggcagtgaagatgatggggtaggcccccttctgggccgcgaggaagcggcaggccttgtcctgtttgcactggtcgcagaagcgggtgaggtatgctgacacctcctgggggcgagagctggccacagactcctggaggtcactgagcatctgcaggatgtcatgtgtgggctcctgggatccgtctgcagagactttaggtgccgtctttacaatgttgctcagatcaaccccttgcgattcaaactgctccacggcctctttcactgcctcctctggccccatcgcaaactcctcgatgttctcgcgcacagctgcatcaaaggtctcctgggcaatgcgcttggagaccatcttcgcctgtgttgatgttggcgtgcagccgatagatgctcctgagctgtatctagagcaacatcgttcactcatttatttgtaccctgtagcctccttgtccccactgcctaggacggggcccgacacgcagcaggcactcagtgcacaggtgccggtcttcgcggccacgtggggaaaggtggggcgcgcggttgtcacccagggagccgcctctagccccttccggccgccgtacgcgcgcaggcgctgtggcgcccctaggcttggcctcccagagactcgcggacgctcacgataaccaaggacgaccgcgaaccaaggtaaagccaacgaggccacctcgtgcgcgacggaggcgtctttgccgccccttccgggacgctcacggtggtcgccgcccccagcagggaaatgttttgcctccagagcgtccgcccagaagaagcggacagcgcgcttgcgcaagagagccgggccgcggcgatcgaagaatccggacc

SEQ ID NO: 357342 - DNA, 1267 bp, Homo Sapiens
ccggattctacgatgcgcgctgtccgcttcttctgtttgcacgctctggaggcaaaacatttccctgctgggggcggcgaccaccgtgagcgtcccggaaggggcggcaaagacgcctccgtcgcgcacgaggtggcctcgttggctttaccttggttcgcggtcgtccttggttatcgtgagcgtccgcgagtctctgggaggccaagcctaggggcgccacagcgcctgcgcgcgtacggcggccggaaggggctagaggcggctccctgggtgacaaccgcgcgccccacctttccccacgtggccgcgaagaccggctcaggagcatctatcggctgcacgccaacatcaacacaggcgaagatggtctccaagcgcattgcccaggagacctttgatgcagctgtgcgcgagaacatcgaggagtttgcgatggggccagaggaggcagtgaaagaggccgtggagcagtttgaatcgcaaggggttgatctgagcaacattgtaaagacggcacctaaagtctctgcagacggatcccaggagcccacacatgacatcctgcagatgctcagtgacctccaggagtctgtggccagctctcgcccccaggaggtgtcagcatacctcacccgcttctgcgaccagtgcaaacaggacaaggcctgccgcttcctcgcggcccagaagggggcctaccccatcatcttcactgcctggaagctggccactgcaggtgaccagggccttctgctccagtccctcaatgccctgtcggtgctgactgatggacagccagacctcctggatgcccagggcctgcagctcctagtggccacgctgacccagaatgctgatgaggctgacctgacctgctctgggatccgctgtgtgcgtcacgcttgcctgaaacatgaacagaatcggcaagacctggtgaaagctggcgtgctgcctctgctgactggtgccatcaaccatcatgggccaccacactgacgtggtcagggaaagcctgctgggccctgcgtgtcatgaccttcgatgacgactccgtgtgccttggcatgccacaacatgccagatgattgtgccggagacaagggttgcaggtgctctcgagcccaaggttctggttacctggctcggggagcctgtggaacggtccgctggcatcgcaggtttgcgggtctaccgggcggacttggtgcctgccccggtgccatggcacggtcgctctatgtgcctgcctgcataaatttgg

SEQ ID NO: 357343 - DNA, 950 bp, Homo Sapiens
cggtccggaattcccgggatccgcccccggggccgcctctgcctgggggagccggggctccgctgggggcgacttccttgttcgtatcgagccagcgaaaagacagaaccggaagagaccgggggcgaaggcgacaggggtctgtggaagagacctgtcggcggagagcggtccacgttttcctggagaaagacgaggccccagggcaggagcgcgggctgcgctgggcctttacttcgccgcccgcgggcggggagaccggccccgtacccgaggggacgaggggacgaggggcccatgcccagtcagggaagccgaaggcctggaggggcttccgggagcaggggctggagctcctctgccaggcaggaggctggcaccagacacccggcagagggaggcggcgagggcccagcaaggattctccccagcccctgtgcctgcgtctcctgcggcttctgtgcgcggaccgtgtcctgtgctgtgtagggaacgctgcctctctgctcgggacgtggattcctttcccctcctcctcgcctggctactgctgacgcaggtcgtcaggactccgcttgggtgtcacccgtgcaggaagcctcccttagtcaagggccctcggcacccgccccatatgtgactagcagccctcctgtgtatttcatcgcgcccccgttgtttatatcagccattccactcaccacccttctgggcaaccctttatctcccgctctgaaatcccatcgctgagggctgggacccctcctcagtgcttatccctgtttccccgcgcgagtctggcgcctggcgttgtgcaaaggcgcacagctaaaacgtttgtggaggcgaaagaaacgacgcaacagggtgatgagccgcgacgacagttaaggacaggcacttgggccgggcgcaggggaaaacggggggaaggtcaggcttaggtgtgg

SEQ ID NO: 357344 - DNA, 900 bp, Homo Sapiens
ggtggtacaggtccggaattccgggatatcgtcgacccacgcgtgcgctcagcagctgtctttctcgcgcccatggccggtctctcctcttccccgcagtggcctccttctctgcctgcctgggtggccgccatgggccggaagcggctcatcactgattcctacccggttgtgaagaggagggaggggcccgctgggcacagcaagggggagctggcacccgagctaggtctctgacgtgtgagggaggcaggaggagtggacacggaggggcctagaggaggcccctagaggggcggaggggccgatggaacgggaaaggtggcctgtcctcccctcccgacaccaggtctagctgcgggtggcagaggcaaagcggtggtgaggaaggctgggaggtgaggggcaggagactgaagccaagctcgtactgaagagcagctgtcattgcaggggaggagccccagaccccgcgacgaggaggaagcggagctggagctgctgaggcagtttgaacctggtcctggcagtacgggccctgcaccgggatcacacggtgcagcgctggtgtcgggccaagcagatgggcttggagcctcccccagaggtgtggcaggtgctgaagaccaccccggagaccccccgttccagtgcagtctctggcatctctatcccctatgaggcaccacgtaagactcctgcccttagctctcttgctcaccacgccaagaaactcaggacagaagcgagagcccattgtcctgctcagctcagcccggtgcggaggaacccttggaaggcagaaacctggaggtgtcagaggctccaatcttccatctaacacgaggtcccagagtcccggagagctgggcagtgaagcaaagtgctctaatggaactg

SEQ ID NO: 357345 - DNA, 921 bp, Homo Sapiens
gggctctctcggtttgtctgggtcatcttgtctgcccgccgctggcctggccccgtctgtctctctcagcagctgtctttctcgcgcccactggccggtctctcctcttccccgcagttgcctccttctctgcctgcctgggtggccgccatgggccggaagcggctcatcactgattcctacccggttgtgaagaggagggaggggcccgctgggcacagcaagggggagctggcacccgagctaggggaggagccccagccccgcgacgaggaggaagcggagctggagctgctgaggcagtttgacctggcctggcagtacgggccctgcaccgggatcacacggctgcagcgctggtgtcgggccaagcagatgggcttggagcctcccccagaggtgtggcaggtgctgaagacccaccccggagacccccgcttccagtgcagtctctggcatctctatcccctatgaggcaccacgtaagacctcctgcccttagctctcttgctcaccacccaagaacctcaggacagaagcgagagcccattgctcctgctcagctcagcccggctgcggaggaacccttggcaggcagaacctggaggtgtcagaggctcaactcctccatctaaccagcaggctcccagagtccccggaagagcctgcgcagctgaagcagagtgcttctagatggagagtggtcactggggaaaaggacctggccatcaccttccaatacctgctgcctgtctccctgacccatgatctggcaagttaggcacagtcagacatggacagttgatccatgaggaaaagatgctctcccacctaaggccaggaatctgagagcaggactggctgagctcccagggcaaggggttcactaatgcttatcaataaagaatattgagcctggta

SEQ ID NO: 357346 - DNA, 1025 bp, Homo Sapiens
  misc_feature (22)..(22): n is a, c, g, or t
  misc_feature (30)..(30): n is a, c, g, or t
tggctgctttgactggagggcnccttgggntgagccacccccaacaggcagcacgagtccccgaaccagcaccatgtgccctcgggtcctggctcacatctgtcggaggctgcagcggctccagcaaggccggggggcctgccttctcaaacagaagccgaagcgcaggcagcttccggggagacacaatggagaagtggatcccccgctccccaatctgctgcacaagattctcagttgtgcatccagagtacgtggtgctctcaacagcaggcaacaagtatgggggtgagttgcagatgaggaggcagacccggtgcgtctggccaatctgctcgcgcatcttcttgaagtcatcaaacagctgcaaggctgtgctgagtccttccgcgatgaggctgcagctctcaccacccccgcccatgaacttaatgccatcgagccaggtgacaaactcataggcgctgctggtgggagcgtgacattgtacgtaggactcgggagcgcagtccactgtgttgaacaccacgaggctgtactgggtccccccatagtctcccccgaagtccgtctcagcaggaggaccaccattaaaatactcgatggccgggagcaggtagtgcttgcggagcccctcgaagtagggtcccaggttggccgtaccctcaatcacaaacaccacgtcggccaccacgctcccggcgcgggccgggccctcggacccggggaccataccccgtgcggtacccgccaccaccactgcagccgcagccgacgccgcggaatgagcagaaatgcgcctgcgccgcgcagcgcagctcaccgtcgggcaggtttagggcatgctgggaatgcatgccatgctttgtgcggggcacgcgctgaggcttcgttctagctccatcctccttcgcccccaccgcgtggaagactcagaaagggcatagttagcccttctaggggcctgatgggttagacggaattattgtcaaaagctaaataaattgaaagcggctcagtcagcc

SEQ ID NO: 357347 - DNA, 975 bp, Homo Sapiens
  misc_feature (277)..(278): n is a, c, g, or t
gtgctgcaagccgcttgctccggccggcaccctaggccggcccgccgccagctgtcgccgacatggaacccttggccagcaacatccaggtcctgctgcagtgcggccgagttcctggagcgccgtgagagagaggccgagcatggttatgcgtccctgtgcccgcatcgcagtccaggccccatccacaggaggaagaagcgacccccccagtgctcctggctgcgcaggacagcgtggcggtgaggaggccggagggcagcgaggagatgggggnnggggtgcgccgcccctggtcgggccctcctctgcccacttgttgcttgcatcttttgggccaggtgtcccgctccaggaagcgttcagaccccatcctgccatctccccactctccaaacacactcacacctttctattcattcaaggactatttcttgagcacctctagatgtgccgggaactagccaacagcagttggggtcccgcttccactcgcactcccgcaccccagacatcaggccactcacctcccccgctggcttcctcctcttctctcctctccccagcccatagcataaactgtaccctcctatttgaatgccccacactccagtaccggcttgggaaacatctgtttccgcagttagctgtcacctctgggaggtcctttctggccagctggcaggcgcccttgttagggccctcatacccacctgggcaggcttctgttaaagcatttggctccgtgtgtcttttgactcccctcgccctgccaggggactctggtgtctgaaggccagcatgagctctccacaggggacttgtatggggcagacatctgtaagtggctcttgagccactggggggcccggggattgggggcatggcaagtagctgattcccccttcacctcaatcctctctcgccattggcaggtacaggccaaatgaacttgcagaaacgcaggtaagtccc

SEQ ID NO: 357348 - DNA, 1130 bp, Homo Sapiens
  misc_feature (950)..(950): n is a, c, g, or t
ggcctgggtggcgaattcggcacgaggcagccgcttgctccggccggcaccctaggccggcccgccgccagctgtcgccgacatggaacccttggccagcaacatccaggtcctgctgcaggcggccgagttcctggagcgccgtgagagagaggccgagcatggttatgcgtccctgtgcccgcatcgcagtccaggccccatccacaggaggaagaagcgacccccccaggctcctggcgcgcaggacagcgggcggtcagtgcacaatgaactggagaagcgcaggagggcccagttgaagcggtgcctggagcggctgaagcagcagatgcccctgggggccgactgtgcccggtacaccacgctgagcctgctgcgccgtgccaggatgcacatccagaagctggaggatcaggagcagcgggcccgacagctcaaggagaggctgcgcagcaagcagcagagcctgcagcggcagctggagcagctccgggggctggcaggggcggccgagcgggagcggctgcgggcggacagtctggactcctcaggcctctcctctgagcgctcagactcagaccaagaggagctggaggtggatgtggagagcctggtgtttgggggtgaggccgagctgctgcggggcttcgtcgccggccaggagcacagctactcgcacggcggcggcgcctggctatgatgttcctcacccagggcgggccctctgccctctactcgtgccaggcccacttgccaggcaggagccctccccaagccttcagggctgctccgagtcaccgggtggaaatggactaaaaaggacccttgtgggggaaacagggctccccaaacaccctggctgctgggctgccaggcaaggccctccggggaaggggaaaggggcagggactcctccgggaccctcccctgggaacccctggcagggnaagggcactctgtggggccgcaaccaccaagccttttggggttcggggcggcgcccccaggggggaagagggaaacccctccttggggcctctctttccctttgtcggggagaagaggagtccccccggggtcttttggccccccaaaacataaaacaggggaagcactatttttatgtc

SEQ ID NO: 357349 - DNA, 1292 bp, Homo Sapiens
  misc_feature (8)..(8): n is a, c, g, or t
  misc_feature (940)..(940): n is a, c, g, or t
  misc_feature (992)..(992): n is a, c, g, or t
  misc_feature (1029)..(1029): n is a, c, g, or t
  misc_feature (1178)..(1178): n is a, c, g, or t
  misc_feature (1187)..(1187): n is a, c, g, or t
  misc_feature (1203)..(1203): n is a, c, g, or t
  misc_feature (1210)..(1211): n is a, c, g, or t
  misc_feature (1224)..(1224): n is a, c, g, or t
  misc_feature (1230)..(1230): n is a, c, g, or t
ggatatgnatccccgctctacgaggagcccccagtggagtaccaggcccccatctacgatgagccccccatggacgtgcaattcgaggctggcgggggctaccaggccggctctccccagcggtcgccgggccgtaagccccggccgttcctccagcccaacaagcagggccccccctcgccctgccagcagctggtgctcaccaagcagaagtgtcccgagcgcttcctgagcctggagtacagtcccgccggcaaggagtacgtgcggcagctggtctacgtggagcaggcgggctccagccccaagctgcgcgccggcccgcggcacaagtacgcgcccaaccccggcggtggttcgtactccttgcagcccagcccctgcctgctgagggaccagcgcctgggcgtcaagtccggagactacagcaccatggagggacctgagctgcggcacagccagccgcccacgccgctgccacaggcccaggaggatgccatgtcctggtccagccagcaggacaccctgtcctccacaggctactccccgggcacgcgcaagcggaagagcagaaagccctctttgtgccaagccaccagcgccacccccactgagggccccggggacctgcttgtggagcagcccctggccgaggaacagcccccgtgcgggaccagcctcgcccccgtgaagcgagcggaaggtgaggccgaaggggcgcggggcgcggccgagcccttcctggcgcaggctcggctggcctgggaggcgcagcaggcccacttccacatgaagcagaggagcagctgggactcccagcaggacggctctggctacgagagcgacggcgccctgccactgcccatgcccgggccggtggtgcgggccttcagcgaggacgaggcgctggcccagcaggagaacaggcactggaggaggngcaccttcgagaagctaggcttcccccagatcctgctggagaagagcgtctncgtgcagaccaacctggcctcaccagagccctacctncacccctcacagtctgaggacctcgctgcctgtgcccagttcgagagcagccggcagagccgcagcggcgttcccagctccagctgcgtcttccccactttcacgctgcgcaagcccttctcggagacggacatcgagaactgggcctncagcacttncacagcacacgcaggncctcttnncgccggaagtgtncatcgncaaacatgctgcctggagcagcgagtcccatcagaagcccatgatccggacaagcgaccggc

SEQ ID NO: 357350 - DNA, 1209 bp, Homo Sapiens
cggaattcccgggattgtacttcgaaaaagaagatgtgaaggttattttctggtcagctttggccggagccattcccctgaatggtgactctgaggaagaggcaaacagagatgatagacaaagcaacacaactgagtttggacattccagtttcgaccaggctgaaatttcccacagtgaatccgaacatctcccagctagggattctccttcacttagtgaaaatcccacaacggatgaagatgacagtgagtatgaggactgtccagaggaggaggaagacgactggcagacgtgctcagaagaagacggtcccaaggaagaggactgcagccaggactggaaggaaagctctactgcagattctgaggctcggagcaggaaaaccccacagaagaggcagatacacaattttagccatctggtatccaagcaggagttactggagctctttaaggagctacacactgggagaaaggtgaaagatgggcaacttacggtcggactggtgggctaccctaatgttggtaagagttcaacaatcaacaccatcatgggcaacaagaaagtatctgtgtctgccacacctggtcacacaaagcactttcagactctctatgtggagcctggcctctgcctgtgtgactgtcctggcttggtgatgccatcttttgtgtctaccaaggcagaaatgacttgcagcggaatcctcccaattgatcagatgagagatcaggttcctcctgtatcactagtttgccagaatattccaagacatgttttagaagctacctatggcattaacatcataacgcctagagaggatgaagatccccaccgacctccaacatcggaagaactgttgacagcttatggatacatgcgaggattcatgacagcgcatggacagccacaccagcctccatctgcgcgctacatcctgaaggactatgtcagtggtaagctgctgtactgccatcctcctcctggaagacatcctgtaacttttcagcatcaacaccagcgactcctatagaacacaatgaacagcgatgaaatgaaactgcacctaggcagacatcaaacagcaaagaatattgagaatatcgttgacctaactcttttccatcaacagaatgtgagggctttgaccaaacgagtccaggctgtgatgggttacacgcccgggagcgctgaatgactgcaca

SEQ ID NO: 357351 - DNA, 953 bp, Homo Sapiens
gggatcgcgaccggcagctgtccaccgatcccggccaccgcccccggccacccccaccccgcgagcccatggaggctccgggaccccgcgccttgcggactgcgctctgtggcggctgttgctgcctcctcctatgtgcccagctggctgtggctggtaaaggagctcgaggctttgggaggggagccctgatccgcctgaatatctggccggcggtccaaggggcctgcagacagctggaggtctgtgagcactgcgtggagggagacagagcgcgcaatctctccagctgcgtgtgggagcagtgccggccagaggagccaggacactgtgtggcccaatctgaggtggtcaaggaaggttgctccatctacaaacgcttcaaaggcatgtccaggtaagggggtccttgaacctaagccaaggtgcatggggtccccccaaccatagcctggccccccaggaggaaacagcccctctcaggcgggggattttgctaacccaaacctgggcccggtatcagttctgcctttagctcactgagaagtcccctcctctctctgcctatttcctcatctgaaaattagtacaggtgtgtggaggggatgggagtgttagctcttcttctagtttaaggcatagcaaggactttggaagttcagagggaatgagagggagtgcttcctggaggaggtggcatcagtaatgagcctggaaggtagagatggagagagagcacatctggtggagggaactgtgtgggggcttgcaagtatgttggatgtctagagtagggacagggctgcatctgaatcggaagtttagcggtgagtgggggctggggtcttgatgggagtcagggggtggggaaggctgctttgctatggatcacctgtctcctcagctgctcaccaccaccccacctatgaaccgaagacagtcacaacaggtga

SEQ ID NO: 357352 - DNA, 267 bp, Homo Sapiens
caaggggcctgcaaacagctggaggtctgtgagctctgcgtggagggagacagagcgcgcaatctctccagctgcatgtgggagcagtgccggccagaggagccaggacactgtgtggcccaatctgaggtggtcaaggaaggttgctccatctacaaccgctcagaggcatgtccagctgctcaccaccaccccacctatgaaccgaagacagtcacaacagggagccccccagtccctgaggcccacagccctggatttgacaca

SEQ ID NO: 357353 - DNA, 1259 bp, Homo Sapiens
  misc_feature (400)..(408): n is a, c, g, or t
  misc_feature (1015)..(1015): n is a, c, g, or t
  misc_feature (1145)..(1145): n is a, c, g, or t
  misc_feature (1175)..(1175): n is a, c, g, or t
  misc_feature (1193)..(1193): n is a, c, g, or t
  misc_feature (1207)..(1207): n is a, c, g, or t
  misc_feature (1217)..(1217): n is a, c, g, or t
  misc_feature (1220)..(1221): n is a, c, g, or t
  misc_feature (1253)..(1253): n is a, c, g, or t
  misc_feature (1255)..(1255): n is a, c, g, or t
  misc_feature (1259)..(1259): n is a, c, g, or t
caggcacattttagtatcctccaacagtatttgggaaactggtaatgaaacacaaaacttcctttaaattttttataaagaccttattaggagaaaggacaaattttcaattccttacttttatttgtgccttgaaggacttgtgaatgtatagaataattattttttcttactgcttcctctttgcaacccaacctccaccaagtcaatcgtgaaggtaggaagaaagctgtatttctgttacttttaaaaatgataacgagaagaaattaaaacaatggcttaagagaaagaggatgtaaggagtacaaagcaaaacttaacaaagagttagtaaaggaacttgcattgacaattcactcagccatgttaattttatcattaatactgtcttcatcannnnnnnnnccaggtctctctgctcgtatttgcttggtgctccgaaatgcacgggaacagacagctatgggaaagctgcacagagcagttggcaatcaacatgtcctagaagggtgtgtggagtagcaaaacaagtggaacggatgaagaacttccaagctccttcgcagagttttgggccctagtgtgcagggctgctccctcatgagatggaggaaaatgtcgcccacacctacttggacctctcaccaaggacactgccctcagagataaatctgttggacggcagccaagagaccccaaattgtctcaacctccaggacacggcaagttgcaagtttccgagttggggaggcaaagcgggaaaacatgtttggcgatttcctcctgccactcaccgaccggagaaatggggaggcggactccaggtctttcgtggactgccaagagccctatagggcgtccagctataaaaagagaagaatcccataaggacaacaagcaaactcatatgttatccctttagccggattgtgtgctgatgattgtttccctctttacacttcgaatcacccctgatggtcttttgtgagtccccaaggcagcctcagccttngcaaaccgtccagtggggcacgaatctcggaggggtgcgggctgcaggcggcagagggaagccaaagaggggcggcttttccaggccgtccacccccaggcgagctggtcctcacccttcgaccgccccnagtccctcggacagttgcccactcacagcntgcaaagcgggtcgcacnccctgtgggttctncgccctcagnagnnggcggcgcaggaaagtcacctccactacgggncngggn

SEQ ID NO: 357354 - DNA, 939 bp, Homo Sapiens
  misc_feature (602)..(645): n is a, c, g, or t
acagtttacaacaccctgaagaaaatatttaagcacacgctggaagaaaaaagaaaaatgacaaaagatggccctaagcctggcctctagctttcactcgtggtgaatatttcagacctaaagatccagatagtatctctgttcatatgtgaataagttgaagattgtggggctactttttctcatagcactttattttgaatgttgttagtttgtgctgagaatggtcgtccgtatttgaaccaattatttattttaaaatatatttaagctacatttttgttttgaaaaattgccataaatttggtgccactttcttttatttatttgactgagttaatattattgtattaacattttaagtatatggtgtttacattcttatttcttttgacattttggaaataatcataacttgtctttccaaaataaccattttcttgatggaactcttcctagagtttttaccaaatagctaactttagtagtaaaacctcattgtgtatccattcccccacagatgaactaagaaagtcaccaagtgtcttaagctgttttatatttgttacgaagaaggctattgctacaatatttttaaaggnnnnnnnnnnnnnnnnnnnnnnnnnnnnnnnnnnnnnnnnnnnnataaatgtaacagagggtttcaaagcatattatttttcagagagatttagttttactttaatggagtgactgtgaagtggtggggggatttttttggcttgtagaaagtagacttgcctctttgacagatttccaaacaaccttgccaggctttgctgtcaaaaggaggcaggagcagtttgtcacacaccaagccttatacccactcccttggattgctgctgagccaaatagcatttttacagaggaaatggctatcaaaagcccggaagtctgtaaagttccttaaaagca

SEQ ID NO: 357355 - DNA, 885 bp, Homo Sapiens
  misc_feature (295)..(534): n is a, c, g, or t
  misc_feature (553)..(565): n is a, c, g, or t
tgtaaacaaacaaacaaaaagagtgagtttattggcttgtgaatcttctaggggaagaattattctggcatggctggatcctagttgcccaaacaagttgatcaggacgatgtctctccttctctccactctgctccactctgctctgtggcttcattctcaagcagtcccttctcagtggttaagagtttccagggccaaatcctacaattttattaattctaaaagaaggtgaactttcctttcctaattgcttcaattaaaagttcaaagaaggctgggcggagttgctcannnnnnnnnnnnnnnnnnnnnnnnnnnnnnnnnnnnnnnnnnnnnnnnnnnnnnnnnnnnnnnnnnnnnnnnnnnnnnnnnnnnnnnnnnnnnnnnnnnnnnnnnnnnnnnnnnnnnnnnnnnnnnnnnnnnnnnnnnnnnnnnnnnnnnnnnnnnnnnnnnnnnnnnnnnnnnnnnnnnnnnnnnnnnnnnnnnnnnnnnnnnnnnnnnnnnnnnnnnnnnnnnnnnnnnnnnnnnnnnttacagagattccaccccnnnnnnnnnnnnngttcaaagaagactctcagtggactagtttgggtttctacacccgcccttgaacctatcactttgacaggggctatgcagtgctcaggctgacgttgaagaatgggatcagccccacccaatcatgtaaactgagagtgaggaaagggttccccatgaggaaaaagataagatttgttactaaaaaaacaggatactaaccagtcaaaagcgactgacgtcctagcatcattcttctgccgaaagacaccccactgcgcccatcaagataaactttcaagctctcagtataaaatacaaggcacttcatgatttgatccc

SEQ ID NO: 357356 - DNA, 1454 bp, Homo Sapiens
  misc_feature (297)..(297): n is a, c, g, or t
  misc_feature (451)..(451): n is a, c, g, or t
  misc_feature (1444)..(1444): n is a, c, g, or t
gaaatcttggatctgaaaaatacaataaaaaataatggattgtgtcagtctgtctatttgggcagctataacaaaataccacaaactgggtagcttataatgacagaaatacattatttctcccaagtctggaggccagggtgtttaaggtcaaagtggcggcagattcaatatctggtgaggtcttgctttctggtttatagaagttaaatgaataaaatatttataaatgtactttttaaatatttttcaatttagtgatttttaagattcaaagggtacatatgcatgtttgtnacatggatatattgcatactgtgtgggattgggcttgtagtgtacccattaaccaaataggaataggtagtttctcaaacctcaacctctctcacccttccccattttggagtccccagtgtctattattttcatctttatttccatgtatacnaaatgtttatttcctacatgcaagtggaaatatgtggtatttgattttcagttatttcacctttcagttacttcacctaggataatggacttcagctccatccatgtggctgcaaattgcctgtcttcattgttttttaaagctatgtagtattgcaggtatatgcacaaattacctattagtacattattcagtcaaagattgataaacacctttgtttgtttcgtgactttgcaactgtaaatagtgttgttaatacaggagttactaagaaataatttttaggcagctagaaagggtaatggttctcagtggaattttggtttaataaaaagcaacccccaaaacatttcttttctaacagaaagcagcttgaaaaaccagaccagcaagcattgatatgcaaatactggtgattagaaaccaggtccacccaacagggccgttcccgctctcttgtccttgtcacaacttgtgccaggtgtcatggccatctccagataacaccacgtgtgcaggacatcatggcgcccatcattagcatattaaaagactagggtgagagggccaggtttttcatgggctacatgaatgacacatctggtcacaccaattccctggaccctatgcaaatcagacaccacctccttcagcctcccaatatatccaactgcttttccactgcacatggcgttttctccattcgggtacccctttcctctgtacagggggagcttttcttcttctttcttaattaaactttccactccttaaaactactccacgtgtgtccatgtcatttgtctaattggcaggagacgaaggaccctggtgtttctccagtcattggagccatatcattttggtgcattggctggaaatccaaggtacaacactcatcggagcggtgagtataggagcggactttctactttcatttccaaggcttctcgtcctcagtttttattctctcaaatacttttttaaaaacantaccattgaa

SEQ ID NO: 357357 - DNA, 1760 bp, Homo Sapiens
  misc_feature (215)..(215): n is a, c, g, or t
  misc_feature (217)..(217): n is a, c, g, or t
  misc_feature (317)..(317): n is a, c, g, or t
  misc_feature (566)..(608): n is a, c, g, or t
  misc_feature (635)..(686): n is a, c, g, or t
  misc_feature (854)..(987): n is a, c, g, or t
cttgggtgctcacttgggtgttgtgcaacaggagagcctgaagtatgctctgcattcctcagaggcatagaattggccttgattcagctgtcagtgaagtgccgtcagagacattctaaaaaaccatgcagagaagggaaagtacaggaaggaaggattaaggggttgtttaccagtaacctagagggatgtaaatacatttaatcatttttttntngagctaccttttttaatcattcaatcaaaaacaaggaggaatgctatgaaagtatttttctcaatttagtatatccttatagatacctactatatttaanatcctatgtggcattttagataaaggattaggaggattcttctccatttcttatattttttaacagaattttctttgcatacatcttaccaaaaaaaagtatttattgggttaaaaattagttttcgttccccacacatgacaacatagaaatctacaagtaattcaaatagagacatggtttagaatcacagattaaattgtctcagggagagacataattttctaaagaatgaagataaaattaaannnnnnnnnnnnnnnnnnnnnnnnnnnnnnnnnnnnnnnnnnnagtagagacaggatgtctctctgtcannnnnnnnnnnnnnnnnnnnnnnnnnnnnnnnnnnnnnnnnnnnnnnnnnnntgagctcaagtgagtctcccacctcagcctcctgagtagctgggaatacaggtgcacaccaccatacccagctaattttttacattgtaaaaattttcgtagagatgggggtcttacagtcttgtccaggtgggtctctaactcctgggctcaagcaatcctcccacnnnnnnnnnnnnnnnnnnnnnnnnnnnnnnnnnnnnnnnnnnnnnnnnnnnnnnnnnnnnnnnnnnnnnnnnnnnnnnnnnnnnnnnnnnnnnnnnnnnnnnnnnnnnnnnnnnnnnnnnnnnnnnnnnnnnnnaatttataaataagtaaaggtctagtttcaaaacaatgccactgccgtttagcaaggtctttgtacggagaggcagagatcaattgtccatttgggtttcatagtgaatgtgtatgcattcatattatggtttctttttccccccatcccaatccaaaaaggtgccacctgactgggagagagcatccttccaacagggcagtcaggccagccctgatttaaagccaagtccacaaaatggagccacgttcccgtcctctggaggatatggccaggggtcactgatagccgatgaggagtcccaggagtttgatgatttaatatttgcattaaaaactggtgctggtctcagtgtcagtgataatgaatctggtcaaggcagccaggaggggggcaccttgactgactcccagatcgtggagctcaggaggatacccatcgccgacactcacctgtagcacctcactaaccattcgactgagcacactttcatatttgtatcagcttttgtgctaaaactctctaagtacatccacctgtgtaataggaacctgtgaattgtactggatgattaatacaaacgtgattgttgtatttggagtataaattactgattgtatgtgacctgaaaattcactgctataagaaaggtggagtcagtttgtatcagttaataggatgttcatattccaaggatattagttgtttttttaatcatcctatatggctaacattgtttaatgaaagtaataatcaataaagcaatagaatct

SEQ ID NO: 357358 - DNA, 972 bp, Homo Sapiens
  misc_feature (1)..(1): n is a, c, g, or t
  misc_feature (8)..(8): n is a, c, g, or t
  misc_feature (14)..(14): n is a, c, g, or t
  misc_feature (22)..(22): n is a, c, g, or t
  misc_feature (26)..(26): n is a, c, g, or t
  misc_feature (31)..(31): n is a, c, g, or t
  misc_feature (47)..(47): n is a, c, g, or t
  misc_feature (69)..(69): n is a, c, g, or t
  misc_feature (71)..(71): n is a, c, g, or t
  misc_feature (76)..(76): n is a, c, g, or t
  misc_feature (83)..(83): n is a, c, g, or t
  misc_feature (87)..(100): n is a, c, g, or t
  misc_feature (106)..(106): n is a, c, g, or t
  misc_feature (110)..(110): n is a, c, g, or t
ncattccnccatgncttaaatncccnattantttttccaaaaaagcnggaaaacaaaccagccacacananggggnggggtgngggnnnnnnnnnnnnnnttaaanagantaaaatgcagttacctgtggtcattttggaggaagtggaagcctaagaatcgcccccagcatggcttcatcccccaagatggccgatgatctggcctgaaggcctctcacaaagggcaggagaagaagcttccagaaaggctgggatggaggaggagtcctgcggccagctgttgcctgcagcagaggctgcctgtggacacttccctaccggggctgaggccatgctgggagccccccccagtgacgcagaagcacaaattggaggcttggggccatgcccagccaggttggcttccctggggctgaagagctggctgtggtggcaccatggccttggccctgctactcacccaacattcccatcctcccctgataggcccctcctccttgcctgccctctctcccgctgctcagggccagtcactccccccacatgcagctacccctacaacctggggttccttctcagggcctcacctggtccccacatcccctggcctctgctcctgcctcccaaagtccatgtctgcctccatcagccacacacacgcagggacgcccgttccttgccctcccggacttatctactcttcactttcctgatgatccatggggcccaggcctagagggcatccgaggggctgggccttggccacagcctcttggatgatgtccttgctccaccacgcaggcccttgcttctcccatcaacgagtcttggcccaggggacactgaccctcccccagggaggagagaggagttccttccctttcaacgagggcttccacgccctctaaggggtggcggggaagggaggaggctgagaagatgcagattaaaaaaaggtatggaatggaaa

SEQ ID NO: 357359 - DNA, 1225 bp, Homo Sapiens
cgggagggcaaggaacgggcgtccatgcgtgtgtgtggctgatggaggcagacatggactttgggaggcaggagcagaggccaggggatgtggggaccaggtgaggccctgagaaggaaccccaggttgtaggggtagctgcatgtggggggagtgactggccctgagcagcgggagagagggcaggcaaggaggaggggcctatcaggggaggatgggaatgttgggtgagtagcagggccaaggccatggtgccaccacagccagctcttcagccccagggaagccaacctggctgggcatggcccccaagcctccaatttgtgcttctgcgtcactgggggggctcccagcatggcctcagccccggtagggaagtgtccacaggcagcctctgctgcaggcaacagctggccgcaggactcctcctccatcccagcctttctggaagcttcttctcctgccctttgtgagaggccttcaggccagatcatcggccatcttgggggatgaagccatgctgggggcgattcttaggcttccacttcctccaaaatgaccacaggtaactgcattttagtctgtttaaggacccccacccccaccctcaccctgccccttgtgtgtggctggtctgttttcccgcctgttttggacaacaatcactcgggcatctaagcccatggtggaatggtggggagggggccactactgggggccagtgagggaggtctcagagagcaaccgtgcccgatcacccctggcagcgcgctgtcatccgtggacaatgagcaccgggaagctagagggcagtcctcatagcagggcgggctctccaggggtaccagagtcgcactccacggcgccccaggcggccccgccgctcaggctgcggaagacccctggacgtggccagagccgccagggcccagcgagaggcggctgaggctgacggggcacgcggggccccgctggtgccgggcggggggcagcagagtcgcagcagaccgaagcggagggaagcgctggcagcctctgacggcaaggcgccggagcccgagcacatgaaccacggacccgcgaataaagctgagacacccagatgcccggtgggagcagatgtggcacatcacgagcacaagtgaaggtccactgtggccaagcggaacagcgggggcccgatgcggacggccccggcagggcaacgagcgcaaaaggatcacac

SEQ ID NO: 357360 - DNA, 963 bp, Homo Sapiens
  misc_feature (436)..(445): n is a, c, g, or t
cgcacccagagaaaggttaatgcacaagaccccagtttcgtgagtggagtgatggtaaaaatcattagcacagagcctctacatggcaggaaaccaagtccgggatactctgccagcaatctcagaagttctttatgttgatctgctagaaggggatacagaatgccatgctagatttaaaactcctgaggatgctcaagcagtaataaatgcctatacagaaattaacaagaaacactgctggaaactcgagatcctttctggtgatcacgaacaaaggtattggcagaagattttggttgatagacaggcaaaacttaatcagcctcgggaaaagaaaagaggcactgaaaagttaatcaccaaagctgaaaagattagactggcaaagactcaacaagcgagtaaacatataagattttctgaatatgattgnnnnnnnnnncagttcacctcttaatacttcacaagatacttgagctgttcttgggagattcacttttagtatggtagcactgcataattaatgtgtttttaattaaaagaaatatctttgttcctcaacttgtaaataagacttttttctagagacaaatatgatgtataccacaatttttcttaaacattttatttgttgaaattatcttagatgtcagtgtcaggtgatttagtaaataaatgtgttttgaacattatttggaaatgtgttgattttgtttttatactgtaaaaacaaaacataattgcaaaaatactacatgaatatatataaagtttagagaaatgtttaacactaaactctcactgtacttagtttgtaacttgcaataccttcaataccttttcatgttgatttatacagacatgtttaatagttcattctattcattccactttgcctatctgagcttccattgaacaatagaccatagggattggttctaattaaaatgttaaattttt

SEQ ID NO: 357361 - DNA, 861 bp, Homo Sapiens
ggggtggttgtttaagctgggttaagggaaagtgtggtgcgcgttctggggggcatgtaaaatgagtgaactgccggtgaatgtgtccccagttaaaaggttggagcaggataagggaatcctgtcaccatcaatatacactgtgaagcgccagctctgccaaggcgccactgggcggacagccaggagctctccatggccaggctgcctgtgtgcatgttccctgtctggtgcccctttggccgcctcctgcaaacctcacagggtccccacacaacagtgccctccagaagcagcccctcggaggcagaggaaggaaaatggggatggctggggctctctccatcctccttttctccttgccttcgcatggctggccttcccctccaaaacctccattcccctgctgccagcccctttgccatagcctgattttggggaggaggaaggggcgatttgagggagaaggggagaaagcttaatggctgggtctggtttcttcccttcccagagggtcttactgttccagggtggccccagggcaggcaggggccacactatgcctgcgccctggtaaaggtgacccctgccatttaccagcagccctggcatgttcctgccccacaggaatagaatggagggagctccagaaactttccatcccaaaggcagtctccgtggttgaagcagactggatttttgctctgcccctgaccccttgtccctctttgagggaggggagctatgctaggactccaacctcagggactcgggtggcctgcgctagcttcttttgatactgaaaacttttaaggtgggagggtggcaagggatgtgcttaataaatcaattccaagcctc

SEQ ID NO: 357362 - DNA, 1215 bp, Homo Sapiens
  misc_feature (74)..(74): n is a, c, g, or t
  misc_feature (148)..(148): n is a, c, g, or t
  misc_feature (385)..(448): n is a, c, g, or t
  misc_feature (584)..(584): n is a, c, g, or t
  misc_feature (645)..(645): n is a, c, g, or t
  misc_feature (732)..(732): n is a, c, g, or t
  misc_feature (749)..(749): n is a, c, g, or t
  misc_feature (798)..(798): n is a, c, g, or t
cgcctctgccggaaagtccgcgccgccgctgccgccaccgtccgcagcccgagcgccccggagccgcacgcggnccgccgcgcagagacgccgcggctgcgactaggcgcgcccagccgcacgtggcggacccgcccccaggcccgcngtgtcctggaccccgcagcctccgctctcctgtcctcggccccgtccccagggccgcgatgagcttcctgagccgacagcagccgccgccaccccgccgcgccggggcggcctgcaccttgcggcagaagctgatcttctcgccctgcagcgactgtgagggggaggaagaagaggaggaggaggagggcagcggccacagcaccggggaggactcggcctttcaagagcccgactnnnnnnnnnnnnnnnnnnnnnnnnnnnnnnnnnnnnnnnnnnnnnnnnnnnnnnnnnnnnnnnnggcccccgggagccccggcgagctggaggaggacctgttgctgcccggcgcctgcccgggcgcggacgaggcgggcggtggggcggagggcgactcgtgggagggggagggcttcggctcctcgtcgccggtcaantcgccggcggccccctacttcctgggtagctctttctcgccggtgcgctgcggcggcccangagatgcgtcgccgcggggttgcggggcgcgccgggcgggcgaaggccgccgctcgccgcggccggaccacccgggcaccccgccanacaaaaccttccgcaanctgcgactcttcgacaccccgcacacgcccaagagtttgctctccaaanctcggggaattgattccagctctgttaaactccggggtagttctctcttcatggatacagaaaaatcaagaaaaagggaatttgatgtgcgacagactcctcaagtgaatattaatccttttactccggattctttgttgcttcattcctcaggacagtgtcgtcgtagaaagagaacgtattggaatgattcctgtggtgaagacatggaagccagtgattatgagcttgaagatgaaacaagacctgctaagagaattacaattactgaaagcaatatgaagtcccggtatacacagaatttcatgagctagagaaaatcggctctggagaatttggttctgtatttaagtgtgtgaagaggcgtggatggatgcatttatgcccctaagcgatccaaaaaccattgcgctcgtc

SEQ ID NO: 357363 - DNA, 1595 bp, Homo Sapiens
  misc_feature (76)..(76): n is a, c, g, or t
  misc_feature (103)..(103): n is a, c, g, or t
  misc_feature (117)..(117): n is a, c, g, or t
  misc_feature (125)..(125): n is a, c, g, or t
  misc_feature (130)..(190): n is a, c, g, or t
  misc_feature (192)..(192): n is a, c, g, or t
  misc_feature (196)..(198): n is a, c, g, or t
  misc_feature (202)..(203): n is a, c, g, or t
  misc_feature (205)..(207): n is a, c, g, or t
  misc_feature (212)..(212): n is a, c, g, or t
  misc_feature (215)..(215): n is a, c, g, or t
  misc_feature (230)..(230): n is a, c, g, or t
  misc_feature (247)..(247): n is a, c, g, or t
  misc_feature (253)..(253): n is a, c, g, or t
  misc_feature (263)..(263): n is a, c, g, or t
  misc_feature (285)..(299): n is a, c, g, or t
  misc_feature (301)..(301): n is a, c, g, or t
  misc_feature (321)..(321): n is a, c, g, or t
  misc_feature (339)..(339): n is a, c, g, or t
  misc_feature (348)..(348): n is a, c, g, or t
  misc_feature (362)..(362): n is a, c, g, or t
  misc_feature (400)..(400): n is a, c, g, or t
  misc_feature (406)..(406): n is a, c, g, or t
  misc_feature (426)..(426): n is a, c, g, or t
  misc_feature (463)..(463): n is a, c, g, or t
  misc_feature (479)..(479): n is a, c, g, or t
  misc_feature (486)..(486): n is a, c, g, or t
  misc_feature (488)..(488): n is a, c, g, or t
  misc_feature (501)..(501): n is a, c, g, or t
  misc_feature (526)..(534): n is a, c, g, or t
  misc_feature (546)..(546): n is a, c, g, or t
  misc_feature (548)..(548): n is a, c, g, or t
  misc_feature (553)..(554): n is a, c, g, or t
  misc_feature (637)..(637): n is a, c, g, or t
  misc_feature (1216)..(1267): n is a, c, g, or t
  misc_feature (1340)..(1369): n is a, c, g, or t
tccacgcacaggtactccacccagctcttcttgtcctggtagttcttggactcatccacgatcttctgaaacatcnctctcttcctgaacccagggaacaagngaggtgcaggtggnagcaagtntcgannnnnnnnnnnnnnnnnnnnnnnnnnnnnnnnnnnnnnnnnnnnnnnnnnnnnnnnnnnnntncccnnngccnncnnncacgnacngaatccggggctgcntcccccgggctgtcccnccgctnctcccccgtntctgccgggggtcccacgctannnnnnnnnnnnnnnangcgccccctcccggaaggcncgcacttgaagtacaggnccaggtccntggcgatgatggcnatgtccatcacgtggatcacctgctcgtcctcccgccngttcangttctcgtagatcttcaggntctgccgaggttatgcccaccccctcacgcccctgcngccacctctcaaggtnccccgcnanccccccccttccncctccgctgcctgttcctctcacgnnnnnnnnntccggccctccntnggccnnaaccctaatccgcctgctgctcagggccctcctcagggtgcccagctctccaccagcggctccatcgtcggcttgggacgcanatggcctcagaggtcaccaccggggagcgcagggaggggtccactgagtgtccaggtccttgggggccgctcagggctcggctgcccttcattcccccgctggtgggtcccgggccgcttccccttcggcttccaccccaccccatgaggggccctttccagttgtcttccccacaagcgttttcccagggcctccgatgcacctgccctcagcctcggccctccgccttctctgccgccctcccccagtgctcacacacccagtgctcacccgctgcatcagaaccctgctccgcaggatacggccctgccgtcctgcggacgctgcgtccccagcgcccacagcagaaaccgagggtgagtataccaacctcctccgagagcaggaacttcccaaactccaggtggtgccgctccaaaatcgaggagccgtggagcttagccaaggggttctgggacctgttacacaggtggtggaggtgaggcccgtgggacctgcccttggcccaccctgcgctctgcagcccccccagatgggccccactttcttttttttgagacagggtctgcctctgtcannnnnnnnnnnnnnnnnnnnnnnnnnnnnnnnnnnnnnnnnnnnnnnnnnnntgggctcaagtgatccttccacctcagcctcctaagtagcttggaccacaggtgtgcgccaccatacacagcnnnnnnnnnnnnnnnnnnnnnnnnnnnnnngtagaggaaagcttttgccatgttgccccagcttgttctcgaacttctgggctaaagcaattcccttggctttggcctccacaatgcttggagtacctggccttgcccgtggacctccctttctaatagcctggtttgcgaagacttaatcacgccaggggcgcggagattgattaaggttatttcaacagccgcccctgggagtgccacttttttggtccaggtt

SEQ ID NO: 357364 - DNA, 618 bp, Homo Sapiens
gcagttaccctcgggtatggtagcgaggctgggtggccggctggacgcgctgggcgttacctccgcagaaaccctgaacatctggccagaacctgaaccggcggcagcacgagcacgtgatccacctgatggacatcgccatcatcgccacggacctggccctgtacttcaagaagagagcgatgtttcagaagatcgtggatgagtccaagaactaccaggacaagaagagctgggtggagtacctgtccctggagacgacccggaaggagatcgtcatggccatgatgatgacagcctgcgacctgtctgccatcaccaagccctgggaagtccagagcaaggtcgcacttctcgtggctgctgagttctgggagcaaggtgacttggaaaggacaggtcttggatcagcagcccattcctatgatggaccggaacaaggcggcgagctccccaagctgcaagtgggcttcatcgacttcgtgtgcacattcgtgtacaaggagttctctcgtttccacgaagagatcctgccatgttcgacgactgagaacaataggaaagagtggaaggcgctggctgatgagtatgaaggccaaagtgaaggctctggaggag

SEQ ID NO: 357365 - DNA, 798 bp, Homo Sapiens
agcggctttcgggtcgtctccaggacaggtactccacccagctcttcttgtcctggtagttcttgtgactcatccacgatcttctgaaacatcgctctcttcctgaacccagtggaacaagggaggtgcaggtgtggagcaagtgtggagaccccgccccaagcgcccgtctgcatgggaggcgcggagccctgagcgaggccccatccggggtgcgcggggccggctgggcagggacggaatccggggctgcgtcccccgggctgtgccgccgctgcgcccccgtgtctgccgggggtcccaggctacccgcccgccccgcgaggcgcccactcccggaaggcgcgcacttgaagtacagggccaggtccgtggcgatgatggcgatgtccatcaggtggatcacgtgctcgtgctgccgccggttcaggttctggtagatgttcagggtctgcggaggttatgcccagcgcgtcaggcgccctgcggccacctctcagggtgcccggggaccccgccccttccgcctcggctgcctgtgcctctcacgcccccgccctcgggccctcggtgggcgggacccctaatccgcctgctgctcagggccctcctcagggtgcccagctctccaccagcggctccatcgtcggcttgggacgcagatggccttagaggtcaccaccggggagcgcagggaggggtccactgagtgtccaggtccttgggggccgctcagggctcggtgcccttcattccccgctggtgggtcccgggccgttccccttcggttcacccacc

SEQ ID NO: 357366 - DNA, 1005 bp, Homo Sapiens
ggctgtcatcatcatggccatgacgatctccttccgggtcgtctccagggacaggtactccacccagctcttcttgtcctgatagttcttggactcatccacgatcttctgaaacatcgctctcttcttgaagtacagggccaggtccgtggcgatgatggcgatgtccatcaggtggatcacgtgctcgtgctgccgccggttcaggttctggtagatgttcagggtctcctccgagagcaggaacttcccaaactccaggtggtgccgctccaaaatcgaggagccgtggagcttagccaaggggttctgggacttcatctggtacaggttgttggtgccgcggtggtcgatgtcatggcacaggccggctgtcaccatggcgaaggcctccaggtccgtgtagtagctcttcagtttgccggtcatgagcagcgtgaacatcgtctgggccacgttgaagccgtggcgccagttgtggtaggtgattctccggtaccctttgctgatggagaacaggaaccgcaccaggacctcctgggggatctggaactttcggaccacgcccagctcgtagtacatctggatgccacatttgaccaggtccagttcggtgcactccaggtcagagaagtggaattcgtagatgtcaaatgtggtgggccctggcagctcctccttcaggatttcgcccagctcgtcctcatcgcagtcagcaggctccttccccaggcgcgctctggttggcaggatgagctggatctcgtccctgtcgcacttcacgtggtaaaggaccatgtcctgtgcgatgtccttgcggttctccagcttgttcatcttgtcgtaggtgtcggtgttcatcactgaccagcccaggaactgtgtcagggactccatgagaacctcgtcctgttcgtcaaagggcttcccgtctttcctgttgtaaaatgtggcgactcccacaatctcctcctattgttgacgagggcaggacagcacattctt

SEQ ID NO: 357367 - DNA, 924 bp, Homo Sapiens
agcggcaggcctctaccggcccgatggagcgcgcgggcgctactagccgcgggggccaagcccctggcttcttactgcggcttcatactgagggccgagccgaggcggcgcgggtgcaggagcaggacttacggcagtgggggctgacagggattcacctacgctcttaccagctggagggagtaaactggctcgcccagcgcttccattgtcagaatggctgtatcctgggagatgagatgggcctggggaagacctgccagactattgctctcttcatttatttggcaggaagattaaatgatgaagggccatttctgattctttgtcccttgtctgttttgagcaactggaaagaagaaatgcagagatttgctccaggtctttcctgtgtaacatatgcaggcgacaaggaggaaagagcctgccttcagcaagacctgaaacaggagtcacgttttcatgtgctactgactacctatgagatttgcttgaaagatgcatcatttctaaaatcattcccttggagtgttcttgttgtggatgaagctcacaggttgaaaaaccaaagctccctgctgcataagaccttgtcagagttctcagtagtcttcagtctcctgttgaccggaactcccatccagaacagcctccaagagctctactccctcctcaagtttgtggagcctgatctcttttccaaggaagaggtgggagattttattcaacgctaccaggatattgagaaagaatctgagtcaggcaagtgaactgcacaaactcttgcagccatttctgctgaggcgagtgaagctgagtgctacagaggttcccagaagacagaagttgtgaattacctgggtgttgcgttggggacgaatttttagggggcattgatgaaaaacctgagggttggtaatggac

SEQ ID NO: 357368 - DNA, 805 bp, Homo Sapiens
  misc_feature (88)..(90): n is a, c, g, or t
  misc_feature (93)..(96): n is a, c, g, or t
  misc_feature (100)..(100): n is a, c, g, or t
  misc_feature (103)..(104): n is a, c, g, or t
  misc_feature (120)..(121): n is a, c, g, or t
  misc_feature (131)..(186): n is a, c, g, or t
  misc_feature (198)..(198): n is a, c, g, or t
  misc_feature (203)..(203): n is a, c, g, or t
  misc_feature (206)..(208): n is a, c, g, or t
  misc_feature (214)..(218): n is a, c, g, or t
cgcgcctttgtgtggcggcagctgcggccccagcgcctttgaatgtcgagaggggccgggaagggagcctttccatgggccatctgtnnnccnnnnaacngcnnccccaccaccgcccgnnccccgcgctnnnnnnnnnnnnnnnnnnnnnnnnnnnnnnnnnnnnnnnnnnnnnnnnnnnnnnnngagctgcgctanaaatntgnnngctgtnnnnnggcgctgccgccgttgctgaggagccaggatggtcctggtccacgtcggctatctcgtgcttccagtgtttggctctgtgcgaaacagagctcagtgaatggtcaactcgctgctgtgtgcgctgtgacccttctgcctccgcatttagctgtattgtgacaccctcttaaccatttcctgtctccatctgaggaaggcattgctatttaagcggcagtatcccctatctcaggccagcctagccatgggggtgagggggagtgggtgtgtgaggaagaaagaggggggctggatgcgatctccttgaaatgccaccccctctctcaatacacaattatctcttattacttggcatttcctcttaaaacgggtgtggaacattacactaggcagaaattcaaaaatgattaagaaggatgttgagcctgaaagtataattatcctgattaaatcattaccatcctcattaataccaccaatctctaaataccattgcaggatgctgattccatgttttgaaattcaaattgctcagctgcctttaaattttatttttaatactaccttctccctcaccccccccaac

SEQ ID NO: 357369 - DNA, 1659 bp, Homo Sapiens
  misc_feature (141)..(154): n is a, c, g, or t
  misc_feature (1300)..(1300): n is a, c, g, or t
gaaggtattcaagcaccctctttccgcgaaagccaggggctgggcctcctttggcccccgggtagatttgaggtttgcttcccaggagtggggtggcagggcccctccaacccaccttgaacgttttttggccaatttttnnnnnnnnnnnnnnatcgacatgcagggcactggtcagccccaacgcacccactgctgctcctgctctgggccagatcctgttctggggagccacaggacccagacacgaaactagccctccaagggctcagacccggcgaaccagccaggcagaaaacagacctcctcagaactctattttgaggagttgcagtggagggggtctgtgggcccctaagaaggcccccaccaaacagcgaggccagccagtgtgtgctgaaggcccaggaaggagagagagagaggccttggctcacacagagcatctcagcagcagatgaatgtttgcaaaagagatgcttggatcattctggtggcccctctctgtccgaagatgtgtgaggaagatcttggaggattgcactaccagaggagctgctgccctgcagaccaaagatagattttgcttcaccgtgtgacttgaagcatcacttccagccaacacaggcctctcaaactcagcgcaggcccaggacagccccagttcacatctgctgtccctgtgccactattaccagcatcctctccggctctcgaaagtgctctcgtttggaaggaaaaggtcactctgatcaaagccagtgccaggccggtaaggcagccatccccagaacacacctgtgtttctcttccattcatcggcagctctttaacaatcactggggggctagcataatatggtgctgtcctgggtccaaaactcggatgacagtcaatgagcacacagaaacgactgtcttattaagcatgagaagcttccagagaaacatctcccccaacagccatccccgctgcggcgttctgaggaaccccaccttggaaagctttcaccaggatcctagacgcaccttggctccgtctcctcttggggcctttaactgagagtaggagcgactgaatagccccagcctctctgatgggacagccaaaagtgcagctgcctgtcttcaggccggtggctcagggcgatgcagagaaaaagccggcttggctcagcaaaggcagtgcttactagggcttttgttgcaatgtggcgaaatgtcacagagaaaccacactaacccttcctaagtggtcctggatcatgtcctgtctgccacaaatagctgctcacttattncctttaattttagctatgaatgcagtcggctcgccgggcttgtcttcaaattctgaatattctccattcccattgcacagaacggagccccgagacgcaaagaaacacacaaagctcgggcagagaaatatgtttgtaaaccagtgctctactccataaattattataattcttggtgctttctatatccatctagcagatcagcgatcacataaataatagcaagtggactgatttttcttctgcaaagtgctacgtcctagttttcaaaataaagcacttggagagtcacgtatctatggagttgaaatgggaagctgttcagatctgtttcaaacatgcacacagacatatccaca

SEQ ID NO: 357370 - DNA, 875 bp, Homo Sapiens
  misc_feature (246)..(279): n is a, c, g, or t
  misc_feature (362)..(362): n is a, c, g, or t
  misc_feature (465)..(714): n is a, c, g, or t
  misc_feature (727)..(748): n is a, c, g, or t
  misc_feature (828)..(828): n is a, c, g, or t
  misc_feature (849)..(849): n is a, c, g, or t
  misc_feature (856)..(856): n is a, c, g, or t
  misc_feature (866)..(866): n is a, c, g, or t
gagaaatggacaaattcataattatagcagagatttcaaaactcttctctcaagaaacaagcagacagtagacttgaacaaattattgcaacagaataggaaatacatgaatgtacccaaatacatgtagtaattaggtatatgttaaaggtgacatttcaaatatgtggcaaatgttgaattatttgtaaatgatcattggaaactaggtaactgtagaggggtaaagttggatttgtacacacnnnnnnnnnnnnnnnnnnnnnnnnnnnnnnnnnncataacaggaggaaatcatgggaaaattttaaaattatctcagggatatggtttgaatgtttgtgttccctccaaaactcctnggttaaaacctaatccctaatgtgacaatattaagaggtgaggccatgtatgggattaggacccttataaaagtacttgaggttggctgggcacggtgctcannnnnnnnnnnnnnnnnnnnnnnnnnnnnnnnnnnnnnnnnnnnnnnnnnnnnnnnnnnnnnnnnnnnnnnnnnnnnnnnnnnnnnnnnnnnnnnnnnnnnnnnnnnnnnnnnnnnnnnnnnnnnnnnnnnnnnnnnnnnnnnnnnnnnnnnnnnnnnnnnnnnnnnnnnnnnnnnnnnnnnnnnnnnnnnnnnnnnnnnnnnnnnnnnnnnnnnnnnnnnnnnnnnnnnnnnnnnnnnnnnnnnnnnnnagactctgtctcnnnnnnnnnnnnnnnnnnnnnntgagttgaggttaaaggaagctctgttttgctttcttaccccttttgccttctgccatgtgaggacggagcaagaaggcnctcactagatgccaggacctngatatcnaaccgcccanacgcgcaga

SEQ ID NO: 357371 - DNA, 1813 bp, Homo Sapiens
  misc_feature (1110)..(1110): n is a, c, g, or t
  misc_feature (1366)..(1366): n is a, c, g, or t
  misc_feature (1406)..(1406): n is a, c, g, or t
  misc_feature (1441)..(1493): n is a, c, g, or t
  misc_feature (1508)..(1508): n is a, c, g, or t
  misc_feature (1511)..(1511): n is a, c, g, or t
  misc_feature (1515)..(1520): n is a, c, g, or t
  misc_feature (1560)..(1560): n is a, c, g, or t
  misc_feature (1607)..(1607): n is a, c, g, or t
  misc_feature (1636)..(1636): n is a, c, g, or t
  misc_feature (1649)..(1674): n is a, c, g, or t
  misc_feature (1695)..(1695): n is a, c, g, or t
cagattctcatgacagatcacacaaggctcttcttcttcctcttcctcatctggattactggctccttcccatgtggcaggaccctgtgaagtgagtggcctccaggctggttttgggggctgggcagcatcaggctgtgatggagaatgactaggtgaaacacaattaacatttgaccactgattttcccttgactctgagactttttggggtcaataaactgggaaatcttgcaaacaatttcatcaaatgtcagttcagacaaggattttccataagcatccttcaatttccgtaagaaatctgtaagttcctttctggtttgctgtggaaaggcagttttcagcctgtctgtattctctcccaattcatgatggagggatcactccgcagacctgccactgggaggcacagcgtctcccacaggcgctggcagagcccaggctatgccagtcatcaggggggctctaggttggccagttgcagagacgactcccgggcaaactgcaggcatttgaggaacagtaagtatgggtctaaagaaagattctttcacaaggggtcttcctaagaactgctgcatcagtatctcaggactgggtggtggaggaggaagctggactggaggcaaggtactcaaggcaaatccttgcttgactttgtttatttgttcattgtactgtgtcctgaggaatgcaatcttgtttctaacatctgccacaatggcattccaactgtctaccgcagcctttaattgaagtgattctaggttgcttgctgccatgtgagtcaccctggcaagctgattgagacattccttttcagtctgctctagatgaagcaaaccaaaatccctacgacactgtaagaaatacacctcggctgttaaagctctgctagtttctgcgttcagtttgcttacgtatgttttcattgtgctttccagattatgtttttccatttcccactgagatcttttcatagaaagttgctctttaaggttcttgatttcattatctttagcatggatttgacgctgtaatttggaaaccttattgattccaaaagcaacttgttgattaagagatgcgataattttgtctttcttnttaatctgcatttggttttcttgccaccgaaaagtcactgttctcaactgtcttttgaaatcttcacactgatagtgcaatttataaagctgcctttgacgagcaagcctttccttttcagtttctccatagtctgtagttactttgccagctgagccctgctctatcatgtccagaatatgcaattcatccaggctatagaacttgtcttccattgcagaatcctcttgaacatcacttgcatcatcttttatangtctactgactgagtgtggatttgcttgttctttcctcanctgctcttccttttctaccacatatgggacttggnnnnnnnnnnnnnnnnnnnnnnnnnnnnnnnnnnnnnnnnnnnnnnnnnnnnntttactcttaacctngtnggtnnnnnnttatttattaaatttgtaattcaaattgcccaatgggttnttttgcaaaatatatttcctctcaccactgagatcttttgttttctnattttataggtatttctttctagattctntggaaacaattannnnnnnnnnnnnnnnnnnnnnnnnnatcctagtcttctgtccttanataatcactgatgattaaaggaacaacacataatgtcaataatgtaggttactgataaaagttcacagatgctcacttacacacatggatgtaacaaaggaggaagacactttttaaa

SEQ ID NO: 357372 - DNA, 1633 bp, Homo Sapiens
  misc_feature (209)..(209): n is a, c, g, or t
caaggctggcggaagcagagatggctcgagcccttgggctgccccagccaccccctaaccaggatcgctctcaggggcaggcgcagcatccgcccgggcatccctggtggtcccggccctcctcggcttctgcttggccttcctcagcatgtgcacttagggccagcagctgagatgatcatgtgcccggggcctggacccatggctcnccgtccacctgcaccggggtggccttgaggagcgtgactcggaagtaggaaccctgggcaatccggattccggagcgcagcccaccctggacctggcccatgtgcacgacgcccgtcacgcccacaacctccagcagcccgtcgtccatgcgtggcttctcaaacctggtgtcgctgtcggagccccacaggtcggcccccgagccccagctggggatgttgatgaagatgaggccttcaatactgggcagctccacctcctgccgctccacctgcagccggatctgcttgtgcaggctccgagagtgactgatcttctgcagccccacccgcacgtacacacccttgttgtgcagcctgcttgtgaacttgccaggctcctcttcccgtgcctggtggaagtccaggctcagctccgcgtcgatgccaatgccacagtagttactcatctgcacgatcttggggggctctgcgtctgccgtgtcgttctctgaactgccagcctcgtgggcatccagcaggatggtccagcggtccatgagcacggcgtcggcctcgtccacagacagcagtacggagaacgggtcctcgccgctgtagcccgccccccagcggaggactcgaccaaggtcattccctgtgcccaggggcaggatggccacagaaggctccgggcaggccagtcggtaccgtgtctcctccagggcgccaagcacccagcccacagtgccatcgccaccacacaccagcacccggaagcagggcacctgggagaacaggtggagcccgggaagaggacctccgttggtcaggtcgaagacctgatgagggttcagtagcttccggaagctgcagagcaggtctcggcccttgaggcctccactcttggggttcacgaacacaaggaggggacagctgtctgggggcagttcgcgtgcagcaggtcggggagcaccagggcagtgagcagccggccccgcacagccatgtccttcagcagcatgtacagccgctcggcctccgcaaagcaggcaacgtccaacactaccggcgctgcggcaggagcccaggactcagggggagcctgtcccatggcccccacggtgccagggcaggaaccaaaccaggacgtttccccagcccagggctgcccaagggaaaggtcaggtgctacgtgagggccagggctgtcccacttcaccccaggaacacccctgggcctcatgtgaccacgtccctcagggcagctcaccttgggaggagtagatgtgactcacggacaccacggtggctgcaaaggcaggctgtggtcagggcggtgggaggcgaaggacacacagcactggggccagggacagcccctccgcctgtccaggggtgacatctcaccccaaaggcagcctccccaggaagtaccccatccc

SEQ ID NO: 357373 - DNA, 1490 bp, Homo Sapiens
  misc_feature (44)..(44): n is a, c, g, or t
  misc_feature (203)..(203): n is a, c, g, or t
  misc_feature (589)..(589): n is a, c, g, or t
gacagaagacagatgttctcaaagtgtacgaaatcctccccacnttttgatgttctgcatttcaaatctgaagggtacaacgatttgagcctctacaatctcttcttggaggaaaatataagtgaggtcaagtcatacaagtgtcttaaggtactggagaatattaagagcagtggtcaggggatcgacccaatgctactccntgacaaaccttggcatgatcaagatggatgttgttgatggcaaaactcccatgtctgcagagatgagagaggagcaggggaaccagacggcagacctccaaggtatgaacatagacagtgaaacctaaagcaaataatggagagaagaatgcccgacagagacttctggattcttcttgctgatgatttttttccttgagctgtaaatctgtgacttctgcgacatgggatttaatttggctaaagcacccctgttggtttcacagctggtttgcaataaatggttcttggtggagatactgagcatgtcttattgagtccctaatggaaatggtgatcaacaaaaggttatgggaagaatggtttatgaacttcccataggaagncacctgagagatagtaaactgcagcaagtaactatgtgtaagtcctcatcaaatgaaaagcagaaagacaagaacaattagtcaagagcagtagccctgtcagagcctcggagcaatacctttctgtacccgtggtgagacaagacccagagctactggaaaacaagcactttggaagatttgttttgttttcatggaataataatatgtcaggatataatttaacgtgagtttcttatgtgcccttaaagactggttagacaaggaaaagcattcactggctaataatccataggtcgacctatgtcctaagttaggtgtaaggtccgatgccttggcccacactcgagctctctttacattgttagttgtcaaccttggctgatggaaatcccgtaaccactatttgttgcactgtgccttgaagggcagcaggcccaagtgctgctctgactgaaaactgagttaacaagacgaaatctaaaggatattcacagtgacttcaattcaggaagaatgcttccaaaagagcccagtggggaaatctgacatcacagaagacattaattcagtcactttcaaagagtttgtctacaggcggtttctctgttatcaaaggcatttgaaataggattttacttaaacaataatggaacacaggagtatttaaagtgaagaacactttgcctgaatgtgatcagggcacataagtgacattggcgtgcttcatatggcgtgcttggagccagaaaaacttagcggtttattttgtttatatttaagcacagctttaaaaaattcattatcgtttattcagtgtccgaattgaggccatttgggaagaaaattctagcactggtggagaattatagaataaagattataaatggttggataaaaa

SEQ ID NO: 357374 - DNA, 1263 bp, Homo Sapiens
  misc_feature (15)..(15): n is a, c, g, or t
  misc_feature (21)..(21): n is a, c, g, or t
  misc_feature (35)..(35): n is a, c, g, or t
  misc_feature (46)..(46): n is a, c, g, or t
  misc_feature (61)..(61): n is a, c, g, or t
ttgggccaggggggnacccanagggaaaaaaccangtggttttttncccttttaagggggnccctaccctgtccaggggccaaacaataacctggtaacctggcctattccatttggtacaattaaaatacctagctttggcctcagagacaatgcctataaagtattttaatgtccagtaacaatatacactacgaagtgcacttccattacaaattaacatggtgatatacagatgaacaccaccacccaaaacaaaccataaatgagcaacagttaaaacattaaatttataaatagcaaaaccacaaaataaagtatatacattttatagatttacccttgaacaaatatatagtgtatctgggaaagccaaaaaaaatgtgttttatcacataacatctgaataccagaaatgaagatactgataatattctaaaagccttgtaggctttctcccacttaatattcctttaactgtacgtcctttaaaacagtgatattagcaaagctatcacctctttaatgcaatgttgtgactttgcctagcaggttacaatgacctgcagaatattaaatcagagaggaggcactccatgtttaatcatgggacaacagacctaacaaatttataaacctgcatatgaagagagctttagtcaaacataaactgacatgaaaacccaaccaaaacaattactgtatcaaaatgtctttatctcatcttgcccaccttttagatgactggaaatcatttacttagaaagaaaactgccgtttgatttgaatgtacttgtgtttcattgacatagtcaataaattctgaacttttactaccagaaaaatttgtctttaagtgccaggactatcacaagacaaactttatgaacaacgtcaaaatgtataacaactgtcttattgtggaccccagaaacacaagcatcttgaggctcaacatgaatgggtaaatgctgccagtacctgcgcacacagatcaacataattgagacagatgttttacactcatctgcatttcttttcagaaaccaaacaagtataagtgtttagtaactttttgagaatctatttctagtgcagcacttgattgataaaagcctgcttgaagaaaactattttgtactgcattgtataaagctgaaatgcaaactcattcacataaatgatcattaccggacgcgtgggtcgacgatatcccggaaatccgagcggaccagcctgctttaaaccacggtaatgcacaat

SEQ ID NO: 357375 - DNA, 967 bp, Homo Sapiens
  misc_feature (767)..(787): n is a, c, g, or t
gtgtcctggcacacaacccagtgggagagtgtgggaggcgacagtgtgagcccgcccccacgtcgtggggtaacatctgttatcaaactgctgtcgttgttgtggaagcatgtagactgtgccagaggccagacccacgggctcatgcacccctgagccagcagggcatcttggaaaaggaactcttggttcgatacctggagcagaggaggggaaagtccagggctatagggtgtgatgaagtcacccctttctgtcccactacatctgggactgactttccgagcctccagtccaaagccggcttgatttccgtgaactctggtgctcctgcatctcatgagtgtgccccatgggtcccctcccctctcagcatttccttgtcccgtctggacctggggagtggttaggcagcaagctttggtttatggttttcattcattggtgaagtaaattaggcagtgctaaagcctgtgggtttggtccttgaacaagatgtgggccttgcaagatgggagagtaaaccttgaagggctttattaaagaaataaaaaagaacttttgtatcttttatcctgggagcactgcgttttcctagctgtgttattcctggtttaattcagcagagaaggtaaggtgtgaacctacctgccttggagagggcccaggtcccaaatctcttcaaattcttcacatgtttaactttaaggatttgaaccatgaagtcataggttacagacctcagttttatgccccattggattacnnnnnnnnnnnnnnnnnnnnnactctttgaaagctttgttttgtggtagtccttttgggaagaatccagtattatctacaattattggcaaagtttaaatgtattttacataacggaaagtttttagaatgttaaacagtaattgaaaaaggtgataggtcaatttttaggcaaagataattttctcaatcatcgtctcaa

SEQ ID NO: 357376 - DNA, 481 bp, Homo Sapiens
  misc_feature (22)..(22): n is a, c, g, or t
  misc_feature (56)..(56): n is a, c, g, or t
  misc_feature (65)..(65): n is a, c, g, or t
  misc_feature (123)..(123): n is a, c, g, or t
caaccccctgaaaccccaacanggcaatccttggaaaaaaggaaactccttggttnccgaaaaanccctggaaccaaaaggaggggaaaaagtccccagggcctaaaagggtgtgaatgaaantcacccccctttcctgtcccccacctacatcctgggaactgaactttcccgagccctcccagtcccaaagccggccttgaatttcccgtgaaactctggtgctccctgccatcctcatgaagtgtgcccccatgggtcccctcccctctcagcatttccttgtcccgtctggacctggggagtggttaggcagcaagctttggtttatggttttcattcattggtgaagtaaattaggcagtgctaaagcctgtgggtttggtccttgaacaagatgtgggccttgcaagatgggagagtaaaccttgaagggctttattaaagaaataaaaaagaacttttgtatctttaaaaaaaa

SEQ ID NO: 357377 - DNA, 746 bp, Homo Sapiens
aaaactgcacacccattcattgaactctcgtcagtaaggaatagaagtaaactccctcaatttgattaaaaaacaggtacaaaaaccctaatagctaacatatgtaatgtcaaaacgtactaaatcagaatgttatcattgcatggtggaaactcaggttgctatgcaggggtgaaggtatttcatcagaaagaaaaataactcagactccagaattgtttctaatcatccaacaatcatatattggtcactattctaggagttgtaacacttctcagtatgttcaggagaaatgacaggagtaactgtatcattgctaaataatttgtgcacagtggggagtacagtgtcttgaccattaattccacaaagctgctatgagcagaggcacaatggtcatgttgacatgaaccagggagtcttaaaagggtagatggttgggaaaaaagcgagggtatgacgacaggcataatcagagaactcaaaagtgatgtcaaagttaggaactttgaactgaggatctcaaatcacagtaacggataagattgctaaggtagtgactctccaagaggttcatagtaatactaagctgttatttgttcatgtttccctcgttctgtcatgaatgtacaatggagctttccagaggctacattatcacaccagactgaatgtagaagcacataagagaattctgctattaagccggacagtaaagatagagtatttgcaaaaatgttaaaaaa

SEQ ID NO: 357378 - DNA, 1016 bp, Homo Sapiens
  misc_feature (44)..(44): n is a, c, g, or t
  misc_feature (474)..(483): n is a, c, g, or t
  misc_feature (679)..(717): n is a, c, g, or t
caagagtggcggagcctaactatgataggcagtggtttttatgntagtgatagagcgtaagatagggtgagagaaaagtggtaaataccctaattgtgccgacatttagaggtattgtggttaatgggtcgcgtgtaggaccggtggaaattactttggttgatgtgaagagtggacgccaaatgcttgtttaccaactaaacagaaaagtaaagtggtgcctctcgtcataagtattcgcccgagtaattcatatttttccccgtgttcaaggggggtgataaaacacgtggcgcccaggccccagatcttatgtgatggcggttcctgattaggggggcccctttgtttaaagaaaaagtgggttccggtttagttttggccccctccgaggggatattcttagaggcgccccccctttgtaattgttttgtttgtgggttattatattattgtgttgtggagtataatgannnnnnnnnntttctttaaaaatgacatttgtattaaaagtcttaaaatgaagagacaatgattaaacgcatgaaattaaaaattacaattagttagaattggtacatcacaacagtaaaattttgctctttgcttctggaggaacaccctacaacaggtaattaaaaaatttaaaaataatatgaaaggggagctaaatacctgnnnnnnnnnnnnnnnnnnnnnnnnnnnnnnnnnnnnnnnttcattgcaagagatggaaattacattttaaaggctgaaaataataaagaaattcactaaacaacaggccctattgtcctggctccttcagaaagattactgaaaggaaactgggaagtggtttggggaatagaaaattctgggatatggtgggaagttcacaggttggcaccggctggaacagctgagttttgaaggcactctgcagacacaggggtgctgggggccctgaatcacatttacaaagtctttgtactgtatttttaaaagctagtcattaaaatcggttactgccaacc

SEQ ID NO: 357379 - DNA, 1018 bp, Homo Sapiens
  misc_feature (124)..(124): n is a, c, g, or t
  misc_feature (144)..(216): n is a, c, g, or t
  misc_feature (270)..(270): n is a, c, g, or t
  misc_feature (514)..(588): n is a, c, g, or t
  misc_feature (628)..(639): n is a, c, g, or t
ttttaaaagtcttaaaatgaagagccaatgattaaaggcatgaaattaaaaatttcaaatagttagaattggtacatcacaacagtaaatttttgctctttgcttctggaggaacaccctacanccaggtaattaaaaaattannnnnnnnnnnnnnnnnnnnnnnnnnnnnnnnnnnnnnnnnnnnnnnnnnnnnnnnnnnnnnnnnnnnnnnnncattgcaagagatggaaattacattttaaaggctgaaaataataaagaaattcnctaaacaacaggccctattgtcctggctccttcagaaagattactgaaaggaaactgggaagtggtttggggaatagcagattctgggatatggtgggaagttcacaggttggcaccggctggaacagctgagttttgaaggcactctgcagacacaggggtgctgggggccctgaatcacatttacaaagtctttgtactgtatttttaaaagctagtcattaaaatcggttactgccaaccnnnnnnnnnnnnnnnnnnnnnnnnnnnnnnnnnnnnnnnnnnnnnnnnnnnnnnnnnnnnnnnnnnnnnnnnnnngaaaatgtgcagatctgtaacatttttttcacagctgatnnnnnnnnnnnntactaccattctcccccagactcccctttgatacagtaggtaaacaaaatagattttttttccacaaatatcagcagacactttctggcaccccacactgtattggcatcagtgttaacagtcccagttcagatgtgcaatacttcagattggatacactgtaacaagaatccaactttgcatagacatcctcagaatcgcaatcagtcatggggttgcccttcccaagctggcagaaaaggaacccgatcttaatttccagctactcctggaaaagaaggaaaaaaagtttcttcctctcctcctgctccttcatatggttctcccggacttccttccatgtatttaaaacttggaactagaaaaacggctgttgacc

SEQ ID NO: 357380 - DNA, 598 bp, Homo Sapiens
  misc_feature (429)..(443): n is a, c, g, or t
ttttatcttaagtatttgagtagtcattaattctgtttttcctgctttacaaaattcaaatatgtatgtcaagagaaaggaatgctctaccagctaagctcatgttattttaaaatgagaattattaatttattaaaatatctagaataagcatttatttttataccataaagcataaaacacaaatttcttaaatgatatttccttcttcgttatgacctagccaaagttttagaaggtagctatttttaaaggccttcttaccacattggctccatccactttgttcaaggccaaagcaatctgaaataaaaataacagctcacctactacatggaatttttatttcagagcattccagcaaaagttcaccttttgcttctcactggcgaaaatccacaaaagtttcttataggaatagtatgtttnnnnnnnnnnnnnnngctatgccagaacttgtttctcccaaggggcttagcttcttttccatgggaagtaattagaaaattatcggacaaacatgccatttccctaattttttggcctcagggcttgcaaggaaaaacttttttaataatttcttaacaaccctaaaaaa

SEQ ID NO: 357381 - DNA, 1324 bp, Homo Sapiens
gcacaagccgtgcgctcccgggctgcgaagtctggctaggctacgggccacgcgccgccgccgctgccgccgccactgtcctcttcggaggcgcgggcccgacggaaaccatgtttgtggctcgcagcatcgcgggcggaccacaaggatctcatccacgatgtctctttcgacttccacgggcggcggatggcaacctgctccagcgatcagagcgttaaggtctgggataaaagtgaaagtggtgattggcattgtactgctagctggaagacacatagtggatctgtatggcgtgtgacatgggcccatcctgaatttgggcaggttttggcttcctgttcttttgaccgaacagctgctgtatgggaagaaatagtaggagaatcaaatgataaactgcgaggacagagccactgggttaaaaggacaactctggtggatagcagaacatctgttactgatgtgaagtttgctcccaagcacatgggtcttatgttagcaacctgttccgcagatggtatagtaagaatctatgaggcaccagatgttatgaatctcagccagtggtctttgcagcatgagatctcatgtaagctaagctgtagttgtatttcttggaacccttcaagctctcgtgctcattcccccatgatcgccgtaggaagtgatgacagtagccccaacgcaatggccaaggttcagatttttgaatataatgaaaacaccaagaaatatgcaaaagctgaaactcttatgacagtcactgatcctgttcatgatattgcattcgctccaaatttgggaagatctttccatattctagcaatagcgaccaaagatgtgagaatttttacattaaagcctgtgaggaaagaactgacttcctctggtgggccaacaaagtttgaaatccatatagtggctcagttcgataatcataattctcaggtctggcgagtgagttggaatataacaggaacggtgctagcatcttcaggagatgatgggtgtgtagaattgtggaaagctatttatatggacaattggaaagtgtactggtatttttgaaaggtaaatgcgaagcccaagtcaatgggaagttcctcagccagggaaccctcaaaatcccttcccctaagttccaaataatttccaaagtcctttcaagaaattcatttaaaaatgggatcctttcttgctttggccggaaaaagcaccagcctggaggtaacaaaagctaaacctgggaaggaaaacctttttgcccttggttttttgccctggcctttggggttggccattgcccacccacccaggcggt

SEQ ID NO: 357382 - DNA, 1179 bp, Homo Sapiens
gttggccccaagagattccccctcgtggaaggtgtcgccagactccttttggcaagaattttggcatctctgaggcagggacggtgcctgggcctggcctggggaatcccgcggacaacctctggggagattccctggttggttgttaaagccccaggtctccagcactgcctggaactcgtctccgcatcagcctgagcattgaggcggccatccctggaaagctaccttggccagcgaagtggaagactcgcctcagagaaccagaagtacagcaatgcgggagtcccccagcagtgtgggcgagaaggtggggagggggaggtcctctgagacattcttgtagatgaaatgacccttgtgatgggactccaggtaggaggctgtgatgacgggatcacctgtcagggaaatgtccaccccaatgtctccatctgaaaggatgctggcagcccttgtctggacaaaatcggccatgatgttagagatgacgttgatctctttgcagatctgtcccttcaggaccagcttcagggtgaaggagatgaaatttgtgaacagctgcttgatccacccaggctctcgctccccttggagatgcaggagcagcttatggaaagacaggtagcagtcaggggcatcggtccgcactctaccagagtcacaggtcagctgtgtgttgatctggaggtcaatggcagagtcgatctcgaagtcaatggactgatcaatacccagccaccaggcagtggtgtagccatacttcagggtccccttgaagaccacagacacgttctgaatggagacatcaatggacttggcttccaccagctccacctggctgctggcgatggacaagtggctgatctggatgttgtgcaacccatacttgacttggccaaggagcatcatggccttctcgcccgtgatatctgggtagctggctcgctggaaggcggtctggatcaccttggcagtctcgtggttcaacaccaggagggcaggcttggtgatgcggcacacgatgcctgcctcgtgcgaggtgcctttggagcaggcatgggcattgcccagcagggccagggtcaggactgtggcagccagcatggttatcaggcagtggtgtgtaagtggcccgagccgttcagcctgatcccgggaattccggaccggtaccag

SEQ ID NO: 357383 - DNA, 974 bp, Homo Sapiens
  misc_feature (66)..(66): n is a, c, g, or t
  misc_feature (101)..(101): n is a, c, g, or t
  misc_feature (103)..(103): n is a, c, g, or t
  misc_feature (184)..(184): n is a, c, g, or t
  misc_feature (189)..(189): n is a, c, g, or t
  misc_feature (253)..(253): n is a, c, g, or t
tcgcgacgggggttcagggaatatttactgggcctctccgctccctctgctcttggaggtgccatnaggtcagttagctacgtgcagcgcgtggcgctggnanttcagcgggagcctcttcccgcacgcaatctgcctcggagacgttgataacgatacgatggagatgggtgtcgtgaactgntggtnggctacacagaccgtgtggtgcgagctttccgctgggaggagctaggtgagggtcctgaacatntgacagggcagctggtgtccctcaagaaatggatgctggagggtcaggtggacagcctctcagtgactctggggccactgggtcttcctgaactgatggtgtctcagccaggttgtgcgtatgcaattctactgtgtacctggaaaaaggacactgggtcccctcctgcctctgaagggcccacggatggtagtagggagaccccagctgcccgagacgtggtgctgcaccagacatctggccgtatccacaacaagaatgtctccactcacctaattggcaacatcaaacaaggccacggcactgagagtagtggctctggcctctttgccctgtgcaccctggatgggacactgaagctcatggaagaaatggaagaagcagacaagctgctgtggtcagtgcaggtggatcaccagctctttgccctggagaaactggatgtcaccggcaacgggcatgaggaggtagttgcatgcgcctggggatggacagacatatatcattgatcacaaccgcaccgtcgtccgcttccaagtggatgaaaatatccgtgccttctgtgcaggcctgtacgcctgcaaagagggccgcaacagcccctgcctcgtatatgtcactttcaaccagaagatctatgtgtactgggaggtgcagctggagcggatggagtctacctatctggtgaaactgctggagaccaagccggagtaccacagcc

SEQ ID NO: 357384 - DNA, 858 bp, Homo Sapiens
  misc_feature (101)..(115): n is a, c, g, or t
  misc_feature (840)..(840): n is a, c, g, or t
gagaaaataattcacagaaagagctagagtgtcgaggtagaggtagcaattttaaatggagatgttagggaaatcctcactgagaaggtaacatttggtgnnnnnnnnnnnnnnngtggcaagcaagggaaccatccagatagggggcttgtaggtggtgggagatacgtgggatgaattgggacactttgagttgcatgtttgagaagtaatatgaaggcagagagcggataggagctgcggaacagatggaccaaatggacgggcaagatgccgcaaacacaggcaggggcgggggcagactgagggtgaagtgagtagcaccgcagatcgggtgtgaagccgcactggctggaaggtgccactgttagcagaggagcgggggctgctcgtgggactccagagcccatcttgtctttcatgcccacagatggagatgggtgtcgtgagctggtggtgggctacacagaccgtgtggtgcgagctttccgctgggaggagctaggtgagggtcctgaacatctgacagggcagctggtgtccctcaagaaatggatgctggagggtcaggtggacagcctctcagtgactctggggccactgggtcttcctgaactgatggtgtctcagccaggttgtgcgtatgcaattctactgtgtacctggaaaaaggacactgggtcccctcctgcctctgaaggcccacgggatggtagtagggagaccccagctgcccgagacgtggtgctgcaccagacatctggccgtatccacaacaagaatgtctccactcacctaattggcaacatcaaacaaggccacggccaacttagaagtaantggcctctgggcctcttt

SEQ ID NO: 357385 - DNA, 1896 bp, Homo Sapiens
cggataggagctgcggaacagatggaccaaatggacgggcaagatgccgcaaacacaggcaggggcgggggcagactgagggtgaagtgagtagcaccgcagatcgggtgtgaagccgcactggctggaaggtgccactgttagcagaggagcgggggctgctcgtgggactccagagcccatcttgtctttcatgcccacagatggagatgggtgtcgtgagctggtggtgggctacacagaccgtgtggtgcgagctttctgctgggaggagctaggtgagggtcctgaacatctgacagggcagctggtgtccctcaagaaatggatgctggagggtcaggtggacagcctctcagtgactctggggccactgggtcttcctgaactgatggtgtctcagccaggttgtgcgtatgcaattctactgtgtacctggaaaaaggacactgggtcccctcctgcctctgaagggcccacggatggtagtagggagaccccagctgcccgagacgtggtgctgcaccagacatctggccgtatccacaacaagaatgtctccactcacctaattggcaacatcaaacaaggccacggcactgagagtagtggctctggcctctttgccctgtgcaccctggatgggacactgaagctcatggaagaaatggaagaagcagacaagctgctgtggtcagtgcaggtggatcaccagctctttgccctggagaaactggatgtcaccggcaacgggcatgaggaggtagttgcatgcgccctgggatggacagacatatatcattgatcacaacccgcaccggtcgtccgcttccaagtggatgaaaatatccgtgccttctgtgcaggcctgtacgcctgcaaagagggccgcaacagcccctgcctcgtatatgtcactttcaaccagaagatctatgtgtactgggaggtgcagctggagcggatggagtctaccaatctggtgaaactgctggagaccaagccggagtaccacagcctgctgcaggagctgggcgtggatcctgacgacctccctgtgactcgtgccctgcttcaccaaacgctctaccatccagaccagccaccacagtgtgctccctcaagcctccaggatcccacctagctgtacttgcctcatagctggtgaaggattcttctgaaccccctaccctaccccctaaaggtatctgtggtattggcaggatagggaatatgcattacagaaaatgcaggatttgactcatgggcatgacaagatggcagcagccctagggtgaccgtgaactatagacctcgcagtcttttcggtgaaagaagagacaagttgaccctctgcccatttccttatggacctcacccatcatgccagcagggtcataggaccctggccttgttccaaatcatctgggacatgacccactccccacttgtcactgtgttgaaaacagagacttgtttgtgtggccccaacacccataaggaaaccaggctttaggcccaggggagcagtggaggtaagggctccaccccatcttaagctctgtcttccgtggcacaattccaagttcttgacgttagtaattgttaaaggaatggcaaactgttttgttttgaaggatctttctacagtctggtcttacccatgttcctagcaaccctgagatgattttcgtccatttaccaaagcagccgggtcagtgctttctcacgttgccgtattcttcaggtattagtcagcttcagaagccctgctcccatttttccacccacccattcccccataaaacagcttattgtctccaagacaatagacatttaaaatgtgatgcgggtttatgatccagaccccaatcagaattatatcttgggtcattt

SEQ ID NO: 357386 - DNA, 999 bp, Homo Sapiens
  misc_feature (980)..(980): n is a, c, g, or t
gggaggcagtgacgtaacttgctgccttaggtggccttccgctctggcggctgtcgcgacgggggttcagggaatatttactgggcctctccgctccctctgctcttggaggtgccatgaggtcagttagctacgtgcagcgcgtggcgctggagttcagcgggagcctcttcccgcacgcaatctgcctcggagacgttgataacgatacgttaaatgaactggtggtgggagacaccagcgggaaggtgtctgtgtataaaaatgatgacagtcggccatggctcacctgttcctgccagggaatgctgacttgcgttggggttggagacgtgtgtaataaaggaaagaacctgttggtggcagtgagtgctgaaggctggtttcatttgtttgacctgacacctgccaaggtgttggatgcttctgggcaccacgagacactaatcggagaggagcagcgtccagtcttcaagcagcacatccctgccaacaccaaggtcatgctgatcagcgacatcgatggagatgggtgtcgtgagctggtggtgggctacacagaccgtgtggtgcgagctttccgctgggaggagctaggtgagggtcctgaacatctgacagggcagctggtgtccctcaagaaatggatgctggagggtcaggtggacagcctctcagtgactctggggccactgggtcttcctgaactgatggtgtctcagccaggttgtgcgtatgcaattctactgtgtacctggaaaaaggacactgggtcccctcctgcctctgaagggcccacggatggtagtagggagaccccagctgcccgagacgtggtgctgcaccagacatctggccgaatccacaacaagaatgtccccactcaccctaattggcaacatccaacaaggccaccgccacctgagaagtagtgcctctgggcctcttttgccctgtgccaccctggatggggaccctgnaagctcatggaaggaaaat

SEQ ID NO: 357387 - DNA, 973 bp, Homo Sapiens
  misc_feature (453)..(463): n is a, c, g, or t
  misc_feature (495)..(582): n is a, c, g, or t
acacttggggggaaccccctggctggccaccactatcctgccaccatcaccactgtgaacacccacacagaagttggcacccctgaacctaccagcacctcactgcagaatgagtgtgcaccctgccatgctacccatactgctggcacatgcaaacaaggatggatcccattgccacttccctacaaagttctgtggctggcaccacccatcagactcttgtgaacactgcttcaggaacaacttggcccttccagcatggcaggttcctaacttccagggaccacagaacaaagccagaggtctgaaatcaacaccccagagttagaacacacagtccaggagttctgagctgagccttggttccctaaaatcctccagaaacaaacccagtcaattgaacccaccttataccacaattaaatctcccagaacataaaatggaattaaagnnnnnnnnnnncttatctaaaagtcagcaactacaaagattgnnnnnnnnnnnnnnnnnnnnnnnnnnnnnnnnnnnnnnnnnnnnnnnnnnnnnnnnnnnnnnnnnnnnnnnnnnnnnnnnnnnnnnnngattggactagttcccaaacaggctgagatggccaaaatttacagaaatagaattcagattctggacagaaatgaagattattgagatacaggagaaagttgaaatctaataaaaggatctaagggttacaataaactgaacaggaacttatagaccaaatgggcccttaataaccaaggaccaaattttttctgggtagaacttggtaaccatttctatggagaaatttaacaatgcaatccccaagttttaacaggctgtaaccggaccagacttaagaaaagaaatcttataaagctttgaaaacctctctggaaaaaccccttggaaaaaccttttttcagagaggaaagggaggggagaaaccattctacacagaagggaaccacc

SEQ ID NO: 357388 - DNA, 993 bp, Homo Sapiens
  misc_feature (985)..(985): n is a, c, g, or t
  misc_feature (989)..(989): n is a, c, g, or t
ctgtccccgccgtgcgcccttcgccgctgagctcgcagcctccggcgcccacctccacctccagtgtcccgcctcgggccgtcgccctccagcggctcgcgagcgtgggagacgtacctgggcaggcactgtccagcccaggcccaggcacagccgtgaggggcgaggcacggggacatcctggcggccaccatggtggccacgtgcctgcaggtggtgggcttcgtcacgagcttcgtgggctggatcggggtcatcgtgaccacctccaccaatgactgggtggtgacctgcggctacaccatccccacctgccgcaagctggatgagctgggctccaaggggctgtgggccgactgcgtcatggccacggggctgtaccactgcaagcccctggtggacatcctcatcctgccgggctacgtgcaggcctgccgcgccctgatgattgctgcctcggtcctgggtctgccggccattttactgctgctgactgttcttccctgcatccggatgggccaggagcccggtgtggctaagtacaggcgggcccagctggctggtgttttgctcattctgctgggtaagacagctttctcagtggtaccctacctatgagggagcctgatgaatctcagatcttgtggttgctgccttctcaagttcaagagaaatgtgaaaggaagccaagtgaagccagtgggggatggactcccacaatctgtatccctttgtattttatgggcagtttacacagagggctaagtaatgtctctggggagtcactgaccatgaagataagtttaaaaagagaaagaggattttgaaggtaggaaatacctaagggaaagaactgaaagatggaagccttctcagtcttcacagtggaatcctttttgaacacctatgcccaggtcccacagcagatcaattgaatcagaattttctgggcatcaggcaggcaagatatttttgaaacttcccngtgngctt

SEQ ID NO: 357389 - DNA, 850 bp, Homo Sapiens
  misc_feature (26)..(26): n is a, c, g, or t
  misc_feature (755)..(774): n is a, c, g, or t
cggtccggaattccttcagatggacngccagtgccatggattttagaacctgcattgccagttgactgcctgctttgtgctacgtgcaggcctgccgcgccctgatgattgctgcctcggtcctgggtctgccggccattttactgctgctgactgttcttccctgcatccggatgggccaggagcccggtgtggctaagtacaggcgggcccagctggctggtgttttgctcattctgctggctctctgcgcccttgttgccaccatctggttccctgtgtgcgcccaccgtgagaccaccatcgtgagctttggctactccctgtatgcaggctggattggtgctgtgctgtgcctcgtgggtggctgtgtcatcctctgctgcgctggagatgcccaggcctttggtgaaaaccgtttctactacactgcgggctctagctccccgactcatgcgaagagtgcccacgtataagagggctgcccggctgcccacagaggtgctgtagatgctgggcccagggccctaggtttgctcgtcacagtgtggggaagcccattcctctgccaggctctaaagccaaaggtctagaaaagcatcctgtctggcattttgtagtctttaactttctccccatttcccccatcttttggttgccttaaaaagaaattctctagctcagataatgcccagacatttttttcccttggtgttgcccctattagctcttttcttgggcattcttttgctgtnnnnnnnnnnnnnnnnnnnntttgttactttaaatttcaaatgttttgcaaacatcactgagttaggtgggggtggggaagagaaatacaagatac

SEQ ID NO: 357390 - DNA, 980 bp, Homo Sapiens
tggaatgggaaataaactccaaagccaaacagatccttttagacctttgcctttgaccctgccgaagaatgggctccccacactggtgacgaccaacctaggccttgggcccagaatcttacagcacctctgtgggcagccggccagccctcttatacgtggccactcttcgcatgagtcggggagctagagcccgcagtgtagtagaaacggttttcaccaaaggcctgggcatctccagcgcagcagaggatgacacagccacccacgaggcacagcacagcaccaatccagcctgcatacagggagtagccaaagctcacgatggtggtctcacggtgggcgcacacagggaaccagatggtggcaacaagggcgcagagagccagcagaatgagcaaaacaccagccagctgggcccgcctgtacttagccacaccgggctcctggcccatccggatgcagggaagaacagtcagcagcagtaaaatggccggcagacccaggaccgaggcagcaatcatcagggcgcggcaggcctgcacgtagcccggcaggatgaggatgtccaccaggggcttgcagtggtacagccccgtggccatgacgcagtcggcccacagccccttggagcccagctcatccagcttgcggcaggtggggatggtgtagccgcaggtcaccacccagtcattggtggaggtggtcacgatgaccccgatccagcccacgaagctcgtgacgaagcccaccacctgcaggcacgtggccaccatggtggccgccaggatgtccccgtgcctcgcccctcacggctgtgcctgggcctgggctggacagtgcctgcccaggtacgtctcccacgctcgcgagccgctggagggcgacggcccgaggcgggacactggaggtggaggtgggcgccggaggctgcgagctcagcggcgaagggcgcacggcggggacagcagcactccgct

SEQ ID NO: 357391 - DNA, 1534 bp, Homo Sapiens
  misc_feature (869)..(869): n is a, c, g, or t
  misc_feature (1089)..(1089): n is a, c, g, or t
taatttccttattcttctcagatcgttatttaaatatatcccctatattttcagcttattttttacagcttctatcccacaaggaaatacagttatactatactggtaatcaaatgataaagcaggtgataaaactcgcagacccagggtaatcttgggtcaaagctggcaagaaaatctgaaagcagactctctggagccactacttaggcatgctcattcagttgttgattcaattacaacgaatctcaacgaaatccgcttcaagctatgtagtccactcttaacccgaccatgctggaagtaaagtgaatagaaaattgcacctgagctcaacattgtgactctggtgctttgaatactttcttacttttttagaagaattgaatggtttgtcttgactcctcattaagtatagccaactatgtgttctagttgcttgggatacaggcattttagaaacaaataagtggacttatttttccctccaggaatgtcatcatgttctaactgtgctgtttttataacaaacttgagagattttcagactttgttggcaggcagaatcattgtagaaacaacagaaattttgggcacagtctttggggaagcaaatgaggtatccaacatgggtagtgccaagaaattaaggtcatttggaaaaaacatggtttggtacgcacttatagctatagttattgcagttaaacgtattactatatttatagtcaaattggtatttggatttctcaaggctggttgttgacctaaaatttaattgtgatggtaaatgttcaaataaatctaaaacaaaattctattactcaaggatggacactaagagacaaacagtatatcatgtattagtntttgacattttctcactatatagttcacatgtgcaaaatatccctaaaaacaggaagactgctcagatcttctgcataagttacataggcagcaagctatgcacaatttctccttgtgctagctctaattccattcctttgctcctcaggagaatatcatgccgtctgaaaatggcttgataaatgacaggaggtcagtatttgcagttaaatggccttngttccagttctggttccaccacttactagctatgtggccttagataagtaggttacttctctgagcctgtctcctcatttgtaaaacagatggataggaaagaaatgatatctcatttggcggtataagaattaacaatgagttaatgctgtgaaagcattttacaaactaatgtaccacattacacactgatctagatttgaacatttaccatcgtaattacattttagatcaatgtgcctgacacattatccttaaacatggataaaaatttatttaaaaatcatgaccatgtataattttcagtgctcatttttcactctaaaatattttaaattatattctgaagcttatgaatttttcttaaaaataaaagcagaacttccttaattaggactatggtagcatatatagagttaggtgagtagtggacggtcaaaaatat

SEQ ID NO: 357392 - DNA, 992 bp, Homo Sapiens
  misc_feature (829)..(829): n is a, c, g, or t
  misc_feature (846)..(846): n is a, c, g, or t
  misc_feature (869)..(869): n is a, c, g, or t
  misc_feature (876)..(876): n is a, c, g, or t
  misc_feature (878)..(878): n is a, c, g, or t
  misc_feature (880)..(880): n is a, c, g, or t
  misc_feature (882)..(882): n is a, c, g, or t
  misc_feature (884)..(884): n is a, c, g, or t
  misc_feature (895)..(896): n is a, c, g, or t
  misc_feature (901)..(902): n is a, c, g, or t
  misc_feature (911)..(911): n is a, c, g, or t
  misc_feature (913)..(915): n is a, c, g, or t
  misc_feature (917)..(917): n is a, c, g, or t
  misc_feature (920)..(922): n is a, c, g, or t
  misc_feature (935)..(935): n is a, c, g, or t
  misc_feature (938)..(938): n is a, c, g, or t
  misc_feature (943)..(943): n is a, c, g, or t
  misc_feature (954)..(954): n is a, c, g, or t
  misc_feature (958)..(958): n is a, c, g, or t
  misc_feature (971)..(971): n is a, c, g, or t
  misc_feature (981)..(981): n is a, c, g, or t
  misc_feature (987)..(987): n is a, c, g, or t
  misc_feature (989)..(989): n is a, c, g, or t
agcgggtcgggaagtggatccgccgctgccggagcagcccgaagggagctgcggatcgcgaggccagtaccgacccggcccggccgcgcgcaccgcccccgcccgccatggcccgggactacgaccacctcttcaagctgctcatcatcggcgacagcggtgtgggcaagagcagtttactgttgcgttgtgcagacaacactttctcaggcagctacatcaccacgatcggagtggatttcaagatccggaccgtggagatcaacggggagaaggtgaagctgcagatctgggacacagcggggcaggagcgcttccgcaccatcacctccacgtattatcgggggacccacggggtcattgtggtttacgacgtcaccagtgccgagtcctttgtcaacgtcaagcggtggcttcacgaaatcaaccagaactgtgatgatgtgtgccgaatattagtgggtaataagaatgacgaccctgagcggaaggtggtggagacggaagatgcctacaaattcgccgggcagatgggcatccagttgttcgagaccagcgccaaggagaatgtcaacgtggaagagatgttcaactgcatcacggagctggtcctccgagcaaagaaagacaaccttggcaaaacagccagcagcaacaacagaacgatgtggtgaagctcacgaagaacaggtaaacgaaaggaaacgctgctgctaatggcacccaggtccactggcagaggactgcactgcgggtccctcccccagcccgaggcccacggaggttcctcggggggacagtctcagtttcgtgccgttatttaaagaanttctctccatgtttttngtatcggggaggtgcaatcggcntttcctncncngncntcatcgagtgnnaaganngtgttagancnnncngcnnnccataatggaaancancctanccggaaaaggngctngaactaaaaaggngagcccgagngcgaantnatt

SEQ ID NO: 357393 - DNA, 1129 bp, Homo Sapiens
  misc_feature (7)..(7): n is a, c, g, or t
  misc_feature (123)..(156): n is a, c, g, or t
  misc_feature (907)..(907): n is a, c, g, or t
  misc_feature (991)..(991): n is a, c, g, or t
  misc_feature (1002)..(1002): n is a, c, g, or t
  misc_feature (1019)..(1019): n is a, c, g, or t
  misc_feature (1021)..(1021): n is a, c, g, or t
  misc_feature (1030)..(1030): n is a, c, g, or t
  misc_feature (1032)..(1032): n is a, c, g, or t
  misc_feature (1040)..(1040): n is a, c, g, or t
  misc_feature (1046)..(1047): n is a, c, g, or t
  misc_feature (1050)..(1051): n is a, c, g, or t
  misc_feature (1062)..(1062): n is a, c, g, or t
  misc_feature (1064)..(1064): n is a, c, g, or t
  misc_feature (1068)..(1068): n is a, c, g, or t
  misc_feature (1070)..(1070): n is a, c, g, or t
  misc_feature (1074)..(1074): n is a, c, g, or t
  misc_feature (1076)..(1076): n is a, c, g, or t
  misc_feature (1084)..(1084): n is a, c, g, or t
  misc_feature (1088)..(1088): n is a, c, g, or t
  misc_feature (1093)..(1093): n is a, c, g, or t
  misc_feature (1095)..(1095): n is a, c, g, or t
  misc_feature (1103)..(1103): n is a, c, g, or t
  misc_feature (1111)..(1111): n is a, c, g, or t
  misc_feature (1116)..(1117): n is a, c, g, or t
  misc_feature (1120)..(1120): n is a, c, g, or t
  misc_feature (1126)..(1126): n is a, c, g, or t
ctgaggnggaggagggggagcggagggaggtgtttctgtcagttccggctgtttgttcgggaagtggatccgccgctgccggagcagcccggaggagctgcggatcgcgaggccagtaccgannnnnnnnnnnnnnnnnnnnnnnnnnnnnnnnnnatggcccgggactacgaccacctcttcaagctgctcatcatcggcgacagcggtgtgggcaagagcagtttactgttgcgtaatgcagacaacactttctcaggcagctacatcaccacgatcggagtggatttcaagatccggaccgtggagatcaacggggagaaggtgaagctgcagatctgggacacagcggggcaggagcgcttccgcaccatcacctccacgtattatcgggggacccacggggtcattgtggtttacgacgtcaccagtgccgagtcctttgtcaacgtcaagcggtggcttcacgaaatcaaccagaactgtgatgatgtgtgccgaatattagtgggtaataagaatgacgaccctgagcggaaggtggtggagacggaagatgcctacaaattcgccgggcagatgggcatccagttgttcgagaccagcgccaaggagaatgtcaacgtggaagagatgttcaactgcatcacggagctggtcctccgagcaaagaaagacaacctggcaaaacagcagcagcaacaacagaacgatgtggtgaagctcacgaagaacagtaaacgaaagaaacgctgctgctaatggcacccagtccactgcagagactgcactgcggtccctcccccagaacgaggcccacggaggttcctcggggggacagtatcagtttcgtgccgttatttaaagaattctctccatgtttttgtatcgggaggtgccatcggcntttcctcccccgccctcctcgagtgccaagaaggtgttggacagcccgcccttccctactggtgcccctcctcccggccaaggngctggactggngagaagtgcccgcgagngnatgattgcnantctgtaanaatgtnnatnntctaccggcgnanacantnctgntntggttttncttnttgtncnacctgtgnaaaaaacnccccnnacncccccnccc

SEQ ID NO: 357394 - DNA, 901 bp, Homo Sapiens
  misc_feature (91)..(128): n is a, c, g, or t
gtgtttctgtcagttccggctgtttgttcgggaagtggatccgccgctgccggagcagcccgaagggagctgcggatcgcgaggccagtannnnnnnnnnnnnnnnnnnnnnnnnnnnnnnnnnnnnnatggcccgggactacgaccacctcttcaagctgctcatcatcggcgacagcggtgtgggcaagagcagtttactgttgcgttttgcagacaacactttctcaggcagctacatcaccacgatcggagtggatttcaagatccggaccgtggagatcaacggggagaaggtgaagctgcagatctgggacacagcggggcaggagcgcttccgcaccatcacctccacgtattatcgggggacccacggggtcatttgtggtttacgacgtcaccagtgccgagtcctttgtcaacgtcaagcggtggcttcacgaaatcaaccagaactgtgatgatgtgtgccgaatattagtgggtaataagaatgacgaccctgagcggaaggtggtggagacggaagatgcctacaaattcgccgggcagatgggcatccagttgttcgagaccagcgccaaggagaatgtcaacgtgggaagagatgtttcaactgcattcacggagctggtcctccgagcaaagaaagacaaccttgggcaaaacagcagcagcaacaacagaacgatgttggttgaagctcacgaaagaacagtaaacgaaagaaacgctgctgctaatggcacccagtccactgcagagactgcactgcggtccctcccccagcccgagggcccacgggaggttccttccggggacagtctcagtttcgtggccgttattaaaagaattctcccctggttttgggaatccggaaaggggccttcgggccctttct

SEQ ID NO: 357395 - DNA, 1636 bp, Homo Sapiens
  misc_feature (3)..(3): n is a, c, g, or t
  misc_feature (290)..(290): n is a, c, g, or t
  misc_feature (1548)..(1548): n is a, c, g, or t
gtnagtgcaaggcacagttctggggggctgcagaacccggggcctccccgccaccttgcttaggcctccatgcagacccgagctccccgctgaggctgggttgggatcccacagaggaccttaggggtgtgagccatgtgccaggaaggcttatttcatggggacagaggcctctggcctccctccctgctggcagcagagattggaggtgacatgaccagccctgctggccctcccctcccacattggtgctcattgcctggccatgggcaagggctcctggagctgantgaacaggcactgggagaacagctgtaggggtgaaggttaagagttttttcagggactcagagcacaggagtcagccctgggaccacctgaggtccaccaagggggaggcatcaggatggagcccttcctgcctgtccagggcatgcgtacgccacgcacagatgttgacagcatggtgctgttgcccagtgcccccctggagggagatggagtccacagtccttccgttcactcagtggccgtcactgaggcccagtcacgggccagccaggctctgggcactcgccctgtcctcagggagtgtccaggctcgtctccttcatgttggagggcggagggctttattccatcatcacaaggccaggaggaaagtgaggctcaccaaagggaggtgacttgcctgggccctcacagctggcagggagcagagccaccaggagcccagggctgcctgctctgacttccgggctctccagcaccacgtgccctacagctgagagagccatcctggctgagtgtggagggcaacgtcccacccagcgcccctcaaggccacgagagtggacgtcgtgcctgaggcccggcagaagctgctctctcctgggcctcaggtgaaggaggtgccagcggcttctgcctatgccggcagaatactccatggccgactgaggcactgcctggccaggtctctggtctctgccattgtccccctgggtcactcagggcagccattgcaagacaatagcagagccagagtcccggatgccagtggcttctcggtagaaacagggatgacaaggcattgtctaaagggtggaagaacacccacagtgggctgggggtttatgcgtctcctgcactcctccgaggagtcctcctggggctctgggtgcagcacaggctggggcagcaggggatgtgaggcggggtcccggtagacaggccagctgaggcttctggctacagggatggcccaagccccagagggtatgggatgcagaaccacatggtgttgtggggtgcatactaggaagaagtgctctcgacttgtatcagtggagtgtctgcggtgaaggggtagggaggttgctactaaggagactccaggcttagacccgaatgttcatccacctgtcactgtccccaagctgcagtcagtctcctttgggtccgaccctgtcgtcttcctggtagcccagcaagcaccaggcgaaatcaatttccctgggacgctgatcctggtcgccatatgtgggngagcggacagcctgttccccttcacaaacaggactaaatcaggccttgcctggggcaagggaccaaaatccccactccacaagctttt

SEQ ID NO: 357396 - DNA, 2081 bp, Homo Sapiens
  misc_feature (1785)..(1847): n is a, c, g, or t
ccccaccatttcccgcccccatctgtgtacccgatttttccgcccagggtcgcgctggggttgtaccaccatggtgggatgcttgtttgccccctgggtgaggaagtccattgggccgtagggccgcctttccccccccatcatccataccccagccccagatctctctcttttcctcccggtgacactaagtccccagaccggcggccgtacttggccttacagtgcaaaatgtgcttggcgaggaagtcgaggcggcgctgtagcagctgagcgtgggggtctgcaagggcggccagctcggggaagcgaggctcgtggcgccggtagaggcgcagcagccgggccgcggcgtcctgtccgcggtgcagctctaggacgcgccgcgcggtccgctcgcggaacacgcacactgactgcaacagcggctcgttatacttgtcccacatgcctgctacccggtagccgtgcaccaagcccgcctcattgtccagaaagaccagcgccccgcccggaccgcggtgcaggttgctggtggcacgctgcatgacgcgcgggtcccactgcaggctgaagaggttgcttacgagccggtcgaagttggccgtcaggtagtcgaaaaggattaagtcggtccattgtactaggtccaccagctccgcctggctgaggttggccagctcacccccggcatcccggagggggcgcagacggccgtcctccgagcgccagggcgcgggcaccaccacgtccgtgaggttgggcagccagcgtgtcaggctcaccacgctgccctcggtccagtgcgcagcgcgcagctcctcctgcacctgcgcccactgcgcgccccgagcctccacccgagccagtgccagcggcggcacgtggcgctggaggcccagcaggcgcgccagatagtaagacagggcctcgccctgaatctgctccgggttgatgccgtagcgcacgcaggcgcgggtgccgtcaggcaaaacgggccagtcggttggagctgcgcccgcaacccaccgcgctcacagggccaccatccagggcgcacgcgagccgcctccagccacgccgccgcctgggcctccgaaaagccacgggggcacctgctcctccaggccgcggctccagaagacgcccccgtgcaccgcggcgctctcctccggccggggctgcctggctgacacgtgccacctgggctcgctccgggactgccggggcgggccgtccgcgccgcacgccagggtgagcagcgcccggaaagttttcagggagccgccgcgggcgtcccacgccaggggcgggggcagagggaagcgaggcgcgggcgcggggccgccgctccgggccgggcgccgtgggagtcggtcttcgggcggccgggaggcgggcagctcggtccgcggcggcaggagccctccccacagcgccagcagcgagcccagcgccagcagccagagccccgcggtggcggcggcgccccgcatcctcctgcccatgctcccgcggctgtgccggtgcgccgccgccgcttcaaggccgagcccaggcacccgggtcccggcggcgaggcgggcccggcagtttgtgggctccggggcttcgggcgcttcggccccatcgcggccgcggggcgctgcggggctctgtccggcgctccgcccggcgctgggaactcgagtccccgccgcttcccagctgcttttgtatttcgctgtgagaccctccggtgggcgcgattcacaggcgcccggaccacgtgggagccagggggannnnnnnnnnnnnnnnnnnnnnnnnnnnnnnnnnnnnnnnnnnnnnnnnnnnnnnnnnnnnnnttccacttaaagcggcgatggctccttccgagagggagaggcggccccacactcggtccgggacttgggggcctggaggaagccggactggctgcgcccgcgccggggcgtaggagggggtggcgcagagccggagtctggggcctggcgggagggacgcgccctgggcccttgcgggggtgtcttggtcgccgggtccctttgcctaggcagcgcgggtctcctgcaaacttc

SEQ ID NO: 357397 - DNA, 949 bp, Homo Sapiens
  misc_feature (51)..(51): n is a, c, g, or t
cggacccgcgggttaagaactttggtgacccccaccatgcccttgggttanccgcgggaaagccagtgccacccaaggccccggccctcctttgtccccagaaaaggacccggggcccccgccccggaaccgcgggtgcagggttgctggtgggcaacgctgcatgacggcgcgggtccccactgcaggctgaaagaggttggcttacgagcccggtcgaagttggccgtcaggtagtcgaaaaggattaagtcggtccattgtactaggtccaccagctccgcctggctgaggttggccagctcacccccggcatcccggagggggcgcagacggccgtcctccgagcgccagggcgcgggcaccaccacgtccgtgaggttgggcagccagcgtgtcaggctcaccacgctgccctcggtccagggcgcagcgagcagctcctcaagcaccagagcccactgcgcgccccgagcctccacccgagccaagtgccagcggcggcacgtgacgctggaggcccagcaggcgcgccagatagtaagacagggcctcgccctgaatctgctccgggttaatgccgtagcgcacgcaggcgcgggtgccgtcggcaaaacggaccagtcggttggagctgcgcccgcaacccccgcgctccaggaccaccatccgggcgccgcgagccgcctccagccacgccgccgcctgggcctccgaaaagcccgggggcacctgctcctccaggccgcgactccagaagacgcccccgtgcaccgcggcgctctcctccggccgggagtcggtcttcgggcggccgggaggcgggcagctcggtccgcggcggcaggagccctccccacagcgccagcagcgagcccagcgccagcagccagagccccgcggtggcggcggcgcaccgcatcctccatcccgggaattccgaaccgaa

SEQ ID NO: 357398 - DNA, 1475 bp, Homo Sapiens
aacaacttctgcagggcttgaatcttcttcgccaacatcacgaactctgtgacatcattcttcgagtaggtgatgttaaaattcatgctcacaaagcggtacttgccagcgtcacccgtatttcaaagctatgttcactggaaacctttctgaaaaagagaacagtgaggttgagtttcaatgcattgatgaaactgctctccaggccattgtggagtatgcctatacagggactgtttttatttctcaggacacagttgaatctctcctgccagcagcaaacctactccagataaaacttgtcctgaaagaatgttgtgcatttcttgaaagccaacttgatcctggtaattgtattggaatttctcgttttgcagaaacatatggttgccgtgacctttatttggcagccactaaatacatatgccagaattttgaagctgtttgccagactgaagagttttttgagcttacacatgctgacttggatgaaattgtttccaatgactgtttgaatgtagctaccgaagagactgttttttatgcattagagtcttggatcaagtatgatgtacaagaacgccagaaatacttagcacagttactaaacagtgtacgattaccattgttgagtgttaagtttctcactagactatatgaagcaaatcatcttattcgtgatgatcgcacttgtaaacatcttttgaatgaagccctaaagtaccactttatgcctgaacatagactctctcatcagacagtcttgatgacacgacctcgctgtgctcccaaagtactttgtgcagtaggagggaaatctggactctttgcctgtttggatagtgtggagatgtactttcctcagaatgactcttggattggtttggcacccctaaacattcctcgctatgaatttggaatatgcggtttagaacaaaaagtatatgttataggtggtattgcaactaatgtgcgtcctggcgtcactatcagaaaacatgaaaattcagtggaatgctggaatcctgatacaaatacttggacttctctagagagaatgaatataagccgaagtactcttggagtagtagtacttgcaggagaactttatgccttaggtggttatgatggacaatcttatttacaatctgtagagaagtacattgccaaaataagaaaatggcaacctgtgggaccaatgacgacaacaagaagttgttttgctgcagcgttattggatggaatgatatatgccattgatggaaatggaactgcccacatgaacagtgtggagcgttatgattcaagtaagacttctggcagatggttgattacttgcacataaaaggatctactttggcggggggacatgctagccttatttttgggttgtgggacatattgtagattaccattgttccacattgaagatcccatctcatcaaatcaggctctggtggtgaccaatgtagaac

SEQ ID NO: 357399 - DNA, 984 bp, Homo Sapiens
gccggcgctccccctcgttccctgcgccgacgcgggtcgggcgttggcggggagggggaggccagaggcttttcaaggcgctgggggctccggccggcccggtgggggcctccccccgccagagtcaggggtgtcgggcgattccggggtgggggcccgagtctggtccagcggggctctgggtggcagaggggggaaggttaagcggggctgctggcttggggaatttggggccgtccgcggggctctcctcgggctccaagctttcaccccagaaaacagccctgaaccccaaatttgctccagccccagggggccctacctgcccttcctggcttccccagtggaaatctaaggtactggaggcttccaggggagccagggcacccctaggacaaccccctctctctgcagatggggaaactgaggcctggaaacagagaacggtgggaccaaggtcacatgatggcggaaggaggacaaggaaggaggctgactgcgtatccagcacgtgttccgtgccaagcctgtgcaggggccaaggaccggggtctctggacagcgccggttgctgggtcccacgctgggcgacagggcctttgcaatcaggccgacagggtttgaacccttgccgcggcactttccagatggccttggccactgttccctctctgaccttcagatggagcccatggcacctccggagggggtgtgtgcttccaggaccaaatccacttgtgcgtggttaggcacgaagtggggggaagcggctcagccaccggggacctgtcctgcctccaccctctgtggcaacccctttccttgccttttgtctctgttgcttttgggggggtgattagccgctaactcagcggctagaggattctctccccggaaaaggctccggaattgaagcccaaacccccaaggcaaaacggaatctgctccccaggggactaaatgaaaatcgggttcctcactggt

SEQ ID NO: 357400 - DNA, 1071 bp, Homo Sapiens
  misc_feature (890)..(890): n is a, c, g, or t
  misc_feature (896)..(896): n is a, c, g, or t
  misc_feature (953)..(953): n is a, c, g, or t
  misc_feature (983)..(983): n is a, c, g, or t
  misc_feature (1001)..(1001): n is a, c, g, or t
  misc_feature (1008)..(1009): n is a, c, g, or t
  misc_feature (1014)..(1014): n is a, c, g, or t
  misc_feature (1017)..(1017): n is a, c, g, or t
  misc_feature (1023)..(1023): n is a, c, g, or t
  misc_feature (1025)..(1025): n is a, c, g, or t
  misc_feature (1028)..(1028): n is a, c, g, or t
  misc_feature (1031)..(1032): n is a, c, g, or t
  misc_feature (1034)..(1034): n is a, c, g, or t
  misc_feature (1043)..(1043): n is a, c, g, or t
  misc_feature (1057)..(1057): n is a, c, g, or t
  misc_feature (1061)..(1062): n is a, c, g, or t
ggtgtggagcagccaagatggagccggcagtcggcggtccgggcccactgatcgtgaacaacaaacagccccagcccccgccacctccgccgccggcagccgcacagccaccacccggggcaccgcgggccgccgcgggcctcctgcctgggggcaaagcccgcgagttcaaccgcaaccagcgcaaagactcagagggctattcggagtcaccagacctggagtttgagtatgctgacacagacaagtgggctgcagagctctcggagctttacagctacacggaagggccagaattcctgatgaatcgaaaatgctttgaggaggacttccggatccatgtgacagacaagaagtggactgagctggataccaaccagcaccggacccatgccatgaggctcctggatggcttggaagtcactgccagggagaagagactcaaggtggctcgagcaattctctatgttgctcaaggcacgtttggggagtgcagctcggaggcagaggtgcagtcctggatgcgctacaacatctttctcctcctggaggtgggcacgttcaatgctttggtggagcttctgaacatggaaatagacaacagtgccgcctgcagcagtgctgtgaggaagcctgccatctccctggctgacagcacagacctcagggtcctgctcaacatcatgtacctgatagtggagaccgttcatcaggagtgtgagggtgacaaagctgagtggaggaccatgcggcagaccttcagagccgagctgggctccccgctgtacaacaatgagccatttgccatcatgctgtttgggatggtgaccaaattttgcagtggtcacgccctcactttcccatgaagaaagttctcttgctgctctggnagacantattgtgcacgctaggcggctttgaggagctgcagagcatgaaggctgagaagcgcnattcctgggcctcccccgcttcctgaaganagatcaaatgattcgcanatgagannagctntcnaccagntntgnttnnanttatttagngcagagaaaggggngcgnnagaaaaggt

SEQ ID NO: 357401 - DNA, 1079 bp, Homo Sapiens
  misc_feature (872)..(872): n is a, c, g, or t
tggaccggtccggaattcccgggaagacagctttgggatgtcggaagatcctagaggtcccaaggtagctgacttgcgaagctgaggctccagccgagggctccaggcctctgaccggcccagcagtgagcgcggctgcccgacgcttcagggccgggagcagggagcgtgagtcgccatggcgacgccggcgggtctggagcgctgggttcaggacgagctgcactcggtgttggggctgagcgagcggcacgtcgcccagtttctgatcggtaccgcacagcgctgcacctctgccgaggagttcgtgcagcgcctacgagacactgataccttggatctcagtgggccggcccgggacttcgccctgagactctggaacaaggtaccacgaaaggcagtggtagaaaagccagctcgggcagcagagcgagaggcccgggccctgctggagaagaaccgatcttataggttactggaagacagtgaagagagcagtgaggagactgtgagtagggctggaagcagcctccagaagaaacgtaaaaagcggaaacacctcaggaagaagcgtgaggaagaagaggaggaagaggcttctgagaaagggaagaagaaaacaggggggagtaaacagcagacagagaagccagagtcggaagatgagtgggaacggacagagcgtgaacgccttcaggacctggaggagcgtgatgcctttgctgagcgggttcgacagcgggacaaggatcggactcgaaatgtcctggaacggtcagacaagaaggcttatgaagaggctcagaagcgcctcaagatggccgaggaagaccggaaggccatggtcccctgagctgcggaagaaatctcgnccgagagtacctgggctaagccgggaaccgagagaaacttttgaggacctggaaggccggaactggcctgatgaagggagttcccttttttgggggaccgtgggagcttgaaccccggcacagagcgggcagggagcctccaaatattaaacccggccaaatggcgcggaatctttcgccccgggggaagtacccgggggaaaaatt

SEQ ID NO: 357402 - DNA, 515 bp, Homo Sapiens
  misc_feature (415)..(415): n is a, c, g, or t
  misc_feature (462)..(462): n is a, c, g, or t
gcggccgcccccgcgctcctgcagctccagctccagcaggaagcgactccctcgcgccgagtcccggcgcttctccacgttcacgatgcgcagaagcgcgaagcgcccgccgtggcgcgcgttcagccgctccatgtactgagcggtcacgtccacggcctccgcctccggcagctgcaggttccccgaaacgttgcatcgcaggtcgttccagtccgagcgcagcagctcgaagtccacggcgcccacgctgaacgtgcgctgccagtcgatggcgtcctcacgccagcgtccgagcgccgggcccgcggcctcctcgctgtcctccgacgcggcctcgtcgcccggggccccatcgtcctccccttcctcctcctcttcgccctccccgggcagctgcggcccggacacctgngacaagctcaggaaggaggtcacgggccgcgcttcggaggacaagtntgagtccactgtgggcgccgcaggtcccagcgtgcgcgcctggccctcccggc

SEQ ID NO: 357403 - DNA, 1143 bp, Homo Sapiens
  misc_feature (50)..(86): n is a, c, g, or t
  misc_feature (161)..(224): n is a, c, g, or t
cgatgatagactactatagggcgaatggagctctacgcggtggcggccgnnnnnnnnnnnnnnnnnnnnnnnnnnnnnnnnnnnnnatcaggccaaatcggccgagctcgaattcgtcgagagcgggcagcacctgggaaacgcccgcgcggtttggggcnnnnnnnnnnnnnnnnnnnnnnnnnnnnnnnnnnnnnnnnnnnnnnnnnnnnnnnnnnnnnnnngcggcagggaggcggcgctctggggccgcaggcggacgtactctgtgagcggcgcccgggcgcctgggcaggcgcctcccgagtaccggcgcccattttgcccgcccgctaaggagacccgtgcgcggcctacacgcttgggggacagccctttaagacgacatctccgcgaacgccggcctcttgagccagggggacgctcttttgaaagtcagtcccaaaacagttaaggttttattttattttgttttatttccaagtcacagcccccgaatctcgtacaactctccctggaccacttccggttgccggcccgcgcctcataacttcggttcgagtgacctcggcccgggatgcccctcggctcaccccgggctcacgtcgcgatcctggcttgagtggcccagggtgggagacctggaagttttagcctagctgttctcaaggcggattaattagcccaagaaacattatattcatttttctggatatgccgcagaaggatccgtgccagaagcaagcctgtgagatacagaaatgtttacaagccaacagctacatggaatcaaagtgtcaggctgtcatccaagaactgcgtaagtgttgtgctcagtatcccaagggaagatctgtcgtctgttcaggatttgaaaaagaagaggaagaaaacctaacacggaagtctgcatcaaagtaaagttcttctgaagtgctgctccatgtttccaccaaatgaattttttttatcctcctgactcttcaggccaggtagcagcaaatagcaaatgaaaaagtcagctacaaaagttaatgaatatgccatctatgcagaacaggcagaaatataaacacattaaaagacaaatatgtagaatgtaatatactgagctgctaaaataaacctgtttaagagaaaaaa

SEQ ID NO: 357404 - DNA, 807 bp, Homo Sapiens
ccgggatgtcactcgccaagtggaatttgcccagacaagcaacatggctcggaaacgcgcggccggcggggagccgcggggacgcgaactgcgcagccagaaatccaaggccaagagcaaggcccggcgtgaggaggaggaggaggatgcctttgaagatgagaaacccccaaagaagagccttctctccaaagtttcacaaggaaagaggaaaagaggctgcagtcatcctgggggttcagcagatggtccagcaaaaaagaaagtggccaaggtgactgttaaatctgaaaacctcaaggttataaaggatgaagccctcagcgatggggatgacctcagggactttccaagtgacctcaagaaggcacaccatctgaagagaggggctaccatgaatgaagacagcaatgaagaagaggaagaaagtgaaaatgattgggaagaggttgaagaacttagtgagcctgtgctgggtgacgtgagagaaagtacagccttctctcgatctcttctgcctgtgaagccagtggagatagagattgaaacgccagagcaggcgaagacaagagaaagaagtgaaaagataaaagctggagtttgagacatatcttcggagggcgatgaaacgtttcaataaaggggtccatgaggacacacacaaggttcaccctctctgcctgctagcaaatggcttctatcgaaataacatctgcagccagccagatctgcatgctattggcctgtccatcatcccagcccgctttaccagagtgctgcctcgagatgtggacacctactacctct

SEQ ID NO: 357405 - DNA, 889 bp, Homo Sapiens
  misc_feature (6)..(7): n is a, c, g, or t
  misc_feature (15)..(15): n is a, c, g, or t
  misc_feature (17)..(18): n is a, c, g, or t
  misc_feature (24)..(24): n is a, c, g, or t
  misc_feature (29)..(29): n is a, c, g, or t
  misc_feature (48)..(48): n is a, c, g, or t
  misc_feature (66)..(66): n is a, c, g, or t
  misc_feature (68)..(69): n is a, c, g, or t
  misc_feature (79)..(79): n is a, c, g, or t
  misc_feature (84)..(84): n is a, c, g, or t
  misc_feature (86)..(86): n is a, c, g, or t
  misc_feature (93)..(93): n is a, c, g, or t
  misc_feature (109)..(109): n is a, c, g, or t
  misc_feature (112)..(112): n is a, c, g, or t
  misc_feature (134)..(134): n is a, c, g, or t
  misc_feature (143)..(143): n is a, c, g, or t
  misc_feature (147)..(147): n is a, c, g, or t
  misc_feature (156)..(156): n is a, c, g, or t
  misc_feature (160)..(160): n is a, c, g, or t
  misc_feature (181)..(181): n is a, c, g, or t
  misc_feature (187)..(187): n is a, c, g, or t
  misc_feature (191)..(191): n is a, c, g, or t
  misc_feature (209)..(209): n is a, c, g, or t
  misc_feature (216)..(217): n is a, c, g, or t
  misc_feature (219)..(220): n is a, c, g, or t
  misc_feature (222)..(222): n is a, c, g, or t
  misc_feature (226)..(226): n is a, c, g, or t
  misc_feature (238)..(238): n is a, c, g, or t
  misc_feature (279)..(279): n is a, c, g, or t
  misc_feature (314)..(314): n is a, c, g, or t
  misc_feature (327)..(327): n is a, c, g, or t
  misc_feature (335)..(335): n is a, c, g, or t
  misc_feature (344)..(344): n is a, c, g, or t
  misc_feature (367)..(367): n is a, c, g, or t
ataatnncctcaacntnntttatntaaangcatatttttaccctgaanccccacttattgctcatngnnctaacacagntttantnacatttnaattattctatatagnacnaccttgtaagtcaaagttgtgnggcatttgngctntaaaaaaanaaangatactaaaaatccctgtatnttttantttntctaagtattatgcgaangttgggnngnnanaggnaccgctgccacntaaatagttaacagtgcggcatcaaacttctaccgcatttnctctccacttaccctgatgtaaccggaaaaaaaantggttcagacaanatagaganttataaatnatcatggttgggcctaaagaagncctcccattctgttcttcttgggaagtaacaacatttaccgcaaactcattttaaatgttaacaacatgcactttataaactgacaaaagaaatttaggtttgaaaaagatttcctaagtttatgaaatcctttttatctaaattattacaatatcaaaaattttaaattctgttgaattacatcaagctatgcattttcaggttttccgaacctcaaggcatttacttttagaggatgtgaatttacaacttactttgtggaaatgtgccacttactgatatacagatttacaaattaacagtatatcatttcattatctcctaacatatcaacatggataatgtagtttcaccgcgtgttaataagcttgaactccttaatagtttcagggtatattaagaacttaagtttctatcttgttgaaaattagcttacaaaacattgtagcatgacatgtctctaaaggtaattgtatgtgcatccccatttctgttgttgaataaagaaaaactaaacatca

SEQ ID NO: 357406 - DNA, 1092 bp, Homo Sapiens
gaaaaattagactacagtgttaagaagcaaagatccagcaagctctcatcgtcctgcatagtaagagtcttcagaacgtggaaaggaacttcagtggcttttgctgggttgggctgaaggaaaccccggtgaaacccacacctgtaaagatgcttctcacagtgggacttttatcgcttgggtcctggtcacaatcaatttttctgcaaataattggctttgcttttcttgtggtgagtctctaaggacagtgagttccgttctggggactgtgagttctatgctgtgtacatgtgtgctttggagggtgactggaagcaccatcgttccttcccatactttcaggctcagttaccgcttcagtctggactgttgtgaacgagaatatggaagtcattttccccacattgtttacccagcttgcctgggaaacaccaactggaggattagagtccggctcttcagtttgaactcactttccctttctcttcctgggaccacccagtgattcagagccctgcattctgtaatgagattaatgtcaacagtttcctgcattgaagattattttcccaaagagttcacgatttccttcaggacttctccatcaccccagtgtctggctacctaatgactgattaacaggttgattttctagaaaactcaaattacaatttcttttttttaaaaaagggcaatccagccttttctctgattatccgtcctccccatctcccacttgtcctatgttttagccacacaggctgttgtcatcccctaaaagtgtgcttctgagtctccaggcctttgataaattgttccctcctcctgaaatgccattcaccccatctgccttttggaattctgcccttccctcggaatctagcccaagtcctatctcctctaagaagggacttttctagattgaattaaatttccttccctggccctgcatagtggccgcacccagtagactgtgagtctacttttttcatcttttattcttacaagtgcctggcctcatattttgcacacagtaggcatttgctatactttaattactagtaaaattgagtgataaaataaaacatt

SEQ ID NO: 357407 - DNA, 898 bp, Homo Sapiens
  misc_feature (178)..(178): n is a, c, g, or t
taaaggctttttgtacttctttcatcaaccaaaaaggttaacacgcttttatgtctatcaaagtagcaaaggaaaactactctcacaaacttcagttcaacaaagaagaatcaccattaagattgagatatggaattgactaaaacgaagttctccatacacgttatcaatggagcanctttcctgtgtgctttcaaattaatgaaatcgtgaaagaaaagtcaccattcgccattgtgatgttaatgtgtcattgaagatttcagttactacactaggcactgaagtaccattctggagggctgtccactgtatagaacatttatgaatagaaggtaaggacactctgatgattcccacgaactaggaggattggtggtaggtccttagatagagcttctaaccatgccatgtagagagcactagacacagcaccttttcgtgcaactgggagactcatgacaataatattagctgtgcttgaatgttcctttaataactcatttaacctgatctgccggtatgtcttggtcttataaagttcaagctcattatctgttattcgccatggttcatcttctttcattttatctgcaatatcttgctctttatcatcttcatgaagtctgtatggctcaatgatttcctcaaaagctataatattttctttctttggtttggtattgatatctcctagaaccatgatatcagaaaagtctatccggaacttgctaagcaaagtagccatcgctctccggtcatggtctattctgtttatctttccaccaatgaatactctgatcttacagtctttccattttttcttggtcgtcagaaggtaaggtatcaataaggtcaaacctccatcatcaaaaagccaccagacagcaatagattc

SEQ ID NO: 357408 - DNA, 1793 bp, Homo Sapiens
  misc_feature (1454)..(1454): n is a, c, g, or t
  misc_feature (1595)..(1595): n is a, c, g, or t
atattccttctggcagtttaagaaattagacaacttttgcccaaagaacacaccaagtccaagggggggctctgaaagggtccctttccaccagttctccttcaaaagcaaagctgcaggtcctttttaatcaaaaagcaaaatggtacttgcttctctaactcagaacacatccagaaaggtggttctccggaagttttcccgtgtgttttgtaaaggtgaagtttaacaggcgtgcttgctggcaaagggtccgattgcaaagtttgcactgataggagtcccccaggtcttcctcgggggagaacgtcaccattttttctgacggtgacttggtttgtgctatctgactgttaatctgttcggtggacagtttggataagtcccgtagccggaagcctaagtgtgactctaggtgactgatgtacgtggaaggagtcttgatttgggacgcacaatcgttacaaaagaagacggggtggccagtgtccaagtttttgaggaactttgttccacctgtccttcgaagctggtatttcacgttggccagccagtggctgatggtggtcatggacagcccggtgaacctggagatatgcatccgctcctgggggctcaggtctgacatgatgtacttcccttctgaggtctgccggaggctggcggcaaactgggcctgaaggatcaggagggtgctggggggttccagtttgactggcgggcccttcctcttctgggcgggcgtcgactcctcagcctcctccagagtggccccgtcaatgtcagacttctcggagatgctggaaggagtggaggattttgacgtgtggctctctgtcaagttcttcagcatatcggatatatctgacaaggcattctcgcgtagcggcgagtttgacatgaatgatacgacggcagatgtctttgccgttgtcaccggtgatgaggaggttgccggggctgtggacgtgggtgacagaagcactgaacccaaggagcagcctttgtcactcttcccttttgtcaagtctatgggctggtcgttgttgacgtggtagaaatagcggtcgaggtggtctgccttcttggactgcaggggcggcggggtggccacagcggccttctccgccaggctgttgctcaatcttgaaaaagcatgctcatggggtcccagggcaggcagggagggcttggcggccttgccccaggtgaaatgttcatgactgactgcagggcgctcaaagggttaacaaaaggctgttcaggcgggtggtcggtgatgatggccgtgctgccactcaaactgctggctaggggcttcaccagctccttgccattctccaccggctcagcgagggggctcccatccttgcacccatcccgcggggggctggggctgttctcctggctgcggaagcccccatcgctggatgcctccatcttgatgggttccnccgacttcgctgctacatggggagggagcggcccgcttgggcggggaaagcttcccatccggctccttcatcttctcctccactttggcaactttctcagtgacctttttcaccagctcctccatggcatgaaagtttgtnttgggcatgggggacgtctggctgctgggtggagagaccagggtctggtttttcgtcggggagacaatctcactgttgccaaacatgggtttcaggggcgtgctcttccccgacgagcccagggacaacttcatcatgttgggaagttggtaggcggcatggatgctgggatagcccccccagctaggagtgccgttc

SEQ ID NO: 357409 - DNA, 1515 bp, Homo Sapiens
  misc_feature (69)..(94): n is a, c, g, or t
tattgggttttctgtttgaaattggcccctactcctctccagtgtctgctttttgaatccttctgttcnnnnnnnnnnnnnnnnnnnnnnnnnntccctatgatactggcagtggcaataattttccacccagagagaagcttgtggtccacaatgctcgaagaatgaatttccaagtatttgccagtggaaacggagcagaggctatgacaagagtgatttagtgttgcactttcagagcaattatctactgcagtaataaattgaaaatatcagcaagaaccaggtcgtggacttgtcaatacaagggaaccgggggtactgttactcattctaccctacagtgtataagtcccaatcttaactgcattccaaaacaaaatatgtggaatagtccaggcaatgtcaatctcaatgacacaaatttattgtgaaaatattctctaattgatattaatcattgccacaactcagtttacatttttattatcaaaatatagttggtaacgctccttaacttgggataaggaatattggaatagaagaaagtttaaagaatttgattttactgtaagaaatcactcagcctaagcttggaatgttttagttatattaagtatcttagcctaaagagggacacatggggcatgccgacggttggtgcccacatgaaacactgagggagaaagaggctttgctgagcctcagttattgttgacaaaggatttaaaacaatacagtcttgagacttagtttctgtagatagaaatctcctctctctgtctatcagtcatggtccaaataggagacagaaaccattccagttatttcaacaatatgataaaaagaattactgacacagtaaccaaaaaagcaaaaaacccacacaagaattaaggaagtagcaacttccagaagtgctctaaggatgggtgttgctcacctggtcctgggtctttgagcccatcatgaagctggttctgagcaggtcagaaatggcagctgggatcacatgcagctgtgagagcaaactgctgcagcagtgctgacaggaacgggaaggagcacgccccttcttcctgcagcatggaagcttccctctactggaaaaatccaacaggatgccagctgcgaagcagagatgtttgcagagttctgtcgctggtatcacaaaagcagagctaaaaagagcgggtgtggaactgagagacgagcttcctaactggcacagaccctgttagccactcagcatctgcacacagccttctacacctttgaacttctgtcccaccacaaaagcaattctttgtgcccaaggagatgtaattaattggaagctgttaccctctctcaaaaatgaggacatgtaaagctcaccagtcactgtcaatctctgagctgtggtgactcttctaattcagtttcaatcccatctgaatagatttacagaacaagagaatggtacctaaacactaaagggtaaagtttacttccagcaaaaattgcatgaaataa

SEQ ID NO: 357410 - DNA, 1249 bp, Homo Sapiens
  misc_feature (184)..(209): n is a, c, g, or t
  misc_feature (770)..(809): n is a, c, g, or t
gctgatattttcaatttattactgcagtagataattgctctgaaagtgcaacactaaatcactcttgtcatagcctctgctccgtttccactggcaaatacttggaaattcattcttcgagcattgtggaccacaagcttctctctgggtggaaaattattgccactgccagtatcatagggannnnnnnnnnnnnnnnnnnnnnnnnngaacagaaggattcaaaaagcagacactggagaggagtaggggccaatttcaaacagaaaacccagcaaaggagttagaggagaacagctccaactgtgcaaagtggagaccgactctccactctccagtggcaacctcacattctggtactgtgcaaagcggagaccgactcttcactctcctcacattctggttacgttggccctggtagacctttatccctttgcctctgtaacggtgataccataatcataaccgtgccacatctcagcatatcagaggcccatggagtaaaaatagatgaaaagacctctcaagctagtttggaaaaatagagggtttagataaactgactatttaatctcccacttaaacctgttaggcagaatatctgggagaacacctgggcgtaagatgctgcctaacaggcataaccccttgctctaaccagcctagggccagtatgtttttgatggaaaagacaactgtcaaatactacaacgacaaaaaggaagggaaaacatgagcagctctagaaaacgtaagattcaaaactctgnnnnnnnnnnnnnnnnnnnnnnnnnnnnnnnnnnnnnnnnctagccaggaggcctgaccactcactcactcctaagcacactctacacatacacactgactttcccacacacacaacagtcaggtagatgcccaaaggagggcaaatccaaatatctgctctctttggaattttcacggcaaatctgaatttaggcaaaagtgaagacctccctggggtcttcaaagacagcctttgctctccatgtagccaatggtgctcttatatttgccgagcccttcacaactgtctggacaccagaatgcactcttcatattcctggagtttaaatcactgctagatcttcttatctgatctaacttgccctgtaatagaagcacctcccttttggcccctgtactccccgttctttcagaaaaaaagcatccccaaaacagtggtaattagagggtgttcaggaatgaaaagtaggaagagtgt

SEQ ID NO: 357411 - DNA, 843 bp, Homo Sapiens
  misc_feature (625)..(634): n is a, c, g, or t
aagttgaggcacctggggcagagaaaaaaagcatcgccaagcggtttctgggtcatctactgacgaaaatgtcttcccatcagcccttgcgctggtccccagggaccctggcatccgtcgttggcgcccagggtgcgcgtcgggccactaggggtaccccaactcggacagaaggcccatgagttgaatttgaagtttgtgggaatagaggtgaggcaccaggggcaggaaaaaaacaggagacctcgcctcagacaagtggggcctgggtcccccatggatgaaagtgccttcccattatgctgtaccctgggcagagtggacagtgacgaccctggttcgagcccagggtgcgcttcgggaccgcttgcggttaccagaaagcgaacaaatggtccatgagcggaaggtgaggcacctgaggcagagaaagtaaagaaacgcgccgccgagaagcagtgcctgggtccctcacggaggaaattgtcttctccttagcccgttcgcttggcactgaggtccctggcgtccctggtttgatcccagggtacgcctcgggccactagtgttaccccaaggtgggcagaaagcccataaggggaaggcgaggcacctggggcagagnnnnnnnnnncttcgccgcagagaagcgcggcctgattccccacggacgaaagtgtcttcccatcagtccctgcactgggacccggggaccctggtgtccctggttcgagctcagggtgtgcctcagccgctacgtgcaccccaaggggagctttgggagcacaaagcccatgagggaaggtgagttttgagggaggagtggtgaggcacctgtcacag

SEQ ID NO: 357412 - DNA, 770 bp, Homo Sapiens
gctcttttcagcttttgtagaagagattcagaatggtactctaatcaaaaataaagttttgtagtgggaccagaaattacttacctgacatacaaccgccattccccctcatcctgctggggttgaaagttccagacctgctgtcgaggccttgtgtttgtcagacacccagtgtcctcctgcaaggacgcaactgtgagctgaggtgtgagcctaggagcccaggacccctgaccccggccgctgctgccagcctcagaaaggcacccaggtgtgcaggggagcacacagggcccggcagcccccaggaatcaaggatagggctaaggttttcaccttaactgtgaaggcaggaggaataggtgactgcttcctcccgcccttcacagaactgattctcacacactgtcccttcagtccagggggccggggctcaggagccatgacctggtgtctcctgcccaccctggtcccaggtaaatgtgaatggagacaggtatgagaggctgtcctcgtctttgattcccccccaaccccacctcgggcctcacgacggtgctacctaagaaagtcttccctcccaccccccgctagcctggtcagtggtcagcaaattggaagaggatccgatgggagtgtaaatgtgagacacaatgtcttgattatacctgtttgtggtttagctcttgtatttaaacaaggaaataaacttgaaaattatttgtcatcataaaaacgaaacaaattaaaatatttattgccaggcaaaa

SEQ ID NO: 357413 - DNA, 1536 bp, Homo Sapiens
  misc_feature (186)..(200): n is a, c, g, or t
  misc_feature (203)..(338): n is a, c, g, or t
  misc_feature (350)..(363): n is a, c, g, or t
  misc_feature (563)..(577): n is a, c, g, or t
  misc_feature (746)..(763): n is a, c, g, or t
  misc_feature (928)..(1375): n is a, c, g, or t
  misc_feature (1467)..(1467): n is a, c, g, or t
  misc_feature (1480)..(1480): n is a, c, g, or t
  misc_feature (1483)..(1483): n is a, c, g, or t
caaatgtatacctttctcttaaagggccaaaggaaatttttaattttggggcaccttgagtaaaatggttaaaacttgccctaccaaaaattaaattgggtggaggccgggcaaattcccctaaggtcagcagttttagacaagcctggccaaccattatgaaaccctgtttctcctaaaaattcnnnnnnnnnnnnnnnttnnnnnnnnnnnnnnnnnnnnnnnnnnnnnnnnnnnnnnnnnnnnnnnnnnnnnnnnnnnnnnnnnnnnnnnnnnnnnnnnnnnnnnnnnnnnnnnnnnnnnnnnnnnnnnnnnnnnnnnnnnnnnnnnnnnnnnnngactccatctcnnnnnnnnnnnnnnttgtgttgcctcatacgaaatgtatttggttttgttggagagtgtcagactgatctggaagtgaaacacagtttatgtacagggaaaaggattttattatccttaggaatgtcatccaagacgtagagcttgaatgtgacgttatttaaaaacaacaacaaagaaggcagagccaggatataactagaaaaaggatgtcnnnnnnnnnnnnnnnactccccctctaaacactgctgctgccttaattttagaaagcagcttactagtttacccttgtggtataaagtattataaattgttgtgaatttgaagaatccgtctactgtattattgctaaatattttgtttatactaagggacaattattttaagaccatggattnnnnnnnnnnnnnnnnnnctctgcttctgcaggggatgatattggtgagttgccaaagaagcaatacagcatatctgcttttgccttctgttgtttatcttacctgcagatattaagaatgtatgcattatgtaaaatgcccaactatatatttttgttgagtctcttaattaaagacttgtnnnnnnnnnnnnnnnnnnnnnnnnnnnnnnnnnnnnnnnnnnnnnnnnnnnnnnnnnnnnnnnnnnnnnnnnnnnnnnnnnnnnnnnnnnnnnnnnnnnnnnnnnnnnnnnnnnnnnnnnnnnnnnnnnnnnnnnnnnnnnnnnnnnnnnnnnnnnnnnnnnnnnnnnnnnnnnnnnnnnnnnnnnnnnnnnnnnnnnnnnnnnnnnnnnnnnnnnnnnnnnnnnnnnnnnnnnnnnnnnnnnnnnnnnnnnnnnnnnnnnnnnnnnnnnnnnnnnnnnnnnnnnnnnnnnnnnnnnnnnnnnnnnnnnnnnnnnnnnnnnnnnnnnnnnnnnnnnnnnnnnnnnnnnnnnnnnnnnnnnnnnnnnnnnnnnnnnnnnnnnnnnnnnnnnnnnnnnnnnnnnnnnnnnnnnnnnnnnnnnnnnnnnnnnnnnnnnnnnnnnnnnnnnntgggtcgaggtgccgaaagactaaatcgaaccctaagggaagccccgattagagctgacggggaagccggcgaacttggcagagggaaggangaagcgaaggacngcnctagggccttgcaatttacggtaaactggcgtaacacaaaccgcggcttatgg

SEQ ID NO: 357414 - DNA, 902 bp, Homo Sapiens
  misc_feature (677)..(737): n is a, c, g, or t
tgtttcaccggtaaggcccttgacccaaaagccccctttcccaaagttcccaatcccgttggccctcagggtcagctttggtgctaaacattcaggcatccctctgactgagatccccactatgtttttcttgagaagcagctatgcataatccctcttcaacccagtagtcttgaaattttgcaggcctctcctggaaaggaggaaatgacttctctgactttgtatgatgcttattggtggatgaatgggcaagggaaaaaatgaaggaacaagtgaatgaacagtatgggagtatgagaaaaggtataaattgggtatagttgagaaaaggattcaaattgatctttggttcgagagacaatttcatctttctgatgaatttaaagtgtagtctttgaaccagctgggcttaattatgtaaagttttgagcctgagataagcacacaatcacaaaacctacccaaacaagttttttgtttcacttcatctcttataaaacaatgttctaaagtaagtgatagggatgctcatcattctgctacctattatcacaatgaaaacaatcataaatagtacacaggaaaggtgagaaatagcggatagttcttatttcatagtactgtatatggaaataaaccaaatttgctcatagagatactattttattacctcnnnnnnnnnnnnnnnnnnnnnnnnnnnnnnnnnnnnnnnnnnnnnnnnnnnnnnnnnnnnnagaacatcacagcaatttagaatactaaagagcatagctttaaaatgatagtgctgagaactccccacctctaccccaccacctgtaggcttctttgacaacttacaaatgttctctagtttgtatctagaatcacttatatctttcaaataaaccaactttgtg

SEQ ID NO: 357415 - DNA, 1049 bp, Homo Sapiens
  misc_feature (11)..(11): n is a, c, g, or t
  misc_feature (15)..(16): n is a, c, g, or t
  misc_feature (23)..(23): n is a, c, g, or t
  misc_feature (28)..(28): n is a, c, g, or t
  misc_feature (30)..(30): n is a, c, g, or t
  misc_feature (35)..(35): n is a, c, g, or t
  misc_feature (44)..(44): n is a, c, g, or t
  misc_feature (51)..(51): n is a, c, g, or t
  misc_feature (53)..(53): n is a, c, g, or t
  misc_feature (65)..(65): n is a, c, g, or t
  misc_feature (67)..(67): n is a, c, g, or t
  misc_feature (71)..(71): n is a, c, g, or t
  misc_feature (82)..(82): n is a, c, g, or t
  misc_feature (84)..(84): n is a, c, g, or t
  misc_feature (114)..(114): n is a, c, g, or t
  misc_feature (117)..(117): n is a, c, g, or t
  misc_feature (120)..(120): n is a, c, g, or t
  misc_feature (176)..(176): n is a, c, g, or t
  misc_feature (198)..(198): n is a, c, g, or t
  misc_feature (793)..(914): n is a, c, g, or t
  misc_feature (991)..(991): n is a, c, g, or t
  misc_feature (1018)..(1018): n is a, c, g, or t
  misc_feature (1023)..(1023): n is a, c, g, or t
  misc_feature (1032)..(1033): n is a, c, g, or t
  misc_feature (1035)..(1035): n is a, c, g, or t
gcccccgcggnacgnnccccagnatccncngcccncgggcgctnccacctnantatgtcacccancngccncggtgcagtgntncggcctcaggcgactatgggcaccaagctncgnccngcaggtgcacccacctccttctccaatcagatgtagtctgttgagtgaccgccgancggtgcggccaaggaggtacangaaggagacgagcgggtcagtgaaccaataagagtcaggggtagagagtacgtaaggcgtttactggggcaagtaaggactgaagtttgaaggagccaatcaagaggcagaactacctgctaagagctgaaaaactagctaatgaatggagaaaagaagaatggtgcttcaagatggacagaatgaagagccaatgggagggaggtagaagggcaactccgcggaaaggcagggggagagaagcagagcaaccaataaagggagggaatatcgggggacttgcgcagtggcgaatcagcggagcgcaagaaccacgaaagcaacgagaaggtgggtcttagaagtgactgataagccaataggtgataaggccaatagatggtcagggtaaatgggcgtggatcttaaaggtcagacaagctcaccaatccgggaggaggggataaatctgccgcctctccccaacgctggaggggagggaagtagtgtggaatttcaaaggaggaagagggatagggtggggttctggaaaggtttgccggccttcttgctgggccttaaaagagaagtgagggtcggggcttggtggctcatnnnnnnnnnnnnnnnnnnnnnnnnnnnnnnnnnnnnnnnnnnnnnnnnnnnnnnnnnnnnnnnnnnnnnnnnnnnnnnnnnnnnnnnnnnnnnnnnnnnnnnnnnnnnnnnnnnnnnnnnnncgtggtggcatgcatctgtggacccatctactcaggaggctgaggtgggaggatcacttaagcccacggaggttgangctgccgtgagctacgaccctgccacngcacnccaccctgnncnccagaccgcacctt

SEQ ID NO: 357416 - DNA, 995 bp, Homo Sapiens
ggagccaggctgagcgtcggcgccggggttcggtggcctctagtgagatctggaggatccaaggattctgtagctacaatgttgtcaagactttttcgaatgcatggcctctttgtggcctcccatccctgggaagtcatagtggggacagtgacactgaccatctgcatgatgtccatgaacatgtttactggtaacaataagatctgtggttggaattatgaatgtccaaagtttgaagaggatgttttgagcagtgacattataattctgacaataacacgatgcatagccatcctgtatatttacttccagttccagaatttacgtcaacttggatcaaaatatattttgggtattgctggccttttcacaattttctcaagttttgtattcagtacagttgtcattcacttcttagacaaagaattgacaggcttgaatgaagctttgccctttttcctacttttgattgacctttccagagcaagcacattagcaaagtttgccctcagttccaactcacaggatgaagtaagggaaaatattgctcgtggaatggcaattttaggtcctacgtttaccctcgatgctcttgttgaatgtcttgtgattggagttggtaccaagtcaggggtacgtcagcttgaaattaagtgctgctttggctgcatgtcagttcttgccaactacttcgtgttcatgactttcttcccagcttgtgtgtccttggtattagagctttctcgggaaagccgcgagggtcgtccaatttggcagctcagccattttgcccgagttttagaagaagaagaaaataagccgaatcctgtaactcagagggtcaagatgattatgtctctaggcttggttcttgttcatgctcacagtcgctggatagctgatccttctcctcaaaacagtacagcagatacttctaaggtttcattaggactggatgaaaatgtgtccaagagaattgaaccaagtgtttc

SEQ ID NO: 357417 - DNA, 746 bp, Homo Sapiens
  misc_feature (62)..(81): n is a, c, g, or t
  misc_feature (83)..(83): n is a, c, g, or t
  misc_feature (91)..(91): n is a, c, g, or t
  misc_feature (94)..(94): n is a, c, g, or t
  misc_feature (124)..(124): n is a, c, g, or t
  misc_feature (683)..(706): n is a, c, g, or t
tttttggcgctcggtccggtcgcgtccgacacccggtgggactcagaaggcagtggagcccnnnnnnnnnnnnnnnnnnnncncgggggcnacncgcgggaacaacgcgagtcggcgcgcggcnacgaagaataatcatgggccagactgggaagaaatctgagaagggaccagtttgttggcggaagcgtgtaaaatcagagtacatgcgactgagacagctcaagaggttcagacgagctgatgaagtaaagagtatgtttagttccaatcgtcagaaaattttggaaagaacggaaatcttaaaccaagaatggaaacagcgaaggatacagcctgtgcacatcctgacttctgtgagctcattgcgcgggactagggagtgttcggtgaccagtgacttggattttccaacacaagtcatcccattaaagactctgaatgcagttgcttcagtacccataatgtattcttggtctcccctacagcagaattttatggtggaagatgaaactgttttacataacattccttatatgggagatgaagttttagatcaggatggtactttcattgaagaactaataaaaaattatgatgggaaagtacacggggatagagaatgtgcggtttataaatgatgaaatttttgtggagttggtgaatgcccttggtcaatatannnnnnnnnnnnnnnnnnnnnnnngagacgatcctgaagaaagagaagaaaagcagaaagatct

SEQ ID NO: 357418 - DNA, 1106 bp, Homo Sapiens
  misc_feature (1)..(1): n is a, c, g, or t
  misc_feature (4)..(4): n is a, c, g, or t
  misc_feature (7)..(8): n is a, c, g, or t
  misc_feature (12)..(12): n is a, c, g, or t
  misc_feature (15)..(16): n is a, c, g, or t
  misc_feature (18)..(18): n is a, c, g, or t
  misc_feature (21)..(21): n is a, c, g, or t
  misc_feature (25)..(25): n is a, c, g, or t
  misc_feature (29)..(29): n is a, c, g, or t
  misc_feature (32)..(33): n is a, c, g, or t
  misc_feature (41)..(41): n is a, c, g, or t
  misc_feature (46)..(47): n is a, c, g, or t
  misc_feature (58)..(58): n is a, c, g, or t
  misc_feature (63)..(65): n is a, c, g, or t
  misc_feature (78)..(80): n is a, c, g, or t
  misc_feature (82)..(83): n is a, c, g, or t
  misc_feature (98)..(98): n is a, c, g, or t
  misc_feature (219)..(227): n is a, c, g, or t
  misc_feature (306)..(306): n is a, c, g, or t
  misc_feature (349)..(349): n is a, c, g, or t
  misc_feature (404)..(404): n is a, c, g, or t
  misc_feature (406)..(406): n is a, c, g, or t
  misc_feature (414)..(414): n is a, c, g, or t
  misc_feature (426)..(426): n is a, c, g, or t
  misc_feature (456)..(456): n is a, c, g, or t
  misc_feature (510)..(510): n is a, c, g, or t
  misc_feature (540)..(540): n is a, c, g, or t
  misc_feature (542)..(542): n is a, c, g, or t
  misc_feature (560)..(560): n is a, c, g, or t
  misc_feature (595)..(595): n is a, c, g, or t
  misc_feature (612)..(612): n is a, c, g, or t
  misc_feature (626)..(626): n is a, c, g, or t
  misc_feature (628)..(628): n is a, c, g, or t
  misc_feature (633)..(633): n is a, c, g, or t
  misc_feature (640)..(641): n is a, c, g, or t
nccnccnnaaanatnncnttntttnaaantanntaaaaccncaaanntttaaatcatnacacnnntcttataatgtannncnnaaaacattctaatcntatttttgaatacattaattttaaacaatatcttctatattacatttttaaaacatcaatacattcacatattcttcatccttaagatttcttttccaggaaaaccattaacacatcttcnnnnnnnnnttttccgtaagaaattaagacctataaaaaaaatcaaataaccaaaggcactgaacttcttaccttaaattctaagcangagagttgtataaacagtttatgctaataataaatcctacctnataagtttctacacaaaaattttaacttgcaacaagaaaaagaacatttgaccangngattaaangaattcaaaatnacatagtatttaatacttagaaacattctncatgaaaataccttaaaaataacaagaaaatgcctataaggaacatctgaacangtaaacatttccttcctattaatgtttatnanattcataatatgttctancccattttatttatgtacctacacatacttacttngtttaatgtattatctntctttagttctttntnattcnagtactnnatatatattggttggttacgaagatgaggtgtcacagcagaatagtaattaaccatagtaatagctgcttcctcggttgctagttccaaaaatgcctgattttttcctttcagcataaggatgttggtcaccttaccaaaaggtaagcctaaagcaataacttcagtttctgttacttccccaggtaattttcgaatatgaagtacacgagaaggagcaccatccattttatcttctcctttaaattttttactatcattaccattggctgtaactaccatgctgctcatattagagttcggactactgagaacactgcctgagagtagttcgtcagatcctctcttcacgccaactgcaacctcagtgacgattccgtccattgccgaaccggacaaagcttcgctcacaagaaccgagccacgcagccagcgagccacacaagcggcgagaaaatggcccgct

SEQ ID NO: 357419 - DNA, 1209 bp, Homo Sapiens
  misc_feature (643)..(691): n is a, c, g, or t
  misc_feature (738)..(796): n is a, c, g, or t
  misc_feature (958)..(983): n is a, c, g, or t
  misc_feature (1045)..(1082): n is a, c, g, or t
ggcctgggtggcgaattcggccgagggccgtctggggagcgcgagcccgcgggtggcgcgcggcgcatggtggcggctcctttcggagcgcagccgaacctctgacccggactccgttacccctgcccggcgcgccccggcggccggctggaggcagaaacagcagaagcgttaacagcagcagcggcggcggctgctccgccgccgtctccgcgggagcatggagtgcgccctggacgcccagagcctgatcagcatctccctgcgcaagatccacagctcccgaacccagcgcggcggcatcaagctgcacaagaacctcctggtgtcctacgtgctccgcaacgcgcgccagctctacctgagcgagcgctaccgccgagctctaccggcgccagcagcaacagccacagcagcacccgccccaccaccagcatgagcacctaccgtacgcggcgccgggcatgccagccatcgcggccgagttcagccccgctccacttgccggcgtgagatctctgacatgaacttgatgagccggatcattctcgcctgcacctgaccatgtcctctacacacgcagccactctcgcctaattacctttgccgcgtgaccgacccccggaggccgagccgttacttnnnnnnnnnnnnnnnnnnnnnnnnnnnnnnnnnnnnnnnnnnnnnnnnngtatcaccggcctgtaccgcacttcctcccgctgatttcgattaatnnnnnnnnnnnnnnnnnnnnnnnnnnnnnnnnnnnnnnnnnnnnnnnnnnnnnnnnnnnaaccttaaacccacacacacgcccgaagggcacccacgcccacgtaccccaatcaatactctagtaagcaagctccgccgtctatttcccctcttttatcgtttgtctgacaagacacccgcgttctccacactgcaaaccagcccgagagagattatccgnnnnnnnnnnnnnnnnnnnnnnnnnntatcgagtggacccatattacactgcccctaatccctattgcgtttcttttatcataaatannnnnnnnnnnnnnnnnnnnnnnnnnnnnnnnnnnnnnacaagctcgccgccgcctccattgtccccacataggcccgcccccccatagcgccgcggtaacgctcataacccgtatatcccgcgcaacaaactcctccactcctgctctatgaacctgtcaccag

SEQ ID NO: 357420 - DNA, 1085 bp, Homo Sapiens
  misc_feature (1008)..(1008): n is a, c, g, or t
  misc_feature (1013)..(1013): n is a, c, g, or t
  misc_feature (1047)..(1047): n is a, c, g, or t
  misc_feature (1055)..(1055): n is a, c, g, or t
  misc_feature (1062)..(1062): n is a, c, g, or t
  misc_feature (1066)..(1066): n is a, c, g, or t
  misc_feature (1076)..(1076): n is a, c, g, or t
  misc_feature (1078)..(1078): n is a, c, g, or t
  misc_feature (1082)..(1082): n is a, c, g, or t
gattgagactcgtcgcaccgaagccgccgccaccaccgcgcctccgcctcggccgccgccgcagctgctcctggtccccgtccctttgccgccctcgtcaggcccagctctcctgcgccgccgcctcccgccgcgccccgccatgccgctctactccgttactgtaaaatggggaaaggagaaatttgaaggtgtagaattgaatacagatgaacctccaatggtattcaaggctcagctgtttgcgttgactggagtccagcctgccagacagaaagttatggtgaaaggaggaacgctaaaggatgatgattggggaaacatcaaaataaaaaatggaatgactctactaatgatggggtcagcagatgctcttccagaagaaccctcagccaaaactgtcttcgtagaagacatgacagaagaacagttagcatctgctatggagttaccatgtggattgacaaaccttggtaacacttgttacatgaatgccacagttcagtgtattcgttctgtgcctgaactcaaagatgcccttaaaaggtatgcaggtgccttgagagcttcaggggaaatggcttcagcgcagtatattactgcagcccttagagatttgtttgattccatggataaaacttcttccagtattccacctattattctactgcagtttttgcacatggctttcccacagtttgccgagaaaggtgaacaaggacagtatcttcaacaggatgctaatgaatggtggatacaaatgatgcgagtattgcaacagaaattggaagcaatagaggatgattctgttaaagagacagactcctcatctgcatcggcagctgacaccttctaaaaagaaaagtttaatcagatcagttcttcaggtgttgagtttgaaactaccatgaaatgtacagaatctgaagaagaagaagtcaccaaaggaaaggaaaatcaacttcagcttagctgttttatcaatcagggaagtcaagtatctttttncaggncttaaattgcgacttcagggaagaaacacccaanagtctccnacggtgnaaanaaaagccttntntatnaaa

SEQ ID NO: 357421 - DNA, 1553 bp, Homo Sapiens
  misc_feature (1257)..(1257): n is a, c, g, or t
cggtccggaattcccgggatcttggctggtgtatttgtacatctctcgggacgtgaaattgacagtgaaaagtatggcagatgagcaagaaatcatgtgcaaattggaaagcattaaagagatcaggaacaagaccctgcagatggagaagatcaaggctcgtttgaaggctgagtttgaggcacttgagtcagaggaaaggcacctgaaggaatacaagcaggagatggaccttctgctacaggagaagatggcccatgtggaggaactccgactgatccacgctgacatcaatgtgatggaaaacactatcaaacaatctgagaatgacctaaacaagctgctagagtctacaaggaggctgcatgatgagtataagccactgaaagaacatgtggatgccctgcgcatgactctgggcctgcagaggctccctgacttgtgtgaagaagaggagaagctttccttggattactttgagaagcagaaagcagaatggcagacagaacctcaggagccccccatccctgagtccctggccgctgcagccgctgccgcccaacagctccaagtggctaggaagcaggatactcggcagacggccaccttcaggcagcagcccccacctatgaaggcctgcttgtcatgtcaccagcaaattcaccggaatgcacctatatgccctctttgcaaggccaagagtcggtcccggaaccccaaaaagccgaaacggaagcaggatgaataaagaaagggagagcacatgaagctttgctaattataacccctcaccttgaccagagtcattgatgtcctgatgtgaaacaacccttgcccaaccccacgaagtctcctatttaatgtgatgggaagcacaacccctctctcactttgctcctatttctttctgctcttgggatttctggtttaggaagagatgtggttcaggtgctaaacagtgtgtctgatgatcccttctctcccactcacatttcaacccctgcccttgtttggagctaagggaagggcaaaaggctcagatatgattctctatctcttgtgcctgaggcctggagcctaaggagctgtagggtctgaggggcaggggaggcccatatcttgtttcaggtaaaggacccagtatttcccctccttgtacttttgccttaggttctcaagggacaatagtcttcatgttgggattctccaacaggctgggtgcatgtatccccctactcctacccttcatctcatccnttaagggcccagaggtaggcttggacaagccctcccttttcataatcatttggggaggcatgggctgtaattcctttaagctttctccacttctgtctcccacatatactaaaattcctagggtactaggcctgttgtgtctttgggaatctttaagatcaaatgaaccttttcccccaataatcctagtccttttgccaaatttctcaattagaaaggattttccacacgtggaaaattcagcggcagcccagaaacaaaactcctaccatcctccgtggcctttaaccctaacg

SEQ ID NO: 357422 - DNA, 1736 bp, Homo Sapiens
  misc_feature (321)..(321): n is a, c, g, or t
  misc_feature (1601)..(1601): n is a, c, g, or t
ggccggcgcgcgcacgccgcgagccgctggcgctcgggctccgctcggatcccatgcaacagccacgatgtgaagcggggcagagccgggggagcccagcccagccagcctccagacgttgccccatctgacgctcggctcgaggcctctctgtgagggaccggggggccatccccctccagggcggagatcggaggtcgctgccaagcatggcgcccacctggggccctggcatggtgtctgtggttggtcccatgggcctccttgtggtcctgctcgttggaggctgtgcagcagaagagccccccaggtttatcaaanaacccaaggaccagatcggcgtgtcggggggtgtggcctctttcgtgtgtcaggccacgggtgaccccaagccacgagtgacctggaacaagaagggcaagaaggtcaactctcagcgctttgagacgattgagtttgatgagagtgcaggggcagtgctgaggatccagccgctgaggacaccgcgggatgaaaacgtgtacgagtgtgtggcccagaactcggttggggagatcacagtccatgccaagcttactgtcctccgagaggaccagctgccctctggcttccccaacatcgacatgggcccacagttgaaggtggtggagcggacacggacagccaccatgctctgtgcagccagcggcaaccctgaccctgagatcacctggttcaaggacttcctgcctgtggatcctagtgccagcaatggacgcatcaaacagctgcgatcaggagccctgcagattgaaagcagtgaggaaaccgaccaaggcaaatatgagtgtgtggccaccaacagcgccggcgtgcgctactcctcacctgccaacctctacgtgcgagtccgccgcgtggccccgcgcttctccatcctgcccatgagccacgagatcatgccagggggcaacgtgaacatcacctgcgtggccgtgggctcgcccatgccatacgtgaagtggatgcagggggccgaggacctgacccccgaggatgacatgcccgtgggtcggaacgtgctggaactcacagatgtcaaggactcggccaactacacctgcgtggccatgtccagcctgggcgtcattgaggcggttgctcagatcacggtgaaatctctccccaaagctcccgggactcccatggtgactgagaacacagccaccagcatcaccatcacgtgggactcgggcaacccagatcctgtgtcctattacgtcatcgaatataaatccaagagccaagacgggccgtatcagattaaagaggacatcaccaccacacgttacagcatcggcggcctgagccccaactcggagtacgagatctgggtgtcggccgtcaactccatcggccaggggccccccagcgagtccgtggtcacccgcacaggcgagcaggccccggccagcgcgccgcggaacgtgcaagcccggatgctcagcgcgaccaccatgattgtgcagtgggaggagccggtggagcccaacggcctgatccgcggctaccgcgtctactacaccatgggacccggagcacccccgggggcaacttggcanaagcaacaacgtgggacgacaggcctggctgaccaaccgtggggcaagcctgcttggagggacgagaacctacaccggggcgggtggctcggccttaaccctccggcgggggacagggcccctcttggagaccat

SEQ ID NO: 357423 - DNA, 898 bp, Homo Sapiens
  misc_feature (548)..(602): n is a, c, g, or t
  misc_feature (741)..(826): n is a, c, g, or t
ggctttgagatccagacttagggccttcaccaccgggaggagcagcgtgtggaaatggtgacctttgtctgccgagttcatgagtctagccctgcccagctggctgggctcacaccaggggacaccatcgccagcgtcaatggcctgaatgtggaaggcatccggcatcgagagattgtggacatcattaaggcgtcaggcaatgttctcagactggaaactctatatgggacatcaattcggaaggcagaactggaggctcgtctgcagtacctgaagcaaaccctgtatgagaagtggggagagtacaggtccctaatggtgcaggagcagcggctggtgcatggcctggtggtgaaggaccccagcatctacgacacgctggagtcggtgcgctcctgcctctacggcgcgggcctgctcccgggctcgctgcccttcgggcctctgctcgccgtgcccgggcgtccccgcggaggcgcccgacgggccaggggcgacgccgacgacgccgtctaccacacgtgcttcttcggggactccgagcnnnnnnnnnnnnnnnnnnnnnnnnnnnnnnnnnnnnnnnnnnnnnnnnnnnnnnntgagacccctgccgtggggccgggccctgggccgcgggccgcgctgagccgcagcgccagtgtgcggtgcgcgggccctggcgggggcggaagccgggggcgcccccggggctcccctggactgtaggtcccgaaccannnnnnnnnnnnnnnnnnnnnnnnnnnnnnnnnnnnnnnnnnnnnnnnnnnnnnnnnnnnnnnnnnnnnnnnnnnnnnnnnnnnnngggaactgcaaaccgcccccctgtgatggacgggagataagtcccgcccccaaggggccgttgaacacccat

SEQ ID NO: 357424 - DNA, 897 bp, Homo Sapiens
  misc_feature (835)..(835): n is a, c, g, or t
  misc_feature (876)..(876): n is a, c, g, or t
ggtgaggctgagaacttgaccacttccttttcatacacatccagaaggcggacccggagctggtagacgcagccgcagttctctcgagcgccccaccagtcagccacacagatctcaatctgggcgctgtccagcagctcctgccacaccccttccatcaccaggtccacaagctgcctcttggagcaccattcgaaagaggtcacgaagcaggtctgcgaaggagccccaggcaccggtgttaggttcttttctatggcccagccgttcccgccatgctccacctcccagcctctgaagccctgctctccgcaggagttgaagatgagattgcggccgaagggcgcgcgcagacagtagcgcgccagggcgcacagcgggaactcctccttgtcttcgttgctgggcaggcagcgttgagccactgcgtagagtgcgcggccctcggcgctgcggtcgcgggccagctgcagcagccacacagtgggcccgtccactatgtcgcgccaggcgcggcacactgggcggcatcgcgtgaccaaggagcgtggcggcacgtggctcagcacctgcaccagcagctccgggggcagcgcgtccagggccagggatgggtccgccggcagccgtcgccgcgatagccgggcgcccatctccagcagccagagtcctggcgggctgctcggaggcggcagcggcgggctaagcttccctttcccactttgttctgggaggcagtcgaggggctccccgtgatcggcgtggcccagggggccccgggaccggcggtctgggcggtcggtcctctcccggggcgtggcggctgcagcccagnccgggggcggcgactctgagatccagcgggcgggggcgggnggccgcccctcctccggctgc

SEQ ID NO: 357425 - DNA, 978 bp, Homo Sapiens
  misc_feature (926)..(926): n is a, c, g, or t
cggtccggaattcccgggatctcgggagcacatcagaggcttagaggcgagtgggaagggactcagacagtgcaggacgagaaacgcccgcggcaccaaagcccctcagagcgtcgcccccgcctctagttctagaaagtcagtttcccggcactggcaccccggaacctcaggggctgccgagctgggggggcgctcaagctgcgaggatccgggctgcccgcgagacgaggagcgggcgcccaggatggggtgcatgaagtccaagttcctccaggtcggaggcaatacattctcaaaaactgaaaccagcgccagcccacactgtcctgtgtacgtgccggatcccacatccaccatcaagccggggcctaatagccacaacagcaacacaccaggaatcagggaggcaggctctgaggacatcatcgtggttgccctgtatgattacgaggccattcaccacgaagacctcagcttccagaagggggaccagatggtggtcctagaggaatccggggagtggtggaaggctcgatccctggccacccggaaggagggctacatcccaagcaactatgtcgcccgcgttgactctctggagacagaggagtggtttttcaagggcatcagccggaaggacgcagagcgccaactgctggctcccggcaacatgctgggctccttcatgatccgggatagcgagaccactaaaggaagctactctttgtccgtgcgagactacgaccctcggcagggagatacccgtgaaacattacaagatccggaccctgggacaacgggggcttctacatatccccccgaagcaccttcagcactctgcaggagctggtggaccactacaaaaagggggaacgacgggctctgccagaaacggtcggggccctgcatgtcttccaaacccnaaagccttaggagaaagatgcctgggagatcctcgggaatccctcaagctgg

SEQ ID NO: 357426 - DNA, 982 bp, Homo Sapiens
  misc_feature (29)..(29): n is a, c, g, or t
ccacgctctgagacgtctccagggatgtnttcccagccagtccagtctccacagggttctgttgctgggagacagttcatgagggcccggcccccccaggaggccaacgttattccagcgcaggtccagctgctggagggtggtgttgcccttcagggctagggccagctcctccgcgcccttgtgactgatctggttgttgcggaggtccagccgctgcagggcgccgttggccgcccaggcccccgcagaaggtggcgaaggcatcgtcccacgtgcccaggctgttccactccagcgtgaggctctgaatggacttgttctgttggaggagttttcccagagcctcggcccctgcagcccgaaggttgttgccctttaagtccagaaagcgcagcacggtgttggcacacaggcctcggagcagcagtgtggccccttcctcgctgagcatgcagtcactcaggaccagctccgtgcacagcgtctccctcggcagcagcttgcccagggccctgcaggtctccaccgtcaggctttgcgtggccaggtccagccggcccctgggaagctggtgcagctgctgcaggacagcctcctggggctcggccccactctccctgcacaggcggctgtaggagcgccggaactcctccatgacccgcggggccggcagggcctcctccgcatgctcccgcagctgctgaaagggagccgcgcggtgcggagcagtcccagcgccgggtacaggagacggggcctccgccgacccgggcggagagcaatccgagtgggctccgcgggcgggaggtcctgggagcgcggggctgggcggtagtcaaggtccgctttgggctggggccccgcagtgcttggggaccacccgtgcaggaagcaggcaggtgcgtcgcgcgcccccacccagccctgccccgcctgcagccccgacccccgccctcgcgatcccgggaattccggaccg

SEQ ID NO: 357427 - DNA, 1055 bp, Homo Sapiens
gcccgggcgcctcctggggggtggggaaacggtttcgtgaggagaatttgagttaaaattataagacctaattatgagtgatcaaattaaattcattatggacagtctcaataaggagccctttaggaagaactataatttaatcacgtttgattccttggagccaatgcaactattacaagttctcagtgatgttctggctgagattgacccaaagcaacttgtggatatcagagaggagatgccagagcagacagccaaacgaatgttgagccttcttggtattcttaagtacaaaccttcaggaaatgccacagatatgagtacttttcgtcagggtttggtgattggaagtaaacctgtaatttacccagtgctccactggcttcttcagaggactaatgaactgaagaaaagagcatatttagctcgttttttaataaaacttgaggtaccaagtgagtttcttcaggatgaaactgtggctgacaccaataaacagtatgaagagttaatggaagcctttaaaactttgcataaagaatatgagcagctcaagatatctggattttctacagcagaaataagaaaggatatcagtgcaatggaagaagacaaaggatcagctcattaagagagttgaacatttgaagaaaagggttgagacagctcagaatcatcaatggatgcttaaaatagcaaggcaacttcgagttgaaaaagagagagaagaatatcttgcacaacagaaacaggaacaaaagaatcagctatttcatgcagtgcaaagattgcaaagagtacaaaaccagctgaaacagcatgcgccaagctgcagcagatgcaaagcctgaaagtttaatgaagaggctagcaggaggagatacaaatctaatctatatatggtaactgaaaaacttcctacagaactcagacccatacagaaaaacggaatgacattttgtacaaacaagtacgttcagagccagctatgggccatcctgatctcttgaacttgagtctaaacatacgtgaaatcaacacgcaaattacca

SEQ ID NO: 357428 - DNA, 1741 bp, Homo Sapiens
  misc_feature (229)..(251): n is a, c, g, or t
agcggcggcgatcaggcagcgaccctagaggcgtctgtagggtaaagctgggggttctgtagccggaggcggcggcgagtccagaacgtcctggccttacagggagaaggcgtcactcgcggttacaagtgcctgaccctcactccagttggcggaggaggagaaggaaggggccgggccgggtcccctcccctcgcgccccggatggatgtgcccggcccggtgtctnnnnnnnnnnnnnnnnnnnnnnncactgtgctcctgcggaccgctcgggtccgtcgcgaatgctggttcttgccgaccgcgctgctctgcgcctacggcttcttcgccagcctcaggccgtccgagcccttcctgaccccgtacctgctggggccggacaagaacctgaccgagagggaggtcttcaatgaaatttatccagtatggacttactcttacctggtgctactgtttcctgtgttccttgccacagactacctccgttataaacctgttgttctactgcaggggctcagccttattgttacatggtttatgctgctctatgcccagggactgctggccattcaatttctagaatttttttatggcatcgccacagccactgaaattgcctattactcttatatctacagtgtggtggacctgggcatgtaccagaaagtcacaagttactgtcgaagtgccactttggtgggctttacagtgggctctgtcctagggcaaatccttgtctcagtggcaggctggtcgctgttcagcctgaatgtcatctctcttacctgtgtttcagtggcttttgctgtggcctggtttttacctatgccacagaagagcctcttctttcaccacattccttctacctgccagagagtgaatggcatcaaggtacaaaatggtggcattgttactgacaccccagcttctaaccaccttcctggctgggaggacattgagtcaaaaatccctctaaatatggaggagcctcccgtggaggaaccggaacccaagccagaccgtctccttgtattgaaagtactatggaatgatttcctgatgtgctactcctctcgccctcttctctgctggtctgtgtggtgggccctctctacctgtggctattttcaagttgtgaactacacacagggcctgtgggagaaagtgatgccttctcgctatgctgctatctataatggtggcgtggaggccgtttcaaccttactgggtgctgttgctgtgtttgcagttggttatataaaaatatcctggtcaacttggggagaaatgacattatctctcttttctctcctgattgctgctgcagtgtatatcatggacactgtgggtaacatttgggtgtgctatgcatcctatgttgtcttcagaatcatctacatgttactcatcacgatagcaacttttcaaattgctgcaaacctcagcatggaacgctatgccctagtatttggtgtaaataccttcattgccctggcactgcagacgctgctcactctaattgtgggagatgccagggcccttggattagaaataccactcagtttttgatctatgccagttattttgcactcatcgttgtgtttttcctgccagtggtgcagtcagggttatgaagaatgtaaaagctggaagaccacaataagttttaaggtaccacttaatatatactggtgaaggcttttttttaagcaagactttggacagaactggctgt

SEQ ID NO: 357429 - DNA, 473 bp, Homo Sapiens
aattcccgggatgcctttccatgtgctgtgagtgctttgagttcagactgacaacagagtgggtctagcttctatgctttccatgaagatctcccacaaatgtcatccatgctcatgagatggatcaacttgtatcctgaacaagcaaaactgtttgggactcactgccttcaggcagtcccttggaagccaaggactctgggaacttttcagatgggactggaaacacttgggcaggagttcccctggtaggaggtctgttcacctgtacagcctaatggatgtcctgcttgaggtgccctaatattgcaaattctttgtttacaggggtaccacctgtgcccctgggactgtgcttctgtacatgaccacaactctcatgatgtcccctcagccctggaaagcatttgggttagcttccgcttactggtcagagttatactgtgcctgaattgatgcctcaggtcaggttg

SEQ ID NO: 357430 - DNA, 1179 bp, Homo Sapiens
  misc_feature (362)..(362): n is a, c, g, or t
acaaacatttggtggataccacaatgaaaactgcacttaaaaaacaaaaatgctgaaagaggaaggaaatatcaaaaaggtctgaatagacaacaggcaaatatgcttccacctaccgaaagagttttaggttggcagacagatgggtgccttattttctgtgaaactgaagttttaaacactggccagaaaatgtttgattgccatttcaacacatggaaatagttacattgatgcctaaattgccattttctgcaaaaagctgtgcaatgctggtgtcaaagactagacagtcgctattcataatgggctgttgcaattccttcatgaattagatcgagggagtcgcttcccaagtcaantcgtcgcctatgaccatttagctcaagtcggtaagcaaaattttcagcttgcttgcgtgttcctatcagctgtacgattgcgaagaactgctggtgaccatcgtatttttcctgtttctctaagactaacatgaagtgaaagccaaaacagaactgcatcatcacccagtcaacagcaccaggaagattaatgtctgtagcaagaaaaactatatcctctccctgtagggttgtaatggacttatgctgatgcatcagatggggcattacagcatccagagagccttgccatttacaggaagcaccagggcacggacaggaataaggcctaaactcacagagctcttcatggtctgctttttctgtgtgtggcagagttatttcacatccagaagacgcatatttacaggggaaaagtactgaattagccactttctccatagccaagttgcgaatggatcccaaagggccccggcaagttggacaacatgtgagctttgggcgacagttgctacaaacaagatggccactctgacattgaagaatgggcggtaacacatagtcaaagcagactggacactcaaaaagactcgccaagtcattgttggatgcagttgtgccagtcagggcaggcaccctctgggatggtggacacttcgaggtaccggtaggtaatgctgtagcagtctgacggctcatttctgaaataaatacataaggaggcaggagaaaaataattataaccatgacttactttataaataatgtttacatgccataagtccttttaaagtttcatacaaaatttactgagcaa

SEQ ID NO: 357431 - DNA, 1588 bp, Homo Sapiens
  misc_feature (1307)..(1369): n is a, c, g, or t
  misc_feature (1466)..(1466): n is a, c, g, or t
  misc_feature (1531)..(1531): n is a, c, g, or t
  misc_feature (1544)..(1544): n is a, c, g, or t
  misc_feature (1566)..(1566): n is a, c, g, or t
ccgctggctagaccatggagggccgctgggtgcagccacagagcgcggggccccggcgaccccgccccgctccgcgtcactcggcgccctgcggcgcgcgatgagcacctaccactagcggaccgcgagggagaggccgcggccccttcccgttgcctgcggccaccggccggcattcagagcccctcgcctggcgctaaatttaaaaacgtaacacgagcagcaggctggtctcggaaacgaaacgaaattcggtccctgggcctcctcccgggcgctgccggtccctcagcgcgccgcgccacccggaacagacccttctcccgccattttcggcggggctgggagactgaggcccgcggcgctgagcctgcggcgccccggaagaggcgggcggcatggccgctggcgtggactgcggggacggggttggcgcccggcagcacgtgttcctggtttcagaatatttaaaagatgcttcaaagaagatgaaaaatgggctaatgtttgtaaaactggttaacccctgttcaggagaaggagccatttacttgttcaatatgtgtctacagcagctgtttgaagtaaaagttttcaaggaaaaacaccattcttggtttataaatcaatcagttcaatcaggaggtcttctccattttgccacacctgtggatcctctatttctgcttctccactacctcataaaggctgataaggaggggaagtttcagccccttgatcaagttgtggtggataacgtgtttccaaattgcatcttgttgctgaaacttcctggacttgagaagttacttcatcatgtgacagaggaaaaaggtaatccagaaatagacaacaagaaatattacaagtacagcaaagagaagacattaaagtggctggaaaaaaaggttaatcaaactgtggcagcattaaaaaccaataatgtgaatgtcagttcccgggtacagtcaactgcatttttctctggtgaccaagcttccactgacaaggaagaggattatattcgttatgcccatggtctgatatctgactacatccctaaagaattaagtgatgacttatctaaatacttaaagcttccagaaccttcagcctcattgccaaatcctccatcaaagaaaataaagttatcagatgagcctgtagaagcaaaagaagattacactaagtttaatactaaagatttgaagactgaaaagaaaaatagcaaaatgactgcagctcagaaggctttggctaaagttgacaagagtggaatgaaaagtattgataccttttttggggtnnnnnnnnnnnnnnnnnnnnnnnnnnnnnnnnnnnnnnnnnnnnnnnnnnnnnnnnnnnnnnntgctttttacatgtttcagtttgtccttcctgactgttaatgactacctttggttgggggaaggaagaggccaatttcatgttctcttaaacatttntttgcatttggtttttgtgttcctgaacaaaatatgggaaagtgtctaacttcatggctatggcnttttggagtctcntctgacataatgaaaagtaatnacttgagagaattaacatatag

SEQ ID NO: 357432 - DNA, 922 bp, Homo Sapiens
  misc_feature (4)..(5): n is a, c, g, or t
  misc_feature (13)..(13): n is a, c, g, or t
  misc_feature (18)..(18): n is a, c, g, or t
  misc_feature (29)..(30): n is a, c, g, or t
  misc_feature (34)..(37): n is a, c, g, or t
  misc_feature (45)..(45): n is a, c, g, or t
  misc_feature (51)..(52): n is a, c, g, or t
  misc_feature (54)..(54): n is a, c, g, or t
  misc_feature (56)..(57): n is a, c, g, or t
  misc_feature (61)..(61): n is a, c, g, or t
  misc_feature (66)..(66): n is a, c, g, or t
  misc_feature (75)..(75): n is a, c, g, or t
  misc_feature (88)..(88): n is a, c, g, or t
  misc_feature (90)..(95): n is a, c, g, or t
  misc_feature (97)..(97): n is a, c, g, or t
  misc_feature (100)..(101): n is a, c, g, or t
  misc_feature (104)..(104): n is a, c, g, or t
  misc_feature (123)..(123): n is a, c, g, or t
  misc_feature (174)..(174): n is a, c, g, or t
  misc_feature (184)..(184): n is a, c, g, or t
  misc_feature (234)..(234): n is a, c, g, or t
  misc_feature (526)..(621): n is a, c, g, or t
  misc_feature (648)..(653): n is a, c, g, or t
  misc_feature (658)..(658): n is a, c, g, or t
  misc_feature (660)..(660): n is a, c, g, or t
  misc_feature (662)..(662): n is a, c, g, or t
  misc_feature (664)..(664): n is a, c, g, or t
tttnngagaaatngaaanttatgtggagnnaaannnntataaatnaatgtnnanannagcnttttnataatagcnaaaaagggaaggnannnnnnangtnnatnaaggaatgaatggataaanttaacgtgggatatacgtgtaatggaatgctatttggtgaagaaagaaatnaaatattaanacatgcgttaacaaggatggaccttaaaatatcatgctaagtaagagaancctgtcacaaaagaatatgtattgtaccattctacttatatgaaattcctagaacaggcaattctatagggacagaaactagactagtgattggctagagcttggggagagtttggggagcctggaggatgacagcaaagtggtgcagagtttctttttaggttgattaaatgttgtaaaattaattgtagtgatggttgtgcaactttgtgattttgttaaaaaccattgcattttgccctttaaatggatgaattgcacaatgtgtgaattagacataagtttatttacnnnnnnnnnnnnnnnnnnnnnnnnnnnnnnnnnnnnnnnnnnnnnnnnnnnnnnnnnnnnnnnnnnnnnnnnnnnnnnnnnnnnnnnnnnnnnnnnaaatacataaataaaactgctaaaaannnnnnaatananantntaaaaaaaggctgttcgtttctttcacattttctgagcacaatcactttgggataaatgtgtccaggcttaaaaagccagattttatgggctaactaaaatggaaatgtgaaaaactgtgtttttttccataggaggagagaatctgatttgcaggtacgtgcatacccacagcagtcatacttgtaattcttggaaactttgctgaaagttttttcctagcctgaaatcattaaaatatgttgaaacaatgacactg

SEQ ID NO: 357433 - DNA, 1247 bp, Homo Sapiens
  misc_feature (65)..(65): n is a, c, g, or t
  misc_feature (86)..(86): n is a, c, g, or t
  misc_feature (236)..(236): n is a, c, g, or t
  misc_feature (246)..(247): n is a, c, g, or t
  misc_feature (299)..(299): n is a, c, g, or t
  misc_feature (309)..(309): n is a, c, g, or t
ggatctggcgggtccgggtctggacgggacggtgctggatccaaatgggggtgcagtgctggatntggacgggcggtgctgttgtncgaacgggcgatgggtcccatgggcggtgctaggttcggttcggactggcggtgctgggtctaaatgggcggcgctgggtcgcgatgggtggtactgggtccggacgggcggttctgggtctggacgggcggtgcagtatccaaatgggngctgctgggnncggacgggcggtgctaggttcggtccggacgggtggtgctgggtctaaatgngcggtgctangctcagcaggggaccggtgggcgtggcggcacaggtacggagcgcagggccggtggagcgccctctccgaagggccctgcgcaccccgcgctcgctgctcctcctgcccgcgcattgccccggggctgctgcgtgtttcttccagggtgattcctttccgctgggtcacttcaaagccgaccttttcaagctgttttcttccgcggaggacacgttgttaggctttgtgtgcatttcaagggtcatgttttctgaaccgcgctctgccgctcttggggtgttcgagcccccacactgctgtgcggtgtacctctcacagagtgaggttggagggtcccactccctttgtgtgtctccttagaaaacgcctcttctctcagacacatcgttatctcccaattcttcccacacctagagaaccgactccagagttaataaacgtcgaggggaagctttgatgcgccccatttggccctgagagatgccacgtgatcgtcattttaaatcctttcctgggcttcccgatggactcgagtttttactatgtgagcatcccggtgcctgcacagcaaggactctcattgggttccacacgtgctgcgcagatccctgacgcagcgttcactgaacctcaactgcaggagcttcattcctgaggacgctgttaccaagaatgacttgcctcttgaagaatgagtttgcaaagccggcagttagattgctgatgtccaaagtaagtatgtgtagcatcactaaagagaaaattcaggattcctggaaaacagttatgggctctctgcagtgttatttttgtaataaaaaacatatagcatatgtgaaatacctactgggtgatgcaggacacatagaaggctcgaaattaatgtgaatcattctcgtttttctgactgtcattaaaagtccccatttgtattatg

SEQ ID NO: 357434 - DNA, 1651 bp, Homo Sapiens
  misc_feature (206)..(206): n is a, c, g, or t
  misc_feature (239)..(239): n is a, c, g, or t
  misc_feature (469)..(477): n is a, c, g, or t
  misc_feature (1649)..(1649): n is a, c, g, or t
ctttggcagcaaattgggattccaacagaaaaatatttttatctttttctttttcccaagaaatgaactatactcagagaaattccttcagtcccatctttagttcccagcttaataaatcctccctctgatattaccaaagaaagcatggtggtagtagactgctgtagccatgaataaaatacagtttttatgtcttcttcacntatgtctttaggtaaaatctctctaggttgtanctttagagatcttggattttaggggtaacttccactggagttatcctgactacggcatgcatttctatatttagtctcttcctcaggtcatctggaatccagactttcccaagatggagaacttctacatttttggtatatttgatggcattgttcaattcttcaagtccattccagactacttgtagcacacaggccttctcatcttcttcattatgatctgacctaannnnnnnnngatctagtggctctgacatctgcttctctttttcaggtgataacacattttgttttgttttactttgctgttgctttggagaaagtagcttaactagctttccatatgtcacagtaaagctgggctctacatcaaaatattcctggtcccatggaaatacatgaatggcacagtgtttatgaaaaacagaggttgctgacgcgttatatatactaggaggttgagatttgcatactctgaaaatattgtctagaggaacaacctttgactgcatatttttgaatgcattgatttcagttaaaccccaagatgtctcttgtttcttctcagattgaaaggaaaaaatgcttcctatcatagtccataaacttgctactgatgatgagtcaactggaatctctgactcgttttcattagattcagtgattcccacagtatttgactgaagttgcttggtttgaagttctttcatcattcctttctggtctcttccataactatgaagttttttatattcagcatcagcttttgaaaatgtattctctttggctcggcgtgtctttggctgaataaggagtttggtgtcagtttccagccttccataagaggcagctggtattagtgcaacaatttggataaatatgtacgtttgttgatcaacccaaacaggaaaaatggcttttggaaaaactattcgaatttgatctagaagatgttgttcaagggaaacagcatgcagctccagtatctcccaatcatctgctgagaggggttccacctcaacttgttgacaagataccacatgggaacatggcttgagaaatacctgtcccccatttgagagtccaagtttttgaccaacttgtctgttaatttcagccacattttcaccttgatcactaaaatgcctgccttccacccagctcaagaatgcaggctggtgactccagaccacttctatagcttgattctgcagcagatgcagctgggccacgagacgccgcggcaggtggaggaagcagtcgcgagcgttggtgaaggccacagtcactgccgccccgcctcccccagcacccgccaggcgatcgctgccccacatcgtcccggagcgtcgctctgggttcgcccaccctagcgccgcaaaggacccgggacccggcaggccgaggacntc

SEQ ID NO: 357435 - DNA, 1140 bp, Homo Sapiens
  misc_feature (813)..(852): n is a, c, g, or t
  misc_feature (1014)..(1014): n is a, c, g, or t
acgcagctgcaatcttaggcccatcattccactgagttccgaagaatatagccttttcctgaagaaactcctttcttcaatgcttcaggccagttgtgagtctctaagtaagtggacaggatatcaaacacttgattgatggccagtatctctgaatgatagtttttcccattctggtttctgaccatgtattcctggattggcaagcgtgcggtcttgacagagtattcccgggccttttgaaatgtcaccttcttctgaatgctttcatccacaagcccaccgaggatgtaaactttgtttagatcaacatcttcaagagcgtgttctgagtcaggagtcaggtacacaagggtttccaagggaaataaactaaagcagtcttcttctgttatgtctaacaggtaactagaaaatccatcattcatcctcacacactcttcataaaggggactgtctgttgtgaatccagtgaggcagatccaaaatggcctgtcagcttttttgtttgaaccatacaaccttcgaatctgtccagccagtctacttaattctagtttactaaggaatcccagaagctggagttgaccatattcttcggaaagctgtacccttctgggcctccctcatggcgagcaggaattccaggcttagtggatgttctaccttctttgacatgtagtgggtcatactcaaatcgatacatagtcttggtcctgagtgtttggcttccaaaagtttgtctttggttagagctctcaggaaacgtttgctgtgctgggggcaaatgcctggattttctgcacgattggnnnnnnnnnnnnnnnnnnnnnnnnnnnnnnnnnnnnnnnntgctgcaactatcttttcccagtgtctctgttttctctggacatttttcgagcaccatgccgtactgcctgtggccaggatctctccctcctggcactcgccttccgcatcgatctgcagaagctggaagccttcaggaagtccatcttcacctgtctcctntaggtttctttcttgcccctgcagcacaggtgactctactttctgagtactcccttccaatttccagtccatggacttagtcctctgtcctttccaccagactgatcccctcacccccacgcagcg

SEQ ID NO: 357436 - DNA, 1615 bp, Homo Sapiens
  misc_feature (5)..(5): n is a, c, g, or t
  misc_feature (1460)..(1460): n is a, c, g, or t
  misc_feature (1473)..(1473): n is a, c, g, or t
  misc_feature (1483)..(1483): n is a, c, g, or t
  misc_feature (1485)..(1485): n is a, c, g, or t
  misc_feature (1493)..(1493): n is a, c, g, or t
  misc_feature (1497)..(1497): n is a, c, g, or t
  misc_feature (1537)..(1537): n is a, c, g, or t
  misc_feature (1539)..(1541): n is a, c, g, or t
  misc_feature (1543)..(1543): n is a, c, g, or t
  misc_feature (1545)..(1547): n is a, c, g, or t
  misc_feature (1549)..(1549): n is a, c, g, or t
  misc_feature (1567)..(1567): n is a, c, g, or t
  misc_feature (1591)..(1591): n is a, c, g, or t
gggangaagctttgcagccttgcagtccttgtacccattgttctcttctgtgagcagcatgtcttcgcgtttcagagtggccaagttctagctgctcttcctagaacctctaggcaagttcaagttctacagaatcttactacaacatatgagattgttctctggcagccggtaacagctgaccttattgtgaagaaaaaacaagtccatttttttgtaaatgcatctgatgtcgacaatgtgaaagcccatttaaatgtgagcggaattccatgcagtgtcttgctggcagacgtggaagatcttattcaacagcagatttccaacgacacagtcagcccccgagcctccgcatcgtactatgaacagtatcactcactaaatgaaatctattcttggatagaatttataactgagaggcatcctgatatgcttacaaaaatccacattggatcctcatttgagaagtacccactctatgttttaaaggtttctggaaaagaacaagcagccaaaaatgccatatggattgactgtggaatccatgccagagaatggatctctcctgctttctgcttgtggttcataggccatataactcaattctatgggataatagggcaatataccaatctcctgaggcttgtggatttctatgttatgccggtggttaatgtggatggttatgactactcatggaaaaagaatcgaatgtggagaaagaaccgttctttctatgcgaacaatcattgcattggaacagacctgaataggaactttgcttccaaacactggtgtgaggaaggtgcatccagttcctcatgctcggaaacctactgtggactttatcctgagtcagaaccagaagtgaaggcagtggctagtttcttgagaagaaatatcaagccagattaaagcatacatcagcatgcattcatactcccagcatatagtgtttccatattcctatacacgaagtaaaagcaaagaccatgaggaactgtctctagtagccagtgaagcagttcgtgctattgagaaaactagtaaaaataccaggtatacacatggccatggctcagaaaccttatacctagctcctggaggtggggacgattggatctatgatttgggcatcaaatattcgtttacaattgaacttcgagatacgggcacatacggattcttgctgccggagcgttacatcaaacccacctgtagagaagcttttgccgctgtctctaaaatagcttggcatgccattaggaatgtctaatgcccctgattttaccattctgcccccgtattttaatttactgattccagcaagaccaaatcattgtatcagattatttttaagttttatccgtagttttgataaaagattttcctattccttggttctgtcagagaacctaataagtgctactttgccattaaggcagactagggttcatgtntttttaccctttnaaaaaaattntnaaagtctngttncctactttttctttgattttcgacgtttgactagccatcncnnncngnnntnggcgtttgactagccatntcaagcaagtttaatcaatgatcntctcacgctgatcattggatccta

SEQ ID NO: 357437 - DNA, 948 bp, Homo Sapiens
  misc_feature (8)..(8): n is a, c, g, or t
  misc_feature (245)..(289): n is a, c, g, or t
aaggctgntttaattcggttctgattaccacccccaaagtaactggcatgagaatcttaaccccgtctgaacagagggaaatttctttggcagtttggccatcttcccagagccagacctacatgtttagtaagaaataactcaagtatctaaataatcaccgcagcaaggattctcattttttccccttttccaaaagtttgggtgttcttataagtactcagaaaacaattctttgcttaagnnnnnnnnnnnnnnnnnnnnnnnnnnnnnnnnnnnnnnnnnnnnngttatgtcactcaatattatcttgtttcacttattatcagggaatataaactaggacggagaattgagatctgcttagagccccttcagaaaggcgaacacttggggtaagaaattctcctgtgcatctgaagtcacacacacgtatcttaacctcgtttgccttttgaagctttaacaacttcatagtgtagcattttttttcactgcttctaagtagcctagcaacttgaaacagagtgtgtgctagaaatatgtttgtatgtctgggcatctaaaacttgggacttattctcccataaaaacagtaagggagaattaatttttcagtaatcaccaggtgcatattgaccccatgatggccctgaagtgtcagcaagaggcccacccgcagctgttgtcagtgtgttcggacagtctgccatccaacggattcatcattgctcccgtcgctctgcccccttattctactttcttcatcctagtatcacctgacatatctgtacttactgatttatttgttagtatctgtctcccactactagaatataagtacttggtttattcattgctatatccttaatacctagaatagtaattgtgcccatgtcatagtcaataattatttattaaataaagatacacccaaaattgtctaca

SEQ ID NO: 357438 - DNA, 1690 bp, Homo Sapiens
  misc_feature (269)..(269): n is a, c, g, or t
  misc_feature (1006)..(1006): n is a, c, g, or t
  misc_feature (1427)..(1427): n is a, c, g, or t
  misc_feature (1511)..(1609): n is a, c, g, or t
cgacgcccgtggaatctctcctttctccaactgggcttggccaatggaaaacagagctttttaagtagtggcaaggagccaaaaaaataatgcctaggtccggttctcatgggccactggggaatctccttttgcaattaagttagccaatggctggccttctctgcaaaatttgtgaacctggtataggattaagttagaaaggccagaaggtctggctgctccccttctagacttgcaaggtaaaaccccaaggtgtgtgccccgtnaaaggttcagaggttttataggcatccagatagcacatgtgggtctctaccccctgctgcagccctccctggggcagccagccaggctcaggcaagaaagctgctgatctggggtcacttggctgctcttgcttgctgctgctgtgattgttcctacagttaagatcttagctccataaggtacatacggaggtcatctaggtcatctcatggctctcaggcaagaaaagtagcattattgctctcatgcccactttatggataagtgaccgaggcctgcagaggcagagtggctattccagccattaaatgtggctccctgctattctgttccctgccaggatattctgtggatggttaggggaggggtcttgcctcagctaacgaggtgcattttctgtggggtgaggccattcttgtcacttaggtgtctgaggcctgatggtgttggggaatgtcctggttctattcccagggctgtaacgtgggggaaggagggaggaagacagaatggcctctggaacttttggatctttctgagttgaggccttgtctggccaactccgggaggctgctggcatggaaagcagggtagggatgcctggcctagccaggggagctccctctctcccctctgctgcccctctttccacccccatcataaacacgtgtggactttctggtggtaagaagatggttttggagggctgggctgaggtctaggcaggcaagagctnccaaatgtgtggctttgattctcagccttttcatccctcaatcctgggagactcattttaaaacttaaaaaaggacttcattctattggatgctatgtgggcaggccctgggctgttgtagagaggcctgaaacccacttcagtttcctggacaggctgggagtgtgtacccatgggttccctgctgccctattcctggaagacactaatatccctcccaaactcttggttggtttctgctttttttctgtagcattttgtctttgtgggaaattttaagaaacatatgtatggctttttggtttccacttatttattttcccctctgagtttcagatttcatccttctccaccccttccccctgccctaaggtggggctagtgcaaatcgcagtgtgtgtgtagtgggatggttaaaganccgtacatcctcacacctggtgacgcagactaaggcaatgaaccttctttagtaaagaccctttcagctgggtgcggtgggagnnnnnnnnnnnnnnnnnnnnnnnnnnnnnnnnnnnnnnnnnnnnnnnnnnnnnnnnnnnnnnnnnnnnnnnnnnnnnnnnnnnnnnnnnnnnnnnnnnnttaacgggacgttgtggcatgcacctatagtcccagctacttgggaggctggggcgcgagaagtgcttgaacctgagagat

SEQ ID NO: 357439 - DNA, 1837 bp, Homo Sapiens
  misc_feature (7)..(7): n is a, c, g, or t
  misc_feature (38)..(38): n is a, c, g, or t
  misc_feature (264)..(264): n is a, c, g, or t
  misc_feature (267)..(267): n is a, c, g, or t
  misc_feature (510)..(510): n is a, c, g, or t
  misc_feature (615)..(615): n is a, c, g, or t
gtgagcncggggctgctgggtgacccggctcctgcttnccccgcagccccggccccctgcccaccatgaacgccagcggttctggctacccgcttgcctcgctttacgtgggcgatctgcaccccgacgtgaccgaggccatgctctatgagaagttctctcccgccggccccatcctgtccatccgcgtgtgccgcgatgtagccacccggcgctcgctgggctacgcctacatcaacttccagcagcccgcggacgcgtagnggncactggacacaatgaactttgagatgctcaaaggccagcctattcgcatcatgtggtcccagcgagacccaggacttcgcaagtcaggtgtgggcaacatcttcatcaagaacctggaggactccattgacaacaaggctttatatgataccttctccacctttgggaacatcctctcttgcaaggtggcgtgtgacgagcatggctcccggggtttcggctttgtccattttgagacccatnaggccgcacagcaggccatcaacaccatgaatgggatgctgctgaatgaccgcaaagtctttgtgggtcacttcaagtctcgacgggagcgggaggcggactggngggcgcgggccctggagttcaccaacatctacgtgaagaacctcccggtggatgtggacgagcaaggcctgcaggacctcttctcccagtttgggaaaatgctgagtgtgaaggtgatgagggacaacagcggccactcgcggtgctttggctttgtcaactttgagaagcatgaggaagcccagaaggccgtggtccatatgaacgggaaggaggtgagcgggcggctgctgtacgcgggccgggcccaaaagcgcgtggagcggcagaatgaactgaagcgcaggtttgagcagatgaagcaggaccggctgaggcgttaccagggtgtgaacttgtatgtgaagaatctggacgactccattgatgacgacaaactgaggaaagagttctctccctatggagtaattaccagtgcgaaggtgatgacagagggtggccacagcaaggggtttggctttgtgtgtttttcctccccagaagaggcgacaaaggccgtgacagagatgaacgggcgcatcgtgggcaccaagccactctacgtggcactggcccagcgcaaagaggagcggaaggccatcttgaccaaccagtacatgcagcgcctctccaccatgcggaccctgagcaaccccctcctgggctcctttcagcagccctccagctacttcctgcctgccatgccccagccaacattggtactcagaccacaggacccagtggggtaggatgcatgtacaccaggccggccgctcctgccgtgcaaatgttcctcagcagcacatagcacctatcgggtccaggagccggctgtgcacatcccaggacaggagcccctgaccgcgtccatgctggctgcggcgcccctgcatgagcaaaagcagatgattggcccagagacggaaagtacaaagactagtaaaatacatccttgcccttaaggagctaagtacccaaaacctgtaatccaccttgagtcaacagagtacgggttgctcaaaaacagcagtggtgcggtgggaaagggcatcaaccctgcgatcccgacaagtcactccattccctctgatcatgccgggcccacctaccacatgagggatatcacttcatagacttgctggaagggttcagttgtgttagcctgttcctgagctctcttcgtgatcaagaagactgatcagataaatcaagagacttgcccaaattacctaggaaatctgta

SEQ ID NO: 357440 - DNA, 1107 bp, Homo Sapiens
gcgcgtggagcggcagaatgaactgaagcgcaggtttgagcagatgaagcaggaccggctgaggcgttaccagggtgtgaacttgtatgtgaagaatctggacgactccattgatgacgacaaactgaggaaagagttctctccctatggagtaattaccagtgcgaagaagaggcgacaaaggccgtgacagagatgaacgggcgcatcatgggcaccaagccactctacgtggcactggcccagcgcaaagaggagcggaagagccatcttgaccaaccagtacatgcaccgcctctccaccaggcggaccctgagcaacccaatcctgggctcctttcagcagccctccagctatctgcctgcctaccatccaccagctgcctaccctccaggggcctcaatggtccggccaccagtcgtgcctccacgccccccggcccacatcagcagcgtcaggcaggcctccacccaggtgccacgcacggtgcctcatacccagagagtagccaacattggtactcagaccacaggacccagtggggtaggatgctgtacaccaggccggccgctcctgccgtgcaaatgttcctcagcagcacatagcacctatcgggtccaggagccggctgtgcacatcccaggacaggagcccctgacagcgtccatactggctgcggcgcccctgcatgagcaaaagcagatgattggggagcgtctctacccccttatccatgatgtccacacccagctggctggcaagatcacgggcatgctgctggagattgacaactcggagctgttgctcatgctggagtctccagaatccctccatgccaagatagacgaggcagtggccgtgctgcaggcacaccaggctatggagcagccgaaggcgtacatgcactgaaaccagaaaaggaaatcctcgcttccatggctgccaaaaggacagtgtttctggctctcagccctaaggccctgcaaactctaacttatttcccaattagtctgtatctatacttgggctctgtatgtgaatgaaggttggtcacccatccagcctattaccttttgctttgtgtattaaaagtgctgcaaaatcaa

SEQ ID NO: 357441 - DNA, 1715 bp, Homo Sapiens
agcggatccaccgcgcggcccaggactgtcaggatagtgggcgttgcgtgaggcgggtaaatgttcgcggaagcggcaaagacgacacggccttgtgggatggcggagtttaaggagaagcctgaggccccgactgagcagctggatgtcgcgtgcggccaggaaaacttgccggtgggcgcgtggcccccgggggccgcgccggcgcccttccagtacactcctgatcatgtagttggacctggagcagacattgatcccactcaaataacctttcccggatgcatttgtgtcaaaactccctgcctccctggcacttgctcctgtctccgccatggagagaactatgatgataactcatgccttagagatataggatctggaggaaagtatgcagagcctgtttttgaatgcaatgtcctgtgccgatgcagtgaccactgcagaaacagagtggtccagaaaggtctacagttccacttccaagtgttcaagacgcataaaaaaggctggggacttcgtaccttggaatttataccgaaaggaaggtttgtctgtgaatatgctggtgaggttttaggattctctgaagttcagagaagaattcacttacaaacaaaatccgactccaattacattatagccatcaaggaacatgtttataatgggcaggtaatggaaacatttgttgaccctacttatataggaaatattggaagattccttaatcattcttgtgagccaaaccttttgatgattcctgtccgaattgactcaatggtacctaagttggcactttttgcagccaaagatattgtgccagaagaagaactctcttatgattattcaggaagatatcttaatctaacagtcagtgaagacaaagaaaggctagatcatgggaaactaaggaaaccttgttactgtggtgccaaatcatgtactgctttcctgccttttgacagttctctgtactgccccgtagaaaagtcgaacatcagttgtggaaatgagaaggaacccagcatgtgtggctcagccccttctgtgttcccctcctgcaagcgattgacccttgaggtgagtctgttcagtgataagcagcttgcccctccctatagtggaagacagtggttggctagctttacctctgcctagttacataagtttaactcaggaatgtggcagagactgcaagttgtccatcagtatcctttcccctttctgtaatagaattctccatttaacaaaagtacatgactacccagaatactcactttcctagttagatttgtcttagtgactgttctagttaataggatataagcaaaaatgacaagtccttaaatggagatatcctgcccttcacctcctctttcttcctgctggctggaatgtatacatgatgactggaactggagcagtcatcctagaccccaggatgaccctgggaaaggaagccattgcatagaaaaatcaacaaggttaaaaggagtctaggtgtctggtactgtaaaacattcctgtcagtcgtgatctgacacctttgtactttcaggtgagaaatagtctctcccttgcttaagtcactgttattgtaagttttctagcactaacatcgaacctaataatgatccaagaaacccttggggctgcatacctaaaccctgcttgccaaccaatttaaacagtaataaagctgactttttgatttc

SEQ ID NO: 357442 - DNA, 1602 bp, Homo Sapiens
  misc_feature (58)..(58): n is a, c, g, or t
  misc_feature (475)..(501): n is a, c, g, or t
  misc_feature (782)..(782): n is a, c, g, or t
  misc_feature (1191)..(1191): n is a, c, g, or t
ccatcaccaccttctcaaacaacaacagccctgggcaatgcccagctatccttgttantcatgtatctgcaagagcataatctttcccttggacttcttaagaaataaatttctcttaactatgcctgcaagattttcatctatgaataaaaaccattgaaaagattaaattatgaatttgtggttatatacaaagtctgtgacttctaatgtccagattttagaatgatgcctaattctggaggtctcagaggtccaagtgggagtgggtaccatgaatgggggggccctccatttaaaagtaaccttctaaagagctctctgttcctgtagctcccctttccttattggaagggtcaaaacgaagtgtgttcccttaaaaatccaacaagaagttcctctcttatatccaaatataaaaacaccacaaagaaatataccattgggagtgtccaaagccagaaagtcagaggannnnnnnnnnnnnnnnnnnnnnnnnnnctgactattgggagactcaaaaagcccaaagccccttctctagctgttatctcagttacgaacacaacgtactgattttccgtgggaacctcattattgcactgtggggacttcgtcttccagcaccgattctgacggccctaattgccttgtttgagaaatgttaggaaaaaactaattttccggcgaatattgtttaaaagaatgattttcccaggctaacgaccacaaccctctcccacgtccagcatccccaggccctggcactgtggaagcctaancttgttaattgtccaaggaaaacgactgatggaacttctccacgaacagcctctccactttcatccaggtattcagctccagcccgttgtaaacgctccgggtgcggtggaaaaggcctcctccctgttcctgcagcggctctgggggaggggtgctgatgtggagcgctccggccgccgtggcgcgcccaagtccccgtcgcgcccgggatcggtggggattttgttggaaaggtgggtcttcggcccccagccccccaccctggttccgcgccccgcccgggcccgcctctcacctccgtcggctgagggcgctggggccaccggcatcctagcgggtggcgcgcggcggtgccggggcgcccggtcctgcgctcgaatgccagatgggctgggaggcccggcagtntcagcgctcgcgacgtcgttcccgggcctggggtcctgctcggtcgcgtcctgcagccgccttctggtccctgagtccctgttgcccgtccccggaaccggcttcctcggcctcttgtcctcatcgggcgagctccaggtgcagaaaccgggcgcccagagacccagcgggaacaggcttggaaccaggtccgaggtctgggcttgggcgggcgcctgtcgccctgacagcgagggtttgtttgggccgattcttaataggaggattaatactatcattatcgttgtccagatcctgaccatttcttttgtaactggccgagcaccggcttgggcttgcaggtgggcgcctggcgccggacagcgtttttgtttgggcttcttccatcccgggaattccggaccggtacca

SEQ ID NO: 357443 - DNA, 1631 bp, Homo Sapiens
  misc_feature (1502)..(1502): n is a, c, g, or t
  misc_feature (1529)..(1529): n is a, c, g, or t
tgtttttgttttttctcacgtcaattaaaatcaaaggcaggaaaaatgtgaagtattgcctgcagaggctgtgatgttatctgtggtataactgactgggatggctattgaaatcttgctaagcacaatcagaagtaaccaaaatatcttttaaccaaaatgtactgggcagaagctgaagaaaggatatttaagtacactgaataattccttacaatatagtaacataaatggagtcaactaacacacataaactttttatgaaatttgactatccatagtttataacataggctttcagttttataagatttcgaatgattttcctcttttcaattaaacccatccttttccttcattatcttttagttcttaagacagaagagcaagataagtctatattgtctgtcacaagatgaaggtagaggcacattatacaaatacagacctgaagaagtagatattgatgccaagttaagccgattatgtgaacaagataaagtggtgcatgctctggaagagaaacttcagcaactccacaaggagaaatacacgcttgagcaagctttgctatcagccagccaagagatagaaatgcatgcagataacccagcagccattcagacagtggtgttacaaagggatgatttacaaaatggactgcttagtacgtgtcgagaactttctcgagccactgccgaattggaacgagcatggagagaaatatgataagttagaatacgatgtaactgttaccaggaaccagatgcaagagcagctggatcaccttggtgaagttcagacggaatcagcaggaattcagcgtgcacagattcagaaagaactttggcgaattcaggatgtcatggaagggctgagtaaacataagcagcaaagaggtactacagaaataggtatgataggatcaaagcctttctcaacagttaagtacaaaaatgagggtccagattatagactctacaagagtgaaccagagttaacaacagtggcagaagttgatgaatctaatggagaagaaaaatcagaacctgtttcagagatagaaacttcagttgttaaaggttcccactttcctgttggagtagtccctccaagagcaaaatcaccaacacccgaatcttcgacaatagcttcctatgtaaccttgaggaaaactaagaagatgatggatctaagaacggaaagaccaagaagtgcagtggaacagctctgtttggctgaaagtactcgaccaaggatgactgtggaagagcaaatggaaagaataagaagacatcaacaagcgtgcctgagggagaagaaaaaagggttaaatgttatcggtgcttcagaccagtcacccttacaaagcccttcaaatttaagggataatccatttaggactactcagactcgaaggagggatgataaggaactggacactgccattagagaaaatgatgtaaagccagacccatgaaactcctgcacacagaaattgnttcaactaaaagaaaccgaaccccaanaatgtggacttcagcaaagagttaaaaaaaactgaaaacatttcatatgaaatgctttttgaacctgagccaaatggagtaaattctgtggaaatgatggat

SEQ ID NO: 357444 - DNA, 605 bp, Homo Sapiens
  misc_feature (18)..(18): n is a, c, g, or t
  misc_feature (144)..(155): n is a, c, g, or t
aaagaaggcttctccagnaaacctccctgccctacccgcttgcccacctgcctccaccactggtgcaacttcctccttcagagtcagtttctgcagtcaggagagatgagcagttcaccaggaattgggggtgggggcatctgnnnnnnnnnnnnagaatgggagctgcacttggggatggtgatggtgttagagattgcagcccaggacaaagcatcaccttgctcaaggggaacaaactgcagcaggttgtacaaaacattcagagagctcacttgacccaaccgagggttttacttggtgagcctttctagtagtcttgagtctggggctcagttttagatttttatttcattaatgtttgtttatttctaataaattttaataagcgagtaatttaactaggtcgccagaagaccattatttttgtttgtctatttttgttgtcgtcactccctctctcgtcatctgtctgccagtctgttcacagatcaccttgtagtcccttgtggtttttactccatccagtgcttaaagctgatctaaggacttcgatggttccagccttcaaagaaaaaataatttaataaaaatttagttagaaa

SEQ ID NO: 357445 - DNA, 364 bp, Homo Sapiens
ccagtacttttctcctgcactgtgtgtgacccacccagcttcttcctccctgtgtgtgtcagattatgcctgcacttgggaaagctcttgtgagactctcccaaggtgctgtattttgctacctcatggagtattctcccagaaactgcaatgtatttttttaggggagtatctttaacaaagcagaatgattcttctaagtttggcaacaagaaggcttggatctgagtcttctacctggcaggatgccaatcctgtttgttgtccgtatgtcctgaaaacatgagggactggcagatgtcattttggtctaaagagctgacttgtttgagattcagccttaaattaagctcttagttgttca

SEQ ID NO: 357446 - DNA, 1978 bp, Homo Sapiens
  misc_feature (24)..(24): n is a, c, g, or t
  misc_feature (57)..(57): n is a, c, g, or t
  misc_feature (163)..(163): n is a, c, g, or t
  misc_feature (1097)..(1107): n is a, c, g, or t
gtctatttcatagtgatttctggntctttcctccccaccttccaggtttgtggctgnactccttctgttgccctttgccttcttcctgtgtactgatcagactcctcctttccctgcctcctagaaactgatttcactccagactggtgtgggccacccttgntcttcagatgagaatggagtctgaatggtccttcctgagagcgagtgcgacccgttcctttgtttccctgcaaccacccttggacctgactcagctaacaatctagccctgggggaatgtgatctacctgatgcgaccctgagttctccccagagcctcctcctgccccacagctctcaagtacccttttctcctgggactgtgtggacccacccagctttcttcctccctgttgtgtgtcagattatgccttgcacttgggaaagctcttgtgagactctcccaaggtgctgtatttttctacctcatggagtattctcccagaaactgcaatgtatttttttaggggagtatctttaacaaagcagaatgattcttctaagtttggcaacaagaaggcttggatctgagtcttctacctggcaggatgccaatcctgtttgttgtccgtatgtcctgaaaacatgagggactggcagatgtcattttggtctaaagagctgacttgtttgaaattcagccttaaattaagctcttagttgttcagcttggggggcaactttgatttttctctgtgttgtagtctctcatatttactcaaggagggaccaggatgatacagtcatctgaggttatgctttgcaaaaggctgacggtatggaatatgtttccatgtctgagtcttagaaactggctgctcattgttagaaagtgatgctttgtgagactattgtcttggggccaaaaataatcagggattttaaattgggcaagggacaaggtgctagaatcctaagctctggaaatatttcatgacactggtgtattcactcatgtgttccagatgtattctaattgtgtatgaaatgtatgtacacataagtgtgtgtgtctcaggaagtaggaaataaaaatggaagctattatgacctcnnnnnnnnnnngccaactttgagctaggataaaaattgggtaaaggacatttgcttacctgcaaatgaatcactgtggaaatgtgatcttcccatatcatcaagaaacttgttttctggatgaatactgggagaataaaatgagaactctggagtgagctaaattgatcccaattaagtttttctgcttagcagacagaaggtataattttttgacaccctttcccacctggtgcctatgctaggcttgtcctgagaacatccctcagtaacttgatattcacatgacctacaggatgtcccatctgcagggctgagtcagttggggaacaccagaggctacacagtagctcttcctgctactcggttaatgagcttggcaggttctttgtctcactgaattcttatcatggaaacagcagcagcagccgctaggaaatcttcaagtgtagtgtctgtgctaacccagtggtaaatcccttagatcccctgctggtctctggcagtctccttgattttgggtaccatgtatattttccgctttgactttaacgctttctaggatagggtaagcacccttaattcaggcactgtccattagcttcctttgcaaaggctacttatggccggtcacaatccagcactcagacagagccaaggcaatatcctcttgcccatggctatgatgtcagacagtggatgggctccagcaacaagagacaaaataactaaaggcctttgctctcctctgacattgaggcctggggcttacagtttggaatacaacatgtgaaggtttttgttgttgtttgtattttttagatgtaaacttgattattttattgctaatttaaaaataaaaatgactttgtattgattgtga

SEQ ID NO: 357447 - DNA, 1039 bp, Homo Sapiens
cacaaccagttgctattccttccggtggtccaccttgtgacaacagtctggtagcagggtaagaaaataaccttccttcttttctcatagcatagaaagccagggcacaccctaatgcccctacctgattgtaggacctgttcctctctcagggtaaaaagacaaatccttatcaagattataggacctaacagctccctttgaatatccctgagctctgctgtgggaagtatcataaaggttctagccttcgtgaagttgttctcgtggaggtctgttggtccctctgacctcagcatctgctcacatcccaccctctgcccaactctggcagtctctcctggcagatctccccagagtggtccttgcttctcacctggattcctgcttgtgcaggagcctgtgtacacagggcctccctcacccagcctggcccctctgctgagcactttgcgctgctcttgatgggcagcagtgggactgggaactccttagagagggccttgcagctttacactggaataagtctgcctctgcctctgcctcaccctgctggctcctggtgggtttcatcccaggcagagttgacattgctggaggggtttggtggactcctaagaatcatgaaaccacaggagcatgtttaggaagagatttgtctctggtccctgtctctgaaaggacacagatgctaaatatttattgtcttagatcatggattcctgatacctctcactcaaggggaccaaaagggacccccccgtgttcatcccttgtaaggtgagttcagtctacgttgtctctttccagtcactggatgcgtggcaccaactggtcaatgggtgcttggtgccataccctgctcaccctagtctctgcaggcccatgtcctgaagggttcctcaggaggtcgggactagggtgggagaggcactatctgaaacctgcaatcactcttgtgggtcttgaacccattcatttccaaaacatccatctttctccacttcccccaggtcttggttttgagaaacagcaggca

SEQ ID NO: 357448 - DNA, 776 bp, Homo Sapiens
tttcgtattcattttacattgatggtgcaaaatttcatgggtgataaaacaagccaagtgtcaccttatcaggaagtgattcgtggaaaggggattttacctgatggtggagaatacaaacccccttctgattcttgaaaaagcagagactattacaccgaatttcctaataacactggctgtgccctcggcagtggcactggtcctttttctaatacttgcttatatcatgtgctgccgacgggaaggcgtcatccaactggtccatcacagtgctattcagaaatctaccaaggagcttcgagacatgtccaagaatagagagatagcatggcccctgtcaacgcttcctgtgttccaccctgtgactggggaaatcatacctcctttacacacagacaactatgatagcacaaacatgccattgatgcaaacgcagcagaacttgccacatcagactcagattccccaacagcagactacaggtaaatggtatccctgaagaaagaaaactgactgaagcaatgaatttataatcagacaatatagcagttacatcacatttcttttctcttccaataatgcatgagcttttctggcatatgttatgcatgttggcagtattaagtgtataccaaataatacaacataactttcattttactaatgtatttttttgtacttaaagcatttttgacaatttgtaaaacattgatgactttatatttgttacaataaaagttgatctttaaaataaatattattaatgaagcctt

SEQ ID NO: 357449 - DNA, 440 bp, Homo Sapiens
gtgactggggaaatcatacctcctttacacacagacaactatgatagcacaaacatgccattgatgcaaacgcagcagaacttgccacatcagactcagattccccaacagcagactacaggagattttcgtttgacaacttttcaaagatttgaggtaaatggtatccctgaagaaagaaaactgactgaagcaatgaatttataatcagacaatatagcagttacatcacatttcttttctcttccaataatgcatgagcttttctggcatatgttatgcatgttggcagtattaagtgtataccaaataatacaacataactttcattttactaatgtatttttttgtacttaaagcatttttgacaatttgtaaaacattgatgactttatatttgttacaataaaagttgatctttaaaataaatattattaatg

SEQ ID NO: 357450 - DNA, 1042 bp, Homo Sapiens
gcagctcccaaaagattctgccttgtgtacccaagcactcactcttgggtgaactaatgcttctggctgcctagcaagtgaagatctgttgagaaactgagaacgctccaagagagaagctgctctcccctccttgaagaagccgcggacacgggaaacccacggcgggcaagggcccagctgtgtgctcctttcctgtcatggcatctgctgatttgaaactccatgacgaacacgttgaactaaacatttttatttaaatttgtatcaatattcgtaggggctctcttgttaaaagagtcatctgtcctggttgttaggggtaatttttcttggtaaaaatgaatctcctgttgaatactcgggaaaatcaaagggaagtgtggtcagcacacactgaacgttcttttctggagaggccggttttagcctcgtacctttagcaggaccgacagcgggtggaagggaccgtgtgctggatgggggtgtcgcctcctggatggcacaccctcccgaggacatccagacaggctgtgtcaccctccagcactttatgtgcctgctctgaggtgtcctgaacacacagcaacggcctctccttcatcacaggccggggattccttttgtgtttctgtataacatcgatgacgagctgaagctgttgtcacttcactgccctctttggaatttcttccattgtgctgactgattctattaggggctaacaataaaggcagtctacccacttactatcatgcttgcggaaacaagcgttcagcttgtacatattgacaagacgaggaccctgaattacaccctctcttcatcagcccaagccttactgaagtgggatgaagacctcattccctgttctttaaaacatgtttcgtgaactaatattggtccatgtattttttgtccttttgggactctaagtgggtcaagaagcaaaaacatccatgtgttgtttggggggaattggcaccattttttcctgactagtttcaattaactaaagaataaatagtaagaaattctcctt

SEQ ID NO: 357451 - DNA, 895 bp, Homo Sapiens
cctataaagagaagcctgtgtcgaaaactttgaggtgggtgatgcagaaaattatcctgaaaaggatttgtttaaaaacaaaagtgtcttggggcaaaaaccccccaagatatatctctgtgttggggcaatggagaaaaaaaggcctgaggaatgggcattatttaaaaaagttcccggttgccccttaaggaccctaaaagggtgggttcattccctctcaaccaggcttatcttaggatgaaccgttcggggtgggcctgatgtgaagctaaaagcaaaaatattcttcaaaaggaagggatgtcttattcagtccataagatcatctaatgtattaagctggcttgggggatgaatcgggtgtttcattcattcattggacaggtaagcattgcttacctactctattatgacggggtctgtgctgactccgaatattcggtgggatgcaaaatagttaagtgctcttgtagagtttacagattagcggaaaacagacaaattgtgttaagagcaatagaaagaagagagcggaggactctgagaaatgaaggcgaggagtgggagaatgaaaggaaggtggaaggcaggtaaggagtctgaccacctggtatttaaaaactaagatgggggaaagagtctcccaagagagtgaacagcaagtgtcaaggacctgaggcaggaacaagataggcttcttccacaaattgaaagaagatccatatgaaagagtcagagaaaatgcaatgggaggatgaagactgaaagataaggaaaagggaaacaaggcaagaatttgtaaactgctctaaagcattttaaagtttatcttaaaagcagcttgataaattagatttatggtaattagggtattaataaaaatacagcagct

SEQ ID NO: 357452 - DNA, 727 bp, Homo Sapiens
  misc_feature (496)..(513): n is a, c, g, or t
cttattcctgcacctacctcgccactctgccactgtccccattgggcctttctcctaaactggactttgagctctctttgttttttcttatttccctcctgtctctcattttttcttcccattcccctcccatttcagcccttaacttttctctttcccatctccactcagtattccaatggcaaaccctgatgatgtaacacctgcgatgagacatcggactctccggaactttctcatctgacacgtctttttcccagggttcgtacttctcctccattggtcccaggctaactcccctgttcctctgtggtgtctgtcagtccgtctgtcttctctttcctctgcccttcccacagggcagtatctgctgatggattcagtcctggtgtgtgattgttgtgatttgttcttccgtgcgcaaaaggaagagggctttttgagtcccttccaagtgagattgtaaatgtagaattttccactgttggatctagannnnnnnnnnnnnnnnnngggggggtggggttacagagctgagaccttgtgcatgcatgtagaaaattgtaaaatgtaaattttttttaatatataaaaagcttgtttctacagtttgcagtggatctaaacattacggcaattttaggatttttttcttaaacataggaactaaaactgtacaaattttttttatataaaataaagacatttgacttttgtgggggcaaaa

SEQ ID NO: 357453 - DNA, 1841 bp, Homo Sapiens
  misc_feature (151)..(159): n is a, c, g, or t
  misc_feature (301)..(337): n is a, c, g, or t
  misc_feature (1155)..(1224): n is a, c, g, or t
  misc_feature (1283)..(1428): n is a, c, g, or t
aaagcaggctggtaccggtccggaattctcgggatatctgtcgatcccacgcgtcgggattgggtatgttagcttgttggcctaggttgaggggctgggagagtgtttattatcaatgatcgctgtcactatgtgtatgaatcactgtgannnnnnnnncattccccgttttcctgaaaaaaagatttgtttttcctccacattctctaacgcactcaagggcatgtgcctaggagaacgtggtagcattctggtctttccgctttcagaactgctggtcatcttcgtcttttcttcatgnnnnnnnnnnnnnnnnnnnnnnnnnnnnnnnnnnnnngttttttaaaactgtcaggatgaattgtcagacatatggccatgtgttttgtcctctgcttctcccctgtgggaagttgtctccatgctgtgaactggctgtggggtgtgcagctgacgtcagtccctctgagcagtttccccactgtgtcttgtcccatcatgcgctggatctgctcattctcctgctgtgaggggtatgcccacctccttacccccttgacaccatagggcatgctgtgtgctgggcctcaccaggcactgtctattgtgtgactcatggcatcctcgtttcatccccaccgtgcctagcaggccttcctttttcaccacctcggaacagcttgccttttcctccctccacaacaaggactgctgtgcctcagtccttcaactaactcgccactctgccactgtcccagtggtactatctctaaagtggccttgtgcaccattgtagtcttattcctctggatcaattattcccattcctccattcaagcgtaatattcttccattcatcagttcctggacacctgtttacccggagacatggatcggatatatcgcagcatgcaggggatctcaggacgaaaccgccgtggagaaggatacattccacaagtgaatattgtttcctggatcttctactggatattaccaaacgacgacacaacaaaaaagagagcacagcaacaggtggctacggaaaacatagaatgaagctagccacacatacgacacatatagagcatcaaaaaagaacacaaacaagaaacagaagaagaagcagacaagcactacaaaggagataaggannnnnnnnnnnnnnnnnnnnnnnnnnnnnnnnnnnnnnnnnnnnnnnnnnnnnnnnnnnnnnnnnnnnnncgaagaaaacacgaggaccacacgcaaacaaggagaagcaacgaacaaagcaagcggannnnnnnnnnnnnnnnnnnnnnnnnnnnnnnnnnnnnnnnnnnnnnnnnnnnnnnnnnnnnnnnnnnnnnnnnnnnnnnnnnnnnnnnnnnnnnnnnnnnnnnnnnnnnnnnnnnnnnnnnnnnnnnnnnnnnnnnnnnnnnnnnncagacagcgcaggagataacggaggaaggacaaaaccaggcagagcgcggtacgggagaagcagggagacagagacgcgacggagagagccgcgaggagaggaggagacgccagggaagagcaagcggagagaacgaaggaagacagaggggcagaggcgcagcccgcgggaggccggggcagaggcagggtggggacgagaacggagagtaaggagagtgcagaggcgcacgaacacgagagcgggcaagcaagagccgcgacgcgctgaagcgagcacagaagacaaccagcaagcaagcagacggagaggaccaggaggcgaggcacgagggcgagaggcgaacagagagagcagccccaacgagagcgccgagcacagcacagaacagcacaggcaccacgacgggcgg

SEQ ID NO: 357454 - DNA, 1872 bp, Homo Sapiens
  misc_feature (1373)..(1402): n is a, c, g, or t
gatagtttattgaaatttgtagggagatttaggggagatcaaaggactgctcttcagactgggaaagaaatagcttttctttctgtattttgacttgttatttttgattaaaaaacatgttataccaatttaaaacgcttctcccctttcctccagtgataaatgctgctcattctttctacaatggaacaacaaccctaccaatatcagatgaagatagaaccccacggaaaagaattagcaaaacgttaaatatgaccacaagtcctgaagagaaaagaaaaatcactggggatactttcgttaagattgccaatgaagtaattggagaaatgaacttgaaaccagaggaggttttccttgcccaaggtactttacggcctgatctaattgaaagtgcatcccttgttgcaagtggcaaagctgaactcatcaaaacccatcacaatgacacagagctcatcagaaagttgagagaggagggaaaagtaatagaacctctgaaagattttcataaagatgaagtgagaattttgggcagagaacttggacttccagaagagttagtttccaggcatccatttccaggtcctggcctggcaatcagagtaatatgtgcttgaagaaccttatatttgtaaggactttcctgaaaaccaacaatattttgaaaatagtagctgatttttctgcaagtgttaaaaagccacataccctattacagagagtcaaagcctgcacaacagaagaggatcaggagaagctgatgcaaattaccagtctgcattcactgaatgccttcttgctgccaattaaaactgtaggtgtgcagggtgactgtcgttcctacagttacgtgtgtggaatctccagtaaagatgaacctgactgggaatcacttatttttctggctaggcttatacctcgcatgtgtcacaacgttaacagagttgtttatatatttggcccaccagttaaagaacctcctacagatgttactcccactttcttgacaacaggggtgctcagtactttacgccaagctgattttgaggcccataacattctcagggagtctgggtatgctgggaaaatcagccagatgccggtgattttgacaccattacattttgatcgggacccacttcaaaagcagccttcatgccagagatctgtggttattcgaacctttattactagtgacttcatgactggtatacctgcaacacctggcaatgagatccctgtagaggtggtattaaagatggtcactgagattaagaagattcctggtatttctcgaattatgtatgacttaacatcaaagcccccaggaactactgagtgggagtaataaacttcttgttctattnnnnnnnnnnnnnnnnnnnnnnnnnnnnnnggggggggcgccgcacaaagaaaatattcccccgggagggggcccaaagtttttacggcgtaacccgacttttctggatacacaagggggcccctaagaggggagccgtattaaataaggccagaagcacacggggccgcgcgtttaaccaaagggtgctggacaggggcggaaacaactgccctagctggggaatcctgggggaagaggaaccctacacttcggggcgggggacccatcagttggggccaacactctccctctaacaggagagatttttaaagaggcctctggagggggaaccttattaaacaccttcttcagcggtggttctttacggggtgtggtaaaacccccacggggggccagtaatgacctgcgtcggcttgagacgcaaactttggggctcacacggaggttagtgcgattgtgcggaacacttttttttcacccggggacgcctgtggtcg

SEQ ID NO: 357455 - DNA, 783 bp, Homo Sapiens
  misc_feature (246)..(553): n is a, c, g, or t
  misc_feature (588)..(588): n is a, c, g, or t
  misc_feature (616)..(618): n is a, c, g, or t
  misc_feature (621)..(621): n is a, c, g, or t
  misc_feature (640)..(640): n is a, c, g, or t
  misc_feature (653)..(653): n is a, c, g, or t
  misc_feature (668)..(668): n is a, c, g, or t
  misc_feature (671)..(671): n is a, c, g, or t
  misc_feature (685)..(685): n is a, c, g, or t
  misc_feature (688)..(688): n is a, c, g, or t
  misc_feature (709)..(709): n is a, c, g, or t
  misc_feature (717)..(717): n is a, c, g, or t
  misc_feature (723)..(723): n is a, c, g, or t
  misc_feature (726)..(726): n is a, c, g, or t
  misc_feature (730)..(730): n is a, c, g, or t
  misc_feature (732)..(732): n is a, c, g, or t
  misc_feature (741)..(741): n is a, c, g, or t
  misc_feature (749)..(749): n is a, c, g, or t
  misc_feature (761)..(761): n is a, c, g, or t
  misc_feature (763)..(763): n is a, c, g, or t
  misc_feature (765)..(765): n is a, c, g, or t
  misc_feature (771)..(771): n is a, c, g, or t
agcatcagtttaatatctagataaaatctgatgtatgtaattttacttttaagggtttttttccaaacagacgtcctgacaatgttgtttcctattccttgaacattcacctgacgcttatatactgtcattacttttatctgtcaactgatgtcagctactcaatttacacattacttttgtgcatttcatcctgtttctcagtttgacattgtcattcaaattcagagtttgacactgaaaccnnnnnnnnnnnnnnnnnnnnnnnnnnnnnnnnnnnnnnnnnnnnnnnnnnnnnnnnnnnnnnnnnnnnnnnnnnnnnnnnnnnnnnnnnnnnnnnnnnnnnnnnnnnnnnnnnnnnnnnnnnnnnnnnnnnnnnnnnnnnnnnnnnnnnnnnnnnnnnnnnnnnnnnnnnnnnnnnnnnnnnnnnnnnnnnnnnnnnnnnnnnnnnnnnnnnnnnnnnnnnnnnnnnnnnnnnnnnnnnnnnnnnnnnnnnnnnnnnnnnnnnnnnnnnnnnnnnnnnnnnnnnnnnnnnnnnnnnnnnnnnnnnnnnaatattagtaaagaagagtacaatcagaatatganaatgtgtaaatgtgcatattctcttttnnnctnatttggtagcattaaaaanacttaagcatcanagtttggctttatgnagnaggagtctgagacnccncaggtttcagcccttattaanagcgtggntcacanagngttnanttgcctgtncttctgtntccttatctgtnananggggangatgttgtcaca

SEQ ID NO: 357456 - DNA, 1808 bp, Homo Sapiens
ggtccggaattctcgggattccgaaccttgtcctcgctgcgcgccggcccctcggagccccacagcccgggaaggaggccgccgcgggccgggcgcccgctctgccaagcggacccgcaacccggaaaggcggcgcggcggagcctggagccggatcctgctcagaccgggccccggccggccagagccgcgggcatgtcggaggcgcggaaggggccggacgaggcggaggagagccagtacgactctggcattgagtctctgcgctctctgcgctccctacccgagtccacctcggctccagcctccgggccctcggacggcagcccccagccctgcacccatcctccgggacccgtcaaggaaccacaggagaaggaagacgcggatggggagcgggctgattccacctatggctcctcctcgctcacctacaccctgtccttgctggggggccccgaggctgaggacccggccccacgcctgccactcccccacgtgggggcgctgagccctcagcagctggaagcactcacttacatctccgaggacggagacacgctggtccacctggcagtgattcatgaggccccagcggtgctgctctgttgcctggctttgctgccccaggaggtcctggacattcaaaataacctttaccagacagcactccatctggctgtacatctggaccaaccgggcgcagttcgggcactggtgctgaagggggccagccgggcactacaggaccggcatggtgacacagcccttcatgtggcctgccagcgccagcacttggcctgtgcccgctgcctgctggaagggcggccagagccaggcagaggaacatctcactctctggacctccagctgcaaaactggcaaggtctggcttgtctccacattgccacccttcagaagaaccaaccactcatggaattgctgcttcggaatggagctgacattgatgtgcaggagggcaccagtggtaagacagcgctgcacctggctgtggaaacccaagagcggggcctggtacagttcctgctccaggctggtgcccaggtagatgcccgcatgctgaacgggtgcacacccctgcacctggcagctggccggggtctcatgggcatctcatccactctgtgcaaggcgggtgctgactccctgctgcggaatgtggaggatgagacgccccaggacctgactgaggaatcccttgtccttttgccctttgatgacctgaagatctcagggaaactgctgctgtgtaccgactgaagccaggcagggtctgggatcctcagggctccacctctccatctggaagccggagccataactgctgcagtttgggcccaggctatgtgctcttctggtgccctagggactgctgtggccagagcctggggccagccagtacagtcctgagccgaggaggagggactgcaagtggaagagagccagtctggaaggaagagctttccaggtggacagggcttcttggaagacccccaaagccccaggtatcctgggtgaagcctgtttgcctctcttgaaaatggcaggtgctcttgttttacccatgttgggtcagcctgaaactgccaaccagtaggaagcatggactctcctgagtgagaagagactgaaataggagcaagcagaaccctgagaggtgtcccatcttattgctgttgaggaccctgaaacaccgttgtttaaagacttcacacagaaggctctgaactgagccactggggaagggaagtttcagtaacatgacactaaaatggcagagacgttaa

SEQ ID NO: 357457 - DNA, 1289 bp, Homo Sapiens
  misc_feature (209)..(298): n is a, c, g, or t
agcggggtggctagggagacgcggcggtaacctggaccttaaaagtttgttgtcgttagggaataggtgggaatatggttgtgggattaatgaaacacagtaccaaagagattccagaaagagaactggtgtaggaatagggcctgcatgggaggagttcaaagatgcttcttggagggagccgataacccgcgggtggagcctacccnnnnnnnnnnnnnnnnnnnnnnnnnnnnnnnnnnnnnnnnnnnnnnnnnnnnnnnnnnnnnnnnnnnnnnnnnnnnnnnnnnnnnnnnnngagtgagccactgcgccctgcctggaactctatgaggaaataccattctcattttacagaatttatgatttatgaatatgcctgttaacaaatcacctatgattaatacatgtggaggcatatcttccccttatcatgaagagctctggaaattaaattttcaacatttaagtggagaaaggggtcataaatcaaggccaacattttcaatcacaaaagaattcatcttgagattcaatcaaacacaaaattccaaagagaaggaagaattgttggaactagctagaaaaatcattctcagatgtaagagaaaattgggtctcaaaaccctgggctctggaaggcatgtgcatcttcctgctgcatggactgaagtaatatatctggctcaatgcaaaggggaaatccaagatgaatctttaaatatgctttatgcatctctggaccatgcttcctttgattatgatcatctgcctgccttattttttgttgcggaatcggttttatacagactgtgttgtgatgcatccctcaaaacatatttatattcagttgaaataaagctagcaaagattggctatttggtcttcttacgactttttatatttttcctgcatggtcatctagaaagttttaaacaacatttacttaggcttcaaccatatttatacgcactttctttctctggagcatcatatcacaagtatccaaacatcttttcaaatgtgcaattcatcctgaaagcctcggaaattataggtaaaagagaactccgttctgaatccatttttagacctgtggaagataagaaaagatatgagaacacagattctgatatgggaggatatgaaattaaccacctgctctggcactgtgttgctgcttggtcttgtgttcagaataacaatcctcagttgaataacgtgcttgaacatctcgtcttccataagacacagcttcaaaagaaatgctggttggattcagtactggc

SEQ ID NO: 357458 - DNA, 877 bp, Homo Sapiens
  misc_feature (19)..(19): n is a, c, g, or t
  misc_feature (106)..(106): n is a, c, g, or t
  misc_feature (224)..(224): n is a, c, g, or t
cttatatttatgcaaaatntctttcgtgaagccatacctcagattcatcattaaaatcttcgtggttccctctgttcaagtgcaggtcattggggtagacaagaanactcacacacaggatcattaggatctctatggaattcgttcctcgatctacaaagtcaccattaaaaacatacgggttcctctctgaggggagaccattcttgtagaagatcaaaaanagatcatccagtttcccatgcaaatcaccacagattgttacctctttggagggatgaagtttgtatgtgagtgaaattcggcatttgcttcaggactttcttggtgtcaaatagcacctctaagacataatgggcatgaagtatctgttgttccttgaaggcctcaagaagtaaatcaatatccgtacaagtgatgaggaaattgtagctcgaggaccattataggagtctgggacatctatcgagtccacataatcccatctatccctcatgtcctgttcgctttcaagagactgatttcttaattctagctcttccttatgtatatgtgtgtagttttccaacatgaaggaaaagaaggtggataactgcatttggccttgttcatcagctatattcgatggactggaagatggtgagggcatagtgttgtctggccttcagtcgacgctttgtaacctcggtaccagttctggatgatcaacgcagctctcagtgatgtgtcagatctcctggttttcgttgaagaactgctgcatcccatgacttctatctaaatcatatgtgttcatgaattcaacttctgatttaaacacagagtgtgaaaagtgcctcccgttaagctgcgaggaaccactcttagccgatcctct

SEQ ID NO: 357459 - DNA, 886 bp, Homo Sapiens
  misc_feature (10)..(10): n is a, c, g, or t
  misc_feature (18)..(19): n is a, c, g, or t
  misc_feature (30)..(30): n is a, c, g, or t
  misc_feature (32)..(32): n is a, c, g, or t
  misc_feature (35)..(35): n is a, c, g, or t
  misc_feature (42)..(42): n is a, c, g, or t
  misc_feature (48)..(48): n is a, c, g, or t
  misc_feature (100)..(100): n is a, c, g, or t
  misc_feature (144)..(202): n is a, c, g, or t
  misc_feature (385)..(385): n is a, c, g, or t
agggccagcncccccccnncgcgccgccgncngcngccgcgnccgccncccccgggcgagcccagctcggcgccgcaccggagcatcctctggtaccatngcgggcgcccgccgaggggcagccgccgcgggaggcaaagtttnnnnnnnnnnnnnnnnnnnnnnnnnnnnnnnnnnnnnnnnnnnnnnnnnnnnnnnnnnncggccgcctcaccgcgccagggcacccatcctctcccctcttcggacagtcttctcggggtcctggagtccgccgtgcctagcaccccaaacaatccgaaacatagccgaggcgaatgcagctggagaggggcttgtccggaaaggcagccccgggaacagcaagcgcggagcgggtggctgntcccagatttccagggctccaggttctcgagagatactcccaaagagtttcgggcgagagtgcgtgccggcgggtggggggccgagaaattgtttaaagctcctcctggaaggtcctcacttctacatgacagacatccaccgcgaatccactaggtaaatccatttagctttgtgtgcggggactagggaggccacttcgccggcccaacctcctttcaagacagaagcagaccccatggaatccaggcgccccttccctccattcagccccggccggctcgcccgctagcgccagcctcccccgggcagcgcgcggagcagcggcgcgcatcgcctgctcccgaggcaatctccgcgtccgccgcctcctgacacttacgcccggcgaggggttcagagggaagagtgcgcccttctgaaggaagtgggaatcgaacgacggaaaggcagctgagaagaagatgcacggggggaggagattaatttaattaaggatcct

SEQ ID NO: 357460 - DNA, 1380 bp, Homo Sapiens
  misc_feature (29)..(29): n is a, c, g, or t
  misc_feature (79)..(80): n is a, c, g, or t
  misc_feature (971)..(971): n is a, c, g, or t
  misc_feature (1081)..(1081): n is a, c, g, or t
  misc_feature (1220)..(1220): n is a, c, g, or t
ccgaggcccagcgcccgtccgcagcgcgnccggcatggcggcgacaaggagccccacgcgggcaagggagcgggagcgnntctggcgctcccgccgcaggaagtgaccaagttcactcctggatgctagctacaagccaagccttagacactgtctggagaatggcaaaaggctttgtgatgttggcagtttcatttctggtggctgccatctgctacttccggaggctacatttatattcagggcacaagctgaaatggtggattggatatctgcagagaaaattcaaaaggaacctcagtgtggaggcagaggttgatttactcagttattgtgcaagagaatggaaaggagagacaccccgtaacaagctgatgaggaaggcttatgaggagctattttggcggcatcacattaaatgtgttcgacaagtaaggagagataactatgatgctctcagatcagtgttatttcagatattcagccagggcatctcttttccatcatggatgaaagacaacgatcattgttaagcgctcctgataaactgccgatatacacggccgaccttccctccaattctactgcctcggtttttggccacatacttccatctccaactattcttgagtccctgttgctacatccggtatttacgcaggagtcttgttttccttaccacccactttcctccccttcccccttgtccccccgataatcaccaccagtaaacaaacagcaacacctcacattttacttattatttttcgcctctagtagtactgctttcactacgtccgaaagttttttacccctctccccccgtctcatccgtattgttgttccattttagtcctattacagctatgtagcgacctgatcgctacatcctaatttcttacaactctccgttttttagcgttctcccccttcttgttcacctccccctcacagtgtgagtaatgtgcacnacgctgtcgatctattgcccttacccgacgctctctcgcttcctcgtctcatatttatctccctatacccatcctctcgtaccttcttctcattttggtctctgaagacncgtgctcagtgcttattattatatactagtccggtaactatccgtcgtccccttaaccccccctctcgctcttctattggctatctatgttaggactacctatttacgtgcaagtatcgacactccttatattacatcnataatactctggttattcttgcctatgcgcggtagtacacgacacccgttactgtccctggcctaccgatccgcgccgtaccccgcccctgtgcattggagatcccacactatttaccctcctcccacgtttcgtacctacaatcaccaggttcgttagg

SEQ ID NO: 357461 - DNA, 1082 bp, Homo Sapiens
  misc_feature (672)..(695): n is a, c, g, or t
  misc_feature (741)..(795): n is a, c, g, or t
  misc_feature (833)..(833): n is a, c, g, or t
  misc_feature (957)..(957): n is a, c, g, or t
  misc_feature (969)..(969): n is a, c, g, or t
  misc_feature (998)..(998): n is a, c, g, or t
  misc_feature (1012)..(1013): n is a, c, g, or t
  misc_feature (1020)..(1020): n is a, c, g, or t
  misc_feature (1022)..(1022): n is a, c, g, or t
  misc_feature (1025)..(1025): n is a, c, g, or t
  misc_feature (1031)..(1032): n is a, c, g, or t
  misc_feature (1037)..(1038): n is a, c, g, or t
  misc_feature (1042)..(1042): n is a, c, g, or t
  misc_feature (1047)..(1047): n is a, c, g, or t
  misc_feature (1050)..(1050): n is a, c, g, or t
  misc_feature (1054)..(1055): n is a, c, g, or t
  misc_feature (1060)..(1060): n is a, c, g, or t
  misc_feature (1070)..(1070): n is a, c, g, or t
atggccacaatgggagaaaagacagtccaccttcaaagtcaaccagaatgactcttaacctctcttgtctgggttgggcatccagataagattttcttcgtacaaagagtcttgctactaggaaaaagagtttgaaaatcactagtctaactaaatatctcactttaaaaaaagcacaaactaagactcaatgaggtttatcttccacaagatcagccagttttagcagagcagttgctaaaacccaggtctcaaactccttgtctatggctcatctaactaagcaacaaaaagcccaatgagctctggagagagagagggagctaaaacaggactcaatcaaaacccacttgggattagggaagccaccctctgtgagtgagttaaactgagattccctccccttcaccctggcttcctttgcagaacaagggtcaccgccagagggaaagctgagtttacggaggggatcctggttggagtcagagtataccttggtttggttttgtggggttttttgaggcagggttctaactgccacccaggctggagcacagtgacagtcatgggctcactatggccctcagacctcctggcctcaatgcgatcctcccacctcaacctccagagtgtctgggactataggcacgtgccaccatacccagctaatannnnnnnnnnnnnnnnnnnnnnnngagacagggtgtcactatgttacccaggtctcaatcactatgttannnnnnnnnnnnnnnnnnnnnnnnnnnnnnnnnnnnnnnnnnnnnnnnnnnnnnngtgtcaaccactgtggccagccacgcattggttttaangtccagaatttttctgtttggagccttcacaattagttttaggttgggagaccgtgaacccaccaagcagccctttagaggctggaaaaagagtttggaaaaaagaactctgtgggctttaggnatttctctcggnaatcctctaggggcgaggaggtaaatttnccactgggagggtnnttaagtntnttnttactnnctatnngggntaacncanacannataantaaatagggnaagtttaattga

SEQ ID NO: 357462 - DNA, 3136 bp, Homo Sapiens
  misc_feature (2508)..(2519): n is a, c, g, or t
agcggagtcggagccgggcttgcccgggcatgtgggagctgccggctttccggacgccacgtgcagaccggaagagacacgcggggcttcaggctgctgccccattggaagattactccccaggcttcccttgccccaagcagtgagctgactggaatggtaccccgggaggcccctgagtctgctcagtgcctgtgcccttccctcaccatcccaaatgccaaggatgtgcttcggaagaggcacaagagaaggagccgacagcaccagcggttcatggcccggaaggccttgctgcaggagcaggggctgctgagcatgcctccagaaccagggtcctccccactgcccacccctttcggggcagcgacagcaactgaagctgccagcagtgggaagcagtgtctgagggctggatctggcagtgccccatgcagcagaaggcctgctcccgggaaagcctcagggcccttgcccagcaagtgtgtggctatcgactgtgagatggtgggcacgggaccccgagggcgggtaagcgagctggcccgctgttccattgtgagctaccatggcgatgtcctctatgacaagtacatcaggcctgagatgcccatcgctgactaccgtacccgctggagtggcatcactcggcagcacatgcgcaaggctgtccccttccaggtggcccagaaagagatccttaagctcctgaagggcaaggtggtggtggggcacgcgctgcacaacgacttccaggcgctcaagtatgtccaccctcggagccagacccgggataccacctatgtcccaaacttcctcagcgagcccggcctccacacccgggcccgggtctctctaaaggacctggccctgcagctgctgcacaagaagatccaggtgggccagcacgggcactcatcagtagaagatgccacgacagccatggagctctaccggctggtggaggtgcagtgggaacagcaggaggcccgcagcctctggacctgccccgaggacagagaacctgacagcagcacagacatggaacagtacatggaggaccagtactggcccgatgacctggcccacggcagcagaggaggagccagggaggcacaggacagaaggcaatcgagaagggggcggggctccctggactgggcttccggtgtggccggtaggaagtgggggccaggcagagcagcgggcactccttcctgggcagggtggggcaggatgcagtgagccagccccagggaccagaggagtaggggtcatctgtaaccttgacaccctctgcacacagcatagccctctctctctccagggctgtaggataactttctcctgactcctgtggtattagctcaatggcactttacagaactccatggagatgtcaggtggaccatctactagggcccagcaggagtagggaatgtgccaacagactgcccaggttgccgcggccttccccaccccccagatctcctgagtcatcatgctgtgctaatgaaagggatcatatcatcctctctggggatggtgggtgggggtgtcaatatcctgggagctcccttaccccaactcaatgacttgggggtaaagttctcttccttttgttgcctacctcttcctccactcatttgggttcagaataaacatgccctgaagttaaagaggagttaagtcctaaaggaggcatttcttccccacctccctgacctggaactctggctacagccattgtaggaactccgtgcctggcctgtcagctccctgctaggctacagtggaatagcagagcccacaggcttctcgtggggagttggctccttaacatttcttggcaacagaaagccccaggcacagctcagggaggagggaaggcaggtaagctttggacgagaactggcatatttattttgacccaaatcagggatttccccagtccacccagtactgggctcttaagcaaaagtctgagaaacaagacagtggtttgaattctggggcctttgtgtaggattgtgcctgacctttatttatttattaacagcagggccactcgtctagggcagtggagtctgcgtgtctcctggggctggggcagggcattggcagttacgcagtggccctgaacctggtctggtgcccccgaacctggtctgatgccccctcagctctttgacaatcactgtggctgttgggttttctcctatttctaaaaatgttctcttctttcctaagtgacagttttgaagtattggataaccaagagctcaggtcacacagaccttggagccccatctttgcttgcagcttagctttgagatactaagcaagcgagggacttcactcttgagcctgttttttcctcatctgtaaagtggggatagtggtacggcctacctcatagggttgtaatgagcactaaatgtgaagtgcttggcacagtgcctggcacatggtgagccacagctactgtgagtttctgtttatcccccnnnnnnnnnnnnaagcccattgtttattctttgagaatttgttgtaacttcttcaggataacacctgagtccacaggctgagcagctgtggcccagacagaactgctccggcttggctgttccagcaggtggggcgctggcctcggtgagggcacagcagcaaggttcacggatatccgtgtgtcttgtctgtggccaccaggcacaggtttggcttccggtcagtgtcccgacactgtgcgggaggtgacaacagagcaaagcagcgcaggggtcagggaggtggagacactgctgaaatcacactaccccaccctcagctgaagccccacgttccacaaacttggggtcatagattgtccagtcactggctccctccctgtcagcacagcacagaggaaggggctaactgaatcttttaccacttctggcctggctccagaactttgttctagattccttaaaagtcggtagctgatgtcaaactcaattgagcagtagctttgatcccttggtctgggggtcgaaggaagatggcgctgttatcagcggggaaatgtactatttaagatcagctttgttgtaaaaccatttgttctagaataaaactcaattggaaacgtgaaaaa

SEQ ID NO: 357463 - DNA, 1119 bp, Homo Sapiens
  misc_feature (838)..(838): n is a, c, g, or t
  misc_feature (936)..(960): n is a, c, g, or t
gagcgaggcctgggtggcgaattcggcacgagggaacgcggggcttcaggctgctgccccattggaagattactccccaggcttcccttgccccaagcagtgagctgactggaatggtaccccgggaggcccctgagtctgctcagtgcctgtgcccttccctcaccatcccaaatgccaaggatgtgcttcggaagaggcacaagagaaggagccgacagcaccagcggttcatggcccggaaggccttgctgcaggagcaggggctgctgagcatgcctccagagccagggtcctccccactgcccacccctttcggggcagcgacagcaactgaagctgccagcagtgggaagcagtgtctgagggctggatctggcagtgccccatgcagcagaaggcctgctcccgggaaagcctcagggcccttgcccagcaagtgtgtggctatcgactgtgagatggtgggcacgggaccccgagggcggggtaagcgagctggcccgctggttccattgtgagctaccatggccgatgtcctctatgaacaagtacatcaggcctgacgatgcccatcgctgactaccgtacccgctggagtggcatcactcggcagcacatgcgcaaggctgtccccttccaggtggcccagaaagagatccttaagctccctgaaaggcaaggtggtggtggggcacgcctctgcacaacgacttccaagccgctcaagtatgtccacccctcggagccagaccggggataccacctatgtccccaaacttcctcagcgaacccgggcctcccaaccccgggcccggggcctctctaaaggacctgngccctgcacctgccttcacaaaaaacaatcccggtgggcccatcccgggcccctcctcactaaaaaaatcccaccaaagcccatggaaccttcctccnnnnnnnnnnnnnnnnnnnnnnnnnaccacccgggagggccccccatcctttctggacctccgctccgaagaacccaaaaaacctggcaaccagcccccaaaatgtgcaaaccctacctggggggaacccagcactggggcccaaataaacttgctcccccccgcccgaacaagaacggttccc

SEQ ID NO: 357464 - DNA, 923 bp, Homo Sapiens
  misc_feature (42)..(42): n is a, c, g, or t
  misc_feature (104)..(104): n is a, c, g, or t
  misc_feature (117)..(117): n is a, c, g, or t
  misc_feature (180)..(180): n is a, c, g, or t
  misc_feature (193)..(193): n is a, c, g, or t
tccccagaaaatgccaacaagggcaatcaccatggcatgagnaggtgaacagggaaaagatggtgatggcgtgagagacccccaacccgcaggatggagaagancagcatccagacnagacccaagagtgcgcaaagatggctgggagacgccagccatggggatctgctcgtcagtttnggtggtgcaaagnagtagtacatgttatagcgatccgtcaagtgcttcatgcacaggtagagcaccccaaaaaggcacaatgatggggcaagtgatgctgtacgccatcaccacgctgaacacgtttcatcatccacgcatactcacgcccaaactggaagtctatggcctggttctttctgatgttgactctctctggctctgatctagagaagaagaggcgggtgctgtagcagaagagtgaccccagacgcagcagctccatgcctgtgccaagtaaagctgccgtgatcacgtagttgacaaagaaggcgccgttgtctggcaggaacacacactggaacctgatggatgcttgctctagatagtagatgtcaaagagccagcggagaaagacatccaaactggtcagtcccatagagggcagaatgactaccatgaacaccagaaagatgtagcacttgtgcaccatgaccagattctgacttgatctggtccagtgggcctcgaggaaggcggagaagtagacaatcagaggcagtatcactgtgaagccccagagcatcacagaggggaagaactgggtcacaattgggttctgcagcttctcgatggggcgggtgacgttgtacatgtcgatagtgttcatgatgatggcaggcgtggtgagaaagaagaagaggaagaagaggaaggtgttattgcgataaagcgggcccaccaaaagaagcggcggacagaca

SEQ ID NO: 357465 - DNA, 1006 bp, Homo Sapiens
gcaggctggtacgccccggaagttagggatctcaccttcagcactgaggtccaagaagtttggagtttgtgaagttcgtgacctcaaacccaatggggccaacatcttggtaacagaggagaataagaaggagtatgtacacctggtatgccagatgagaatgacaggagccatccgcaagcagttggcggctttcttagaaggcttctatgagatcattccaaagcgcctcatttccatcttcactgagcaggagttagagctgcttatatcaggactgcccaccattgacatcgatgatctgaaatccaacactgaataccacaagtaccagtccaactctattcagatccagtggttctggagagcattgcgttctttcgatcaagctgaccgtgccaagttcctccagtttgtcacgggtacttccaaggtacccctgcaaggctttgctgccctcgaaggcatgaatggcattcagaagtttcagatccatcgagatgacaggtccacagatcgcctgccttcagctcacacatgttttaatcagctggatctgcctgcctatgagagctttgagaagctccgccacatgctactgttggctatccaggagtgctctgaaggctttgggctggcctaataaggccctgcccaactccgtggggttttttttaccatggctggacctggggaggggggagtttaaaaacacgacccagaaagaaattggtcaaaaacccattaaatggcactcccccaacaacagcacgccgaccccgaaactaatgtggccttggcggggccgcccttgggcccctcaaagaaaacttttccctaagacccattttcgctttcgggcggccggcgcgggcccccctttaaggggttaaagtgggacaccattggggccccctaaacgcctgtggttttcccctttagggagagaaaaccccgcgggggggctcagtggcgacccttaaagggggggccctgtggtggaaaa

SEQ ID NO: 357466 - DNA, 987 bp, Homo Sapiens
  misc_feature (14)..(14): n is a, c, g, or t
tctcgggatctccngcgaaggtgagtgatgggggcagcagcagtacagactttaagatggtgtcctctggcctcactgaaaaccagctacagctctctgtagaggtgttgacatcccactcttgttctgaggaaggcttagaggatgcagccaacgtactactgcagctctcccggggggactctgggacccgggacactgttctcaagctgctactgaatggagcccgccatctgggttataccctttgtaaacacataggtaccctgctggccgagctgcgggaatacaacctcgagcagcagcggcgagcccaatgtgaaaccctctctcctgatggcctgcctgaggagcagccacagaccaccaagctgaagggcaaaatgcagagcaggtttgacatgactgagaatgtggtaattgtggcatctcagaagcgacctttgggaggccgggagctccagctgccttctatgtccatgttgacatccaagacatctacccagaagttcttcttgagggaactacaggtcatcatccagctccgggacgacacgcgccgggctaacaagaaagccaagcagacaggcaggctaggttcctccggtttaggctcagctagcagcatccaggcagctgttcggcagctggaggctgaggctgatgccattatacaaatggtacgtgagggtcaaagggcgcggagacagcaacaagcagcaacgtcgggagtctagccagtcagaggcgtctgtccggagggaggaatcacccatggatgtggaccagccatctcccagtgctcaagatactcaatccattgcctccgattggaaccccacagggggagaaggacaaggaagaaagaaccacctgaagttaccctgctcagagaacagctgagtttggacgagctgtgggacatgcttggggagtgtctaagggacctagaggaatcccatgaccagcatgcggtgatagtgctaa

SEQ ID NO: 357467 - DNA, 962 bp, Homo Sapiens
ggcctgggtggcgaattcggcacgaggttagagctgcttatatcaggactgcccaccattgacatcgatgatctgaaatccaacactgaataccacaagtaccagtccaactctattcagatccagtggttctggagagcattgcgttctttcgatcaagctgaccgtgccaagttcctccagtttgtcacgggtacttccaaggtacccctgcaaggctttgctgccctcgaaggcatgaatggcattcagaagtttcagatccatcgagatgacaggtccacagatcgcctgccttcagctcacacatgttttaatcagctggatctgcctgcctatgagagctttgagaagctccgccacatgctactgttggctatccaggagtgctctgaaggctttgggctggcctaataaggccctgcccaactccgtggggttttttttaccattgttggacctggggaggggggagttaaaaaaagaaccagaaagaaattgtcaaaaaccaataaatgaaatccaccaactcaccgtgtgtgtcccagctgccccatcttccccagcgcatacctgttcctcttctcattctctccccgccgcctgtttcctcaccttctctcccctttccatgccgtccatgatccccaccccatgtgttttaaaaaggcagtagcctttgcagggacctgtctgtcccaactgtttgaacagtgtgctcctcagattctgtgttcagaaggatttgctgcattgagacttgaaacctttggataggggaaaaaattatatatataaagatttttttgttctgtttgcatttcttaatttgtgcttggaatgtgttgatgtgcacagctaatgattcaatgcgagacaagattggcgtctgtgttgtggaggtttcaaataaagagcactcttcataactcacttttcacaatggagtttttttcaaactt

SEQ ID NO: 357468 - DNA, 1743 bp, Homo Sapiens
taatagtgagacatctcagaagcgactattgcggtggacgggagcgtccagtagcacatctatgatccatgtagagcatccaagacatctagccagaagttcttcttgagggtactacagctcaacatccagctccgggacgacacgcgccgggctaacacagaaagccaagacagacaggcaggctagagtacctccggtaaaggctcagactaacagaatccaggcagctgttcggcagctggaggctgaggctgatgccattatacaaatgtcggagtctagccagtcagaggcgtctgtccggagggaggaatcacccatggatgtggaccagccatctcccagtgctcaagatactcaatccattgcctccgatggaaccccacagggggagaaggaaaaggaagaaagaccacctgagttacccctgctcagcgagcagctgagtttggacgagctgtgggacatgcttggggagtgtctaaaggaactagaggaatcccatgaccagcatgcggtgctagtgctacagcctgctgtcgaggccttctttctggtccatgccacagagcgggagagcaagcctcctgtccgagacacccgtgagagccagctggcacacatcaaggacgagcctcctccactctcccctgcccccttaaccccagccacgccttcctcccttgacccattcttctcccgggagccctcatctatgcacatctcctcaagcctgccccctgacacacagaagttccttcgctttgcagagactcaccgcactgtgttaaaccagatcctacggcagtccacgacccaccttgctgatgggccttttgctgtcctggtagactacattcgtgtcctcgactttgatgtcaagcgcaaatatttccgccaagagctggagcgtttagatgaggggctccggaaagaagacatggctgtgcatgtccgtcgtgaccatgtgtttgaagactcctatcgtgagctgcatcgcaaatcccccgaagaaatgaagaatcgattgtatatagtatttgaaggagaagaagggcaggatgctggcgggctcctgcgggagtggtatatgatcatctctcgagagatgtttaaccctatgtatgccttgttccgtacctcacctggtgatcgagtcacctacaccatcaatccatcttcccactgcaaccccaaccacctcagctacttcaagtttgtcggacgcattgtggccaaagctgtatatgacaaccgtcttctggagtgctactttactcgatccttttacaaacacatcttgggcaagtcagtcagatatacagatatggagagtgaagattaccacttctaccaaggtctggtttatctgctggaaaatgatgtctccacactaggctatgacctcaccttcagcactgaggtccaagagtttggagtttgtgaagttcgtgacctcaaacccaatggggccaacatcttggtaacagaggagaataagaaggagtatgtacacctggtatgccagatgagaatgacaggagccatccgcaagcagttggcggctttcttagaaggcttctatgagatcatttccaaagcgcctcatttccatcttcactgagcaggagttagagctgctttatatcaggactgcccaccattgacatcgatgatctgaaatccaacactgaataccacaagtaccagtccaactctattcagatccaggggtgggtg

SEQ ID NO: 357469 - DNA, 515 bp, Homo Sapiens
  misc_feature (463)..(463): n is a, c, g, or t
  misc_feature (494)..(494): n is a, c, g, or t
accgcactgtgttaaaccagatcctacggcagtccacgacccaccttgctgatgggccttttgctgtcctggtagactacattcgtgtcctcgactttgatgtcaagcgcaaatatttccgccaagagctggagcgtttagatgaggggctccggaaagaagacatggctgtgcatgtccgtcgtgaccatgtgtttgaagactcctatcgtgagctgcatcgcaaatcccccgaagaaatgaagaatcgattgtatatagtatttgaaggagaagaagggcaggatgctgggcgggctcctgcgggagtggtatatgatcatctctcgagagatgtttaaccctatgtatgccttgttccgtacctcacctgggtgatccgagtcacctaacaccatcaatccatttttcccactggcaaccccaaccacctcaggtaatttcaagttttgttcgggacgcnattgtgggccaaagttgttattatggacaanccttttttctgggagttgtta

SEQ ID NO: 357470 - DNA, 722 bp, Homo Sapiens
  misc_feature (48)..(48): n is a, c, g, or t
  misc_feature (106)..(106): n is a, c, g, or t
  misc_feature (149)..(149): n is a, c, g, or t
  misc_feature (190)..(190): n is a, c, g, or t
  misc_feature (205)..(205): n is a, c, g, or t
  misc_feature (215)..(215): n is a, c, g, or t
ttccatctcaaaaaattaaaataagaataataagaataaataaaatgnttatttgcctttgttcagaatatttttcagaacagcagcctacacacaagccacgacntaaaatacaactaataaacaggctcaggtcatttcttgcacantttttcacatagtatctaatactacactgtactagttttgntcctacccaaatganttacactttntgtcttctggactcctgtctttcaaatctcagcctcttttcttctccatctacacctgctttccgggtaattccatctcagtaaacactgacaatttccaaatttaaatctccagcatgagtctcatccctgaactctagacacatgaatcaacacagccaattggatgtataaggagcatctcaaaactaaccaaactccaaatctcaatttcctcaaaaactgattccatatatagtcatttcttatctctgtaaatggcaatacccttctcccaggtgctcaggttaagtcaaataaggcttatttcctcccactccacatcgaggcaatcagcaaatggtagttggctcaatgttcataattgaagtacttcccaccaataccacccgagaactgcaggccaagctgctgtgatttatggcctatttattgcagtagcctcttcactaggtgtctgcttctgcccttgctgccttacagtctagtcttaatgcaataaccaga

SEQ ID NO: 357471 - DNA, 1060 bp, Homo Sapiens
  misc_feature (4)..(4): n is a, c, g, or t
  misc_feature (16)..(16): n is a, c, g, or t
  misc_feature (27)..(27): n is a, c, g, or t
  misc_feature (38)..(38): n is a, c, g, or t
  misc_feature (42)..(42): n is a, c, g, or t
  misc_feature (47)..(48): n is a, c, g, or t
  misc_feature (51)..(51): n is a, c, g, or t
  misc_feature (54)..(55): n is a, c, g, or t
  misc_feature (85)..(85): n is a, c, g, or t
  misc_feature (90)..(90): n is a, c, g, or t
  misc_feature (93)..(93): n is a, c, g, or t
  misc_feature (95)..(95): n is a, c, g, or t
  misc_feature (115)..(116): n is a, c, g, or t
  misc_feature (118)..(118): n is a, c, g, or t
  misc_feature (122)..(122): n is a, c, g, or t
  misc_feature (124)..(124): n is a, c, g, or t
  misc_feature (137)..(137): n is a, c, g, or t
  misc_feature (144)..(144): n is a, c, g, or t
  misc_feature (146)..(147): n is a, c, g, or t
  misc_feature (151)..(151): n is a, c, g, or t
  misc_feature (158)..(158): n is a, c, g, or t
  misc_feature (161)..(161): n is a, c, g, or t
  misc_feature (167)..(167): n is a, c, g, or t
  misc_feature (171)..(171): n is a, c, g, or t
  misc_feature (174)..(174): n is a, c, g, or t
  misc_feature (185)..(185): n is a, c, g, or t
  misc_feature (187)..(188): n is a, c, g, or t
  misc_feature (193)..(194): n is a, c, g, or t
  misc_feature (197)..(197): n is a, c, g, or t
  misc_feature (209)..(209): n is a, c, g, or t
  misc_feature (217)..(217): n is a, c, g, or t
  misc_feature (225)..(225): n is a, c, g, or t
  misc_feature (230)..(230): n is a, c, g, or t
  misc_feature (244)..(244): n is a, c, g, or t
  misc_feature (251)..(251): n is a, c, g, or t
  misc_feature (263)..(263): n is a, c, g, or t
  misc_feature (280)..(280): n is a, c, g, or t
  misc_feature (285)..(285): n is a, c, g, or t
  misc_feature (288)..(288): n is a, c, g, or t
  misc_feature (296)..(297): n is a, c, g, or t
  misc_feature (332)..(332): n is a, c, g, or t
  misc_feature (349)..(349): n is a, c, g, or t
  misc_feature (363)..(363): n is a, c, g, or t
  misc_feature (380)..(380): n is a, c, g, or t
  misc_feature (528)..(529): n is a, c, g, or t
  misc_feature (571)..(571): n is a, c, g, or t
  misc_feature (609)..(609): n is a, c, g, or t
  misc_feature (891)..(891): n is a, c, g, or t
ccangaaccccccccnccagaatccgnggaaccccgcngccnggggnngcncgnncgccggcccgagccttcgggcccgccgccncccanccnanaagcaggcccccaagtcgtnntncccntntaccaggcggggngcgaccngnnaccngggtgcntgntggagnatangcncgccagcgagncnntccannggnacgagcgcggcncgccgccncctactcnccctntgaggcgctgctcnacgcgcncgtgcacgaccnccaaagcgtacgcgcantaccngcnggccacgnncccgcggcgcgcgctcgcaccgcccagtgccggcntccgcctgtgcgcggcncccgggccgcacgnggcgctggcagtgcgcnacaaccgcgtgggcattctgcgccgcatcctgcgcaccttgcgcgacttcccggccgaggagcgggcgcgcgtgctggaccggcgtggctgcagccgcgtggagggcggtggcacgtcgctgcacgtggcctgtgagtggcgcgcccnnagtgcctcttcctgctgctgggccacggcgcctcgcccggtntgcgggacggcggcggcctcacgcctctcgagctgctntgcgccagctgggccgcgacgccggggccactccctccgccgccggagcccccgcctcagctcccggggagccgcgccagcgccgcctgctgctgctggacctcctggcgctgtacacccccgtgggtgccgccggctcggcccgccaggagctggtgggcgaccggccgcgctggcagcggctgctgggtgaggacaagttccagtggctggcgggcctggcgccgccctcgctcttcgcgcgcgccatgcaggtgctggtcaccgccatctctccaggcngcttccccgaggccctggacgagctgccgctgcccccattcctgcagccgttggacctcactggcaaaggctaggcccggagcaccctaggcgctggattttgggacaaaactatttttcagagcgttgtaccggcactttatatatattgatctctgtacggcacaaa

SEQ ID NO: 357472 - DNA, 1001 bp, Homo Sapiens
  misc_feature (370)..(370): n is a, c, g, or t
  misc_feature (405)..(405): n is a, c, g, or t
cttgcattgtgtaatcacccgtcaaatcgtgctccccttcccggccggaattcccaagtgcccatgatcctgcccaaaatcccaacgtgttgttagcccaatgcatgctgccacttttcggccccggtatcccgctcaaccacggtaatccgggcatctggctgtttctgagccgccgcgcctgcgggaaacagtggccctagcagggataatgcagcgtacgccttggttgttcttgcacgaagcggcgttagacccatgcgtcctcaagagggcgagcttagtctgtctgcctgcgtcccgcgctcgtcccagtggaaggccttctcttggcgcgcaatatcctccagcagccacacgggtagcaggncgcgcaccgcctggtagtaaggcgtaacgacgacntgcggcactgcttctgcgctcgcgagcgcgccgcgcaccgaggcctcgggcccgccgtccgctgccaccccccaggcacgccgcgcgtcccacggcatgctggcggcggggcgttcctgggcctcaaggcatggatcccgcgaaggcacacctggttcctgcaccgcgatcacctagttccggggatgtgggtatatcacagtccactggccggagcctcagctttatacgttagctcctgggaggagacaggagggtgaaaacaacactggagaccggtgtgcaccgcactgcacagtctgccatcctcttcaggtcccatacctctcttgatctccccgactactagatgaagcgggtactgccatccacactttccagcagggcacaagcttctccaattctccaaggtcagtcaagccacggcagagccaggcactagaactcaggtcccactgcgtctcagtttgggctcattccagaattggtgggacaccccagacgcgtgggtcgacagatatcccggggaattccaggaccgtaccagcctgcttatataacgcagcggttcatagtacaaaagctttcccttcttt

SEQ ID NO: 357473 - DNA, 845 bp, Homo Sapiens
  misc_feature (57)..(57): n is a, c, g, or t
  misc_feature (79)..(244): n is a, c, g, or t
  misc_feature (371)..(539): n is a, c, g, or t
aaaaaatgaggtgagccagaaacatattgtaacccagaagggacaaaatcccacccnttccccttttgtcaagcacatnnnnnnnnnnnnnnnnnnnnnnnnnnnnnnnnnnnnnnnnnnnnnnnnnnnnnnnnnnnnnnnnnnnnnnnnnnnnnnnnnnnnnnnnnnnnnnnnnnnnnnnnnnnnnnnnnnnnnnnnnnnnnnnnnnnnnnnnnnnnnnnnnnnnnnnnnnnnnnnnnnnnnnttatctattgttagcagaggagggggtcacaaggtacatggtggggagatgataagacccattgtccagaagaagactgtcacaaggtcgattgatcagttaaggtaggacagggacaggtcacaannnnnnnnnnnnnnnnnnnnnnnnnnnnnnnnnnnnnnnnnnnnnnnnnnnnnnnnnnnnnnnnnnnnnnnnnnnnnnnnnnnnnnnnnnnnnnnnnnnnnnnnnnnnnnnnnnnnnnnnnnnnnnnnnnnnnnnnnnnnnnnnnnnnnnnnnnnnnnnnnnnnnnnnncctcttacttctgagggattgctcaaggtagaaggttaataaattcttaaactaccccccactttcactacagagattaagagtacagttctgtccaaggatttgatctggcccaacaaagagccttcttcagaagtggattagttttgtcctttggtgaggcttgtgatgggccttatttattcgtattgtaggcctcttatactattccaaaaacaagacaagggaactgaaaccactttgcataataatgtcacctattatctccagtgaggctagtctggtcacctctggatcaatagtatc

SEQ ID NO: 357474 - DNA, 1470 bp, Homo Sapiens
  misc_feature (4)..(4): n is a, c, g, or t
  misc_feature (28)..(29): n is a, c, g, or t
  misc_feature (32)..(32): n is a, c, g, or t
  misc_feature (87)..(87): n is a, c, g, or t
  misc_feature (91)..(91): n is a, c, g, or t
  misc_feature (139)..(139): n is a, c, g, or t
  misc_feature (155)..(155): n is a, c, g, or t
  misc_feature (189)..(189): n is a, c, g, or t
  misc_feature (194)..(194): n is a, c, g, or t
  misc_feature (212)..(212): n is a, c, g, or t
  misc_feature (274)..(274): n is a, c, g, or t
  misc_feature (278)..(278): n is a, c, g, or t
  misc_feature (310)..(310): n is a, c, g, or t
  misc_feature (318)..(318): n is a, c, g, or t
  misc_feature (327)..(328): n is a, c, g, or t
  misc_feature (354)..(355): n is a, c, g, or t
  misc_feature (358)..(358): n is a, c, g, or t
  misc_feature (364)..(364): n is a, c, g, or t
  misc_feature (366)..(369): n is a, c, g, or t
  misc_feature (372)..(372): n is a, c, g, or t
  misc_feature (375)..(387): n is a, c, g, or t
  misc_feature (390)..(390): n is a, c, g, or t
  misc_feature (393)..(397): n is a, c, g, or t
  misc_feature (400)..(401): n is a, c, g, or t
  misc_feature (405)..(405): n is a, c, g, or t
  misc_feature (413)..(413): n is a, c, g, or t
  misc_feature (416)..(416): n is a, c, g, or t
  misc_feature (420)..(420): n is a, c, g, or t
  misc_feature (423)..(424): n is a, c, g, or t
  misc_feature (426)..(426): n is a, c, g, or t
  misc_feature (429)..(429): n is a, c, g, or t
  misc_feature (437)..(437): n is a, c, g, or t
  misc_feature (440)..(440): n is a, c, g, or t
  misc_feature (447)..(447): n is a, c, g, or t
  misc_feature (451)..(451): n is a, c, g, or t
  misc_feature (453)..(453): n is a, c, g, or t
  misc_feature (461)..(461): n is a, c, g, or t
  misc_feature (467)..(467): n is a, c, g, or t
  misc_feature (486)..(486): n is a, c, g, or t
  misc_feature (497)..(497): n is a, c, g, or t
  misc_feature (503)..(503): n is a, c, g, or t
  misc_feature (505)..(505): n is a, c, g, or t
  misc_feature (509)..(510): n is a, c, g, or t
  misc_feature (516)..(517): n is a, c, g, or t
  misc_feature (552)..(552): n is a, c, g, or t
  misc_feature (577)..(577): n is a, c, g, or t
  misc_feature (582)..(582): n is a, c, g, or t
  misc_feature (585)..(585): n is a, c, g, or t
  misc_feature (590)..(590): n is a, c, g, or t
  misc_feature (596)..(596): n is a, c, g, or t
  misc_feature (600)..(600): n is a, c, g, or t
  misc_feature (695)..(695): n is a, c, g, or t
  misc_feature (757)..(757): n is a, c, g, or t
  misc_feature (1358)..(1397): n is a, c, g, or t
acangcatttctcatcagctctaagcannagnattagaattcatcaagcggactcacatcttttctctgcacagagagggctgaaangggngagaaagtcccttatgtatgtctagatttggtaaagcgaaggatttcngcgaatgagtcactgnggctatacacgtttgcaaattgtaaggcactggngggcngggagcacagataaaggncttctggggtcccccatcctgtccagcaacctcccagctcacaccttagcttctaccaagangggngaacagcagcatccctgctatcttcactcagnccccagangacacaggnnaccgcacagctccactcccaccatannttnttaggngnnnngtntcnnnnnnnnnnnnngtnttnnnnnctnntttngttttttnttnggtnggnncnttntgtttttnttnctttgtncttngngcactttnaatgcnagggttgtgattcacacangcgttgcccantttgtngnaagnntttttnntgggacctcggggggccaccatgtgggggcaattnttttttaatacccactggggggggnacgcnggngcccngggggngggngtgggggttggggttcttgctcaggtactgctggtggtagtcttccgcatagtagaaagtctgtacctcccggatgtcggtagtgatggggccgnaagccgtgctctgaaagaaccttttggtagttctctttgaagctccagggctgcctcccatntgcttggccagaggtcgggtagatgcccgagcggtactgagtgccatggtcgtccccctggcgcataccttgggtcgggtcgtgattctcccagaagaccttgagcagttcctcaaaactcatgtgttctggctggtacaccactcggacgacttctgcatggccagttttttctgagcagacttctttataagtaggatttgaagtatagcctcctgcaaaaccaacttgagttgaatacactcctttcaagacccagaatttcctttcagctccccagaaacatcccattccaaatacagccatctgtgttccctctgggaaaggttcgactgttctgttgcacattgacatgatgtttggccgctacaggggtctgttccttccggcccggcaaggcctcctgggggctgacgatgttcgaggccgagttgcccatcctcgggacgggaaagaggctgtggaggaggaggagctggcaagccctccgggtggccgagagcatgggagggcgccagccgaagggtggtcccgggggacggcgctaccggcagcggagccgcagccggaacggcagagagtggggtccgcggccggaacnnnnnnnnnnnnnnnnnnnnnnnnnnnnnnnnnnnnnnnntgctggcggggctggaggccgcccgtaatcgaggttgcccaaacccggggccgtaccggctgtcaccgggggc

SEQ ID NO: 357475 - DNA, 1452 bp, Homo Sapiens
  misc_feature (104)..(227): n is a, c, g, or t
agcggggcagcagaatctggggaatgcagtctgcgagctttccgcctgtgcggtacgagggtgagctgagaatgtcagggaccaaggcacagtatctgatacannnnnnnnnnnnnnnnnnnnnnnnnnnnnnnnnnnnnnnnnnnnnnnnnnnnnnnnnnnnnnnnnnnnnnnnnnnnnnnnnnnnnnnnnnnnnnnnnnnnnnnnnnnnnnnnnnnnnnnnnnnntacaaaaaattgtcaaaactgacattagaatggctcctcattctcattcctaacccctgcaagaaaactggctgcctctgagctggctggtctaacccacccgtcttggcggggaccctgcccccttgtcgttccggacctgctgggcctcaagatcctcgatcggccttctgctggctcagacggcgaaacagagatgcaggaaataagtgacgttgctcaagaaaaacctgacgcagtgaatcatgctgaatattaatattggatgaactgtgcttggcagacttgaagacttcatctcacatggaccagtggacagtcagagtgtggttctttcagagcacggcttcggccccatcactaccgacatccgggaggggacagactttctactatgcggaagactaccaccagcagtacctgagcaagaacccccaatggctactgcggcttggggggcaccggcgtgtcctgcccagtgggtattaaacaaataattgctccccacatggcggggcctttgaggttcccagtaaaaatgctttcaacaaatgcgcaatgctggtgtgattcacaatcgtggcatttaaagtgcacaaagtacaaaggaatttatacagattgggtttaccgaagtataatctataggaggcgcgatggcaagttgataaaatgtgacttatctcctaataagttatggtgggagtggagctgtgcggtttcctgtgtcttctggggtctgagtgaagatagcagggatgctgtgttcacccttcttggtagaagctaaggtgtgagctgggaggttgctggacaggatgggggaccccagaagtcctttatctgtgctctctgcccgccagtgccttacaatttgcaaacgtgtatagcctcagtgactcattcgctgaaatccttcgctttaccaaatctagacatacataaggggctttctctcccttttcagccctctctgtgcagagaaaagatgtgagtccgcttgatgaattctaatgctttgcttagagctatgagaaatgtttgttttaataaaaacctacagtccattggttgaagggtacaagaaacaagtgtcgacgcctctagagatccctctaggggcgcagcttgctcgtacccatcttcttgtcaagctggtactaaagtacggctgtaggaacatagcctcgccgctggtatacacgtcgagctgggaagcgcgtag

SEQ ID NO: 357476 - DNA, 991 bp, Homo Sapiens
ctgaggaaagaaaaaaaggcaagacttggcacagctcagtcaaatcagcttcttttgtctgctttctcggcttgagcttcaggaaagaaaaccgtcctggggtacagaaaaactcagaactttttggttttcaaacttagaaggctttttaagtctcttgggctatttgaaagtgttggtacatacaatgacgtttagtcaccagtattaagggaaataaaagcctttttcaaaacgaagcttccatagtgtccatgcatttgggaaatactatatttgattttttgcatgtatgattataccatgagagacaggattaatatagaagatggcaaggcaaatttctaattagagggaatattaattttctacaaaataaagtttgttcatcaatacaaacctgctttcaaatcaaatcagaaagacatccttcggaatgtgttcagaaccaattagtgacaacactgaagaccagaaaggcaagctgaagacaccagacttcgcttgaagggcaaacaagaaatccaaacatcatgtcaatggcaacagaacagtcgaacctttcccagagggaacacagatggctgtatttggaatgggatgtttctggggagctgaaaggaaattctgggtcttgaacaggagtgtatcaactcaagttgggtttgcgaggaggctatactttcaaatcctacttattaagaagtctgctccgaaaaaaactggcatgccgaagtcgcccgagttggtgtacccgccagaacacatgagttttgagagaactgtgccagaggctcctggcgagaatcacgaacccgagccaggtttgcgccccaggcgaaacgacatggcgccactgaaccggcggcattaccgacctttggccagcaatgtggccgcctgagtcccaagaaatacccacaggttttcaaaccagtgttgcgccctaaagaaccggaggagaaaaatatctctgcgggaaaacacccaa

SEQ ID NO: 357477 - DNA, 438 bp, Homo Sapiens
  misc_feature (341)..(341): n is a, c, g, or t
  misc_feature (348)..(348): n is a, c, g, or t
  misc_feature (353)..(353): n is a, c, g, or t
  misc_feature (384)..(384): n is a, c, g, or t
  misc_feature (396)..(396): n is a, c, g, or t
  misc_feature (417)..(417): n is a, c, g, or t
gtatgattataccatgagagacaggattaatatagaagatggcaaggcaaatttctaattagagggaatattaattttctacaaaataaagtttgttcatcaatacaaacctgctttcaaatcaaatcagaaagacatccttcggaatgtgttcagaacccaaacatcatgtcaatggcaacagaacagtcgaacctttcccagagggaacacagatggctgtatttggaatgggatgtttctggggagctgaaaggaaattctgggtcttgaaaggagtgtattcaactcaagttggttttgcaggaggctatacttcaaatcctacttattaaagaagnctgctcnggctnaaactgggccatgcaggaagtccgttccgantcggtgtaccanccagcatcacatgaagttttnccggggaacggcttcaaggtc

SEQ ID NO: 357478 - DNA, 1425 bp, Homo Sapiens
  misc_feature (2)..(2): n is a, c, g, or t
  misc_feature (6)..(7): n is a, c, g, or t
  misc_feature (56)..(56): n is a, c, g, or t
  misc_feature (93)..(93): n is a, c, g, or t
  misc_feature (124)..(124): n is a, c, g, or t
  misc_feature (178)..(178): n is a, c, g, or t
  misc_feature (186)..(186): n is a, c, g, or t
  misc_feature (205)..(205): n is a, c, g, or t
  misc_feature (208)..(217): n is a, c, g, or t
  misc_feature (320)..(320): n is a, c, g, or t
  misc_feature (327)..(327): n is a, c, g, or t
  misc_feature (374)..(374): n is a, c, g, or t
  misc_feature (396)..(396): n is a, c, g, or t
  misc_feature (406)..(406): n is a, c, g, or t
  misc_feature (416)..(416): n is a, c, g, or t
  misc_feature (426)..(426): n is a, c, g, or t
  misc_feature (894)..(894): n is a, c, g, or t
  misc_feature (901)..(901): n is a, c, g, or t
  misc_feature (913)..(913): n is a, c, g, or t
  misc_feature (960)..(960): n is a, c, g, or t
  misc_feature (963)..(964): n is a, c, g, or t
  misc_feature (972)..(972): n is a, c, g, or t
  misc_feature (983)..(983): n is a, c, g, or t
  misc_feature (995)..(995): n is a, c, g, or t
  misc_feature (1008)..(1008): n is a, c, g, or t
  misc_feature (1029)..(1029): n is a, c, g, or t
  misc_feature (1032)..(1032): n is a, c, g, or t
  misc_feature (1047)..(1047): n is a, c, g, or t
  misc_feature (1056)..(1056): n is a, c, g, or t
  misc_feature (1059)..(1059): n is a, c, g, or t
  misc_feature (1076)..(1076): n is a, c, g, or t
  misc_feature (1080)..(1080): n is a, c, g, or t
  misc_feature (1083)..(1083): n is a, c, g, or t
  misc_feature (1113)..(1113): n is a, c, g, or t
  misc_feature (1120)..(1120): n is a, c, g, or t
  misc_feature (1128)..(1128): n is a, c, g, or t
  misc_feature (1135)..(1135): n is a, c, g, or t
  misc_feature (1145)..(1146): n is a, c, g, or t
  misc_feature (1149)..(1150): n is a, c, g, or t
  misc_feature (1190)..(1190): n is a, c, g, or t
  misc_feature (1195)..(1195): n is a, c, g, or t
  misc_feature (1200)..(1200): n is a, c, g, or t
  misc_feature (1203)..(1203): n is a, c, g, or t
  misc_feature (1210)..(1210): n is a, c, g, or t
  misc_feature (1212)..(1212): n is a, c, g, or t
  misc_feature (1216)..(1216): n is a, c, g, or t
  misc_feature (1231)..(1231): n is a, c, g, or t
  misc_feature (1238)..(1238): n is a, c, g, or t
  misc_feature (1256)..(1256): n is a, c, g, or t
  misc_feature (1267)..(1267): n is a, c, g, or t
  misc_feature (1275)..(1275): n is a, c, g, or t
  misc_feature (1279)..(1279): n is a, c, g, or t
  misc_feature (1293)..(1293): n is a, c, g, or t
  misc_feature (1319)..(1320): n is a, c, g, or t
  misc_feature (1334)..(1335): n is a, c, g, or t
  misc_feature (1337)..(1338): n is a, c, g, or t
  misc_feature (1357)..(1357): n is a, c, g, or t
  misc_feature (1364)..(1364): n is a, c, g, or t
  misc_feature (1372)..(1372): n is a, c, g, or t
  misc_feature (1375)..(1375): n is a, c, g, or t
  misc_feature (1380)..(1380): n is a, c, g, or t
  misc_feature (1385)..(1386): n is a, c, g, or t
  misc_feature (1393)..(1393): n is a, c, g, or t
  misc_feature (1419)..(1419): n is a, c, g, or t
cnagannggtgggaacgaacagtgttgatatatgataacagatgacaatgattttngtcaacaaacgtatttacacgttttcttcatattacntgtgtttttatggcccagctgagtgctaaangcaagtgattcccggtaggtttagttttgaagctccaacttcaaagaagtttcnataatatntaaggaaaaaaaccaaatnagnnnnnnnnnncccaatttaaggttatacgacatggccacagatgatagcctggctgcacaagccaaaccaaggaatgggatttgtgattgtccctattgcctgcaagggctanactccgngtaaccaagattttataagccggaagagttataaaatacttacctcngaaaaaagtctacttcctgtanaaatttttcncacatcccanataaggggtnatgtctgtagaaaagaaacgtaaaataatttgcttgtgaaatctgcaaactgaggtggaccaaagtcccagaaacctgagcctaaattaaaggaaaattagtatattacactataaaaacgatctctaaaagtaacagaagactcctaatggacctgggggaaacacctgtcgggatcccaagacctgattaaaccactgcagtgcccattaagctcaaagaatattaaaaatcaaagactatcacaggctacacttggcactagactcactacgaatacagaagagaagcatagcatgtgggcagtacagtgtcaagttccccttcttcaggagtccttgcttcattcacatctcgcgctcgcatggtctctatacctatctgatttagatctcatctccttgcacatgggctgtcagcattgggatgaaagctccccgatagctgtgtggactgctgcaagatctnccccgtntcccgaatcccngcacccaatgacgcctacagccattgtatcggcatctggaaacgggngcnngtatattnccttctggtcnacatgcaatttnctcagagctcatnttttccatagcggtatcgccnccncatgtcgttgatccngtaagggcnccnggagacatgcctaaaangttnacnaaattcctatgcgagaggtgaaaaggtttngcgcctntttggccnccggccntggctggcgnnccnncctccctctcttgaattacttggcctcccagtacttgagnacatnccatntcngtaaaangntatngcatccctaaataanccaggcnacatgctaggtcaatgtnccttactccgntttgcccnccgnatattctctccctntctcttgtatgtaatttctgcatganntcccccccttgttnncnntgatatgttattcattggntgaatcnccgtcccnccncggtnggcannattcttnccttatgttaaaatatgtaagagaangatgtc

SEQ ID NO: 357479 - DNA, 1147 bp, Homo Sapiens
gctggtaccggtccggaattcccgggatcccagggcagactggtagcaaagcccccacgcccagccaggagcaccgccgaggactccagcacaccgagggacatgctgggcctgcgccccccactgctcgccctggtggggctgctctccctcgggtgcgtcctctctcaggagtgcacgaagttcaaggtcagcagctgccgggaatgcatcgagtcggggcccggctgcacctggtgccagaagctgaacttcacagggccgggggatcctgactccattcgctgcgacacccggccacagctgctcatgaggggctgtgcggctgacgacatcatggaccccacaagcctcgctgaaacccaggaagaccacaatgggggccagaagcagctgtccccacaaaaagtgacgctttacctgcgaccaggccaggcagcagcgttcaacgtgaccttccggcgggccaagggctaccccatcgacctgtactatctgatggacctctcctactccatgcttgatgacctcaggaatgtcaagaagctaggtggcgacctgctccgggccctcaacgagatcaccgagtccggccgcattggcttcgggtccttcgtggacaagaccgtgctgccgttcgtgaacacgcaccctgataagctgcgaaacccatgccccaacaaggagaaagagtgccagcccccgtttgccttcaggcacgtgctgaagctgaccaacaactccaaccagtttcagaccgaggtcgggaagcagctgatttccggaaacctggatgcacccgagggtgggctggacgccatgatgcaggtcgccgcctgcccggaagaaatcggctggcgcaacgtcacgcggcctgctggtgtttgccaactgatgacggctttccattttcgcgggcgaacgggaaactgggcgccatcctgaacccccaacgaacggcgcttttcaccctgggaggaccacttgggtacaagagggaacaacgaaatcgaaattaccctttgggtggggccgcctggcggcaccaagctgggctggaaaacaaaatcccggccccatctttccgggggggccccaattaggaatgggggaaaaaaccttcgagaaaaaccttcccggaaaactt

SEQ ID NO: 357480 - DNA, 1426 bp, Homo Sapiens
  misc_feature (735)..(735): n is a, c, g, or t
  misc_feature (751)..(751): n is a, c, g, or t
  misc_feature (773)..(773): n is a, c, g, or t
  misc_feature (889)..(889): n is a, c, g, or t
  misc_feature (1334)..(1334): n is a, c, g, or t
  misc_feature (1389)..(1389): n is a, c, g, or t
  misc_feature (1396)..(1396): n is a, c, g, or t
  misc_feature (1402)..(1402): n is a, c, g, or t
  misc_feature (1416)..(1416): n is a, c, g, or t
agcgggggggaggagggagaggagggccgagccggcggcacgggaggcccggttttgaagccgcttctctgcccgagttaggtttcgcccagcgcaatttctttctctatgtactttgcgaataagtttcggagcatcggttaacagcctatgggtgaaatttggctttcattcatgaatgagaaattattcttgacagaagtattttaaaagaaaaatctttacgatggcctcagcagtacttagttctgttcccaccaccgcttctcgttttgccctgttacaagtggatagtggcagtggctctgattctgaacctggaaaaggtaaaggtcgaaatactggaaagtctcaaactttaggaagcaagtcaactacaaatgagaaaaaaagagagaaaagaagaacaaaacgaagaacagcaacagagtgaagcaaatgagctcaggaatcttgcttttaagaaaattccccagaaatcctcccatgctgtttgtaacgctcaacatgatcttccattgtcaaacccagtacagaaggattcacgagaagaaaattggcaagagtggagacaaagagatgagcagctgacatctgaaatgtttgaagcagatcttgagaaggcattgttactaagtaaactagaatatgaagagcacaaaaaggagtatgaagatgctgaaaatacttcaactcagtccaaagttatgaataaaaaagataaaagaaagatcntcagggaaaagacagncctctcacagtatcactaaaanattttcattcggaagatcacattagtaaaaagactgaggaagtggttctgaaagatggaagaattgaaagactaaagttagagcttgaaaggaaagatgctgaaatccagaagctnaaaaatgtaatcactcaatgggaggcaaagtataaggaagtaaaggcaagaaatgcacaattattgaaaatgcttcaggaaggtgaaatgaaagataaggcagaaatacttctgcaagttgatgaatcacaaagtatcaagaatgagctcactattcaggtgacttcacttcatgctgcattagaacaagaaagatctaaagtgaaagtattacaagcagagttagccaaataccagggtggcagaaaagggaaaagaaactctgaatccgaccagtgtaggtgattacattagcctttgaagtcaacacaaagtttaaaacttccaggattttgcaaagttgtatatatttaatgctgtgcaactgctaaactatgcagtttttgttgaaggaactaaaagcaactagctccctaatggtctataattttatttcttttgtgcntaaagtgaaaaagaagaaatagagaattccagcagaattcagtggttgctactanccatacntcttancactttagttttcntcagtcaata

SEQ ID NO: 357481 - DNA, 551 bp, Homo Sapiens
  misc_feature (129)..(190): n is a, c, g, or t
ccgccccggcgccccgggacccgttagtgcccagcctgcgggccgaccgcgacccccgcccggcgcgagcctgcccccagctctgccgacacttgacccagaccagtcccaacgcccagtgcggcctcnnnnnnnnnnnnnnnnnnnnnnnnnnnnnnnnnnnnnnnnnnnnnnnnnnnnnnnnnnnnnnacgggaggcccggttttgaagccgcttctctgcccgagttaggtttcgcccagcgcaatttctttctctatgtactttgcgaataagtttcggagcatcggttaacagcctatgggtgaaatttggctttcattcatgaatgagaaattattcttgacagaagtattttaaaagaaaaatctttacgatggcctcagcagtacttagttctgttcccaccaccgcttctcgttttgccctgttacaagtggatagtggcagtggctctgattctgaacctggaaaaggtaaaggtcgaaatactggaaagtctcaaactttaggaagcaagtcaactacaaatgaggaaaaaaagggggga

SEQ ID NO: 357482 - DNA, 1110 bp, Homo Sapiens
agcgggtttggtgagcgttgccggcgggcccgcggtacctcccgcactctgacctgcggcccgtaggtccgagccggggacggcggcgtcggtgggtcatgctccggcactccccctcgctgtgggagctggtggaggagcacgttccgctccgggagcgacgcgaagtgaagaggattctgggggaggcggcggtggacctgagcctggagctgcgggcggaggtggggagagggaagcagcggtcacagagatctcagcatcatcaaggaccaactgaacgtgtccaacattgaccaggtggccagacacctgaggggccttctggaggaggagtgtcacaccttggagagggagatcctcatcctgcagcgctgcctggaagaggagtatttgaggccttgccacccctctgaggcagccctggagcccaccctggcagagctaaaggaacagaagaaggccatggagcaggagctgcaggcatctgtggggccttcttgtgtctctcccaaccacaggcagcggcccttgggggtcctccacacaggggcctcagacccccgcttcccctctgcggggttgcacctctccagtgctgcctgcctgcacctcctctggagccctaccttagacctcgaggccagtcggctacccaccgctggggacggcagcttcagtgcagccccagggaagggccagcttccacacccatgtccagtgcagcaccccaagccccagcctgaagggctggtcaccgagtaggctctggcttctgccacagcgcacctgtctgccgctgccgcctcagctgctttggcccagccagcttcagatctggtcttggcgagctctcgccaggaccccaaggctgttggtctgtctggcccttgccccacccccttgccagatccctggtgtctggagctgagtggccgggcatcggtcccaagcatcaaagcctttggcctttctcctcccaggcctccacaaaggcctggcagacagaggtctcattccagcctgactcttgtcccctgggggacccagacaaagcacagcagccgctcagagacaggaatagaaatttcattaaaatctatggacttt

SEQ ID NO: 357483 - DNA, 687 bp, Homo Sapiens
cggcatcgagtcggccaaaagccgggcagaagagagcgccaaggactggcagttccggaacgggcaatcccagccgtaggggaccagcggcagagcacgggtccgagccggggacggcggcgtcggtgggtcatgctccggcactccccctcgctgtgggagctggtggaggagcacgttccgctccggtgagcgacgcgaagtgaagaggattctgggggaggcggcggtggacctgagcctggagctgcgggcggaggtggggagagggaaggtgggccacgcccctggcctgccccacgactcgggtgatttcccacctcctgcgggtccctggccctgccgggtaactcccgagatcctatcctggtctcccctttgactccgccctctccctcactcccccaggaccaccaagcattccggacactcgcctcacaccagtcgcaaggtatcccagatctccttgcaggttggcgatgttacgggcactgcgtccaagaggctcgatctctcgagcccacaggtcccgccccatctctgacccctcttctcttctgtgcgcaccgacgtctcataaaggacctctttgcgcacaggaagctccggcagttgctacacggtctccgagcacaaaccatctgtgcagggcaagaaccaagccaaagctagagtctataatacccc

SEQ ID NO: 357484 - DNA, 1102 bp, Homo Sapiens
  misc_feature (4)..(4): n is a, c, g, or t
  misc_feature (9)..(9): n is a, c, g, or t
  misc_feature (54)..(54): n is a, c, g, or t
  misc_feature (120)..(120): n is a, c, g, or t
  misc_feature (128)..(128): n is a, c, g, or t
  misc_feature (134)..(134): n is a, c, g, or t
  misc_feature (136)..(136): n is a, c, g, or t
  misc_feature (145)..(145): n is a, c, g, or t
  misc_feature (150)..(150): n is a, c, g, or t
  misc_feature (174)..(174): n is a, c, g, or t
  misc_feature (194)..(194): n is a, c, g, or t
  misc_feature (225)..(225): n is a, c, g, or t
  misc_feature (229)..(229): n is a, c, g, or t
  misc_feature (231)..(231): n is a, c, g, or t
  misc_feature (239)..(239): n is a, c, g, or t
  misc_feature (241)..(242): n is a, c, g, or t
  misc_feature (250)..(250): n is a, c, g, or t
  misc_feature (253)..(253): n is a, c, g, or t
  misc_feature (255)..(255): n is a, c, g, or t
  misc_feature (275)..(275): n is a, c, g, or t
  misc_feature (279)..(279): n is a, c, g, or t
  misc_feature (284)..(284): n is a, c, g, or t
  misc_feature (286)..(286): n is a, c, g, or t
  misc_feature (292)..(329): n is a, c, g, or t
  misc_feature (331)..(331): n is a, c, g, or t
  misc_feature (338)..(339): n is a, c, g, or t
  misc_feature (346)..(346): n is a, c, g, or t
  misc_feature (349)..(349): n is a, c, g, or t
  misc_feature (351)..(352): n is a, c, g, or t
  misc_feature (362)..(362): n is a, c, g, or t
  misc_feature (369)..(371): n is a, c, g, or t
  misc_feature (374)..(374): n is a, c, g, or t
cttnataancacccgtttacatagttaatagtgtatatttgcctatctgacttncccaaattagatgttctacttaaaatataggagtgtataagacctggatatactaaagttattcancgtgtatntaaaantnaaatttaantgggnacctttgtattatttatatataantaaatctagcaacatctacncatggacctatactttcctctcataacattntaananctgtaatnanntcttcaangtntntcctttctggaacttagaanatcnataangnagcaannnnnnnnnnnnnnnnnnnnnnnnnnnnnnnnnnnnnntntgtgacnntgtgaantanannatggtaatgnccaatgnnnaanaaaaaactgctaagaatgaagtagacactcaaaactttaccatgaccaaattagtgaactctattctatgcttaaagtatctgtttacagtatatctgactttccatcatagactatgagttcctcaaaaacaaagataccttttgtacccaaaaccaaagctcggtgccatataacccccgagaaatgagttgatcagaacaaagtttccctcacgtgttctttgaaagctgctagaagaagacccagtgtgtttacatcatgtttgtgaggtgttcaacttacctcatttgagaataaaagagctgtactaaggacaaagacgttaggcatgtatgagtttttagtcacagtttcccacttagcatcaattatttgggaaaaattaaaacacttattggtttattaatacctctgtttcctttaattcttttatataagaaaggatgaaggtgaaaggcatgaagattgtcaagtgtttgtgtatatgtgcacagatgtgtgtttagtccgttaaaacacagttagtaagtttcaatgtggttgtagagttgagttgtaagcccgtttaaagtaaaagtgtgttaaaccccgtgtttaaatgtaagtggttagggttgtgttatcgcggtttaaggtgaagtgtgttaaagtacagtaacacttgttcagtaaaaatgctgttgtacagtacctcaaaaaaaccctgtagttaaaaaaacaaagtg

SEQ ID NO: 357485 - DNA, 1332 bp, Homo Sapiens
  misc_feature (1090)..(1090): n is a, c, g, or t
tttgaaatattctcttcattaaatagtatttaacaaacatttaaggaccttctattggctagctaacacttgcatggaactctctcactatgttgcccaaactggccttgaactcctaggctcaagcaatcctcctaagcatcaaggactacaggtgcatgctagctaccacacccagctgtaatcaccttttgattttgtctgctagtgccagaggcatatgcataatgtgaattcatcaaactgcaaataaaaatgtttgagtccttttttaatatgtggatctctctggtactgtttttagataaataaaagagtagcctagaagaatacataaatcaaaaactgaccaattcagaattaaatgagatagtcccagcttgaattaataccagtctttaaaaaaataaatgtgagtttttacttttaattataaaaggtaatctaaattaccttaaactaaggtaattgccaagaccagttatggtagatttacttttataaatataataattgtaaaataaatattgtttataagcaaatagatgcagctaaagtcctttttaaaggctcacagaaagctttccaaagatgattaaatattctctaaaatactatttgtttagcacaccatttattttgaaaaacaggacaaaagaaaactcaatcagcccgtgtttgattcactttgaatttcaaattgaagaatgtccaaataaaactttattacctctcagtttaactatggtttgtctaatagttcattttaggacaaaatggggagtaaacttctccaactctgaggtgaaatacaccatcttcatgaccaaacacggtgaatcacgttgccatttttcattcttcacatctctcctgtcttaacctcctttccacttccagctgtgcttggtttttgtgtatttttgtaataggatgaatgttgttttcattttctttctcagaggtgcaaaatgcaggagcagagagtgtggattctcagccaggtccttggcacgccgcctcaggcaaggatgtgcctgagtgcaaaacgcagcagacgcctctttgtcacgtctccggacgaccccangcattccggagggggaaatgactttgtttatgtgtctatccctggtaatgatgttgtagtgcagcttaatttcaattcagtctttactttgccactagagttgaaagataagggaacaggaaatgaatgcattgtggtaatttagaatggtgatagcaataccttcttcttgcatatggtaatacttttaaaagttgaattgttttatttatttgtatattttgtaaagaataaagttattg

SEQ ID NO: 357486 - DNA, 635 bp, Homo Sapiens
ggcaaaacttggaaggaaagaacccttaaaagagaggctcacaaacaagtaacttgtgagaattctccaaagtctcctaaagtgactggaacagcttctaaaaagaaacaaattacaccctctcaatgcaaggaacggaatttacaagatcctgtgccaaaggaatcaccaaaatcttgtttttttgatagccgatcaaagtctttaccatcacctcatccagttcgctattttgataactcaagtttaggcctttgtccagaggtgcaaaatgcaggagcagagagtgtggattctcagccaggtccttggcacgcctcctcaggcaaggatgtgcctgagtgcaaaactcagtagactcctctttgtcacttctctggagatccagcattccttatttggaaatgactttgtttatgtgtctatccctggtaatgatgttgtagtgcagcttaatttcaattcagtctttactttgccactagagttgaaagataagggaacaggaaatgaatgcattgtggtaatttagaatggtgatagcaataccttcttcttgcatatggtaatacttttaaaagttgaattgttttatttatttggatattttggaaagaataaagttattggaaaga

SEQ ID NO: 357487 - DNA, 1755 bp, Homo Sapiens
  misc_feature (92)..(92): n is a, c, g, or t
  misc_feature (155)..(155): n is a, c, g, or t
  misc_feature (169)..(205): n is a, c, g, or t
  misc_feature (207)..(207): n is a, c, g, or t
  misc_feature (234)..(234): n is a, c, g, or t
aaacattacagggctttctcaaagaataataatatggtaatgaacccagtctgaatgatttcaaagcctgcccacaaggagggcaaaagagnaaaagaaccaaggggagaatatgattgcaaatagggaaagaaaaaaggaagggaggaattaanaggtggtttggggnnnnnnnnnnnnnnnnnnnnnnnnnnnnnnnnnnnnncnccaactttggattttctgtatgagtgngcaaggataggtactcaaaacctcctgacctctgaagaggcatgtctctgtaacaaaacagacttctccgtccactgagtaatgttatatttcacttctccgaagaagctgcctacgacagggagatataactctaatagccctaattgaagtctttcaacattaaatattttcaaattttcaagttaaaaaccttattaaaaagcaacatttaatcatcagttgctcttgctttaaacttagtgaaatacaaaggtcatgcctcttctccaaatgaatgattaaaaacaaatcacaggaaagtccatttttaattgcatgtaaagttttctccctatgttttctttaagaaatcctaatttaagtatactttaaatcaaaatacctctaaagacttccagtgggttggaatgtatgaaagaggaatggaaaagatttctaggtagcaaacagtagacattctacacttgggtgttttctgctctctttaaaaccaatcagtaaataattccttgcttagcacttaaaagtttaccatgaatgctacatctggataggatgaactatgactttgacataaccatccatactccactccgcagacagtaccattttaaagtttaggaattctggatccagtttccttggtgtattgagcttgattatagaaaagctttaccctcacccaactctcagaaaaagtccttgtcaacctggctcctaattcctagtcttgatcctaaaacagtatgacacatttcaagcactcactcattctctccttctttctgactaataggaaaatgtaagacactgtacacaaaggtatttccataggaatttgtgtgtagaggagctaggtttcatgctttagatgaagtctcctaactgtccccttggccgcagtactactgggcattctgcagcgaggcctgccccactgggagccggcctgcatcaggcagccctccctccagatcaaagcaaaagacatgcctggtccacttttctccagtgtcacatactcgccttcatcctccaaggtccctcaactccttgagtaagggaagctggcccattccctttttcatctttaaagcaagattcctgcattgtttctaaaacctgcatttgaacagttattccaggagatgtcttaaagtaagaacccaatgatgtcttccaattggcttggaatgttttttaaaatgtattttttttaaaggtgctttgttgtaactaagcaaactttgaactggatcactttgtaatttactttgtaagccctaacaggccaagactgctttcaaggctcatccagcagatatagttcttttgcaccagatttaaaacattctgttcctcactcttttctccagttagaaaatacaaagtgtaacagaatggatggaaaaaaattagatgttgacaagacccagacacaaaaagttacctcaatctccagaggttgaaatgtaagcaatttatccctgtctttgttcttaacgtttgataattgtt

SEQ ID NO: 357488 - DNA, 255 bp, Homo Sapiens
  misc_feature (32)..(32): n is a, c, g, or t
  misc_feature (57)..(57): n is a, c, g, or t
  misc_feature (63)..(63): n is a, c, g, or t
cagcggcatcacggttgcattcccattggacncatgcacctcccggatggtttttgntttttncgggggttctttggggtttgtttgtttgcttcttttccagagtgtggaaagtctacagtgcagaaaggcttgaacctgccagctgatttgaaatactttcccctgcgcagggccgtatgcatcctgccaagctgcgttatattctgtactgtgtacaataaagaagtttgcttttcgtttaccaagcacccg

SEQ ID NO: 357489 - DNA, 1055 bp, Homo Sapiens
  misc_feature (4)..(4): n is a, c, g, or t
  misc_feature (7)..(7): n is a, c, g, or t
  misc_feature (10)..(11): n is a, c, g, or t
  misc_feature (17)..(17): n is a, c, g, or t
  misc_feature (19)..(19): n is a, c, g, or t
  misc_feature (27)..(27): n is a, c, g, or t
  misc_feature (50)..(50): n is a, c, g, or t
  misc_feature (57)..(58): n is a, c, g, or t
  misc_feature (61)..(61): n is a, c, g, or t
  misc_feature (68)..(68): n is a, c, g, or t
  misc_feature (71)..(71): n is a, c, g, or t
  misc_feature (78)..(78): n is a, c, g, or t
  misc_feature (84)..(85): n is a, c, g, or t
  misc_feature (103)..(103): n is a, c, g, or t
  misc_feature (116)..(116): n is a, c, g, or t
  misc_feature (140)..(140): n is a, c, g, or t
  misc_feature (144)..(145): n is a, c, g, or t
  misc_feature (154)..(154): n is a, c, g, or t
  misc_feature (161)..(161): n is a, c, g, or t
  misc_feature (191)..(191): n is a, c, g, or t
  misc_feature (196)..(196): n is a, c, g, or t
  misc_feature (199)..(199): n is a, c, g, or t
  misc_feature (203)..(203): n is a, c, g, or t
  misc_feature (208)..(208): n is a, c, g, or t
  misc_feature (210)..(210): n is a, c, g, or t
  misc_feature (214)..(215): n is a, c, g, or t
  misc_feature (467)..(482): n is a, c, g, or t
  misc_feature (484)..(485): n is a, c, g, or t
  misc_feature (572)..(572): n is a, c, g, or t
  misc_feature (583)..(583): n is a, c, g, or t
tganaanaannaattantnttgggacnttctgagctgacatgccttaggnactgaannccncatttcnccntggctgnatttgnnctattttaagggtttagngtcaacggggaangacatttaagatgatttggatttnttanngtccctttngatgtcntctaccattactgttgaccaaatgaaaagnggttntgngagnatttncnatgnnattccggacattaatcgggatgtcccacattcatactctgtgctggagcggtttgtagaagaatgttttcaggctggaataatttccaaacaactcagagatctttgtccttcaaggggcagaaagcgttttgtaagcgaaggagatggaggtcgtcttaaaccagagagctactgaatataagaactcttgcagtcttagatggcagaaaaatacatacccgaaccgcgccaagagccgccagcacaaggnnnnnnnnnnnnnnnntnngaagcacttgttttgggtacaaggcatttctgacatttcataaacccacattcaaggggaattgttaaaggaaaggtccttcctctnttttttgtttntcgagggggcaaggagggacagaaaagtaacctcttcttaagtggaatattctaataagctaccttttgtaagtgccatgtttattatctaatcattccaagttttgcattgatgtctgactgccactcctttctttcaaggacagtgttttttgtagtaaaatcactggtttatacaaagctttatttagggggtaaagttaagctgctaaaaccccatgttggctgctgctgttgagatactgtgctttgggagtaaaaaaagaaagttatttctttgtcttaaagaatttttaaaaaattagtcatgagacttattcatctttccagggaacatactgattggtcttaaaagactagacagttaagtaaaaggtggctggaacatctatttttctacaaaactggaaaaatgaacctggttctagaagaatgtacaccaaaataaaacatgtgaagcgagtatgtattc

SEQ ID NO: 357490 - DNA, 1150 bp, Homo Sapiens
  misc_feature (167)..(168): n is a, c, g, or t
  misc_feature (192)..(255): n is a, c, g, or t
  misc_feature (401)..(474): n is a, c, g, or t
agcgggacaagaggatgggactgcagttgtggctgccaggccccggccagggtgaaaacaaggaacattccagagaagatcacaaggatgcgaataaaatcggagctgcacagggatctttgggctgtaataggaggggacacacaggggttggagtgcagtgggcnnacgatcctcggggctccagtgcannnnnnnnnnnnnnnnnnnnnnnnnnnnnnnnnnnnnnnnnnnnnnnnnnnnnnnnnnnnnnnnacaaggagagggacaaattccttcttggcatccttatggccctgtgacctgctaatgaatgctgactctgagttgctactagaatttggtttccttgtggcttcccaggaattgtgagccatcacggataaggacctgcaaggtcnnnnnnnnnnnnnnnnnnnnnnnnnnnnnnnnnnnnnnnnnnnnnnnnnnnnnnnnnnnnnnnnnnnnnnnnnngactcaagtgatcttctcacttcagccttctgagtagctgggaatacagccccctctgcagctcttcatgggggtccactcaagtcagaagccacatctgggtgtgattcagagagctgtttatgcaaaaccagccttgtcaccatcaggcaaggcacctgaattcccaccgcagaaagtgctgtggccctgaggacttttctgtcaccagccatttccaggtagacccagtgtaatcacaagcatccttgtaagtggcaaagaggcagaggagacagcgccagagaggcagctgcataagaaggatcaagatgttgctgactttgaagttggaagaagaaggccatgagcctcagtatgtgggcggcttctagaagctggaaggggcaaggagatggatttgacccttcagcctccaggggcagctgtacctgccatcactgattgtagcctggtgaggcctgttttagacttctgacctgtagagctgtaacataatacatttgggttgttttcaaccactaagtttgtggtaatttgttgtagcagctgtagaaaatgaatacatatgaatcctctggcatttgtttaagatttgctctatggcctagtatgtggttgtaaatgttccatctgtgcctgaaaaaatgtatatttctaattcagtagtctctgc

SEQ ID NO: 357491 - DNA, 1802 bp, Homo Sapiens
  misc_feature (244)..(244): n is a, c, g, or t
  misc_feature (1516)..(1524): n is a, c, g, or t
aacgcgcccttagggaaaagggcccggtatggccacaggaccaattcccctttaacacatcaggtaaggtcggagggttggccatcaggagcccgagaattgggtgcaaattgcaatttccaagcgcgggggggaacaaaagcaaagggttttaatggcacaggaggtaaatttccagggcaactctttggggcacaacacgggggggtagggggaattaccccaaccaggtattccccactcntacccctagataaggtcagcctgtttctgccttcccatcccatccagcacctctcaggccttcagatgtgccctatggggtcccctgctgctactcattctgtctctgtttttccagagatgctggaggccaggacagctgggcacatgcagactctggctgacttcaggcagctgcctgcccggactctctctacccactggccacgtgagttttctccttaatccccaccgctagagagaatgcatacacgaggggccaggagggaagccagacagaaagctcctaggattagggataagaggaggggaaaaagcagagtccactgtttaggagaggagttggccaacggtggcgggtgggatagaataaggtgggggaaaggggagaggcaaggtgacaggagggctgggctgagggagccaagggctagaccctcccctaacccctgtgtgtcccctcctattacagcccaaagatccctgtgcagctccgattttattcgcatccttgtgatcttctctggaatgttccttgttttcaccctggccggggccctgttcctccatcaacgaaggaaatatagatcaactggcgtgctcctgacacccctcccccaagcgcacccttgccatctacccatcgaatgctccctgtcttcaccctgccccgggcactgctcgcaacactcaacgaagcaaatacagatcaaacaaaggagaaagtcctgtggagcctgcagagccttgtcgttacagctgccccagggaggaggagggcagcaccatccccatccaggaggattaccgaaaaccggagcctgcctgctccccctgagccagcacctgcgggagctgcactacagccctggcctccacccccaccccgccgaccatccaagggagagtgagacctggcagccacaactgcagtcccatcctcttgtcagggccctttcctgtgtacacgtgacagagtgccttttcgagactggcagggacgaggacaaatatggatgaggtggagagtgggaagcaggagcccagccagctgcgcctgcgctgcaggagggcgggggctctggttgtaaaacacacttcctgctgcgaaagacccacatgctacaagacgggcaaaataaagtgacagatgaccacccctacaacgacgaggccccaacccgcggcataatcctgccggccgccccggccctccacaagccttcccgaacctccctttgggccgcgggccacccaggccacgggcacatgnnnnnnnnngtccccaaccctatccccgccatgacctcgccccgcggatccacctccgaaaagtatgccccgcgccacccactaggcttccttgaacacgcaatcccccgcgaagtccctgccgacccccgccccgcccacgtcacggccccgccctacttcaccgcgcccccgcggcgatgacaagaaaacgcccgcgcccccgggcgctgtagccggcacgcccgcggaccaccagagtccacaactccgacccagcctttcgcggcgcaccccccccaccgcgg

SEQ ID NO: 357492 - DNA, 890 bp, Homo Sapiens
  misc_feature (50)..(152): n is a, c, g, or t
  misc_feature (417)..(629): n is a, c, g, or t
ggacacaggaaagggccctgacaagaggatgggactgcagttgtggctgnnnnnnnnnnnnnnnnnnnnnnnnnnnnnnnnnnnnnnnnnnnnnnnnnnnnnnnnnnnnnnnnnnnnnnnnnnnnnnnnnnnnnnnnnnnnnnnnnnnnnnnacaaggagagggacaaattccttcttggcatccttatggccctgtgacctgctaatgaatgctgactctgagttgctactagaatttggtttccttgtggcttcccaggaattgtgagccatgatggataaggacctgcaagggaagaatgaggaagcctgggacagtgcaggaggggagagcactggtggtagagaggagtgatgacaagggtctccgccaaaagggaaatggagggggttaaagaagctgctggggagggttnnnnnnnnnnnnnnnnnnnnnnnnnnnnnnnnnnnnnnnnnnnnnnnnnnnnnnnnnnnnnnnnnnnnnnnnnnnnnnnnnnnnnnnnnnnnnnnnnnnnnnnnnnnnnnnnnnnnnnnnnnnnnnnnnnnnnnnnnnnnnnnnnnnnnnnnnnnnnnnnnnnnnnnnnnnnnnnnnnnnnnnnnnnnnnnnnnnnnnnnnnnnnnnnnnnnngcacattggtgtacatggaaccctaagaccttaaaggtttaatttaaaaaccgaaccctggcttcggttccaaaaataacaacaaaccgcccccttcgtcggtgcggctctggcccccccaaaaagctttccaaaacccttcgtttttgggcccgcgggcccccaaagggaaagggaaacatggccataagttgttttccaaaggaaaatccctggcccctgacacaaatgggcttgggattttcccccaccaattaaaaa

SEQ ID NO: 357493 - DNA, 839 bp, Homo Sapiens; identical to SEQ ID NO: 264323

SEQ ID NO: 357494 - DNA, 947 bp, Homo Sapiens
  misc_feature (65)..(77): n is a, c, g, or t
  misc_feature (764)..(789): n is a, c, g, or t
cagaggtgctctggcccttataggagggttgccccgacaccccgcggcagggaaccactccattnnnnnnnnnnnnntacagggaatccaaattccccatggaaaaaacccgaagtttccaccccccgcgaggtggtctcccctagaatttcccccttcctaaggcggaattcccaggggaaagcccctgtattggacaattccccatcccaggattcacccctgccagttttccaatgttaacccctggggatggggttttttaccaataaaaactgggggtttttttgttcacaggttttcccccttgcccaaaactcccaaaaacctggtgattttggacaaggccttccctttggagcccccgggatggggtgggggagcccccatgggcctgggaaggagggtcctgtggagggggctgcagggctgaccagcaggcagcctcatctggtcgggggcgggggcggcaggagcagaaccggggtctccgtccttgggcctgtcctggttggccacgggccctgaggatgcacggtgcctggggctcctgtgccggtgggcggggggcatgctggcctctgagcgatcaggcgaggccagcgagggtgtgcttgcaaattcaagcaataagaggggggttcctgggggcttccagcccaggctagaagcccccatggcttctggcagctgaacatcagccccaggtattggggtgattttggtcatgacagtgtgcctgtcccactgttacacgcatgaannnnnnnnnnnnnnnnnnnnnnnnnnctcagggctggaccgacgtcctagtggacctgatgtgaaattcctgtcaaacaaacaccacttttcaatggtttgctaggagtatttctgtattgaaagtttctaattatgctttttaaaaaaatactaaaaataaaggttcaagctgccaaattttc

SEQ ID NO: 357495 - DNA, 1568 bp, Homo Sapiens
  misc_feature (45)..(81): n is a, c, g, or t
agaggatgacgacatatggggaccccgttatcgcggtggcggcgnnnnnnnnnnnnnnnnnnnnnnnnnnnnnnnnnnnnnatcaggccaaatcggccgagctcgaattcgtcgagagcgggttttctgccgggtaatggctgcttccaagacccagggggctgtcgcccgaatgcaggaagaccgtgatgggagctgcagcacagtcgggggtgtaggttatggggacagtaaggattgtatcctggagccgctttccctgccagaaagtccaggtggcaccaccactttagaaggttctccatctgtgccttgtattttctgtgaagaacattttcctgtggctgaacaagacaaacttctgaagcacatgattattgagcataagattgtcatagctgatgtcaagttggttgctgatttccaaaggtacattttatattggaggaaaaggttcactgaacagcccatcacagatttttgtagtgtaataagaattaattccactgctccatttgaagaacaagagaattattttttgttatgtgacgttttaccagaagatagaattcttagagaagagcttcagaaacagagactgagagaaattctggaacaacagcagcaagaacgaaatgataccaattttcatggcgtttgtatgttttgcaatgaagaattccttggaaacagatctgttattttgaaccacatggccagagaacatgctttcaacattggattgccagacaacattgtaaactgcaatgaatttttgtgtacattacagaaaaagcttgacaatttgcagtgcttgtactgtgagaagaccttcagggacaaaaatacacttaaagatcacatgaggaaaaaacagcatcgtaagattaatcctaagaacagagaatatgacagattttatgtcatcaattatttggaacttggaaaatcgtgggaagaagttcagttggaagatgatcgggagttgctggaccatcaggaagatgactggtctgattgggaagaacaccctgcctctgcactctgcttattttgtgaaaagcaagcagaagcaattgagaagttgtatgtcctcatggaggatgcacactaatttgatcttctcaaaataaagtcggaacttggattacatttctatcagcaagtgaaactggtcaattttattcggaggcaagttcaccaatgcccatgttatggctgccatgtgaagttcaaatccaaagcacacttaagaactcacatggaagaaactaaacacacttcgctgctccccgatagaaagacgctgggatcaactggagtattattttccaacctatgaaaatgacactctcctgtgtacactatctgacagtgaaagtgacctgacagctcatgaacaaaatgaaaatgttcccatcatcagagaagatacatctaaactgtatgctttgaaacagagcagtattttgaaccagttgctacgtatagagtactctgaaacctagcacaaactaccacataagcattcttcatgtcttctctatgagaccatatcgatagacaat

SEQ ID NO: 357496 - DNA, 1238 bp, Homo Sapiens
  misc_feature (19)..(19): n is a, c, g, or t
  misc_feature (238)..(238): n is a, c, g, or t
  misc_feature (422)..(422): n is a, c, g, or t
ggcgaatgtggagggcgangtgcggcagggcaatcacaaaagggctgtcagagaggaggcgaggcgggaggaagatggagaggcgggtgggagcctcacctttggactctatcgccacagcccggtctagccgctacgcccgagctcaagtctgactcgaaactccgctgggtgcctgagaggacccggcaggccaaggggtggaactgagggggcggggacgcggcgggcgggtggngccgcctcccggctgggcacgcctccaagccagactggacgcgaaggaaaccggaacctgtctgcctacggtgcctgtttccggaagcagcttgagtccggacaccaacgacggggacgctgggaagccgacttccggcgccctattttctcacctggttcccgcggcgagccagcggcagcgncggcggcgatgagacagaagcactaccttgaggctgcagcgcggggactgcacgacagctgcccgggccaagcccgctacctcctctgggcctacacttcgtcgcacgatgataagagcacttttgaagaaacgtgtccatactgtttccagctgttggttctggataactctcgagtgcgtctcaaacccaaagccaggttgacacccaaaatacagaaacttcttaatcgagaagcgagaaactatacactcagttttaaagaagcaaaaatggtgaaaaagttcaaagactccaaaagtgtattgttgatcacttgtaaaacatgcaacagaacagtgaaacatcatggtaaaagtagaagctttgtgtcaacattgaagagcaatcctgccactcctacaagtaaactcagcctgaagacaccagagagaaggactgcaaacccaaatcatgacatgtctggctcgaaaggcaagagcccagcatcggttttcagaacacctacatctggacagtcagtatctacttgctcctcaaagaacaccagcaaaacaaagaaacacttctctcaactaaaaatggtacttagtcagaatgaatcccaaaagattccaaaggtggacttcagaaatttcttatcttctctgaagggtggacttttaaaataagaaaatgcctgatgtcaattctgaaactaaagttgggtaaaccaactttttaaactcttattccattttttgaatacatggaaaactagaatctgaatggaaaattttttcttgccatcctttccggggtttatggggggaaaat

SEQ ID NO: 357497 - DNA, 1271 bp, Homo Sapiens
  misc_feature (80)..(80): n is a, c, g, or t
gttctttggggaaaccagactggttgtttggggaaatttgttaggtccaaaagagttccccccccagttggctggcttgntggagttcccacaggtgacctgccgtgccctgaattaatcaaaactgaaagaggcttccatgccccacatgtttccatggggtcccaaggggacactatgggatctccatgtgggggaaatcctccacagggcttggcaccattggtgctggtcagctgggctaagccctcagaaccattctggtttggacccagaagatccacttcattgagcagagttcgggcaattaccaggggtacggctaaaatcttggacgtctgcatcgaatcccattctgcacgggtaaaccattggtcttgtccatcacatcaccctcctccttcaaatctcctagcttatctccatcaaacgtacccttgtccttcttgtcaccttggtcgtttgcatcactgtcggcatccctggggccaaatcctccttttcttagacaggaatcgcccggggatgagctcaacacatactccaccatgctaacgcctagtcccccactctccgatcgtgcggacagtacagaattgacctcactgttcacatggaaactctgaccaggtcttctctgcaccatgatgggctgggaaactgaatgatcagatgttccccaggcactgtctcgccattgatcacccaggaatattccttttggtccatctttgctggattcatctgtttcccaaaactttttacctggcaagagctgctctcccatcgctcttccctccagagcaagtgcctgaaaatcatgattcagttcatccatggaacgcacctgatgttctgcatgaatgttatccccagtaggccatcgatgtttgctattattatagccgcctcctccacttcctcctcccccaagctgctcaccatgctgcctctgaaagaagtagtccaccatagcgtcgtcctgggaacggcctgcaactcctatagatcctgggacagggctggagtgagtcccagctgcaagagcctgatttgcagctggttgtggctgcgcttgcgaccctgttccagatgtcaaaacaacaggcatgttgggattagctggttcttgagggtgatgtttcagggggggtgaaagagtcctgccaaagcactgcttttctcttcaagacacatgcaacgctcattccaccaacacgggcggagcggtaggatgaagatggatttcagccccccgatcttctctctct

SEQ ID NO: 357498 - DNA, 1241 bp, Homo Sapiens
  misc_feature (814)..(814): n is a, c, g, or t
  misc_feature (816)..(816): n is a, c, g, or t
  misc_feature (825)..(825): n is a, c, g, or t
  misc_feature (831)..(831): n is a, c, g, or t
  misc_feature (834)..(835): n is a, c, g, or t
  misc_feature (839)..(839): n is a, c, g, or t
  misc_feature (842)..(843): n is a, c, g, or t
  misc_feature (848)..(851): n is a, c, g, or t
  misc_feature (854)..(855): n is a, c, g, or t
  misc_feature (857)..(857): n is a, c, g, or t
  misc_feature (864)..(864): n is a, c, g, or t
  misc_feature (1108)..(1108): n is a, c, g, or t
  misc_feature (1112)..(1112): n is a, c, g, or t
  misc_feature (1148)..(1148): n is a, c, g, or t
  misc_feature (1210)..(1210): n is a, c, g, or t
  misc_feature (1220)..(1221): n is a, c, g, or t
  misc_feature (1226)..(1226): n is a, c, g, or t
ggagtggcggccagcagaggagcccaggtcctacccggacgaggaagcccgaaaactggtctgactcacgctacgagcatgtcatgaagttgcgccaggcagccctgaaatcagctcgagacatgtgggctgattacatcctgtttgtagatgcggacaacctgatcctcaaccctgacacactgagcctgctcatcgctgagaacaagacggtggtcgcccccatgctggattcccgggctgcgtactccaacttctggtgtggaatgacttcccagggctactacaagcgcacacctgcctacatccctatccgcaagcgagaccgccggggctgctttgcagttcccatggtgcactcgaccttcctgatcgacctgcggaaggcggcgtccaggaacctggccttctacccacctcaccctgactacacctggtcctttgacgacatcatcgtctttgccttctcctgcaagcaggcagaggttcagatgtatgtgtgcaacaaggaggagtacggattcttgccagtgccattgcgcgcccacagcaccctccaggatgaggccgagagcttcatgcatgtgcagctggaggtcatggtgaagcacccgcccgcagagccctcccgcttcatctcggctcccaccaagacaccggacaagatgggcttcgacgaggtcttcatgatcaacctgaggcggcggcaggaccggcgggagcgcatgctgcgggcgctgcaggcacaggagatcgagtgccggctggtggaagccgtggacggcaaagacatgaacaccagccaggtggaggngntggggatanagatgntgnntggntanngggannnntannanggccggnccctcaccaagggtgagctgggctgcttcctgagccactacaacatctggaaggaggtggtggaccgggggctgcagaaatcgcttgtgtttgaggatgacctgcgttttgagatcttcttcaagagacgtctgatgaacctcatgcgggatgtggagcgggagggcctggactgggacctcatctatgtgggccggaagcggatgcaggtggagcaccccgagaaggctgtgcctcgcgtgangganctggtggaggcgactattcctactggacctggctangtgatctcctgcaagcgccgcaaactgtggctgtgagcgctctccaaatgtgctgtggagantctgccgtcnnttcgncaaaacagtgtcgag

SEQ ID NO: 357499 - DNA, 1166 bp, Homo Sapiens
ccgcgccgcgatgtggccgtggcggaggaagtgaggcaggcagtttgtgatgcccggcgtggccgcccctgggaggctcctgcccccatgaagacacccgaggctggcttggcggggaggcccagcccctggacaacccctggcagagctgcagccacagtgccggctgcacctatgcagctcttcaatggagacatctgtgccttctgccacaagaccgtgtccccccgagagctggctgtggaggccatgaagaggcagtaccatgcccagtgcttcacgtgccgcacctgccgccgccagctggctgggcagagcttctaccagaaggatgggcgacccctctgcgaaccctgctaccaggacacactggagaggtgcggcaagtgtggcgaggtggtccgggaccacatcatcagggccctgggccaggccttccacccctcctgcttcacgtgtgtgacctgcgcccggtgcattggggatgagagctttgccctgggcagccaaaacgagatgtactgcctggacgacttctacaggaaattcgcccccgtctgcagcatctgtgaaaatcccatcatccctcgggatgggaaagatgccttcaaaatcgaatgcatgggaagaaacttccatgaaaattgctacaggtgtgaggactgcaggatcctcctgtctgtcgagcccacggaccaaggctgctaccccctgaacaactatctcttctgcaagccatgccatgtgaagcggagtgctgcggggtgctgctgagagtgcccgctgggcagtgaacagaccactagccccggctggggcccttccctgacttggtttcccttcctaacctgctcttgcacactttccttctgagcctccatggagaccagcctgcaagccggcccagcctgtccaggatacagtggggctgagcacccccaggccttccactcctctaccctctgggcaccagaaggctcctggaccatgagcttcacccccagaattccctgctgaccctgccccacttccagggaaaagctggggggaggttggacccctctcactgactagctgtctggtaggggtgctaggaccagcctcgcctgtgggggttgagctgtttgaggacaaactccaaggtcccttaaaaagtgccttttaga

SEQ ID NO: 357500 - DNA, 1627 bp, Homo Sapiens
  misc_feature (1079)..(1079): n is a, c, g, or t
ttggtagtgacaaatactggtccttgggcagtgtctggccggtggtgccatgcaagatgagtccctacagcttcatgccactccggcgccgtgagtccttccgggcaatggggctgaagttcacaatctccttgtagatgtgctctgagaaaggcagcatggtttaaggtgcgtaaagaggtgctgtggcgagaaagtccaccccccttcagagacagcatggagagcgaagtcagctcaaggagaaagaagcacccaggagacaatgcccaccaagaaggaggtggcaggtagggctggcagaggccaggcacaaagatggaggaagcaaggaagagaggctgcaggcggaggcgaggaagcccgaggccccagctcttacgcttccattcatccactgtgagtttctcgtgttctaaggaatcatcaaacggctgctgggcctccgtctcttcctcagggtcccggaagggttcaaagaagggatgggtgagggcctgcgcggccgtcaggcgcttgtccacgtctagctccagcatcttctccagcaggtccgcagctgcaggggcagagccaagagcctcacaccaggggctgggagagcccgccctctgggatacgctgagaggcccctggggagcgggctctgagactcaccctgggggctggcccgtgggaacagctgagtgaaatccttcctgggggtctgtggcagggactggatgtaggatttggccgctttgtcgttcagcttctgcacaaactccgtgccaggcaccccggtcactttcaggatctgggtcagctggtccaggtaatctttcccctggaacagagttttccctgtcagcatctctgccatgatacagcccacagacccagatgtccactgtctggttgtagtgcatccagctgaggatcacctcggggggctcggtaccagcgggtcaccacgtagcccagtcatctcggcgtctgcatgtcgcgccagcccaaaatccagaatcttcagttcacagtcctcattcacagccaggttgcctggcttcaggtccctgtgcacgaccccagcagagtgngatgtacttaaggcctttgagcatctgatacaccaggtactggatcttctcctcactgaactccatccccatgattcttctgcagatccgtatgcatgaagggcatcaccaggtagaagtcatagaagttgcgcagggaggaggctggggtgaagacatccaggagcccaatgacgttctcatgctgcatgtgcttcagcagcagcagctcccggtaggcgcgcttggcgaagatctcggactgaaagggtcggctcagcttcttgatggccaccttctcccctgaccgcttgtcgatggccgagcacacggagccataggccccgctgccgacgtgcgtcggggacacgtaggtcttgggcagctcccaggcggtcttgttgacgtcctgcttgtagaagccctttttccggatgaggctcatcccgggcacccgatctcggcggccccggcgtggcggctgcgttcgcggcccaacgggctcccagcgccccgacccccgctgcgcccgccccgcgccgccatcccgggaattccggaccggtacc

SEQ ID NO: 357501 - DNA, 869 bp, Homo Sapiens
  misc_feature (191)..(191): n is a, c, g, or t
  misc_feature (224)..(224): n is a, c, g, or t
tccagggggggtttttcccaaagaggggcccattttaacgggggccctttttaggattccaaaggtttatttttttcccccaaccgggaatttttggaaatttggcatttaactaggcccccttttccccccattaaggagaagggaccccttcgttctttggcttgaaagggctgtattccaagaagggnctgagtttggtagtgacaaattactggtccttngggcagtgtctggccggcggtgccatgcaagatgagtccctacagcttcatgccactccggcgccgtgagtccttccgggcaatggggctgaagttcacaatctccttgtagatgtgctgcttccattcatccactgtgagtttctcgtgttctaaggaatcatcaaacggctgctgggcctccgtctcttcctcagggtcccggaagggttcaaagaagggatgggtgagggcctgcgcggccgtcaggcgcttgtccacgtctagctccagcatcttctccagcaggtccgcagcctgggggctggcccgtgggaacagctgagtgaaatccttcctgggggtctgtggcagggactggatgtaggatttggcctgtctggttgtagtgcatccagctgaggatcacctcgggggctcggtaccagcgggtcaccacgtagccagtcatctcggcgtctgcatgtcgcgccagcccaaaatccagaatcttcagttcacagtcctcattcacagccaggttgcctggcttcaggtccctgtgcacgaccccagcagagtggatgtacttaaggcctttgagccatctgatacaccaggtactggatcttctcctcactgaactccatccccatgatcttctgc

SEQ ID NO: 357502 - DNA, 1197 bp, Homo Sapiens
  misc_feature (124)..(151): n is a, c, g, or t
  misc_feature (337)..(410): n is a, c, g, or t
aatacatttggagctttgggagtattaaagtatttacaccaagcttgtccaacccgtggcatgtgtcccaggacagctttgaatgtggcccaatacaaattttaaactttattaaaacatgagnnnnnnnnnnnnnnnnnnnnnnnnnnnnaaagctcgtcagctatcgttagtgttagtgtactttatgtgtggcccaagacaactcttcttccagtgtggcacagggaagctaaaagattggacacctctgatttatactagctcgttttgcttgttgaaaaatttggccaaatacctattgtcagcattcttgggtgaggattagcctaccatnnnnnnnnnnnnnnnnnnnnnnnnnnnnnnnnnnnnnnnnnnnnnnnnnnnnnnnnnnnnnnnnnnnnnnnnnntaactgtaggttgacaggtctagagtgatccatcccacctctaatattttgtgaatttatgactttgccttcagatgaggctgagctatacataaaacagtataaactagggtactgcctcgtatctcttgtaggctctctcaaatctctgtaccttccacttaaccctaattgagccaagctttagtcaggcgatcttggttgcctaccagaatgtcaggagactcatcttacacagtcatggtggccaatgtttctggtgggttgtgctgaaacagctcttctgagaacttccaaccacccatgctctaacctggagacagccatcccctgcctcagaataagtaccaattcgtagtacatgtatggtactcttgtccccaagaaatgttaggaagcttgtcagctgaatgagaggaggtgccttctgggtatctctgtgttggtgtatctgtgccattggctacagaacaagaaaaatactatttgccatgctattaccttggcagatgtgtaggtgatagtcatctggctttgagctgagatggtcagtgggttgtaaattccccactagcagatattcagggtggcctgagttatgtaaacaagtgagcaacacagctttaatttcatggaggaatcaaagctgcacactggtattaaaacaacttgattttgcgcacacagttgcatgcatggcaagctgttaacctctgggtggcattttcattatgaatttgttcaccacctgtcttgcttaagctacaaaataaatgcatttgactgc

SEQ ID NO: 357503 - DNA, 893 bp, Homo Sapiens
  misc_feature (409)..(482): n is a, c, g, or t
  misc_feature (673)..(700): n is a, c, g, or t
  misc_feature (824)..(853): n is a, c, g, or t
tcctaacaatttcctgggggaccaaaaggtcccataaaatgtactcccaaaatgggaccttattttaaggcaagggaaagcttgtctccgggttaaagcatgggtggttgaaagttccaaaaaagagctgtttcaagcacaaccccaccagaaacattggccaccatgactgtgaaagatgagtctcctgacaattctggtagacaacccagatcccctgactaaagcttggctcaattagggttaagtggaaggtacagagatttgagagagcctacaagagatacgaggcagtaccctagtttatactgttttatgtatagctcagcctcatctgaaggcaaagtcataaattcacaaaatattagaggtgggatggatcactctagacctgtcaacctacagttannnnnnnnnnnnnnnnnnnnnnnnnnnnnnnnnnnnnnnnnnnnnnnnnnnnnnnnnnnnnnnnnnnnnnnnnnatggtaggctaatcctcacccaagaatgctgacaataggtatttggcccaaatttttccaacaagcaaaacgagctagtataaatcagaggtgtcccaatcttttagcttcccctgtgcccacactggaagaagagttgtcttgggccacacataaagtacactaacactaacgatagctgacgagctttnnnnnnnnnnnnnnnnnnnnnnnnnnnnctcatgttttaataaagtttaaaatttgtattgggccacattcaaagctgtcctgggacacatgccacgggttggacaagcttggtgtaaatactttaatactcccaaagctccaaatgtattnnnnnnnnnnnnnnnnnnnnnnnnnnnnnncactcagcttaatcagctcagctctcttctaaagggggct

SEQ ID NO: 357504 - DNA, 506 bp, Homo Sapiens
actggcccggctgagcgcccagtcagctctgcagtaggggggttcctccttggtgactggatgggcacagccaagcacaggctcctgaagatcccagctccaggaaacatcagcatggttcattgcattgtccacctgaattcttcacccctccctgtggctgtgtccattgccctgtagtgttgcagttcccctcaggaaaaagatatcatttacttctctgacccttgatttggagcttggctatgtgacgtgctttggccaatgggatattggatgacacaacataaggagagacacagatatgcatatgcacaatgcagcttgcctttttatgcttctcccttcaccacgaaaagagctttccctgggggtagcagctgtccctgcagcctgtgttcagaatgcacaaatgtgaggagccaagcccagccagcttgaaagtgagttgccaggcccggcgcagtggctcacacctgtaatcccagcactgggcgctagccggt

SEQ ID NO: 357505 - DNA, 2111 bp, Homo Sapiens
  misc_feature (1517)..(1554): n is a, c, g, or t
  misc_feature (1556)..(1567): n is a, c, g, or t
  misc_feature (1573)..(1859): n is a, c, g, or t
  misc_feature (1884)..(1884): n is a, c, g, or t
  misc_feature (1916)..(1939): n is a, c, g, or t
  misc_feature (1943)..(2068): n is a, c, g, or t
gtgttagaagagtcagaggagtgggtagctcctctctggagacagattgtcccatgagctcaatcattcagctctcaacagagaggaggccctggagagagtggctcctctccgcagcaagttattccaatgtctctgcaggtctctgaagctcgcagaagagtgtagctcctctctgctggcaggtggtctctgtagctttcagcggagaaggtactcctctctgtagctggtcaccccaccgtctccagctatcagcagagagggtactgctctctgcagctggtcatcctgtcccctcgtctctaccatcttcatcctctggctattctctgcgctgctctggctgagcctagggtttttatggacctcagcggggaagaagctgtgtgctgattgggccattggcaggcccagaaaaggctccacgagtttccactctggtcagagggactggcagcccagcccccagaattaaggccctccctggcctgagggtggggccttactggggaccccacccccttcctcctgctgccattcatggctgcaggtcttggctccgactcccctccaagatcagagcagttgctggagtggagagaggccaggcagtggaagcagacacccctgagcttgcagggatggagggtgaagggggctgtccttcctgggatggccgatggtgcaggctacagagatgccctcgtcctgtgcctgggggggcagccacagctgcacctgggagctcccaccccgccaacttggaagaggcagggctcccacttgtccctggctcctgcctgcgcggctgcagctgcatctggaagggcaaattctgcctgttcccggctcccccaggagcagagaggctcggatccacagctgcagtttgggtggctgtagccctgcccaagagggtggggctcctgcctgctccatagagcagaaggcctgggtctgcagcagcggtttgcggctccagtcccaactcatgagggacggggcttccaccggctccatgaagtgtgcagccctagccacacagcgtgatggcagcagccactgccatcacaaggacccaaattcatttcttgcttcccctcctcttcctgcgcagagtccctgtgcttcagcactcagcgtgggcttccatttcccaaacagcaaataattcattcttttttaggccttggtatttgctgtcttctgcacccagaattctttccttactccctgccaggcccaggccaactctccaggctgatgtcactgcccttctggtacacacatcaacagcagttcttgttttaccattgtgtacagaattatttatgggcttgtctatcctacagaccgtgtggccataagctgtcagttgtgggtatcagcacacagcagggactcattaatgtttggggctttaaataaaaactcaagccagatgcagtggctcacacctgtaatcccaacactctggaggccaaggtgagaggattgcttgagccaaggtttannnnnnnnnnnnnnnnnnnnnnnnnnnnnnnnnnnnnncnnnnnnnnnnnnttatgnnnnnnnnnnnnnnnnnnnnnnnnnnnnnnnnnnnnnnnnnnnnnnnnnnnnnnnnnnnnnnnnnnnnnnnnnnnnnnnnnnnnnnnnnnnnnnnnnnnnnnnnnnnnnnnnnnnnnnnnnnnnnnnnnnnnnnnnnnnnnnnnnnnnnnnnnnnnnnnnnnnnnnnnnnnnnnnnnnnnnnnnnnnnnnnnnnnnnnnnnnnnnnnnnnnnnnnnnnnnnnnnnnnnnnnnnnnnnnnnnnnnnnnnnnnnnnnnnnnnnnnnnnnnnnnnnnnnnnnnnnnnnnntctacaaaataatttttaaaattanccaggcattgagacttggcagagtgtgaggcnnnnnnnnnnnnnnnnnnnnnnnncctnnnnnnnnnnnnnnnnnnnnnnnnnnnnnnnnnnnnnnnnnnnnnnnnnnnnnnnnnnnnnnnnnnnnnnnnnnnnnnnnnnnnnnnnnnnnnnnnnnnnnnnnnnnnnnnnnnnnnnnnnnnnnnggacaagaccctgtctctaaaactaaattaaataataaataaa

SEQ ID NO: 357506 - DNA, 1563 bp, Homo Sapiens
  misc_feature (86)..(86): n is a, c, g, or t
  misc_feature (136)..(182): n is a, c, g, or t
  misc_feature (493)..(551): n is a, c, g, or t
  misc_feature (888)..(890): n is a, c, g, or t
  misc_feature (899)..(899): n is a, c, g, or t
  misc_feature (902)..(902): n is a, c, g, or t
  misc_feature (905)..(905): n is a, c, g, or t
  misc_feature (907)..(907): n is a, c, g, or t
  misc_feature (909)..(911): n is a, c, g, or t
  misc_feature (913)..(913): n is a, c, g, or t
  misc_feature (915)..(915): n is a, c, g, or t
  misc_feature (917)..(917): n is a, c, g, or t
  misc_feature (921)..(921): n is a, c, g, or t
  misc_feature (957)..(957): n is a, c, g, or t
  misc_feature (969)..(969): n is a, c, g, or t
  misc_feature (979)..(979): n is a, c, g, or t
  misc_feature (1443)..(1443): n is a, c, g, or t
  misc_feature (1447)..(1447): n is a, c, g, or t
  misc_feature (1459)..(1459): n is a, c, g, or t
  misc_feature (1520)..(1522): n is a, c, g, or t
  misc_feature (1531)..(1531): n is a, c, g, or t
cagcttgttacacatgtacaacccccgcccctagtcaacaaccaactcaaacctcacccgggcatgttggcacgcgtgtataccangcctcttggtagctttagtcagtataatcgcttattacgtaggacgggtnnnnnnnnnnnnnnnnnnnnnnnnnnnnnnnnnnnnnnnnnnnnnnnagagtgagagtatatctctgtctcaaaaaaagaaacaaagaaagtacttatgcatagaaagtatatagccattcagcacaccttgctctcattggattcatataacccttaaatcttcatttaagccgacataaaattcccacatgcgtgagatacttaacagcctttgagtttaacaaagattaagtgggattatctctcttggcatcttcatgattttcttttatgcacagaaaaggaaactcgtcatctaaaaggagaattcaacataaaaagtgattgtcattttccaaactgctttcctgtttgcnnnnnnnnnnnnnnnnnnnnnnnnnnnnnnnnnnnnnnnnnnnnnnnnnnnnnnnnnnnctggagactaaaaggattaataaaatgtagcattcaccagcaggtccctacatataatgtagataatttggttccagtcttcctctcagacttcattttctactcttctctattcactctgcgaagcagacactagttgccattcctcaaataccttgctttcccacatctccattcctttgtcctcctgttcctgactgcttcagctaccttttctctttatatgtatacacacaacacaaggagataatcttatacaacccaaggacacagagagcagtaagatcgcatgaaggacacaaataggtacctaatacatcaacaggaagccaagtgnnnggccccttncgncancntnnncncncnggtnacaggctcttccatctctgcttctctccacaaagcngctttataatcncggcagagcngttttcactgcttttttgggaacgtaatccaggtttacccagcctcacttcaagaacaaacagagactaattagtatctatgaatcccaaaccccaggagaaagaaactgattggttcgaattatgtccgcttgtgtactcttggcacaatcacctttgaccagacagggcagttatgtagtcaggcctttttgttttgtaaagcagacatggctgccagaaccccatctttgtaggctatgttctcaaaggtatgtacttggcaaagatgccaaaaaatgtccaccacagaccataaaggagtaaattgcagctgaacttcaaaagcataaagaacaattgacatgttaaggattttcaacagactgactcctacttaaacaaattcagacctgaatttaaatggaactccttcaaagaagtcatccctgacccaagccccaatcaaaatttggtggccccanttanttattcttacantggcactctttttctttatagtacctatcatagtttaaatatgtatttgtgagtctcctcnnntgaaaacangactgttttgtttactgtgatatacacaatac

SEQ ID NO: 357507 - DNA, 1703 bp, Homo Sapiens
  misc_feature (31)..(31): n is a, c, g, or t
  misc_feature (54)..(54): n is a, c, g, or t
  misc_feature (98)..(98): n is a, c, g, or t
  misc_feature (152)..(152): n is a, c, g, or t
  misc_feature (300)..(300): n is a, c, g, or t
  misc_feature (1139)..(1139): n is a, c, g, or t
  misc_feature (1259)..(1259): n is a, c, g, or t
  misc_feature (1266)..(1266): n is a, c, g, or t
  misc_feature (1294)..(1294): n is a, c, g, or t
  misc_feature (1310)..(1311): n is a, c, g, or t
  misc_feature (1342)..(1342): n is a, c, g, or t
  misc_feature (1354)..(1355): n is a, c, g, or t
  misc_feature (1357)..(1357): n is a, c, g, or t
  misc_feature (1359)..(1359): n is a, c, g, or t
  misc_feature (1361)..(1361): n is a, c, g, or t
  misc_feature (1363)..(1363): n is a, c, g, or t
  misc_feature (1365)..(1365): n is a, c, g, or t
  misc_feature (1374)..(1375): n is a, c, g, or t
  misc_feature (1379)..(1379): n is a, c, g, or t
  misc_feature (1382)..(1382): n is a, c, g, or t
  misc_feature (1386)..(1386): n is a, c, g, or t
  misc_feature (1394)..(1396): n is a, c, g, or t
  misc_feature (1402)..(1404): n is a, c, g, or t
  misc_feature (1411)..(1411): n is a, c, g, or t
  misc_feature (1461)..(1461): n is a, c, g, or t
  misc_feature (1536)..(1536): n is a, c, g, or t
  misc_feature (1538)..(1538): n is a, c, g, or t
  misc_feature (1623)..(1623): n is a, c, g, or t
  misc_feature (1651)..(1663): n is a, c, g, or t
  misc_feature (1679)..(1679): n is a, c, g, or t
  misc_feature (1682)..(1682): n is a, c, g, or t
  misc_feature (1696)..(1696): n is a, c, g, or t
tcgtgatcactactatagcctggtgccaagnagattccccaacaagcaagagcnagagatcccagtgcaaccctcatgtgaggggcactcaacacctngcttcgaatagctgggctcgaatcatatggatgaagctcacaatgtaagaatcnccgagtgcagacttccatagctgtgtgtaagctacaagcctgtgcccgttgggctgtcactggaacccccattcaaaacaacttattggatatgtattcgctgctgaagtttctccgttgctctccatttgatgagttcaatctgtgnaggagtcaggttgacaatggctcaaagaaaggaggagaacggttaagtattttaaccaagagccttttgctgaggagaacaaaagaccagctggactctactggcagacctttggtgatactgccccagcgtaaatttcagttgcaccatttaaagctttctgaagatgaagagactgtttacaatgtgttttttgcaagatcaaggtcagctctgcaatcctatctaaaaagacatgaaagtagaggcaaccaatctggaagaagccctaataatccattcagtagagtggcactggagtttgggtctgaggagcctagacactcggaggcagcagactcaccgagatccagcaccgtccacatactgtcccagttgctgagactccgccagtgttgctgtcatctttctttactgaagtcggccctggatccaatggaactgaagggtgaaggtcttgtcctttccctggaagaacagctcagtgctttgaccttgtcagaactccgtgactcagagccatcttccactgtttcccttaacggcaccttcttcaagatggagctttttgaaggcatgcgagagagcaccaagatttcatctctgttggcagaattggaggcaattcaaagaaattcagcatcccaaaagagtgtcattgtctctcagtggaccaacatgctgaaagttgtagcattgcacctgaagaagcatggactgacttatgccaccatcgatggctctgtcaatcccaagcagagaatggacttggtagaggcatttaaccactccagaggccctcaggtaatgctaatctctctcttggccggaggtgttgnaaaaaacctgactggaggaaatcacctctcccttttggacatgcactggaatccatcacttgaagatcaagcttgtgaccgaatttaccgagtagggcagcagaaagatgttgtcatacncagattngtttgtgagggaacagaagaagaaaagntcttacagcttctttnnaaatagaatagatttggccaaacaagttctntcagggtctggnntntntntntnttttttttnnttgnctngcgncagagtcnnntttggnnnctaaccncctgtggataagggctcagaatagcaccattgctggtttgtatttttttntgggaataacaacctaaccatgagccttgaactctgttctttgcatttcaatttcaccgtcaagcctttcccctncntcgaaatgaggcataatcttatccccagaattgaggaggggttgtgttaaccaattagttaaccaattatgttaataatttattnaatgagtggaaaggaaaccaaaagaatnnnnnnnnnnnnngaatatgattaagagntgnccattttgaaaacnagtctgg

SEQ ID NO: 357508 - DNA, 1059 bp, Homo Sapiens
gagcgaggcctgggtggcgaattcggcacgaggtgagaaactaaatttggagttacaatggggaatcaataaagaaggaaacaaattaagtctccttaatcgaatcacagaatattcaagttgaaaaaggcagctagtcaagatcattagctggcccttcaatttccaagtagcaatctgaagcctagaggactgaggttaaataacttgcccaaggacatctagctacctagagaccagacctgagttttggtttcacctctgttacttaagagttgtcaactgatgatagtgctaagagctattattaacagtctgaccctagtttctcactagaaactaggcaagaaggtatctggcaccagcttgtcttaggccagtatagcttaggacagggatcgacagattttttttctttgaggcttttcaggccacatagttctctgtcacatgatgtgtgtgttttgttttgctttgctttcttttcttaaatccctttaaaactgtaacaataatttttagctacaaaaacaagctgtgggctggatttggcccatggcccatagtttgccatttctgatctagtatgtcagttcctttgagctttagctgtcttctaacaggaatccatcacttgaagatcaagcttgtgaccgaatttaccgagtagggcagcagaaagatgttgtcatacacagatttgtttgtgagggaacagtagaagaaaagatcttacagctccaagaaaaaaagaaagatttggccaaacaagttctatcagggtctggagaatctgtcaccaagctcaccttggctgacctcagagtccttttttgggatctaacctcctgtggaataaaggctcagaatagcaaccattgctggttttgaattaggatctggggaataacaaccctaaccatgagcccttgaaactctggttcctttgcatttccaatttcccccgggccagcctttttccacctttcctccaaaatgaggcataatctttccccccaaaaaatttttaagggagggggttttgggttaaaccaatta

SEQ ID NO: 357509 - DNA, 1200 bp, Homo Sapiens
  misc_feature (1)..(1): n is a, c, g, or t
nacatggtattaacaccatggatctgaagcaagagcggggcatctggttagcatacattggttctgtatatttcgagaatcacttaagtacacaaaggaagcgtgcaatgttagagagatgatgtgaacagtcttggtggtttatctaatggagaattcggtgtccttcaggaaactaaagatactcaaaagttgctccccaatttctattaacaatctaaaaatgaacatttccatttcatataaatatacaaatttaaaatgtgtgcagttcagaatggcctaccatttttagattgcttatgtgccagaaaatatacagtcaataaaaaaataccagagaggtggggacaaaaggctctctggatctgtacagcaacaatgaatatcacttcaacaggtagctattcgtggaggaagtggcatcctgggaaccaagaagcactgaaagatggcaggtcacaaatctggtgatgggggatatgatgtatagtaaggcccgtcttccctggcatcatattcaaggacaaaaggaggaaagtaaatctgtcctggtgatatggcagaaaacagctggtggaggctgtccacatggtggattttgtccttcagtcctgagacagaaaaggtggtaaaaaaccatgttgacacctttgaacgaaatgtgggatgtacaaaataaacagccttcaaattcctcttgtacttgacatcaacaacatcgtagagtttcttcaggaagtcggagtccaggtgattgtattcgctggtcagggtgtgaaaatacactaatacatactccttcacagcaatgtgatccattacatgaatgaaatataagagagccttgtccatatctattaatgttacaggaatgtttcttccaactaccaccatcactgttcgaccacagttatcaacacctgtttggtataaggcttttagagaagcaatatcagacagatcctcagatcttgcttgacataaccagcgattataatttctttgatgctgcttctgcagagctgcctctgataattgtcccctgaaggatcagttttctttgcttgtcaatatctccttccattcgagcaaaagcatgagagccaatgaaagagagatcaactcccaagccttcatcctcctccccggccgttaatggcccgaattcccgggcatatgtccggtaccgtcgacttg

SEQ ID NO: 357510 - DNA, 862 bp, Homo Sapiens
  misc_feature (6)..(6): n is a, c, g, or t
  misc_feature (75)..(75): n is a, c, g, or t
  misc_feature (90)..(90): n is a, c, g, or t
  misc_feature (105)..(105): n is a, c, g, or t
  misc_feature (134)..(134): n is a, c, g, or t
  misc_feature (258)..(258): n is a, c, g, or t
  misc_feature (279)..(280): n is a, c, g, or t
  misc_feature (314)..(314): n is a, c, g, or t
  misc_feature (316)..(316): n is a, c, g, or t
  misc_feature (318)..(318): n is a, c, g, or t
  misc_feature (357)..(357): n is a, c, g, or t
  misc_feature (399)..(399): n is a, c, g, or t
  misc_feature (403)..(404): n is a, c, g, or t
  misc_feature (413)..(413): n is a, c, g, or t
  misc_feature (430)..(430): n is a, c, g, or t
  misc_feature (432)..(432): n is a, c, g, or t
  misc_feature (435)..(438): n is a, c, g, or t
  misc_feature (445)..(445): n is a, c, g, or t
  misc_feature (447)..(447): n is a, c, g, or t
  misc_feature (449)..(449): n is a, c, g, or t
  misc_feature (451)..(452): n is a, c, g, or t
  misc_feature (454)..(454): n is a, c, g, or t
  misc_feature (457)..(459): n is a, c, g, or t
  misc_feature (480)..(482): n is a, c, g, or t
  misc_feature (485)..(485): n is a, c, g, or t
  misc_feature (492)..(492): n is a, c, g, or t
  misc_feature (499)..(512): n is a, c, g, or t
  misc_feature (528)..(528): n is a, c, g, or t
  misc_feature (600)..(600): n is a, c, g, or t
attgtntcttaatctctccatattcaactattcttcatttacaacaatagttacaccagtaattatgagaggctntcatatatcaaagcngctcaggtgggatcnacatacattggttttgaaatgtttccttngctcggttctcccaaacacataatttctgtttcagcagtacaaaggcatgttttaaaatctataacataaagaataaggaatagctttgtatttttgtcattgattaaatggcaccagaaaggnttagggaaatattaagaacannttaaaaaacatacgaaaaagtgattgtgaaggantntnattcgcatgataatagttaagcaaatttcatttcacatntttgtaaagctgaacagcagttcacaaaaaaatgttcattgnaganngtgttatgntcaaagccaatgagtcngnaannnnacgaccngncngnncnggnnngggggggattacgagggaaannnggngggtctntctttcnnnnnnnnnnnnnngtgtagaaaaataggngcaataatgatcaaagttttgatgtcttgagtctccatcttaggggattatcttacgtttaagcttaacatntcatgtagtaagatttggagagccacatacttaacagtaaaattaagtgtgtataaaacattaattgctaacaattgttagcaaactatttcagtgataatgttcattttgaaaatatgtactgtataacattaagaaaatatttaactccctgtaacaagttccattatgaaaatcttattcctcagtgaggttatcttgctgcactctgtagcaaatttgtttaatctacataataataaaatatctagctgcagtgcaa

SEQ ID NO: 357511 - DNA, 890 bp, Homo Sapiens
  misc_feature (606)..(606): n is a, c, g, or t
  misc_feature (888)..(888): n is a, c, g, or t
cccgggagctcgctgtgcccgatggctacaccaaccggactggtgctgtgtacctgtgcccactcactgcccacaaggatgactgtgagcggatgaacatcacagtgaaaaatgaccctggccatcacattattgaggacatgtggcttggagtgactgtggccagccagggccctgcaggcagagttctggtctgtgcccaccgctacacccaggtgctgtggtcagggtcagaagaccagcggcgcatggtgggcaagtgctacgtgcgaggcaatgacctagagctggactccagtgatgactggcagacctaccacaacgagatgtgcaatagcaacacagactacctggagacgggcatgtgccagctgggcaccagcggtggcttcacccagaacactgtgtacttcggcgcccccggtgcctacaactggaaaggaaacagctacatgattcagcgcaaggagtgggacttatctgagtatagttacaaggacccagaggaccaaggaaacctctatattgggtacacgatgcaggtaggcagcctcatcctgcaccccaaaaacatcaccattgtgacaggtgccccacggcaccgancatatgggcgcggtgttcttgctgatgccaggaggcaggcggagacctgccgaggaggcaggtgctggaaggctcgcaggtgggcgcctattttggcagcgcaattgccctggcagacctgaacaatgatgggtggcaggacctcctggtgggcgccccctactacttccagaagaaagagaaagtagggggtgccatctatgtcttcatgaaccaggcgggaacctccttccctgctcacccctcactccttcttcatggccccagtggctctgctttggntt

SEQ ID NO: 357512 - DNA, 1523 bp, Homo Sapiens
ttcctggtcaatgtggactgtggtgatgctactgtgtgcctctgacaaaggagaggcaagagccttctggttggggcgggaaataccatccatagttggctatttcttgagaaggaaggaaactgacctaggaccaaggtaaacctgacactgtgtctctctagtgcagattcctaactgctaccccaggctccatctctgttctacttcctgattgggtcaaattttaggagggacaacccactcatgcctcagaaaaatctgtcatatgggaaatgcctttaaaagccaatcccttgatgccttcttttaaaaagtagatttcacacttattcatttatccttacatggtatttgttaaggatccactgagcaccaggcattatgctgacgttgaaagagagccatcattatgactagaataataagtggcaaacgatgttgtgagaatggtgaacacgacctctgatgcagccttttgtgtgcgagttgttctacttcgggggtgatgttgattgcctctgcattcaacacactctattcccttgacaatgaggcctcacttaggcctcattgggtggagtcttgctgcagcattattctgggaatttatgccatgggcccactttctattgatagatgaacctgtcagttggttcattcctcatgcattccaaaaacatgcattgagcttgggtcaagggccaggcatgaggataggcatagttcctgccctcaagaagttcatgagcataggaggtgtatagacaaattgcaaaacaggcaagggtaccaaggtggcataagaaagcatcaattaactatcttggggaccagagaaaccctgagagaagcaatggctgctaaggttttaaaacaaagagtaaatttccagtagaatgaaaggattggcagggcatgccacaatgagggaagaatgtgcaaaggtgtggacgcatgaaatgccatgatgggttccgctgagcaacgtggcattgccagagcatgatgtggaagctcaggggttgaggggtcccttcataggtaggcagggctgaatcctaaggaaactggtaggaagtgtggaggagctagacttgtcatggaaggggtttggagccactggagcctttaaatcaggatagagtcatgatcagaattgcattttaggaaaatccctttggtggctgaatggagactgtggactggatgggcgtgggatggtggcatgggagctatgaggcctttttgaaatgtcaatactaaaacatagttgatggcctgctttacacgatgtttcctctacagcagatagtgagtttccaacacaaaatttatttccataaaagtctttggataaagcaccttaagagggattttcaacaaggagaggggagcattcaaagagctaatgtttccagttttattttgtcttggtgtagaattgctgggagaggtgtccagccatcctgccatttcttcttcccttacacagaatgtggcacatttagctccaggcttga

SEQ ID NO: 357513 - DNA, 1020 bp, Homo Sapiens
  misc_feature (506)..(518): n is a, c, g, or t
  misc_feature (615)..(672): n is a, c, g, or t
  misc_feature (710)..(763): n is a, c, g, or t
  misc_feature (829)..(852): n is a, c, g, or t
  misc_feature (928)..(975): n is a, c, g, or t
ggaccggtccggaattccctggatcgaacttctcaaccctcagagacttagatcttccacctcactccctcagccaagcctccaggccccctcgtgcatccgtggtggcctctctgccttctctgttctgttctccccatggcccagacatgagtggccccctagaaggggctgatgggggaggggaccccaggcctggggaatcattttgtcctgggggcgtcccatcccctgggcccccacagcaccggccttgcccaggccccagcctggccgatgacaccgatgccaacagcaatgggtccagtggcaatgagtccaacgggcatgagtctagaggggcatcttagcggagttcaacagctccttcttcagcaacggaaggactcaaccctgttggaaacccttgaaagcaccaagaagcccaaattttcgaagcccttccccacccacaagttccattgtgctaaggcctcctgagaggcccctcttaaaaaaagggaaannnnnnnnnnnnnaggggttggcgaacggggaaaattttccccccggggaagggtttccaaaggggattctttgagaccctcttttaaaaaattcaaattttttaaatgnnnnnnnnnnnnnnnnnnnnnnnnnnnnnnnnnnnnnnnnnnnnnnnnnnnnnnnnnnttgtgtaaaaccaccctggggggtttggtttaaaaaannnnnnnnnnnnnnnnnnnnnnnnnnnnnnnnnnnnnnnnnnnnnnnnnnnnnngtggagggaggggggaaatttttcttctcccctgaggagagaaggggccccctcaataaaattccnnnnnnnnnnnnnnnnnnnnnnnnagacctcctcccccctctcgtggggggaaaacacccttttttttaaaaacaacaagaagagatccctttcttcttnnnnnnnnnnnnnnnnnnnnnnnnnnnnnnnnnnnnnnnnnnnnnnnnaacaaaaacccctctttttttttgttttaaaaggaaagagagaaa

SEQ ID NO: 357514 - DNA, 886 bp, Homo Sapiens
  misc_feature (870)..(870): n is a, c, g, or t
tatcatatcgtcgaccaggcgtcgcggacgcgtgggcgctgggcatggatgcctccggccgcgcgcctctaaggacccggcgttcatggaatatgaagacaaggctggaagacctagcaagccaccctctccaaagcagaatgtgaggaagaatcttgactttgaaccactttccaccaccgcactcatcctcgaggacagaccagcaaatctcccagcaaaaccagctgaagaagctcagaagcacagacagcagtatgaagaaatggtggttcaggccaaaaagcgagagctgaaagaagcccagcgaaggaagaagcagctggaagaaagatgcagagtcgaggaaagcattggaaacgctgtgctcacctggaataatgagatcttacctaactgggaaacaatgtggtgctctagaaaagttcgagatttatggtggcagggaatccctccaagtgtgagaggcaaagtctggagcttagccattggcaacgagttaaatatcacccacgagctctttgacatctgtcttgcccgagccaaggagaggtggcggtcccttagcacaggaggctctgaagtggagaacgaagatgctggtttttcagcagcagacagagaagccagtctggagcttattaaactgggacatttctagaacatttcctaatctctgcattttccagcaaggtggtccatatccatgacatggttgcacagtattttgggcgcttatacttgttaccggccagatgtgggttatgtccagggcatgtccttcatagcagcagtgttgatcttgaacttagatactgcagatgcctttattgccttttctaaccttctgaataaaccctgtcaaatggngttttttagagtggac

SEQ ID NO: 357515 - DNA, 921 bp, Homo Sapiens
caccaccacaaaaagtcaaaaacaaagaaacgaggcctgggtggcgaattcggcacgaggggaagacctagcaagccaccctctccaaagcagaatgtgaggaagaatcttgactttgaaccactttccaccaccgcactcatcctcgaggacagaccagcaaatctcccagcaaaaccagctgaagaagctcagaagcacagacagcagtatgaagaaatggtggttcaggccaaaaagcgagagctgaaagaagcccagcgaaggaagaagcagctggaagaaagatgcagagtcgaggaaagcattggaaacgctgtgctcacctggaataatgagatcttacctaactgggaaacaatgtggtgctctagaaaagttcgagatttatggtggcagggaatccctccaagtgtgagaggcaaagtctggagcttagccattggcaacgagttaaatatcacccacgagctctttgacatctgtcttgcccgagccaaggagaggtggcggtcccttagcacaggaggctctgaagtggagaacgaagatgctggtttttcagcagcagacagagaagccagtctggagcttattaaaactggacatttctaagaacattttcctaatctcctgcattttccagcaaggtggtccatatcatgacatgttgcacagtattttgggcgcttatacttgttaccggccagatgtgggttatgtccagggcatgtcctttcatagcagcagtgttgatcttgaactaaaatactgcagatgcctttattgccttttctaaccttctgaataaaccctgtcaaatggcgttttttagagtggaccatggccttatgttgacttattttgctgaattggaaatatttctttgaagaaatttgccgaaaattatttgcgccattt

SEQ ID NO: 357516 - DNA, 1972 bp, Homo Sapiens
  misc_feature (1429)..(1449): n is a, c, g, or t
ggatggtaccggtccggaattcccgggatgatgcttttaacttttattattaattattttgagatcttaaaaaatagtagttctcccttattatttttgtgggcattgaaaagctcatttcacagtaccagagatttttactgggagtatatattttggaggtaggcatagagggagccctaccccttccacaaattacgttactcaagagacagctaaaataaaatgcattatctccccagaccagagacagtggccaaaataaaaaatcatcggggctggaaatttcccaaatcaaaccagcctcctggtgcttgaaggtttcattcactattacctgcacaggatgtaaagaaaagtcacagtaggcactctttaccagggaaataaggcagtatttgaatcacaagatatattttttatctgcaaccatggatccaatgatctgtagagctttttcactcattaactgtcaggatatgaaggactgacagtctgtaaagatatttatatttttgtatagttgttttcatagatttctcaaaggctgaagttttcaacctagaagatgagatttgtattgagtatagaaatgatgtttcctatctagtttgtaaataatcatggtgcacttgaggggtctcttgggaaactcctagggggtcaaggaatcactattctgaaactgtataggactggggatttaggctgctgcattttgcctttcttaaataattatattttgggaatgtaacccctgttctgtcttcattgacaggatttgcttgtgttgttaaaacactaacacaagagcttccagtgcctgggccgtgcctaggtgatgctatttcttctatatctcctgtcttctttatcccaaatcccactcagcatatcttcagacctaggttgtaagaccaactttggattggatctagccagtgaattattatttccatggttggttccctttctgttaactctggtaatcaacagattgaaaacggtggaagaacttcttctgaaaattgcagtgggagcaaattcttgttggttttgtgctgcttgcctttctagatctgctcatcagcacttaaccttccctcctctaaaggttactaaagaagcctgaagtaggtaaagagtgctcctcagcttcttatccttccactctttacccagcagatttcattcaatgccttagccaaggagtccagcacctgtctcccctgctaataattgtccttagagatgctagtactttaatccaggtatagcagtttcccgttattttcttgcttgtcgttcccctacatttcctcctgatttcccaagactctctttgtggcttttgagggtcagccaaggagcaggcaagtgagtgaacaatcctcaggaaaagaaggaccattttagcttaacacttccnnnnnnnnnnnnnnnnnnnnnaagaagaatataggtaaacaggtaatgattcttgattggagataccatttgactcttgatgagagttgtacgaagatggaaatgagggatgattccaggcgttttagggggaaggctgcagataccattctaacccccaagatactgtgttctcaagacctcttagaactaggtgttgtcagggataatttgaggagggcttagtcttcagaacaatcctgcagtcttgacagaaatctaaaatctccaaaaactcctaccctttaaccttaccctagggggaactgatctatgaatattacatgtgtgattatgaaaggtgaagttgagtgagaggagttgaggaacgtggaagacagtgagctctcaccctaacactataagaagcatgatctcaatagaccaataattcacctttttatacatctgtaaataaatggaatgtttttaagaatataattatgtcagatttagcattttcttttatatattaaatatatatatctttccttttcaaaagaaa

SEQ ID NO: 357517 - DNA, 1825 bp, Homo Sapiens
  misc_feature (965)..(1029): n is a, c, g, or t
  misc_feature (1108)..(1116): n is a, c, g, or t
  misc_feature (1398)..(1414): n is a, c, g, or t
  misc_feature (1416)..(1656): n is a, c, g, or t
  misc_feature (1704)..(1740): n is a, c, g, or t
cctgggtggcgaattcggcacgagggaacgccgtgggcatcttcagccgccgcctgcaggaggcccttgcggccaaggaggctgcggacgcggagctgggccagctccgagcccagggtggcagcagtgacagcagcctggctctacatgaaaggatccaggccctggaggcggagctgcaggctgtcagtcatagcaagacgctgctggaaaaggaactgcaggaggtcatagcgctgaccagccaggagctggaggagtcccgggagaaggtgctggagctggaggacgagcttcaagaatccagaggctttaggaagaagataaaacgccttgaggagtcaaacaagaagttggctcttgaattagagcacgagaaagggaagcttacgggcctcggtcagtccaacgcagctctgcgggaacacaacagcatcctagaaacagctttggccaagagggaggcagacctagtccagttgaaccttcaggtgcaggcagttttgcagcgcaaagaagaggaggatcgccagatgaagcatcttgtccaggccctgcaggcctcactagagaaggagagggagaaggtgaacagcctcaaggagcaggtggctgctgccaaggtggaagccgggcataaccgccgccacttcaaggcggcctccttggagctgagtgaggtgaagaaagagctgcaggccaaggaacacctggtgcagaagctgcaggccgaagccgacgaccttcagattcgggaggggaaacattcccaagagatagcacagttcccaagcaaagcttggcccaagcccggggcacagctccagctcctggcaaaagcagccgggacgagcagctcagcaaacagcccgtgggaaaccaagagatggaaaatctcaaatgggaggtggatcagaaagaaagagaaatccagtccttgaagcagcagctggacttgacggagnnnnnnnnnnnnnnnnnnnnnnnnnnnnnnnnnnnnnnnnnnnnnnnnnnnnnnnnnnnnnnnnncgagaaatcacacattcagtggggagcgacttctccttgcttatgggaagtcctcaagtgagtgatgttcaccatgtannnnnnnnnctcttaggacagactaattctgaaaataccgaaggaaaagtagctctatgttctcaccccggttttcctgcgtgtgtgcccttgggtgcgatgcctcccccagcgctctgtggtcgccggtgccagggccccctctggtttggcagggcctggctgcctttgctccctgcagtgagtcttttggtgttttcatgcacggcttgtgcttctggatctgaggcctctcgtgttcacgcggacacttccttccttaagaagacgcctaaaagaggaagttggaannnnnnnnnnnnnnnnngnnnnnnnnnnnnnnnnnnnnnnnnnnnnnnnnnnnnnnnnnnnnnnnnnnnnnnnnnnnnnnnnnnnnnnnnnnnnnnnnnnnnnnnnnnnnnnnnnnnnnnnnnnnnnnnnnnnnnnnnnnnnnnnnnnnnnnnnnnnnnnnnnnnnnnnnnnnnnnnnnnnnnnnnnnnnnnnnnnnnnnnnnnnnnnnnnnnnnnnnnnnnnnnnnnnnnnnnnnnnnnnnnnnnnnnnnnnnnnnnnagtgctggaattataggcgttgaccaccccccccgggctgcaggtggnnnnnnnnnnnnnnnnnnnnnnnnnnnnnnnnnnnnnatctcccagggactccttcgggaattctaccttcagaaattacttcaggggataaaagtttgaatattttggtccttgtgggcaa

SEQ ID NO: 357518 - DNA, 791 bp, Homo Sapiens
  misc_feature (537)..(537): n is a, c, g, or t
  misc_feature (705)..(705): n is a, c, g, or t
agtcgacgggtccggacatatgcccgggaattcggccattacggccgggggggccctagcaaccagagcagtgacagtcagcaaccgccggaatggcgaaagcaacaacaatcaaagaagccttagcgagatgggaagagaaaactggccagaggccatctgaagccaaagagataaaactttatgcccagattccccctatagagaagatggatgcatccttgtccatgcttgctaattgcgagaagctttcactgtctacaaactgcattgaaaaaattgccaacctgaatggcttaaaaaacttgaggatattatctttaggaagaaacaacataaagaacttaaatggactggaggcagtaggggacacattagaagaactgtggatctcctacaattttattgagaagttgaaagggatccacataatgaagaaattgaagattctctacatgtctaataacctggtaaaagactgggctgagtttgtgaagctggcagaactgccatgcctcgaagacctggtgtttgtangcaatcccttggaagagaaacattctgctgagaataactggattgaagaagcaaccaagagagtgcccaaactgaaaaagctggatggtactccagtaattaaaggggatgaggaagaagacaactaatgccacgcttttcactgtgtgttaacttatttaaatgtcntaagaaacaatagataaaattttatataattggtctatttttaaagaattctggtatgggggacaaaagttttcttaaagaataaa

SEQ ID NO: 357519 - DNA, 892 bp, Homo Sapiens
aaggaagggttaagccaaagaagggaacaattccaatcatttagacacttaaggaggggttaaagttgtatgataaagcagatatttaaattatttgtaatctttttgtatgcaagaaatttctgcctagtgaatcaagaaaacatccagattgacagtctaaaatggctactggtattttagttaaattcaaaaatgagaactttttcagtgattcactgttactaacattctatttgagaaggcttattggtaaagtttggggataaaggcattgcttaacttcttatataatttaggtataaattctgtgacatgctcttgagctttaccctagttgaacatacatgtgtagatttacacatactgtttcattctaaaatttagaaattgttcattaaatcccatttgaggtataagtcactcaggaagttaaaatatctctacacgtatatttttacattaaaaatacagtgttagcataaattccccttttcaggaagaacaaaaatgtcagtgcatagttagataaaatggtaaaatgttttactgaaagcatacttttttggaaaatagattcatgaagcctttaagtgctgcttctgtcagtcaaacgttaaaaactttaacattttcaaagtgcccagactgtgtacaaagacacatgtaatggagattgtacaggttgtttttttgtttgaacctttgaaagagtttaatcttaacgttttctaattttaaaattttaaaatcttgtttaacaaaagcttgtattaagatactgttttcatttcattacagaattgtttataaaagttcatttgttgaaaaataaggatcctttttaataccacagcatttgtactgttcctttttaatatactgaaaatat

SEQ ID NO: 357520 - DNA, 1567 bp, Homo Sapiens
  misc_feature (134)..(134): n is a, c, g, or t
  misc_feature (144)..(144): n is a, c, g, or t
ccttgataacaaagaaaaagattcaaccataaacacccggggtataagggacacattaaaaaaaccttaaaaaccaattattagggaaagccatataagagtggaattaagaccaccgggagcatcatggccancctaatgtcnaatgccaatacaccaacttgaaatgcctatttgaaataagattgtcattaaaatcagtttaccacatgaaaagggtgtagtggcatccaactaaccagcaaaatactaatatcagtatggtcagtctgtagaaaacacttcgaggatctcttttttattcttgtaacagaacgttttactctcaattcatgaacatctgaattttcttcaggttttatctcaaagcaagtggggacccctggtatgaacttactggatgaagagagctgacttcttacagagccaaagttttctggaagtattctggagtggttctcttgagaaggtctttctggagcaggtaacacacatgctgtcttcttgctatatcttcttctgtgttttttgatgaatgaataactccatttatggctgccagagagtttcacctgaggcccactctttttggatggatgaagagttaagttgatcatctcattttcttcaagtctgttttctttgttggacaatccacagcttatacttctgcagacacttgtatgacttacagtaagacaaactaagggcagaattatactggaactagcaataaagagattagttaaaggcaattctgtatgaaatcagatggccatgactcaacacataaatacctgctgctcagcaaatgctgaaccaaaatgtttcttgaagttccacaagactgtgaaacactggaaggggagaacagatggcaaaacctagtgtccagacagtagctatcagaaagtagccatggtttgctgttaaattattagatatgggatgttttatcatatgatacctgacaatggcaattgatattaaaattaaagttgaaaccaaaactgacacacattgaagaaaaggcataatatggcacatgactttgccaaacatccactgatccagcaagacagacgtcagtgtgaaaggtgagcaaaacagcacaaccaagatatcagaaaaggccagattgcctatgaggaagtttaccgtagtcttctgattacgctttttcatgagagccattaaaataagtagattccccataaagccaagaagacttacaaatgtatagagcccaatcagaaaatactgtaagtcatctacactgcttttatagtcatcccagactgggaaatcagaattccgagtggcagcagtattattctcatagtggcaagtgtcttgttataatactcgtcgagctctaaatccatattatagtctttcttgaatcaatcctttcttctaactttgtggcaggtcagttgttaccgatagcctttccttgtaacaccctttcccttcctttttcctgaaaaacacaatgagcagacctcggggcgccccggccgctgcaggccctgggctcccgggagcgcggcccagcgcgatcgct

SEQ ID NO: 357521 - DNA, 2093 bp, Homo Sapiens
  misc_feature (755)..(755): n is a, c, g, or t
cgcagctccgaggtgaaggcgcgcgcccctccccgcctgcctcccgggccgcagcgatgaattccgccgagcaaaccgttacgtggctcatcactctgggggtgctggagtcgcccaaaaaaaccatctcggacccggagggctttctgcaggcgtcgctgaaggatggggtggtcctctgcaggctgctggagcgcctgctccccgggaccatcgagaaaacgtttgatgcaaatgatttgtatcaggggcagaattttaacaaggtcctcagttccttagtgactctaaataaagtaacagcagacatcgggctggggagtgactccgtgtgtgcccggccctcgtctcaccgcataaagtcttttgactcccttggatcacagtctttgcacactcggacttcaaaactgttccagggccagtatcggagtttggacatgaccgataatagcaacaatcaactggtagtaagagcaaagtttaacttccagcagaccaatgaggacgagctttccttctcaaaaggagacgtcatccatgtcacccgtgtggaagagggaggctggtgggagggcacactcaacggccggaccggctggttccccagcaactacagtgcgcgaggtcaagggccagcgagaagcctgtgtctcccaaaatcaggaacactgaagagccctcccaaaaggatttggatacgactgccataaacaaaagctattacaatgttggtgctacagaatattttaganacagaaaatgaatattctaaagaacttcagactgtgctttcaacgtacctacggccattgcagaccagtgagaagttaagttcagcaaacatttcatatttaatgggaaatctagaagaaatatgttctttccagcaaatgctcgtacagtctttagaagaatgcaccaagttgcccgaagctcagcagagagtcggaggctgctttttaaacctgatgccacagatgaaaaccctgtacctcacgtattgtgccaatcacccttctgcagtgaatgtcctcacggaacacagtgaggagttgggggagttcatggagaccaaaggtgccagcagccctgggattctcgtgctgaccacgggcctgagcaaacccttcatgcgcctggataaataccctacgctgctcaaagagctcgagagacacatggaggattatcatacagatagacaagatattcaaaaatccatggctgccttcaaaaacctttcagcccaatgtcaagaagtccggaagaggaaagagcttgagctgcagatcctgacggaagccacccggaactgggagggcgatgacattaaaactctgggcaacgtcacttacatgccccaggccctgatccagtgtgccggaagtgaggaaaagaatgaaagatatcttctactctccccaaatgttttgctaatgttgtctgccagtcctaggatgagtggctttatctatcagggaaagctcccaacgacaggaatgacaatcacaaagcttgaggacagtgaaaatcatagaaatgcatttgaaatatcagggagcatgattgagcggatattagtgtcgtgcaacaaccagcaggatctgcaggaatgggtggagcacctacagaagcaaacgaaggtcacgtctgtgggaaaccccaccataaagcctcattcagtgcccatctcataccgtaaaggacttggtgcttctcctccttcccaggactccaaggcgtggcatcccgtggctgagctgtccagcaagtgatcagttgctttaaaacctaatcaatatttggataaaaagtgcaaaacacttgcttcacatttctctgcagatctttggccctcttcgtgcagtagtgaattgttttccaatgagtgttctcgagaaacaaccctgaattgtgcctcctcacgcacagttcagaggtgcttgggtgggaagctgcttctgctccgtgtggccctagaagactgatttaggggagttttacactcaactatagatgatttttctgagaattttaactgtttattatgcttcatttaagaaaacaaaaaataaatgattatgatgatg

SEQ ID NO: 357522 - DNA, 1690 bp, Homo Sapiens
  misc_feature (13)..(13): n is a, c, g, or t
  misc_feature (73)..(73): n is a, c, g, or t
  misc_feature (87)..(87): n is a, c, g, or t
  misc_feature (158)..(158): n is a, c, g, or t
  misc_feature (247)..(247): n is a, c, g, or t
cggcaaagttgtntatgaggtggggggataaatccctgaatgaagggctctgtagggcccgggcttgttggtnctgatctgcttggnactgaaatttgtggcgagctgcatggaaccgttggttgatccctacttggtacgatgactggtagccaggnctgctagctgatgaccccaataaacgcttagtgagtaccggcgaagagcaaggagaggatgttagagaggaggaggcagtgctgctggnagacagtgagctcccactggaagagaggggactgggcattgggactggagtctcaatccccacaggacacccaccattctccactggtttctcttgggccaatgccacagatttttcccgtggaggcacttggttttctacattgttgcctgcagtcagctccctggtagtttgtatctctgggtcacaatggccattggtttttgcatatgagtaagcaggagtgccaggaccaggcagcccagtgtttgtcatctagactatgtggctcacatgggttctttctgctagaaaaccctctgtttggcaaaacacagacattagcatgagaggctcagttgctgtgcctttggacacgggttactggtttcttaaattgctcatcagggctactgtgctggtgggaagcctctaggtccttcacaatcttctttaaactttccatttcttctttcagggttatggtccggttctcttctcggttcagttttgctctcagtagttccctttcgatgtcaaactctgataactgcttctctacctgggcctcagtctgcaagcctctctttctctcagctgccaactcttcttccagtttactcacccggctcttctccttctccaatttcaggctcagctctcctgccttctgtccttcctcggctgccttgttggtggctttcttgcactcaagcactagcatggatgagagctgcttgtggcgggagcgctcctcttccagctgactagagagcttcttctgttctttttcaaactttttcacttgggatttttcaaattccaactgttgagtcagcctctctctttccttctctagcatgtaggtgacatcatctccttcagccgtatcctgtgcatgccgctgcctttcttcctcaaggtctaggatcacctttcggtgcctgctctcagcagcagccagctgggacagcatgcgctcctgcatgttcttgcactgcttcatcacaaccttaagaatagagagtgggtttgtgcagactggctgcttttcgccatcatttttctccttcagtgtttcaaaatctctctgtagagccattaaaggatcactgatgttatattttccatagcgttcttcaatgaaagtatctctgtgttgggcctttaaggcttctataacaaggtcccttgcttcaagctctccttcaagaatactaaatagtgtcaggagttcaggcttgctgagtttttccagattcatcttgaaagcctgataatcggcagagtcacacttcagtcctcaagtataaacttacagttttcttcagtaaaaaattgggaaaattgccaaatatatttaaaatgccattagcatggtggaaatgtgtccaatgctgtgagtcctctccgccaaggctgaggtgcggggtgggaggtgcctttgaatgaggggtgtcagag

SEQ ID NO: 357523 - DNA, 1710 bp, Homo Sapiens
ttttgtatcacttgaggtattattcatacaacagaacaccatatagcattaaaaatgaactccaggacccaacaaggatggattatacaatgctgagtgacaaaaacgacacaaaagcacatacacaggattccatttatctaacactcaaaagcaaacacaactatgtcgtataaggctgcatacaagaatggtaaaattcaaacgaaagcagggaaatgactgacagaagacgatgacctggaatgtgccccaatctcagctgcacatcaaatgtacctgggatgaggtgggtggagctttgaatctaccactatccaggccacacacctagaagctctggtttcattgtttcattgatttcattgttttgattgatgctgaccttaggcagcagagttttcaatgctctccaggtgtttctaaagtgcagacaagtttaggaccgtgcttgagggtgaagggcaggactgtgatggggaggggcaaatatggggcccttggggtgcaggcaatggttttccttgacctgaatgggggtctcacaggtgttgcatatacatatacgtacacatgtcagctcttccctttctgccacagcatacacgtaggtgttccacggcccacaggtgacagcctttacttggagttgcttatctacaaagtagttccacacggcgagaccgatccaagctggtgcgtcgtcctgcgtggcccagctagtccatatagtaccccacgccccagatgtagagctcaccctgttcgtgtcaccacagctgtgtcgaccgggatccacagctggccttgactgcatctgagcccatggggagatccagtaatgccgggaagggctggacagctatgaagggggcagggcgctccatcctcagccccacccgttctcttcacctgagaaccatcttcattcagttctgtggcttcccttgcgacagtctctccatcctctgccaagttcctggtgggcaggccagctgccctgattcattccagccccagatataaatatccccagtctcactcacacacacagaatgccagccccccgcggccacctcagccatgatctaggccctgcaacgcctccaacagccgtggctccagctctgcctccagggtcccatggcccagctgtccatgcctgcccccgccccaggagaacacctggccagcagcgtccagcagcaacgcgtgctcggcgcccagctccagctggcgtgcccgcagctccggagccagaggccggtagaagggcgcccgcgggctcacgtaggcacgggcgcagggcagcaggggtagcctcccagcctgggcctcaccggccggatcgtcttccccttcggcctcgggcaccacattctgggcccacaatggctccccacgcagcgccgattcggccgcccagacctgcagtaacgcctccggccccggcccggcgcgcagcaccgcgaggagcccctccgaggcccacgcgtccttgcagcggcccgccgcgccgctggctgagcccgacagctccaagcggcctccacgggtcacgaaagcggtgtagctccagctcgcgctcacgcggcagatgtcgacgcccgcccgcagcggactggggctgtgcacctggcgcccgcgaccggagcccagcacctgcccgaagccgcagaaaccgaagccgaaccaggcccccgccgctcc

SEQ ID NO: 357524 - DNA, 1474 bp, Homo Sapiens
  misc_feature (134)..(134): n is a, c, g, or t
  misc_feature (429)..(429): n is a, c, g, or t
  misc_feature (523)..(523): n is a, c, g, or t
accatagcgactgacacttgtatcagacaacagcccactttaccacccgagttgatctattgcacactgagggcctcaggggcccgttctgctggtcctcctcccccggccctcttgcgtcgtcgagaagctgntacgtaaaactcccacgtccagcggtaagctggttctgatgcgctaccttccatccacattttcagtctcccgtctactcgttaaggggtctatgtgtgtgcgcgatgatcgaacagcgggggtcgcgcgtgtggaccgcgcggtttgggtagatgggtcccgcacccgctgccgaccgttgctgtatgaaggagtccgccgaggggcgttgtgcattccgcggcgggtgctcgcacgcgtacgcgtcacccagtagtctcccttttctgtactggcaccgttacatatttccgntcgtacgctagctcggatcattggagacgacgaagttacttctgggaggtatggggttccggggatgggccgctcttacgggttgccatccctncgcaccctggtttgggctgtaaactcccgtggggtttgtgtcacacccacggttgggtgtgttggcctttccgagcgactgcgcgcgatgccctctaatgtgctctccgcgagtggtccgcccatgttggccgcacactgtttagctggtcaacccccgcgagggtgtccctgggacgcctagaagtgtctccttttggtagaggggcgcgcgccggtggagccttccacgttagaccattggggggtctgggccacgcagtggctgccctcgccagcctgtgccctcagcgggccggatcgtcttccccttcggcttcgggcaccacattatgggcccacaatggctccccacgcagcgccgattcggccgcccagacctgcagtaacgcctccggccccggcccggcgcgcagcaccgcgaggagcccctccgaggcccacgcgtccttgcagcggcccgccgcgccgctggctgagcccgacagctccaagcggcctccacctgcggggcggattggagcagggtggccagaatggaggcggcggggatggggggagcggggtgttcctgggaaggggtcgaattggggaccaacccagaatgtggggctggcggcctgaacgggggagacaaactggactggccacagcggtgcggggaggcgactggggagcgcggctggaataagtggggacggggcggggagtgctcacgggtcacgaaagcggtgtaggctccagctcgcgctcacgcggcagatgtcgacgcccgcccgcagcggactggggctgtgcacctggcgcccgcgtccggagcccagctcctgcccgaagccgcagaaaccgaagccgaaccaggcccccggccgctcctccatcccgggattccggaccggtaccagccttgtttggtgggtggcggtcggtgggggggaggagagaaaataaa

SEQ ID NO: 357525 - DNA, 668 bp, Homo Sapiens
taggggttttctttttgaggtgataaaaatgttctaaagtttatagtgatgatgcttgcaatttctataagtagacttaatgcagtgatggttgcaaattctataaatatatttaatgtggtgatggttgcaaattctatgaaaaacccaaattgtacaatttcaatgagtgaaagcatgctatgtgaatgtcttcataaaggttttatttaaaaaatgagcaaacggtagaatgttaacatggcccacgtctatgtggtgtctatattggtttctattatatgttttctatgtggttgaaacattcctaataacatgtgcgtagttttttaaaaaagaaaacacatcagtggacgtgaatgcaggatgtcttatgaatgctcacacagaagctcccattcgtgaggaatgcagggaaaagcagaagatggagtaggagttggcatggcccagctagctcagatgacacacgatggtcccagtggcatgacttggtttgtgtgatttgtgccttggggttttattttggcacattacaaaggagtaaataaagcctgtatacagtcagtttctgtctattctaatgaagggcaaggggatgaagggatttaccttgagtaaccatccacttacatttattaggaatcttgtgatcctatcgtcacccg

SEQ ID NO: 357526 - DNA, 179 bp, Homo Sapiens
gatcaaatctttttttgacatttttgcaaaaaaattttcctaatgttcttgatttaattgtatagaatttgtataattaggtgtattttatttgcgtctagctttgaggtatcataatttatgtatcttatgtgaattttttgctgtaataccaataaagttttttttctccacatgtt

SEQ ID NO: 357527 - DNA, 568 bp, Homo Sapiens
aatttatacttaagaatcctttaagaacctggtgttcctgagtggtcctgaatcatataagttggtaatggaagctgtaatgaccaagtcccctaaacatactatgtctttgccacgtgtgctgtgacttctctgtgggtgatttaatttatttggatccacctctgagtgagcgcacagtgatcaggtgcttcaaagccaacagaccagctcctcttcctccggatcctcttttgatctgcccaggaaagggatgcattgacactctcctgcatgcacctggcgagaagccacctgaaagtcactgtggttaaagatattggtggaggtaccccaggagcactgttacaaatccttcttgttttggcatctcgtacaacattattaagacacagctgagagttgatgggtgtgtaatgcatatgccaaggaaatgtcactaatcccaaagcaatcaaaaaggagacctcaaaccagatgttaatttgttctttgtgtaacaatgtaaccaaaatattgatgataaaagtcataatttaagattcagaataaatgggtttgatgtctg

SEQ ID NO: 357528 - DNA, 1009 bp, Homo Sapiens
catgtggttccctttgacacctgtaccacttacgttattcgtgtcctatgtcttctctcgctccgtatgtgtgggtatgctctctcttatagtacggccattaactctcgctagccctatggtgctgaagtctcatgaggcttgcaggtcccaggggctgcacatgaattcaaagcgcattgtccaaggacatgcttggatccccaattcagggagtggcaaatacgttaacatccggacgagtcatctggcacctccacaacttagacttctgcgctgtgtctcaagatgcgtgcaaaaggctctgaagaaagctgataagatagttttggagcctcatgatgaatcttgaggttacagtagctagagattatctcagccctgtcctggcagatctggcacaaagaagaggaaacattcaggaaattcagactcgccaggaccaacaaagttgttattggatttgttcccttagcagaaattatgggttattcaactgtgcttcgaacgctaacatcaggctcagctacttttgccttagaactatctacttatcaagccatgaatcctcaagatcaaaatacactgctcaaccggagaagtggtttgacctaaatgttttagtttttggagagaaattcaggagcacctagctacttcattttcagtaagaacaatttttattgctttatttattggacgaataaagtactgtttcagtacattcagagaactagataaaagatataacttaagctttgatagtggcactggagccacccgttttaatttatataatgagaaatgtgctttgatgtttaaagccactgtacctgaatcatgctgttcatctatgaagttattactataagtagccttcagaagagtggtatcacaaagttgtgtttcttttgtgtccttaagcttgtctcacaagaaagatgccaggcctctaaatgtaataagatagagggtcaaaggttcaatcaataaaaatattttattcaaa

SEQ ID NO: 357529 - DNA, 915 bp, Homo Sapiens
  misc_feature (217)..(229): n is a, c, g, or t
  misc_feature (805)..(839): n is a, c, g, or t
aacttaagcttaatatttgacccaatatattgccatatataaaagatagggaattttgcaaacctcctctttattaaaggttgaagggaagccatgtaacctctagactttctgggcttttattgccatagttaagcacattaaagtagtttgataaattaaatagcaggttctagtacttcacattttcaacccgtgtgtgcaatgcctttttctnnnnnnnnnnnnntgagggaaaaacctggtagtgaatgtgtagttggggaataaagaaaagcactaaatcctgccctttttgtgtggtttccttttgatacaactaggttattcataatgtatacctagaaaagtgaaattgaaaataccaaaagatgtatcatttttatttgaatccatcatgcagtgtacatttcagataatttccttcagtctccagataggagtgtatccaaacatctaattttatgtgcactgtgtatcttatatgaatgttttattttatataccacatgcaaaaatgtccatatgcactatttaaatgttttaaataatatattccttctttataatgctaaatctatatgagtaccatatttttataagtcagtggtctgactggtttcattttagaattaacagctgcttcaatatgttattcaatgttaatgtttggctgtgagtagaatatgtaaaagtggcatggcagcacttatgctctgtgacagtattgtgtgtcatagttgagcagtagctggtagaattaggcagttggtgatagttttactttggtacaaataaaaactgnnnnnnnnnnnnnnnnnnnnnnnnnnnnnnnnnnntcccccagtataatggcattgctgtgtctggcacttcattgtacagacttttataataaaagaacttgaaagttct

SEQ ID NO: 357530 - DNA, 779 bp, Homo Sapiens
atcatgtactgatcgtgtcccaaagtggataagtgttttaaggcgagtaacgaagacaggtatatagtagtagtcatttagaagaatgtattaaaatggtgtatattgaaagaaaatgttctccagtagatggggtttatttttaatgggtcagcaattcccgccacgctttctgaggaatgaacctaagtttatgtgattgttaaaacaatgcgtcgatgttcagggaaatctttttgtttgtttattgaccatacatgttctaactttgtattgaccaaagtatattaaatgacagatgtgtaatattaagcatcaatatcacctaacacatcgtatataagatataacatgatagatagttggtcgattacattgctatactgcttagttttaactggtttatttttattgtagcagaaatgaactgaaaaaaaatatgggtttgataatcacacacatgaaagtaccattttgtaactcaacaaaagataaaacattcttcatcaaaaggcttctcgcttggtgtcaggttgtcacatgtgaccactgtgcaatgcgaagccatacttcttcagtgcacaaagtcatgtttaaacttggaaaagagaatgctacagtagtttcaaagttcagtgttgtggacccaggaaattttccataagtcttgcttgataacaatgtgattgtacaaaataaatgttcttaaggaaacaacttatgtaacatttgctacctttatgtaaacataaataaatcccatttaaaagataaaactt

SEQ ID NO: 357531 - DNA, 741 bp, Homo Sapiens
agacatgaacgaatttaaaatacctggaccaccatgttgctttaagatcccggtaaaagatgggctgtgttaagttccccccccaaggaggccctggacacacactgacagcgcgggcaaggggtcaactcctgatgttcgtgaagacggtgcaccggggcatcaaaggtgtggtaacagataaattcggcaagccagtcaaaaacgcccggatctcagtcaaaggcattcgccacgacatcaccacagccccagatggtgactactggagactgctgcccccaggtatccacattgtcattgcccaagcccctggctacgccaaagtcatcaagaaagtcatcatccccgcccggatgaagagggctggccgtgtggacttcattctgcaacctctggggatgggacccaagaactttattcatgggctgcggaggactgggccccacgacccgctgggaggtgccagctctttgggggaggccacggagcccgacccgctccgggcgcgcaggcagccctcggccgacgggagtaagccctggtggtggtcctacttcacatcgctgagcacccacaggccacgctggctgctcaagtactagccccggccccagcacccgccaggatgtggagaccgaggcccgtctccgcatcccgggctcctggctcttgattttgtctgccacagacatcccacaaagccgctgccattttattaaagtgttttgatccactttc

SEQ ID NO: 357532 - DNA, 1134 bp, Homo Sapiens
  misc_feature (1036)..(1036): n is a, c, g, or t
  misc_feature (1038)..(1038): n is a, c, g, or t
  misc_feature (1074)..(1074): n is a, c, g, or t
  misc_feature (1096)..(1096): n is a, c, g, or t
  misc_feature (1103)..(1103): n is a, c, g, or t
  misc_feature (1114)..(1114): n is a, c, g, or t
  misc_feature (1116)..(1116): n is a, c, g, or t
  misc_feature (1125)..(1125): n is a, c, g, or t
atcaggccaaatcggccgagctcgaattcgtcgagagcggagcggtgtttcgcagcccagagcatttgcagctggtcactccagtctcctgggactttgactcgccgtactcggcgcgctcctgctgagggtcgccggagatgtcgctcggccgccttctaccaggagcctgatccgtgccgcccgccgcccggatgggaccaccagagtgctctaaagtctccagtgaatattgaattgctgaggattttgggaaaagacaaatcaaagttcccattccatggatcccttaggtgcaccttcccagtttgtggatgtggatacactaccaagctggggtgactcatgccaagatgaattaaattcctctgatactacagctgaaatatttcaggaagacactgttcgatcaccttttctttataataaggacgtcaatggaaaagtggttctttggaaaggagatgtggcattactgaactgtacagccattgtgaataccagcaatgaaagtctcacagataagaatcctgtgtcagaaagtatcttcatgcttgcagggcctgatttgaaggaagatctccagaaacttaaagggtgccgaacaggtgaagcaaaattgacaaaaggattcaatctagctgcccggttcatcattcacacagtgggacctaaatataaaagccgctatcgcacagcagctgagagttccctttatagctgctacagaaacgtacttcaactagcaaaagagcagtcaatgtcttctgttggcttctgtgtcatcaattctgcaaaacgtggttatcctttagaggatgcaacacacatagcacttcgcactgtaagaagattcctagagattcatggggaaaccattgaaaaagtagtatttgctgtctctgatcttgaagagggtacttaccaaaagctgctacctctctacttcccaaggtcattaaaagaggagaatcgatcattgccctacctacctgcagatattggaaatgcagaggggagctgtggtactgaacgnanattagataagtgagaacctggtgctcagaagatacnagaagaggggatgaggctgggngtgattntcttcattggncnatgctttgncgatggaag

SEQ ID NO: 357533 - DNA, 1028 bp, Homo Sapiens
  misc_feature (870)..(878): n is a, c, g, or t
  misc_feature (886)..(886): n is a, c, g, or t
  misc_feature (888)..(888): n is a, c, g, or t
  misc_feature (901)..(901): n is a, c, g, or t
  misc_feature (925)..(925): n is a, c, g, or t
  misc_feature (928)..(928): n is a, c, g, or t
  misc_feature (942)..(942): n is a, c, g, or t
  misc_feature (979)..(979): n is a, c, g, or t
  misc_feature (988)..(988): n is a, c, g, or t
  misc_feature (994)..(994): n is a, c, g, or t
  misc_feature (1001)..(1001): n is a, c, g, or t
  misc_feature (1010)..(1010): n is a, c, g, or t
  misc_feature (1013)..(1013): n is a, c, g, or t
  misc_feature (1016)..(1017): n is a, c, g, or t
  misc_feature (1022)..(1022): n is a, c, g, or t
  misc_feature (1024)..(1024): n is a, c, g, or t
agcgggaggcccggtctccgggtaagatggcagcggacggacagtgctcgctccccgcttcatggcggccggtgaccctcacccacgtcgaatatcctgcaggtgatctctctggccacctccttgcctacctgagcctcagccctgtatttgtcatcgtcggtttcgtgaccctcatcatatttaagcgggagctgcacacgatctccttccttgggggcctggcactgaacgagggggtcaactggctgatcaaaaacgtcatccaggagccacggccctgtggaggcccccacacagcagtgggcaccaagtacgggatgccctccagccattcccagtttatgtggttcttctccgtctattccttccttttcctgtatttaagaatgcaccaaacaaacaacgccaggttcctggacttgctgtggaggcacgtgctctccctgggactcctcgctgtggccttcctagtctcctacagcagggtctacctgctgtaccacacctggagccaggtgctctatggaggcatcgctggaggcctcatggccatcgcctggttcatcttcacccaggaggtcctcaccccgctgttccccaggatagcagcctggcctgtctccgagttcttcctaatccgagacacaagcctcattcccaacgtactctggtttgagtacacggtaacccgggcagaagccaggaacagacaacgcaagctggggacgaaactgcagtgaccagtgggtgtggctgggtccagcctccagatctggcccgcacgatgccttggcaggatggaccaggatgaccagacagggaacgaagcagaaaccctctacagacccaagtcaccaagtggagccnnnnnnnnncttatttnantttaatgaacaanggggacaaagggctgaacagcccncancaggacctgggggntgctgcttggggcgtggcagagacctcgtgtgtgctncaaccctgntggcanaaatccncggatgggnctnggnntgggngnggag

SEQ ID NO: 357534 - DNA, 806 bp, Homo Sapiens
  misc_feature (162)..(170): n is a, c, g, or t
cccaggtgcccatgccgagggcactttctgcacagccaggggccggcagcagcacagcaagggtctctggccacggcccccaggcagcaggccccccagggtcctggttgaggggctggttcagccctttggtccaccttgttcattaaaattaaaataagnnnnnnnnnggctccacttggtgacttgggtctgtagaggtctctgcttcgtccctgtctgtcatcctgtccatcctgcaaggcatcgtgcgggccagatctggaggctggacccagccacacccactggtcactgcagtttcgtccccagcttgcgttgtctgttcctggcttctgcccgggttaccgtgtactcaaaccagagtacgttgggaatgaggcttgtgtctcggattaggaagaactcggagacaggcctgctgtaggagactaggaaggccacagcgaggagtcccagggagagcacgtgcctccacagcaagtccaggaacctggcgttgtttgtttggtgcattcttaaatacaggaaaaggaaggaatagacggagaagaaccacataaactgggaatggctggagggcatcccgtacttggtgcccactgctgtgtgggggccgtgtgcagctcccgcttaaatatgatgagggtcacgaaaccgacgatgacaaatacagggctgaggctcaggtaggcaaggaggtggccagagagatcacctgcaggatattcgacgtgggtgagggtcaccggccgccatgaagcggggagcgagcactgtccgtccgctgccatatcccgggaatt

SEQ ID NO: 357535 - DNA, 504 bp, Homo Sapiens
  misc_feature (24)..(24): n is a, c, g, or t
  misc_feature (56)..(56): n is a, c, g, or t
  misc_feature (64)..(72): n is a, c, g, or t
  misc_feature (419)..(419): n is a, c, g, or t
ccctggttgaagggctggtttcanccctttggtccaaccttgttccattaaaattnaaataagnnnnnnnnnggctcccacttggtgacttgggtctgtaaaaggtctctgcttcgtccctgtctgtcatcctgtccatcctgcaaggcatcgtgcgggccagatctggaaggctggacccagccacacccactggtcactgcagtttcgtccccagcttgcgttgtctgttcctgcaaaacaggatgggggtcagatgtggagacatctggtgttcagtgacctacagctgtccccaccccacccgtagtcccaactaagtaggcaaatgcccacacccagtagccagcgattgacctgaactgggccaatcagagcacctgccctgggaatggcacctagacagggctgatctcccncgcgaggcctgtacctcagttatctcagctctgcaatcccagaagtggagcccaggggattggagcaggggtagggaccaggatg

SEQ ID NO: 357536 - DNA, 572 bp, Homo Sapiens
gaaccttccaaattgtatcagatattccgtgagatgtatgtgcgttttttcttcagactccattccatctcttctcatccttctggtattgtgtcactctgtctgctgtttgaaactcttcttcaaacttatcttccccaactcttttatcatctacgagaaattggggctcaaccacttcgcatatcatttaagtggatggttcgagctttctctggatacttagcctacagatcagctcttgcttttatgggatagaatcctaggatacaactctctggaaattcttgctgtgctggcagctgccgtgtttgctttccgagcagtgaacctgatggaggtgacatcactggctgcagctgaagcagttcttgctgacctttctactttaaaagttatgcctcttcttcagatttttctgtttgctactgtcacctgatcttcttcacagtcactggcaacacatctagtttttcattagaaacaaatcatgaactatgcaaactctgcataaaaccaaaatgaaactttgcatataagccaataaagatcatgttccctcttcagttaaa

SEQ ID NO: 357537 - DNA, 2119 bp, Homo Sapiens
  misc_feature (1036)..(1036): n is a, c, g, or t
  misc_feature (1905)..(1905): n is a, c, g, or t
gtaagatactgtctatatttgctattaggtaccaggctggacaaaaagagaagaaaaaggggaaggacaatgaggtaattaaaaaatgaaattgagaaccaggcaaaaaagaatgaaaaggaggtatcaaaaaaagtgttggattttaggaagcagtggagtgccattcatcatactccatgtcgtattgcactcaatttataaaacattttcacactatggcctttcccattaaggccccaaatttccttcctgctattccagatactgctcagcaaactgttctacaaaagaaatttttactgaacaaagattatcaggaaaatcccaccttacaggaaagagtaaaatattaagagtctacctgattcagcttttcattcaattaaggtttataggaatgtgtacataggagtggtttcagctccaacacgattccaggagcaagtgctaaactttgataggaaataagtgattgtagtgaataacccaagcagcactcctataaaggtacaaagaaatcttatggaaaatctaatgaaactgataaactattgtttctgccatatttaccataaacctttagtggtaaaaaagttgaaagtagttgtaaatctccttcatcagcaactaatgctaccaaaaaagaagtgaggcagaaatgtaaaggttttaaagaagatttttaaacaactcttggaaatattttactcaagtagtttttttcttaaaagtttttaaaaattatttttcagagttcatagctactgataaaggtattttcttaattatggaaagcctttttttcagctatcacaaatgaaattacatcttttcattaaatataaacacacaaaaaataaatttacaaataaccaaaaaattttatattttcctaccttgaacacatttcttcaaagggttagcttgaaaaatacatgtctaagattacagaatattcaatagttacttttagggttttaacattattttagattttaccacagagtttaccaaaaaaataacaacaaaaaancctgctaaacatcaaataccacttgtccactgggaacaattcagctttctatcagttgagttggttagatcacattaagttgttatgtataggtattgaccagaagcctacaatgagatacagattttacactaagattgaaaaaatttatggtaccagctctttttctcttaactttctacactaagagaaaaatacattacttggcctacatcttaaagcattcaaaataggccctctgtaagtttttaacaaattgtatttgtatttaggtctttaagaaacaacctgagatgatggtaagtgtctcattcctcatttgacaaatgaggacaaatcactccttgagaactaaggtcatttcaatccatagcacccctgacctagtgccatgattcaaattcacaactcttgatagctaagactttgactgctccaactagcaaatcacatatagccattccctaactttgtgtttcccaaatctagctgtgaatcagaattaccacaggatgccttagccctacccttgatctactgaagcagaaaattactgccttaattctgtgtgatacaggtcagcctgccttttaatatttggatatctaaagtgagagcataaatgatgaagagaccagtttataggactatttctcacaccgtcatgtaaagttggtatgtgtctttgctccattaaagtatttctgacctcaatcttaaactttgctttgtcaaacaaaatcatgctgatttcaaatccaattagaaaataagtatgtacagtaaaaagtaaacttgggcttcaattaatgaaactttaacagaaacatggctagagaggaatctcctcctataagagaaaaagtganttcacaacaactgcctactaaatacaactggaagtgcctttccctattttgtaaaatcgaatgaaaaacccacaaaacacatccacaacaatacaggtgaggcaagggtctatattcctttctattacaggtggggtcttttatatgtctcaaacctgaacaaaatacaggtaacaatctaaattcaatcatgacaataaaatactttccattt

SEQ ID NO: 357538 - DNA, 691 bp, Homo Sapiens
  misc_feature (403)..(426): n is a, c, g, or t
aagttggtatgtgtctatgttccattaaagtatttctgacctcaatcttaaactttgctttgtcaacaaaaatcatgatgatttcaaatccaattagaaaataagtatgtacagtaaaaagtaaacttgggcttcaattaatgaaactttaacagaaacatggctagagaggaatctcctcctataagagaaaaaagtaaaatcgaatgaaaaacccacaaaacacatccacagcaatacaggtgaggcaagggtctatattcctttctattacaggtggggtcttttatatgtctcaaacctgaacaaaatacaggtaacaatctaaattcaatcatgacaataaaatactttccattttccaagtctgatggtaataaatatttacattttaaaaaataannnnnnnnnnnnnnnnnnnnnnnnaaaaagacacaacatgctcaagggtacacagaatatggaaaaagtcatcacttcatttgagagatcaactggtaataaaaaacaatgttcttacatattaaccaattcaagagtggtatcaccagggagtctaacatggtgtttacttcaaagatgatattcaagtatgttatttggaacactatttctaatgtatctataaagaagcaagcactgctatctaatttttatagtttttagtatcttctatatccacctcctcgct

SEQ ID NO: 357539 - DNA, 897 bp, Homo Sapiens
attcccgggatccgagtttcaggcagctggaataaagagagatatcgggggaaagccgcgagaaggccagcgtccctcgctgggagcagagctagccgagtagggcgcccggctgtcaaactggccggcgcagtgcacgctgggccgccccggagcgatcgcagagcccgtcgggagtcgtagtccgggacgggcccgcggcatcgtccgcgacgcagctcgggatccgggtcggggtgtcggccgggttgctgccgggcaccgtcgagcgttagccacccagcattgagctgccagcggctgttctccctaagcaccctcgctcacgtcgcctcgcctcgcctcgcctcgcctgaccggccgcagccttggataccagccttaaatcgagccgactacggcccagccccgcccgcggcgaggtgcgcggggttcggtgcgagcccctcgcccctggccgggccagcctcttgatgcaccggggacgggcgcgcccatccgactcttcgaggggcggcagggccccatctgtgtctttcgctctcgagcccccagctagagttggcttcagcggaatacctactgtgcgggattattcaacaagccgattgatcacattcttcagctctagcagtgcaaaggcttcactgaaaaagaacattacaacttttttgaaagaaatttgggggtaaatttaattttaaatactgatttttgataacatttgatcttatgacagcatttgtatttttaattacagataggattacactaaaagtcatttctgacctgctcccttacccttatggctaaaataaactgctaggccctgaagcaaaggcgagccatgttctagagcaatgtctttcttgtattaaaatacagccccatgctcac

SEQ ID NO: 357540 - DNA, 1309 bp, Homo Sapiens
  misc_feature (195)..(217): n is a, c, g, or t
gcctcacttcagttctgtcttcattacagctctgtgctcagtttctccatctatgtaataaatacagccatatctgggcctggaagaactatgtcaaaagattttaaagagacaggcatcatttgaaggcagtattattttaaagtatcaatattacatttcttgcaaagagctgctgaaagttagttcttgccnnnnnnnnnnnnnnnnnnnnnnngctcttttaatgagtttattctgtcaatagggaaaatatcaactttaaaatctaaacatatgccacaaaattttgggacaaattttgagttgaagacggcagtacaaactcatgtttagctttgtacacacataaataattatagatgtgtacatatgcatggattaatatacatacatatttctcaactctgctacaaacagtgacatcccagtagcaacaagcacatctaatgcccagatcttggtttctaagtatgattctccaacaaaaggaaccagggctctttggagcaggggttgattctagggattctagggttggggcagggaatatccaagatgaacctggagcatcttgtagtgccagaaagtaagaagtgctcaaaaatcaaaaggatgggcacatcaaagggacatagtagccaacctggcagaactcctaatagccaagctggacaacttaagcaacaaaataaatactgtgttacccaaaatacaaaatatacatgagtccatactgatgtaaacaaattagggtgggagggagaaacaaattttccatatagaaaaattccaaatactacatatggatattcccacttccagggggttgaatgtaatctttcccacccaccacctcccatgactggacttagtgactgttttccaaagaacagaagtatggaaagggaaaataacagtaattttcagcagcaaaaaaccaacacacactaccttaaccaagtgtccaaagttaatacaccatcaagctgatagcatgtaactcctgacatgatgcagtgagaaggaccttcacctctggtattcttcctaaaaatctataaccccactctaaccatgaggaaaacatcagacaaacccaaattgaggaatattctacaaaacacctgaccagtactcctcaaaactgtcaaggttatgaaaaagaaagactgtggaactatcacagaccagaggctaattaggcatgacgactaattcagtgtggtatcctagattggatcctggaaaagaaaaatgacattaattaaaaaactagtacaatctgaaaaataaagtcaaagttccg

SEQ ID NO: 357541 - DNA, 2096 bp, Homo Sapiens
  misc_feature (605)..(605): n is a, c, g, or t
catggactgtgctagtggagacacattcacagacaaagcccacagcgccctttctatggagtcaattcatgttcctgatcctgtcatttcaatagcaatgaagccttctaacaagaacgatctggaaaaattttcaaaaggtattggcaggtttacaagagaagatcccacatttaaagtatactttgacactgagaacaaagagacagttatatctggaatgggagaattacacctggaaatctatgctcagaggctggaaagagagtatggctgtccttgtatcacaggaaagccaaaagttgcctttcgagagaccattaccgcccctgtcccgtttgactttacacataaaaaaacaatcaggtggtgcaggccagtatggaaaagtaataggtgtcctggagcctctggacccagaggactacactaaattggaattttcagatgaaacattcggatcaaatattccaaagcagtttgtgcctgctgtagaaaaggggtttttagatgcctgcgagaagggccctctttctggtcacaagctctctgggctccggtttgtcctgcaagatggagcacaccacatggttgattctaatganatctctttcatccgagcaggagaaggtgctcttaaacaagccttggcaaatgcaacattatgtattcttgaacctattatggctgtggaagttgtagctccaaatgaatttcagggacaagtaattgcaggaattaaccgacgccatggggtaatcactgggcaagatggagttgaggactattttacactgtatgcagatgtccctctaaatgatatgtttggttattccactgaacttaggtcatgcacagagggaaagggagaatacacaatggagtatagcaggtatcagccatgtttaccatccacacaagaagacgtcattaataagtatttggaagctacaggtcaacttcctgttaaaaaaggaaaagccaagaactaactttgcttactgtgagttgactgactctaattgaatctgcgtggttttgatactttgatggattccagtggaataaattcaggctgctgaaacaagaaattctgagcccaggaagcgggctcttctttcttcaaaagaagcccttcttgttcatattcaggagcttctgttatattcaaaggtaattctatgtctatctcaactctattgattggttttatagttcattgaaaatcctcaaataaaatataattattactgaaatatgtttaatatttaaggggaaaagagactaatttcagttatacttttaagcttagaatgtatgttcatttccaaattttgtatcataagagttttcaacatagagaaaagctgaaaaaatgcaaagaataaccacatactttccatctaccttcctttgttaacgggttgtttatcatataataatttgtttgtcatatttgctttcactgtctattatctgtttaagtctcataactctatttttagtttgctgaagacttgaaagtgaatcgcatatatcatgacacttcttggagtgtcattaatgggcaggcttttctgttgaagagtggattcccgaagttcttcatagagagtgtttttcagattcttcattgggatattaaaatattagccaaatttctctctgttttatatatgtcagtttatttcagtttgtggtttctgcaaatttgtaactgcctctgttttaggagtataagtattacttccttgtggtctattgtgaagtaaaaagtagacccttgcatatactattcttgtttgtgttcatcttaatgtttttgtacagctaaatcaaatgtaatttatagagttagtttcatcaacctaatgaatgctagttaaatttgaattccttggaatttatcgtatattgtattcactgagattatgaagggacaaatgttaatcttttgtttccagaaaaagttgggctttcccaagcagttctattacccggttcagaattgcttcatccaaaaatcatctgatggtatagatggatcctagtccttttcattacctgatggtagaaataaaataattgattttaaa

SEQ ID NO: 357542 - DNA, 1852 bp, Homo Sapiens
  misc_feature (119)..(127): n is a, c, g, or t
cgggatccgacggtgtgtgcggaacatggcggagcgcggcaggaagcggccgtgcggcccgggtgaacacggccaaaggattgagtggcgaaaatggaagcaacagaagaaagaggagnnnnnnnnntggaaggatctcaagctgatgaaaaaactggagcggcagcgggcacaggaggaacaggcaaagcgcctggaagaggaggaggcagcggcagagaaggaggaccgcgggcggccctacacactgagcgtagccctgccgggctccatcctggacaatgctcagtcgccggagcttcgcacctacttggccggtcagattgccagagcctgtgccatcttctgtgtggatgagatcgtggtgtttgatgaggagggccaggatgccaagactgtggagggggaattcacaggagttgggaagaaggggcaggcgtgcgtacagctggcccggatcctgcagtacctggagtgtccacagtacctgaggaaggcgttcttccccaagcaccaggatctacagtttgcagggctcctgaaccccctggacagcccccaccacatgcgtcaggatgaggaatccgagttccgagagggcatcgtggtggatcggcccacccggccaggccacggctcctttgtcaactgtggcatgaaaaaggaggtgaagattgacaagaacctggagcccgggcttcgggtgactgtgcgactgaaccagcagcagcacccagactgcaagacctaccatggcaaagtggtatcatcgcaggaccctcgcaccaaagctggtctctactggggctacaccgtccgactggcttcctgcctcagtgctgtgtttgctgaggcccccttccaagatgggtatgacctgaccatcgggacgtcagagcgcggctcagatgtggcctctgcccagcttcccaacttcaggcatgctcttgtggtgttcgggggcctccagggtctggaagctggagcggatgctgaccccaacctggaggtggctgaacccagtgtcctctttgacctgtacgtcaatacctgtcctggccagggtagccgtaccatccgcacggaggaagccatcctcatctccctggccgccctgcagcctggcctcacccaggcgggtgcccggcacacctgaaagttctaaggggccgaggacatcagtgaagcagcagtgaaaccaggggctctgcaggtcacttgggacggacgccaccagaattgtctccaaaaatcaccacctttaatactccccggtcctgcacacacccacagtctcactgggctccaccctcacttactgcccgccgtggatggccttggaggctgcctgcccgcgccaggatgttgggcacaaagagcagccccgaagcccgctcaatgctctcgatgggcaccaggaagcgctccagtgggatggcctcatccacaggtgcgttgggcatcacgtaggtgcggagctcaatttgcccacctgctgcctccaggatcagcaccttgaagaagtgtgtgggcactgccacgtggttcttgccgatgacctggtactttacgtaggatttcccatcagcctctgtcctgtgggcagacccaggcacacgtgggcagggggcctggatgaacccaaagccacctcttccaggcagccttccctgatctgtcctctaacttctgtcaacctgcaggaccacgccctcactgtgagacttctgtagcctgcctggctcctccttgaggctggaactctctccagggtggttaactctttccctctgttttccttatgcccaacactgggtcaggcagagtgggcgacaataaacgctgctaggag

SEQ ID NO: 357543 - DNA, 1616 bp, Homo Sapiens
tctcgctgcggaaagttggggcagctgttgctagtctggtcgttggtgacagcgaggcttccgcgctcgctgctggtgagcaagccccggcgtgccccgcgggctggaagaggcggcggcgtgatgcggcccgtggacgcggacgaggcgcgggagccccgcgaggagccgggcagcccgctgagccccgcgccccgcgccggccgcgagaacctggcctccctggagcgcgagcgcgcccgggcgcactggcgggcccgcaggaagctgctggagatccagagcctgctcgacgccatcaagagtgaggtggaggcagaggagcggggcgcccgggccccagcaccccgcccgcgtgcggaggctgaggagcgggtggctcggctgtgcgccgaagcagagaggaaggctgcggaggcggcgcggatgggcaggcggatcgtggagctgcaccagcggatcgccggctgcgagtgcttgctgagccggcgaggcctgcgcgggtctggagcggagcgcggccggggagtgtcccgcggttggaaaggcgctgggtggccaactgacgaactgtgttcacctgataaggagtcgtggctgcttggacaggctcaaaccaagagagcctttcgttttgtctcccctgtttttctgcctgcgttttctccacattagccactcaatttccagtaccatcctggcggatgacttcagcattagatggtcaggtgtatttttttattaataggcgcattcagtttggaaaagacagcttttcattaatgtcccacgtaaaggaatatggcctatacagtacgtacgctgctgcgtggtcatatttgttcctgtgatcttattgtattttcaaagtttggaagtatactcgtgtgctttgctgtttttttatgcttcctggaatttggggactcatgagagacttgaggttagagttctgcaagtgagaagacactacatggttgcagctgccacatgaagaacccaagctcctgtcaaagttgtgaatgcgactttggatgagattaagaaggcccagtggacggttggtcttgaagagtggcagtgtgtggatttgaggacctctgcagaccatcagatcaaaggagggagagctgcttttgggtgcttttgttttttcttgtttcttatagcattcctttttcttggaatgtaattttcctatggcatgttaactggtgcacatcgtgtaacctgtctggtgagcaacctacaattgggatgagttctaggtacatgtgtttgctgactttggggtaaacaactttgttataatacagtctctgccacagatgcatgtgacctcttcaggggcccagagtggctgaggaaggaaagcttcaagctggccatgggggtcccaaacagtcattccaggcttagatgatgactagcctaggtcatcagagcccagactccacagagactaaaatcagagctctgtcttgttatgataaatttcatttgcttggaaaaagaaatgctgaaagccagtgtttagaatctttgtgcagatgaccaaagcaattgacttggccaagaaaaggtaaggtaaataaacatttttcaaaatgaaaaaa

SEQ ID NO: 357544 - DNA, 887 bp, Homo Sapiens
  misc_feature (876)..(876): n is a, c, g, or t
gtggaacatgaatgataagctggtcagtgtccaaactgaatgcgcctagttaataaaagatacacccggaccatctaatgctgaagtcatccggccaggatggtactggaaattggagtggcctaatgtggagaaaacgcaggcagaaaaacaggggagacaaaacgaaaggctctcttggtttgagcctgtccaagcagccacgactccttatcaggtgaacacagttcgtcagttggccacctatgaaaaaagaatgaaaccaactccgcggagagcgtggcacggctctgcgctcccctccctgcctacccagcgccttccaccgcgggacactccccgccgcgctccgctccagacccgcgcggcctcgccggctcagcagcactcgcagccggcgatccgctggtgcagctccacgatccgcctgcccatccgcgccgcctccgcagccttcctctctgcttcggcgcacagccgagccacccgctcctcagcctccgcacgcgggcggggtgctggggcccgggcgccccgctcctctgcctccacctcactcttgatggcgtcgagcaggctctggatctccagcagcttcctgcgggcccgccagtgcgcccgggcgcgctcgcgctccagggaggccaggttctcgcggccggcgcggggcgcggggctcagcgggctgcccggctcctcgcggggctcccgcgcctcgtccgcgtccacgggccgcatcacgccgccgcctcttccagcccgcggggcacgccggggctgctcaccagcagcgagcgcggaagcctcgctgtcaccaacgaccagactagcaacaggttgccccaactttccgcagcgagatgccatacccccggncggaccagcct

SEQ ID NO: 357545 - DNA, 273 bp, Homo Sapiens
ccctttccagagtaggaaagcaaatacagtaaaatagagtgttaataataaaaatgtagagtcctcatagaaggaatgctactctggcagaaacccatctaattttggttatacaaataaaagtaattttaaaaaaatttaaaagcttagaaatggtaatactgcaaatacctttacaattttgtttcctataatataccttacagaaaaattttccaaaccagtctatcagagtgttaataataaaaatgtagagtcctcatagaaggaatg

SEQ ID NO: 357546 - DNA, 485 bp, Homo Sapiens
tcgcaacaaactgacatcaagaaaaagcaatcttatttcaagccagatgtgatgctagagtagaaaaccttcaagctgagtgcagaaagcaccgtctcttactagaagaagacaataaaatgttggtgaatgaactgaatcattcgaaagaaaaaaaatgccaatatgaaaaagagaaagcagaaagagaagtagctgtgagacagcttcaacaaaaacgagatgatgtcttaaacaaaggatcagcaacaaaagctctgctggatgcttcatcgcgtcactgcacctatttagaaaatgggatgcaggattcaaggaagaaattagaccagatgagaagtcaagtatgtatgcaactttgcacaccaacaactgttaatctgtagctagttaactaatataaagtgttttggggtactaattttagtggatggctttcttttgtatttttatgataattaatgttattaaaattttatagtgga

SEQ ID NO: 357547 - DNA, 920 bp, Homo Sapiens
  misc_feature (275)..(275): n is a, c, g, or t
  misc_feature (278)..(278): n is a, c, g, or t
ctcggcttccgaggccagacactgcagctgccagcagcccaggggcatcaagccaggcatggagccaagcaaggcccttcgcgccccctcagccacggcctcctcacggcccagcccattggccaggcgggacccccagagtgtactccagggcgggcgagggcagggggaggcggcctgatgatgtggccctgtcatagcggtcctggcccgacacgccgccgccggtccctgacggctggggctgggcctgcgggggcggcagctggggcccnctngttcgctgccgccgccaggtccttggtggccgggtgcttaaggccgggggcccgggcgagcggccctcgggaagcacgtggctgcgcttgagctggcgggcggcatcgatgagcagttcgatgcggtccgcgccctcgaagttcacgcagcagcgacacacggcctcgctgaagtcccacaccatggcccacggcatcttgggcaggtcgcacaggtagcaccactggcggcgggacgcctgcacagacgccatggccccagtccgcgcgccgcccagctcccgcgttccaccggccgccgacgtgcgatccgcgccgccaacgttcgatccgcgtcccggggacagcgcgagccacggtccggcctccggctcggcctccccgccggatccaggcccggccccccttccccgccccctgggccctaagcctttctgctcactcccgcctccctcgcgaaggcaggctgaggcacgtcggcgcccccgcccggtccgggctccgagccgaggcgcacagctcgggccccacgatgggccgcgagcgccgccgactcgggctcccatcccgggaataccgggctcggtaccatcgcccctccgtacacggctatggggggcgggaagtggagggggaaggggg

SEQ ID NO: 357548 - DNA, 1511 bp, Homo Sapiens
  misc_feature (149)..(152): n is a, c, g, or t
  misc_feature (156)..(157): n is a, c, g, or t
  misc_feature (160)..(161): n is a, c, g, or t
  misc_feature (172)..(172): n is a, c, g, or t
  misc_feature (183)..(183): n is a, c, g, or t
  misc_feature (194)..(195): n is a, c, g, or t
  misc_feature (200)..(200): n is a, c, g, or t
  misc_feature (202)..(202): n is a, c, g, or t
  misc_feature (205)..(219): n is a, c, g, or t
  misc_feature (221)..(222): n is a, c, g, or t
  misc_feature (224)..(224): n is a, c, g, or t
  misc_feature (227)..(228): n is a, c, g, or t
  misc_feature (1357)..(1357): n is a, c, g, or t
  misc_feature (1367)..(1367): n is a, c, g, or t
  misc_feature (1446)..(1446): n is a, c, g, or t
gggggtgtttaaaaaaaggggggcccaggggctctacgtctattattaagcccccccctaatggggcgcccctctttccacaaaaaaagagtgggtgccggtaaactgtggcgcccccccaggggattctttaaaggcggggccccccnnnnggtnnctnnctcttctcctntcttccggccnccccttccccnnccccncnccnnnnnnnnnnnnnnncnncnttnncttagctgctcaaagaaaattttatgggcactcggtaaagacaaatgccacaaaatgccattgaaacagatatcgaaaagcacaaggtgctgatgtagccactagatgaatctgttcggtagcagttgagcccggtgaattaaggagtttacagctgttatttatgtggctcatgatgcttattgagcaatctgcaaaaatagatttcctgtctcacacaggacagggtagatttccagcaagcataatcaaaatctccaagtcttttggtcaaattagagctgccaccatgcacgaggttttacttaaaggtgtttactgatgaataaactcacacttctgtgaactggttcttgcttcttgtgcagctaactctttccacctctctttgttctgctgaatgatgtccaccaggttgttcttgaaactcttcaggtccactgctgcaagggagtagtctggggaataggacccatcactcatggagccttttgtatttgatcgtcttagtgcatcagcaatgtgtaaccccacaatggtggttgagctgcttgccacataggaagaagtttcggcttttgaggcttcctctataagaggaataacaattttctctgttgagtctgtcagaagagaaaatgttggctctactatgaaatcgatgaaacctatttgtgactgggccaccatggttgacttccgatcacaaagtggggaaaatggaagccctaattcagcttctttatctccctgcaggaaaaactcctccattagggccatggtccaccgataatgcagcttccaggatttggctgggtggctgatgtctgctgcgtggagaatcagggacatggttttggctctgtcaatcccttcaggctgctgcaaactgtttcttatatttttaatttgctggaagtgacctgacatgtctgtagataaaaccatttcaatcactaggttccgaagatccctccagtcatctttggataaatttatcaagatattcatttcttcttcttgcataagtcgataagctgcactcacgtggtgattctcaaggacagagcgaacattatacaaaatggcaacatctgaccttgtctgaatgtgaaagttgtttgttgtnccctgtatgnctcataatacatgaatggacagtcagacaaagacccattgactaaaatttaccagttacagtgagccagtgcatgatancctgtatgaagcattatgtaatgccacagtttgaagtgaacatcagctgcatgaatcaaattgtg

SEQ ID NO: 357549 - DNA, 789 bp, Homo Sapiens
  misc_feature (56)..(110): n is a, c, g, or t
agcggagcctcggggagcagcccgggctgtttgttccgtcaccggggaaaggaggnnnnnnnnnnnnnnnnnnnnnnnnnnnnnnnnnnnnnnnnnnnnnnnnnnnnnnncggtggcgagttcgagccccgcggcccctgtccgcccgcgtgcgcccctcgacacagctcgcctcccgccccctgattcctgctgctgccgcccagaggagaaaggaacctctgcctcgaatttccccactgcgccgggcgctgcggagagcggcgagggtgggcgcgaggcggagaacgcgatgaatgagttctcccctcgcctcggagttgtctgagttggcggcgctgcgcccaggcttccggctctcagcgccccacgcgcgcgtggctccccgggctgccacccacgcccgcggccggggccgagccagccacgcagggcagccgaggctccggagctcctgtcccggccccagtccgggtaaaaggagggttgtccccagcggaggcgcacagccgcgcgttctccctgcactctcttcgcggtcccatctgttccccatggcgtctcatccgcaaacccggatccaggcttacctggagaagaacaagatcggtcccctgtttgaggaattaatgaccaagttaataactgagacacctgaccagccaatcccatttctcattgacccatcttcagtctaaacaagggaaccgtggacaacttcaaagaactttgtctggatctgcagctctatgggcagaaagtgaaaaatcagaatccaaaggaacaaga

SEQ ID NO: 357550 - DNA, 1029 bp, Homo Sapiens
  misc_feature (829)..(829): n is a, c, g, or t
aaaaagcaggctggtaccggtccggaattcccgggatcaagattttgaccaacctatcaatattatatcagattctgcatatgtagtacaggctacaagggatgttgagacagctctaattaaatatagcacggacgatcatttaaaccagctattcaatttattacaacaaactgtaagaaaaagaaatttcccattttatattactcatattcgagcacacactaatttaccagggcctttgactaaagcaaatgaacaagctgacttactggtatcatctgcattcataaaagcacaaaaacttcatgctttgactcatgtaaatgcagcaggattaaaaaacaaatttgatgtcacatggaaacaggcaaaagatattgtacaacattgcacccagtgtcaagtctctacacctgcccactcaagaggcaggagttaatcccagaggtctatgtcctaatgcgttatggcaaatggatgtcacgcacgtaccttcatttggaagattatcatatgtccatgtaacagttgatacttattcacatttcatatgggcaacctgccagacaggagaaagtacttcccatgttaaaagacatttattatcttgttttcctgtcatgggagttccagaaaaagttaaaacagacaatgggccaggttactgtagtaaagcagttcaaaaattcttaaatcagtggaaaattacacatacaataggaattctctataattcccaaggacaggccataattgaaagaactaatagaacactcaaagctcaattggttaaacaaaaagaagggggagacagtaaggagtgtanccactcctcagatgcaacttaatctagcactctatactttaaattttttaaacatttatagaaatcagactactacttctgcaaaacaacatcttactggtaaaaagcacagcccacatgaaggaaaactaatttggtggaaagataataaaaataagacatggggaaatagggaaggtggtaacgtgggggagaagggt

SEQ ID NO: 357551 - DNA, 871 bp, Homo Sapiens
ggcggagtatgggccaggtcgcattataaagtaagggaaacttccgcaggaacgagtgaaaatagaaaatatggctgggggggaataagggcagaggtttattacattgaggccttgagggagggcctgtgaggtttaacgtagcggggccaaagcttgacttcccccttcgggcctggtgagggcaggttggatgcctaattaaaggcgcagacctgtcctcagctgcactgggggctgttggcagtttggggaaaaaaacttctggacactgggcctcctctagcctgggcgaaaggaccaaggcacggcccaagccccgggggcagctgcctttggctttgatctcaagtcaggctgaaggcagcgaagcctcggggcccaagcccctccccagccccctctcccggacagacgccttgcccagggtgtgtttgctgagtgtcttgactaccgtgacaccacgcatggccagagctagcgtccctactgcctcccgactcctcagtggaggaggagctgcggtccctctggtgtctgccatccccctccctccctgggcccggccctggacccgtcaggtgcctgtccccagccccaaccccactcatgccccgtcgtcctcccagacaaatgaaaccacgctgcgcttccgatgcccccgcttgccgtgtaatggttcagctaatcccatggcgagatgggggctcactccggaggaggagccaggcagcagggccttcctgaccaacagccagctctgtccttccccccaggaaacacatgttcatttgtgtgatcatgtatagacctcagaacggaagataggactgtatataattgtaataaataccagttgccactatttaag

SEQ ID NO: 357552 - DNA, 863 bp, Homo Sapiens
  misc_feature (825)..(825): n is a, c, g, or t
gtttgctctcctcaacatatgaagtcctgattttccagcccacagaatgagatcccctttcatttgaatcccaatatcaaaatactaaaacattaaaagaataaaatagtagagccaagttcccttattaacaggagaagtcccatggggctgcctcatccagattttgttgataggcaaggtgcttaaacaccaagtgacaaggtccaaatgtgtgagggagtagagagagagaaagcaagagagaattgtgttcagtttacactgatggactagcaacttgggagctggtatctgtgaggttctaactgcccaaatgcaaacctaacagtagcctcttgccattgggccagatactgaagttttggtactggcctctctgcacatgatctcaacattcacattgtgtgcttgaacagtttccctatgctgcaatggaacagcaaatacctcctaggtagaacctggagacccaaggcagcagcagtaaataaatatcttgcatatatgtcaaattcagtcctcaaacaaaacctgacatcttagtaaagccatcagaaagttctaacaaaaatggtatacttttttcctacaatgtttaatctccatgccgacaatgtctcatttgactttttttccctctgccccttaaaataggtgatgaagtagaaattcagtcatgaaaataaaaagacatatttcaaatatacagcatcctgttgtcacagaacagacaggactgtcctagacactgtggggaaaagatggcactgggataggtaaaattttatttagtgatcactcacactggaacaatgcttttcntaattgaaggaggggtgaagtgccaggggttaggggag

SEQ ID NO: 357553 - DNA, 886 bp, Homo Sapiens
  misc_feature (11)..(11): n is a, c, g, or t
ttaactgtttncccatttttccagcagcagtagttacactatcctcaatttgccctattttatgacaacctaacatattatgctgggaggaacagaatgagtacaacaaggtttgccccagaagctaaaacaaatttactgacatttaaagagcaatactcaccctcggtttgtctacaggggaaagaaattcatccagtgatgcttcagtatgcaagaacaaaattgttttgcaataatacataagaaagaacattctctagggacaaaaggtcccctccttgccaagagcctggggtgcagcaggagtacagtactttttttgaaaccctgaaggacagctcaatttttttgctaagggcatgaaggttctggaatcagccatgtgtggagggatggatatgcctttttaaaaaagcatgacagtatttctgagcatgattttcagttgctaaatataggcttagcaacagcactgctgatgaaatcactcaggagacatttttaaagagaagcaaaagaaaacagatttgtgatgtacacacagcaggacaactgttttggatgaactcattccaacttgttaagacgacaaaaatgaccaacttgttaagatgagaaaaatgaacgtgttcaattaactgaatcctctttttaagacgactgagtgtgttgcagctgagtgaatctttgggactcgggaaaaataatccacacagacattgcaaatccctgtgttagcccaggcccaaactccttacccaaatccaaagcctttcccgagggcagattttaccaggaacattcaccgcgggctggtaacctctccccatttctgtgtcaagagttcatagctgagtaacagtataaccaggaaaaagtacag

SEQ ID NO: 357554 - DNA, 3232 bp, Homo Sapiens
  misc_feature (2728)..(2825): n is a, c, g, or t
cccgggatgggccgcaagcggcatggaggaggcggaggccgcggcgagccgggccgagcagtgagggccctagcggggcccgaagcggggcccggggcccctaagccattcctgaagtcatgggctggccaggacattggtgacccgccaatccggtatggacgactggaagcccagccccctcatcaagccctttggggctcggaagaagcggagctgttatccttacctggaagtataaactgacaaaccagcgggccctgcggagattctgtcagacaggggccgtgcttttcctgctggtgactgtcattgtcaatatcaagttgatcctggacactcggcgagccatcagtgaagccaatgaagacccagagccagagcaagactatgatgaggccctaggccgcctggagcccccacggcgcagaggcagtggtccccggcgggtcctggacgtagaggtgtattcaagtcgcagcaaagtatatgtggcagtggatggcaccacggtgctggaggatgaggcccgggagcagggccggggcatccatgtcattgtcctcaaccaggccacgggccacgtgatggcaaaacgtgtgtttgacacgtactcacctcatgaggatgaggccatggtgctattcctcaacatggtagcgcccggccgagtgctcatctgcactgtcaaggatgagggctccttccacctcaaggacacagccaaggctctgctgaggagcctgggcagccaggctggccctgccctgggctggagggacacatgggccttcgtgggacgaaaaggaggtcctgtcttcggggagaaacattctaagtcacctgccctctcttcctggggggacccagtcctgctgaagacagatgtgccattgagctcagcagaagaggcagagtgccactgggcagacacagagctgaaccgtcgccgccggcgcttctgcagcaaagttgagggctatggaagtgtatgcagctgcaaggaccccacacccatcgagttcagccctgacccactcccagacaacaaggtcctcaatgtgcctgtggctgtcattgcagggaaccgacccaattacctgtacaggatgctgcgctctctgctttcagcccagggggtgtctcctcagatgataacagttttcattgacggctactatgaggaacccatggatgtggtggcactgtttggtctgaggggcatccagcatactcccatcagcatcaagaatgcccgcgtgtctcagcactacaaggccagcctcactgccactttcaacctgtttccggaggccaagtttgctgtggttctggaagaggacctggacattgctgtggattttttcagtttcctgagccaatccatccacctactggaggaggatgacagcctgtactgcatctctgcctggaatgaccaggggtatgaacacacggctgaggacccagcactactgtaccgtgtggagaccatgcctgggctgggctgggtgctcaggaggtccttgtacaaggaggagcttgagcccaagtggcctacaccggaaaagctctgggattgggacatgtggatgcggatgcctgaacaacgccggggccgagagtgcatcatccctgacgtttcccgatcctaccactttggcatcgtcggcctcaacatgaatggctactttcacgaggcctacttcaagaagcacaagttcaacacggttccaggtgtccagctcaggaatgtggacagtctgaagaaagaagcttatgaagtggaagttcacaggctgctcagtgaggctgaggttctggaccacagcaagaacccttgtgaagactctttcctgccagacacagagggccacacctacgtggcctttattcgaatggagaaagatgatgacttcaccacctggacccagcttgccaagtgcctccatatctgggacctggatgtgcgtggcaaccatcggggcctgtggagattgtttcggaagaagaaccacttcctggtggtgggggtcccggcttccccctactcagtgaagaagccaccctcagtcaccccaattttcctggagccacccccaaaggaggagggagccccaggagccccagaacagacatgagacctcctccaggactgcggggctgggtactgtgtacccccaggctggctagcccttccctccatcctgtaggattttgtagatgctggtaggggctggggctaccttgtttttaacatgagacttaattactaactccaaggggagggttcccctgctccaacaccccgttcctgagttaaaagtctatttatttacttccttgttggagaagggcaggagagtacctgggaatcattacgatccctagcagctcatcctgccctttgaataccctcactttccaggcctggctcagaatctaacctatttattgactgtcctgagggccttgaaaacaggccgaacctggagggcctggatttctttttgggctggaatgctgccctgagggtggggctggctcttactcaggaaactgctgtgcccaacccatggacaggcccagctggggcccacatgctgacacagactcactcagagacccttagacactggaccaggcctcctctcagccttctctttgtccagatttccaaagctggataagttggtcattgattaaaaaaggagaagccctctggggnnnnnnnnnnnnnnnnnnnnnnnnnnnnnnnnnnnnnnnnnnnnnnnnnnnnnnnnnnnnnnnnnnnnnnnnnnnnnnnnnnnnnnnnnnnnnnnnnnctcttaggggggcctcgagcccccataagccttaaagggggtctaattaaaaatccctggccgtcttttacaaacttggaggctggggaaacccctggggggcccaaactcatacgccttgggaaaaattcccctttccccacttggcaaattcgcaaaggggcccttacgattggccctacctaagcgtggacactccgtagtggcaatggcctacttgaacgcttatatttttttcgaaaaatcccctttaaactttatgtaaaacaactgattttttaaaccactggtccacacatgtggaactcctttttaattcaaagaaataccctcttaaaggctaaaggttttcccccttagatccagatgttcccttctaaaatagggctctccccctaaaagtgtca

SEQ ID NO: 357555 - DNA, 999 bp, Homo Sapiens
ctctaggacccaataattgagggataaaggcagagactccctagggactagagaaatgatgagccaggtttccatggtaactgattgcagtgcagcctcttcctagtctcagactgagggagaatcaattttgggggagaccacatctaatggataaaagagccacaggattacaaaagggtggaatagttgttacaagaaggtcacatcatcctggcactgctcccagaaccagtgggcctcgaagcccagcttggcactctcatcctctggtgactcaggtggtccaccttgaagcctctcccctgggggcttccacacagctctcaagctccctagcctggtggctgccacagccacctcagtcctggccctctctccaccagctataacttttgccccagtccatctcggaacgtggagccccaggtgggccctgttcatccagctcgctgggggccactgtgtccaggaagctgccaatagagacactgtccagccggtcggtggtgctggtgtctggcaggctgtcccagctgcctcgccttgagcggcctgggctcccgcctgtcaggctatattgactgctggtgaggctgctgcaatgactggtcaacgtcccccgctcctccaacagccagcgcactgcctcgatgccctcattcaaggtcaccagctgctgcaggatcttcacatcgatggctcgcaggtaagccagctccatcttcagcgccatgatcttgtcccccaagtcgtggccggtgctagacgcccctgggagcagcagggcgccagaggttcccagctcacactcgcctcgcagcccgcggagcagcccttcaggggtcttcctgcccaccttaccctccacatcccgcaggtcaggcgtctgggactccacggtcccctccatgcgggcccaagcctgaaaagggctgggcgaccggacgccggggaccggctcccgggggtcctcccttcgccgctgctaaagcggag

SEQ ID NO: 357556 - DNA, 1045 bp, Homo Sapiens
  misc_feature (975)..(983): n is a, c, g, or t
ggcctgggtggcgaattcggcacgagggcggcatggaggaggcggaggccgcggcgagccgggccgagcagtgagggccctagcggggcccgagcggggcccggggcccctaagccattcctgaagtcatgggctggccaggacattggtgacccgccaatccggtatggacgactggaagcccagccccctcatcaagccctttggggctcggaagaagcggagctggtaccttacctggaagtataaactgacaaaccagcgggccctgcggagattctgtcagacaggggccgtgcttttcctgctggtgactgtcattgtcaatatcaagttgatcctggacactcggcgagccatcagtgaagccaatgaagacccagagccagagcaagactatgatgaggccctaggccgcctggagcccccacggcgcagaggcagtggtccccggcgggtcctggacgtagaggtgtattcaagtcgcagcaaagtatatgtggcagtggatggcaccacggtgctggaggatgaggcccgggagcagggccggggcatccatgtcattgtcctcaaccaggccacgggccacgtgatggcaaaacgtgtgtttgacacgtactcacctcatgaggatgaggccatggtgctattcctcaacatggtagcgcccggccgagtgctcatctgcactgtcaaggatgagggctccttccacctcaaggacacagccaaggctctgctgaggagcctgggcagccaggctggccctgccctggggctggagggacacatgggcccttcgtgggaacgaaaaaggaggtcctggcctccggggaaaaacattctaaatcacctgcccctctctttcctggggggggacccagttcctggctgaaaaaaagaaggtggccattgaggctcaacaaaaagaagggcccactggggccagaaaaccaaaactgaaaaacgttnnnnnnnnngggggctcttctgtgcaagcaaaagatttgaaaggggcctctatggaaaaaaatctatagca

SEQ ID NO: 357557 - DNA, 741 bp, Homo Sapiens
ggctgtacggctcggagttacgggatactgtcagccggtcggtggtgctggtgtctggcaggctgtccagctgctcgccttgagcggctgggctccgcctgtcaggctatattgactgctggtgaggctgctgcaatgactggtcaacgtcccccgcgtcctccaacagccagcgcactgcctcgatgccctcatacaaggtcaccagctgctgcaggatcttcacatcgagtggctcgcacattcctgaagtcatgggctggccaggacattggtgacccaccaatccggtatggacgactggaagcccaggccccctcatcaatgccctttggggctcggaagaagcggagctggttaccgttacctggaagctatagcaactgacaaaccagacgggccctgcggcagattctgtcagacagggcgccgctgctctttcctgcctggtgactgtcattgtcaagtactcaagtctgatcctggacactcggcgacccatcacttgaagccaagtgaatgacccagagccacgagcaagactatgatgaggccctaggccgccgtggagccccccacggacgcagaggccagtggctccccggcgggtcctggacgtagaggtgtattcaacgtcgcagcaaagtatatgtggccgtggatggcaccaccggtgctggaggatgagggcccgggagcagggccggggcatcatgtcattgtcctcaacaggccacggga

SEQ ID NO: 357558 - DNA, 1730 bp, Homo Sapiens
cttggttaagggccaaccaggatttctcccgtcctgggccttcttgcccaacacccctgggtctctaaaaaccagttcccagctgtccgaaaggtaaagacgtgtctctcgctggtttctcgaggttctgccccgcgcgagggcctcacctgtgggtagaggtgctgcatgaacttgctcccgagaaacgccctccagccggggtaccgggaggtgctgcccggccatggttgctcacgcctgccctcttccaggtcttcggaacttcggctctaaagcgttcctcagcgccatccgcccggaaacacgagcgacagagaaaaggtccgcgagccggcagactccagagtggctgggtccgagcgcggggcgggttgccgaagggcctcggcctggctgcgtgctggagagcggggacggggccgactcaccagaggctgcagcaacaggtccactttgctctccagtctctttctccgacaccgctgaggcggtttcccaccgacttcctttccatacagcaccggcaggcaccggggtgaagggtcataaaaatggcgctggccgctcgtttgctaccccagttcctgcactctcggtcgctgccctgcggggccgtccgactccggactcctgctgtggccgaggtgaggctgccgtcggccacactttgctacttctgccgctgtcgcctcggcttgggagcggcgttatttccacgaagcgctagggccttggcagcctcggcgctacctgcccagggctcccggtggccagtgctcagcagcccgggactccccgcagccttcgcttctttccctgcctgccctcagcgcagctacagcacggaggagaagccccagcagcaccagaaaaccaagatgatcgtcctgggattctccaaccccatcaactgggttaggactcgaattaaggccttccttatctgggcctatttcgacaaagagttcagcatcacagagttctccgagggagcgaagcaggcttttgctcatgtatccaagttgctgtcacagtgtaaatttgatctgttggaagaacttgtggccaaagaggtgctacatgcattgaaagaaaaggttacttcactacctgacaaccataaaaatgcccttgctgctaacatagatgaaattgtatttacatcaacaggagacatctccatttactatgatgagaaaggaaggaagtttggttaacatcctgatgtgcttttggtatctaaccagtgccaacatccccagtgaaactttaagaggagccagtgtattccaagtttaagttggggaaacagaaagtgggaaactaaacaacttcttagggcaagctatgagtttcagagggagttcacacaaggagtaaagcctgactggaccattgcacggattgaacactcaaaattattagaataattttcttggaaaaatcagcttatggactttagcagttgctgtgaaaaactaaggaagaaaaattttggggtcatttgatcttcacttaatctaagtctgtgaattacttttatattattttgaaatactccttgcagtatattggcatgatacagtaaaagcattttccacagattgttatcaccttctttaaaagaagtcaaaatttaaaaaatacaatagcacgttgttggtgtcatattcaataacatttccaatgctacatataattttatagacataataaagaaggtattg

SEQ ID NO: 357559 - DNA, 675 bp, Homo Sapiens
  misc_feature (48)..(57): n is a, c, g, or t
  misc_feature (174)..(183): n is a, c, g, or t
  misc_feature (617)..(617): n is a, c, g, or t
ggcaaacacagacagtttctagttgcaagatatcccccatggcagagnnnnnnnnnngtttcttctgggatgcagacaatccaggaatcagtgataatccactgacctttctaggaagtaagagcaaagaacaaacaggttagattctgagaagctgtttctaagtttgatggnnnnnnnnnncctaagcctgaggcactgagaagggttcaagcttgtattctccagatgcaagccaacctattgctgcaactgacaaatgagtataatactgacacaaatgtgggctgtttttgtttgtgtgtgaagacatatgtcagaactccactcatctgtcaatgatggtgcaaataaagcccgatttccactggcagctattataaccaggagaggatcctgcctttggctaaggccagcggaaaggaaggcaaatggagagacacaaagagcctgaatctttgagccatcactcagttgcgatcaaactgcctggaacccaccccaccccgatcgcctgctcggacaaaaataactgaagctcccattgttcaaaccagcttgtgtcatggtttctgatgtttataactaagaccaattcaaacaatacaatattttanatctttattattttttaaggaaacaatagcttaagggtaaaaactcatctctaattgt

SEQ ID NO: 357560 - DNA, 928 bp, Homo Sapiens
ggcggtgtattagcatgagcagcgtggccctggccccacactcccaaatctgccactccatagacccacttgcctcaaggctttatatttggctgctttcttacaatgagaattaagatttttaaactgaagttgaccatacaggttgcattagccctaactggcttcatgtaagaagggtgactgcctaaactagttccttgtaagctgaaccatcaattatcagttgaagccatacttttatttaaattaatatacgtagataccagaggccaagccacagagaggataatagttcttcccaataaaggtgatattaatcagactaatttccgaacctaaagaagttactgcttaaacgacggaatttcagggggaagcaagactcatttagaacaaatgaaatttctccagtcctacatttcctgaattggacttctagcacatcaaaaatatttcagtcattatcagtctcattaactgaaatgcccaaatgctaaatgccagtgttctttcacactgttttaattttcttgggaaattgagtcccagtggatgttaatggagtgggttgcccatccctgaaatgtcttattttcaagtgcctggcctgggaaagaaggggaagaaacaattgcattatatccaaagatacactataaaaatagagtttttaccaaaaaaagatgtttgttctcatctcagtaggcctcatttgggcaagtgacccacaggtcttttggcgagtttgctatttgcctgttgaaatacttgtttcaacttagagaacagttatgatgtgaccatagcatggcacaactaaaaatctaagcctgaaacctgaaaaaagagatatgacaagggaaattaatcaggctatacataagtattgtatttatttgaataaaaataaaaagagcaacccata

SEQ ID NO: 357561 - DNA, 642 bp, Homo Sapiens
  misc_feature (249)..(265): n is a, c, g, or t
  misc_feature (606)..(623): n is a, c, g, or t
aagtgctgtgattacagacgtcagccaccatgcctggcctgaaaccttttttaggtaaagttgaattccatccttaaaagtttctgttatatcctatttagccattttctattgtctcccaaagaattcacatcaaaaaaacagctttgaactcccccttcaaaggaaacagtcgactttcataattagcatctaccattatccccaaatcttattttattcattgacttgaaattttttccaattgcnnnnnnnnnnnnnnnnnaaggttaagagcagaggtttactaggccaaagaaagagaatagctctctgttgcagagaggggtcctggagaaatgggttaccccagttgtcttatttaaatggttacccatcagattttaattttatcttctctttgagagcttggtaataagaagcacttaaatcactccaaagaagactttaaaaagggagcagtgaaaaggtcttaataatttattgattgaattaagaaatactagctaattaagaatctgagtctaaacagcacagattttttctttctgcttttaaattgtgttttaaaaaaagagacagggagcaaccgcacccagcttaagnnnnnnnnnnnnnnnnnngagacggagttttcgctct

SEQ ID NO: 357562 - DNA, 853 bp, Homo Sapiens
  misc_feature (45)..(82): n is a, c, g, or t
ggaaaggtgttatctatagggactggactcccgcggtggcggcgnnnnnnnnnnnnnnnnnnnnnnnnnnnnnnnnnnnnnnatcaggccaaatcggccgagctcgaattcgtcgagagcgggagggcgagcggaggcggagaaagggcgcgggagtgagagagggtgagtcagccactgtctatgcaataaagggaggcctcaccgcgggatagggctgaattcagaagtgcggcccgtgccgcagtctgttccaggacgcggcttgtcttagcgtcagcgagggaaggttgaggaggagccagagcctggtcctgcagcctttctcgccgtcagcgcccgtcgccatctccaccatgcagtcccgggaagacgtcccgcgctctcgccgcctcgccagtccccgtggtgggaggcggcccaagaggatttccaagccctcggtttcggcctttttcacgggtccagaggagttaaaggacacggcccattctgcagccctgctggcacagctcaagtccttctacgacgcgcggctgctgtgtgatgtgaccatcgaggtggtgacgcctggcagcgggcctggcacgggtcgcctcttttcctgcaatcgcaacgtgctagcagctgcgtgtccctacttcaagagcatgttcacaggtggcatgtacgagagccagcaggccagcgtgaccatgcacgatgtggacgccgagtccttcgaggtgtaggtcgactactgctacacgggtcgtgtgtctctcagtgaggccaatgtgcagcgcctgtacgcggactccgacatgctacagctggaatatgtgcggaagcatgtgctcttcttaccgacgcc

SEQ ID NO: 357563 - DNA, 1177 bp, Homo Sapiens
atcaggccaaatcggccgagctcgaattcgtcgagagcggggcggcgagcagacgcggagaaaggacgcgggagtgagagagggtgagtcagccactgtctaaacgataacgggaggcggctctgcggggtagggttgaattcagtaaatgggctcgtgctgctgtctcttcggagacgctgctatcttagcgtcagcgagggaaggttgaggaggagccagagccgggtcctgcagcgtttctcgccatcagcgcccgtcgccatctccaccatgcagtcccgggaagacgccccgcgctctcgccgcctagccagtccccgtggtgggaagcggcccaagaagattcacaaacccacagtttcggcctttttcacgggtccagaggaattaaaggacacggcccattctgcagccctgctggcacagctcaagtccttctacgatgcgcggctgctgtgtgatgtgaccatcgaggtggtgacgcctggcagcgggcctggcacgggtcgcctgttcccctgcaaccgcaatgtgctggccgcggcatgtccctacttcaagagcatgttcacaggtggcatgtacgagagccagcaggccagcgtgaccatgcacgatgtggacgccgagtccttcgaggtgttggtcgactactgctacacgggtcgtgtgtctctcagtgaggccaacgtggagcgcctgtacgcggcctccgacatgctacagctggaatatgtgcgggaagcctgtgcctccttcttagcccgacgtcttgacctgaccaactgcaccgccatcctcaagtttgcagatgcctttggccatcgcaagctgcgatcccaggcccagtcctatatagctcagaacttcaagcaactcagccacatgggttcaattcgggaggagactctagcagatctgaccctggcccagctgctggctgtcctgcgcttggatagtctggacgtggagagtgagcagacagtgtgccatgtggcagtgcagtggctgcaggctgctcccaaagagcggggtcccagtgctgcagaagtctacaagtgcgtgcgctggatgcacttcactgaagaagatcaggactacttagaagggctgctgaccagagccacggtcaacccacaagccacggtcaacccacaagccacggtcaacccac

SEQ ID NO: 357564 - DNA, 420 bp, Homo Sapiens
gtgggttgaccgtggctcgtgggttgaccgtggcttgtgggttgaccgtggcttgtgggttgaccgtggcttgtgggttgaccgtggcttgtgggttgaccgtggcttgtgggttgaccgtggcttgtgggttgaccgtggcttgtgggttgaccgtggctcgtgggttgaccgtggctttatcatctttgcctcaaagcagctccatgtcacctccagctcaaaacctcagtcattttgctctcacctttgagtaaggccagggacctggaaaagtgggactaaaatgtctccaggacgttttatccaggaaaactaccacgaacctggtaccttcttggttatggatggtaaggggagagcaaaatgactgaggttttgagctggaggtgacatggagctgctttggggtaccgagct

SEQ ID NO: 357565 - DNA, 1003 bp, Homo Sapiens
  misc_feature (270)..(270): n is a, c, g, or t
  misc_feature (272)..(272): n is a, c, g, or t
  misc_feature (277)..(277): n is a, c, g, or t
  misc_feature (279)..(283): n is a, c, g, or t
  misc_feature (301)..(301): n is a, c, g, or t
  misc_feature (305)..(306): n is a, c, g, or t
  misc_feature (310)..(311): n is a, c, g, or t
  misc_feature (313)..(315): n is a, c, g, or t
  misc_feature (324)..(325): n is a, c, g, or t
  misc_feature (349)..(350): n is a, c, g, or t
  misc_feature (357)..(359): n is a, c, g, or t
  misc_feature (361)..(361): n is a, c, g, or t
  misc_feature (363)..(364): n is a, c, g, or t
  misc_feature (369)..(371): n is a, c, g, or t
  misc_feature (374)..(375): n is a, c, g, or t
  misc_feature (380)..(381): n is a, c, g, or t
  misc_feature (383)..(384): n is a, c, g, or t
  misc_feature (389)..(389): n is a, c, g, or t
  misc_feature (391)..(391): n is a, c, g, or t
  misc_feature (396)..(396): n is a, c, g, or t
  misc_feature (399)..(400): n is a, c, g, or t
  misc_feature (402)..(405): n is a, c, g, or t
  misc_feature (413)..(415): n is a, c, g, or t
  misc_feature (417)..(418): n is a, c, g, or t
  misc_feature (422)..(422): n is a, c, g, or t
  misc_feature (433)..(433): n is a, c, g, or t
  misc_feature (436)..(437): n is a, c, g, or t
  misc_feature (439)..(439): n is a, c, g, or t
  misc_feature (448)..(448): n is a, c, g, or t
  misc_feature (450)..(450): n is a, c, g, or t
  misc_feature (455)..(455): n is a, c, g, or t
  misc_feature (459)..(460): n is a, c, g, or t
  misc_feature (462)..(462): n is a, c, g, or t
  misc_feature (467)..(468): n is a, c, g, or t
  misc_feature (471)..(472): n is a, c, g, or t
  misc_feature (475)..(475): n is a, c, g, or t
  misc_feature (478)..(478): n is a, c, g, or t
  misc_feature (481)..(481): n is a, c, g, or t
  misc_feature (485)..(486): n is a, c, g, or t
  misc_feature (497)..(498): n is a, c, g, or t
  misc_feature (509)..(509): n is a, c, g, or t
  misc_feature (526)..(529): n is a, c, g, or t
  misc_feature (532)..(534): n is a, c, g, or t
  misc_feature (536)..(537): n is a, c, g, or t
  misc_feature (540)..(541): n is a, c, g, or t
  misc_feature (546)..(548): n is a, c, g, or t
  misc_feature (552)..(552): n is a, c, g, or t
  misc_feature (554)..(554): n is a, c, g, or t
  misc_feature (564)..(567): n is a, c, g, or t
  misc_feature (576)..(577): n is a, c, g, or t
  misc_feature (581)..(581): n is a, c, g, or t
  misc_feature (588)..(592): n is a, c, g, or t
  misc_feature (605)..(605): n is a, c, g, or t
  misc_feature (611)..(612): n is a, c, g, or t
  misc_feature (629)..(629): n is a, c, g, or t
  misc_feature (632)..(632): n is a, c, g, or t
  misc_feature (643)..(643): n is a, c, g, or t
  misc_feature (648)..(648): n is a, c, g, or t
  misc_feature (671)..(671): n is a, c, g, or t
  misc_feature (673)..(673): n is a, c, g, or t
  misc_feature (677)..(677): n is a, c, g, or t
  misc_feature (680)..(680): n is a, c, g, or t
  misc_feature (686)..(704): n is a, c, g, or t
  misc_feature (730)..(730): n is a, c, g, or t
  misc_feature (732)..(732): n is a, c, g, or t
  misc_feature (737)..(737): n is a, c, g, or t
  misc_feature (747)..(747): n is a, c, g, or t
  misc_feature (751)..(751): n is a, c, g, or t
  misc_feature (756)..(756): n is a, c, g, or t
  misc_feature (936)..(936): n is a, c, g, or t
  misc_feature (981)..(981): n is a, c, g, or t
  misc_feature (991)..(991): n is a, c, g, or t
ccaacgtaacgaggcctgggtggcgaattcggcacgaggggcaaagcgtctgacatgtggtggcagcaaattcgtccccggggtggtttcctcgcctggcccccgagtccccacgggctggcgggtggaatcccaggtctccagggggtccctgtgcagctccatctcacttctctactgcctcccagccccacggtttcaggcattcagatgtgagctcatcaacattgaacccaaagtcggtggtatatgactcaccctccttccaantntcctncnnnnntttttttaaaataaactnaccnnaaanntnnntaacacacnnacctccattatcatttatattttnnttataannncntnnttttnnnttnntttannannatttnanttttnttnntnnnntttttttnnncnnttcncccatcccaanctnntnattttattncnttttnattnntnattannatnnttnatnttncttnnttattaaaaannaaatcaactcnaataaactctccttatnnnnttnnnannttnnacttnnnacanancatctttttnnnncttaacttnnttanacatccnnnnnctctacattttcncttttnnccattcattccccttcnctnaattttatttntactntaacttcataatcccatattttntntttnctnattacnnnnnnnnnnnnnnnnnnnctcctccctcctttccacccctcctntnccttncactcccttncctnccctnttttttggtcaacattgctacggagccagcagtgaggcctttcccttcaagggctctgtggtatctctggccacatttgttctaatgtctgaacctctaaatcttttctttttgattggttttactgtttttaagaagccagcactgctgtctcatagatgggatttgtactcttggggnaacttaaagtgtctctctcgctgctaacagacgattgatgtcttntctctgtganccactcaccatg

SEQ ID NO: 357566 - DNA, 887 bp, Homo Sapiens
gtttttccctgccgccggctgttcgtctcttcttgtatctcttacctctatctttgtgacacgctctcggggatgatcattcgctaccttctcactgtttccagcttatcgcatgctcgggactttactaacttcccattccctcttcgtgtcgtggccccgaggacgtagggccaagtgctctgcgttcgctttgtatttgcccgtccgttcccgcgcatcccaagtctgtctgatgggtatggccctggtcatgcctcagttcctgccttcatctgcttttccggaggtaaaaccatatcaactcctagaaatcgctccttatggggcttgggaccttccatttggcactgagcatcttgtggggccttaactggctgagacatcccggccctctacatttgccctgttggccaggcagtccccttcccgcaattggagggcgacgcctaacttcagaatcccatagtggcgcttgccgcaggtctggtggggtgtcttttttctcctccctcctttccacccctccgcgccctgccactccctggcctgccctgtttttgggtcaacattgctacggagccagcagtgaggcctttcccttcaagggctctgtggtatctctggccacatttgttctaatgtctgaacctctaaatcttttctttttgattggttttactgtttttaagaagccagcactgctgtctcatagatgggatttgtactcttggggcaacttaaagtgtctctctcgctgctaacagacgattgatgtcttgtctctgtgacccactcaccatgtaaagaattaacctcctatcttagcagacatcgtctcctaatatttccctttatttaataaaaatgttatggtgaagagatgg

SEQ ID NO: 357567 - DNA, 946 bp, Homo Sapiens
gattcttgggatcgcggagctgcggcggctatgctgtggagcggctgccggcgtttcggggcgcgcctcggctgcctgcccggcggtctccgggtcctcgtccagaccggccaccggagcttgacctcctgcatcgacccttccatgggacttaatgaagagcagaaagaatttcaaaaagtggcctttgactttgctgcccgagagatggctccaaatatggcagagtgggaccagaaggagctgttcccagtggatgtgatgcggaaggcagcccagctaggcttcggaggggtctacatacaaacagatgtgggcgggtctgggctgtcacgtcttgatacctctgtcatttttgaagccttggctacaggctgcaccagcaccacagcctatataagcatccacaacatgtgtgcctggatgattgatagcttcggaaatgaggaacagaggcacaaattttgcccaccgctctgtaccatggagaagtttgcttcctactgcctcactgaaccaggaagtgggagtgatgctgcctctcttctgacctccgctaagaaacagggagatcattacatcctcaatggctccaaggccttcatcagtggtgctggtgagtcagacatctatgtggtcatgtgccgaacaggaggaccaggccccaagggcatctcatgcatagttgttgagaaggggacccctggcctcagctttggcaagaaggagaaaaaggtggggtggaactcccagccaacacgagctgtgatcttcgaagactgtgctgtccctgtggccaacagaattgggagcgaggggcagggcttcctcattgccgtgagaggactgaacggagggaggatcaatattgcttcctgctccctgggggctgcccacgcctctgtcatcctcacccgagaccacctcaatgtccggaagcagtttg

SEQ ID NO: 357568 - DNA, 1575 bp, Homo Sapiens
  misc_feature (1489)..(1489): n is a, c, g, or t
  misc_feature (1531)..(1531): n is a, c, g, or t
  misc_feature (1558)..(1558): n is a, c, g, or t
agcgggcgagcgcaacggaggtcgaaggcgttcagactcttagctgaacgcggagctgcggcggctatgctgtggagcggctgccggcgtttcggggcgcgcctcggctgcctgcccggcggtctccgggtcctcgtccagaccggccaccggagcttgacctcctgcatcgacccttccatgggacttaatgaagagcagaaagaatttcaaaaagtggcctttgactttgctgcccgagagatggctccaaatatggcagagtgggaccagaaggagctgttcccagtggatgtgatgcggaaggcagcccagctaggcttcggaggggtctacatacaaacagatgtgggcgggtctgggctgtcacgtcttgatacctctgtcatttttgaagccttggctacaggctgcaccagcaccacagcctatataagcatccacaacatgtgtgcctggatgattgatagcttcggaaatgaggaacagaggcacaaattttgcccaccgctctgtaccatggagaagtttgcttcctactgcctcactgaaccaggaagtgggagtgatgctgcctctcttctgacctccgctaagaaacagggagatcattacatcctcaatggctccaaggccttcatcagtggtgctggtgagtcagacatctatgtggtcatgtgccgaacaggaggaccaggccccaagggcatctcatgcatagttgttgagaaggggacccctggcctcagctttggcaagaaggagaaaaagctgcttacgttggtgcactttgttgctccaggaagagacgcttaaagaagacctggtgttggccacaagtctcagtaatggaaggcgtggggtccccttttgcttctttgattaaaaataaaggaaaactcattggagatgattgtgggtatttcagcaacccaagaaggacacttaggtactgtaagtaatttgaaaagtaagatacttctaggattaagagccgccatggccagggcatgaacaggagacctgtgatcatgtaaccgtaattggtaataagggctcaagagccattcagatcttttagaccagatgctacaagcagtcatctctctctaagtttgtactgttatggggggactttgtgagagaaggcaggtaatgaaatgacccctaagtgtacctctttctcacagctcctcgggtttctgtaatttcctacagaatccttcctgatcctctgtaactgtaaggcattatgcattttagcatccccttctctttggtaacacagcaaccatttcctaggcttctactgtgtgtgaagcccatgctaactcctgggcaggaagaccttcagtaaaaggcttagaaatggagtttatcctatcaacaaaagagagcaaggaaatgatgtaaaggcagtctattttcagagccagagaggaactggggagattgtagatagtttgtggttttcaattagaggcacttnaaattggggggcagttggtgttcacaatcctaaaagaagttnttgaggaagtgtttgtagggttagtcnggtaggagtaggacctt

SEQ ID NO: 357569 - DNA, 1877 bp, Homo Sapiens
  misc_feature (162)..(171): n is a, c, g, or t
  misc_feature (437)..(513): n is a, c, g, or t
  misc_feature (1191)..(1191): n is a, c, g, or t
  misc_feature (1199)..(1199): n is a, c, g, or t
  misc_feature (1340)..(1340): n is a, c, g, or t
  misc_feature (1573)..(1573): n is a, c, g, or t
  misc_feature (1579)..(1579): n is a, c, g, or t
  misc_feature (1627)..(1627): n is a, c, g, or t
  misc_feature (1643)..(1643): n is a, c, g, or t
  misc_feature (1654)..(1654): n is a, c, g, or t
  misc_feature (1663)..(1663): n is a, c, g, or t
  misc_feature (1742)..(1742): n is a, c, g, or t
  misc_feature (1789)..(1789): n is a, c, g, or t
  misc_feature (1793)..(1793): n is a, c, g, or t
  misc_feature (1799)..(1799): n is a, c, g, or t
  misc_feature (1854)..(1854): n is a, c, g, or t
ctctgcacggccgctgcagcatcttgtccgcggcgttgtgtgtaacccactctattaccacctgctcagtggttgttcattattctcccccggcggggctgttaatctctctctcttcgtgggggtgttgtgttcctcccctgatatggttgtgctcctcgnnnnnnnnnnaacgagagatagggtgttcttttcttctctcccatgagtgttcgctccgtcctgcgtttgccgcattcttttgtctccctcctcacgaccgcggttgtttgtaataccggcgccctcgccgctctctgattgttgatttataattgacggccctcttatgtggggcccccctttgtttcacaacaaatgcgtggtgtgtcgctcttgattgcggtcctccctctcgggcgaggttcctctctcggctcgcgcgccctcctccttcnnnnnnnnnnnnnnnnnnnnnnnnnnnnnnnnnnnnnnnnnnnnnnnnnnnnnnnnnnnnnnnnnnnnnnnnnnnnnactatttaacaaaaatatttaatgctgccaaaaagtataaaaatacagtaggaatggcagtacaatacaaagtaatctctcctaatttatttcttgtacatctttctacatttcatacactcattaaaaacacttaacacatccaattaaaggttctgcaaagtcttctgctggtgggtgctcttcatcccctggatgtaaagtttactttgtaaacaaacaactgtgaggcaatctagagggttagcgagcctcactttagtttccggagtgggcttcaggtcttgctttgcacatcaatggttcaaaatttatagctgcagaatattctcaagtcatgaatattaggtgtctgtcaatcttggcctttttctttttcgttcattctcatttagcctctgtttcatctgctgcaccttctgagctgtggtggcctttctgtcctctcgaatacgtttccgtagagcactctcactgttctcctccattgtatcttgcattgtagaggaaagtcctgtacatcggtcacctgtcagttgttcttcttctagacctattctgttcccattgtatgattcagtcattattttgtctggtgaatgatcaaaggcacgaaataagtcttccttagaaagttctttccatcgtttctgtatactagaatctccctttatacantttgctcnttctattatagccatgtatgagaatctcagttgatctggggtctgaataagacccattcggtattttctcatgttcagtaacacttgttttatgttaatatcatctcctttttccatcaaaacaagacaagtgtctaccangagagaaggtgccagagcgcccaatgcctgcactacagtggatcaccgcaggcccatggtcagggttcaaggagccagattctctcactttaaacaagaaattgagaaatgaagctggtgattcagggactccaaaatctggccaggtagtataatgaaagtgagatattgttctggtttcaccactcgattctttctccacaatgcggttcagcatgacaactgctttggtnttctgntgccaaaccataagccagaaatggcagcatgtgttaggaagtggaccntgtgttaagatgtaantcctttgtgcntcttctatntcaactaaactggcattaatataatcattctcagcattttgcagtttaacacgactgtgatcatcaagtacagcggctnccagcgacgctgagtatccaactcttcgaactcccgctcgatggtgntggncatggntgcgggagcgagctggcgcgagcagagcctgcgccggcggagaggttcaggcccngcacgatccggggagagcgctgg

SEQ ID NO: 357570 - DNA, 1601 bp, Homo Sapiens
  misc_feature (725)..(725): n is a, c, g, or t
  misc_feature (1184)..(1184): n is a, c, g, or t
  misc_feature (1196)..(1196): n is a, c, g, or t
  misc_feature (1596)..(1596): n is a, c, g, or t
gggatataccgcggcgcgacggtagttgctgtggtttccgttctgagctcgcagcttaggagctgaagatcgcggacttagcgttgccgcgtccgagtccggccatcagtggctgcagatccggaggccaggagctcaaccacccttcttcggaacagggccggcctgctgctgtgccctcgacgctcggtgcctgtatctactccggggcctaggtcggctccgggggcggcttaggagaaggccgccggcgagatgttcaaaaacacgttccagagcggctccctctccatcccctacagcatcggcagcaagcctctgcaaatctgggacaaaaaggtacggaatggccacatcaaaagaatcactgataatgacatccagtccctggtgctagagattgaagggacaaatgtaagcaccacatatatcacatgccctgcagaccccaagaagacgctgggaattaaacttcctttccttgttatgattatcaaaaacctgaagaagtattttaccttcgaagtgcaggtactagatgacaagaatgtgcgttgtcgctttcgggcaagtaactaccagagcaccacccgggtcaaacccttcatctgcaccatgcccatgcggctggatgacggctggaaccagattcagttcaacttgctagacttcacacggcgagcatacggcaccaattacatcgagacctcagagtgcaggtactntccctttcccagatagagccctgggttgggggatagggcacactgcgtctaatattggcttgtggcccacatagcagaacagtgtgggtttctggcttcagttgccacactgtccagggagctttggcctcacaaaggtccaggaaatattcagaagtcgggtcaggtatagaggtgaatacagcaagtaagacctccctcttgccagaatccatccctaagacaagccaaggagatgccggagatgacgcgtttccagtcctggaagagggcctctagaagattcaggaaaagggggagcacagtcacatttcgcctctcaaaagaagcattgccttgacagatccatgcaaattgtcgcatccgacgggtttacttctcaaacagactctactcagaagatgagctgccggcagagttcaaactgtatctcccagttcagaacaaggcaaagcaatnactggaattgtnactcgagggatagaccctggatgtgactcttctttttaaaaggaaactatgtggaggacgatgcaaaaacatatttatcttagtttgctctgctgtagttctgttatttatacttggtgttgcttgtcatggacaccggtgaacatgccgtaactctgtaactgcattgtaagtgcagtgggggtaagcagtcctgtgagtggcgcatgaacgctggagcttattccgctgcctgccccagtgtggggggagatacctttaccatgaacttacagaattaaagatggcccataaggaattccagaccaatatttcttctgcggtttattctatgttttatatattatctaaatatatgtatatgctgtgtcatactcataatctggaaatgaataaagtnattat

SEQ ID NO: 357571 - DNA, 1289 bp, Homo Sapiens
agcggattgaaggcggggaaataccgcggcgcggacggtagttgctgtggtttccgttctgagctcgcagcttaggagctgaagatcgcggacttagcgttgccgcgtccgagtccggccatcagtggctgcagatccggaggccaggagctcaaccacccttcttcggaacagggccggcctgctgctgtgccctcgacgctcggtgcctgtatctactccggggcctaggtcggctccgggggcggcttaggagaaggccgccggcgagatgttcaaaaacacgttccagagcggcttcctctccatcctctacagcatcggcagcaagcctctgcaaatctgggacaaaaaggtacggaatggccacatcaaaagaatcactgataatgacatccagtccctggtgctagagattgaagggacaaatgtaagcaccacatatatcacatgccctgcagaccccaagaagacgctgggaattaaacttcctttccttgtcatgattatcaaaaacctgaagaagtattttaccttcgaagtgcaggtactagatgacaagaatgtgcgtcgtcgctttcgggcaagtaactaccagagcaccacccgggtcaaacccttcatctgcaccatgcccatgcggctggatgacggctggaaccagattcagttcaacttgctagacttcacacggcgagcatacggcaccaattacatcgagaccctcagagtgcagatccatgcaaattgtcgcatccgacgggtttacttctcagacagactctactcagaagatgagctgccggcagagttcaaactgtatctcccagttcagaacaaggcaaagcaataactggaattgtgactcgagggatagacccctggatgtgactcttctttttaaaaggaaactatgtggaggacgatgcaaaaacatatttatcttagtttgctctgctgtagttctgttatttatacttggtgttgcttgtcatggacaccggtgaacatgccgtaactctgtgactgcattgtaagtgcagtgggggtaagcagtcctgtgagtggcgcatgaacgctggagcttattccgccgcctgccccagtgtggggggagatacctttaccatgaacttacagaattaaagatggcccataaggaattccagaccaatatttcttcctgcggtttattctatgttttatatattatctaaatatatgtatatgctgtgtcatactcataatctggaaatgaataaagtgatatattcctggtttgtaaaaaa

SEQ ID NO: 357572 - DNA, 556 bp, Homo Sapiens
  misc_feature (522)..(522): n is a, c, g, or t
  misc_feature (527)..(527): n is a, c, g, or t
  misc_feature (541)..(541): n is a, c, g, or t
tggaagaattcgcggcgcaccggtagttgctgtggtttccgttctgagctcgcagcttaggagctgaagatcgcggacttagcgttgccgcgtccgagtccggccatcagtggctgcagatccggagccaggagctcaaccacccttcttcggaacagggccggcctgctgctgtgccctcgacgctcggtgcctgtatctactccggggcctaggtcggctccgggggcggcttaggagaaggccgccggcgagatgttcaaaaacacgttccagagcggcttcctctccatcctctacagcatcggcagcaagcctctgcaaatctgggacaaaaaggtacggaatggccacattcaaaagaatcactgattaatggacatccagttccctgggtgcttaggagatttgaaggggacaaatgttaaggcaccacatatattcacatggccttgcaggaccccaaggaggacgttggggatttaaaatttccttttccttgttcttgatttttcaaaaacntgaangaatttttttaacntttggagttgcaggg

SEQ ID NO: 357573 - DNA, 1014 bp, Homo Sapiens
  misc_feature (245)..(253): n is a, c, g, or t
  misc_feature (888)..(888): n is a, c, g, or t
  misc_feature (930)..(930): n is a, c, g, or t
  misc_feature (939)..(939): n is a, c, g, or t
  misc_feature (944)..(945): n is a, c, g, or t
  misc_feature (957)..(957): n is a, c, g, or t
  misc_feature (962)..(962): n is a, c, g, or t
  misc_feature (964)..(965): n is a, c, g, or t
  misc_feature (982)..(982): n is a, c, g, or t
  misc_feature (990)..(990): n is a, c, g, or t
  misc_feature (992)..(992): n is a, c, g, or t
atcgtgctgaggcgggtggcatggcggagaaggatgacaccggagtttgacgaagaggtggtttttgagaattctccactttaccaatacttacaggatctgggacacacagactttgaaatatgttcttctttgtcaccaaaaacagaaaaatgcacaacagagggacaacaaaagcctcctacaagagtcctaccaaaacaaggtatcctgttaaaagtggctgaaaccatcaaaagttggannnnnnnnnctcagtgcaataagaaagatgacttacttcacaagttggatattggattccgactcgactcattacataccatcctgcaacaggaagtcctgttacaagaggatgtggagctgattgagctacttgatcccagtatcctgtctgcagggcaatctcaacaacaggaaaatggacaccttccaacactttgctccctggcaacccctaatatttgggatctctcaatgctatttgccttcattagcttgctcgttatgcttcccacttggtggattgtgtcttcctggctggtatggggagtgattctatttgtgtatctggtcataagagctttgagattatggaggacagccaaactacaagtgaccctaaaaaaatacagcgttcatttggaagatatggccacaaacagccgagcttttactaacctcgtgagaaaagctttacgtctcattcaagaaaccgaagtgatttccagaggatttacactggtcagtgctgcttgcccatttaataaagctggacagcatccaagtcagcatctcatcggtcttcggaaagctgtctaccgaactctaagagccaacttccaagcagcaaggctagctaccctatatatgctgaaaaactacccnctgaactctgagagtgacaatgtaaccaactacatctgtgtngtgcctttnaaganngggccttgactngtgananngattcagagaggagccntactttcngntgctcagctgcctcattgaggt

SEQ ID NO: 357574 - DNA, 429 bp, Homo Sapiens
  misc_feature (13)..(13): n is a, c, g, or t
  misc_feature (15)..(15): n is a, c, g, or t
  misc_feature (21)..(21): n is a, c, g, or t
  misc_feature (29)..(29): n is a, c, g, or t
  misc_feature (36)..(36): n is a, c, g, or t
tcttaatgagttntnaaaaanaaaaattnagtcaantctccccgtacacacacactcgggcacttcaggaggtcagttctcaccccttcctcgatggggctttaaagctctggggagaagagctgctccccactcatgccccagagggactgtgaaaaggcttcctgtgacctccgatggcggcccctcattggccaagggcactgtggatgttttgtgggaggcagcatggcaccgtggaaagggcagtagacgtggagccggcacctctggtctggattccacttaaaaccagttgagtggtctcaagcccttaacctctgtaagcctgtttcttctctgaaatcacagtaataaagcgtcgtaagatggttgggaagaaccagaggtgacttatgcaaaagctttataaactgtaaagttcctgcc

SEQ ID NO: 357575 - DNA, 929 bp, Homo Sapiens
  misc_feature (5)..(5): n is a, c, g, or t
  misc_feature (239)..(240): n is a, c, g, or t
  misc_feature (253)..(253): n is a, c, g, or t
  misc_feature (329)..(329): n is a, c, g, or t
  misc_feature (335)..(335): n is a, c, g, or t
  misc_feature (340)..(340): n is a, c, g, or t
  misc_feature (344)..(344): n is a, c, g, or t
  misc_feature (346)..(346): n is a, c, g, or t
  misc_feature (349)..(350): n is a, c, g, or t
  misc_feature (352)..(352): n is a, c, g, or t
  misc_feature (436)..(436): n is a, c, g, or t
tgtgnaactagcttattattttcatactaaaaagtaatcactgatagtttttctataggtatgagatcaagggaatcatttttagaaatcattttcattgtaaaaagtatattagatgtcttttgccaaattttatctagttagtaattataaacagtatcagtcttattttcctattgtttatgaacaatataaagacctcttaatagtgatctaaaagttttctattgtcacggggnnaccctcagaatcnctaggcctgttagatttatttttgccgttagcattaaaagtttcgctctgtattagaaaatagaaaacttagaaanacaggnagtgncagnanctnncngcccccccttttattgccaagtcattatctagtttctcaatgtggcattgcaactctgattttttactgttcgtgcactaaagnatttgagataagcccttagtgttgaggaaatcctaaatcctactgctggggggttaaaagaaatatagtgacaggctatgaaatagtgttgtcataacttatcagtggctagtaaatagggtagttgccttctgacaccattttgagtgaaggcagtttaattgcgttgcctctgtttagataagcatttgcgaatccacagtcaaatgtgtgaatgctgtggttaaagtatttccattatatgagatttgatttcttaagtgatttttttgtctcaggttccattctacatcaaaaggtatttggaaaatgtctttcactgtatgtgtacatggagaaccataacctataattgtatgtaaatctagtgattgtgaaaaacaagaaacttgcagacacatattaacagttggtgacttatcgccagttggtgacttacttacctacccctgcctctcaaatcttgttataacaattaaacagttcgtattaa

SEQ ID NO: 357576 - DNA, 1093 bp, Homo Sapiens
  misc_feature (32)..(32): n is a, c, g, or t
  misc_feature (35)..(35): n is a, c, g, or t
  misc_feature (224)..(224): n is a, c, g, or t
  misc_feature (235)..(251): n is a, c, g, or t
ccagaggctggaaggtgccgtgagctcctccnaancacgcagcctctgcctggatggcagaattcatgcagaattcgttcagggctaagtgacatctgcccaccccctgggccagctggcatggagacagcatccggccagggttgggggagacaagctggacgccctccacataggctggccagtcaggtcctactgggacagccaaggggccctgtgcgagncctggaggtgnnnnnnnnnnnnnnnnnacacccatagtctctcgtgcaccatccctcatcagggagccggcacccacccaggtccactgccaggtctcacaggtgggcactggggcgctcacctcactacacgtggctgtcgaggggacacacgcagggctgcatgtggccaggctccaggcagagccccccagctgcttccccaggcaggccctgtgcccccgagctgcagcagggaggtcgggcccagctccccctgcctgcactgtgccgtaaatgacagcgctcttctcctcttggaaggaggtgcgtggggtacggccgggccagcagcagctccttctcgtggatcaggctgtccagcaggtcctcctgacggtagttgtggtagaccttcaggaaggccagcgtggtgatggccagccaggccagccatgaggcccagaggccaaactgggcaattgcaaactgatcgtagaaggcggagttgtccacgcccagctccaagtcgatgtcctggagctcttcacagctgtggggtacggtgcccttctcggtgatggtgtcgcaccacatggtgaagcccacgctcacgatggtgctggcaatgaagaccaggaagaccacgaaggcgctgaccaggaggttcaggaaggcggagaagaaggagccctcgtgtcccttgcagaggaagaagaacgtgcgccaggcgtgcgcggcggccagcagcagagacaggaggctggcgagcaggctgaagcggcaggcggccggcgggccccactcctgcaccgtgaagcgctcgcgctcctgcaccgtgaggttggcgctcagccacatgccctcggtgaagagcaggcagcggccgc

SEQ ID NO: 357577 - DNA, 487 bp, Homo Sapiens
ggagaagcgtcctcaggccagccacggcagccaagagccttcagaggccagcctggggtccggaattggacctgggcaattgcaaactgatcgtagaaggcggagttgtccacgcccagctccaagtcgatgtcctggagctcttcacagctgtggggtacggtgcccttctcggtgatggtgtcgcaccacatggtgaagcccacgctcacgatggtgctggcaatgaagaccaggaagaccacgaaggcgctgaccaggaggttcaggaaggcggagaagaaggagccctcgtgtcccttgcataggaagaagagcgtgcgccaggcgtgcgcggcggccagcagcagagacaggaggctggcgagcaggctgaagcggcaggcggccggcgggccccactcctgcaccgtgaagcgctcgcgctcctgcaccgtgaggttggcgctcagccacatgccctcggtgaagagcaggcagcggccgc

SEQ ID NO: 357578 - DNA, 1094 bp, Homo Sapiens
  misc_feature (26)..(27): n is a, c, g, or t
aagccagcagacaagtggaacaagannccgcagtcagatcagctccctttcgagcaccgagcgagggatccgctcagaaatgggccagcttcggcaggagaacgagctgctgcagaacaagttacataatgccgtgcaaatgaagcaaaaagacaagcagaatatcagccagttggagaaaaagctaaaagctgagcaggaagcccgaagttttgtagagaaacagttaatggaagagaaaaagaggaagaagttagaagaagccactgctgcccgggctgttgcgtttgctgctgcatctaggggagaatgcaccgaaaccttacggaatcggatcagagaactagaagcagagggcaagaagctcacgatggacatgaaggtgaaagaagaccaaatcagagaactagaactaaaagtccaggagcttcggaaatataaggaaaatgagaaggacactgaggtgttaatgtcagccctctcagccatgcaagacaaaacacagcacctggagaacagcttaagtgcagagacgagaatcaagctggacctgttctccgcactgggcgatgcaaagcggcagctcgagattgcccaaggacaaatccttcagaaagatcaggaaatcaaggacctaaaacagaagatagccgaagtcatggccgtcatgcccagcataacatacagtgccgccacccagccccctgagccctgtttccccccactactcttccaaatttgtggagaccagcccctctggacttgaccccaatgcctctgtttaccagcccctgaagaaatgaaggccagctgtgtgttgtgcccaaaaatttggttaccggaaggcattgcaaaggagcgtctctggcagtcaagataaaaaaacagtttctattgtattttgtggaactgtatctgttgtcatttttaaaaaggggggaaaagataacatccaagtctgattagaactgcccatcagtttttcttgtaaatttttagaagacctcacagaactttacagtttatttttctcggccaacacattaaaaccattcttggattccaaaacaaaagacatagaaaacaaaacgggg

SEQ ID NO: 357579 - DNA, 857 bp, Homo Sapiens
  misc_feature (74)..(88): n is a, c, g, or t
aaaaaaatggggtttcgccatgttgcacatgctggtctctttctcttgttttttttttatatgcctatcaccgnnnnnnnnnnnnnnngggaccacacacgggagcgagcgcacacaaccacagtatttatgttctataaagtcactgtgtacactgagttagcaaatattgaaccgcggctgccaggggaaatacagttagattcctgcaattctctggtcacattttctctaattgatcaatgcgtaaccttgttttatgtgtgtttctatttaaagacgtcttatttgatacatattgttgattcatcaatattgaagtcagggccagcagcactataaatactgatgcctgcttgaatgaagcttctctaatacatgtgtttcctctgtaacacaaaagtgtatcacaattaacactagatagcatttcactaagcttggggattatttcaaaacagtgaaatcatcaacaaaaagcacaaaaatgtgaaaactgtggcactaaatagaccacaagaagtacactggtttatagttgaactgggaaaaaaggcagagcgttgccttcttagactccagctggaagtgtgtgtgccaggagacccagctttctcccagccctgggcatgtctgccgatggctcagaaagcacctaaggaactgattttggcggttaaaaataaatattaaatgagttgggctaattcgtaaatactgatgattactggtattatattaaaagattattatttatttttaagcctcaaaatttttaaaaaataacatatataacccatctttttccaaaaaataaatctaataaatctaaatctcctctttttaataataattta

SEQ ID NO: 357580 - DNA, 285 bp, Homo Sapiens
agtgcacatacacatactgcatataccatgcatgcacacatgtgcaaatccatatacacacacacaccctctctcttgctcctcccagcccaggctcagtgggttggcagccctggactgtaaaggatcattaaatgtggccccctcccgtggctgactataggatgacttctcctggagctctgcccttgcagtaactttggagggttttcaccagaccaagaatggacgagttacgggtcggctaataaaatgctttggccagagcccaaagttctgtcctca

SEQ ID NO: 357581 - DNA, 969 bp, Homo Sapiens
ttgacctataaaaagtcatttaatgcatattccagatggccaatacaagctggttaggtaattagcccttgaagaattcttttataatcatataaaaatgttttgtcttgtttaaaaaaagtctactctaacaaaaacatccaccaatgggcttgcattttttccatttgcaggtttgtaagatcataaaaatatacacatatgcatctctgggcatatctctgtccactagctaatcagttttggcaatacactgcataggggtatactaccattggtttctgacattaagttagctttaagcttattggctattccaacaactggaggcagcttagaacccaatccctggaaagaacttgcaggattaactacccgtttccctaacaccttgtctatggtggtgagaggtctgggaacaaacttgctaatccaagggtgtcttaatgcttgagctggggtcaagcgggcagaggggtcccagtgaaaacaccttttcaagaactctataaacaagtagtcatcacaccctttcagtgctgtcccccagtctttgctgcctgggggaccccgctttttacccctacgtgagcgaccccccacaagcacaaccctcccatctgcctgggtagtcacagagcagtagcggggtatgcccttggaattaataaagtacttggcacgtttggattgctccagaagttttggtggtggcatccctagaagctccatcatgcaggccaactggtctccttcatcctctccagggaagagaggctgtcctgttaaaagttctgcaaggatgcagccaaaactccatatgtcaattggtgtgctgtagcggcttcctaagatgatttctggagctctgtagaaccgagactggatatatgtgtagagcttctggtactcgaaacagctggacccaaagtcaatgaccttggttgaactgcgcccgtggtgtttcag

SEQ ID NO: 357582 - DNA, 1370 bp, Homo Sapiens
  misc_feature (37)..(37): n is a, c, g, or t
  misc_feature (109)..(109): n is a, c, g, or t
  misc_feature (112)..(112): n is a, c, g, or t
  misc_feature (297)..(370): n is a, c, g, or t
  misc_feature (546)..(546): n is a, c, g, or t
  misc_feature (561)..(561): n is a, c, g, or t
  misc_feature (801)..(801): n is a, c, g, or t
aggaaaaaaaatcataattttaataattcacacttantgcactattgttatttcaattttacagagaaaaacaggcatagagtgatgaaatagcaagtacatatataancancaaatggcagagctggaacgccaatcctagcaatctgaaccagcatttaaaaacgaggaattaaagcacatagggtgagaaaaattatagggaagggacaagagctcaaggggacacctggaaaagaaatactataatttaaaaaattaccaacgggctaattatacttgtgttttactggcagnnnnnnnnnnnnnnnnnnnnnnnnnnnnnnnnnnnnnnnnnnnnnnnnnnnnnnnnnnnnnnnnnnnnnnnnnnacaaggacgcttaatagatgataacggacacattccctgcttgctctgatctgcatctcaacagctggctctggagcaagcaaagggagactaagggaaacagagcggagcagggcaaagaaagccgactgaaagtgagaaatgcaggaaatgtttcccatctaggcagaagctgntccagcattcaaatntctccagccggcccgccaccacgtcacaaagcccgcctctcagtgacaaagccccgccccgttcccttggctgttctctgagctcccaatacttccctccttctctttggcccctgctaccccgcctagcatcatttcctgtgcgctggatgctgattggtccgacagtcggaagtgagggcgggcggtgggggccgttgccgcagtgacagtgctaggggagtccgaagatggcggcgntgcgtcgctctcagcatcatcaccaccatcatcaacaacagctccagcccgccccaggggcttcagcgccgccgccgccacctcctcccccactcagccctggcctggccccggggaccaccccagcctctcccacggccagcggcctggcccccttcgcctccccgcggcacggcctagcgctgccggagggggatggcagtcgggatccgcccgacaggccccgatccccggacccggttgacggtaccagctgttgcagtaccaccagcacaatctgtaccgtcgccgccgctcccgtggtcccagcggtttctacttcatctgccgctggggtcgctcccaacccagccggcagtggcagtaacaattcaccgtcgtcctcttcttccccgacttcttcctcatcttcctctccatcctcccctggatcgagcttggcggagagccccgaggcggccggagttagcagcacagcaccactggggcctggggcagcaggacctgggacaggggtcccagcagtgagcggggctacgggaactgctggaggcctgtcgcaatgggga

SEQ ID NO: 357583 - DNA, 1376 bp, Homo Sapiens
gggtttccttgcgttcattcaaaaacttgctgggtaatccccaggcctctatagctcagatcattgtcacagtcgtactgggactggttataggtgccatttactttgggctaaaaaatgattctactggaatccagaacagagctggggttctcttcttcctgacgaccaaccagtgtttcagcagtgtttcagccgtggaactctttgtggtagagaagaagctcttcatacatgaatacatcagcggatactacagagtgtcatcttatttccttggaaaactgttatctgatttattacccatgaggatgttaccaagtattatatttacctgtatagtgtacttcatgttaggattgaagccaaaggcagatgccttcttcgttatgatgtttacccttatgatggtggcttattcagccagttccatggcactggccatagcagcaggtcagagtgtggtttctgtagcaacacttctcatgaccatctgttttgtgtttatgatgattttttcaggtctgttggtcaatctcacaaccattgcatcttggctgtcatggcttcagtacttcagcattccacgatatggatttacggctttgcagcataatgaatttttgggacaaaacttctgcccaggactcaatgcaacaggaaacaatccttgtaactatgcaacatgtactggcgaagaatatttggtaaagcagggcatcgatctctcaccctggggcttgtggaagaatcacgtggccttggcttgtatgattgttattttcctcacaattgcctacctgaaattgttatttcttaaaaaatattcttaaatttccccttaattcagtatgatttatcctcacataaaaaagaagcactttgattgaagtattcaatcaagtttttttgttgttttctgttcccttgccatcacactgttgcacagcagcaattgttttaaagagatacatttttagaaatcacaacaaactgaattaaacatgaaagaacccaagacatcatgtatcgcatattagttaatctcctcagacagtaaccatggggaagaaatctggtctaatttattaatctaaaaaaggagaattgaattctggaaactcctgacaagttattactgtctctggcatttgtttcctcatctttaaaatgaataggtaggttagtagcccttcagtcttaatactttatgatgctatggtttgccattatttaataaatgacaaatgtattaatgctatactggaaatgtaaaattgaaaatatgttggaaaaaagattctgtcttatagggtaaaaaaagccaccgtgatagaaagtattaatatctaagaatcttggctgagggtttggac

SEQ ID NO: 357584 - DNA, 701 bp, Homo Sapiens
ggttggccggaggcatgccccgaaccagggccggaagtgcaccggccgcatgcccacgggaggggacaaagaaattccggccgaatctagggggaggagtgggcttattcgtaaagtgagtgataaaatcactctcggcacgcgcaggacgggcaacattgtgtggggtacacatttgaagaggaaatcgtgggtgcggtgcagacctcctattctaagaaaaagctcttcgtaagcctcatggagtaccagatgacaccaaagactgttgccaacttgactgagagcagctccgagtccgtccagagcttcctgcagtcaatgatcacctgtgggcatccctgaggtcatgtctcggctcgaggtagtgtttacagccctcatgaacagcaaaggcgtgagcctcttcgacatcatcaaccctgagattatcactcgagatggcttcctgctgctgcagatggactttggcttccctgagcacctgctggtggatttcctccagagcttgagctagaagtctccaaggaggtcgggatggggcttgtagcagaaggcaagcaccaggctcacagctggaaccctggtgtctcctccagcgtggtggaagttgggttaggagtacggagatggagattggctcccaactcctccctatcctaaaggcccactggcattaaagtgctgtatccaagaaaaaa

SEQ ID NO: 357585 - DNA, 733 bp, Homo Sapiens
gtcataagccagaagaaggtgaagcactggttctacccccaggagaatatcatcgacccttcgtggtggagaacgcaaacggagaggtgacagatttcctgagcttttatccgctgccctccaccatcatgaaccatccaacccacaagagtctcaaagctgcttattctttctacaacgttcacacccagacccctcttctagacctcatgagcgacgcccttgtcctcgccaaaatgaaagggtttgatgtgttcaatgcactggatctcatggagaacaaaaccttcctggagaagctcaagtttggcataggggacggcaacctgcagtattacctttacaattggaaatgccccagcatgggggcagagaaggttggactggtgctacaataaccagtcaccagtgcgattctggataaagccactgaaaattcgaaccaggaaatggaaccccaccactgttggtccaattttcacacacgtgagaatccctggcaaagggagcagaactgaaccggctttaccaaaccgccagcgaacttgacaattgtattgcgatggcgtgggctgcgtgacgtcacctccggtcgtgtctctggtctccgtgttttccagttaattacatcctcatgcagccgtgatcaagggaatgtaactgctgaaaactagctcgtgattggcatataatggagttaacgggtgaataataaaagtatatatatatatta

SEQ ID NO: 357586 - DNA, 544 bp, Homo Sapiens
cccaaaatgaaagggtttgatgtgttcaatgcactgatctcatggagaacaaacccttcctgaagaagctcaagtttggcataggggacggcaacctgcagtattacctttacaattggaaatgccccagcatgggggcagagaaggttggactggtgctacaataaccagtcaccagtgcgattctagataaagccactgaaaattcgaaccaggaaatggaaccccaccactgttggtccaattttcacacacgtgagaatccctagcaaagggagcagaactgaaccggctttaccaaaccgccagcgaacttgacaattgtattgcgatggcgtgggctgcgtgacgtcacctccggtcgtgtctctggtctccgtgttttccagttaattacatcctcatgcagccgtgatcaagggaatgtaactgctcatgcagccgtgatcaagggaatgtaactgctgaaaactagctcgtgattggcatataatggagttaacgggtgaataataaaagtatatatatatattatttatatatt

SEQ ID NO: 357587 - DNA, 791 bp, Homo Sapiens
  misc_feature (235)..(277): n is a, c, g, or t
agaagacgaaactgaaagtgttacttaaaacttcagtctagtaaactgaaattatgaatcataaaatgctgcttcttacttttgcttcctaaatataatctaccccaactacattgaaattttcatgaaaaataaacatatcaataatgggatttacagaaaccaatttctttacaaagtcttgaccaactgtttacctgactatcccagtaaggagaattttccttcaaagatnnnnnnnnnnnnnnnnnnnnnnnnnnnnnnnnnnnnnnnnnnnaaaatggggaaaactgtaaaacataaaagaaatgcaatatatagtagaaattgcttattccaacttctaactgctcatatcaaacttctctttagaaaaatggaaaatgtatccagtacaattcaatcgacatacaatttatttttttagtaacagatttttcaaattgagctcttaaaaagtacagttaactacaaaagattaaatagatacttataaaatatatttaccctgaaatgcttaagaataaaagtgttgatgcccatgtcaatagtacattatacattacacacattatttaaatgtcattctctttacaataacgtagataaaaccaccaatatttaattgcttatatcaagttccagttaataattcaaatagccctcaaaaacaatatcctgcgaataaacgattattctaaatttttcgtctgccttaaaatactttgtttttgaactctcattgaaatacaagttgtaaaaattttacctaattttcttcaacaaaacat

SEQ ID NO: 357588 - DNA, 1151 bp, Homo Sapiens
  misc_feature (7)..(7): n is a, c, g, or t
  misc_feature (14)..(14): n is a, c, g, or t
  misc_feature (19)..(20): n is a, c, g, or t
  misc_feature (22)..(22): n is a, c, g, or t
  misc_feature (34)..(34): n is a, c, g, or t
  misc_feature (46)..(46): n is a, c, g, or t
  misc_feature (66)..(66): n is a, c, g, or t
  misc_feature (68)..(68): n is a, c, g, or t
  misc_feature (85)..(85): n is a, c, g, or t
  misc_feature (129)..(129): n is a, c, g, or t
  misc_feature (134)..(134): n is a, c, g, or t
  misc_feature (171)..(171): n is a, c, g, or t
  misc_feature (178)..(178): n is a, c, g, or t
gctcggnacaccgntagtnncntgtgggcgaggngcgggtgtgtcnaaatcagattgcgccctgtntnctcagtctctgtccccngagaatgtttggcccattccctatccgccactctgatctctgantaaantgtgtaatgagaaaattatctcaagattaactaatanttagatntttcttcttttaaactcagaataaacctggttgtagataatataatatggctactagagctataattgagtaggtgactagaagcattttttcaaaatatatttcttgtaaagacatctactttgttttaactaggaaaagaaactcctcatattaaaataaacatttccataagcactttctagaagagtgtagcatccatctaccatccatcccagaatgtttgtatcttgctcatagtatttcaaaaatttttatgggtgaaaaaaatgcacttttttatttattggaaaagtgtagagttattgaattaaattctcaagtgggacaatttagtgtaaagggaaacatgggttttggaaacaagagcacagggctgtggtccctgttccagcaatgactgttactatgtgacctcgagcaaatgatttaactgtctctgtgcctcagtttctccatatacaaaatggggataatgatactaaccattgcctacctcatagagatgttatggggacaaacgaaataatagagataagcacgaatgctttcaactcttcggaagaaaggtgctatataaattgaagttgtgtttttaatgatccaattattaattatgtttagggtttaaataacaatactgttagtcatgttaagaataagttttgttttgatgcatatttccacttctcttctgtggccagatcttgatcattcaaccagtaatggtacctgaggaactgaaatgggtatttgttttctgtatgtttctgccagtagtatttcaattgaatatccagaaaagactggagtttaacttgtaatatcttatagtttacatgtaataaaacttattcaagctatatataaaagtatgattacatgtaaatagcaggtatgttgtaattaaaggcacttaccaaattgtctttgttcttttttaattgtaataaaagtcagttttacatccaaa

SEQ ID NO: 357589 - DNA, 867 bp, Homo Sapiens
  misc_feature (97)..(97): n is a, c, g, or t
  misc_feature (457)..(473): n is a, c, g, or t
acattaactggatcattgcttccccaggccaggagaacccagactaagggaaagtggaaggtaattaatatggggcagaatgagcaaatccagatcnccagccaaagtgcactgatgtgtgagctcttaagcccactcagcatgacgactgagtagacttgtttacatctgatcaaagcactgggcttgtgcaggctcataataaatgctccattgaatctactattcttgttttccactgctgtggaaacctccttgctactatagcgtcttatgtatggtttaaaggaaatttatcaggtgagagagatgagcaacgttgtcttttctctcaaagctgtaatgtgggttttgttttactgtttatttgtttggtgttgtatccttttctccttgttatttgcccttcagaatgcacttgggaaaggctggttccttagcctcctggtttgtgccnnnnnnnnnnnnnnnnnaaacacagaatcactctggcaattgtctgcagctgccactggtgcaaggccttaccagccctagcctctagcacttctctaagtgccaaaaacagtgtcattgtgtgtgttcctttcttgatacttagtcatgggaggatattacaaaaaagaaatttaaattgtgttcatagtctttcagagtagctcactttagtcctgtaactttattgggtgatattttgtgttcagtgtaattgtcttctctttgctgattatgttaccatggtactcctaaagcatatgcctcacctggttaaaaaagaacaaacatgtttttgtgaaagctactgaagtgccttgggaaatgagaaagttttaataagtaaaatgattttttaaatatcaaaaaaaa

SEQ ID NO: 357590 - DNA, 1251 bp, Homo Sapiens
  misc_feature (1045)..(1045): n is a, c, g, or t
  misc_feature (1149)..(1149): n is a, c, g, or t
  misc_feature (1172)..(1172): n is a, c, g, or t
  misc_feature (1184)..(1184): n is a, c, g, or t
  misc_feature (1187)..(1187): n is a, c, g, or t
  misc_feature (1202)..(1202): n is a, c, g, or t
  misc_feature (1211)..(1211): n is a, c, g, or t
  misc_feature (1218)..(1218): n is a, c, g, or t
  misc_feature (1221)..(1221): n is a, c, g, or t
  misc_feature (1223)..(1223): n is a, c, g, or t
  misc_feature (1229)..(1229): n is a, c, g, or t
  misc_feature (1244)..(1244): n is a, c, g, or t
gctggaccggtccggaattcccgggatcggggcggggcggggcggggcgcgcagcaggagcgagtggggccgcccgccgggccgcggacactgtcgcccggcgcccaggttcccaacaaggctacgcagaagaacccccttgactgaagcaatggaggggggtccagctgtctgctgccaggatcctcgggcagagctggtagaacgggtggcagccatcgatgtgactcacttggaggaggcagatggtggcccagagcctactagaaacggtgtggaccccccaccacgggccagagctgcctctgtgatccctggcagtacttcaagactgctcccagcccggcctagcctctcagccaggaagctttccctacaggagcggccagcaggaagctatctggaggcgcaggctgggccttatgccacggggcctgccagccacatctccccccgggcctggcggaggcccaccatcgagtcccaccacgtggccatctcagatgcagaggactgcgtgcagctgaaccagtacaagctgcagagtgagattggcaagggtgcctacggtgtggtgaggctggcctacaacgaaagtgaagacagacactatgcaatgaaagtcctttccaaaaagaagttactgaagcagtatggctttccacgtcgccctcccccgagagggtcccaggctgcccagggaggaccagccaagcagctgctgcccctggagcgggtgtaccaggagattgccatcctgaagaagctggaccacgtgaatgtggtcaaactgatcgaggtcctggatgacccagctgaggacaacctctatttggtgtttgacctcctgagaaaggggccccgtcatggaagtgccctgtgacaaggcccttctcggaggagcaagctcgcctctacctgcgggacgtcatccttgggcctcgagtacttgcactggccagaagatcgtccacagggacatcaagccatccaacctgctcctgggggatgatgggcacgtgaagatcgccgactttggcgtcanaaccaagtttgagggggaacgacgctcagctgtccagcacggcgggaacccagcattcatggccccgaggcatttctgattccggcagagctcagtgggaaggncttggatgtatgggcactggggnacgttgtactgnttntctatgggagtgccnttcatcganatttcanctngncctccnaagaagataagaatnagccgtg

SEQ ID NO: 357591 - DNA, 1245 bp, Homo Sapiens
  misc_feature (51)..(87): n is a, c, g, or t
  misc_feature (1102)..(1102): n is a, c, g, or t
cgaatgtatagatcactatagggcgaactggagctcacgcggtggcggcgnnnnnnnnnnnnnnnnnnnnnnnnnnnnnnnnnnnnnatcaggccaaatcggccgagctcgaattcgtcgagagcggatccgggcactctgctggtcgcggcgggagtggcgtggcgcagggatggcacaaaagaaatatcttcaagcaaaattgacccagtttttaagggaagacaggattcaactttggaaacctccatatacagatgaaaataaaaaagttggtttggcattaaaggaccttgctaagcagtactctgacagactagaatgctgtgaaaatgaagtagaaaaggtaatagaagaaatacgttgcaaggcaattgagcgtggaacaggaaatgacaattatagaacaacgggaattgctacaatcgaggtgtttttaccaccaagactaaaaaaagataggaaaaacttgttggagacccgattgcacatcactggcagagaactgaggtccaaaatagctgaaacctttggacttcaagaaaattatatcaaaattgtcataaataagaagcaactacaactagggaaaacccttgaagaacaaggcgtggctcacaatgtgaaagcgatggtgcttgaactaaaacaatctgaagaggacgcgaggaaaaacttccagttagaggaagaggagcaaaatgaggccaaactcaaagaaaaacaaattcagaggaccaagagaggactagaaatactggcaaagagagcagcagagacagtggtggatccagaaatgacaccgtacttagacatagctaaccagacaggcagatcaatcagaattcccccatcagaaagaaaagcccttatgttagctatgggatatcatgagaagggcagagctttcctgaaaagaaaagaatatggaatagccttgccatgtctgttggacgctgacaaatatttctgtgagtgttgcagagagctgctggacacagtggataactatgccgtcctccagctggatatagtgtggtgttacttccgcctggaacagctggaatgccttgatgatgcagaaaaaacaattaaacttggnccagaaatgctttaaaaattgttacggagaaaatcatcagagactggtccacataaaaggaaaatcgtgggaaacgagaaggtactgttttctaagactctacttacttcaagggatccgaaactatcacagtggaaatgatg

SEQ ID NO: 357592 - DNA, 1075 bp, Homo Sapiens
  misc_feature (51)..(87): n is a, c, g, or t
cgaaatgatagatcactatagggcgacctggagctcacgcggtggcggcgnnnnnnnnnnnnnnnnnnnnnnnnnnnnnnnnnnnnnatcaggccaaatcggccgagctcgaattcgtcgagagcgggcgggccgcaggttccggctgctggcggcgttgcggccgcaggtttgactcccgtgcggtgcggcccagcagccacaaagctcccgctgccattgctccttgtactcccgccgtcactgccgctgtccaacccctcccccggggcttgcgcggcggctcccacacccctcggcccgtgtacgcgctctgcacctgcctgcccgaaaacatgttgcagacaccagagagcagggggctcccggtcccgcaggccgagggggagaaggatggcggccatgatggtgagacccgggccccgaccgcctcgcaggagcgccccaaggaggagcttggcgccgggagggaggagggggctgcggagcccgccctcacccggaaaggcgcgagggccttggcggccaaagccttggcaaggcgcagggcctaccgccggctgaatcggacggtggcggagttggtgcagttcctcctggtgaaagacaagaagaagagtcccatcacacgctcggagatggtgaaatacgttattggagacttgaagattctgttcccggacatcatcgcaagggccgcagagcatctgcggtatgtctttggttttgagctgaaacagtttgaccgcaagcaccacacttacatcctgatcaacaaactaaaacctctggaggagggaggaggaggaggatctgggaggagatggcccccagattgggtctgttaatgatgatcctgggccttatctatatgagaggtaatagcggcaggggaggcccaggtctggggagaatgctgcgttcgggtggggggtgcaaacccttcaaaggtatcagtttgcctccataggggtatcccgaagaaggctattactggcaagaatttgaggcagcagcggaaatctcagataacaggcgggggggcatcacaacgaagtccaacacgaacgatgac

SEQ ID NO: 357593 - DNA, 1617 bp, Homo Sapiens
  misc_feature (610)..(644): n is a, c, g, or t
atcaggccaaatcggccgagctcgaattcgtcgagagcgggctccctgtactcccgccgtcactgccgctgtccaacccctcccccggggcttgcgcggcggctcccacacccctcggcccgtgtacgcgctctgcacctgcctgcccgaaaacatgttgcagacaccagagagcagggggctcccggtcccgcaggccgagggggagaaggatggcggccatgatggtgagacccgggccccgaccgcctcgcaggagcgccccaaggaggagcttggcgccgggagggaggagggggctgcggagcccgccctcacccggaaaggcgcgagggccttggcggccaaatccttggcaaggcgcagggcctaccgccggctgaatcggacggtggcggagttggtgcagttcctcctggtgaaagacaagaagaagagtcccatcacacgctcggagatggtgaaatacgttattggagacttgaagattctgttcccggacatcatcgcaagggccgcagagcatctgcggtatgtctttggttttgagctgaaacagtttgaccgcaagcaccacacttacatcctgatcaacaaactaaaacctctnnnnnnnnnnnnnnnnnnnnnnnnnnnnnnnnnnnatggccccagattgggtctgttaatgatgatcctgggccttatctatatgagaggtaatagcgccagggaggcccaggtctgggagatgctgcgtcggttgggggtgcaaccctcaaagtatcatttcctctttgggtatccgaagaggcttattatggaagatttgtgcagcagcgatatctcagttacaggcgggtgcctcacaccaatccaccagaatatgaattctcttggggtccccgaagcaacctggaaatcagcaagatggaagtcctggggttcgtggccaaactgcataagaaggaaccgcagcactggccagtgcagtaccgtgaggccctagcagacgaggccgacagggccagagccaaggccagagctgaagccagtatgagggccagggccagtgctagggccggcatccacctctggtgagggttggtgaaaagttggccagtgggtccccgtgaggacgaactactgtcctgagtcataagtaatatgggtggggcgagggtcttatttctgtagaaatcgtgtgactttaaggatttagattttgtatcttatgttttgtaacatttaataattactgttaaaatgctgtttgtaaatgagattggtctactttttcctgtaggattttattgtagagttttgctggttttgtaaaatggatggaagaactttgtatttatactgtgattttgaacagattatgcaacattggaaggaaggctgtactttgatggtttgaaggaactcagcagtatgatgatctggttccaggggaaaaaaatagctggttggtgtctagccccccaacacttttgtctgttgtgtataaaagaagaaagactggcatgtaccttcatttgcttagctatttgagtatctagagaaaaattaaaatgcaatgagttagcagtataccctggcacacttaataaattaaacatttgtggagcaaaa

SEQ ID NO: 357594 - DNA, 1022 bp, Homo Sapiens
  misc_feature (148)..(148): n is a, c, g, or t
  misc_feature (276)..(276): n is a, c, g, or t
  misc_feature (908)..(908): n is a, c, g, or t
  misc_feature (921)..(921): n is a, c, g, or t
  misc_feature (949)..(949): n is a, c, g, or t
  misc_feature (958)..(958): n is a, c, g, or t
  misc_feature (964)..(966): n is a, c, g, or t
  misc_feature (979)..(979): n is a, c, g, or t
  misc_feature (982)..(982): n is a, c, g, or t
  misc_feature (993)..(993): n is a, c, g, or t
  misc_feature (996)..(996): n is a, c, g, or t
  misc_feature (999)..(1000): n is a, c, g, or t
  misc_feature (1019)..(1019): n is a, c, g, or t
cacccgcagctgcagcacagtcatggcccaggcgtcgccgccccggcccgagagggtgctcggcgccagcagcccggaggcccggcccgcgcaggaggcgctcctccttcccaccgctgtattcttcaggacttgtggaatgtgaggntcaggatccacttaatcctgatagaagttttgatgtggaatcagtaaagaaagaaatccagagaggaaggaagttgaaatgcaaattttgtcataaaagaggagccaccgtgggatgtgatttaaaanactgtaacaagaattaccactttttctgtgccaagaaggacgacgcagttccacagtctgatggagttcgaggaatttataaactgctttgccagcaacatgctcaattcccgatcatcgctcaaagtgctaaattttcaggagtgaaaagaaaaagaggaaggaagaaacccctctcaggcaatcatgtacagccacccgaaacaatgaaatgtaatacattcataagacaagtgaaagaagagcatggcagacacacagatgcaactgtgaaagttccttttcttaagaaatgcaaggaagcaggacttcttaattacttacttgaagaaatattagacaaagttcattcaattccagaaaaactcatggatgagactacttcagaatcagactatgaagaaatcgggagtgcactttttgactgtagattgttcgaagacacatttgtaaattttcaagcagcaatagagaaaaaaattcatgcatctcaacaaaggtggcagcagttgaaggaagagattgagctacttcaggacttaaaacaaaccttgtgctcttttcaagaaaatagagatcttatgtcaagttctacatcaatatcatccctgtcttattagggattacatttnctaagccagagtntgtcaattgcaatcaggctaaaccaganaccaggtgngaatcnnnatcttagactagnggntctcttggctnagngcnntccctgtcttctggtgacnttt

SEQ ID NO: 357595 - DNA, 920 bp, Homo Sapiens
ggctggaccggtccggattcccgggatccgggatctcgctatccggccgccacccgcagctgcagcacagtcatggcccaggcgtcgccgccccggcccgagagggtgctcggcgccagcagcccggaggcccggcccgcgcaggaggcgctcctccttcccaccggtgtctttcaggttgcagaaaagatggaaaaaaggacatgtgcactctgccccaaagatgtcgaatataatgtcctgtactttgcacaatcagagaatatagctgctcatgagaattgtttgctgtattcttcaggacttgtggaatgtgaggatcaggatccacttaatcctgatagaagttttgatgtggaatcagtaaagaaagaaatccagagaggaaggaagttgaaatgcaaattttgtcataaaagaggagccaccgtgggatgtgatttaaaaaactgtaacaagaattaccactttttctgtgccaagaaggacgacgcagttccacagtctgatggagttcgaggaatttataaactgctttgccagcaacatgctcaattcccgatcatcgctcaaagtgctaaatttttcaggagtgaaaagaaaaagaggaaggaagaaacccctctcaggcaatcatgtacagccacccgaaacaatgaaatgtaatacattcataagacaagtgaaagaagagcatggcagacacacagatgcaactgtgaaagttccttttcttaagaaatgcaaggaagcagggacttcttaattacttacttgaaagaaatattagacaaagttcatttcaatttccagaaaaactcatggatgagactacttcagaatcagactattgagaaatcggggagtgcacttttttgacctgtagatgtttcgaagacacatttttgtaaattttcaaa

SEQ ID NO: 357596 - DNA, 469 bp, Homo Sapiens
  misc_feature (38)..(38): n is a, c, g, or t
  misc_feature (44)..(44): n is a, c, g, or t
  misc_feature (102)..(102): n is a, c, g, or t
attcatggcatctccaaccaaaggtggccagccagttnaaaggnaagagcattgagcttactttccaggacttaaaaaccaaaccctggtgctccttttcgnagaaaaatagagatcttatgtcaagttcttacatcaatatcatccctgtcttattagggattaccgtttcctaagccaagagtcatgtcaaattgcaatcaggctcaaaaccagagaccaggctgtgaaatccacacatctttagaactagtcgtctcctcttggcctcagcagctcttccctgttcttactggttgacattttgatcactctttgcacactcttgtgttttttgctcactgtcacattcccagcacctagtatgctcagtaaatgtttgtggaataagtgcataaaatgttcttaacctttgattctacttacagcccatgatagcctcttagatataataaatttggattatact

SEQ ID NO: 357597 - DNA, 1082 bp, Homo Sapiens
tattaaggccagaagggagggtgtttgtgaatgccttccaagcccaggggtttctgtttataccagtccccttctttttaccattgagttttcattccatttttttccagttggttaggttatattccgtcgtttcccatcccgtcaggtttgccaccaaaaacttccagggattaaatgagcaagtgctggctttcatggaaagcttacgaattctttcctttttatagtcaagatagccaatgtaattgtactggtttcctgctccacggatgacaactttagtagaggctgaatcacaatcttctgaaaatgcagctgcatgtcctggcttcagtgctgtattgtaaagggcaagaatatcaccttgcacaattacatcatcatccatgtatatggccttctttgcgctgggaaccagaattggcaagtagaaccttgcaaaggttaaaggtttcatggattccccctggtcaggatcctcctttacttttcctcccaaaagtttagggtcaaaattgacaattttgtatctgatgcttttcagggaatcactgttgagccaggaccggagatggtctgctgtattgttgagagtaacaatgtagaaaatcacattggagcgagtgttgtgctgaatgctgtttatagctgcaatggcccccccaagcctgtcttcagatgcagcgatgaccacaggaatctcctcttgtctcccatctactgcatgtcggagagcatttgggacaaagtctataggttgaggccctacaattcctgaatctgtaacctcattccttaacaaactgctcaagctgaggaagttatggtgcaaaaccagtaagaagagagcaacagccaggaccaagatgatgatgtttactttacggaatgacatctttttcttctgtcatataaatattagtttttaacccctctagctccgtggcagccgcgcagccccactacgcccagccagcccgcagcggtaaccgctagagcgtcgcgccaagcaggcgccgcggggcagccctgccgccggggtcctcgcagggaaaaaggccgtcgccatggagacgcgg

SEQ ID NO: 357598 - DNA, 448 bp, Homo Sapiens
  misc_feature (437)..(437): n is a, c, g, or t
gcggccgcggcgagcctttgaggggaacgacttgtcggagccctaaccaggggtgtctctgagcctggtgggatccccggagcgtcacatcactttccgatcacttcaaagtggttaaaaactaatatttatatgacagaagaaaaagatgtcattccgtaaagtaaacatcatcatcttggtcctggctgttgctctcttcttactggttttgcaccataacttcctcagcttgagcagtttgttaaggaatgaggttacagattcaggaattgtagggcctcaacctatagactttgtcccaaatgctctccgacatgcagtagatgggagacaagaggagattcctgtggtcatcgctgcatctgaagacaggcttgggggggccattgcagctataaacagcattcagcacaacactcgctccaatgtgattntctacattgtt

SEQ ID NO: 357599 - DNA, 932 bp, Homo Sapiens
  misc_feature (855)..(891): n is a, c, g, or t
agcctgtcttcagatgcagcgatgaccacaggaatctcctcttgtctcccatctactgcatgtcggagagcatttgggacaaagtctataggttgaggccctacaattcctgaatctgtaacctcattccttaacaaactgctcaagctgaggaagttatggtgcaaaaccagtaagaagagagcaacagccaggaccaagatgatgatgtttactttacggaatgacatctttttcttctgtcatataaatattagtttttaacccctttcatctggctggctcccacttggcattcaaaggtcaaggtagcctcctccaaactccacgttgagctgcacctcccctgagctcccacatctgggcctccctctcccagggctaatccagctgtcatgtatttctggcgtgatgtggctgtctcccttgacacgctctgggctcttccaaggcaacagcctggtcttggtaacaaccgtgtcctcggtctgctgtactttgaagtgatcggaaagtgatgtgacgctccggggatcccaccaggctcagagatacccctggttagggctccgacaagtcgttcccctcaaaggctcgccgcggccgcccttactgcaggcgatggaggagatgcggatgcagcccgcgccccgacccgccctgccagctcagcgcccgcgccgcaggccccggagcccagcccgttgtctggccgcccgcgttccctgcacgctgggccgagcacacttgccctctagctccgtggcagccgcgcagccccactacgcccagccagcccgcagcggtaaccgccccgctctcgacgaattcgagctcggccgatttggcctgatnnnnnnnnnnnnnnnnnnnnnnnnnnnnnnnnnnnnncgccgccaccgcggtaatccagggccctatatagtctatcc

SEQ ID NO: 357600 - DNA, 477 bp, Homo Sapiens
gtttgccaacaaaaacctcccaggattaaaatgagcaaagtgctggctttcatggaaagcttacgaattctttccctttttatagtcaagatagccaatgtaattgtactaaaaacacaaataggatatatgtacttactgcttcaaacaaaatagatacaattttatagccagtagagagaagagctgttaaataaactgacttcttcagattagaaaataaatatttgaaattccaagttagaataggaacctagatgttgacataataaaccagatgttcaagaacaattaggctgtcaagtccatgaagaagtctacagaaaagcaggcttaagttttgggatgaaatgattggggagtgtaaattgcagcaaaagagttccctgaatttgcaacctcttcccattatactatattgtaggaagacggggtgtctggtaagcaattgacttgcacacaggcaacagcgatgac

SEQ ID NO: 357601 - DNA, 1312 bp, Homo Sapiens
  misc_feature (965)..(965): n is a, c, g, or t
ttgcggttgtgcggttttgctctttgtgtgcgtgtccctctggttggtagcccgttgtctgtcctgtccactcatcgctgtgtccatttgagtgattcttgtctgacctcctttttgcgggcttggctctcatcgcttgtcgctaatcacgcagtggtggctcggtatcggtacatatactccgttggttagatcattccacgaatccattcacagacatggatatccattgtattctcgggaccctactcatccacgtggtcttctatacagtatcaggtgtagcaccctggagccaggctggtccacacctagaagttccataggaaaggttcattgggaatccacctagggttgaatcgagatgggtctggaagagcaaaggtcagagctgctgagctcttggggtagacctcgagtgtgtactcgctttctgcccagagacgtggtactggggagctcagcaatcgatagatccaggcctcaatctctcgaaggtcatgcagaagggcacttgacttctcctctaccagcagcgatccagtaaagatccgccacatggtgtccctttgtacgcctcgagggatgcccagtttcttgcccagaaggcgctcactatcatgcagtccaccaggcgcttgagagtatacaaacactctcggaaggtggagaagaatagggtagtggctgagcacgcacagggacgtgagagtactgttgcgggagcggctccccgccttggcccggcgtttgccccgaggagactggttcacatcaggggtagagtcagcactgagaggctgcagggatgagccactctctgagctctcagtgccaccctcttctgaggcacaggtggcatgggttccttccttcccacgggagccctgccccaccttcccccttctccttagagattcgcttttggaaggagcggtagaagttaacacagatgccatatcgcntgactccagtgtcattgtcagtgagggtgaagacaaaagaggtatcatcccgaaggctcatgcgccgctgccgcacgctcaggcagccctcgggctggcagaagaacactacatctgggggcaggggaaactcagtgtgatcctccaaggggtatcgccgtagcaattcaggagtctgggccacgctatcactgctcgggtgcctgaagaacataaagacaaattcagcagcctgaagggatggaatgggctatcaaattttaaccacagtcaacaataaagctcaagatgctattttggataaagtaacctgactgtaacaccttggaaaatatgggtgctgcctg

SEQ ID NO: 357602 - DNA, 1680 bp, Homo Sapiens
  misc_feature (23)..(23): n is a, c, g, or t
  misc_feature (81)..(81): n is a, c, g, or t
  misc_feature (1044)..(1095): n is a, c, g, or t
  misc_feature (1451)..(1497): n is a, c, g, or t
ctttctcaagagggatttccctntttctgtaaccagagttttttgtgaatgggttcctatatggacccaaacctatagtcnaagctgtatatgcataatgaccatctgcccttaaaaaagtggatttacattttttattttaaaaaagcattgtcagtgaaaacctgctaatagtttttaaataaacctaaacaatgtctgactctgaaagcaataaccaaacacctgactcttattactggacctaaaatgacctgtaactgagtcaagaagggccagagtatattttaccttcaaaaggtgacaaatgcttataaccagccaggcgatggacattttaagatgtaatcctcaaaagaaaaactctatccactctcagttgagagtcaaagtacaccagaaatttaaaactttgtgtgaaaaattatttataggaatcccaacaaaatacttaaccaaaaagttaagcagaactattggctaggtattgcttgcttaattttccataaaatttgaagctgtgatctaaaagtcttatcttcacgtttttaccaataatacttaatagtcattaaatgatatcctgaagttttctttccattcattttaactgagttccagaaaaatcaactacattaaaataattaaagaagaaagatagaaaaaaattggttgttacaaagaacattcaacgttgggattattaaatcctggctaatgagaagtagaaccggttttagacttttgctttcatttgaattcttaaggtttaactagatactttatggatattatgaacctgcacaaaagaatgggcagtacaaatatgaggttcatgtggactatggcactctgtaggtaatgaccaactaaacataattagttttttataatacatacatttagaaatggtatcaagccattgtttcaaaaacactgaagcacaaattgcccagacctaacaaaagcggcaatgtcaggtaaagattcaaacaaacatggaggcaaaaacatagtactcttctgtacgctgtcacactaacnnnnnnnnnnnnnnnnnnnnnnnnnnnnnnnnnnnnnnnnnnnnnnnnnnnnacacattttggatgacagtaaaattagatgtcatggacttcactctccaaaagagcaaaatcatttgtccaactatctcaacaaaagatattcaaaaattaatggttagtgagtttatttaaactggaaaaatgtagctggccacaaattatactatgagcccacgtatgtagactccacacttgcattagtttctgaacaggtgtctactccaaaccaagcacagctttttgaaagcaagaagcatcaaaagtcttcattataggatttcaggtattttcccaagaggcacaaggaccttcatgctcatagcctagaaccttccttctctcaaaatggctagtttttccagtttnnnnnnnnnnnnnnnnnnnnnnnnnnnnnnnnnnnnnnnnnnnnnnnttatagatgcatagtgaaaaccaagagggatgacacagcagtgatgacactttcgtgctgacatgcattagacacctgtcataatggaaaataaaaattacatgacatttccctgggttattattggtgctatttcaaaactaccagctttgataacagaaagaaaacagttgggttctgcca

SEQ ID NO: 357603 - DNA, 1654 bp, Homo Sapiens
  misc_feature (18)..(18): n is a, c, g, or t
  misc_feature (219)..(219): n is a, c, g, or t
  misc_feature (805)..(805): n is a, c, g, or t
  misc_feature (880)..(880): n is a, c, g, or t
  misc_feature (892)..(892): n is a, c, g, or t
  misc_feature (935)..(935): n is a, c, g, or t
  misc_feature (1029)..(1029): n is a, c, g, or t
  misc_feature (1033)..(1033): n is a, c, g, or t
  misc_feature (1036)..(1036): n is a, c, g, or t
  misc_feature (1128)..(1128): n is a, c, g, or t
  misc_feature (1145)..(1145): n is a, c, g, or t
  misc_feature (1157)..(1157): n is a, c, g, or t
  misc_feature (1213)..(1213): n is a, c, g, or t
  misc_feature (1258)..(1258): n is a, c, g, or t
  misc_feature (1290)..(1290): n is a, c, g, or t
  misc_feature (1298)..(1298): n is a, c, g, or t
  misc_feature (1350)..(1350): n is a, c, g, or t
  misc_feature (1358)..(1358): n is a, c, g, or t
  misc_feature (1362)..(1362): n is a, c, g, or t
  misc_feature (1396)..(1396): n is a, c, g, or t
  misc_feature (1412)..(1412): n is a, c, g, or t
  misc_feature (1477)..(1477): n is a, c, g, or t
  misc_feature (1521)..(1521): n is a, c, g, or t
  misc_feature (1599)..(1607): n is a, c, g, or t
  misc_feature (1637)..(1637): n is a, c, g, or t
  misc_feature (1644)..(1644): n is a, c, g, or t
  misc_feature (1646)..(1646): n is a, c, g, or t
aatttaagtagggctganctgtgtgtaactggtgaaatgttcaagttaacaatccttacacacgaaatctctcacttcactgacttaattccttatttgctgaataaacaataactttccagtcagtagtcaagagttggcaatctagctggtaggacataacatataatcatgaaacagcaaaaacagtattcaaagattaaattagcaataccccanaatgtgtgttagagttagcataaagaatttctgatgtagtttaccaagagctaaactaaaaagtccagaatacaaaaaacagggatgcaatgatgttagtttttttcaccatccttgaaattctcccattaaccacagctctgagttttcaactgctctttgtccttaaatcttcagattccctcctttgaatgggataggtagagcagattagaagaaatatattccgaggctctctaatagtttctggatgattaaccttcatgaaaataacctcacagataagtaattaggatttttcagcccatttctataaactaagtaaactttttttctagtgaacataacttgatatattagtgactgtagaaagtctttctacagcaacaggaattatatcaaggcttttgcaaattcctggcaactccgggcatgtttaagttctactactcatctgttctgactatattttcatctgatggaataagcagttcatctcctttcctagaacttttagtgctctactgtccccctcactttagttaaggtctgccatgtcctcctctccgacagtccttgactttcnccaatggcatattcatctgctcaaacagatgtcactgcaaaacaaaacaaacttttaacaaaaagcaatgtttgnatatttggggcnttttgtatgacaatattgcacgtttcctcagaaaaattcacgnagattctttaaggttgggggtttaatctattgatattttccttaggtagacaaagacaacctctaagtgcgctcagttaatctttaaccgctanatcntcntcacccaggcactaagacataactagggcataatgagttttatttccaccaggggcgcctagtaactaccaggttcaacgctcccaggtggncgacatgtgatgtgttntactgtttgggntggggatattagttaaaaaaactctggccaaaaggatcacgcggatattcttgggnatgcctagcgaaatgcgctgtacctaggcctcgaactctcgcctnctctccggtgggcggtctcgaactccagcctnctctccgncagcccacagcaatgcgcttgccaagaccttaggctgcaaaattcgccacgncccagagntcgnctctcaagtgcgccccgctacagggtaagttttnggcgagattcgcgtcncacccatctagccctggtccgctgtccctaactcccgcagtttcacagaggcggcggcggtgagngcagccgatgccacatcctcagcggcaagctgaagaaacctgtntcctctctggggcgaccaaacgatacgtcgatgccggaaccgacccgatcgccgagccgtcggctccgtccttaccgnnnnnnnnncaagatacacacccccgtataaatggcggntttgcgncntcccggga

SEQ ID NO: 357604 - DNA, 788 bp, Homo Sapiens
catgcccagagcttgcctttcctcttcttgttgcctagaatgtactccctcatctctgcctggtaaaaatcagcctacccttcaagtcaagttaaaatactactctaccgtgaagactctcttggtccactcattcctacccccaattccaaatacttcttcatctcccatccaatctagctgtgacctctcctttaattcactctccagagaactttgtgcctctctggtgatgcttaacatatgccacctcatatttcaggtatttggggacttgccttatccccactactagatcgtagcctgagaaatgcactttattcatctttgcatctcctgcagctatagtaaatgtttaataatatgatcacttatgataaatttgatttttaaaattattctaatttagaagcatgtcattgaaacagtctctaaaatagctacacagtctattaaggaataatatatattttaaactctaaacaaatatctggttttatttaacaaaactgtacaatttcatattaatgtttaaagctcatccatggtaagattatacctctgtgcctattaatcttacctagtttatttggtcaatataaatagtaactctacttgtacatgtaattacacacagtcaataatctgttaacttaagatccctcctttaactgatatctcttacagttagaattttttatgcttacattttaaacaaaaagataagaaatgtactaaggttctccatattttcatcttgttcaatcaatgtttaatatcagtaatat

SEQ ID NO: 357605 - DNA, 1624 bp, Homo Sapiens
  misc_feature (222)..(222): n is a, c, g, or t
  misc_feature (330)..(330): n is a, c, g, or t
  misc_feature (722)..(749): n is a, c, g, or t
  misc_feature (1041)..(1041): n is a, c, g, or t
  misc_feature (1045)..(1045): n is a, c, g, or t
  misc_feature (1056)..(1056): n is a, c, g, or t
  misc_feature (1058)..(1059): n is a, c, g, or t
  misc_feature (1062)..(1062): n is a, c, g, or t
  misc_feature (1071)..(1071): n is a, c, g, or t
  misc_feature (1076)..(1076): n is a, c, g, or t
  misc_feature (1079)..(1079): n is a, c, g, or t
  misc_feature (1084)..(1084): n is a, c, g, or t
  misc_feature (1090)..(1090): n is a, c, g, or t
  misc_feature (1097)..(1097): n is a, c, g, or t
  misc_feature (1102)..(1199): n is a, c, g, or t
  misc_feature (1201)..(1201): n is a, c, g, or t
  misc_feature (1203)..(1203): n is a, c, g, or t
  misc_feature (1205)..(1205): n is a, c, g, or t
  misc_feature (1207)..(1207): n is a, c, g, or t
  misc_feature (1211)..(1211): n is a, c, g, or t
  misc_feature (1213)..(1214): n is a, c, g, or t
  misc_feature (1221)..(1222): n is a, c, g, or t
  misc_feature (1226)..(1227): n is a, c, g, or t
  misc_feature (1270)..(1270): n is a, c, g, or t
  misc_feature (1276)..(1276): n is a, c, g, or t
  misc_feature (1288)..(1288): n is a, c, g, or t
  misc_feature (1292)..(1310): n is a, c, g, or t
  misc_feature (1313)..(1313): n is a, c, g, or t
  misc_feature (1325)..(1325): n is a, c, g, or t
  misc_feature (1327)..(1327): n is a, c, g, or t
  misc_feature (1332)..(1332): n is a, c, g, or t
  misc_feature (1345)..(1345): n is a, c, g, or t
  misc_feature (1348)..(1349): n is a, c, g, or t
  misc_feature (1356)..(1356): n is a, c, g, or t
  misc_feature (1362)..(1362): n is a, c, g, or t
  misc_feature (1365)..(1365): n is a, c, g, or t
  misc_feature (1370)..(1370): n is a, c, g, or t
  misc_feature (1376)..(1376): n is a, c, g, or t
  misc_feature (1379)..(1379): n is a, c, g, or t
  misc_feature (1386)..(1387): n is a, c, g, or t
  misc_feature (1409)..(1409): n is a, c, g, or t
  misc_feature (1420)..(1420): n is a, c, g, or t
  misc_feature (1428)..(1429): n is a, c, g, or t
  misc_feature (1431)..(1433): n is a, c, g, or t
  misc_feature (1454)..(1454): n is a, c, g, or t
  misc_feature (1471)..(1472): n is a, c, g, or t
  misc_feature (1490)..(1490): n is a, c, g, or t
  misc_feature (1523)..(1523): n is a, c, g, or t
ccctcctgtacgtagacaatttgtaacgtgattctgatgttcagtttattagaacaatagctttcctcaaagaaataaagtcaaatttacctagtttggttgttcctactttagtgaccgggaagatgcttgataatttcattcagagaaattttgaaagggaagtcttacttctttttagtttttatagctaagcattagtgacttatttcaaaagacgcnaatcaaaaagttagtttgaaagcattttttaataattgtatttatgcatttccttgatttaatatgataaatttaatacttaacaatttatatgtaactaaaacttanagtcatttgaaaaatatatagaaacctatttacaacttgttaaggacaatcagacataatgcagagttaagtagtatttgcttaaaattcaagttgtgacctaatgatcaaatactaggcttgtacgaaatgctttagaaaaactttgtaacagttttgtgggatttttcaatataaacctttatcagaaatatactaagtttgtctcccactgacaacagatgttttccaaataaacatattctatacatacttgtggaatgccacatggtgaatcattgtatatgaaattccactcctgtacagttactctgcagctaatggtcatgcactgcttaatgctggtcctgaatcatgttctcatgttagaccaacagctctccaattgtcannnnnnnnnnnnnnnnnnnnnnnnnnnnccacttttaaattaaatgcatgttgtggaaaaacagtcttttaaaatgaaatttcagattccatttgagaaggttctgtagatatttcagtccatataaaataatacatctttactaaacttatataaggggagagaaagttatgaagttttggacattactaaaagtacagtatttgatttcactttcaatgaatgtgaagttaataaaactaaatctcataatgctcttggttcctaagaatgagtagtaatcatcaactttataatactccaatattccatataataanaaanaagagccctgnannaanaacacaccnaaaanaangaacnctgtanaaagagnacaannnnnnnnnnnnnnnnnnnnnnnnnnnnnnnnnnnnnnnnnnnnnnnnnnnnnnnnnnnnnnnnnnnnnnnnnnnnnnnnnnnnnnnnnnnnnnnnnncncnananaaancnnaaaaganncccnnaaattatggaacatgagccaaaaaataaaagaaagaagaatantaagtnaataaagtttgnattnnnnnnnnnnnnnnnnnnncanaaactaactgtncnaaatntgttgcctttgtnaannttataanacaganacnacatngtaaanatntccattnntttataaattaaccagtaaaanaaaaaagcaanaacttagnnannnaatatattaataactgttttnttaaaaataatcatagnnaatttaaatcttcacatnatcacctatttgaataagcaatcatatccaatnaaattctgtatttctgagtatttttatagtcattttgttcttgtgtgaattttaaagctatccatatgttaatacaaatataaaaaatcatataaaatata

SEQ ID NO: 357606 - DNA, 2281 bp, Homo Sapiens
  misc_feature (1461)..(1495): n is a, c, g, or t
  misc_feature (1701)..(1790): n is a, c, g, or t
  misc_feature (1796)..(1796): n is a, c, g, or t
  misc_feature (1800)..(1802): n is a, c, g, or t
gctggtaccggtccggaattcccgggatgcatgaacaggcattctcgtcgcacatactgggaaccaatagaagaactttcagaggaagaaaaaggaagggaaaatgaacagaaattaaataacaacaaaatgcatttaaggaaagctttgaagagtaactcctccctcactaagggactaagaacaatggtggagcagaacttgatggagaaactggaaaccttggggattaatgcagatatacgtggcatttcaagtgatcagttgcatagagtactaaaaagtgtggaatcagaaagacataagcaagaaagagaaatacctaactttcatcaaattcgagaattccttgaacatcaagtcagctgtaaaattgaggagaaagcactactctcttcagatcagtgcagtgtttctcaaatggataccctttcaactggagaagtacccaaaatgatacaacttccttccaaaaacagacaactgattagacaaaaagctgtttctactgataggacatctgttccaaaaattaagaaaaatgtcatggaagatccttttcccagaaagtcttcaactattacgacccctccttttagttcagaggaggagcaggaggacgacgacctcatccgggcatacgcatccccaggcccacttcctgtgccgccaccacaaaacaagggcagcttcgggaagaacacagtgaaaagtgacgcggacgggaccgagggaagcgaaatcgaggacactgatgattctcccaagcccgcagagatcgccgttaaaacacctactgaaaaagttgaaaagatgtttccacatcgcaaaaatgtgaacaaaccagtcggtggaactaatgtccctgagatgtttatcaaaaaagaagaattacaagaactaaagtgtgcggatgtggaggatgaagactgggacatatcatccctagaggaagagatatctttgggaaaaaaatctgggaaagaacagaaggaacctccacctgcgaaaaatgaaccacattttgctcatgtgctaaatgcctggggcgcatttaatcctaaggggccaaagggagaaggacttcaagaaaatgaatcaagcacattaaaaagcagcttagtaactgtgactgattggagcgacacttcagatgtctaattccacatgtcagaagattattccagaagccagcagtatttcagtatcacagtgtttcagtaatttgcctccatgattctagtgcttctgccttaccgtgtttcccacagcaacacagagactgattcaaagaacaatggtctctttaatggcacccaatacagtattgaaaatcagatcatcaacagtatttcgaagcatgtaaaggtgtttaagacttccgctgctgcttaaaaataacatgtcattgaagtcataaaaagttttttcttcagaaaggtactctagtgttaagtgtannnnnnnnnnnnnnnnnnnnnnnnnnnnnnnnnnnaacttacagcatgttttggtttgaattactaaaactttaaaaaatatttttcttatgtatgctgtcgtatcgtaggcgtttatattataaaattctgttagtagtcttaaaattgaattggtggaaccactaatccttaaaagttagtctggttatttttcatatagaagtaagtttaatccgagtgtggtggtgttcacctttgnnnnnnnnnnnnnnnnnnnnnnnnnnnnnnnnnnnnnnnnnnnnnnnnnnnnnnnnnnnnnnnnnnnnnnnnnnnnnnnnnnnnnnnnnncgcccncccnnnaaaagtaagtttaggattagaatatagctaggtccaatgttaaatacattttcctggagtacatttgtcacattcagctttgagccactgtaagcatgttactattaaatggttggttattttatatagcatattctttatcttggatattttatgaataaagtatagttattttaagtgccaattaatttatcagactaaatagaaaatatttgagccattactgaactcacatatgtatgttactttttactatttaaaatacccaacatgtattatgaaatacctcaaaagtaatttagttacattcttaaacaatgacattgtcgaaagaaagttcttataagctgttttttgcatttttataacttggttatactatattctgtttccaagtaaccttttaactaaaagatttgttgggttttagatctcttttcatttgtcaaccttttcagtaaagccctctgttacatcac

SEQ ID NO: 357607 - DNA, 760 bp, Homo Sapiens
aggaaaaaaggaggagagggttaaactgggttaagtggtaaatttaaaaaaatatacgggttttatatttccccattgattttttaaggaaaaccgtgtaaaaagccaaaagaatttttgtaggtaattgccaccaaaatgtaacaaaatagatgttttttcttaaaattgggcaggtcagtataattatgtttcctgcctatgatgttgagggaagttgtatcagtctgattcttagttttttcatctgttaagtagaacgtactattacttaccttaaagggtggctttgagaattttgtaaggaacaaacatgtttttggttctggaatataggaggtgctcaataaaagttgactctgactggcaaataatattgttttgtaaatgcatgatgattatttttgaccatatttgacttagtttcattaggctaatgttaattggtactatatgaaagtgagtcaactaattataaaagattagaaatgtcttaggtgacgatgggggaaaaacttaaaatttttgcataaattatggagagatgatagagttattacagtgttattaagtattcctatgttgcattttgcaaatacttaatacagatgaaaataatcttgagtcacaataaagtaatgatatgttaagtttcaacagtgtacattgtagtaattttctgaaagttacaggttcctcagaaaaaatttaaactagctttatttctttaataaattataagtaaaagttgactatctga

SEQ ID NO: 357608 - DNA, 927 bp, Homo Sapiens
gcccatgcagcaggccaaggctgtgctcaagcatttcaacgtgcgtgtcacccacgcagacatcttcagccgctgccaggcctgtaactgtgaccagttacctaaaggtctacagggacatgataaaacagctcatgtggctcagcatgtcaccagaaggggcccagaagctcagtgtgacgagaccacccagagccagacggtgcaggagccaggcccagccccaaacacagcacctgagggctgcacctatgaccgcccctaccgctggctgcagatggctgacctgcgggcggagacaccggacatgctggccgacggcaccctggctgcagctggcagggagtccctggtgggtgtgctgaggacacctgggctgcggtgcttctactactgcacgtggctgtggaaaggtcttctgggacggctcccacctgggtcgtgttgccacccacttccgagacatgctggagagcgcccccagcgccctgcgagcctgagcccagcccccagacaagtgccaacagtcccttctgaggacaggcagtacaataaatcagtggaaagtgcccgactgctgggcccatggtccgtgaaagcatacctgataccgaaccaaccatggagcgtgggacttcatatgtgaggccagtacttcatctacggaatcttcctgaacaaccgtgggtggtctgccgcagggagtaccctgttgggggaccaggtcaattgcagaacgactcatcactggttagaacagcagaaggaactgctcttcagtgggactttaattgcattgaaaagtgggctgcacattgatacattcataactaacgctggtgtgagcaactacgcacctgggacaggcacatagagacagacacacaacttggagggggggcagacaaagctgggatacgtccagag

SEQ ID NO: 357609 - DNA, 1251 bp, Homo Sapiens
  misc_feature (664)..(695): n is a, c, g, or t
taaacctggaagcagattcccgatttcgctgtctgcacccctttcccacatttcaacacagtgttgtttgccaaacccattggaaacgatatccgctttgtgttgttccgtaaaggtacacccgggaacagagttctgtttatgcacacccactaacttagcccttaagacttccctgcccggttccgcccacgggaaggctgtggggagcccagcccggttcacacttgccggaggtgacagaccccatccctgctctgtcccccgcgcgcgccgcgcatttgcccacctgcaccgaccgcaccgcgcctgcgcccccaccggacccgcgacagaaactgcccccttcctgggccactttctgaacctggacacagacgatgtcctccgagggagggagcctacccccgttacacctcagagccacgaagccggcacccgctccctgccgcagcttccccggatccctgcgctgccctcgggaaagcagcgactcaaccagacccagccccccgcgcggcaggggccctcctggccaccgcaccctactttttctagccggcgcccccaaagcagtggcttctcataggaaaggatgggaggggggcgcagttgaggtgactcttgatgacaagtcactgcagctggcctgctgtgaagtttnnnnnnnnnnnnnnnnnnnnnnnnnnnnnnnncgtgtccagaatgcctggtggcctgcgggggtctttaccaaggggatgctggcttgacccaggcctcctttccctaagagcagcaggagctgagtgaggcacagggatgcccccatccccttctggccagcgagctgctcctatgatgtcaccctctgtccaccgtgacaaagacagacacatcctgcagaagaatctgggtcgcagcaggtgccctgcctccagcaggaagcaaaaccaaggcggtggaggcaggagagcacggagacagacgccccgaagctctctccctgttcctccccaaacgctaggcgatgggaaagacggggacaatgcagagtaaatgtgtgccgctgacacccagtatgcgacacaagccaagaattctaagtggattcacgagccacaccacccagccttgggtcttccctcttcagccgtcagagccaggatcagtctctggctttgcaccaagggctgctgtcccctcacacggtgtctgcgctctcgctgggcaggggtggctgcccctcgtgccgaattcgccacccaggcc

SEQ ID NO: 357610 - DNA, 2041 bp, Homo Sapiens
tgcctggcctcaactgttgcttcttataaaggtgtgttccaagagaacaagccttcagacatttgctatattgacgctgagctgtcaggggactcaggcttatgaggaggtatttgtttacacaaaacagtgtctagtgaagacgacaagaaagaggggaaaggatcggaaaaagaagctaaaatactatagaaaaccatgagatctattcgatcttttgctaatgatgatcgacatgttatggtgaaacattcaacaatctatccatctccggaggaacttgaagctgttcagaatatggtatctactgttgaatgtgctcttaaacatgtctcagattggttggatgaaacaaataaaggcacaaaaacagagggtgagacagaagtgaagaaagatgaggccggagaaaactattccaaggatcaaggtggtcggacattgtgtggtgtaatgaggattggcctggttgcaaaaggcttgctgattaaagatgatatggacttggagctggttttaatgtgcaaagacaaacccacagagaccctgttaaatacagtcaaagataatcttcctattcagattcagaaactcacagaagagaaatatcaagtggaacaatgtgtaaatgaggcatctattataattcggaatacaaaagagcccacgctaactttgaaggtgatacttacctcacctctaattagggacgaattggagaagaaggatggagaaaatgtttcgatgaaagatcctccggacttattggacaggcagaaatgcctgaacgccttggcgtctcttcgacatgccaaatggtttcaggcaagggcaaatggattaaaatcatgtgtaattgtcctccgcattctgcgtgatttgtgcaacagagtccccacatgggcaccattgaaaggatggccactagaacttatatgtgaaaagtctataggtacttgtaatagacctttgggcgctggggaggccttgagacgagtaatggagtgtttggcatctggaatactacttcctgggggtcctggtcttcatgatccttgtgagcgagacccaacagatgctctgagctatatgaccatccagcaaaaagaagatattacccacagtgcacagcatgcactcagactatcagcctttggccagatttacaaagtgctggagatggacccccttccatctagtaagccttttcagaagtattcctggtcagttactgataaagaaggtgctgggtcttcagctctaaagaggccatttgaagatggattaggggatgataaagaccccaacaagaagatgaaacgaaacttaaggaaaattctggatagtaaagcaatagaccttatgaatgcactaatgaggctaaatcagatcaggcctgggcttcagtataagctcctatctcagtctggccccgttcatgccccagtcttcacaatgtctgtagatgtggatggcacaacatatgaagcctcaggaccatccaagaaaacagcaaaacttcacgtagcggtgaaggtattgcaggcaatgggatatccaacaggctttgatgcagatattgaatgtatgagttccgatgaaaaatcagataatgaaagtaaaaatgaaacagtgtcttcaaactcaagcaataatactggaaattctacaactgaaacctccagtaccttagaggtaagaactcagggccctatcctcacagcaagtggcaaaaaccctgtaatggagctcaatgaaaaaagaagaggtctcaagtatgaactcatctcagagactggtggaaaccatgacaagcgctttggtaatggaggtagaagtagatggacagaaattcgaggcgcagccaaataaaagtggcaaggaggcacttactgcttgagaactgttctgaccatgcgaatatagaaagaatatctcgcagggtggaacctggctgcatcacgtcggcagaagacacagactttgcactgcgtaatcgtgacttgacacctgcaagtctatacgcctagatacagatccg

SEQ ID NO: 357611 - DNA, 1020 bp, Homo Sapiens
  misc_feature (100)..(100): n is a, c, g, or t
  misc_feature (573)..(573): n is a, c, g, or t
ataaaatgggtgctggagtctaaaatgataccctgggtggagccggggagctgagcaggaggccaggtggcaaccagtagctgctgggcccgtggcctgnaaccctcctgcactcctccagctggagtctcaccgcggatcccaagaatacctgctgttcccacagggctgcctttccgtagtttgtctggagacaccaagagtggtttccatgcctgctgggaataggctgagcatgcaatgacatgagggccaaggcttgtgagggaaaatgacagcttcacagccccttgaggagtgaccaagccacaaagtaaatcctaaagccacaaccccttctaccactgagctgctggaggtgggtccttatttcaagccatattcaacccacccaacaaaacctaacattgaggtggtgggcacacggcccctgccgtggggctcactctgcagctggagagacagcatacctgaaacctgcaaggaaccggtttataaaacaacagaacagccaggaaaatggtgctaggagaaacagtggagaggccagagaagcaaacacactgtggctcntcactgggggtttcacggggttggactgagccctgtcacctctgtgatagtcttcactctgacaggcaatggtgactgtgtgtgtttcctggggaggaggttagcagggacggttgcctttcctgggaagggcggtttgcagaaccaggggtttatattgcagggagtgtattttctgaattctaagtcagaacaagcagtctgatacaggatccatggctgggtcacttctgggtgcaagaggctttctagaccttagacactcaagattacggtcccgggccagtaacagcacctgggagcttggtagaaatgcagaatcttagcctaggcaacatagggagacctcatctctgcaaaaaataacaaaattagccgggcatggtggtgcacacctgtagtcccagctattctccaggctgaggtgggaggatcgcttgagcccaa

SEQ ID NO: 357612 - DNA, 1523 bp, Homo Sapiens
acttcggccaaaggcagccacatcctgttcctggacagccacaggggcattgcgccaggaggacgcggggatggctccacacccgctgccaagtcaaacacggggcactccaggcagaatgagggactaatcttcccgactggtgtaagtaaaacctcctggtgaaggtcacagtcttcaaaagcagaccgaggcagaggcatcgctgagtcagcagtgagagatgggagcgtggaaactggtctcttcatggaggaagtgacctgtttatgagcaagaacaaggccaggagaaggcccactccccgcaagctgtgagttgactcataggggccatgggactgtcccaggtgatgtgagcgatctggagcaataccggtgtactctgcttttgtttaaaatgaattaaaatgaattaggggcttggggaatgagccaaatgggcaataattacacgaataggccatgtcttcccaagatgccacctcactggctatcgaatctgtgaagccgctgtctcctcatttcttctggtgagagatgaaacccgtagggtggtgggctatttctggtatttcctcggtcccagaggctggcttgtaatgctctctcgagctgttcttcttcactcagtcctgctgtgtacgtgtcatagttcctgggtgcttcttcatagtgatctggcctgccatgcggataataatcctgatatccagagctgcctgaactattaaagtagtattgccgtcctgggtaaccaacactggaggaaaaaccgcctgcacatgcttccatgattttcttcagaggcccttgagtgtacattagtccaacaagaatcccagccagatgcccagcgaaggaagtccctggtgagaataaatgaatagccacaagttcgacccaacaagcaaatctgttcggtacaggaaagcccaaaatgttgacaaagcctccagggcaataatggttgttaagaactttcaaagcaaacaaaactcctgagaaacctacagcacagctccttttgaagtcaggttcatccataaattcggcaacagcaaattgcaagagcaggtataccactccagtaagtacagaaaatgcggtgataacataggcaaaccatctacttcccagtcttctttctagatttattcctttccagagcatggatgccatattgaaatacaaatgccaatcatcagcatggtgaaggggagagagcagtaaacgctgccagtctttttgctggtaacacttctccacactaaggcaggagctatacagtggcttctgagggttcaagaagaaccagatgttgagggccaaagttgctagggtgacaggtggaatattgttgatcccaacatggaagatttgagaaaggagtagaataagtccagtatttatccctcttgatctccgttgcatggccagatatcagggaaacagctcagcaatgggaaaacgtactcaggtggtcagtttcaggtatctggggagatatacagacggctgaac

SEQ ID NO: 357613 - DNA, 696 bp, Homo Sapiens
  misc_feature (106)..(106): n is a, c, g, or t
aggaaaaataccagaaaattaagccccaccaacttacggggttttcatcctcaattctgcctggaagtgccccgtgtttgacttggcagcgggtgtggagccatcnccgcgtcctcctggcacattgccactgtggctgtccaggaacaggatgtggctgccttggccgaatgttgtcctactctccccaaccccggcgcctcagctcctcagctcctcgggcccctgcgtctggctggtgtttgcaaggccttcgctttggttctgttatgcttctgcctttatagaaagtcttattgaagaagtgtaagaaagacctaaggtggggaagactcctacacacaccattagtatcagtgacaccagcaatgtaggttcccagccccttcccagtggcagcttgtgtgtccaggagataggacatcatttaacgcatcagcaaagtagcagcagatgccacatacagagtagagcgaaggcatttggtggatcggtcactagagatctatcttgcagaaagtatgtttttcctcataaaagtgcctcttaattggccattgtaccagccacttgtcctagccaaatgtccaaaacacgcccttgggccccgccacgttacaatccacagattgtctgtctgagtcgtttaaggcatttcctggtgcttgtgttccatgaataaaaggacaaagtcag

SEQ ID NO: 357614 - DNA, 1397 bp, Homo Sapiens
cccggggatctgacaccccctatagttgccccccctgggtctcttttcccttaactccgcagatgttctctaagccccgtgtgtgggcccgcccggctgccccgggctaagccccccccgtttttttggggaagggccttttccctcggccccctggtggttttccgaagggattttttgcccttttccagaaaccttttccagggaactttcccggccatggtgggtatttctcccggagtgggccggttccttcccggagccaggatgagggcgattttcgagggatgttaacggtgcttccccagactggagtcctggaaaaattttgccaacctgacatgtttcatgatggccaggacatactgctccacatcccggcgcccgtgataggccaccatcatcttgtcagccaccaccagggtctccacgtagcgctctcggctgaccgatcgcttcaggcctggctggccacgctctgtttcattccccaggggcctggcaggcggtggcttcaaggtccgcagccaccatggccgccctttccacggtttctcatctctcactccacaggctgtgtccaggtgggggtgacgcagagaggaacgcttgtacaccacatgtggtccactttcctccgggctccgagaacccttgggcccaccgtgcaggggctcaatcaggtactcttcctcgtctgccacgatcaggccgtgcaggcctccacaggtgctgatggccacatgggagctgctggcctggccctgcaggtgaccagcgtagaggcagtggggccgggccgccctctgccaggccaggccctcccgtgtccagtactccacggagacgtgccctgccagtagacgggagctgcgggtcaggttcagcaggaagtgggtgctgggcgaggccactttgtagaagaggcgggactcggctgtggcccccgtgccgcggcgctgcctccggggaggaggtggcgagaaggccagcagtgccccgttgtggtccacgcgggtggggaaggcgatctcatagctctccagactggacaggaactcatcttgagaccggaaggcgtgcgtgacctcgaacatgaggcccagccccagggcgagggcccagcggaggatctggcaggcgggagccatagaggccacgtgtccacatgtctctccccagccccggctgccggcagcccccacagtgccgcctcccctgttcacagccttcgcagcatcaccgggctccttttgggggcttcggttgctggagtagtgttgggcccctgtacggatccttccctcgcctgctccctgcacctgggcctccctctctgggccttggtttcttcttctttggagcctgcgccgcagcccggggcctccgcgccgtcg

SEQ ID NO: 357615 - DNA, 1076 bp, Homo Sapiens
  misc_feature (856)..(856): n is a, c, g, or t
ggctggaccggtccggaattcccgggatggaatgtcagcttttacataacgttcctttccgcttttgacacactgtgtgagggtccatcttcttctgatcacagatggagtggaatggcttgaagatgataattagcaccatggagcctcaggtgtcaaatggtccgacatccaatacaagcaatggaccctccagcaacaacagaaactgtccttctcccatgcaaacaggggcaaccacagatgacagcaaaaccaacctcatcgtcaactatttaccccagaatatgacccaagaagaattcaggagtctcttcgggagcattggtgaaatagaatcctgcaaacttgtgagagacaaaattacaggacagagtttagggtatggatttgttaactatattgatccaaaggatgcagagaaagccatcaacactttaaatggactcagactccagaccaaaaccataaaggtctcatatgcccgtccgagctctgcctcaatcagggatgctaacctctatgttagcggccttcccaaaaccatgacccagaaggaactggagcaacttttctcgcaatacggcgcgtatcatcacctcacgaatcctggttgatcaagtcacaggagtgtccagaggggtgggattcatccgctttgataagaggattgaggcagaagaagccatcaaagggctgaatggccagaagcccagcggtgctacggaaccgattactgtgaagtttgccaacaaccccagccagaagtccagccaggccctgctctcccagctctaccagtccccctaaccggcgctacccaggtccacttcaccacccaggctcagaggttcanggctgggacaaatttgcttaaatatggcctatggccgtaaagaggttctcccccaattacccattgatggaatggacaacccttgtggggaatgaaccatccctggtcccaccagggaactgggttggggccatccttggtctaacaacctgtcccccccgaatcccgaatgagaagggccctctgggcaagctctttggcccccccttggggagcaggg

SEQ ID NO: 357616 - DNA, 850 bp, Homo Sapiens
cgcgtggtcgccgcaggcctggcgttatgcgcgcttcgcccaaggtccctgcctcagcggcggcttgggcaagccccagcgcggcgtggggctggggagggaacatggccttgggcagggaccatggccttgggagggaccgcctgggcaactgggttattttatgtgataaactgcgaagttccggggacctgtgtcaaagataaacaaagccggacactcaggtgagtttgaaacagctgagacacttctaaattcagaagttcatatgcttctggaacatcgaaagcagcagaatgagagtgcagaggacgaacaggagctctcagaagtcttcatgaaaacattaaactacacagcccgtttcagtcgtttcaaaaacagagagaccattgccagtgttcgtagctttgctactccagaaaaagcttcataagtctgagttggcctgttttggccaacctttgcccagagactgctgaggagtccaaggctctaatcccaagcttgggagggacggtttgaagaggaggagctgcagcagattcttgatgatattccaggacaaagcgcagctttccagtattaatctccaaacatcactgctgctcggagaaaccacatccccaggcataacaccaccttcccactgtctggggctgacttgcacagaaattctgttgaagacagttgagaattcctttggagaaaacagcccagcttggcgtggggttaggttgctgtttcaaataactcacaggcccaggtgacatggaatcttggagcagccttgtgcagtggcagccagtggcttcctgaacgtgcctctgcgaagtgtgagatgaggggc

SEQ ID NO: 357617 - DNA, 2623 bp, Homo Sapiens
  misc_feature (959)..(973): n is a, c, g, or t
  misc_feature (999)..(1226): n is a, c, g, or t
  misc_feature (1311)..(1311): n is a, c, g, or t
  misc_feature (1980)..(2027): n is a, c, g, or t
  misc_feature (2076)..(2093): n is a, c, g, or t
  misc_feature (2350)..(2359): n is a, c, g, or t
gcgcctcctttcccaaacacgcggcccggtccggaattccgggattggtggtgggcggtgcggctcggcgatggcggcgggtggcagcgatccgcgggctggcgacgtagaggaggacgcctcacagctcatctttcctaaagagtttgaaacagctgagacacttctaaattcagaagttcatatgcttctggaacatcgaaagcagcagaatgagagtgcagaggacgaacaggagctctcagaagtcttcatgaaaacattaaactacacagcccgtttcagtcgtttcaaaaacagagagaccattgccagtgttcgtagcttgctactccagaaaaagcttcataagtttgagttggcctgtttggccaacctttgcccagagactgctgaggagtccaaggctctaatcccaagcttggagggacggtttgaagatgaggagctgcagcagattcttgatgatatccagacaaagcgcagctttcagtattaatctccaaacatcactgctgctcggagaaaccacatccccaggcataacaccaccttcccactgtctggggctgacttgcacagaaattctgttgaagacagttgagaattcctttggagaaaacagcccagcttggcgtggggttaggttgctgtttcaaataactcacaggcccaggtgacatggaatcttggagcagccttgtgcagtggcagccagtggcttcctgaacgtgcctctgcgaagtgtgagatgaggggtcacataaccacactgttgactacctcattcctggtttttggcctccacatcatcttttttcttaatatttcatgttttaatttcagggtgtttatactttttgaaactagaccagaagatagtagactttatagagaaagaccagttttacctagatactaaaggaagaattaaaccgctgttagtttgaaatgctttnnnnnnnnnnnnnnnaaaatggagatagggtcttaactctnnnnnnnnnnnnnnnnnnnnnnnnnnnnnnnnnnnnnnnnnnnnnnnnnnnnnnnnnnnnnnnnnnnnnnnnnnnnnnnnnnnnnnnnnnnnnnnnnnnnnnnnnnnnnnnnnnnnnnnnnnnnnnnnnnnnnnnnnnnnnnnnnnnnnnnnnnnnnnnnnnnnnnnnnnnnnnnnnnnnnnnnnnnnnnnnnnnnnnnnnnnnnnnnnnnnnnnnnnnnnnnnnnnnatgagccaccacaactggcctgaaattcttaaaggatgggagtgtcgatgacagcacccttggcatcgttgtgcctaacctgggnagacggaaagaagcacgccatggggaagtgtttacacttggggacaagtgctaagtattgtggagcccatagccccttgagatagatggctactttgcctttcttcttgaactgtcttgcagaatgtggatttggggtaagtggtcttgaaggattcatttagtcaccctcaaattaagatttttacttcatctttcttgggcctgcacctccaagataacaaagaagaagcaatggtcgtgccaaagaggtccacaaccaggtgtgcactgttcactgcagcccatttgctgtatgaactgtggttgttgtgtgcccaatgacaaggctactaagaaattcatcatttgaaacgtagaggccgcagcagtcagcgatgtttctgaaatgagcatccttgacgcctgtgtacttcccaggctggatgtgaagctacattaccatgtgagttgtgccattcacagcacagtggtgaggaattgagctcatgaagcaggcaaggaccgaacacctccaccccaacgtagacctgcaggtgctgccccatgacctccaccaaagcccatataaggagcggagttgttaaggactgaagaaaaacttctctggagaaaaataaaattgcaattctactcaaaaacgacaccccccttctaggcgaactcaacnnnnnnnnnnnnnnnnnnnnnnnnnnnnnnnnnnnnnnnnnnnnnnnnaccgcctacccgtatagtggaacaaaaccaaccaatcgcgcttgtgctnnnnnnnnnnnnnnnnnnaaaaattcttttcttaaccccttttgtctggggggccggccggccccccgggcgcggtaatttacacccttgcggtaccaaccccttgtgtttccctaacgacaaaacccttctgcccccgcgagaacaagggggcccctggtgtccccctctcccccttgtaaaataaacaactcgcccgcgcgttgtggttaccccccgcagtttcttctttttacaccccatctttctacacacgcctattcctctttaggggnnnnnnnnnngcggggccccccttcccgcacgggggcgggcccgcagaaccgggaggccccgcggacccgtcaaaaattacaaccgcccccggccgctggtgtcccacaccagcgaagatttatgctttgtgcgccccgtctcttcataacattttctcgctcgcacacatatctgtggaaccattctctccccacccaccggggggtttggcgcagaatcaccccccacgatttccgccccgcggtcgatcaccaccccacacttctctcgcc

SEQ ID NO: 357618 - DNA, 678 bp, Homo Sapiens
  misc_feature (585)..(585): n is a, c, g, or t
  misc_feature (592)..(592): n is a, c, g, or t
  misc_feature (621)..(621): n is a, c, g, or t
tgaaccaccgtgcctggccttcattctcctctttctataacgcaatcttaggatgcaaaaccaagcaaagtctgaattaatctatctagaatagcaccgtggagtcacagccatggtcaggcccctccaaagaacagactggatttcggaacccatgtctctccctgccacaagcaactagtccatatgcaacttggaagcgagccactgtgggtcttggcttctttcttgcttcctcctcaatagttactgccactgatttagtgctaaagagataggaacatcacttaaaaccatctctacacataaatccacttagaataattttttcccctggaggatcgattattgaagtacaaggctttactgtttattctactgtagacaccacaggacaccatgttcttggttagaattgagtacttgagagactatatgaataattgcttgttgaacagtacacgtgaattatctctattttccagctaaagattgagcctaaaatgattagtatttttgtaattttgaatcatttgatccatttgaagttggattagtgacaaagtcttattcatttttcaagtnttagttntgagggcttctcccagaactagcagcaanccagcgttgctgctagataatattgcacctttaagctaacaagtaaaaagctgatcc

SEQ ID NO: 357619 - DNA, 1629 bp, Homo Sapiens
  misc_feature (1619)..(1619): n is a, c, g, or t
cggtccggaattcccgggatccagccctgggatggctccacccgcgctggctccaaaatagcgagggggcggggcccgggccgtgggagcgcctgaggggcaggagtccagtgttttagccttcgaaggaccatggtgcttccacgtcatcgtgttgtggcgctcccggctatggcagtaccgtagttttcctctcttctgcctgcggtgaccattgggctgtagggtgccccgaggcctccctggccccctcacgccggcagaatggcctcagcccgaggggccaagcagtcttcgccccgggtggggaccaccgcctaacacagaaacgtccacggtccgcgtggagacctcgtcccaccgcgtggagacgtcgtcccggcgggtggagacctcccagcgccgcagcgaggggccctccctcttccccctcgggaaagcggctccctcgcattcctcgaggcgtcctcccggcacgtggaatcctcctcgcagcgcacggaaacagacctcccgccacgtcagaacctctgtccctgagggtggagacgtctctgcactgcgcggagagcccgaccccgcgggccaagccggccgcccgccagaacgaaaaaacggcccgatgagatgctgcttcccaaaggccaccaaggggccagggccctcagccaggacagaaaggcctccagttgccagccagccagccagctgccaggtggaccaatcattttcggtttcatggaaacaaaccataaatcaatgtaagaaacagccaagccgcagtttctgaacacagccaacgtttactgaccgtcctgcgtcttggaccagcctacttttgacccagtgaactattttcacttgaagccagcacagaaggttttcaggcccaggatgctgtctaaatcgggttgatggacaaagagaggctgtttgagcctctgagccaggtgagtttgggatccacagccctcagaaaaccttcaccccttaggaacagagaccaaactgaaataatgacctgtggaatgattccatgcctgctaaaaactcgagggacaaggaacagactcataaattattaattggcctttgtttatgtttcaaagtaaatggtcgttttctttatgctaagtctttgtacctggcacccccatccatacacttttttaaggtaggttagatgtggttaaaaatgacagtaaacccaccagcaagcaaaaataatcttagaaagtgagaggaggtcactgaaacctggcctgaggtttgaagaagatggagaagagttatatttattgagaaccggctctggccaggcactagatgttcctccacttacgatggggttacctcccgttgaaactattgtaagttgaaaatatggtaatttgaaaatgcacttaatacccctaacctactaaacatcatggcttagcctagcctaccttaaacatgctcagaacacctaaagttgagcaaaatcatctaacagaaagcctgttttataataaaatgttgaatatctcatgtaatttattgcatactgtactaaaagtgaaaaagaatggttctatgagtacttacagtactatttctactgaatgtcacttttgtangattgtaaag

SEQ ID NO: 357620 - DNA, 1381 bp, Homo Sapiens; identical to SEQ ID NO: 97785

SEQ ID NO: 357621 - DNA, 1162 bp, Homo Sapiens
  misc_feature (991)..(991): n is a, c, g, or t
  misc_feature (1029)..(1029): n is a, c, g, or t
  misc_feature (1116)..(1116): n is a, c, g, or t
  misc_feature (1123)..(1123): n is a, c, g, or t
  misc_feature (1130)..(1130): n is a, c, g, or t
  misc_feature (1144)..(1144): n is a, c, g, or t
  misc_feature (1156)..(1156): n is a, c, g, or t
gccgcggccaacttctctggactggaccagaagtttctagccggccagttgctacctccctttatctcctccttcccctctggcagcgaggaggctatttccagacacttccacccctctctggccacgtcacccccgcctttaattcataaaggtgcccggcgccggcttcccggacacgtcggcggcggagaggggcccacggcggcggcccggccagagactcggcgcccggagccagcgccccgcacccgcgccccagcgggcagaccccaacccagcatgagcgccgccacccactcgcccatgatgcaggtggcgtccggcaacggtgaccgcgaccctttgccccccggatgggagatcaagatcgacccgcagaccggctggcccttcttcgtggaccacaacagccgcaccactacgtggaacgacccgcgcgtgccctctgagggccccaaggagactccatcctctgccaatggcccttcccgggagggctctaggctgccgcctgctagggaaggccaccctgtgtacccccagctccgaccaggctacattcccattcctgtgctccatgaaggcgctgagaaccggcaggtgcaccctttccatgtctatccccagcctgggatgcagcgattccgaactgaggcggcagcagcggctcctcagaggtcccagtcacctctgcggggcatgccagaaaccactcagccagataaacagtgtggacaggtggcagcggcggcggcagcccagcccccagcctcccacggacctgagcggtcccagtctccagctgcctctgactgctcatcctcatcctcctcggccagcctgccttcctccggcaggagcagccctgtggcagtcaccaagctcccgcgggggtacatctccattccggtgatacacgagcagaacgttacccggccagcagcccagccctccttccaccaagcccagaagacgcactacccagcgngagggggggagtaccagacccaccagcctgtgtaccanaaagatccagggggatgactgggagccccggccctgcggggggcatcccgttcaggtatctgtcagggtgatcgagcgggagggtcnacagcangagagangcactcactccctngccatcgtgtgnaacgtg

SEQ ID NO: 357622 - DNA, 782 bp, Homo Sapiens
  misc_feature (455)..(455): n is a, c, g, or t
  misc_feature (457)..(457): n is a, c, g, or t
  misc_feature (566)..(567): n is a, c, g, or t
  misc_feature (715)..(715): n is a, c, g, or t
  misc_feature (739)..(740): n is a, c, g, or t
  misc_feature (755)..(755): n is a, c, g, or t
  misc_feature (760)..(760): n is a, c, g, or t
  misc_feature (779)..(779): n is a, c, g, or t
ccccgatcttggatgaacagccaactaaatgcagtcctgaagaagatgaggaggacgaggaggatgttgatgatgaggaccatgatgaaggattcggcagtgagcatgaactgtctgaaaatgaggaggaggaagaagaggaagaggattatgaagatgacaaggatgatgatattagtgatactttctctgaaccaggctatgaaaatgattctgtagaagacctgaaggaggtgacttcaatatcttcacggaagagaggtaaaagaagatacttctgggagtatagtgaacaacttacaccatcacagcaagagaggatgctgagaccatctgagtggaaccgagatactttgccaagtaatatgtatcagaaaaatggcttacatcatggaaaatatgcagtaaagaagtcacggagaactgatgtagaagacctgactccaaatcctaananactcctccagataggcaatgaacttcggaaactgaataaggtgattagtgacctgactccagtcagtgagcttcccttaacagcccgaccaaggtcaaggaaggaaaannataagctggcttccagagcttgtcggttaaagaagaaagcccagtatgaagctaataaagtgaaattatggggcctcaacacagaatatgataatttattgtttgtaatcaactccatcaagcaagagattgtaaaccgggtacagantccaagagatgagagaggacccannatggggcagaagcgngaaancctcattaaagatactctnggt

SEQ ID NO: 357623 - DNA, 1371 bp, Homo Sapiens
agcggggtagtgctctatcttgttgccggaagtgggaagagagaaaggttgtgatggcggctatagctgcatccgaggtgctggtggacagcgcggaggaggggtccctcgctgcggcggcggagctggccgctcagaagcgcgaacagagactgcgcaaattccgggagctgcacctgatgcggaatgaagctcgtaaattaaatcaccaggaagttgtggaagaagataaaagactaaaattacctgcaaattgggaagccaaaaaagctcgtttggagtgggaactaaaggaagaggaaaagaaaaaggaatgtgcggcaagaggagaagactatgagaaagtgaagttgctggagatcagtgcagaagatgcagaaagatgggagaggaaaaagaagaggaaaaaccctgatctgggattttcagattatgctgctgcccagttacgccagtatcatcggttgaccaagcagatcaaacctgacatggaaacatatgagagactgagagaaaaacatggagaagagtttttcccaacatccaatagtcttcttcatggaacacatgtgccttccacagaggaaattgacaggatggtcatagatctggaaaaacagattgaaaaacgagacaaatatagccggagacgtccttataatgatgatgcagatatcgactacattaatgaaaggaatgccaaattcaacaagaaagctgaaagattctatgggaaatacacagctgaaattaaacagaatttggaaagaggaacagctgtctaatcccttcaagaactgtttatagaagcttgagaatggggtaaaaatttctgctagcaaaatcaagttctttttgaaattttatcagtaatccagaatttagtagtccatgccttctcactcagcatttagaaataaaaatgtggtttcttaaacgtatatcctttcatgtatatttccacatttttgtgcttggatataagatgtatttcttgtagtgaagttgttttgtaatctactttgtatacattctaattatattatttttctatgtattttaaatgtatatggctgtttaatctttgaagcattttgggcttaagattgccagcagcacacatcagatgcagtcattgttgctatcagtgtggaatttgatagagtctagactcgggccacttggagttgtgtactccaaagctaaggacagtgatgaggaagatggcagtggccaccggaggactggagcagtccctcctcatggcggcctgtgaccaaggtcggggaggagtggagctatccttccatgatctgatcatgtacagttccctttttaaaaagcaataaatgcttgggattagaaaaaaaa

SEQ ID NO: 357624 - DNA, 1978 bp, Homo Sapiens
  misc_feature (1218)..(1255): n is a, c, g, or t
  misc_feature (1279)..(1279): n is a, c, g, or t
  misc_feature (1289)..(1305): n is a, c, g, or t
  misc_feature (1816)..(1882): n is a, c, g, or t
  misc_feature (1924)..(1924): n is a, c, g, or t
  misc_feature (1946)..(1946): n is a, c, g, or t
  misc_feature (1972)..(1972): n is a, c, g, or t
  misc_feature (1977)..(1977): n is a, c, g, or t
ggctatgaacgggtaaaaaagaggctggtacggccggaatcccgggatatcgtcgacccacgcgtccggttaacagtactgtctaggctgtgcaatatattctctttcaatgtaccttccttcacctcgtcgtatatatcctcgataagtattaaaacagtatttgagtttaaaagagtttgtatatatttaaatgaataactttttatactctttgttacatgtttgtatcagtatttagtggaaaaccatttgagttgttttgggttagaatttttctttttgtactgtttctttaaaacagagttcttagtaacaggggcagttcctgaattcaaataaaccattttgtatgtttggattttgaatgggttaactaattacaggctaaaataatgccttttttagtgtttttaatttttagaattcactacataaattgtaagtaattgtgggtctcaaaaacactaggaacttttaagtgtcttagcacttcctcgatgtgcctgccctgagggagtgagttcacatttgagacaactgcactccagtgtggacgtgcctttgtcttcaggccatgccgaagggtgtttaaagcagtcttgcaggtcgctcctttcccagccgtggataaaaactgaagctaggaatctaataaggaatgctgatttcctcagttccattttgaggaatggggaaggctattctaaagaaaaaaatgggatttgttttctcggcagatctgcaaggctggctttaagagcacaaggagggaaagtaacgaaagggctggactactataaaagttacaaatacgtagttagaccaatagatttatatagtcaggtttttgtcatgtaatttattaactaactattacagaaacacagctaagaatatcaagtatttctctggctcttgaccagaaaaaaatcagttgacttaaccctttgctgtcaaaagagttggcgtttcctgttctgggtgctactgccaaacgttatggtacttagagtcgggatgcacaacttcaaccaccgacttatcaatgcagccgcctgtgtattgcaattggccgttaccttaagcactgagccacccgggtttagttcagccatttcaagaagtatatttaacgtcggtagttctgctttattaaaatgcagcagaggtactcttctgtcccttccgttttatagttctctgagagagttctannnnnnnnnnnnnnnnnnnnnnnnnnnnnnnnnnnnnnatcttgtatttacccccgcacctnccccgtaccnnnnnnnnnnnnnnnnnaagaaaaggaattcttttgtgtatatatagatacttgcatgatatactgtagtcaatgttcggttcctcaaaaggtcttgctgctgtcaggtgttatgcactccatccatcataactgtatgaaacacatttcatatgtaaataaacgtgggacatttggcccttgtgcttctgtgagagaattattgatggtgggtctctgacatctttgtgaagtttgggaagtaattaattgcagcgacaagctacagggtgttgcagaattcttcccactcagaagaatggcatattcgttctcattagtaatcagctattttgtcactttcttgttgactccatcagtacatgggtacaatccgagggtgtgaatttcagcttgaaattccattgctgttccttgttttgtttgtattgctctaagttgtattcataatagcactttcatatgtttctgcatttgaaccttgcaataagcctgtgtggtaggccacataggtccgaataacctagnnnnnnnnnnnnnnnnnnnnnnnnnnnnnnnnnnnnnnnnnnnnnnnnnnnnnnnnnnnnnnnnnnntttgcatattagaacccaaatattttgctctctaaatctaangctcgctctatgtggttatgtncctattgacaaatattcatttattcnacaant

SEQ ID NO: 357625 - DNA, 785 bp, Homo Sapiens
  misc_feature (359)..(359): n is a, c, g, or t
  misc_feature (448)..(448): n is a, c, g, or t
  misc_feature (496)..(496): n is a, c, g, or t
aaatgacagatgccaccaatgaggaggaaacagaaataaaagaagacactaaggtccccagtcccaagcggaagttggaagaaccagttctggagttcaggcctccccgaggagcaatcactcaaccactgaaaaagctgaaaatcaatgtttttaaggttcacaagtgtgccgtgtgtggcttcaccaccgaaaacctgctgcaattccacgaacacatccctcagcacaaatcggatggttcttcctaccagtgccgggagtgtggcctctgctacacgtctcacgtctctctgtccagggcacctcttcatcgtacacaagttaaaggaacctcagccagtgtccaagcaaaatgngggctgggggaagataaccaacagggaggaacaaacccagccacgaggatggaatcccctgatgggcgccgtgttcagacagaaagtgncaaagtgttgcgcaaaaacttttgaaactgaagctgccttaaatactnacatgcggacacacggcatggccttcatcaaatccaaaaggatgagctcagccgagaaatagccacagatgctccatgaggaaaatccctgtccacattggaataaaaaagacatttttgttacaaagtttgcagtataatgagagttacacagtactgtctagggctgttgcaatatattctctttcaatgtaccttccttcacctcgtcgtatatatcctcgataagtattaaaacagtatttgagtttaaaagagtttgtaatatttaaatgaataactttttata

SEQ ID NO: 357626 - DNA, 434 bp, Homo Sapiens
  misc_feature (37)..(37): n is a, c, g, or t
aggcccctccaccaaaaccccaaaagggatgaagccncagcccgagaaaagagcccacagaggcccccatgaggaaaacccccgtcccacattggaataaaaaagacatttttgttaacaaagtttgccagtataatagagttaacagtactgtcctaggctgttgcaatatattctctttcaatgtaccttccttcacctcgtcgtatatatcctcgataagtattaaaacagtatttgagtttaaaagagtttgtatatatttaaatgaataactttttatactctttgttacatgtttgtatcagtatttagtggaaaaccatttgagttgttttgggttagaatttttctttttgtactgtttctttaaaacagagttcttagtaacaggggcagttcctgaattcaaataaaccattttgtatgtttgg

SEQ ID NO: 357627 - DNA, 928 bp, Homo Sapiens
  misc_feature (919)..(919): n is a, c, g, or t
  misc_feature (923)..(923): n is a, c, g, or t
  misc_feature (926)..(927): n is a, c, g, or t
gaactatttagtctcctgtttgtatgcgtttgctaatggtagctaatataaccagtttttgttgtaaatgcaccaattctgaaggcactttatgtactacatggaggtcatatctggttttgtttttatatttttatcatgaacattaaatgtgatgatgatttcttttccctgcacacatctttccggtgcaatatctatcaattgtgaatctggctgctggtgtataaaaacctggatgtaaagctgagcctacagacctgtcctcaccaactgttttgtgatttctactcaactacaaagatttatttaatgtactcttaatctaactgagttttgttaccaatgacctgttgcatgcttcaataccgtgtactgcctgagttgtgcctcttgtgtgctagattaaaagtgagacagagacttgacttgatcctctgagctcaagctattgagctggtagtggcagaggactgagggtacctgcacagtttgattcttttccacgtgtaagtctccattgcagaattgtcgtgctttgagaaaacacctgaggcagtgtgggagttgaacgaccctgctgtcctttttaacctgtgttgtcctagaccctgtcggggcagtcaggggacactagagatttgatctcatgcgagtcatcaataggacaaaaaagttgtggtttggggaggtctgtttgttacataaaaaggacctttcggtgtaagaaattgccgtttttaccctgccctggctggcatgtgagaagccatggaaggttgtggttgtaaatgagttgtctaaaggggtgcagaggcctgaggtttctaaaagaaggtagatttctacagagctgagtgttggttcctttttcttattggttgaaaattacctggtagtgatcagaaaacttagatgntatntannt

SEQ ID NO: 357628 - DNA, 1466 bp, Homo Sapiens
  misc_feature (831)..(848): n is a, c, g, or t
  misc_feature (1018)..(1018): n is a, c, g, or t
  misc_feature (1038)..(1038): n is a, c, g, or t
  misc_feature (1055)..(1055): n is a, c, g, or t
  misc_feature (1059)..(1059): n is a, c, g, or t
gacgaagtggagttgttcatgtcggccttgggtgattggaatgtgaatgactgaagacagctttctatttacaagaccggctctggcccaaaccaccccgtcattcagtgtttaggaaagcttgtgctattcatggccccgaaagcgtatcggtttattcagtttgtccaagggcatcgcaagtacttataaaggattcccgaacttaatgtttcaattggtttcagctgtttcaatagagcaatgggccagtcctgagaaacggcacagagttcaccacagcctttatctgccttgatttacttccaaaataaacctttgaagatttacgagagaaacttctcatggccgtggaaaatgctcaaggatttgaaggggtggattaagcaccctgtgcctcgggggtggttgttcttcaagcaagttctgcttgcacttttgcatttgcctaacagacttttgcagaggcgatggcagagagcagctgcaggcatggtccctggagccgagccttcaccacgcactcgtccaagttcggatgcgggaacctggtcccagcttgagttcctgcctttcccaccacaaattatcaactggttgatgtgtacactaattacatttcaggaggacttaatgctatttatgttgtgcctctgcaggcaaagcccttaataaatattttacatcctttctaatgacaatgaatggaattaatcactcaacaggtatagtattacgactcatgtttactttttaaaatgatttagaccgattttcagattttatttcgttatgattaaagatgtctcatgtacttggaaaagtgagcannnnnnnnnnnnnnnnnngtatttcactttcataccaggcttaatgtcaatgacatttttatttttgaagtactctgacacctccaccctctactttattagaattggaaggcaaatttttgtccaaaaacctacagacaagtactttgagagaatttccaatataatattagacataatgataattntttccatactcagaatgaanaactggatattacgttnttgntttggggtttttttgtacaaatttagctaatagctacaggctgagagaaatgtaacatagcatgacaaattttgtgttgacttgaaaggaatcacaccattattccttagaaggaattacatgtggtctaacacatttgagaacagggttggactcccatttctaatccgagaaattacttaacccttcctgggcgctgtacagtcatcttttattctatttcctctttgctgtttgtagtagagacattttgaatgaaacttggcactgcttgattcaaaactgtggaaaccagatctgtttagtctcctgtttgtatgcgtttgctaatggtagctaaataacccagtttttgttgtaaatgcacccattctgaaggcactttatgtactacagggaggtcatat

SEQ ID NO: 357629 - DNA, 600 bp, Homo Sapiens
  misc_feature (532)..(532): n is a, c, g, or t
  misc_feature (557)..(557): n is a, c, g, or t
ggacctcatgttctgcatagacgaagaaaactttggacagacatatcaagtggatttgaagcccaatgggtcagaaataatggtcacaaatgaaaacaaaagggaatatatcgacttagtcatccagtggagatttgtgaacagggtccagaagcagatgaacgccttcttggagggattcacagaactacttcctattgatttgattaaaatttttgatgaaaatgagctggagttgctcatgtgcggcctcggtgatgtggatgtgaatgactggagacagcattctatttacaagaacggctactgaccaaaccaccccgtcattcagtggttctggaaggctgtgctactcatggacgccgaaaagcgtatccggttactgcagtttgtcacagggacatcgcgagtacctatgaatggatttgccgaactttatggttccaatggtcctcagctgtttacaatagagcaatgggggcagtcctgaggaaactgcccagagcttcacacatgctttaatcgccttganttacctccatatggaaacctttgangattacgagagaaacttctcatggccgtgggaaatgctcaagg

SEQ ID NO: 357630 - DNA, 1818 bp, Homo Sapiens
  misc_feature (36)..(36): n is a, c, g, or t
  misc_feature (1371)..(1371): n is a, c, g, or t
cacacgcagtttggtcaaaccccgcaggtgtttttntaaaacacgaggcagtactcactaacggttctaaggtagcgaggctgggtggcgaatcggcacgaggccaaaatggcggacacaatgagccggcgacgcgccggttgtccgtgaggtggctgtgaggacgaacggtcggcgaggctccacagtccaggcagaagacctcgacaagcaggaagaagaggaggaggcggccaactgttggcgacttcccgctagcctgctggctgcggtgcccgccctgctgggtttggccctcggcagcccgcccgctcgccgccgggccctggcccggcctgcgccgccgctgccttccccagccgccgccatgaagctgaccgacagcgtgttgcggagttccgcgtcgctaaggtgttccgcgaaaactcggacaagattaactgcttcgatttcagccccaacggcgagacggtcatctcgagtagcgacgacgactccatcgtgctctatgactgccaggagggcaaaccaaagagaaccctgtacagtaagaaatatggtgtggacctcatcagatacactcatgcagcaaacacagttgtttacagctctaacaaaatagacgatactattcgttacttgtccttgcatgacaacaaatacatcagatactttcctggacatagcaaaagggtggtggccttgtccatgtcacctgtggatgacactttcatttctgggtctcttgataagaccattcgactctgggatctccggtctcctaactgccagggcctcatgcatctgcaggggaagccagtttgttcttttgatccagaagggttaattttcgctgcaggtgtcaactctgaaatggtcaagctttatgaccttcgttcttttgataaggggccatttgctacctttaagatgcagtatgatcgaacttgtgagtggacaggacttaaattcagcaatgatggcaagctcatcctcatttccaccaacggcagcttcattcgtctgattgatgcattcaaaggagtggtgatgcacacatttgggggttatgccaacagcaaagctgtcacactggaggcttcatttactccagactctcagtttattatgattggttcagaggatggcaagatccatgtctggaatggagagagcggtataaaagtagctgtgttggatggtaaacacacaggcccgattacctgtttgcaattcaaccccaagttcatgacttttgccagtgcgtgttccaacatggccttttggttgcccaccattgatgactgaccctgttgctgcttggctatttctgtatagtgagggcggccagcaggaagaaactcagagggnaactgagaaaaaagtgggatggggatcatttgactgggctggaaaaacacccttttaaatggccttccccatggatgtgctgtacatctgctcaaaagaaaataattactttgatgagcgtcttcaaaaggactcttggtgcaacagactcaattggaactcagcttttctaactgtcactgcacccaagctctgctggaggagtgaccagactcacgatttggtatagtggggctctcaagcatcttcaatttgaatgtacatgctgctgaggagccggtgaagtcatcagttccgcacatcccttctaccctccaactgcatgggaagccaaagtcctggttttgaaatgcttgggcagctcagccgcttgccctcaccctgcatgtcttgttactgggtctccctgtgtacttgtggcattatccacaaccatcatgttaatca

SEQ ID NO: 357631 - DNA, 514 bp, Homo Sapiens
  misc_feature (46)..(46): n is a, c, g, or t
  misc_feature (333)..(333): n is a, c, g, or t
  misc_feature (335)..(335): n is a, c, g, or t
gaaggcagactgggtccctgtaaagaccataggacaaatcagtggntgccatcccacagggttgatggctgaatgtgcttcaaagcacctttcctttactccaaggatcactccaggacagtttaggaatctacacggacagaggtaacctccattttttttatccagggttaacggtatccgcgacgagctggactcgccaggtacgggagattggggggatgaaggaccacagtcaacctgattcgaacgacgaaaactcgttgtttgacagatcccgaaacggctcctggcccagggccgtcgcagtgacaactcgagtggttttttgananctggcggcgccaggaggacccgcgcggccccggcggacgcgagcggagcaggcaaggtctctctaaggaggcccctcggcggcctggggcaaaccggtactttcgccaccccttccaccgctggctcccacccgtcatccgacctcgccaaagctgcattaagcccaaacgccaccacg

SEQ ID NO: 357632 - DNA, 1146 bp, Homo Sapiens
agcggggcgatggcagcggaccctgagcgagcttgagggctcggacccagctccctcccgcgaaaccttgggcggatccggcgctgcggccccagctcgctccgctcctgctccctccccggccgctgcctgggcggaggcagaggcagaggcccgggctggccgccctgctcgtgccccagctcggccccggacggccaggctgctgtgcagagaggaggccgagtcggtagtgaaaagagaatactgaaaaataggatctcaagatgagtaaaaagcccacaaatcgccctggaatcacttttgagattggtgctcgtttggaggcactggactacttacaaaaatggtatccatcacgaattgacaaaaattgactatgaggagggcaagatgctggtccattttgagcgctggagtcatcgttatgatgagtggatttactgggatagcaatagattgcgaccccttgagagaccagcactaagaaaagaagggctaaaagatgaggaagatttctttgattttaaagctggagaagaagttctggctcgttggacagactgtcgctattaccctgccaagattgaagcaattaacaaagaaggaacatttacagttcagttttatgatggagtaattcgttgtttaaaaagaatgcacattaaagccatgcccgaggatgctaaggggcaggattggatagctttagtcaaagcagctgctgcagctgcagccaagaacaaaacagggagtaaacctcgaaccagcgctaacagcaataaagataaggataaagatgagagaaagtggtttaaagtaccttcaaagaaggaggaaacttcaacttgtatagccacaccagacgtagagaagaaggaagatctgcctacatctagtgaaacatttggacttcatgtagagaacgttccaaagatggtctttccacagccagagagcacattatcaaacaagaggaaaaataatcaaggcaactcgtttcaggcaaagagagctcgacttaacaagattactggtttgttggcatccaaagctgttggggttgatggtgctgaaaaaaaggaagactacaatgaaacagctccaatgctggagcaggcgatttcacctaaacctcaaagtcag

SEQ ID NO: 357633 - DNA, 1114 bp, Homo Sapiens
  misc_feature (7)..(7): n is a, c, g, or t
  misc_feature (16)..(16): n is a, c, g, or t
  misc_feature (28)..(28): n is a, c, g, or t
  misc_feature (31)..(31): n is a, c, g, or t
  misc_feature (61)..(61): n is a, c, g, or t
  misc_feature (71)..(71): n is a, c, g, or t
  misc_feature (82)..(82): n is a, c, g, or t
  misc_feature (833)..(857): n is a, c, g, or t
  misc_feature (859)..(976): n is a, c, g, or t
gctcagntcccgcganccgtgcgccatntgnacgtctcttctgctcttcctccagccggtnctcgtggcgngcagctcctcntgggcaacctgcagcttctcccgctcctgcggcagctcctcggccttgctgctgggccacctgcagggctgtggaccaggttgctcttctccctggaactttcagctggcaaaagtgcagggcggagagaatcagggcaagcgagcgtggagtcgtctgagcaggccggggaggggcctctgcggggcgaacggcctcggcccggcgaggagcgccgcggtggagacggggtccgctggcccgagagcccccgcaggctgcggtcggacgctgttggacgcaggctgccgctctcagcgtcagacaggacggcctgtgccaggtcccttaggctccgctgtagcccctctccatcctctgtctccagggccgcctgctcctgtagccgcagggattccagggcctcaagcttctcggtgaggtccttgtcgacctgatccttctccagattctgcttctgaagacgcttcactgccaggcccagctctgtcactcttctgcagtgacgcctgcctcatgcagcacccaccagggaccctcctggcactgaggtcagccttgtccaggtcgctttgcatctgctgctgggacaggtccttctcgtggagcaccttgtcccgcagctgctcctccagctgggcctgcttctccagggctggctcgacccggctctctgccagccgcaggcctgtgctcattcccaggccggcctcctggacagctcccctcccagctgcagcgggtccaaaannnnnnnnnnnnnnnnnnnnnnnnncnnnnnnnnnnnnnnnnnnnnnnnnnnnnnnnnnnnnnnnnnnnnnnnnnnnnnnnnnnnnnnnnnnnnnnnnnnnnnnnnnnnnnnnnnnnnnnnnnnnnnnnnnnnnnnnnnnnnnncctggatttctcagcatctgaggtcagcctacagctcttgcgggagaaagacacgccggcccccttggatgccatccttcgtctctcatgggcagccagtggtcctggaggcccgagcctcggccgccacgacccgct

SEQ ID NO: 357634 - DNA, 1168 bp, Homo Sapiens
  misc_feature (309)..(434): n is a, c, g, or t
  misc_feature (1038)..(1046): n is a, c, g, or t
agcgggaggctcagcgcgcaagcgtgcgcgtgatttggccctgaacggacgccgtagccaagaggttgggcggatgttgtgagccgggtcgctgcggccgaggctccggcccccaggaccactggctgcccatgagagacgaaggatggcatccaagggggccggcgtgtctttctcccgcaagagctgtaggctgacctcagatgctgagaaatccagggtcacaggcattgtgcaggagaagctgctgaatgactacctgaaccgcatctttcctcttctgaccatgcacccccagcagccaccggnnnnnnnnnnnnnnnnnnnnnnnnnnnnnnnnnnnnnnnnnnnnnnnnnnnnnnnnnnnnnnnnnnnnnnnnnnnnnnnnnnnnnnnnnnnnnnnnnnnnnnnnnnnnnnnnnnnnnnnnnnnnnnactgaaaccacggtaaacccctggaccccgctgcagctggaaaggggagctgacccagcacgccggccctggggccctcaaccacccggcctgccggatggtaagaaaagccgggcccgcgcccacccccttgggaccaaatatggtccccacccttggacggacccaccttgcggggaacaagggggcttccaaacaaagacaggtacccttgtcccccactccccccacatggcaccaacccaacccgttaatacggacttgaaccatccaggcgccccgaaggggcgtccccttcggtggggctagcctgacactcaaagcccaagcgggtacgagcggcggtgcaagcggccggggataaggcgctggcatcccgcgcggaagtcgcccccgccactctctcaataccgcacctttatattcgggacccgacgcgtacgcccattccccccaccgcgcgctttctccatcatcgagaagaacaattatagtggcgtggcgcccctccccccatctaactcctttatcgcgctgctctcataggcagacgagctgggacaagttcttgtgggagaagcacgaatacgtacaagcgctgggnnnnnnnnngccgatacacccaccactaaatcgcgctccagaaatagggacggaaccgcggaactccctcgagggcgcgggccgagtttgatttttcgcacaaggggtctggcgggcgcaccaacccgccg

SEQ ID NO: 357635 - DNA, 942 bp, Homo Sapiens
  misc_feature (444)..(444): n is a, c, g, or t
  misc_feature (469)..(469): n is a, c, g, or t
  misc_feature (486)..(486): n is a, c, g, or t
  misc_feature (519)..(521): n is a, c, g, or t
  misc_feature (529)..(549): n is a, c, g, or t
  misc_feature (563)..(563): n is a, c, g, or t
  misc_feature (571)..(571): n is a, c, g, or t
  misc_feature (574)..(574): n is a, c, g, or t
  misc_feature (579)..(580): n is a, c, g, or t
  misc_feature (582)..(582): n is a, c, g, or t
  misc_feature (595)..(595): n is a, c, g, or t
  misc_feature (646)..(646): n is a, c, g, or t
  misc_feature (648)..(651): n is a, c, g, or t
  misc_feature (688)..(690): n is a, c, g, or t
  misc_feature (739)..(739): n is a, c, g, or t
gccattccacatatatagactcagttggcccgtcaggatatcgcctgattgttgaggactgtatcacagtgatatgtatttgtgtaatgctcatttgttggttgtacatctgaaccttacctcaacatggcaagtgctgccttacctaagataggatcatacaactgatcaggggattgaatttgatcatgcaacaacaggtgactctgaattttattcagtagttgtcattgctctgtggtttagtaccatagaaaaaggaaatccccccttttcatgtattccttggtaagaggacatgactccggtaagggagagggaaagggagatgcttcctgttttgaactgcagtgaattcacggttcctgtttcaccaccccaaaccttatggcgcacccacacccacatccctctcgccggccaccgccaaaggtcgcgggtttngtacactccagcccactcacgcatngaaaagggccccgtggngcctggggcgcgcccagtgaaaagatggggacnnngtaattgnnnnnnnnnnnnnnnnnnnnngcttcgcaaaaatnacaatggngtnactanngntaaagcttatttntcaattcataaaaaagacatttattgccagccaaagggaggagggcccccncnnnncccctattctcaatgttcgcttgaatcttttattatnnnttttaattctcccccatacccacttcctgatacttgggttctctttccngctcagggcccttcatttgtactttggagtttttctcatgtaaatttgtataacagaaaatattgttcagtttggatagaaagcatggagaataaaaaaagatagctgaaattcagattgaagaaatttatttctgtgtaaagttatttaaaaactgtattatataaaaggcaaaaaaagttctatgtacttgatgtgaatat

SEQ ID NO: 357636 - DNA, 941 bp, Homo Sapiens
tccatgcagtcaatctttattatagcagtattcgcatatgcacatcaagtacatagaactttttttgccttttatataatacagtttttaaataactttacacagaaataaatttcttcaatctgaatttcagctatctttttttattctccatgctttctatccaaactgaacaatattttctgttatacaaatttacatgagaaaaactccaaagtacaaatgaagggacctgagcaggaaagagaaccaaagtattattattgctcaagaaaggaaacatggcagagaaacaagcagaagcagctctggctgacagcctgagggtaaagagcactggagaagtaaagaaaaggaaaaggtcaccaccctgatctgacatgttgaattgagaggtaggttgtatgatagggaaggaatagggccagctgtggctgccagtagcagaatgtccaggttggaactctggtctaaagcctaggagagcagaacggtaagaggctacaaaataaaaacaaactggattatcaaggtggtcatactgagtaggcagggatggagatcttcaggctcccagccgggccccaatttacagtagagaggctcaagcagggatagggtagagcaagaaggactccagatcacagtcaaagtcgtcaaagggcatggtctccgctgaactgggctgggtagcttgtgtctccgtgacaaagttcactggctgcttctgtaggagctctgggtcgaaggccacaccccgaaagaaagggtggacctggaagtgatgcagataacgtagacgatggagggggttctggcataagagctgaaggaaaatagagcatgaaggatgagtgactaggacaggacaggcctgaacagaaaggatggaaaagaagaaagaagttcatggagctgtggagggtaggaataagaacccc

SEQ ID NO: 357637 - DNA, 684 bp, Homo Sapiens
  misc_feature (33)..(33): n is a, c, g, or t
  misc_feature (535)..(544): n is a, c, g, or t
tttggggaattgaggattggatactcttgtatntgtgaagttgccccaggtaacatttggacatgttcatcttattcttaggagggaaaaatcacttgccaaattaatacatacttcttagaccactgagttctagtttttattcacactacaacattctctttaacgatgttgcaggtattctcaattcccttttaggaaaaatgaaatgtgaggagaattctggttgtaatagatgacagtacatatgatctgcaggtttgggcatatgctttcatcattaaattatctgataaagttacaagtcacaaaggagaatgagaacttaatgattctattggatttaatatattagcaagaaaacatactatttacatatgtgtagcttagtaaggcattaacataagtacaaaaactatgaaacagatgcatatttcctcaacatactgtgtcaggtatactgttttataatttggttgttttagccttattgcacaccaactcccaaaatataggttactcttgttcaaaaggnnnnnnnnnnttgtgattttctttgagtggtatatgttattaattaccattagcatttgctcttataaagggcaatgattatagtagacaatattgtaactcacgtagacttgttgaatatgcaaactgactgtcaagtgcctcaaagcc

SEQ ID NO: 357638 - DNA, 1324 bp, Homo Sapiens
  misc_feature (1061)..(1061): n is a, c, g, or t
  misc_feature (1063)..(1063): n is a, c, g, or t
  misc_feature (1065)..(1084): n is a, c, g, or t
  misc_feature (1095)..(1179): n is a, c, g, or t
  misc_feature (1189)..(1201): n is a, c, g, or t
ctgtgaatattctcttcttaaatgagggttttaacaccatgacgtgtgatttccttattcgtaggtgttccagtagatcagtttgggtatttcgaggacaaaaataatttggttgttggggcttccttgtcaaagtggaacgtgcattcccccaattcgatgtcgggaatctgtattactttgtggtagcttcctgcaccaccagctcccaatatggggtacttctggtcacaagggaaaaaaagtcggaagtgtctttgatggaaacggtaataattaccattaagcatttggctctattcaaggcaaagattatagtagacaatacttgtaactcagtagacttgttgaataggcaaacttactgtcagagtgacctccaaaaaaatgaaaaagatagaatacactagtagttcatatcctcttcttgtaggaaaccaataatagccattgtggcaataattcatcagttgatttttaaagcttcatgttatgcagaaaaagaatcctgctgttatacatgtgacagtgactttgtgctgaaatttcagctattccagataaacattgtatatcttgtaaattaatgtttaaaggtagttttgttcttacagaaagtgttgattgccaggttgcttatagcactttaagttattctaaaaatgaaattataagccaaatatttggcttaagtagatttagttgtatagcacttacatatttagttcttttgaaagtttagataattatttaaagaaagcataatgctaatggaaaagaaaatctgatgttctattataatatgctattgctgaatatgaatagaaatacagggcatcatttccttgtctcattataagttagtaacaatatatagattaaatgtttacaatatagggaattgtaaataaatatatcagtttttttccccttcggtcttccacagcagtattattgtctttgtggagttgactaatgataatttaaaaatcctgtaatggatttctactaaaataaggtcatagtggcatataccaaataaaatcaaatacagaaatacnanannnnnnnnnnnnnnnnnnnncaaaacaacannnnnnnnnnnnnnnnnnnnnnnnnnnnnnnnnnnnnnnnnnnnnnnnnnnnnnnnnnnnnnnnnnnnnnnnnnnnnnnnnnnnncttggggcgnnnnnnnnnnnnntcaaaaaattttttaaacacctttttttggggcggggggcccccaagaggaaagggaacgggggcaataacgtgtttcccaagaaaaccctgggccagaaaaaagggggtggatttccccccc

SEQ ID NO: 357639 - DNA, 915 bp, Homo Sapiens
ataactgtaataaatggtgatacagactaattttaaaggcacaagtgacatgttacactgtattgcttcttgaactttccaaacaatgcttgtacatgtcaggtttgggccattctcctgctaagacagagagcattttaagttattcaaaaccccagatttcaatatcttggataaagaaatcttccttcttagaaagtgtacgattcccaaacgttttacaagaatggcttcttccatggtagagatctccatcaagccaaagcgcaaattctcctcctccaccaccgaaagctagtgaatccatgtctcctttgataaaaaacatattatctcctgtccacttaaagacctcaaactccggacagaatgtaaaaacaaaggtctctccagtaccataaaagccatcactcactttcagtggctcagatgctaacgcaccaaaaacctgtccatcactgtctttaatcaccatcagcactggggtgtctaaacctgtcattgttcgataaagagttttcaagcttgtgccatgttttccagtaccataaacaagagtccatggatagccaattgttcttggtggaagatgcttggtaagcttttcaatttgatctggcagtaaaagttcactgggatcacttaggtttggtcgaaaagattcagactccaggtctgctttcactgtagcaacctgctttgaatttatgtcttcccttgtagtaatcagagtgtatttatgattaattggttgatgtcttctcccttttttcccataccagagacgagacatttcctttccagggcaaattaagttacataaaatcacgtaagaactgttttcaaaagcattcttcctctgtcaaagataaatttccagcactagagccttactacagtgacaaaacagtttgc

SEQ ID NO: 357640 - DNA, 1247 bp, Homo Sapiens
  misc_feature (1138)..(1138): n is a, c, g, or t
  misc_feature (1165)..(1165): n is a, c, g, or t
  misc_feature (1194)..(1194): n is a, c, g, or t
  misc_feature (1224)..(1224): n is a, c, g, or t
agcggagcactgaggagtctctttctgaagatgtgttcacagaatcagaactttcccctatacgagaggagcttgtatcttcagatgaactgcgacaagataaatcttctggtgcgtcatcagaatctgtgcaaactgtcaatcaggctgaagtagaaagtctgacagtcaaatcagaatctactggtactcctggtcacttaagatctgatactgaacattctacaaatgaagttgggactttatgtcataaaactgatttaaataatcttgaaatggccattaaggaagatcagattgcagataactttcaaggaatatcaggtcctaaagaagacagcacaagtataaaaggtaattcagaccaggattcttttcttcatgagaattcgttacaccaagaagagagtcaaaaagaaaatatgccttgtggggaaacagcagaatttaaacaaaagcaaagtgttaacaaaggaaaacaaggaaaggagcaaaatcaggactcacagacagaggcagaagagctacgcaaactttggaaaacccatactatgcaacaaactaaacagcaaagggaaaatattcaacaagtgtcacaaaaagaagctaagcataaaattacatctgctgatggacacatagaaagttctgcacttttaaaagaaaagcaaaggcatcgattacataagttcttgtgtctcagagttggaaaaccaatgaggaaaacgttggtatctcaagcaagtgctacaatgcaacagtatgcacagagagataagaaacatgaatataggtatgctgtgccacaagaaaggacagatcacttgtatgccttcttcattcagtggagtccagaaatatactgcagaagatactggcgaatataccagagaacctggactttatacgtagtaaaaacacgatcgaggagtcctgaaacaatcgaggattctagtaatcaagcagcagccagagaatgggaggtagtgtcagtggctgagtatcaccgcagatcgatgctctaaatactgaagaactgcgcacactctgcagacgcctccagattacttacaaggggaagacattaaatttcaaaggcaggttgctacagttgaaaggcagacctgggagtcttgantctttttcgacccaaaccttaagtggntccccagtggaactttttacttgcccagntcccaatttggaaaagcttttacccaggcntctttcccacccagggacctttg

SEQ ID NO: 357641 - DNA, 847 bp, Homo Sapiens
  misc_feature (11)..(11): n is a, c, g, or t
  misc_feature (16)..(16): n is a, c, g, or t
  misc_feature (24)..(24): n is a, c, g, or t
  misc_feature (71)..(71): n is a, c, g, or t
  misc_feature (100)..(100): n is a, c, g, or t
  misc_feature (172)..(172): n is a, c, g, or t
  misc_feature (175)..(175): n is a, c, g, or t
aggtggatctntcgcntgagacancatcagctgattcacactggagagaagccttataaatgcaacaagtntacaaaagcctttggttgtagttcacggntttttcgccatcagagaactcacactggagaaaaaccatttaaatgtgatgagtgtggcaaaggctttgttnagngctcacaccttattcagcatcagcgaatccacactggagcgaacccctatgtgtgtaatgactggggaaaagccttcagtcagagtcccagccttatttaccaccagagaatccataaaggagagaagccctacgaatgcctccaatgcggaaaagccttcagtatgagcacacagcttacaatacatcaaagggttcacactggagagaggccctataaatgtaatgaatgtgggaaagccttcagtcaaaactcaacccttttccaacaccagataattcatgcaggggtgaagccctatgagtgcagtgagtgtggaaaagccttcagccggagctcatatcttattgaacaccagagaatacacactagggcccagtggttttacgaatatgggaatgccctggaagggtccacctttgtgagccgtaaaaaggttaatactataaagaaactgcatcagtgtgaagactgtgagaagatatttaggtggcgttcacacctaattatacaccagagaattcacaccggggagaagccttataaatgcaatgactgtggcaaagcttttaatcgtagctcaaggcttacccagcatcaaaaaattcacatgggatagaccacttacatataaatgtgtatatatgtgaataaacctatagccttaactt

SEQ ID NO: 357642 - DNA, 1224 bp, Homo Sapiens
  misc_feature (1196)..(1197): n is a, c, g, or t
agcgggggagtgacgtcggagtgtcaacatgcaagatggcggcccatcaccggcagaacacagcagggcggaggaaagtgcaggtttcctatgttattcgagatgaagtggagaagtacaaccgaaatggagtcaatgctctgcagctggatccagcactaaatagacttttcacagccggtcgagactctatcataagaatatggagtgtcaatcagcacaagcaagatccatatatagcatctatggaacaccatactgattgggtaaacgacattgtactctgttgtaatgggaaaacattaatatctgcttcttctgacacgacagtaaaagtatggaatgcacacaagggattttgcatgtcaacattaaggacacataaggattacgtaaaggccttagcatatgccaaggataaagaactagtagcatcagctgggttggacagacaaatattcctttgggatgtgaatactctaacagcattgactgcctcaaataacactgtcacaacttcttctttaagtggaaacaaagattccatttatagcctggccatgaatcaactgggaacaatcattgtatcagggtccactgaaaaggtgttacgggtatgggatccaagaacatgtgcaaaactaatgaagcttaaagggcacacggataatgtgaaggcattgctattaaacagagatggcacgcaatgcctgtcaggcagttctgatgggacaattcgcctttggtcccttggccagcagagatgtatagcaacataccgagtccatgatgaaggtgtttgggcgctgcaagtcaatgatgccttcacacatgtgtattctggtggaagggacaggaagatttattgtacagacctaagaaaccctgacattcgggtgctaatttgtgaagaaaaagcaccagttctcaagatggagcttgatagatcagctgatcctcctcctgcaatttgggttgcaacaactaagtctacagtaaataaatggactttgaaaggaattcataattttagagcctctggagattatgacaatgactgtacaaatcctataacacctctttgtacacaacctgaccaggttattaaagggggtgctagtattattcagtgccacattcttaatgataagagacatatattaaccaaagataccaataataatgtggcatattgnngatgtattgaaggcatgtaaagttgaa

SEQ ID NO: 357643 - DNA, 580 bp, Homo Sapiens
agtcagttctctgagggacactcttcagctgaccatgtgacatcatcccatctctttcttcagaaattccctggattaatgtggactcactgtcaatgttggtctcaacatctttacagacgtttttggtcctctctgctgggggatcatcctgtgcttccaggccccaagccatgtcccctctctccaaaagtgagatcagtgcaggtttgggaactgggtaccccaaagcagtcaggttcccaaaattctccaacatcacacttctgtacagggccctctgggcaggagaaaggccagtccattctgtcttggtgaagtgcacagccacatcctcgaaggtcaccatctcctaaaacaacaggttcctgctgccccagagccaatcctctggctccgggccagagtgtggggcagaggggacaggtagggacttgagggaaagtcctggtattgagctttcagaggcatggctgccatgacctggtctccctcttagcaggcaaaggctcaggaaaaacagaaagcggtgcgtgaacggaagtgccgggagaaagggattaatttaattaaggatcct

SEQ ID NO: 357644 - DNA, 1041 bp, Homo Sapiens
  misc_feature (3)..(3): n is a, c, g, or t
  misc_feature (10)..(10): n is a, c, g, or t
  misc_feature (14)..(14): n is a, c, g, or t
  misc_feature (17)..(17): n is a, c, g, or t
  misc_feature (20)..(20): n is a, c, g, or t
  misc_feature (25)..(25): n is a, c, g, or t
  misc_feature (31)..(31): n is a, c, g, or t
  misc_feature (34)..(34): n is a, c, g, or t
  misc_feature (36)..(37): n is a, c, g, or t
  misc_feature (41)..(41): n is a, c, g, or t
  misc_feature (51)..(53): n is a, c, g, or t
  misc_feature (63)..(63): n is a, c, g, or t
  misc_feature (66)..(66): n is a, c, g, or t
  misc_feature (68)..(68): n is a, c, g, or t
  misc_feature (83)..(83): n is a, c, g, or t
  misc_feature (87)..(87): n is a, c, g, or t
  misc_feature (95)..(95): n is a, c, g, or t
  misc_feature (98)..(98): n is a, c, g, or t
  misc_feature (105)..(105): n is a, c, g, or t
  misc_feature (119)..(120): n is a, c, g, or t
  misc_feature (124)..(124): n is a, c, g, or t
  misc_feature (136)..(136): n is a, c, g, or t
  misc_feature (149)..(150): n is a, c, g, or t
  misc_feature (152)..(152): n is a, c, g, or t
  misc_feature (165)..(165): n is a, c, g, or t
  misc_feature (170)..(172): n is a, c, g, or t
  misc_feature (174)..(174): n is a, c, g, or t
  misc_feature (178)..(178): n is a, c, g, or t
  misc_feature (181)..(182): n is a, c, g, or t
  misc_feature (261)..(261): n is a, c, g, or t
  misc_feature (263)..(263): n is a, c, g, or t
  misc_feature (271)..(271): n is a, c, g, or t
  misc_feature (289)..(289): n is a, c, g, or t
  misc_feature (293)..(293): n is a, c, g, or t
  misc_feature (303)..(303): n is a, c, g, or t
  misc_feature (312)..(312): n is a, c, g, or t
  misc_feature (314)..(314): n is a, c, g, or t
  misc_feature (336)..(336): n is a, c, g, or t
  misc_feature (340)..(342): n is a, c, g, or t
  misc_feature (350)..(351): n is a, c, g, or t
  misc_feature (360)..(362): n is a, c, g, or t
  misc_feature (366)..(366): n is a, c, g, or t
  misc_feature (375)..(376): n is a, c, g, or t
  misc_feature (379)..(379): n is a, c, g, or t
  misc_feature (387)..(387): n is a, c, g, or t
  misc_feature (390)..(391): n is a, c, g, or t
  misc_feature (404)..(404): n is a, c, g, or t
  misc_feature (412)..(412): n is a, c, g, or t
  misc_feature (416)..(416): n is a, c, g, or t
  misc_feature (418)..(418): n is a, c, g, or t
  misc_feature (422)..(422): n is a, c, g, or t
  misc_feature (424)..(424): n is a, c, g, or t
  misc_feature (427)..(428): n is a, c, g, or t
cangagaatncccncgnccnactcncctttnatntnntagnaacaacagtnnnttttcccagnccntnggttcatcaaacatncccnttctagcntanccaccanatacacctgaccannaaancggagaaagctnccagaacgtgagnnanattgtaagttctncagcnnntncccnacnncataaactgtctgaaaccccaggcactaaagcagagtttcatccctgtctttaaactgggggtatgtccactctagcangnaaaaaacnactgttacacggtccagnaacnctgacaagangctcgccgnancagaaccgtcaccacgcagccntcannngggctggnnacatcattnnncacngccgcaaanngcnccacagcncannaccacagccagangcacacanacananatananacnnaaaaatatatcggatagttgtatacaaatgagcaaggtatttgttgcaacttactacatagcatatacccaaaatcactgaagaaaatcgctggcatcagtgtgcagcaaatttgttcttttggtttcatcactaacaaaagtgcctcatcataaaaatacagttggtttttagggtgccatattgttaaaattagataacttacttacattgaataaacgaatgcgttttattggtaacagatatcattacatttaccagttttaacacaggtggatacagaacttccattctttagtcattccaggtggatctgagttttatattcaaacttttaatacagtttttgagttttgtgtgacttgaatttttaatctttctgtaaaatacgtaacttaaatgaacatattaaatgtgtatcttttcttcagataccagatttgatataatgttgtaacataggtgtgtagatagtggatcctggatggaactggcttctttatcgagaagaatataattctgcatgaggacttaatgaatccaaacctgtgtcatgcctgtgtgcatacccaattaaacactggaaataaaaattgttttggtgaattttgca

SEQ ID NO: 357645 - DNA, 997 bp, Homo Sapiens
  misc_feature (40)..(40): n is a, c, g, or t
  misc_feature (50)..(50): n is a, c, g, or t
  misc_feature (53)..(54): n is a, c, g, or t
  misc_feature (57)..(57): n is a, c, g, or t
  misc_feature (60)..(64): n is a, c, g, or t
  misc_feature (66)..(67): n is a, c, g, or t
  misc_feature (682)..(682): n is a, c, g, or t
  misc_feature (689)..(689): n is a, c, g, or t
  misc_feature (701)..(701): n is a, c, g, or t
  misc_feature (707)..(707): n is a, c, g, or t
  misc_feature (713)..(713): n is a, c, g, or t
  misc_feature (728)..(728): n is a, c, g, or t
  misc_feature (745)..(745): n is a, c, g, or t
  misc_feature (764)..(764): n is a, c, g, or t
  misc_feature (768)..(768): n is a, c, g, or t
  misc_feature (776)..(776): n is a, c, g, or t
  misc_feature (779)..(781): n is a, c, g, or t
  misc_feature (783)..(783): n is a, c, g, or t
  misc_feature (793)..(793): n is a, c, g, or t
  misc_feature (800)..(800): n is a, c, g, or t
  misc_feature (829)..(829): n is a, c, g, or t
  misc_feature (840)..(841): n is a, c, g, or t
  misc_feature (847)..(847): n is a, c, g, or t
  misc_feature (850)..(850): n is a, c, g, or t
  misc_feature (857)..(857): n is a, c, g, or t
  misc_feature (861)..(861): n is a, c, g, or t
  misc_feature (865)..(865): n is a, c, g, or t
  misc_feature (867)..(868): n is a, c, g, or t
  misc_feature (873)..(873): n is a, c, g, or t
  misc_feature (881)..(881): n is a, c, g, or t
  misc_feature (889)..(889): n is a, c, g, or t
  misc_feature (895)..(896): n is a, c, g, or t
  misc_feature (899)..(899): n is a, c, g, or t
  misc_feature (903)..(903): n is a, c, g, or t
  misc_feature (905)..(905): n is a, c, g, or t
  misc_feature (909)..(910): n is a, c, g, or t
  misc_feature (916)..(916): n is a, c, g, or t
  misc_feature (921)..(922): n is a, c, g, or t
  misc_feature (925)..(925): n is a, c, g, or t
  misc_feature (928)..(928): n is a, c, g, or t
  misc_feature (933)..(933): n is a, c, g, or t
  misc_feature (935)..(935): n is a, c, g, or t
  misc_feature (938)..(938): n is a, c, g, or t
  misc_feature (945)..(946): n is a, c, g, or t
  misc_feature (955)..(955): n is a, c, g, or t
  misc_feature (961)..(962): n is a, c, g, or t
  misc_feature (974)..(974): n is a, c, g, or t
  misc_feature (979)..(980): n is a, c, g, or t
  misc_feature (985)..(986): n is a, c, g, or t
  misc_feature (990)..(990): n is a, c, g, or t
atgcttggtaccaatactattaataatattagctctatantaacaagggnttnnatnatnnnnngnncaaacaggagaacccaaaatgaagggaaaaacttagagctaatttcctagagtatgtatttaaatggaaagtcggagctcacagagagcagtcaggaattctgcattttctggatctatcttttgtgccttctcatagtactcagcagcttgcctcttttctccttccagcttgtaaacaaaccctagggcacttaaactctgcacatctaaagcattgtgacaaagtctcttggtagacaatttcttcagagcacttgtcagtttggtgcgaaggggtgatctgtctttgacctttaaggcttctaaataatgatggatggcagtattttctgatttacggtgaaattcctgaaagcggccatagtggtaatggatctgatgtttgtgatcatcggttatgttctccagacgaagagctttccggaaaatgtcctcagcattgctatactggcctccttcagcatacatgttggccaggtctgtgtaggcaaatgcaaacatagagtctcgttccatggctgctttgaaatgaaatatagcagatgaaaccagctcatcaacctttaggttatcctttcccttaggtctgtcgttgtgtggccttctctgattntgactcnttggtgcccggnagcaangtccanctggtggtgccaggnatgaatatgttggtgtnactcctaggccttttttanaagntcgagagnatnnntncaggaatatnttctccnatagaacttggctgcataacgtaggtcgnaaggctgggannatattnggnccagganttcntcanannacatntccccatnatctattncatgtnnatnttgnancttnngtgcangaaannctntantatgnanttntctgggnntggggtaangctttnntaaggcccatanaaaannctttnnatanctctcta

SEQ ID NO: 357646 - DNA, 1047 bp, Homo Sapiens
  misc_feature (829)..(829): n is a, c, g, or t
  misc_feature (889)..(889): n is a, c, g, or t
  misc_feature (897)..(897): n is a, c, g, or t
  misc_feature (912)..(912): n is a, c, g, or t
  misc_feature (920)..(920): n is a, c, g, or t
  misc_feature (931)..(931): n is a, c, g, or t
  misc_feature (976)..(977): n is a, c, g, or t
  misc_feature (980)..(980): n is a, c, g, or t
  misc_feature (993)..(993): n is a, c, g, or t
  misc_feature (1010)..(1010): n is a, c, g, or t
  misc_feature (1015)..(1016): n is a, c, g, or t
  misc_feature (1026)..(1026): n is a, c, g, or t
  misc_feature (1029)..(1029): n is a, c, g, or t
  misc_feature (1039)..(1041): n is a, c, g, or t
tcgcgcacgcccaccgcgcggcttcccgcggtccccggtgctgaggagagagcgatccgagggactgcgccgcccggacggcctgcagagcgctgccatcatgagtgaaattcgtaaggacaccttgaaggccattctgttggagttagaatgtcattttacatggaatttacttaaggaagacattgatctgtttgaggtagaagatacaattgggcaacagcttgaatttcttaccacaaaatctagacttgctctttataacctattggcctatgtgaaacacctaaaaggccaaaataaagacgcccttgagtgcttggaacaagcagaagaaataatccagcaagaacactcagacaaagaagaagtacgaagcctggtcacttggggaaactatgcctgggtgtattatcacatggaccagcttgaagaagctcagaagtatacaggtaagatagggaatgtctgtaagaaattgtccagtccttctaactacaagttggagtgtcctgagactgactgtgagaaaggctgggcactcttgaaatttggaggaaagtattatcaaaaggctaaagcggcttttgagaaggctctggaagtggagcctgacaatccagaatttaacatcggctatgctatcacagtgtatcggctggatgattctgatagagaagggtctgtaaagagcttttctctggggcctttgagaaaggctgttaccctgaacccagataacagctatattaaggtttttctggcactgaagcttcaagatgtacatgcagaagctggagggggaaaagtatatggaagaaatcctggnccaaatatcatcccagccttacgtccttcgttatgcagccaagttctataggagaaaaantacctagnacaaagctctcgaanttttaaanaaggccttggnggtgacacaacttcttctttctgcatcacagatgggactatgctnnggngcaaatgatccantcaagaggcccacacanagacnnaaggaagganaantaaaggtgannnctgatt

SEQ ID NO: 357647 - DNA, 1529 bp, Homo Sapiens
  misc_feature (1519)..(1519): n is a, c, g, or t
ggcgagttcgcagctgcgcgccgggtcctggaggccgaggccgctcccgcccgttgtccccgcagtccccgacgggagcgccatggcccagccgccgcccgacgtggagggggacgactgtctccccgcgtaccgccacctcttctgcccggacctgctgcgggacaaagtggccttcatcacaggaggcggctctgggattgggttccggattgctgagattttcatgcggcacggctgccatacggccgccaggaagctggctggggccaccggccggcgctgcctccctctctctatggacgtccgagcgcccccagctgtcatggccgccgtggaccaggctctgaaggagtttggcagaatcgacattctcattaactgtgcggccgggaacttcctgtgccccgctggcgccttgtccttcaacgccttcaagaccgtgatggacatcgataccagcggcaccttcaatgtgtctcgtgtgctctatgagaagttcttccgggaccacggaggggtgatcgtgaacatcactgccaccctggggaaccgggggcaggcgctccaggtgcatgcaggctccgccaaggccgctgtggacgcgatgacgcggcacttggctgtggagtggggtccccaaaacatccgcgtcaacagcctcgcccctggccccatcagtggcacagaggggctccggcgactgggtggccctcaggccagcctgagcaccaaggtcactgccagcccgctgcagaggctggggaacaagaccgagatcgcccacagcgtgctctacctggccagccctctggcttcctacgtgacgggggccgtgctggtggccgatggcggggcatggttgacgttcccaaacggtgtcaaagggctgccggatttcgcatccttctctgctaagctctaggaatcttccggccgctgcttcctgccgcctcactcagccaggtggagagcaccaatctgaaccagcaatgcctgcagcccagcccctcctctgaacactcagctattactgcgctttccctccccacggccccaactccagggcaggagcaactggacagtgggcctggcccgtggagctgccacgcaggtgcctgagggccaggtgccacgcaggtgtctgaggaccaggtgccacgcaggtggtgggggtacagacaagatgctgggatgtcccctgccccatggtcaagggtgtcctgcctgcctgggtccagggcctgagggagccacatggatcccgagacttgtgttctcttggctgaaaacactgaggtgctcccatctgtgcgtggcccatgagctgggatggtcctccagctgcccacaaggtccgcccctctgtctctgcaccacctgtttgcataaacacactttgctacaatcttgctagtgcgttttcttaaaagataatctatttactgtaaaaataaattggactttgcaaaagcttttagaaggaaaagaaagaggattaaagagaattgctggtgancctatcgttt

SEQ ID NO: 357648 - DNA, 968 bp, Homo Sapiens
cgcagctgcgcgccgggtcctggaggccgaggccgctcccgcccgttgtccccgcaggccccgacgggagcgccatggcccagccgccgcccgacgtggagggggacgactgtctccccgcgtaccgccacctcttctgcccggacctgctgcgggacaaagtggccttcatcacaggaggcggctctgggattgggttccggattgctgagattttcatgcggcacggctgccatacggtgattgccagtaggagcctgccgcgagtgctgacggccgccaggaagctggctggggccaccggccggcgctgcctccctctctctatggacgtccgagcgcccccagctgtcatggccgccgtggaccaggctctgaaggagtttggcagaatcgacattctcattaactgtgcggccgggaacttcctgtgccccgctggcgccttgtccttcaacgccttcaagaccgtgatggacatcgataccagcggcaccttcaatgtgtctcgtgtgctctatgagaagttcttccgggaccacggaggggtgatcgtgaacatcactgccaccctggggaaccgggggcaggcgctccaggtgcatgcaggctccgccaaggccgctgtggacgcgatgacgcggcacttggctgtggagtggggtccccaaaacatccgcgtcaacaagctcgcccctggccccatcagtggcacagagggctccggcgactggggtggcctcagccagcctgagcaccaaggtcactgcagcccgctgcaaaaggctggggaacaagacccgagaatcgccacagcgtgcctaactgggcagccctcctggctcctaacgtaccgggggcctgctggtggccaaggcggcgcttggtttacgtcccaacgggtccagggcgccgagattcgatcctctctgaaagtcaagaatctccggccggatccagcggcatta

SEQ ID NO: 357649 - DNA, 1360 bp, Homo Sapiens
  misc_feature (29)..(29): n is a, c, g, or t
  misc_feature (35)..(35): n is a, c, g, or t
  misc_feature (53)..(53): n is a, c, g, or t
  misc_feature (63)..(63): n is a, c, g, or t
  misc_feature (69)..(69): n is a, c, g, or t
  misc_feature (85)..(85): n is a, c, g, or t
  misc_feature (104)..(104): n is a, c, g, or t
  misc_feature (972)..(981): n is a, c, g, or t
tcacccaaggaactctgtacttcgccttncaccancgtcctgtgaaggtcttntcaacactgnatgggnaagcctttctaaaggntattaagggggctgggggnctgggggtgctgagtaccaagggtccccaggaagagacaggccaggcttatgggctgggcatccagagatcgccctgacgccagctccaggtggagttaggagggcactcttgtcccgacgcatttacagaccactccctcttcttgttcccctcgactctgagagtgtggtggggtagctgtggaacctgactgcttgcctgaaggttgggcagcgtggctagaaattgcggcccagacctgggatctcacccacacctctatgagacgtcctgaaggaaaccatcgactgagcggagaggcttcgctttgcccgcctcctcccagggaaggaagagcggaagaggcgtcgcagccaccgagactgccagccaccaccccctcccagactctctgtccccaccccagaccagggtcaccttcttcctgcactgggggtggggtgcggtaggtttcgcaatccagactgtggggtgggggtgggagcaggtgtgtgtaaaatgagcagctcgtcaggagtcactgagaaggaggcagatggagctggtacccagcaggtctcctctcataagcgtcaaccctcgcctgggcgggctgggggatcctcagcaccccagctctgagccaggggtctgcaacccgggcaccagcgatgggccctcatgcacacagggcgccgagcggggcgcggaggaagagtgacttcagacaggaacccgacgccacagccggtgacgcggaccctgggtcagccagcacgatgggccgctggggagaggagggctggaggcagagagtgtaagtgtgcagccttcatcagcttatttttagtcgcgttatgtaagtggcttcatctcaacgtcacatnnnnnnnnnntctcagatttaattacaggatgacagcctttgcttttcaagcaagctgttctcctggcaagccaggcgaaggattggggagttttgctaaacagaaggagccctttctgaggtgaccacccgtcaaaacttgaacccgcttccacctccgtctccctcttcccgaccagcctcacccagcctcggctgaatgtggcctgagagtagccacttgtccgcaatcacagggacgttttatgcctgtcaagggagcttcctctctcctcttcctccccctcccaccttctgcctggcagctttgccttctctccaagagaagggtccacccaatcagaactcctcttccttttcattcctggattaaagcacttgtaatcagt

SEQ ID NO: 357650 - DNA, 1845 bp, Homo Sapiens
ggttctcccggcgcaatattggggaggtgtccccaaccctattagtgtttttttccccccttgttttcccgggtgtgccccgtttaaaaggtgtgttgtaaaagaatttcttccaaaagggggcaatggttgcccttgttttgtggttttgccagggcttcgatggtatgaggggacaaaattttcaaaggccttttttggcccgtcattttccccggagaaatttttggaggggttcctttcgcctaaggaaatcctgggggggttggtcttcttcggaattattctcgtgaggtcgatatcggaggttctttctttccaaaaagtggggcaacgtgcatttttcccaaaatttccagttgtcttcaaggttaaatatagggggggaaaaacaaagcgagtgctttttggttaggggaatcctctgaagttctatttggtgctaagaagaggatgtaagcataaaaaaacacatccctctaccatctttgaaaatctttctccatcgggggggttttcagatagtagctgtgattagaaagaatatactaagctttcaacaactttctgcatcataggagtggtttgtaggcagagaaccaaggagtgtttgtggtcttgtacctgagcttaactttatccttattttcgtatttggggctgaaacaaagaaaatcctaaatttccattttttcaatcatgggtttgttgcgtgttgaacttacttgataaactgattttgtagtatcttcaatccaaagtgattgctcatcagtaaaaacatagtttgaactttttgaatttgacctgcccccttgagatattggaataaaatgagatactgcaacaggatgtgtcgacgaaagttactgtcactcagttgtaaatccatcagcttttcacttgttaaaaatttggcaaaatatacatgttctcctcctgttttcaattcttccatcttttttcttgaggcctgagtatcatctaatttataactcttaaaaacagctaaaacttcttcagaatacttgagaaaagttttccatgaaatcttctcatagcattgcacagggttcctgaagtaatcctgaagtgaccagaattttcgatacaggttgtaatcaattggaatagagcacgttgttggagcttcctcatctcccatttcgccttcttctacatccattccttcttctctatcttcagtgtgcttctgacccagggtgctttcctgctcatttgtattgaaaacagtgacattttccagattaaactgactctgcaagttaagacctgatttctcagacagagggaaaagcctggccaaaaagagctgaatccgtccacagaagactgtattctgggatttagacaatcttcttaggagatcattgcacatacgtagtaagtaatttttcccagcagaatagaatgtatttgatttccaagtagcaacatttttttccacaaaagtgaatattgtgtcacactgatccaaaggaagacaatccaaaacatctcccaacaatacaaaaggtgtagatgcggtacaaataccttcagttactcccccaatagcaagagaaataatagctaaaacgttttcacatgatgaatgatttataatttcttcttctagaatacctctgaaagcttggtcaagggtacattttttttcattttcactgccaggtacctggctgaaggtacttaacaatggcttgatgtttttgttgttcaaggcctctctggtagacttcgtaaaaccgcgtccgcgcttcgggcaaactgaagagcggcggcgtcggagacatcttctcggctgcgcgtgcccgccactgcccc

SEQ ID NO: 357651 - DNA, 985 bp, Homo Sapiens
gggctgggtggcgaattcggcacgaggggaagctccacaacgtgctctattccaattgattacaacctgtatcgaaaattctggtcacttcaggattacttcaggaaccctgtgcaatgctatgagaagatttcatggaaaacttttctcaagtattctgaagaagttttagctgtttttaagagttataaattagatgatactcaggcctcaagaaaaaagatggaagaattgaaaacaggaggagaacatgtatattttgcaaaatttttaacaagtgaaaagcaatgacgggtaaaatataaacgagaaaacaaaagagacaaggctgggcttccagaaacaagataaatatcttcatggaccagaaatgccaagtagtgagcaaaactgcagcctgggcctgctggactctctatccaaggcaggtggtggtgtccaggaatttggctacaagtaacagagactaaatgtgcaccatgtgggacaaggggccagagccagattcacttcttgaagccaaggactagggtggaaacttttatccagttttgggaagaaactaagaaaaaatattgccagtcttcctgccaagggctatggtttttataggaagttgtgagccctagggataacaaagaccagctttgtgtccatcctgcttgctcagtgaccagatatgtgatatgctcagtatacttatgaaacagctgctccaagaaggcatcataagactttcttctagaacttagggactcaggggccctggtagaagcagatgcaaaactgctagacaggggaaggatgtacaccccaaagggagggggaaaggaagtaaccaaacctcccaaaagaaaaggcttcttgtttcaaaacttctgaaaaattaaaaattccaaaatccataaatcctaatgctaaggaaggattcccccggaaaaatcaactattggggaaacaaacaaaaaattgaatttccgacgga

SEQ ID NO: 357652 - DNA, 543 bp, Homo Sapiens
cgatacaggttgtaatcaattggaatagagcacgttgttggagcttcctcatctcccatttcgccttcttctacatccattccttcttctctatcttcagtgtgcttctgacccagggtgctttcctgctcatttgtattgaaaacagtgacattttccagattaaactgactctgcaagttaagacctgatttctcagacagagggaaaagcctggccaaaaagagctgaatccgtccacagaagactgtattctgggatttagacaatcttcctaggagatcaatgcacatacatagtaagtaatttttcccagcagaatagaatgtatttgattcccaaagtagcaacattttttctcccacaaaagtgaatattgtgtcacactgactccaaaggaaaacaatccaaaacatctcccaacaatacaaaaggtgtagatgcggtacaaataccttcaatgtggagcacatacccaatttaaaagtttaaaaaactgtagagtagaatagcctatgaaaaataattctctcgatggtgtca

SEQ ID NO: 357653 - DNA, 1172 bp, Homo Sapiens
  misc_feature (14)..(14): n is a, c, g, or t
  misc_feature (16)..(16): n is a, c, g, or t
  misc_feature (18)..(18): n is a, c, g, or t
  misc_feature (22)..(22): n is a, c, g, or t
  misc_feature (26)..(26): n is a, c, g, or t
  misc_feature (48)..(48): n is a, c, g, or t
  misc_feature (69)..(69): n is a, c, g, or t
  misc_feature (72)..(72): n is a, c, g, or t
  misc_feature (77)..(77): n is a, c, g, or t
  misc_feature (88)..(88): n is a, c, g, or t
  misc_feature (127)..(127): n is a, c, g, or t
  misc_feature (134)..(134): n is a, c, g, or t
  misc_feature (136)..(136): n is a, c, g, or t
  misc_feature (148)..(148): n is a, c, g, or t
  misc_feature (151)..(151): n is a, c, g, or t
  misc_feature (157)..(157): n is a, c, g, or t
  misc_feature (162)..(162): n is a, c, g, or t
  misc_feature (165)..(165): n is a, c, g, or t
  misc_feature (192)..(192): n is a, c, g, or t
  misc_feature (220)..(220): n is a, c, g, or t
  misc_feature (225)..(225): n is a, c, g, or t
  misc_feature (231)..(231): n is a, c, g, or t
  misc_feature (235)..(235): n is a, c, g, or t
  misc_feature (281)..(325): n is a, c, g, or t
  misc_feature (329)..(329): n is a, c, g, or t
  misc_feature (393)..(393): n is a, c, g, or t
  misc_feature (401)..(401): n is a, c, g, or t
  misc_feature (418)..(418): n is a, c, g, or t
  misc_feature (466)..(466): n is a, c, g, or t
  misc_feature (469)..(469): n is a, c, g, or t
  misc_feature (530)..(530): n is a, c, g, or t
  misc_feature (596)..(661): n is a, c, g, or t
catctgaccccccnancncacncccnggaagttcacttcacatttcanaaatcccatttttaacgaganctntgctntgagccagaancttttcgggtcaacggatgagtagcctcagcagtaactnttcagangntttagactgcanccncagacnccccnttntcaagttctgaagcagtgtctacattncccacttggctaatgggaggttcaacgnttttnttaccncctnccctgtctgtcacctcaggcttttcctttcctcgggcttcttcctnnnnnnnnnnnnnnnnnnnnnnnnnnnnnnnnnnnnnnnnnnnnngatncccactagagcgtctatttctctcttccaagtctctgtgcctgtcccggtcagggctcctcctnccccactntctcctgtcacggttantattatctctatcatcattacggttcccataccgttcccggtcatttnccnccctatttccaaaagatcttcttccaaacctttcttggtctctacctgaattgaactgctncctgttatcatttctaaactgctgtggctgctgctgtgttggtggaggctgttgtgatggtggtgnnnnnnnnnnnnnnnnnnnnnnnnnnnnnnnnnnnnnnnnnnnnnnnnnnnnnnnnnnnnnnnnnngcggcggctgttgccttccgtctctgtcttcaggaccccctgggcctggccctgggcccccgagccctggcattccaccaggcctaacaaaggggccatgcggtgggaagggacctttcattccatgaggtggaggcatcgcaaagccccctggtcctggcggtgggcctctgtgcatcatgtgcggtggcatgggacggggcggcatcaaagggaaccgctgtaagtgaggtgggggcattcctggagggcgctggagtgggatgagaccgggccgggcgccaagaagaccagtagatggtgcctgaagtccaattacaggaccaggggcaactccttgagtgccatagaagtgaaacaggctgggttacaggaggggtgggcagaatcgtgggtgcagcagccggcacggcagagcgatacattttcacgcagtcaccagaggcggcgtctcctaatagcaacaagacaggtttgctgggataagaatcccagggattctcattcaaag

SEQ ID NO: 357654 - DNA, 1020 bp, Homo Sapiens
  misc_feature (22)..(22): n is a, c, g, or t
  misc_feature (25)..(25): n is a, c, g, or t
  misc_feature (73)..(73): n is a, c, g, or t
  misc_feature (605)..(620): n is a, c, g, or t
  misc_feature (903)..(911): n is a, c, g, or t
agccttgccgggacaggcccanagnttggaagagagaaatagcgctttagtgggcatcaagcagagagagagnttctagagatagagagtctcgtagagagaaggaagaagcccgaggaaaggaaaagcctgaggtgacagacagggcaggtggtaacaaaaccgttgaacctcccattagccaagtgggaaatgtagacactgcttcagaacttgagaagggggtgtctgaggctgcagtcctaaagccttctgaagagttacctgctgaggctacctcatccgttgaacccgaaaaggattctggctcagcagcagaggctcctcgttagagactggaatttgtgaaaatgtgacagtgacacttcctggagtgtagagcttgaggtgtacagatgctgtattatatccgctcccgctgtactgcagccccgcgccagctggtggggaactgtaagcaatttgattgcttcccttctatttaaaaatagccacaaaataacaaaaaatactgaaatatgaataaatattaccctttttgctgtaactttttaaaagttttgactttaaaaagtttacaaatcgtaattagaagtgctctctannnnnnnnnnnnnnnnaatttaagacaaggtaacggtgaaagctcctcaaaacaatagggatgtttttaataaactccattttcgtaacaaactttaaaaaataaaaccaccccccccacgtaattcctaaagcgcatcccccctcttcctcaccctcccccttatcaacctctccaaaccactcccttgccaacctcagccaccactatgcgctcgtgcacaataaacgctacctcctcagtaaatatcccctcggcgggtgtcccccgccgctccttggaaaatttctcttttaaannnnnnnnntttcgggggcccgtcgcccccctttatggtataacacaacacgggggtcgcaattttgtttccccacagagaaatccccggcgaattctaaactagggccctggtagct

SEQ ID NO: 357655 - DNA, 988 bp, Homo Sapiens
  misc_feature (3)..(3): n is a, c, g, or t
  misc_feature (5)..(5): n is a, c, g, or t
  misc_feature (13)..(13): n is a, c, g, or t
  misc_feature (22)..(22): n is a, c, g, or t
  misc_feature (25)..(25): n is a, c, g, or t
  misc_feature (42)..(42): n is a, c, g, or t
  misc_feature (47)..(47): n is a, c, g, or t
  misc_feature (74)..(74): n is a, c, g, or t
  misc_feature (80)..(80): n is a, c, g, or t
  misc_feature (93)..(93): n is a, c, g, or t
  misc_feature (96)..(96): n is a, c, g, or t
acncncccatganccctgcccnccntcccagttcctagagtntggtntggtttggccgggagggaggaaggaantggccntggccctggagtntgntcagccacacccactagctggagggaggccacagcaagccccgccagagtctgaagggcctcgaaaggtgattcccagcctgggccaggagcactctcccagtgcagggctctggtctttgaagtgtatgggcccaacaccctgctcacacagagtggctgcccacaaggcccagccatcagcagggctctgccgacccatctctgtaaggcttctcttccacgtggctggtctgctccagaagccactgatgctcggactcactcactgtcagtctgagggtcacctcctgaaaaacactgctcgtagccacctgctcaaagtgaagtttctggaacatccggatgcttggttcatttccttgcccaattttagcctcaaacttggtcagacctagcgtggtcactccgtaagacagcatcgcgagaacggcctcagtgccaaggcccttacccctgcagctgggctctgcaatcatgacctcgatctcccccaaggtgaggtcttctagatctgtgaggaagaggttcacatctcccaccatgcagctctcttcggtggcgcctggctgggcctgccacttctcggcatccagcacaatgaaggtacacttgtctgcatcttcctgccagctgcactgcatggcatactcctgctccagggtcagcggctccgaggctgtcaaacgctgcagctcctctgatttcatccactcgtggtacctgctgggcacatgctccgaggtgtagggtacaaggaccaccttcttccccagcagcaaggtgttctgattcaacctcatggtagcagcctaccaccgacgaaatcgtcccccgcagaaagggtgatctacctcctccaaccagccacgttcccaggcccggtcgaccgc

SEQ ID NO: 357656 - DNA, 1037 bp, Homo Sapiens
ggctggttggaggaggtagatcaccctttctgcgggggacgatttcgtcggtggtaggcgtgctaccatgaggttgaatcagaacaccttgctgctggggaagaaggtggtccttgtaccctacacctcggagcatgtgcccagcaggtaccacgagtggatgaaatcagaggagctgcagcgtttgacagcctcggagccgctgaccctggagcaggagtatgccatgcagtgcagctggcaggaagatgcagacaagtgtaccttcattgtgctggatgccgagaagtggcaggcccagccaggcgccaccgaagagagctgcatggtgggagatgtgaacctcttcctcacagatctagaagacctcaccttgggggagatcgaggtcatgattgcaagagcccagctgcaggggtaagggccttggcactgaggccgaatctcgcgatgctgtcttacggtaagaaagtgtgagcagacaatgcgaggaagtgggcaggccccaggtgaactttgtacaggtgtgagggtagggggcaggtgaaggttcctcctctgcagcttgggacaggagggtgggaggcaggcgccctccttacttgcccctgatctcatctcctctgcgaggagtgaccacgactaggtctgaccgaaggtagaggctaaaattgggcaaggaaatgaaccaagcatccggatgttccagaagagttcacgttaggaagcagggtggctaccggagcaggagatagccagagagggagaccctcacacccgacagggcagtgagctccacgacataacggagagcatccagggaagacacgtacacaagccaagcgaggaaaacaacgaaagccccctacacaggacgactgggcctacgggacagaaccccggcgcagaagaggccaagggcgccaaggaggagacaagcacaaaaccaggcgcagcacgcaaagagaaagcaagaggcaccaaacagaaaaacagaaagacccaaaacgacaatgcacacgtgaccaaaggacccc

SEQ ID NO: 357657 - DNA, 814 bp, Homo Sapiens
ggctggttggaggaggtagatcaccctttctgcgggggacgatttcgtcggtggtaggctgctaccatgaggttgaatcagaacaccttgctgctggggaagaaggtggtccttgtaccctacacctcggagcatgtgcccaggtaccacgagtggatgaaatcagaggagctgcagcgtttgacagcctcggagccgctgaccctggagcaggagtatgccatgcagtgcagctggcaggaagatgcagacaagtgtaccttcattgtgctggatgccgagaagtggcaggcccagccaggcgccaccgaagagagctgcatggtgggagatgtgaacctcttcctcacagatctagaagacctcaccttgggggagatcgaggtcatgattgcaggtttgtttcacctagccctgccttccgctgactcccggctctcagatctgctgactgagcctgctgaggctgcaaagggtgggcactcacagggttcactgggaggctccatgtggtgagtccaggtcctggctgggcagctgcccacctagccccctcagcctgtggtacaccctcagctcatcactttagtccttatgcttaggcgtgaacttaacccttggtttggggtagattcaagtatggttagtcccatagttggggtgggctggggaccctcagaaaaaggtctctggagcatgttgtcatattacaggaggaggccctcctgtttctgctccttcatggtcctcagtttcccccaagtggctactgactatcccatgaggcagatactgactccatgaagtaagaggc

SEQ ID NO: 357658 - DNA, 970 bp, Homo Sapiens
  misc_feature (41)..(77): n is a, c, g, or t
atgatagatatatagggaccgggttaccgcggtggcggcgnnnnnnnnnnnnnnnnnnnnnnnnnnnnnnnnnnnnnatcaggccaaatcggccgagctcgaattcgtcgagagcggcggggaacgtggctggttggaggaggtagatcaccctttctgcgggggacgatttcgtcggtggtaggctgctaccatgaggttgaatcagaacaccttgctgctggggaagaaggtggtccttgtaccctacacctcggagcatgtgcccaggtatctttcccgcttgacatggggtaccacgagtggatgaaatcagaggagctgcagcgtttgacagcctaggagccgctgaccctggagcaggagtatgccatgcagtgcagctggcaggaagatgcagacaagtgtaccttcattgtgctggatgccgagaagtggcaggcccagccaggcgccaccgaagagagctgcatggtgggagatgtgaacctcttcctcacagatctagaagacctcaccttgggggagatcgaggtcatgattgcagagcccagctgcaggggtaagggccttggcactgaggccgttctcgcgatgctgtcttacggaggtgaccctcagactgacagtgagtgagtccgagcatcagtggcttctggagcagaccagccacgtggaagagaagccttacagagatgggtcggcagagccctgctgatggctgggccttgtgggcagccactctgtgtgagcagggtgttgggcccatacacttcaaagaccagagccctgcactgggagagtgctcctggcccaggctggggaatcacctttcgaggcccttcagactcttggctggggcttgcctgtggcctccctccagctagtggtgtggctggagcagactccagagccaggccagttccttctccctcccggcaaaccagaaccagactctaggaagtggatg

SEQ ID NO: 357659 - DNA, 1865 bp, Homo Sapiens
aggcagtaactctacggtttaaggtagcgaggctgggtggcgaattcgcacgagggctaccatgaggttgaatcagaacaccttgctgctggggaagaaggtggtccttgtaccctacacctcggagcatgtgcccaggtaccacgagtggatgaaatcagaggagctgcagcgtttgacagcctcggagccgctgaccctggagcaggagtatgccatgcagtgcagctggcaggaagatgcagacaagtgtaccttcattgtgctggatgccgagaagtggcaggcccagccaggcgccaccgaagagagctgcatggtgggagatgtgaacctcttcctcacagatctagaagacctcaccttgggggagatcgaggtcatgattgcagagcccagctgcaggggtaagggccttggcactgaggccgttctcgcgatgctgtcttacggagtgaccacgctaggtctgaccaagtttgaggctaaaattgggcaaggaaatgaaccaagcatccggatgttccagaaacttcactttgagcaggtggctacgagcagtgtttttcaggaggtgaccctcagactgacagtgagtgagtccgagcatcagtggcttctggagcagaccagccacgtggaagagaagccttacagagatgggtcggcagagccctgctgatggctgggccttgtgggcagccactctgtgtgagcagggtgttgggcccatacacttcaaagaccagagccctgcactgggagagtgctcctggcccaggctgggaatcacctttcgaggcccttcagactctggcggggcttgctgtggcctccctccagctagtggtgtggctgagcagactccagggccagggccagttcccttctcccctcccggccaaacccagacccagactctaggaagctggaatggagggcagggatccatgggagatgtcgggatgaaggtgggagccggaggtgcagggggacctggaacatggatgggagtggacaggcctttctccttagaggccagaggtgctgccctggctgggagtgaagctccaggcactaccagctttcctgattttcccgtttggtccgtgtgaagagctaccacgagccccagcctcacagtgtccactcaagggcagcttggtcctcttgtcctgcagaggcaggctggtgtgaccctgggaacttgacccgggaacaacaggtggtccagagtgagtgtggcctggcccctcaacctagtgtccgtcctcctctctcctggagccagtcttgagtttaaaggcattagtgttagatacagctccttgtggctggaaaacacccctctgctgataaagctcagggggcactgaggaagcagaggccccttgggggtgccctcctgaagagagcgtcaggccatcagctctgtccctctggtgctcccacgtctgttcctcaccctccatctctgggagcagctgcacctgactggccacgcgggggcagtggaggcacaggctcagggtggccgggctacctggcaccctatggcttacaaagtagagttggcccagtttccttccacctgaggggagcactctgactcctaacagtcttccttgccctgccatcatctggggtggctggctgtcaagaaaggccgggcatgctttctaaacacagccacaggaggcttgtagggcatcttccaggtggggaaacagtcttagataagtaaggtgacttgcctaaggcctcccagcacccttgatcttggagtctcacagcagactgcatgtgaacaactggaaccgaaaacatgcctcagtataaaacaaacattataaaacgaaaaaaaa

SEQ ID NO: 357660 - DNA, 513 bp, Homo Sapiens
ggattgcgtttcctgtgctaaaattctctctcctggctgggctccggtaaactgaagctgctcgagaaatcacctgggaactctcatagccgtttgtcacccagggtgtacttgccaggacctctccttgctactcttcccaaagtcgggaggcaaagcggctgggtcaccagagcctgaccatactgacgctccagggggaagacgcagaggccgggaagagacaccccctcccaaacacataaaacttgccccttcctagcctcggctcccctcactggggccttgggcaggaccgacccgcatccaactaggcctaaggggtaggctctgagcctcttacccctaagaggcggagagtgcgcccaaggcgggcgcccggcctgttccccagccctgcctggaagccccgcagccactgcattttgtttaaacacagatagcacgggcctttctcttattgctacagtgttttgtacacggttaaaacactagtaaagctttttcgttatt

SEQ ID NO: 357661 - DNA, 995 bp, Homo Sapiens
  misc_feature (39)..(39): n is a, c, g, or t
  misc_feature (837)..(837): n is a, c, g, or t
  misc_feature (892)..(892): n is a, c, g, or t
  misc_feature (909)..(909): n is a, c, g, or t
  misc_feature (918)..(918): n is a, c, g, or t
  misc_feature (922)..(922): n is a, c, g, or t
  misc_feature (931)..(931): n is a, c, g, or t
  misc_feature (933)..(933): n is a, c, g, or t
  misc_feature (938)..(939): n is a, c, g, or t
  misc_feature (966)..(966): n is a, c, g, or t
  misc_feature (979)..(979): n is a, c, g, or t
  misc_feature (982)..(982): n is a, c, g, or t
  misc_feature (987)..(987): n is a, c, g, or t
  misc_feature (990)..(990): n is a, c, g, or t
ggcagagggagtttccgctttgaactccaccccggtagnagctccgcggaagggaaagctttctccggaagcttggggggctttgctttcgcattaagaaagcacggtaggatcatggggttgcacagggggccggagggccagggtctcccggaggtggaaaaaagagaagatgaagaaaaaaatgtaaagttgactgaaattctggagctcttggttgcagctgggtatttaagggcaagaattaaaggcttataaacctttgaaaaggtagtaggaggaatgaattggtgtataaacacttgcaactttgatgtagatgttgatttgctctttaaagaaaactctacgataggtaaaaaaatagctctgtaagaaaaaattgtctcggtcctgcaaaggatgaaatgcccacaccagctggagccccaccagatcaaggggatggattttattaaaatatttactgttgttcagtggctggtgaaacgagctatagaaaaaaaagaagagatgggtgaatatatacgctcctactctgtatcccagttccagaagaattacagtctccctgaggatgatgacttcataaagagaaaagaaaaggccatcaagacagttgtggacctctcagaagtgtacaagccccgtcggaaatacaaacgccaccagggagcagaggagctacttgatgaagaatctcgaatccatgctacacttttggaatatggcaggagatatggatttaggccgccagagcaaaattggagaaggctgaggacaagcaaaacggaacttccagcaggggctgtcagctacagaaaaagctgatgcccncgaggaagatgagcttcgagcagctgaagagcagcgtattcagtcgctgatgacnaagatgacggctatggnaaatgaggngagncgtctcacngnaagcnncgtggggcagattgtgggactctgctntgttgagaataanagnttttntcnagtat

SEQ ID NO: 357662 - DNA, 1699 bp, Homo Sapiens
gggaccggtccggaatttccgggatggcgggagcagcaatcgcagccatggcgtcgttactgtggggaggcgacgcaggggcggcggagagcgagcggctgaacagccacttttcaaacctcagccaaccccggaagaacctttggggtattaagagtactgcagtccgaaacatagatggttctattaataacatcaatgaagatgatgaagaagatgtagtggatttggcagctaattcactcttaaacaagttaatccatcaatccttagtagaatccagtcaccgtgtggaagttttacagaaggatcccagctctccactttactcagtaaagacatttgaagagctgcggctaaaggaagagttactaaaaggaatctatgcaatgggatttaataggccatctaaaatccaagagatggctctccctatgatgctggcacatccaccccagaacctcatagcacagagccagtctggaacaggaaagacagcggcatttgtgttggcaatgttaagcagagttaatgccttggaattgttcccacagtgcctctgcctagctcctacttatgaattggctctgcaaactggccgtgtggttgagcagatgggaaaattctgtgtggatgttcaagtgatgtatgccattcgagggaatcgaattcccagaggcaccgacatcactaaacagattataattggcactcctgggactgtcctagattggtgttttaaactaaaattgattgatttgactaagattcgtgtgtttgtcctggatgaagcagatgtgatgattgacactcaaggattctcagatcatagtattcgtattcaaagagctctaccctccgaatgccaaatgctcctcttttcagcaacctttgaggactctgtgtggcactttgctgagcgaatcatccctgaccctaatgttatcaagttacgcaaagaggagctcacactgaacaacatccggcaatattacgtgctgtgtgagcacaggaaagacaaataccaagctctgtgcaacatttatggcagcatcaccattggtcaggccatcatcttctgccagactcgtcgaaacgctaagtggttgaccgtggagatgatacaggatggccaccaggtgtctttgttaagcggggagctgaccgtggagcagcgagcttccatcattcagaggtttcgggatgggaaagagaaggttctcataacaactaatgtttgcgcccgagggattgatgtgaagcaggtcacaattgttgtgaactttgatctccctgtaaaacaaggagaggagccggactatgagacctacctccaccgcatagggcggacggggcgctttgggaaaaaaggccttgccttcaacatgattgaagtagatgagctgccctcgctcatgaaaatccaggaccactttaacagcagtattaagcaactcaacgctgaagacatggatgaaattgaaaagattgactattgaagaaagaactttattgtttgtgcagtatcctagtttatgtgagaatgtctcagtgggttttgaaggtaatttttttatgttgaggctttttcgacgtgaaactgtcacagatggcaaaataaatgtcacggtacttagttttaagacatgaggtctttttgaagccaaattgatgtgaagcttgtgatccttttgaataa

SEQ ID NO: 357663 - DNA, 993 bp, Homo Sapiens
  misc_feature (729)..(729): n is a, c, g, or t
  misc_feature (807)..(807): n is a, c, g, or t
  misc_feature (848)..(848): n is a, c, g, or t
  misc_feature (887)..(887): n is a, c, g, or t
  misc_feature (893)..(893): n is a, c, g, or t
  misc_feature (896)..(896): n is a, c, g, or t
  misc_feature (900)..(900): n is a, c, g, or t
  misc_feature (904)..(904): n is a, c, g, or t
  misc_feature (916)..(916): n is a, c, g, or t
  misc_feature (925)..(925): n is a, c, g, or t
  misc_feature (929)..(929): n is a, c, g, or t
  misc_feature (942)..(942): n is a, c, g, or t
  misc_feature (946)..(947): n is a, c, g, or t
  misc_feature (954)..(954): n is a, c, g, or t
  misc_feature (967)..(967): n is a, c, g, or t
  misc_feature (976)..(976): n is a, c, g, or t
  misc_feature (979)..(979): n is a, c, g, or t
  misc_feature (981)..(981): n is a, c, g, or t
  misc_feature (983)..(983): n is a, c, g, or t
  misc_feature (989)..(989): n is a, c, g, or t
ggaacctgacagcggcgccgagggggccacccggactctgtttggaacggaagcacagtgtccgccgcttcctggttgcgggtcagcgcccaggtcctgggctggccgccgggatgttgccctacacagtgaacttcaaggtgtcggcgcgcaccctcacgggggccctcaacgcccacaacaaggcggcggtggactggggctggcaaggtttaattgcttatggatgtcattcacttgtggtagtgattgattccattactgcccaaactcttcaagttttaaaaaagcataaagctgatgttgtaaaggttaaatgggccagggaaaactatcaccataacattggctcaccatattgcttacggttagcttctgctgatgtcaatgggaagatcatcgtctgggatgtagcagcaggaatagctcagtgtgagatccaagagcatgccaagcctatccaggatgttcagtggttgtggaatcaagatgcttcccgcgatttactgcttgctatccacccgccaaattacattgtgctctggaatgccgacactggcaccaaactatggaagaagagctatgcagataacattctttctttttcttttgacccttttgatccctcacatttaactttgcttaccagcgagggtattgttttcatctcagacttctccccatccaagcctccctcaggccctgggaaaaaagtttacatatccagcncacactctagcccagctcataacaagctggccacagccacaggtgccaagaaagctctaaataaagtaaaaattttantcactcaagagaaacctagtgctgaattcataactctcaangattgccttcagttggcatacctgccttcaaaaaggaancacatnttnttgngctntcctcgagaganttttaatcnttgnacttgaggggaancagnnggggggngtgtattcaaaanaacgcacangantncntttttncagg

SEQ ID NO: 357664 - DNA, 1570 bp, Homo Sapiens
  misc_feature (89)..(89): n is a, c, g, or t
  misc_feature (99)..(99): n is a, c, g, or t
  misc_feature (140)..(140): n is a, c, g, or t
  misc_feature (145)..(145): n is a, c, g, or t
  misc_feature (172)..(172): n is a, c, g, or t
  misc_feature (176)..(176): n is a, c, g, or t
  misc_feature (180)..(180): n is a, c, g, or t
  misc_feature (197)..(197): n is a, c, g, or t
  misc_feature (212)..(212): n is a, c, g, or t
  misc_feature (214)..(214): n is a, c, g, or t
  misc_feature (225)..(225): n is a, c, g, or t
  misc_feature (227)..(227): n is a, c, g, or t
  misc_feature (235)..(235): n is a, c, g, or t
  misc_feature (244)..(244): n is a, c, g, or t
  misc_feature (257)..(257): n is a, c, g, or t
  misc_feature (268)..(268): n is a, c, g, or t
  misc_feature (270)..(270): n is a, c, g, or t
  misc_feature (284)..(284): n is a, c, g, or t
  misc_feature (288)..(288): n is a, c, g, or t
  misc_feature (299)..(299): n is a, c, g, or t
  misc_feature (310)..(310): n is a, c, g, or t
  misc_feature (315)..(315): n is a, c, g, or t
  misc_feature (319)..(319): n is a, c, g, or t
  misc_feature (321)..(321): n is a, c, g, or t
  misc_feature (331)..(331): n is a, c, g, or t
  misc_feature (333)..(333): n is a, c, g, or t
  misc_feature (338)..(338): n is a, c, g, or t
  misc_feature (341)..(341): n is a, c, g, or t
  misc_feature (345)..(345): n is a, c, g, or t
  misc_feature (349)..(349): n is a, c, g, or t
  misc_feature (357)..(375): n is a, c, g, or t
  misc_feature (390)..(390): n is a, c, g, or t
  misc_feature (394)..(394): n is a, c, g, or t
  misc_feature (425)..(425): n is a, c, g, or t
  misc_feature (430)..(430): n is a, c, g, or t
  misc_feature (433)..(433): n is a, c, g, or t
  misc_feature (443)..(443): n is a, c, g, or t
  misc_feature (446)..(446): n is a, c, g, or t
  misc_feature (449)..(449): n is a, c, g, or t
  misc_feature (454)..(457): n is a, c, g, or t
  misc_feature (467)..(467): n is a, c, g, or t
  misc_feature (469)..(471): n is a, c, g, or t
gacgacttgaagttgggagttaggaaggtgaacttttctatctgaattctccgggtccctgaagccctccttgccgctctccatctgtnttgcactgcnagctgggtccctgctggggctctgggacttccacttctcantccanataggaacccagcttccactgaatcantgcnaaanctgcctcccagcctggntgggaagggggaaancnactggtaggancnagccccanatggaggtnaggagccactgcnaacctcccgtntncaggtgctgatgtnggcntgcagagtgtngggctggtgcnttcanccanancccttcaatnanataangtntgtntatntacatgtnnnnnnnnnnnnnnnnnnngcactctcaaaagtntttnaaagggtgcagatgtaaggctcagtgttggnaaaanacnaagggctatnatnatnaaaannnnaagctttatntnnnccttagaagtgggaaacccagagctctgttgatttcctaccacaacccagtaggggcctctctctgccatgggctggacagctttttgaggaagccattcagctcccacagttgagctcccacagggctttaggtgtccattccctctcaactgcttagaggcagctttgagcacagccttcctggaaggaagctaggcaagacctgccacacagcgaaggttgggtttacaagggtgacattggtacccccttggccaagagtaaagaagaacaagtctaagccttgcttttatcttagttgtctgggtggtagcagaactcatcagctccttatcctcagtctgttcctctataaaagatgagagatgttcactgactttgtgcagtgagaaggcagcaagtactcacggctggtgctgtgggacctcacagcttctaaggagaggggctgggagggcctttgccatcagatctgccaagcacctaatgcttgcctgtggtgaaggcaagatggaccaagggccttggagaaaagggctcccaggcttctgaactttgaggcctcagcactttctgcattatcgtcaaactctttggaaagaaaccaaatcattaaaaagtagaaagaaatctgcctcttgtctgccctactgcccctttacccccactctgtccccaaatgatattattgcaccttgacctgggagcgccagagaggggagggagttggcagagacttctggtgccctctgccctcctagcaacagatgcccacttatattttggcccctggcagcctcgcccagcccctgatcagcccaggcctagggcagttaggacctttctgtttattttctgaagcagagagaatgatctcagagtttgcaaatgaagccttttttgcactttcattcacatgcactttggtggggttacatttttgtacttgcctcttgtgtgtgcacatgtgtgtatgtgttctttaagagaatcttctggcttaagctaaggtgactcttgaaggagaaaaagttacaaacaaaatgtggtgtgatctgtcagtgtatcaaaacaacataaataaacttgaacaactg

SEQ ID NO: 357665 - DNA, 839 bp, Homo Sapiens
  misc_feature (42)..(53): n is a, c, g, or t
gggtgtctagtattaatgttgccagtaagcacctctctcccnnnnnnnnnnnnattattttaatttgagaactcctgtgtccagtttagaagtgagagacttccatttttagttcctttacactcaccaccctagcaagtgccctgcacagagtaataagtaaattgatttcctaatcacaattctatgtgacttatggtcaaaagagcagttttaataactttaaaagtacttcagatagacgcagaaaattggtgagtggttgaccaagaacactgcacaaatataaaaaaagttctggaaatgcagaatggcgttagatttatatttggtttgttaattttatatcactgtttttcactgtttttgtggacaaataatggttgctttgctgaagtgttcttcctcaatcttgattgccctgtacctacccaaaagctgtagtcacacgtcctaaaggccaagcaaacccaccgggatggtggggggtcttggagccaagctcttaggttcctcttatttggggcagtaccagtccataccagctgcgatttgtgagtggacctgtggtaagaagaatagaaaaggctctcagagataaggttttttacatgtgtaacaatcccaagatttcctagattaaaatcttaattgattttgaaattggatttttatttagaatcaaaattaggacaagaacagataacttcttcagatacatttgtgtaactttacagaatgtcatcaagctttggggctctgtggggcacatgatttatccataaaggagatgcagtatgcttacttaaattaataaatttaaaatcttttaaaagtgt

SEQ ID NO: 357666 - DNA, 1075 bp, Homo Sapiens
  misc_feature (198)..(198): n is a, c, g, or t
  misc_feature (932)..(932): n is a, c, g, or t
  misc_feature (1007)..(1007): n is a, c, g, or t
  misc_feature (1025)..(1025): n is a, c, g, or t
  misc_feature (1048)..(1048): n is a, c, g, or t
  misc_feature (1050)..(1051): n is a, c, g, or t
  misc_feature (1055)..(1055): n is a, c, g, or t
  misc_feature (1058)..(1058): n is a, c, g, or t
  misc_feature (1062)..(1062): n is a, c, g, or t
  misc_feature (1064)..(1064): n is a, c, g, or t
  misc_feature (1071)..(1071): n is a, c, g, or t
ccgggatctctgataacgggatgggtggtgctggacctcgggcggggccgggcctcgtggcgggaggaggcagggcagggcctctgggacggggctggacggcttgttgacggaaacgagcccttgacgctgtggcccggaagtggagcggctgtcgcagtgcggctccggcagtggcagcggaggcctgtgtttgcngccttcggcaagcgactgagatggcgagcgcaactgcacctgcagccgcagtccccaccctggcttcgcctttggagcagctccggcacttggcggaggagctgcggttgctcctgcctcgagtgcgggtcggcgaaccaggagaccaccgaggagtttaatcgagagatgttctggagaagactcagtgagtgcgcctccttccgggctccccttgcctcacttcctccagcgtcccgaccccttttcctcccgctgtcccccacggaggggactgctctcccccgctgcatcctttctgtgaggtaccttacccacctcagcacctgagagggtgaaatagaattctaacctcgacattcgggaagtgtttttgagaagtctcggtcggtaagggaagtcttccaagtccgtgcagcactaacgtattggcacctgcctcctcttcggccaccccccagatgaggcagctgtgactgtgtcaagggaagccacgactctgaccatagtcttctctcagcttccactgccgtctccacaggaaacccagaagttctgtgaacaagtccatgctgccatcaaggcatttattgcagtgtactactttgcttccaaaggatcaggggatcaccctgagaaagctggtacggggcgccaccctggacatcgtggatggcatggctcagctcatggaagtactttccgtcactccaactcagagccctgagaacaangaccttatttcctacaacagtgtctggggtgcgtgccagcagatgcctcagataccaagagataacaaagctgcngctcttttgatgctgacnagaatgtgggttttgtggagggngnncatnaanaaangnggagggngggg

SEQ ID NO: 357667 - DNA, 1304 bp, Homo Sapiens
gcagtactcctagcgggtttaaggtagcgaggcctgggtggcgaattcggcacgaggctgtgtttgcggccttcggcaagcgactgagatggcgagcgcaactgcacctgcagccgcagtccccaccctggcttcgcctttggagcagctccggcacttggcggaggagctgcggttgctcctgcctcgagtgcgggtcggcgaagcccaggagaccaccgaggagtttaatcgagagatgttctggagaagactcaatgaggcagctgtgactgtgtcaagggaagccacgactctgaccatagtcttctctcagcttccactgccgtctccacaggaaacccagaagttctgtgaacaagtccatgctgccatcaaggcatttattgcagtgtactatttgcttccaaaggatcaggggatcaccctgagaaagctggtacggggcgccaccctggacatcgtggatggcatggctcagctcatggaagtactttccgtcactccaactcagagccctgagaacaatgaccttatttcctacaacagtgtctgggttgcgtgccagcagatgcctcagataccaagagataacaaagctgcagctcttttgatgctgaccaagaatgtggattttgtgaaggatgcacatgaagaaatggagcaggctgtggaagaatgtgacccttactctggcctcttgaatgatactgaggagaacaactctgacaaccacaatcatgaggatgatgtgtgggggtttcccaagcaatcaggacttgtattggtcagaggacgatcaagagctcataatcccatgccttgcgctggtgagagcatccaaagcctgcctgaagaaaacttcggatgttagtggcagagaatgggaagaaggaccaggtggcacagctggatgacattggggatatttcggatgaaatcagccctagtgtggatgatttggctctgagcatatacccacctatgtgccacctgaccgtgcgaaacaatgtaagtactggctttgagggaatagctacagaacaaatgggcagaattccactaatcactagtatttcctgtaagctatagggtacatatttattagtcacatttggatggaagtacaacagtaatgtcacagttcttgcatgcgtttggggttgataaaaattcactgaagttgaattataatagccatgagctttggtagttctctctcccaaaatcacctgggtaatcattcagaaaagcccaaaggccttagaaaatgatgctttaaggctgggcgcggtagctcacac

SEQ ID NO: 357668 - DNA, 848 bp, Homo Sapiens
tggtccggcccgcagtacgggatatcgtcgacccacgcgtcgcacggaggggactgctctcccccgctgcatcctttctgtggaggtaccttacccacctcagcacctgagagggtgaaatagaattctaacctcgacattcgggaagtgtttttgagaagtctcggtcggtaagggaagtcttccaagtccgtgcagcactaacgtattggcacctgcctcctcttcggccaccccccagatgaggcagctgtgactgtgtcaagggaagccacgactctgaccatagtcttctctcagcttccactgccgtctccacaggaaacccagaagttctgtgaacaagtccatgctgccgatcaaggcattatattgcagtgtactatttgcttccaagaggatcaggccctgagaacaatgaccttatttcctacaacagtgtctgggttgcgtgccagcagatgcctcagataccaagagataacaaagctgcagctcttttgatgctgaccaagaatgtggatttcgtgaaggatgcacatgaagaaatggagcaggctgtggaagaatgtgacccttactctggcctcttgaatgatactgaggagaacaatctgacaagccacgatcatgaggatgatgtgttggggttgcccagcaatcaggacttgtattggtcagaggacgatcaagagctcataatccctatgccttgccgctggtgagagcatccaaaagcctgcctgaagaaaattcggatgttagtggcagagaatgggaagaaggatcaggtggcacagtggatgacattggggattcttctgatgaaatcacgcctagtgtgatgc

SEQ ID NO: 357669 - DNA, 1035 bp, Homo Sapiens
  misc_feature (842)..(842): n is a, c, g, or t
cggtccggaattctccggatcggggcgggaggaggcggggccaggcctggtctctgataacgggatgggtggtgctggacctcgggcggggccgggcctcgtggcgggaggaggcagggcagggcctctgggacggggctggacggcttgttgacggaaacgagcccttgacgctgtggcccggaagtggagcggctgtcgcagtgcggctccggcagtggcagcggaggcctgtgtttgcggccttcggcaagcgactgagatggcgagcgcaactgcacctgcagccgcagtccccaccctggcttcgcctttggagcagctccggcacttggcggaggagctgcggttgctcctgcctcgagtgcgggtcggcgaagcccaggagaccaccgaggagtttaatcgagagatgttctggagaagactcaatgaggcagctgtgactgtgtcaagggaagccacgactctgaccatagtcttctctcagcttccactgccgtctccacaggaaacccagaagttctgtgaacaagtccatgctgccatcaaggcatttattgcagtgtactatttgcttccaaaggatcaggggatcaccctgagaaagctggtacggggcgccaccctggacatcgtggatggcatggctcagctcatggaagtactttccgtcactccaactcagagccctgagaacaatgaccttatttcctacaacagtgtctggggttgcgtgccagcagatgcctcagataccaagagataacaaagctgcagctcttttgatgctgaccaagaatgtggattttgtgaaggatgcacatgaagaaatggagcangctgtggaagaatgtgacccctactctggcctcttgaatgatactgaggaggacaactctgacaccacaatcatgaagattatttgggttgggggttccccagccacccgggacttgtatttgggcccgaggaccaatccagagctcctaatcccagtgccttggcctggggggaacatcccaagccggccct

SEQ ID NO: 357670 - DNA, 1471 bp, Homo Sapiens
  misc_feature (48)..(84): n is a, c, g, or t
tgatagactcactatagggcgaccggagttcatcgcggtggcggccgnnnnnnnnnnnnnnnnnnnnnnnnnnnnnnnnnnnnnatcaggccaaatcggccgagctcgaattcgtcgagagcgggagggcgggctggggcggcggcggggagccggacttgggcgagggaggtggctccgcttacctcagcttttccattcgccaccgttcggcccccacacgccacacccacaagtcggcgaagcccaggagaccaccgaggagtttaatcgagagatgttctggagaagactcaatgaggcagctgtgactgtgtcaagggaagccacgactctgaccatagtcttctctcagcttccactgccgtctccacaggaaacccagaagttctgtgaacaagtccatgctgccatcaaggcatttattgcagtgtactatttgcttccaaaggatcaggccctgagaacaatgaccttatttcctacaacagtgtctgggttgcgtgccagcagatgcctcagataccaagagataacaaagctgcagctcttttgatgctgaccaagaatgtggattttgtgaaggatgcacatgaagaaatggagcaggctgtggaagaatgtgacccttactctggcctcttgaatgatactgaggagaacaactctgacaaccacaatcatgaggatgatgtgttggggtttcccagcaatcaggacttgtattggtcagaggacgatcaagagctcataatcccatgccttgcgctggtgagagcatccaaagcctgcctgaagaaaattcggatgttagtggcagagaatgggaagaaggatcaggtggcacagctggatgacattgtggatatttctgatgaaatcagccctagtgtggatgatttggctctgagcatatatccacctatgtgtcacctgaccgtgcgaatcaattctgcgaaacttgtatctgttttaaagaaggcacttgaaattacaaaagcaagtcatgtgacccctcagccagaagatagttggatccctttacttattaatgccattgatcattgcatgaatagaatcaaggagctcactcagagtgaacttgaattatgacttttcaggctcatttgtactctcttcccctctcatcgtcatggtcaggctctgatacctgcttttaaaatggagctagaatgcttgctggattgaaagggagtgcctatctatatttagcaagagacactattaccaaagattgttggttaggccagattgacacctatttataaaccatatgcgtatatttttctgtgctatatatgaaaaataattgcatgatttctcattcctgagtcatttctcagagattcctaggaaagctgccttattctctttttgcagtaaagtatgttgttttcattgtaaagatgttgatggtctcaataaaatgctaactgccagtgtggagaga

SEQ ID NO: 357671 - DNA, 1572 bp, Homo Sapiens
  misc_feature (1491)..(1491): n is a, c, g, or t
tatttaagtgtaaagaatgttcaaaagcctttagccaaagttcagctcttattcaacatcaaataacgcatactggagagaaaccctacatatgtaaagaatgtgggaaagcctttactctcagtacatccctttataaacatctaagaacccatactgtggagaaatcctacagatgtaaagaatgtggtaaatccttcagccgaagtcaggcctttttatacatcaaaaaattcatgctgaagaaaacccttgtaagtataatccgggtaggaaggcatctagttgcagcacatccctttctggatgtcaaagaattcattctagaaagaagtcctacttatgtaatgaatgtggcaacacctttaagtctagctcatcccttcgttatcatcagagaattcacactggagagaagccttttaaatgtagtgaatgtgggagagccttcagccagagtgcctctcttattcaacatgaaagaattcacaccggagaaaagccctatagatgcaatgaatgtgggaaaggctttacttctatttcacgacttaatagacaccgaatcattcatactggagagaagttttataattgtaatgaatgtggtaaagccttaagctcccactcaacacttattattcacgagcgaattcatactggagaaaaaccatgtaaatgtaaagtatgtggaaaagccttcagacagagttcagctctcattcaacatcagagaatgcatactggagaaagaccctataaatgtaacgagtgtgggaaaacattcaggtgtaactcatcacttagtaatcaccagagaattcatactggagagaaaccatatcgatgtgaggaatgtgggatatcttttggccaaagttcagctcttattcagcatcgaaggattcatacaggagaaaaaccctttaaatgtaatacatgtggaaaaacttttagacaaagctcatcacgtattgcacatcagagaattcatactggagagaaaccctatgaatgtaatacatgtgggaaacttttcaaccataggtcatcccttactaatcattataaaattcatatcgaagaggacccctagaaagtagatttgtatgtgtgaaagccttaaaccaaagctcatcgaagaatacatccttgagagagatgtaataaatgtaatggatgtgaaaaaaactgtaataatttagccctcattaggtatttaatcccatggataaacctcagctatataatagatatgaggaaagtgtttgtgcctgtcagacacccaaaaaaataacctgagatgaacaatttacaattgaagacattgactttagccatttgtgaaatgggtttgcctttcccctttccctacagacgtatatgctagatgccacgtgatcaccagaaacagatatccgagtgggtggggaggtgtgctttagatttctcattagaagaccaccaaactggtaatatttttatagcatngtaatagcttgatcaaattgtacctttttagagaaaaggaccaaaataaaagaaaaatgaattatgaactacctctcagtc

SEQ ID NO: 357672 - DNA, 1083 bp, Homo Sapiens
  misc_feature (57)..(57): n is a, c, g, or t
  misc_feature (602)..(682): n is a, c, g, or t
  misc_feature (719)..(821): n is a, c, g, or t
  misc_feature (846)..(846): n is a, c, g, or t
  misc_feature (860)..(861): n is a, c, g, or t
  misc_feature (883)..(884): n is a, c, g, or t
  misc_feature (917)..(1035): n is a, c, g, or t
  misc_feature (1047)..(1047): n is a, c, g, or t
  misc_feature (1079)..(1079): n is a, c, g, or t
ggattccatacgggagaaaaacccctttaaatgtaatacatgtggaaaaaacttttnagacaaagcctcatcaccttactgcacatcaaagaattcatactggagagaaaccctatgaatgtaatgcatgtgggaaactctttagccagaggtcatcccttactaatcattataaaattcacattgaagaggactccttaaaagccgatttgcatgtgtgaaagccttaaaccaaaactcatcagagaatacatgcttgagagtgatttattaaatataatgaatatgagaaaactcttagttctcatcagatactaagttttaagaataaactttagctatgtaataacttatgggaaaagcttttatacttgtcactcactgtttaaaatatcccgagacagttcactgttgcagacattgaaattggccatttgtaagataaaagaatacaaatggagagatttgcatgggatgcagaaatatggaagactaaccaagcagaccaggagagaccagcaatagtgtcccagagaccatgatgtctgagcccagttttggaagaatactttctttccaggctgggcatggtggctcacacnnnnnnnnnnnnnnnnnnnnnnnnnnnnnnnnnnnnnnnnnnnnnnnnnnnnnnnnnnnnnnnnnnnnnnnnnnnnnnnnnacaacaacaaaattagccaggcatagtggtgcacatnnnnnnnnnnnnnnnnnnnnnnnnnnnnnnnnnnnnnnnnnnnnnnnnnnnnnnnnnnnnnnnnnnnnnnnnnnnnnnnnnnnnnnnnnnnnnnnnnnnnnnngaaagagcaagactctgcctccccnacatgcgccccccnncccctgcccctgccagaaaaanngtttgtggatccctgttatcagaataaggacannnnnnnnnnnnnnnnnnnnnnnnnnnnnnnnnnnnnnnnnnnnnnnnnnnnnnnnnnnnnnnnnnnnnnnnnnnnnnnnnnnnnnnnnnnnnnnnnnnnnnnnnnnnnnnnnnnnnnngataattgtttnaattttgttgttaaccaatgtttcattcactnaaat

SEQ ID NO: 357673 - DNA, 827 bp, Homo Sapiens
  misc_feature (35)..(35): n is a, c, g, or t
cggcgcgccgcggggtgagcggcgccgggcctgangtcgcccagacgccgtcggggcggagccgggtcgcgaggctgcatcccggccggcggttccggagcctcgcggctggggaggcgcggcccgggacgctcgagcttagggagatctgccttctggagactgcgccgtcctcccgggagagccagaaagaggacatggctgctgggcagcgggaagcgaggccccaggtgtcactgacgtttgaggatgtggctgtgctgtttacccgagatgagtggagaaagctggccccttctcagagaaacttgtaccgggatgtgatgctggagaactataggaacctggtctcactggggctcccatttaccaaaccaaaagtgatctccctgttgcagcaaggagaagatccctgggaggtggagaaagacggttctggcgtctcctctctaggatcgaagagcagtcataaaaccacaaagtcaacgcaaacacaagactcttcatttcagggactgatactgaaaagatccaacaggaatgtaccttgggatttgaaattagaaaagccttacatatatgaaggcagattagagaaaaagcaggataaaaagggaagttttcagatagtttcagccacccacaaaaaaatccccactatagaaagaagccataaaaatactgaattgagccaaaacttcagcccaaagtcagtgcttattaggcaacagatacttcccagagaaaaaacaccaccaaaatgtgaaatacaaggaaacagcctcaaacagaattcacaattacttaatcaaccaaaaattacagca

SEQ ID NO: 357674 - DNA, 1019 bp, Homo Sapiens
  misc_feature (878)..(878): n is a, c, g, or t
  misc_feature (896)..(896): n is a, c, g, or t
  misc_feature (934)..(934): n is a, c, g, or t
  misc_feature (1009)..(1009): n is a, c, g, or t
gagcgggccttgctcctctaggtcccaggcgctctgcggagctttcgctgcccggtgagcggcgccgggcttgaggtcgcccagacgtcggaggagccgggtcacgaggctggagcttcctgcttgcagagtgcggcggggaggcgcggcccgggaacgcgggatcctggggagatctgccttctggagactgcgccgtcctcccgggagagccagaaagaggacatggctgctgggcagcgggaagcgaggccccaggtgtcactgacattcgaggacgtggctgtgctctttacctgggatgagtggagaaagctggctccttctcagagaaacttgtaccgggatgtgatgctggagaactataggaacctggtctcactgggactctcatttaccaaaccaaaagtcatctccctgttgcagcaaggagaagatccctgggaggtggagaaagacagttctggtgtctcctctctaggatgtaagagcacacctaaaatgacaaagtcaactcaaactcaggattcatttcaggagcagataacggaaaagattgaaaacgggatgaaccctggaacttcatatcagaaagatcctgcatatatgaacgagaacacttaaagaaacagcaggacaaaaatgaaaatttacaaataatttcagttgcccatacaaaaatccttactgtagatagaagccataaaaatgttgaatttggccaaaacttctacctgaaatcagtcttcattaagcaacagagatttgctaaagaaaaaactccatcaaaatgtgaaatacaaagaaatagtttcaagcagaattcaaatttacttaaccaatcaaaaatcaaaacagcagagaaacgctataaatgnagtacatgtgaaaaagcnttcattcacaattcatcccttcgtaaacatcagaaaancacactggagaaaattatttaaatgtaaagaatgtttaaaagctttcagccaaagttctgctcttattcacatcnaagactcata

SEQ ID NO: 357675 - DNA, 786 bp, Homo Sapiens
ggatcagggtgaaaaaaaggggagttagtgtttaatgggtaagaggttcagtttcgcaagacaaaagatttctggatattaaaagcacaacagtatgagtataattaatgctacagaactgttaaaaaagagtctctttcagatttagatactagaaaatgtatgagtaaaatacgatgtctgaaatttgctttcaaataatctgaaggctggttggggaagttgttggagtcatacatgaaataaaactggtattagttgacaacccttaaaactgagtgggtttattataccattctctctctacttttgtgtatgtttgaaattttccatcataaaggagtttttaaaaacccaacattatcaaaatgaaaaataatcaatacaagtgctggataagaaagtcaaggaaatatcacagaatgtataatttaaaagatttgctgaggtgtgtgtatcacctgagctcaggagttctttttaagttaatgaagaaggatatgcacaatatgtgaggcaaaaataagtaaataaatagcagtttacagaacgaaaggtatagaaggatctggttctctaagagttcaatttctatgaaagtgaaatatgctattattcctaggttaaaggaaataaggattgattttgcgcctctgacttactgttttcctttattatttttcttgagactgagtttagctctagttgcccagactggagtgcagtggactcgatccactgcacttggcaatctcggctccacagcactcaatccactatactcga

SEQ ID NO: 357676 - DNA, 1157 bp, Homo Sapiens
gaggcctgggtggcgaattcggcacgagggtggcggcgagaagatggcgacttcgaacaatccgcggaaattcagcgagaagatcgcgctgcacaatcagaagcaggcggaggagacggcggccttcgaggaggtcatgaaggacctgagcctgacgcgggccgcgcggctccagctccagaaatcccagtacctgcaactgggccccagccgaggccagtactatggcgggtccctgcccaacgtgaaccagatcgggagtggcaccatggacctgcccttccagacccccttccaatcctcgggcctggacaccagccggaccacccggcaccatgggctggtggacagggtgtaccgggagcgtggccggctcggctccccacaccgccggcccctgtcagtggacaaacacggacggcaggccgacagctgcccctatggcaccatgtacctctcaccacccgcggacaccagctggagaaggaccaattctgactccgccctgcaccagagcacaatgacgcccacgcagccagaatcctttagcagtgggtcccaggacgtgcaccagaaaagagtcttactgttaacagtcccaggaatggaagagaccacatcagaggcagacaaaaacctttccaagcaagcatgggacaccaagaagacggggtccaggcccaagtcctgtgaggtccccgggaatcaacatcttcccgtctgccgaccaggaaaacactacagccctgatcccccgccaccacaaaaaaggggggtcccctgcccgaactgaccaagcatccactttcccctcccgttcccgaaccccgctgggaccccgaagaagcccacctttccctggattggagcagcctccagccagcaccggggaaccttcccggccaaccctgaacgcacctgggggacttggcgggcccccgggccaggggaaatgagcaacccccgggggtcctttccacaagcaaccggtccggcttgggggtaaacccccctgtcccctgggacacaaaaggccaaggcctccctccgcggatatccccacacccgggtccccccggtgcaacccccttagcttacgggcgttggaccactgtggagcccccctggtcccctggggcacgaccgtgtgccccaaa

SEQ ID NO: 357677 - DNA, 1231 bp, Homo Sapiens
  misc_feature (20)..(20): n is a, c, g, or t
  misc_feature (34)..(34): n is a, c, g, or t
  misc_feature (56)..(56): n is a, c, g, or t
  misc_feature (63)..(63): n is a, c, g, or t
  misc_feature (164)..(164): n is a, c, g, or t
  misc_feature (927)..(927): n is a, c, g, or t
gaaaacagaggagagaggtntgagcagcagggcntggacccagaccctccctcccntggcccntagaagggaggtagcatctcccccatccctcacactccagccctgcccctgccctccagtctggggctcagacaagaggggcaggatgcagaggtgggctntctaggactcaggctgtggggaggaggctcccactcccccgggctgcggaagagaaggcaggctctcccccctgcaaggccacctcgtcctacccctcgatgaccagggacccgcctgcaggatttggagacaaagcagagacaactcacctgggttcgggggctggagttgcccaggaggtaggagcgggtgaccagattgtccccgaagctgccacccccactgccccccacactgcggtagctgcgagtgaccgtgacactggaggcagaagagccagaggagatgggtccgcccacctgggctcctgagccgctggcagatgccttgtcggcaggctgcccgcaggtcccgcacagcacggtgcgcgagcgcaggttgtactcagcggggtcccccgagctgctgcagtgggagccctgggaagggagacaaggctcaggcgggacggcgagtctgggactgaccactcaggcccaaccaggctccaggctcctgcaggctcccagccgccaggcaggaaggtgtggttctgtgcccaaggagccagcgggcaatgggggtttgggaggctaggggcccggaggaggagagggaagacataaaaggggagaaggctcaggaagacttggggacagagaaccagagcagtgactctgactctgttctagctactctgagcttaagaggaaaagaagagagaacgggagcaagcttgtagggcagcaggcatgcactattaattggagtggaggggcggtncaggaatgagagagaacattcttgcaggaaaaatgagggaaatgagaggatatgcatgcaacaagaatgggggagagaggcagggcgggcatgccccacgtctgtcctcccctccccttcccagaagacaaatccagacccttgtccactgctcccacaggaatattccatggcatcagaaagttcccactcccttccttaccagagtagggcacccagacacctgggttccctgttcaaggtatagggaggagagagaagaaaggccaggccagcgagtaaagttccaaaacattctttaatg

SEQ ID NO: 357678 - DNA, 501 bp, Homo Sapiens
  misc_feature (425)..(449): n is a, c, g, or t
cacggctcccactgcagcagctcgggggaccccgctgagtacaacctgcgctcgcgcaccgtgctgtgcgggacctgccgggcagcctgccgacaagggcatctgccagcggctcaggagcccaggtgggcggacccaatctcctctggctcttctgcctccagtgtcacggtcactcgcagctaccgcagtgtggggggcagtgggggtggcagcttcggggacaatctggtcacccgctcctacctcctgggcaactccagcccccgaacccagagcccccagaactgcagcatcatgtaatctgggacctgccaggcaggggtgggggtggaggcttcctgcgtcctcctcacctcatgcccaccccctgccctgcacgtcatgggagggggcttgaagccaaagaaaaataaccctttggnnnnnnnnnnnnnnnnnnnnnnnnnctaagagaagttattttctacagtggttttatactgaaggaaaaacacaagc

SEQ ID NO: 357679 - DNA, 1054 bp, Homo Sapiens
  misc_feature (630)..(630): n is a, c, g, or t
  misc_feature (675)..(675): n is a, c, g, or t
  misc_feature (859)..(859): n is a, c, g, or t
  misc_feature (883)..(883): n is a, c, g, or t
  misc_feature (900)..(900): n is a, c, g, or t
  misc_feature (910)..(910): n is a, c, g, or t
  misc_feature (950)..(950): n is a, c, g, or t
  misc_feature (981)..(982): n is a, c, g, or t
  misc_feature (985)..(985): n is a, c, g, or t
  misc_feature (989)..(989): n is a, c, g, or t
  misc_feature (995)..(995): n is a, c, g, or t
  misc_feature (1008)..(1009): n is a, c, g, or t
  misc_feature (1011)..(1011): n is a, c, g, or t
  misc_feature (1017)..(1017): n is a, c, g, or t
  misc_feature (1024)..(1024): n is a, c, g, or t
  misc_feature (1029)..(1029): n is a, c, g, or t
  misc_feature (1035)..(1036): n is a, c, g, or t
  misc_feature (1039)..(1040): n is a, c, g, or t
ccgacggcccgcatgctggcctccgtgacgcggcctcctccgcgcctcgcggcaatggcgtcggaggggccgcgggagcccgaaagcgagggcatcaagttatcagcagatgtcaaaccatttgtccccagatttgccgggctcaatgtggcatggttaaagtcctcagaagcatgtgtcttccccagctctgcagccacatactatccgttagttcaggaaccaccagtgaaagagcagaaaatatatactgaagacatggcctttggagcttcaacttttccacctcagtatttatcttctgagataactcttcatccatatgcctattctccttatacccttgactccacacagaatgtttactcagtgcctggctcccagtatctttataaccaacccagttgtgaccgaggttttcaaacagtgaagcatcgaacatgagaacacatgccctctcccaccaagaaatgaaagctctggtttaagaagaaaacctatgatgagacaaaaaacgtatgatcagcaaaagtttgacagtgaaagggctgatggaactatatcatctgagataaaatcagctagaggttcacatcatttgtccatttacgctgagaatagtttgaaatnagatggttaccataagcgaacagacaggaaatccagaatcattgnaaaaaatgtatctacctccaaacctgagtttgaatttaccacactggactttcctgaactgcaaggtgcagagaacaatatgtcagagatacagaagcaacccaagtggggacctgtccactctgtctctaccgacatttctcttctaagagaagtagtaaaaccagctgcagtgttatcaaanggtgaaatagtggtgaaaaataanccaaatgaatctgtaantgctaatgcngctaccaattctccttcatgtacaagagagttatcttggncacaatggggttatgttgtcggcagacattnntanagantgtcancgcccctaaaaanntncttttntgtaacnttaanacattnnttnncacaggtccaaaaa

SEQ ID NO: 357680 - DNA, 1150 bp, Homo Sapiens
  misc_feature (1142)..(1142): n is a, c, g, or t
  misc_feature (1147)..(1147): n is a, c, g, or t
cccgggattcggccctaaatccctagatggccctgcccttcatttcgcgtccttcggttgcctgggaaggacgagctcagggcggacgcacccaccccggccctcccgccgctccacccagcaccggagggtaggggcggcccagcttcagggagccctgattgggtgtacgcagggaaagcctcctgctattggctgcgatctccctcccctttctccgcagatgactgtcatggtgctgagcgtacagctacagcgcagggcactccgccggaaatgcgagccgcacgtgccgggcgctggggattcgagccccgggcccagcctgatcgctgacggcggcggcgggcacagcggcagtctgtggggtggctggggcatggcgggtgcctgccccaactggggagacaaggcaccgcagggcaagctgcccatggccctggggctctggccgctgtgggttcaagacgaggaccagcctgacactggaagtgcgggcgcagaattagaggaggcacaattagaggctgaggcagagggggaagacagatgagcctccaaaataaaggaccctgggcttgcttccgaccttactccttctcagcctctacccccacttgtagcagctattcccgcctcatcagccagccctgcggcagttcccgtcgagccccgcccttttctacctatccccttctccagccccttcccgcccaattcacggccccacccctgacctttctcgcccgggtgggcatcacccccgtctcgccagcaccccttcgacttctctgacctcatctcctttctctatagctcgggttcatgacgctctcgatattcctgtgcagaaacctggaccacgtctacaaccggctcgctcgataccgttaggccccgccctccccaaagtcccgccccgcccccgtcacgtgcgctgggcacttccctgctgcctgtaaatatttgtttaatccccagttcgcctggagccctccgccttcacattcccctggggacccacgtggctgcgtgcccctgctgctgtcacctctcccacgggacctggggctttcgtccacagcttcctgtccccatctgtcggcctaccaccacccacaagattattttcacccaaaccncaaanaaa

SEQ ID NO: 357681 - DNA, 1231 bp, Homo Sapiens
ctccgtctctctttctctctcagcctctttctttctccctgtctcccccactgtcagcacctcttctgtgtggtgagtggaccgcttaccccactaggtgaagatgtcagcccaggagagctgcctcagcctcatcaagtacttcctcttcgttttcaacctcttcttcttcgtcctcggcagcctgatcttctgcttcggcatctggatcctcatcgacaagaccagcttcgtgtcctttgtgggcttggccttcgtgcctctgcagatctggtccaaagtcctggccatctcaggaatcttcaccatgggcatcgccctcctgggttgtgtgggggccctcaaggagctccgctgcctcctgggcctgtattttgggatgctgctgctcctgtttgccacacagatcaccctgggaatcctcatctccactcagcgggcccagctggagcgaagcttgcgggacgtcgtagagaaaaccatccaaaagtacggcaccaaccccgaggagaccgcggccgaggagagctgggactatgtgcagttccagctgcgctgctgcggctggcactacccgcaggactggttccaagtcctcatcctgagaggtaacgggtcggaggcgcaccgcgtgccctgctcctgctacaacttgtcggcgaccaacgactccacaatcctagataaaggtgatcttgccccagctcagcaggcttggacacctggcgcggtccagacacagtgcagacatctgcgctgtccctgcagagagccacatctaccgcgaggctgcgcgcagggcctccagaagtggctgcacaacaaccttatttccatagtgggcatttgcctgggcgtcggcctactcgagctcgggttcatgacgctctcgatattcctgtgcagaaacctggaccacgtctacaaccggctcgctcgataccgttaggccccgccctccccaaagtcccgccccgcccccgtcacgtgcgctgggcacttccctgctgcctgtaaatatttgtttaatccccagttcgcctggagccctccgccttcacattcccctggggacccacgtggctgcgtgcccctgctgctgtcacctctcccacgggacctggggctttcgtccacagcttcctgtccccatctgtcggcctaccaccacccacaagattatttttcacccaaacctcaaataaatcccctgcgtttttggtaaaaaaaa

SEQ ID NO: 357682 - DNA, 1289 bp, Homo Sapiens
gaggcctgggtggcgaattcggcacgaggccatgttggaggctccgggcccgagtgatggctgcgagctcagcaaccccagcgccagcagagtcagctgtgccgggcagatgctggaagtgcagccaggattgtatttcggtggggccgcggccgtcgcggagccagatcacctgagggaagcgggcatcacggccgtgctaacagtggactcggaggagcccagcttcaaggcggggcctggggtcgaggatctatggcgcctcttcgtgccagcgctggacaaacccgagacggacctactcagccatctggaccggtgcgtggccttcatcggtcaggcccgcgctgagggccgtgcggtgttggtgcactggtctctttttcagtcatgcaggagtcagtcgaagtgtggccataataactgcttttctcatgaagactgaccaacttccctttgaaaaagcctatgaaaagctccagattctcaaaccagaggctaagatgaatgaggggtttgagtggcaactgaaattataccaggcaatgggatacgaagtggatacctctagtgcaatttataagcaatatcgtttacaaaaggttacagagaagtatccagaattgcagaatttacctcaagaactctttgctgttgacccaactaccgtttcacaaggattgaaagatgaggttctctacaagtgtagaaagtgcaggcgatcattatttcgaagttctagtattctggatcaccgtgaaggaagtggacctatagcctttgcccacaagagaatgacaccatcttccatgcttaccacagggaggcaagctcaatgtacatcttatttcattgaacctgtacagtggatggaatctgctttgttgggagtgatggatggacagcttctttgcccaaaatgcagtgccaagttgggttccttcaactggtatggtgaacagtgctcttgtggtaggtggataacacctgcttttcaaatacataagaatagagtggatgaaatgaaaatattgcctgttttgggatcacaaacaggaaaaatatgaacatgatattttatagcttgggaagaaacttgcagatgatatgtgctgcctttgcttcttatcattcatggcagattgtttgtgctttcaacatttcatttgaaatgggagaagataaaatcacttgatgtaacctggaaactatgctttacatggcaatcaaagccttttgatcatgtacattttatttgatattaaaatcttttataaccagaaaaaaaa

SEQ ID NO: 357683 - DNA, 1074 bp, Homo Sapiens
  misc_feature (828)..(828): n is a, c, g, or t
  misc_feature (958)..(958): n is a, c, g, or t
  misc_feature (1001)..(1001): n is a, c, g, or t
  misc_feature (1006)..(1006): n is a, c, g, or t
  misc_feature (1014)..(1014): n is a, c, g, or t
  misc_feature (1030)..(1030): n is a, c, g, or t
  misc_feature (1036)..(1036): n is a, c, g, or t
  misc_feature (1043)..(1043): n is a, c, g, or t
  misc_feature (1046)..(1046): n is a, c, g, or t
  misc_feature (1049)..(1049): n is a, c, g, or t
  misc_feature (1069)..(1069): n is a, c, g, or t
gggatgtcgggccccgggccgccaccgtcacctcggccgctgccgctgtcgccatcgccttgtttccccatcccccgccatggccgaggacctctctgcggccacgtcctacaccgaagatgatttctactgccccgtctgtcaggaggtgctcaaaacgcccgtgcggaccacggcctgtcagcacgtcaataggagtgaaacatccacatctgataacacagaaacttaccaagagaatacaagttcttctggtcatcctacttttaagtgtcccctgtgtcaagaatcaaattttaccagacagcgtttactggatcactgtaacagtaatcacctatttcagatagttcctgtgacatgtcctatttgtgtgtctcttccttggggagatcctagccagattaccagaaatttcgttagtcatctaaatcagagacatcaatttgattatggagaatttgtgaatcttcagctagatgaagaaacccaataccaaactgctgttgaagaatcttttcaagtaaacatctgaaggctgtagacatctctgcatctttgtacctgcaagtgccatctttaagggggaaactacatgaagtcaccgttacagtaacttgatgtgtatattaataaaagtaattcagtcattttagtttttgattgaaaataaaggtagggcttctaaaaacttcatcatcttgataagttaaaaaatgaaagttatgacattagctttaaaggtgtaaaaaagatgtttcactaatgtaacggtgaaagagaatccctgttgtactttatctttttgtaatattatttttgaatttntcattatgttgcttttgaaatttgatgcattcctcccatttactttattattgtacacatttaacacacagtagcaaattttgaacgatgtgattgatataacctaacaaatctgagccagttattattnagagttgcagaatagaaacttgaagtgctaaatggaataatcnaaggnaatttttnaatggaggttctagcngaaaantcaatanganganattgttttttataactttanatttt

SEQ ID NO: 357684 - DNA, 1640 bp, Homo Sapiens
  misc_feature (1283)..(1287): n is a, c, g, or t
  misc_feature (1289)..(1381): n is a, c, g, or t
  misc_feature (1383)..(1383): n is a, c, g, or t
  misc_feature (1385)..(1403): n is a, c, g, or t
  misc_feature (1453)..(1461): n is a, c, g, or t
  misc_feature (1499)..(1559): n is a, c, g, or t
  misc_feature (1586)..(1595): n is a, c, g, or t
agcgggcgagacaggccgcacttcacaccccgtgcctccccgcctctcctggctcctccgcccagatccccggcgctcccgcgttcggtgacggccgggtaggctgtaggcagcgcaatgccaagacagagctgctggcggcggcgggcgaatctccctgcaccatgagcctcggctccggccccgttaggggccgataagcacagcgcacgccgccctccatttgccccggggcctcggctgcgaagatagcggcggccggacaggaagctcgaggaaagcgctgggccgggtctctacgaacacgtgaaggaaaagcagctccgtccacaacgccgcttcggggctcctagggagtcgggccccgggccgccaccgtcacctcggccgctgccgctgtcgccatcgccttgtttccccatcccccgccatggccgaggacctctctgcggccacgtcctacaccgaagatgatttctactgccccgtctgtcaggaggtgctcaaaacgcccgtgcggaccacggcctgtcagcacgttttctgtagaaaatgtttcctgactgcaatgagggaaagcggagcacattgtcccctatgtcgtggaaatgtgactagaagagagagagcatgtcctgaacgggccttagaccttgaaaatataatgaggaagttttctggtagctgcagatgctgtgcaaaacagattaaattctatcgcatgagacatcattacaaatcttgtaagaagtatcaggatgaatatggtgtttcttctatcattccaaactttcagatctctcaagattcagtagggaacagcaataggagtgaaacatccacatctgataacacagaaacttaccaagagaatacaagttcttctggtcatcctacttttaagtgtcccctgtgtcaagaatcaaattttaccagacagcgtttactggatcactgtaacagtaatcacctatttcagatagttcctgtgacatgtcctatttgtgtgtctcttccttggggagatcctagccagattaccagaaatttcgttagtcatctaaatcagagacatcaatttgattatggagaatttgtgaatcttcagctagatgaagaaacccaataccaaactgctgttgaagaatcttttcaagtaaacatctgaaggctgtagacatctctgcatctttgtacctgcaagtgccatctttaagggggaaactacatgaagtcaccgttacagtaacttgatgtgtatattaataaaagtaattcagtcnnnnnannnnnnnnnnnnnnnnnnnnnnnnnnnnnnnnnnnnnnnnnnnnnnnnnnnnnnnnnnnnnnnnnnnnnnnnnnnnnnnnnnnnnnnnnnnnnanannnnnnnnnnnnnnnnnnncgccctaaaaaaatcccccagagggggcgccaattataccgccacccccnnnnnnnnngagaaaggggggccccctatgggggggctatttataannnnnnnnnnnnnnnnnnnnnnnnnnnnnnnnnnnnnnnnnnnnnnnnnnnnnnnnnnnnnaattttggagaaaaacacctttttttnnnnnnnnnnccatttggggacacacccccaacagaattttagccccctcggggg

SEQ ID NO: 357685 - DNA, 1696 bp, Homo Sapiens
  misc_feature (1071)..(1071): n is a, c, g, or t
  misc_feature (1076)..(1076): n is a, c, g, or t
  misc_feature (1080)..(1080): n is a, c, g, or t
  misc_feature (1170)..(1313): n is a, c, g, or t
  misc_feature (1327)..(1441): n is a, c, g, or t
  misc_feature (1670)..(1670): n is a, c, g, or t
  misc_feature (1685)..(1685): n is a, c, g, or t
  misc_feature (1687)..(1687): n is a, c, g, or t
  misc_feature (1689)..(1689): n is a, c, g, or t
  misc_feature (1694)..(1694): n is a, c, g, or t
cacttaagggacttaccaatttgggattcttccaggagctgaaaactgattgcaaatatgaaacagatttcactacaggacttgaaccctacattaaaaaacaacaagctccccaaaataattgaaaaagatcttcaccaaagagtagctgcaatgtgaatggcaggatatgaagcaagtaagagatggtgaaaagattatcttaagcttggaattaagtgatgaaagggaccttcgaaattatcaactctaaatacttctttacaggaaaattgaaagcaggtaagaacctgccccctaccgtggagttcttggtgccgtgagttggagttcttggtgcctgggtgcgtccccaaggccactggtcttcagatctttcttacttgagaagaacgcctccgcctcctggctctcccaccagtggtattgccaccaccacacaccagcataaagcacagattgctgcccagctccttggagaggggccagtgcatttgtcaggaattgaaaagttttggagccagttcgaggactttctgctgcacaaagtgttggctggaagcatgattatctcacacagagcgttggaattacttcatgatgatttcaaagaaaattttcttctctaaacactcttatcccaagggcatcctaaagttcctctggaatgcattgggtgggagagaaagttctatgtcaactcttctggcagagggaaaagctgaccgaggaagtcaaaatgaaagaaagaagcagacaggactgaggctccctgagatgcagaaactgaggcacagagcaaggatgtgccacagcagaagcaagttgtgttggcagtaggaaacaagataaagagaagaactcaaagaattgagagaaggctttgaacatgatgatggagaaataacactcttgggagaaatgaagatactttctcctccctggtttacctgagtttccagcacccagtgataagaaaggatggcattagtgatgtgtacacctgcagtgatcgcttcacctttctaaagcagatgccgtggtagacattttgccagccctcctttcacnacccncacngcttggtgtacgctggcagacttttgacctaatttcttaaccctcaaatattccaagacagaacaaagcacacaacaaaaccagaatgannnnnnnnnnnnnnnnnnnnnnnnnnnnnnnnnnnnnnnnnnnnnnnnnnnnnnnnnnnnnnnnnnnnnnnnnnnnnnnnnnnnnnnnnnnnnnnnnnnnnnnnnnnnnnnnnnnnnnnnnnnnnnnnnnnnnnnnnnnnnnnntgtggtggcaaatnnnnnnnnnnnnnnnnnnnnnnnnnnnnnnnnnnnnnnnnnnnnnnnnnnnnnnnnnnnnnnnnnnnnnnnnnnnnnnnnnnnnnnnnnnnnnnnnnnnnnnnnnnnnnnnnnnnagactctgtcacaaaaacaaacaaaaaactgaatgaatggaagcagataagtgcagagagaaacactgatttaccttcagaaagataaaaaagtagtatattgatatacttgtatattgctatctactagtatagcttcagttggtgtatgagtatagaactattgggttgttctttatgtgattactccttcccagttttagtaaagtattccaatttgagggaaacntttcattgtcaatanantnaaaanag

SEQ ID NO: 357686 - DNA, 776 bp, Homo Sapiens
gtaaaataagcgcctcgcagatgtcccgcgccccggttacgttagacctgggaggcagaatccacgccctgcgctcacgggcccacgcacgcacagctgaactttgcagataaaggctcactgatggctcagttgggagcagttgtggctgtggcttccagtttcttttgtgcatctctcttctcagctgtgcacaagatagaagagggacatattggggtatattacagaggcggtgccctgctgacttcgaccagcggccctggtttccatctcatgctccctttcatcacatcatataagtctgtgcagaccacactccagacagatgaggtgaagaatgtaccttgtgggactagtggtggtgtgatgatctactttgacagaattgaagtggtgaacttcctggtcccgaacgcagtgtatgatatagtgaagaactatactgctgactatgacaaggccctcatcttcaacaagatccaccacgaactgaaccagttctgcagtgtgcacacgcttcaagaggtctacattgagctgtttggtaagaaagtctctcctgagcatgccgtgcttaagcagggttcctggaaccccgcgtctctccactgtcctaaagcctggctgcctgcagggtgtgatggtcacttatggacaggacaatgttaaagaatcttgtgctcaggagctggtcacaaaggagttcatggagaatgctgatagctatgcaacaaagatcttagagggcttggaggctttgggcacagggacca

SEQ ID NO: 357687 - DNA, 862 bp, Homo Sapiens
tcccaggttacgctgacaattaatggatattccactttcctggccaaaaggtttttaaatggaggtggaggaaaaccattccaaacccaagggttgatttttttcccttgggaaaaaccccctaccaaaaaactgaatttttataaaccagttaacttatttttgatagatgttcccatttataaatagcagccctttacttcactgtctacaaaattgcaggctgtcacattttacatgttttgaattcaaatgttttaagattagattttctagtaagagttaaaataaaaacaaagttacacagacaggttagttgtcctatgcaaataaaacagctgattttcatgattttgctatttagacagataagagacaaccattggattgacactaatgtgtaggataacatatttttttgtttaaagaggaaatgatagaaacttggggtggggcagctgcagcaggacttgactctactgagagctcttctgtgctcatgggacaagctatcgcaggatgttagtaccggagaggccctcaagttaagacctgagcaaagtgtgctattcagagaagctgagctatccctgctcccggttctactgtggtgaattggtgttttctgaggtctaggcaacaagagctcagagtagaaggagtagacattttcgggaagtgggatgctgggcatgtcatgttgctctaacaagtgattaatagcacgaaaatgggaggaagatgaatgtattttaaatggatactccctatgctagtcttgggaaatgaccttcttttcttgagacggagccttgctctattgcccaagctagagtgggatggcatgatcttggctcacgac

SEQ ID NO: 357688 - DNA, 1280 bp, Homo Sapiens
gaaaacaaaaatgccgcctaattggtcactggccctttctcatgaatgaaggaggtttctgttttaagaaataaagtgactcctcagccgttgattcactgcccacagggagattttgagcagaggcttcctaggctccgtagaaatttgcatacagcttccacttcctgcttcagagcctgttcttctacttacctgggcccggagaaggtggagggagacgagaagccgccgagagccgactaccctccgggcccagtctgtctgtccgtggtggatctaagaaactagaatgaaccgaagcattcctgtggaggttgatgaatcagaaccatacccaagtcagttgctgaaaccaatcccagaatattccccggaagaggaatcagaaccacctgctccaaatataaggaacatggcacccaacagcttgtctgcacccacaatgcttcacaattcctccggagacttttctcaagctcactcaaccctgaaacttgcaaatcaccagcggcctgtatcccggcaggtcacctgcctgcgcactcaagttctggaggacagtgaagacagtttctgcaggagacacccaggcctgggcaaagctttcccttctgggtgctctgcagtcagcgagcctgcgtctgagtctgtggttggagccctccctgcagagcatcagttttcatttatggaaaaacgtaatcaatggctggtatctcagctttcagcggcttctcctgacactggccatgactcagacaaatcagaccaaagtttacctaatgcctcagcagactccttgggcggtagccaggagatggtgcaacggccccagcctcacaggaaccgagcaggcctggatctgccaaccatagacacgggatatgattcccagccccaggatgtcctgggcatcaggcagctggaaaggcccctgcccctcacctccgtgtgttaccccccaggacctccccagaactctcaggtccagggagtttccctccagtttgaaacctcagaggtatccagcatgtggaccgatgcctgcctccccaatcttttccccacatggctcctggaacctatcattaccatttggccctggaagtccccgattacccaggggccatatgggccatgaactaccccttcgagcaggcctaaccagcaaggggattccagccggggttcttgcctggggaagcccccttgcctggaaaccaatggtggaaaagacctgccaccccgtgggagaaaggttattccctgaatttact

SEQ ID NO: 357689 - DNA, 2833 bp, Homo Sapiens
  misc_feature (55)..(87): n is a, c, g, or t
  misc_feature (1703)..(1703): n is a, c, g, or t
accaccccccccgaatgatgactcttgggcccgcgtatcgcggtggcggcgcatnnnnnnnnnnnnnnnnnnnnnnnnnnnnnnnnnatcaggccaaatcggccgagctcgaattcgtcgatgagcgggcttcccagctgccgtctgcaccagccatggactgctacacggcgaactggaacccactcggggactctgccttttaccggaaatatgagctgtacagcatggactgggacctgaaggaggaactcagggattgcctggtggctgctgcaccctatgggggccccattgcactgctgaggaacccctggcggaaggagaaagctgctagtgtgaggccagtgctcgatatatactctgcttccggcatgcctctggccagcctgctgtggaagagtggacccgtggtgtccctgggctggtcagctgaggaggagctgctctgtgtgcaggaagatggtgctgtactggtttatgggcttcatggtgacttccggagacacttcagcatgggcaatgaagtgctccagaaccgggttctggatgcccggatctttcacactgagtttggttccggagtggccatcctcacaggggcccaccgcttcaccctcagtgccaatgtgggtgacctcaaactccgccggatgccagaggtgccaggtctgcaaagtgcaccctcctgctggactgtgctgtgccaggaccgagtggcacacattcttctggctgtggggcctgacctttacctcttggaccatgcagccctgctccgcagtgacgccccctggcctggcccaggagtaagcagcttcctacagatggctgtctccttcacctaccgaaacctggcactcttcacagacacaggctacatctggatggggacagcatcactcaaggagaagctatgtgagttcaactgcaacatccgggcacctccaaagcagatggtctggtgcagccgtcctcgtagcaaggagaaggccgtggtggtggcctgggaaaggcggctgatggtggtgggcgatgcacccgagagcatccagtttgtgctggatgaggactcctacctggtgcctgagctcgatggggtccgcatcttctcccgcagcacccacgagttcctgcatgaggttccagcggccagcgaggaaatcttcaaaattgcctcaatggcccccggggcgctgctcctggaggctcagaaggagtatgagaaagagagccagaaggcggacgagtacctgcgggagatccaggagctgggccagctgacccaggccgtgcagcagtgcattgaggctgcaggacatgagcaccagccagacatgcagaagagtctgctcagggccgcctccttcggaaagtgtttcctggacagatttccacccgacagcttcgtgcacatgtgtcaggacctgcgtgtgctcaatgctgttcgggactatcacatcgggatcccgctcacctatagccaatataagcagctcaccatccaggtgctgctggacaagctcgtgttgcggagactttaccccctggccatccagatatgcgagtacttgcgccttcctgaagtacagggcgtcagcaggatcctggcccactgggcatgctacaaggtgcaacagaaggatgtctcagatgaggatgtggctcgagccattaaccagaagctgggggacacgcctggngtctcttactccgacattgctgcacgagcctatggttgtggccgcacggagctggccatcaagctgctggagtatgagccacgctcaggggagcaggtaccccttctcctaaagatgaagaggagcaaactggcactaagcaaggccatcgagagcggggacactgacctggtgttcacggtgttgctgcacctgaagaacgagctgaaccgaggagattttttcatgacccttcggaatcagcccatggccctcagtttgtaccgacagttctgtaagcatcaggagctagagacgctgaaggacctttacaatcaggatgacaatcaccaggaattgggcagcttccacatccgagccagctatgctgcagaagagcgtattgaggggcgagtagcagctctgcagacagccgccgatgccttctacaaggccaagaatgagtttgcagccaaggctacagaggatcaaatgcggctcctacggctgcagcggcgcctagaagacgagctggggggccagttcctagacctgtctctacatgacacagttaccaccctcattcttggcggtcacaacaagcgtgcagagcagctggcacgtgacttccgcatccctgacaagaggctctggtggctgaagctgactgccctggcagatttggaagattgggaagagctagagaagttttccaagagcaagaaatcacccattggctacctgccttttgtggagatctgcatgaaacaacataacaaatacgaagccaagaagtatgcttcccgcgtgggtcccgagcagaaggtcaaggctttgcttcttgttggcgatgtggctcaggctgcagatgtggccatcgaacaccggaatgaggctgagctgagcctcgtattgtcccactgcacgggagccacagatggggccacagctgacaagattcaacgggccagggcacaagcccagaagaagtgaggagtccatcctgtacatctcaagcaaggggttcctcccctagcacctgggcttggcagaagggccatagttcatccagctcctcccctagagcaatgctgaggagcgggggcatggtagcagggctgtctggttttaaataaagttggaacccttaa

SEQ ID NO: 357690 - DNA, 533 bp, Homo Sapiens
  misc_feature (446)..(446): n is a, c, g, or t
taggtagcgaggcctgggtggcgaattcggcacgaggcggagctggccatcaagctgctggagtatgagccacgctcaggggagcaggtaccccttctcctaaagatgaagaggagcaaactggcactaagcaaggccatcgagagcggggacactgacctggtgttcacggtgttgctgcacctgaagaacgagctgaaccgaggagattttttcatgacccttcggaatcagcccatggccctcagtttgtaccgacagttctgtaagcatcaggagctagagacgctgaaggacctttacaatcaggatgacaatcaccaggaattgggcagcttccacatccgagccagctatgctgcaagaagagcgtattgaggggcgagtagcagctctgcagacagccgccgatgccttctacaaggccaagaatgagtttgcagccnaggctacagaggatcaaatgcggctcctacggctgcagcggcgcctagaagacgagctggggggccagttcctagacctgtctctac

SEQ ID NO: 357691 - DNA, 935 bp, Homo Sapiens
  misc_feature (904)..(904): n is a, c, g, or t
aagagcccccgagcgtcgcttgatgggactccggggggcccagcctggccctggggcctgatcagaacccgcaagtcatccccccctcacctctctcctcgagtaagtggggaggggagattaacgacgtcttccttgaacccccattgtcagcagagacctgggctccggcctggccctcaggcccgaggttttcctcaaccaacacagcagcatctcagcactggctcctttgctctccctgaattccttctcactcctggcttcccacccctttgtgggaaaatatcttctcaaagggaagagactgcctcggggctgcccctccctcccctcaccccacagcagccataatcaggagaaaccgggtgggacccaaagtccccgcctcagtccaggaagtgtgcagcgcagttctggcccgtccagctctggctctgagcttgaactggctggagccccgctcacggtacactggcagcaggggcagggcagccctgggcctacgtcagcagatgggaaaggcgttcagcacagaagcagatagacggtttagagctccagagctacgggggcaatagcgccgaattttatcaggatggcctcaaggatgctacaaatcttggctcctgggaacatggggcctccaccaccgagtgcgttcctggtagtaaagcctgccacgttcaggaaggcactgccctgtggccaaaaccctcaccgaggctctgctcccaccccctactctgtctctgaggcagaccagctccccagtcactgctgagctccccccagatccccctttgcccgacacttttcctctccaggatgaataggatgataaaggacccggacatcacactgggaggtcaggagcaggaggaacctgaggaaggaggcctcntccaaagatgggaggggctgggagggcatgt

SEQ ID NO: 357692 - DNA, 1161 bp, Homo Sapiens
  misc_feature (11)..(11): n is a, c, g, or t
  misc_feature (18)..(18): n is a, c, g, or t
  misc_feature (23)..(24): n is a, c, g, or t
  misc_feature (30)..(31): n is a, c, g, or t
  misc_feature (40)..(40): n is a, c, g, or t
  misc_feature (56)..(57): n is a, c, g, or t
  misc_feature (60)..(60): n is a, c, g, or t
  misc_feature (80)..(80): n is a, c, g, or t
  misc_feature (82)..(82): n is a, c, g, or t
  misc_feature (90)..(90): n is a, c, g, or t
  misc_feature (92)..(92): n is a, c, g, or t
  misc_feature (122)..(122): n is a, c, g, or t
  misc_feature (141)..(141): n is a, c, g, or t
  misc_feature (413)..(413): n is a, c, g, or t
ccccccctggnataaganaaacnnaagaannatttttttngggggagcccccgctnnaancctttttgttgcaggctctntntggcgctngnccacaccccatcctggagagcagagggagnccgttctgcaagcctacancagcaatgacctcttggacttttatagccacaaccagaggagtgtgcttcagttgctgcactccacgagcgacgtggtgcggcagtacatggccaggctcatcaatgcttttgcgtcactggcagaaggtcgcctctaccttgcccagaacacaaaggtgctgcagatgctggagggaaggctgaaggaggaggacaaggatatcatcaccagggagaatgttcttggggccctgcagaagttcagtctcaggcgcccgctgcagacagcgnatgattcaaagacggcctcatcttctggctggttgatgttctgaaggaccctgactgcctgtctgactacacgctggagtactcggtggctttgctcatgaacctctgcctccgcagcacagggaagaacatgtgtgccaaggtggcaggcctcgtgcccaaagtcctttcggatcttcttggccatgaaaaccatgagatacagccgtatgtgaatggagctctgtacagcatcctttctgttccatccattcgtgaggaagcaagagcaatgggaatggaagacatcctacgctgcttcatcaaagaaggcaatgctgaaatgatccgccagatagaattcatcatcaagcagctaaattccgaagagctaccagatggtgttcttgaatctgatgatgatgaagatgaagatgatgaagaggaccatgacatcatggaagccgatctggacaaagacgaactgatccagccccagctcggagaactctcaggagagaagcttctgaccacagagtacctggggatcatgaccaacacggggaagacaaggcggaaggggctggctaatgtgcagtggagcggggatgagcccctgcaaaggcccgtcacccccggcggccacagaaacgggtacccagtgtaagtcagggctaaaggaagcgggaattcactctcttaagctctgtttcgattacagtgtaagatgtatgtatttttaaaattcaaaataaagcattccttttgg

SEQ ID NO: 357693 - DNA, 1036 bp, Homo Sapiens
  misc_feature (994)..(994): n is a, c, g, or t
  misc_feature (1012)..(1013): n is a, c, g, or t
  misc_feature (1028)..(1028): n is a, c, g, or t
ccggaattcccgggataagaaataacacctgcatagcagaaggctctgaagatcaagttctctacattgctaatgacactgatatcctgggttttatatatccagttcaactacagaggcgatcatcaacaaatttctcatagtgaacataattcaagaataacagggatggatgtatattatcaaagagatatgattatttggagtactcagtttaatccaggcggaattttctacaaaaggatccatggcagagaaaaaaggcaagcaaacagtggcttgatttgtcctgaatttaaaaggcccagggacattgcagttgactgggtggctggaaacatttactggactgatcattctagaatgcatgggttcagttactacactactcactggaccagtctgaggtactctatcaacgtagggcagctgaatggccccaactgcaccagactcttaacaaatatggctggagaaccctatgctattgcagtaaatcctaaaagagggatgatgtactggactgttgttggggatcattcccatatagaagaagcagccatggatggtacactgagaaggattttagtacaaaagaacttacagagacccacaggtttggctgtggattattttagtgaacgcatatattgggctgactttgagctctccatcattggcagtgttctgtatgatggctctaattcagtagtctctgtcagcagcaaacaaggtttattacatccacataggatcgatatctttgaagattatatatatggagcaggacctaaaaatggtgtatttcgagttcaaaaatttggccatggttcagtagagtacttagctttaaatattgataaaacaaaaggtgttttgatatctcatcgttataaacaactagatttacccaatccatgcttggatttagcatgcgaatttctttgcttgctaaatccttctgggggcacttgtgtgtgtccagaaggaaaanatttgattaatggcaccnncaatgatgacagccngttagatg

SEQ ID NO: 357694 - DNA, 718 bp, Homo Sapiens
  misc_feature (24)..(24): n is a, c, g, or t
  misc_feature (249)..(288): n is a, c, g, or t
  misc_feature (330)..(332): n is a, c, g, or t
  misc_feature (337)..(337): n is a, c, g, or t
  misc_feature (363)..(363): n is a, c, g, or t
  misc_feature (443)..(443): n is a, c, g, or t
  misc_feature (482)..(482): n is a, c, g, or t
  misc_feature (527)..(527): n is a, c, g, or t
  misc_feature (549)..(549): n is a, c, g, or t
  misc_feature (560)..(560): n is a, c, g, or t
  misc_feature (605)..(605): n is a, c, g, or t
  misc_feature (610)..(610): n is a, c, g, or t
  misc_feature (621)..(621): n is a, c, g, or t
gaactatacatctaccaaaagctncagttaaatgtttgggtatattgaaaacacactggatataaatttgaaaccactgttaaacgtgtgacaggaaaatcgagttgaaactgccatgcccgtgtcaactgaccatgggttcttgggctctcaatgcaatagaacattgacatgaggccaaaagagttttctcaaagcttcaccggagctaccgtccagccataagggaggcagaacgagcacgagaannnnnnnnnnnnnnnnnnnnnnnnnnnnnnnnnnnnnnnnatccccagacagaccccacctataaaagaacaggaaggactnnnttatnaggcaaagtacgagaactgacagcanaagtagagtgtacacaggctgggcaaggcaaacaatgtgaggggtagggtagcaggtcagcaaagccagtagagaaggtnaactggagtaatgggccacctggtagtccggcctgtganaacaagactataaaacaatcgcccagcagcattcctatctgaggngggacacccagcaaccatggtnagcccctaaancagttccaggaattgctttaaaataaaaagactattagcagcgangaaanggagagggttnagtgaagtgtgggaaagcactaaagggggtgaaccaaagccaggccctgaacaactagtgtctcaccagtaaaaacacaaatacaaacagcatgcaa

SEQ ID NO: 357695 - DNA, 1194 bp, Homo Sapiens
  misc_feature (502)..(559): n is a, c, g, or t
  misc_feature (1031)..(1031): n is a, c, g, or t
  misc_feature (1038)..(1038): n is a, c, g, or t
  misc_feature (1041)..(1041): n is a, c, g, or t
  misc_feature (1043)..(1044): n is a, c, g, or t
  misc_feature (1054)..(1054): n is a, c, g, or t
  misc_feature (1059)..(1059): n is a, c, g, or t
  misc_feature (1064)..(1064): n is a, c, g, or t
  misc_feature (1083)..(1084): n is a, c, g, or t
  misc_feature (1092)..(1092): n is a, c, g, or t
  misc_feature (1094)..(1094): n is a, c, g, or t
  misc_feature (1099)..(1099): n is a, c, g, or t
  misc_feature (1102)..(1102): n is a, c, g, or t
  misc_feature (1121)..(1121): n is a, c, g, or t
  misc_feature (1123)..(1124): n is a, c, g, or t
  misc_feature (1135)..(1136): n is a, c, g, or t
  misc_feature (1143)..(1143): n is a, c, g, or t
  misc_feature (1145)..(1145): n is a, c, g, or t
  misc_feature (1155)..(1155): n is a, c, g, or t
  misc_feature (1159)..(1159): n is a, c, g, or t
  misc_feature (1162)..(1164): n is a, c, g, or t
  misc_feature (1167)..(1167): n is a, c, g, or t
  misc_feature (1173)..(1173): n is a, c, g, or t
  misc_feature (1186)..(1186): n is a, c, g, or t
  misc_feature (1191)..(1191): n is a, c, g, or t
ccctccctgtggccccccgccaaacctatagaaaaaacccaagcctgggagtgtcctggggaggggaggtagtatggggaaacccctgtgctctaccctctggcctgggcagtgcagacagggagggctcatggggaaggagtaggccagtaactccacctgcagaggacatggcactggctgggatgcgttgggggaggaggcgcctgctgccagctttcctctggtacccgctggggggtggcatccagggttgggtgcccggcttgaggcctggggcagcgatgcccttcacctgctggtggccattgctcctgtcaggctgcttactgcaaggccccatcatccgcgtctgtgtcctggctgtgttccagctcttcctcgctgtgtgtcaggagcccttcctcatcgccgtcgtctcgggtccgtgcttccccctggggcaggcctgcctcagaagttgtgttctcttggggggctggtggccggctgctgccaccgnnnnnnnnnnnnnnnnnnnnnnnnnnnnnnnnnnnnnnnnnnnnnnnnnnnnnnnnnntggcgccacctccatcacccttcttcttgccatctggattggccttttgctccgcagcgatctgctccaagcggctcagcagggcatcgatattggacttgatctgtgtcagctccgtcttgatggcctgcagctcactgctctttaacttgatcttggctgagctggtggtgacagctgtggagcgggcaaagagcttgacaggtacgttagttttgacacgccggaccaaagggactgtgacccggggtcgcttcacagggaccgccctgggcactggcacgggcgacagacggccccggtagtcgaagagcctgtcgtagaagtcgtcccggtagtaatcatagtcaaagatgtagccactgtatatggcagatgctgctctctttagcccttggggtctgtcaggcttaggctctccagccatgtttgatgtccagggtctgcccggccagcacccgcccattttctnccagcanagntnncccggggatnggggncattnggagtactgaacaaaaggnntagccttntngaaanaanagcgggcacacggcactantnngagaagagtgnntccacantnatttcttacnaaantgnnntgnggttcnaaatgagagcganagtgntgg

SEQ ID NO: 357696 - DNA, 1491 bp, Homo Sapiens
  misc_feature (1156)..(1228): n is a, c, g, or t
ggccgagggcagggctcgcggttgcggggctcgcgccgctgtcagtgcggcggggcgcgcgagcggcgccagctcggggcagcggaacccagagaagctgagggggcggtagcggcggcgacggcgacgacgacgactcccgcgcgtgtgcccagcctcttcccgccgcagccgcccttttcctccctcccttacgtccccgagtgcggcagtaccgcctccttcccagccgcgcggcttcctccagacctctcggcgcgggtgagccctattcccagaggcaggtggtgctgaccctgtaacccaaaggaggaaacagctggctaagctcatcattgttactggttcccagagagggggcttcttgaaaagcaagtagagcagaagactggtgagcacggtgtttcccagcatctccacagtgccagcacagaggaggacactcaagaaatgttggtaaagtgggcaccatgtccttgaagcttcaggcaagcaatgtaaccaacaagaatgaccccaagtccatcaactctcgagtcttcattggaaacctcaacacagctctggtgaagaaatcagatgtggagaccatcttctctaagtatggccgtgtggccggctgttctgtgcacaagggctatgcctttgttcagtactccaatgagcgccatgcccgggcagctgtgctgggagagaatgggcgggtgctggccgggcagaccctggacatcaacatggctggagagcctaagcctgacagacccaaggggctaaagagagcagcatctgccatatacagtggctacatctttgactatgattactaccgggacgacttctacgacaggctcttcgactaccggggaccgtctgtcgcccgtgccaggggcccagggcgggtccctgtgaaagcgaccccgggtcacagtccctttggtccggcgtgtcaaaactaacgtacctgtcaagctctttgcccgctccacagctgtcaccaccagctcagccaagatcaagttaaagagcagtgagctgcaggccatcaagacggagctgacacagatcaagtccaatatcgatgccctgctgagccgcttggagcagatcgctgcggagcaaaaggccaatccagatggcaagaagaagggtgatggannnnnnnnnnnnnnnnnnnnnnnnnnnnnnnnnnnnnnnnnnnnnnnnnnnnnnnnnnnnnnnnnnnnnnnnnagcagcgggcaccagcccccaagagaacaacaattctgaggcaggcctgcccccagggggaagcacggacccgagacgacgggcgatgaggaagggctcctgataccacagcgaggaagagctggaacacagcaggacacagacgcggatgatgggcgctctgagtaagcagcctgacagggaccaatggcaccgagcaggtgaaagggcatcgtggccaggctcaagccggacacaaaacctgggatgccaccccaagggtc

SEQ ID NO: 357697 - DNA, 1202 bp, Homo Sapiens
  misc_feature (84)..(146): n is a, c, g, or t
tgggtccgggcttcccccctgggcaggcctgcctcagaaattgtgttctcttggggggctggtgccggctgctgccaccgccannnnnnnnnnnnnnnnnnnnnnnnnnnnnnnnnnnnnnnnnnnnnnnnnnnnnnnnnnnnnnnccatcacccttcttcttgccatctggattggccttttgctccgcagcgatctgctccaagcggctcagcagggcatcgatattggacttgatctgtgtcagctccgtcttgatggcctgcagctcactgctctttaacttgatcttggctgagctggtggtgacagctgtggagcgggcaaagagcttgacaggtacgttagttttgacacgccggaccaaagggactgtgacccggggtcgcttcacagggaccgccctgggcactggcacgggcgacagacggccccggtagtcgaagagcctgtcgtagaagtcgtcccggtagtaatcatagtcaaagatgtagccactgtatatggcagatgctgctctctttagccccttgggtctgtcaggcttaggctctccagccatgttgatgtccagggtctgcccggccagcacccgcccattctctcccagcacagctgcccgggcatggcgctcattggagtactgaacaaaggcatagcccttgtgcacagaacagccggccacacggccatacttagagaagatggtctccacatctgatttcttcaccagagctgtgttgaggtttccaatgaagactcgagagttgatggacttggggtcattcttgttggttacattgcttgcctgaagcttcaaggacatggtgcccacccgcgccgagaggtctggaggaagccgcgcggctgggaaggaggcggtactgccgcactcggggacgtaagggagggaggaaaagggcggctagcggcgggaagaggctgggcacacgcgcgggagtcgtcgtcgtcgccgtcgccgccgctaccgccccctcagcttctctgggttccgctgccccgagctggcgccgctcgcgcgccccgccgcactgacagcggcgcgagccccgcaaccgcgagccctgccctcggccggcaccactgaggcgcgcgggggtgggggcacccggagcggctccccgcagctcggctccgcccgcccctcggccgattaaccacccagcctcgtacctagcctt

SEQ ID NO: 357698 - DNA, 1777 bp, Homo Sapiens
  misc_feature (1533)..(1617): n is a, c, g, or t
gggcgcgcgagcggcgccagctcggggcagcggaacccagagaagctgagggggcggtagcggcggcgacggcgacgacgacgactcccgcgcgtgtgcccagcctcttcccgccgcagccgcccttttcctccctcccttacgtccccgagtgcggcagtaccgcctccttcccagccgcgcggcttcctccagacctctcggcgcgggtgagccctattcccagaggcaggtggtgctgaccctgtaacccaaaggaggaaacagctggctaagctcatcattgttactggtgggcaccatgtccttgaagcttcaggcaagcaatgtaaccaacaagaatgaccccaagtccatcaactctcgagtcttcattggaaacctcaacacagctctggtgaagaaatcagatgtggagaccatcttctctaagtatggccgtgtggccggctgttctgtgcacaagggctatgcctttgttcagtactccaatgagcgccatgcccgggcagctgtgctgggagagaatgggcgggtgctggccgggcagaccctggacatcaacatggctggagagcctaagcctgacagacccaaggggctaaagagagcagcatctgccatatacaggctcttcgactaccggggccgtctgtcgcccgtgccagtgcccagggcggtccctgtgaagcgaccccgggtcacagtccctttggtccggcgtgtcaaaactaacgtacctgtcaagctctttgcccgctccacagctgtcaccaccagctcagccaagatcaagttaaagagcagtgagctgcaggccatcaagacggagctgacacagatcaagtccaatatcgatgccctgctgagccgcttggagcagatcgctgcggagcaaaaaggccaaccaaaatggcaaaaaaaaaggtgatggaggtggcgcaaacgacggccgcgacggtggtggtgccaccggtgccggtgacagtggtggtgacggtggcggtggcagcagccggccaccagccccccaagagaacacaacttctgaggcaggcctgccccagggggaagcacggacccgagacgacggcgatgaggaagggctcctgacacacagcgaggaagagctggaacacagccaggacacagacgcggatgatggggccttgcagtaagcagcctgacaggagcaatggccaccagcaggtgaagggcatcgctgccccaggcctcaagccgggcacccaaccctggatgccaccccccagcgggtaccagaggaaagctggcagcaggcgcctcctcccccaacgcatcccagccagtgccatgtcctctgcaggtggagttactggcctactccttccccatgagccctccctgtctgcactgcccaggccagagggtagagcacaggggtttccccatactacctcccctccccaggacactcccaggcttgggttttttctataggtttggcggggggccacagggaggggaccctgacaataaagagattggatcccnnnnnnnnnnnnnnnnnnnnnnnnnnnnnnnnnnnnnnnnnnnnnnnnnnnnnnnnnnnnnnnnnnnnnnnnnnnnnnnnnnnnncttgtcgggcgcgcttcggcccctcgaaaaagctttttcaaaacctattcgttgtggcgcgccgggccccagaaggaaaagggaacagtggccataagcttgtttcctagggaaagatcctgggccatgaactaggggcttggaatctcccccccacaat

SEQ ID NO: 357699 - DNA, 1378 bp, Homo Sapiens
  misc_feature (1257)..(1258): n is a, c, g, or t
  misc_feature (1315)..(1315): n is a, c, g, or t
  misc_feature (1330)..(1330): n is a, c, g, or t
gaggcctgggtggcgaattcggacgagggtggggagagcccatgcgcctgggaagccgggctgtttctgggcggggctgcagactcctcgtgctcgtgtcaccgtgtccttcccaggagacagagaaggaggagagcccggaaccagggccggagcggcgggcggagccgagctgcggggagccgctccgggtgcccccacccccgcgcgcctcagtggtgccggccgagggcagggctcgcggttgcggggctcgcgccgctgtcagtgcggcggggcgcgcgagcggcgccagctcggggcagcggaacccagagaagctgagggggcggtagcggcggcgacggcgacgacgacgactcccgcgcgtgtgcccagcctcttcccgccgcagccgcccttttcctccctcccttacgtccccgagtgcggcagtaccgcctccttcccagccgcgcggcttcctccagacctctcggcgcgggtgagccctattcccagaggcaggtggtgctgaccctgtaacccaaaggaggaaacagctggctaagctcatcattgttactggtgggcaccatgtccttgaagcttcaggcaagcaatgtaaccaacaagaatgaccccaagtccatcaactctcgagtcttcattggaaacctcaacacagctctggtgaagaaatcagatgtggagaccatcttctctaagtatggccgtgtggccggctgttctgtgcacaagggctatgcctttgttcagtactccaatgagcgccatgcccgggcagctgtgctgggagagaatgggcgggtgctggccgggcagaccctggacatcaacatggctggagagcctaagcctgacagacccaaggggctaaagagagcagcatctgccatatacagtggctacatctttgactatgattactaccgggacgacttctacgacaggctcttcgactaccggggccgtctgtcgcccgtgccagtgcccagggcggtccctgtgaagcgaccccgggtcacagtccctttggtccggcgtgtcaaaactaacgtacctgtcaagctctttgcccgctccacagctgtcaccaccagctcagccaagatcaagttaaagagcagtgagctgcaggccatcaagacggagctgacacagatcaagtccaatatcgatgccctgctgagccgcttggagcagatcgctgcggagcaaaaggccaatccagatggcaagaaaaagggtgatggnnagtggcgcccaccggcggcggcggcggtggttggtggcacctgtggcggggaatatnttgggtggggccccncgcttaaacctcttcccccaattcaaaggggagacatttcccgtccca

SEQ ID NO: 357700 - DNA, 629 bp, Homo Sapiens
  misc_feature (513)..(513): n is a, c, g, or t
gcgccccttggatcctcggtggcagggtccgggcaagtgtcattgcgagggttcaggaagccccggcctgtgatcgtgagcggaaacccctcctggagtttccccaaagccatggacagccctagtcttcgtgagcttcaacagcctctgctggagggcacagaatgtgagacccctgcccagaagcctggcaggcatgagctggggtcccccttaagagagatagcctttgccgagtccctgaggggtttgcagttcctgtcaccgcctcttccctccgtgagcgctggcctgggggaaccaaggccccctgatgttgaggacatgtcatccagtgacagtgactcggactgggatggaggcagccgtctttcaacatttctaccccacgaccacctcggcttggctgtcttctccatgctgtgttgtttctggcccgttggcatcgctgccttctgtctagcccagaaggtcagtctgtgtgtgggacttggaggggactgggcataaaanagaaaaatgcaccacaaaaacaaagagccatatacctgaggcgggaaggtggaaggtagcccagagaacctgaactcaaatcctgagtctgccactctctgcaagattttttttga

SEQ ID NO: 357701 - DNA, 430 bp, Homo Sapiens
  misc_feature (15)..(15): n is a, c, g, or t
  misc_feature (22)..(22): n is a, c, g, or t
  misc_feature (43)..(43): n is a, c, g, or t
  misc_feature (61)..(61): n is a, c, g, or t
  misc_feature (82)..(82): n is a, c, g, or t
  misc_feature (130)..(130): n is a, c, g, or t
  misc_feature (208)..(208): n is a, c, g, or t
  misc_feature (213)..(213): n is a, c, g, or t
  misc_feature (381)..(381): n is a, c, g, or t
  misc_feature (397)..(397): n is a, c, g, or t
accttcttcccctcnttaaagnctgcccctgggggaaacaaancccccctgaatgttaaangaacatgtcatcccaatgaanaatgactcggaactgggatggaggcaaccgtctttcacccatttctancccacgaccacctcggcttggctgtcttctccatgctgtgttgtttctggcccgtttgcatcgctgccttctgtctancccanaagacccgccctagttgcccctacagccctcactgtgaaccctgaggccggcagcccagcaaatctgtgggcagagagtggagaatcttggtggatgaggctgcggcggcggcaggagcatctagaaacgggagcgagctggactggaacccttccccatcctggccnacgctcgtcgggcggnaggaacctgaggttaaacaccagacacccttgt

SEQ ID NO: 357702 - DNA, 1506 bp, Homo Sapiens
ttacactgttcctatttcctgtgttacctttcctatcatcccgcaccggtccgggattcccgggatgcgcggcgccccgcagccaggcccccgcccccgccgcatccacctcctccgccgcctgcgacccaacgggcgccccccgccgcggcagctgccgccgggcccccgcggccaccatgaagaaggaggtgtgctccgtggccttcctcaaggccgtgttcgcagagttcttggccaccctcatcttcgtcttctttggcctgggctcggccctcaagtggccgtcggcgctgcctaccatcctgcagatcgcgctggcgtttggcctggccataggcacgctggcccaggccctgggacccgtgagcggcggccacatcaaccccgccatcaccctggccctcttggtgggcaaccagatctcgctgctccgggctttcttctacgtggcggcccagctggtgggcgccattgccggggctggcatcctctacggtgtggcaccgctcaatgcccggggcaatctggccgtcaacgcgctcaacaacaacacaacgcagggccaggccatggtggtggagctgattctgaccttccagctggcactctgcatcttcgcctccactgactcccgccgcaccagccctgtgggctccccagccctgtccattggcctgtctgtcaccctgggccaccttgtcggaatctacttcactggctgctccatgaacccagcccgctcttttggccctgcggtggtcatgaatcggttcagccccgctcactgggttttctgggtagggcccatcgtgggggcggtcctggctgccatcctttacttctacctgctcttccccaactccctgagcctgagtgagcgtgtggccatcatcaaaggcacgtatgagcctgacgaggactgggaggagcagcgggaagagcggaagaagaccatggagctgaccacccgctgaccagtgtcaggcaggggccagcccctcagcccctgagccaagggggaacaagaagaaaaagtacctaacacaagcttcctttttgcacaaacggtcctcttggctgaggaggaggagctggtcaccctggctgcacagttagagaggggagaaggaacccatgatgggactcctggggtaggggccaggggctggggtctgctggggacaggtctctctgggacagacctcagagattgtgaatgcagtgccaagctcacaggctgcaagggccaggccagaaaagggtggggcctgcagcctgcaccccccacctttcccaacccttcctcaagagctgaaaggatcccagcccctaggtgggcagaagcagaaccctccccagagctccttaaggaaaaagacagaatgggtttcattgaattgccgcccttattttattcctggtggaagatggcatgcatgggggccttgctggtggtttaaaaattggggggcttaccccaataaatccactggataacaaaaa

SEQ ID NO: 357703 - DNA, 596 bp, Homo Sapiens
ggctttttgcttttctgtatatggttttgcattcatttttcaaattcacttcaatattcatttattttcttcgttttgtatgtatgactcaattttgacattactatttttgtacaaacagcttttgaaatcctgtcatgcagtgtcccaaacgcaaggcgaaggagatgcagcagatggtgaaattggaagccgagatggaccgcagaccagcaacagtagtatgaaactccaaaatgcaaactgaagcagcaaacccacaaagcatcaaaagactcactcacaaacttctgaacacaaactccatggatgaaagctgtttattttgtttcctttatgtgtaaacaagatgatatctgaaaccagagagacttggaatgtctgactgacttctatttaacagcttgagtattgcatttccttggccaaacaaaaatagctacaaatccacaaaaatttactattccagtaaggcagagtccaaccattgataatacaacttaaacatgtttgctataaaataccatcacaagtaaatgagcttggtgtgaacaactctcctttgtgatgccttaggacatgtttgaactgcagca

SEQ ID NO: 357704 - DNA, 916 bp, Homo Sapiens
ggctggtaccggtccggaattcccgggatccgggaacgctcaggagccggaggagccggaaagcgccgggacccctcgcggggcctctgagcggcgcgggcggacccgagcccccagcccgctggcgccgctgcccgccaggccccgggggcggcggccaagatgtccgtgcctaacgtgctggccaaagcgctctatgacaatgtggccgagtccccggatgagctctccttccgcaagggtgacatcatgacggtgctggagcaggacacgcagggcctggacggctggtggctctgctcgctgcatgggcgccagggcatcgtgcctgggaaccgcctcaagatcttggtgggcatgtatgataagaagccagcagggcctggctccggccctcccgccaccccggcccagcctcagcctggcctccatgccccagcgcctccggcctcccagtacacgcccatgctccccaacacctaccagccccagccagacagcgtctacctggtgcccactcccagcaaggctcagcaaggcctctaccaagtcccgggtcccagccctcagttccagtctcccccagccaagcagacatccaccttctcgaagcagacaccccatcacccgtttcccagcccggccacagacctgtaccaggtgcccccagggcctggaggcctgcccaggatatttaccaggtgccaccttctgccgggatggggcatgacatctaccaggtccccccgtccatggacacacgcagctgggagggcacgaagcccccggcaaaggtggtggtgccaacccgcgtggggcagggctatgtatacgaggcgcccaagcggagcaggagagtacggactctcgcgacacctgctggcccggggccacaggacatctactgaggtgcccg

SEQ ID NO: 357705 - DNA, 2437 bp, Homo Sapiens
  misc_feature (128)..(128): n is a, c, g, or t
  misc_feature (473)..(525): n is a, c, g, or t
ggagcgaggcctgggtggcgttcaaagacgagggaagcgacgagtctttgccgcccagcgcgggcccggagcagggggaagggaagtgcggctcggtcggttttgtctggagggggcgtgaggccgcncctacggtggccgtcgagggacggcgctacggctcccacgctaggccaaacgcctccggcggccgcgcccgagagccccttcacctgcagggcgaccccagccggcgacgcgtgaaccacgccctcagccgccttgccagcgcccccaaccgcgcgccccaccaccatgcggccgccctgcgcacggagccccgagggacaggggcacccgcaggcccggcccctagcaccgccggccggccccgaggtccgggacgccggcgccgccgcggagagggcaccgggccgacgcctccccccagggtcagctgcgggctcccaggcctaggcgcccatgacccctannnnnnnnnnnnnnnnnnnnnnnnnnnnnnnnnnnnnnnnnnnnnnnnnnnnngccggggcccaatgccggtcatgcccattccgcggcgggtgcgctccttccacggcccgcacaccacctgcctgcatgcggcctgcgggcccgtgcgcgcctcccacctggcccgcaccaagtacaacaacttcgacgtgtacatcaagacgcgctggctgtacggcttcatccgcttcctactctactttagctgcagcctgttcactgcggcgctctggggtgcgctggccgccctcttctgcctacagtacctgggcgttcgcgtcctgctgcgcttccagcgcaagctgtcggtgctgctgctgctgctgggccgccggcgcgtggacttccgcctggtgaacgagctgctcgtctatggcatccacgtcaccatgctgctggtcgggggcctgggctggtgcttcatggtcttcgtggacatgtgagggccgtgggtgcgagcttgatgtatcgtcccggcctgtggctgtgttctctccatgggtggggtcggccagcgccttcccttcgcccatcccccaggcagtcgctgctgcccggcgcccacggagagaaaagaaagggctgagacttctgtgatgggggcgcggacaccacccctaggctggcttcctggacccaccctccccgtatgcactctcaggggcagcgcccacctgccggtggctcctgctcacatgtcttcgggtcgtactgcggggtgggccctccgttccgcctctctgtgggcctctctccaggaccacagctgccagggactttagacatcaccctgggaggcccctggacacagagggctgtgtgcccaggagcaattccggaggggggccctcctggctgcacagccccttctgcgtgccctggccccagccccagccaacgggacacggaaggctcccctcgctgacacaccacactgccacaaagctgcttactctgccctgggccgcctgaggcctggcactgcccgcggaccaccctgtgtgtgtcatcctgaggggctgtgtgggtcctgagtccccagccagccttcagggtccccttggattgtgtagatgcagtctagcggggggccggagaagggctcaggtgggaggggcctcagcaggctcccagctcaggggctggcctggggggaaccctgggagccaggggctgactccagcaacactggcctgtctgcctgttctgggagggctgtgaggatgtcttgcagatgctctggatttctgcggaggcacctccattcctttctggctttttttgcgggggagggctttgggcctctttctttgagggaacaccgtcaaagaaagcctgggagatcgaggcttcagtgagccaggatggaaacgcgtgtcccaagtgtccggagcaggcggcagaggcctcagtgcggcaaacacagccccagagcctgtgtggcaccagcagcatcttagagccccaggtatatgctgagatcttatctcacgctgtcctccagtgtctggggggcccaaatgatggcacaggggcaggtgggctggaggggcgcacatgcctgtgttcagggtagggtggccaccatgggccgaggtctcacccaggaccccttgctctgctcctcagccttgcagtcacggcagcactatggtggactgcccatggccgtgtgactttgggggcaagtgggagggcgccctgaataatgattgcaagacaacacgcagaggctaccctagagtcagacacagggtgtggtactgacaaccctagtgtcacctcaaatccatgtcaccacactctggggcatggggtggggacttggtgaacctaccatgtcaggcggaaccagtggccccctgacccatgaaggaccgttagtgtggcccctggaaaaacaaaaccttttgaaaaaccccta

SEQ ID NO: 357706 - DNA, 1107 bp, Homo Sapiens
  misc_feature (45)..(63): n is a, c, g, or t
  misc_feature (843)..(843): n is a, c, g, or t
  misc_feature (912)..(912): n is a, c, g, or t
ggcctgggtggcgaattcggcacgagggagagaatagtctcgagnnnnnnnnnnnnnnnnnnnaaaaaaataggtttaatgcaggtgggtcatggcatgacgaatttcacaggcaccggggacagcaggcggccaggtgctcagagggcaccaaggtgccacaactccctgcagcgttgacaccgcacgagcggcaccaccagccccctcccgcctcccgtcccaccttcaccctcagccaagaggcttgggtgactctgagtaatacgttaacaaaaaacaaagcttctttgaggaaacagcatgacttagtgcaaaagattctctgcagcaagaaatgaggcccacgcagggaagctcccgcctacctgcccagggcgtggacgcagcccgggctcatcagaggtcatccacagaagctgccgataaattagagagcacggtttacggccagagattttttgctttctctacctgatttagggtttttcaaaaagtttctcttccagtggcacacaactgtcctcatggctcctgggccactggtccgcctgacagggtagggtcacaagtcccacccatgcccagagtgtggggacatggatttgaggtgacactagggttgtcagtaccacaccctgtgtcctgctctagggtagcctctgcctgttgtccttgcaatcattattcagggcgccctcccacttgcccccaaagtcacacggccatgggcagtccaccatagtgctgccgtgactgcaaggctgaggagcagagcaaggggtccctgggtgagaactcgggcccatgggtgcccacccctccctgaaaacaggcatctgncgccccctccagcccacctggcccctgtggcaatcattttgggccccccaaaacactgggaaggaacgncgttggagattaagatctccagcatattacttgggggctctaaaaaatgctgctgggtgccaacaggggtttctttgggggggttggggttttgccccccacttaagggcctcttggccgccctgctttccgggaaacttttgggggaacccggccgtttttcccatccctggggctccaacctggaaaaccccc

SEQ ID NO: 357707 - DNA, 763 bp, Homo Sapiens
cggctaggtagcgaggcgggtggttgactggacatcgatggacgcattcagaaggtaatcttcagcaagtactgcaactccagcgacatcatggacctgttctgcatcgccaccggcctgcctcggaacacgaccatctccctgctgaccaccgacgacgccatggtctccatcgaccccaccatgcccgcgaattcagaacgcactccgtacaaagtgagacctgtggccatcaagcaactctccgagagagaagaattaatccagagcgtgctggcgcaggttgcagagagttctcaagagcattcaaaatcaatgaactgaaagctgaagttgcaaatcacttggctgtcctagagaaacgcgtggaattggaaggactaaaagtggtggagattgagaaatgcaagagtgacattaagaagatgagggaggagctggcggccagaagcagcaggaccaactgcccctgtaagtacagttttttggataaccacaagaagttgactcctcgacgcgatgttcccacttaccccaagtacctgctctctccagagaccatcgaggccctgcggaagccgacctttgacgtctggctttgggagcccaatgagatgctgagctgcctggagcacatgtaccacgacctcgggctggtcagggacttcagcatcaaccctgtcaccctcaggaggtggctgttctgcgtccacgacaactacagaaaaaaccccttccacaacttccggcacgggggtaccga

SEQ ID NO: 357708 - DNA, 1152 bp, Homo Sapiens
  misc_feature (13)..(13): n is a, c, g, or t
  misc_feature (67)..(67): n is a, c, g, or t
  misc_feature (71)..(72): n is a, c, g, or t
  misc_feature (79)..(79): n is a, c, g, or t
  misc_feature (82)..(82): n is a, c, g, or t
  misc_feature (86)..(86): n is a, c, g, or t
  misc_feature (1094)..(1095): n is a, c, g, or t
  misc_feature (1126)..(1126): n is a, c, g, or t
  misc_feature (1142)..(1142): n is a, c, g, or t
ggtccggaattcncgggatatcgaacgttgagcagggcgggtgggtggtgcggagtgctgagcggcntcanncccaacngtnggcncagtcggacggttccgaggcgttgccgggagccgggcgcggctctgtgtggactcggagaaacgcggggcgtctgcctgagcccgcttttctacaagatgtggggatttttgaagcgccctgtagtggtgacggctgacatcaatcttgagccttgtggccctgactgggatggggttactgagccggctgtggcgactcacctacccgcgggctgtggtttttgacgaagtatattatgggcagtacatctctttttacatgaaacaaatcttcttcttggatgacagtgggccgccatttggccacatggtgctggccttgggaggttatttaggaggattcgatggcaattttttgtggaacagaattggagcagaatacagtagcaacgtgcctgtgtggtccctgcgcctgctgccagcactcgcgggggccttgtcggtccccatggcctaccagatagtgttggagctccacttttctcattgtgccgccatgggagctgctctgttgatgcttatcgagaatgctctcatcactcagtcaaggctaatgcttttggaatcagtgttaatatttttcaatctattggccgtgttgtcctacctgaagttcttcaactgccaaaagcacagccctttttctctgagctggtggttctggctaacactgacaggggtcgcttgttcctgtgcagtgggcatcaagtacatgggtgtgttcacgtacgtgctcgtgctgggtgttgcagctgtccatgcctggcacctgcttggagaccagactttgtccaatgtctgtgtgttctgtcacttgctcgcccgagcagtggctttgctggtcatcccggtcgtcctgtacttactgttcttctacgtccacttgattctagtcttccgctctgggccccacgaccaaatcatgtccagtgccttccaggccagcttagagggagactagctcggatcaccagggtcagcactggaggtgcctttgggtccaggtnntctgagggacgtctttgggaactgtgcctgntgcttattccacaggnactacccatg

SEQ ID NO: 357709 - DNA, 3421 bp, Homo Sapiens
  misc_feature (2868)..(2878): n is a, c, g, or t
agcgggcgggctcggtgaatcgaacgttgagcagggcggtgggtggtgcggagtgccgagcggcctcacccccaaccgtcggcccagtcggacggttccgaggcgttgccgggagccgggcgcggctctgtgtggactcggagaaacgcgggttatttaggaggattcgatggcaattttttgtggaacagaattggagcagaatacagtagcaacgtgcctgtgtggtccctgcgcctgctgccagcactcgcgggggccttgtcggtccccatggcctaccagatagtgttggagctccacttttctcattgtgccgccatgggagctgctctgttgatgcttatcgagaatgctctcatcactcagtcaaggctaatgcttttggaatcagtgttaatatttttcaatctattggccgtgttgtcctacctgaagttcttcaactgccaaaagcacagccctttttctctgagctggtggttctggctaacactgacaggggtcgcttgttcctgtgcagtgggcatcaagtacatgggtgtgttcacgtacgtgctcgtgctgggtgttgcagctgtccatgcctggcacctgcttggagaccagactttgtccaatgtaggtgctgatgtccagtgctgcatgaggccggcctgtatggggcagatgcggatgtcacagggggtctgtgtgttctgtcacttgctcgcccgaacagtggctttgctggtcatcccggtcgtcctgtacttactgttcttctacgtccacttgattctagtcttccgctctgggccccacgaccaaatcatgtccagtgccttccaggccagcttagagggaggactagctcggatcacccagggtcagccactggaagtggccctttgggtcccaggtcactctgaggaacgtctttgggaaaactgtgccctgctggcttcattcccaccaggacacctaccccatgatgtaagatatgaagaacggccgaagcagctcccacccagcaacaggtgacctgttaccccttcaaagacgtcaataactggtggattgtaaaggatcccaggaggcaccagctggtggtgagcagccctccgagacctgtgaggcacggggacatggtgcagctggtccacggcatgaccacccgctccctgaacacgcatgatgttgcagcccccctgagcccccattcacaggaggtctcctgctacattgactataacatctccatgcccgcccagaacctctggagactggaaattgtgaacagaggatctgacacagacgtctggaagaccatcctctcagaggtccgctttgtgcacgtgaacacttccgctgtcttaaagctgagcggggctcacctccctgactgggggtatcggcaactggagatcgtcggggagaagctgtcccggggctaccacgggagcacggtgtggaacgtggaggagcaccgatacggcgcgagccaggagcagagggagcgggaacgggagctgcactcacctgcgcaggtggacgtcagcaggaacctcagcttcatggcgagattctcggagctgcagtggaggatgctggcgctgagaagtgatgactcggaacacaagtacagctccagcccactggagtgggtcaccctggacaccaatattgcctactggctgcaccccaggaccagcgctcagatccacctacttggaaacatagtgatctgggtttcgggcagcctcgctctggccatctacgccctgctgtccttgtggtacctgctccgacggcgaagaaatgtccatgacctccctcaggatgcctggctgcgctgggtgctggctggggcgctgtgtgccggtggctgggcagtgaactacctcccgttcttcctgatggagaagacactcttcctctaccactacctgcccgcactcaccttccaaatccttctgctccctgtggtcctgcagcacatcagcgaccacctgtgcaggtcccagctccagaggagcatcttcagcgccctggtggtggcctggtactcctccgcgtgccacgtgtccaacacgctgcgcccactcacctacggggacaagtcactctcgccacatgaactcaaggcccttcgctggaaagacagctgggacatcttgatccgaaaacactagaacaagagtgtggcaaagaacacccgtgctggggtcgggacgaggttgaagggtcttggtcaatgtacgtaatgagcagggtgggccccacgctgggaggacacgggctgggctgagcagggcctctagtggaacacatgggggtctcattgaaaagctctctgatgagcacctccttttgtgcaaagttaattttttctcgacaataaagatattccgtgtcttcacccctgaactaagacacagggagtatttcagaggccagcgtaggagtcatcgacaacgaaaagccgagaacccagggccagcagtggagcctcagcagaccagggcctggtccttgctaattgctgcagggtggagtttgatctggcagacccgatcctccttcatgaacacccagcaacctgagcaagtcccggccctgccctcagcgagcccggcaggcgtcccgggacagctcagtgttggagggccacctgaaccacgagccagggctggggcttgcatgtcattgtctatgacagcgtcaagactggcccttggcaccgtgctgtgtggaaaccctcccctctgagactccactgagacgtggctgagtgaaatcttcctcgtcagtggtcaaggtgtgtcatccatacagctccatgcctttgtcttttttaaatgtaattaaaaaaggaaccaactgggnnnnnnnnnnncagcacacacacaaaaacaggggagcggacacgccatcaaaaaagtcacccatcaagggagccacaggacatacacgacatacaccgggcacgcgtagtgacccacaggagcccaaaaacaggagaccgtacagatcacgcaaggcgaacggtggacgcgcgagagagatgctactacacacaccgtcaggtggacctcgattggtgcgaaaaagcacgtgagaatcaagtgggggaaaattcatgtggacagcgcgggaaacctgtataacatgcgatgagtggagtgatgaccatgaagtgccggaccaacaggtacccaacagcaagaaattctacaaacggcgcccgacaagggcacaagccaccacaccacgcacaggacgacgcagggaacacacacgggggcagaaaaccgaccaaccggcgaggacggagcggcgcagaggctaaaagaacagtgcggcgcgcccccagcgcagcgacgagcaagagaccaccaagagcgacctcaaaccccagggccccagcccgcgagacacg

SEQ ID NO: 357710 - DNA, 313 bp, Homo Sapiens
caaaacattattaaggtactggaccatctcagatcaacaaaccacccagaatctctgttctcgttaactaggaagacactccattttccatacctgtgcttttggcagttgaagaacttcaggtaggacaacacggccaatagattgaaaaatattaacactgattccaaaagcattagccttgactaagtgatgagagcattctctgtttcaaagaggaaacacgtgtcaattttaaggtagcaagggaaaacgtatgaggatgaaaaacactcatgaaaaaaggcattacttttgcgagcgagggtaccga

SEQ ID NO: 357711 - DNA, 1177 bp, Homo Sapiens
  misc_feature (2)..(2): n is a, c, g, or t
  misc_feature (6)..(6): n is a, c, g, or t
  misc_feature (8)..(9): n is a, c, g, or t
  misc_feature (11)..(11): n is a, c, g, or t
  misc_feature (17)..(17): n is a, c, g, or t
  misc_feature (24)..(24): n is a, c, g, or t
  misc_feature (27)..(27): n is a, c, g, or t
  misc_feature (33)..(33): n is a, c, g, or t
  misc_feature (37)..(38): n is a, c, g, or t
  misc_feature (48)..(48): n is a, c, g, or t
  misc_feature (55)..(55): n is a, c, g, or t
  misc_feature (65)..(65): n is a, c, g, or t
  misc_feature (68)..(68): n is a, c, g, or t
  misc_feature (71)..(71): n is a, c, g, or t
cntgtnannanaactancccaganatnaagctnggannccccagagangctaatnttcatcaaanccnccncccacacagcagccattcttttcttggccaatctgcaggattcctccctcaggaacaatgtgacctgtggccatctcaacagtggtagccgccagttcaccatttacccacaagaatgtgagcccttcctctgaattccaggtgccgcacaggtgggtccaccttcccagggaaaccatggcttcagcaaccagttggttccccgtctccaccccaccacaaacactattggattggtagctgagatacagctggatttcatatggattcctctttgtgccataggaaaacaggatggttttgtttaatacatctgtggctttgacccaaatgcaggcactaaaagactcaagcctcattggtctcactggatgcacgcttccaaaatcttcttggaacgcattgggaataaaatagctgtttcacaacctgccggcagccagctccgggcagcccagccctgcaccgcgtgcaggtcggctcgcgtctgccgcagctcctctagcaccgcggccagggcgcgccccgcctcctctgggcgctgcgcctccgcgccctccatacgcgccagcctgcggcccgcgtcgcgggtcgcctgcagcagctcgtccagagcactggtcagcctggcctctgcgggagcccccggcgcgcacggcctcgccaggctttccgcgagccggcccagctcctcccgcagcctctgcagctcgccccgcaggacgtcgtccgtggcttgcagcagcatgcgctctctcatctgcgagttctccagcatgatgaagagcttgtcccattccgagtgctcctgaccgcagtcgcacggcgtggggtcctcagtgggatggagtccattgtctatttcgttgtccaaattcacatacatgagatcataatcatccgagttctcggccaacactgcagaccagagagcacaaaacagaatcgcaaggagatgcattgctggagagacgcaaagttctttccacagctggcgggaggagactctcaagtgagctgagtttgagcggaggagagtgagagtgagaggctggagcagagagtccttaataaatgtcgcagggattcccggacccggtaccatc

SEQ ID NO: 357712 - DNA, 771 bp, Homo Sapiens
  misc_feature (28)..(28): n is a, c, g, or t
  misc_feature (42)..(42): n is a, c, g, or t
  misc_feature (53)..(53): n is a, c, g, or t
  misc_feature (69)..(69): n is a, c, g, or t
  misc_feature (73)..(73): n is a, c, g, or t
  misc_feature (77)..(79): n is a, c, g, or t
  misc_feature (97)..(97): n is a, c, g, or t
  misc_feature (105)..(105): n is a, c, g, or t
  misc_feature (117)..(118): n is a, c, g, or t
  misc_feature (131)..(131): n is a, c, g, or t
  misc_feature (140)..(141): n is a, c, g, or t
  misc_feature (144)..(145): n is a, c, g, or t
  misc_feature (194)..(194): n is a, c, g, or t
  misc_feature (214)..(214): n is a, c, g, or t
  misc_feature (229)..(229): n is a, c, g, or t
  misc_feature (235)..(235): n is a, c, g, or t
  misc_feature (241)..(241): n is a, c, g, or t
  misc_feature (259)..(293): n is a, c, g, or t
  misc_feature (305)..(305): n is a, c, g, or t
  misc_feature (309)..(309): n is a, c, g, or t
  misc_feature (313)..(313): n is a, c, g, or t
  misc_feature (317)..(317): n is a, c, g, or t
  misc_feature (321)..(321): n is a, c, g, or t
  misc_feature (325)..(325): n is a, c, g, or t
  misc_feature (335)..(335): n is a, c, g, or t
  misc_feature (338)..(338): n is a, c, g, or t
gttgtctctagcctgatcagataggagnacaagcaggggacngaaagaaaganaaaatcaggcggcagnattncctnnnagccactgagatatcgtnccagcacnattcctgatcanncaaaaaagaaccnagttaacannaannaaacaaaaacaccacacaaaacatttttctacagtatttcaggtgcctnccacacaggaaaccttaaanaaaatcattttctanaagccnctattncctcttttttacattttnnnnnnnnnnnnnnnnnnnnnnnnnnnnnnnnnnnaaggtacttttnactnctanacancccnactncataatcgtnctntcaaacagcgagatgagtaaaaacatcagcttccacgttgccttctgcgcaaagggtttcaccaaggatggagaaagggagacagcttgcagatggcgcgttctcacggtgggctcttccccttggtttgtaacgaagtgaaggaggagaacttgggagccaggttctccctgccaaaaagggggctagatgaggtggtcgggcccgtggacagctgagagtgggattcatccagactcatgcaataaccctttgattgttttctaaaaggagactccctcggcaagatggcagagggtacggagtcttcaggcccagtttctcactttagccaattcgagggctccttgtggtgggatcagaactaatccagagtgtgggaaagtgacagtcaaaaccccacctggagcaaataaaaaaacatacaaaacgt

SEQ ID NO: 357713 - DNA, 1158 bp, Homo Sapiens
  misc_feature (12)..(12): n is a, c, g, or t
  misc_feature (17)..(17): n is a, c, g, or t
  misc_feature (19)..(20): n is a, c, g, or t
  misc_feature (28)..(29): n is a, c, g, or t
  misc_feature (31)..(31): n is a, c, g, or t
  misc_feature (35)..(35): n is a, c, g, or t
  misc_feature (38)..(38): n is a, c, g, or t
  misc_feature (43)..(44): n is a, c, g, or t
  misc_feature (56)..(57): n is a, c, g, or t
  misc_feature (68)..(68): n is a, c, g, or t
  misc_feature (71)..(71): n is a, c, g, or t
  misc_feature (74)..(74): n is a, c, g, or t
  misc_feature (89)..(89): n is a, c, g, or t
  misc_feature (94)..(94): n is a, c, g, or t
  misc_feature (610)..(610): n is a, c, g, or t
  misc_feature (726)..(726): n is a, c, g, or t
  misc_feature (741)..(741): n is a, c, g, or t
  misc_feature (777)..(865): n is a, c, g, or t
  misc_feature (877)..(877): n is a, c, g, or t
  misc_feature (895)..(895): n is a, c, g, or t
  misc_feature (910)..(1016): n is a, c, g, or t
  misc_feature (1030)..(1030): n is a, c, g, or t
  misc_feature (1062)..(1063): n is a, c, g, or t
  misc_feature (1156)..(1156): n is a, c, g, or t
tacccaaatgantgcanannacccctcnncntccnccntgttnnatgagcagccanncctaagacgtntanaanttgaagatcttcttnccccngcggagtatgaagctcttcagagcccatctgaagctttcaggaacgtcacgtcagaagaaatactgaagatgattgaggagaacagccattgcacctttgtcatagaagcgttgaagtctttgccatcagatgtggagagccgagaccgccaggcccgatgcatatggtttctggataccctcatcaaatttcgagctcatagggtagttaagcggaaaagtgctctgggacctggagttccccacatcatcaacaccaaactgctgaagcactttacctgcttgacctacaacaatggcagattacggaacttaatttcggattctatgaaggcgaagattactgcatatgtgatcacacttgccttgcacatacatgacttccaaattgacctgacagtgttacagagggacttgaagctcagtgagaaaaggatgatggagatagccaaagccatgaggctgaagatctccaaaagaaagggtgtctgtggccgccggcagtgaaaaagatcncaaactgggcaccctgtccctcccgctgcctccagcccagacctcagaccgcctggcaaagcggaggaaaattacctagacgcatgctttccagacagggcgttttggctgcatcncagccactggctggncctattcatttccatttttatgtatgttttgaaaannnnnnnnnnnnnnnnnnnnnnnnnnnnnnnnnnnnnnnnnnnnnnnnnnnnnnnnnnnnnnnnnnnnnnnnnnnnnnnnnnnnnnnnnccagtctggacnacatggggagaccccatntctaccggaggaaannnnnnnnnnnnnnnnnnnnnnnnnnnnnnnnnnnnnnnnnnnnnnnnnnnnnnnnnnnnnnnnnnnnnnnnnnnnnnnnnnnnnnnnnnnnnnnnnnnnnnnnnnntgtgtggccacacnccatcctgggtcacagagtgagaccttgtctnnaaaaagtaacataaggaaaaaagaagccttgctttagcacaggtatgaagccagaagccagcatctcaactgtgcttgtcttatgcagaaatnta

SEQ ID NO: 357714 - DNA, 1867 bp, Homo Sapiens
  misc_feature (1456)..(1544): n is a, c, g, or t
  misc_feature (1586)..(1595): n is a, c, g, or t
  misc_feature (1597)..(1697): n is a, c, g, or t
cgccttttccggcccgcagcgcggcctgggctcccgcgtgtttaaaagtgcgcttgtggctgctgctgtcttaactcctgtgcttggcggacagacaggcgagatggcggcggaggtgttgccgagtgcgaggtggcagtattgtggggcgcccgacgggagccagagagctgtactggtccagttctccaacgggaagctacagagtccaggcaacatgcgctttaccttgtatgagaacaaagattccaccaaccccaggaagaggaatcaacggatcctggcagctgaaacagataggctctcctatgtgggaaacaattttgggactggagccctcaaatgcaacactttgtgcaggcactttgtgggaattttgaacaagacctctggccaaatggaagtatatgatgctgaattgttcaacatgcagccactattttcagatgtatcagttgagagtgaactggcgctagagagtcagaccaaaacttacagagaaaagatggattcttgtattgaagcctttggtaccaccaaacagaagcgagctctgaacaccaggagaatgaacagagttggcaatgaatctttgaatcgtgcagtggctaaagctgcagagactatcattgatacgaagggtgtgactgctctggtcagcgatgctatccacaatgacttgcaagatgactccctctaccttcctccctgctatgatgatgcagccaagcctgaagacgtgtataaatttgaagatcttctttcccctgcggagtatgaagctcttcagagcccatctgaagctttcaggaacgtcacgtcagaagaaatactgaagatgattgaggagaacagccattgcacctttgtcatagaagcgttgaagtctttgccatcagatgtggagagccgagaccgccaggcccgatgcatatggtttctggataccctcatcaaatttcgagctcatagggtagttaagcggaaaagtgctctgggacctggagttccccacatcatcaacaccaaactgctgaagcactttacctgcttgacctacaacaatggcagattacggaacttaatttcggattctatgaaggcgaagattactgcatatgtgatcatacttgccttgcacatacatgacttccaaattgacctgacagtgttacagagggacttgaagctcagtgagaaaaggatgatggagatagccaaagccatgaggctgaagatctccaaaagaaaggtgtcttgtggccgccgggcagtgaagaagatcacaaactgggcaccctgtccctcccgcttgcctccagcccagacctcagaccgcctggcaaagcggaaggaagattacctagacgcatgctttccagacagggcgttttgggctgcatcacagccactggctggtcctattcatttccatttttatgtatgttttgaaaannnnnnnnnnnnnnnnnnnnnnnnnnnnnnnnnnnnnnnnnnnnnnnnnnnnnnnnnnnnnnnnnnnnnnnnnnnnnnnnnnnnnnnnnccagtctggacaacatagggagaccccatctctaccggaggnnnnnnnnnngnnnnnnnnnnnnnnnnnnnnnnnnnnnnnnnnnnnnnnnnnnnnnnnnnnnnnnnnnnnnnnnnnnnnnnnnnnnnnnnnnnnnnnnnnnnnnnnnnnnnntgtgtggccacactccatcctgggtcacagagtgagaccttgtctcaaaaaagtaacataaggaaaaaagaagccttgctttagcacaggtatgaagccagaagccagcatctcaactgtgcttgtcttatgcagaaatataaagcgatggccaggttggacttcaaaaa

SEQ ID NO: 357715 - DNA, 1023 bp, Homo Sapiens
  misc_feature (7)..(8): n is a, c, g, or t
  misc_feature (25)..(25): n is a, c, g, or t
  misc_feature (38)..(38): n is a, c, g, or t
  misc_feature (53)..(53): n is a, c, g, or t
  misc_feature (61)..(61): n is a, c, g, or t
  misc_feature (87)..(87): n is a, c, g, or t
  misc_feature (143)..(143): n is a, c, g, or t
ccttggnnctggaatccaatgggcntcgatgcccggtntccctgtcttccttntggcaagntctccctgctcacccatgttcccttngcacccttctgtccacggtagccctttgggccagagggcccagggatttccaggcngctcaccttgtagcactctccgtaggcttcgtgtttcatgaccttgatgatgcggttgatggtgtcctggtcgatctcggtggagtcgggcagcatggtggcgtagtcgttgcggtagagctcgtgcggcgtgctggcgatgtcccgcaggccctgctccttcaggttctggttgggggccacggcgaagagccggatgccctcctcgcgggcccgctcggcctgcagcttgatgcccccgcaggggctgccggtgacgtggccgtcggtgatgaccacggcgaagtggacggtgcccttgctgcggtcctgccggatctgctccgtcatgttggccagcgcgcagtcggtgaaggtgccgcggcggaaggagctgatgccctgcaggttcttgatgaaggaggcccggtcgctgcccggtgggctgaacacctccacctggtcagagaagtgcaggccgccgtagcgccagctcagcgccacctggtccaggtagaactcgttctgcagctggctgatgaactgcggcacgaactgcttcatgtggaagagcaggatgtccgtgggggactgcatggtgacgctctccgaggtgtccagcacgaagtacacgtggatggggcagtcggtcttctctgggcagttgttgtttctctcggtagtgtccggcgagatgacctcctgctgctgggcctggatggcccccaggattccccagagcaggagcacggagcaggtgccctggagcatcttggcagcacctgtggccctgaagtcctggtcccgaggaggctccgctcccgacggcccgaggatcccgggaatccggacccggtaccagccgcgcgtaaaaactgcggttagtatagcaaggtaagtt

SEQ ID NO: 357716 - DNA, 1691 bp, Homo Sapiens
tgcctgctgtccgctggccttcagggctggacccgttcaccgactacggctcctcgctcaccgtcacgctgccgcccgagctgcaggcgcaccagcccttccaggtcatcctgcggtacacctcgaccgacgcccccgccatctggtggctggacccagagctgacctatggctgcgccaagcccttcgtcttcacccagggccactccgtgtgcaaccgctccttcttcccgtgcttcgacacacctgccgtgaagtgcacctactctgccgtcgtcaaggcgccatcgggggtgcaggtgctgatgagtgccacccggagtgcatacatggaggaagaaggcgtcttccacttccacatggagcaccccgtgcccgcctacctcgtggccctggtggccggagacctcaagccggcagacatcgggcccaggagccgcgtgtgggccgagccatgcctcctgcccacggccaccagcaagctgtcgggcgcagtggagcagtggctgagtgcagctgagcggctgtatgggccctacatgtggggcaggtacgacattgtcttcctgccaccctccttccccatcgtggccatggagaacccctgcctcaccttcatcatctcctccatcctggagagcgatgagttcctggtcatcgatgtcatccacgaggtggcccacagttggttcggcaacgctgtcaccaacgccacgtgggaagagatgtggctgagcgagggcctggccacctatgcccagcgccgtatcaccaccgagacctacggtgctgccttcacctgcctggagactgccttccgcctggacgccctgcaccggcagatgaagcttctgggagaagacagcccggtcagcaaactgcaggtcaagctggagccaggagtgaatcccagccacctgatgaacctgttcacctacgagaagggctactgcttcgtgtactacctgtcccagctctgcggagacccacagcgctttgatgactttctccgagcctatgtgggagaagtacaagttcaccagcgtggtggcccaggacctgctggactccttcctgagcttcttcccggagctgaaggagcagagcgtggactgccgggcagggctggaattcgagcgctggctcaatgccacaggcccgccgctggctgagccggacctgtctcagggatccagcctgacccggcccgtggaggcccttttccagctgtggaccgcagaacctctggaccaggcagctgcctcggccagcgccattgacatctccaagtggaggaccttccagacagcactcttcctgggaccggctcctggatgggtccccgctgccgcaggaggtggtgatgagcctgtccaagtgctactcctccctgctggactcgatgaacgctgagatccgcatccgctggctgcagattgtggtccgcaacgactactattccttgacctccacagggtgcggcgcttcctggagagccagatgtcacgcatgtacaccatcccgctgtacgaggacctctgcaccggtgccctcaagtccttcgcgctggaggtcttctaccagacgcagggccggctgcaccccaacctgcgcagagccatccagcagatcctgtcccagggcctgggctccagcacagagcccgcctcagagcccagcacggagctggg

SEQ ID NO: 357717 - DNA, 749 bp, Homo Sapiens
  misc_feature (508)..(518): n is a, c, g, or t
  misc_feature (603)..(604): n is a, c, g, or t
  misc_feature (614)..(614): n is a, c, g, or t
  misc_feature (620)..(620): n is a, c, g, or t
  misc_feature (625)..(625): n is a, c, g, or t
  misc_feature (627)..(627): n is a, c, g, or t
  misc_feature (631)..(631): n is a, c, g, or t
  misc_feature (637)..(637): n is a, c, g, or t
  misc_feature (649)..(649): n is a, c, g, or t
  misc_feature (659)..(659): n is a, c, g, or t
  misc_feature (663)..(663): n is a, c, g, or t
  misc_feature (666)..(667): n is a, c, g, or t
  misc_feature (671)..(672): n is a, c, g, or t
  misc_feature (674)..(674): n is a, c, g, or t
  misc_feature (681)..(681): n is a, c, g, or t
  misc_feature (685)..(688): n is a, c, g, or t
  misc_feature (691)..(691): n is a, c, g, or t
  misc_feature (693)..(693): n is a, c, g, or t
  misc_feature (708)..(708): n is a, c, g, or t
  misc_feature (722)..(722): n is a, c, g, or t
  misc_feature (736)..(736): n is a, c, g, or t
  misc_feature (739)..(739): n is a, c, g, or t
gtgttgctttgcaatggctggatccctcagaagacttaacttggctggagtgggaggaactgaaaataccactccatggcagacccatatatccaaatcgtagagaacgagaagctatgattttatcatcttatgctggaatcttaatgaacagtatcccgattgaggaagtctttaaaatttatggggctgattcttctgccgattctggtaccaccaaggtcccccgagtttcatctccccgcctccccttgcacccctttgccatgttaacagcacccaaagcagcagcatacgcccgcaaacagggtcacttagaaaattggaattgtaccatggaacttcataatagattctctgggagcagacgagaagcatcatcttaaaaccacagctcttgccagtacatttttctttacaactgtttttggtacaactgcactgaagtgttatttttgatgttgagctttcttcttttagaagcatattgcatggctacattttcttnnnnnnnnnnnctgtgaccttatgctacttcattgtgactggaagactgctggagaattcagaaagtatatagtatttctgtgttagagcaagctnnctctgtagcncctttnacaantntttngcattnaatattgcacantgattaagtnggangcnnattnncnttgagtnaagnnnnggnanaattagtctgtcatngattgcctttactntgttctcatatganaanaatgtttaaa

SEQ ID NO: 357718 - DNA, 995 bp, Homo Sapiens
ccgcgcggccggccccccaaaagcaggtggtaccggtccggaattctgggatcctgatgtctgtgagcaccagtctgagatgcgcggatgcttcagcatgcctccagaagcagagaaagaacaaaagcactggaaccggtctccggttgcctctagactcagagaagctgggtctaagtgtagtgttagctgcagatacctgctcagctggctaagcctttaacatggaaagaaggctcataaagaaggaaatgaaaaagctcttgggagattatattggcatcagacttcgggaaaatgaatttgacccaaaaggaagacggcaactcacctttctagatgatatggcacactatgacttggccatcagtgttgctttgcaatggctggatccctcagaagacttaacttggctggagtgggaggaactgaaaataccactccatggcagacccatatatccaaatcgtagagaacgagaagctatgattttatcatcttatgctggaatcttaatgaacagtatcccgattgaggaagtctttaaaatttatggggctgattcttctgccgattctggtaccatcaaggttccccgagtttcatctctccgcctctccttgcacccctttgccatgttaacagcacccaaagcagcagcatacgcccgcaaacagggtgtcaagtcaagaaaggtaacaacaaataaaaatgccaccagcatctctgcaaaggaagcaaatgccacagaatggaaatcatcacaaaggttttcagacacacagccaaagcacaaagtcacttagaaaatcggaattgtaccatggaacttcataatagattctctgggagcagacgagaagcatcatcttaaaaccacagctcttgccagtacatttttctttacaactgtttttggtacaactgcactgaagtgttattttggatgttgagctttcttcttttagaagcatattgcatggctacattttctt

SEQ ID NO: 357719 - DNA, 1496 bp, Homo Sapiens
  misc_feature (352)..(352): n is a, c, g, or t
cgggatccgtcgtccccgaatgtgacagcatccccaccccggctgctgcccaggatccgccggaccccggcctcgatatgggagacctggaactgctgctgcccggggaagctgaagtgctggtgcggggtctgcgcacttcccgctacgcgagatgggctccgaaggtcccaacactggtggaggagctgatcgcagtggagatgtggaagcagaaggtgttccctgtgttctgcagggtggaggacttcaagccccagaacaccttccccatctacatggtggtgcaccacgaggcctccatcatcaacctcttggagacagtgttcttccacaaggaggtgtgtgagtnagcagaagacactgtcttggacttggtagactattgccaccgcaaactgaccctgctggtggcccagagtggctgtggtggcccccctgaggggagggatcccaggacagcaaccccatgcaggagctgcagaagcaggcagagctgatggaatttgagattgcactgaaggccctctcagtactacgctacatcacagactgtgtggacagcctctctctcagcaccttgagccgtatgcttagcacacacaacctgccctgcctcctggtggaactgctggagcatagtccctggagccggcgggaaggaggcaagctgcagcagttcgagggcagccgttggcatactgtggccccctcagagcagcaaaagctgagcaagttggacgggcaagtgtggatcgccctgtacaacctgctgctaagccctgaggctcaggcgcgctactgcctcacaagttttgccaagggacggctactcaagcttcgggccttcctcacagacacactgctggaccagctgcccaacctggcccacttgcagagtttcctggcccatctgaccctaactgaaacccagcctcctaagaaggacctggtgttggaacagatcccagaaatctgggagcggctggagcgagaaaacagaggcaagtggcaggcaattgccaagcaccagctccagcatgtgttcagcccctcagagcaggacctgcggctgcaggcgcgaaggtgggctgagacctacaggctggatgtgctagaggcagtggctccagagcggccccgctgtgcttactgcagtgcagaggcttctaagcgctgctcacgatgccagaatgagtggtattgctgcagggagtgccaagtcaagcactgggaaaagcatggaaagacttgtgtcctggcagcccagggtgacagagccaaatgagggctgcagttgctaagggccgaacacccatgccaagggaatcaaccaagaatgcacccctgaaaacctcaaggatcacgggtccagggctctgccggagccccaagtctccgcaagggagaagcagagcgggcggtaaaagttgctgaccgatctcactcctcctcacccaagtgaaggtcgaaatttctggcccaacccaggggga

SEQ ID NO: 357720 - DNA, 1136 bp, Homo Sapiens
gattcccgggatagcgagactgacgctccccaaccgtcccgcaactgtcctgtcccagactttggcaccgtcggggtccgtcgtccccgaatgtgacagcatccccaccccggctgctgcccaggatccgccggaccccggcctcgatatgggagacctggaactgctgctgcccggggaagctgaagtgctggtgcggggtctgcgcagcttcccgctacgcgagatgggctccgaagggtggaaccagcagcatgagaacctggagaagctgaacatgcaagccatcctcgatgccacagtcagccagggcgagcccattcaggagctgctggtcacccatgggaaggtcccaacactggtggaggagctgatcgcagtggagatgtggaagcagaaggtgttccctgtgttctgcagggtggaggacttcaagccccagaacaccttccccatctacatggtggtgcaccacgaggcctccatcatcaacctcttggagacagtgttcttccacaaggaggtgtgtgagtcagcagaagacactgtcttggacttggtagactattgccaccgcaaactgaccctgctggtggcccagagtggctgtggtggcccccctgagggggagggatcccaggacagcaaccccatgcaggagctgcagaagcaggcagagctgatggaatttgagattgcactgaaggccctctcagtactacgctacatcacagactgtgtggacagcctctctctcagcaccttgagccgtatgcttagcacacacaacctgccctgcctcctggtggaactgctggagcatagtccctggagccggcgggaaggaggcaagctgcagcagttcgagggcagccgttggcatactgtggccccctcagagcagcaaaagctgagcaagttggacgggcaagtgtggatcgccctgtacaacctgctgctaagccctgaggctcaggcgcgctactgcctccaaggtttgcccagggacgggtactcaagcttcgggcttcctccagaaccctggtggacagctggccaacctggccactttgcagatttcctggcccctctggacctaatgaaacccagcctcctaaaaaggacctggggttgga

SEQ ID NO: 357721 - DNA, 1563 bp, Homo Sapiens
cgccgagctgggccaatcctcttggtggaggaagctcggctgattctcggctcacgcgggaggggagtaaagggtggcggtccgggcctggagttcagtgggtgcagcctgcttgcgagctgaggccagacaggggggcgcctacggacggaaaagaaaagttgattacaaacgggaccatattttgcttcgaaatggaaccagcagttagcgagccaatgagagaccaagtcgcacggactcatttgacagaggacactcccaaagtgaatgctgacatagaaaaggttaaccagaatcaggccaagagatgcacagtgatcgggggctctggattcctggggcagcacatggtggagcagttgctggcaagaggatatgctgtcaatgtatttgatatccagcaagggtttgataatccccaggtgcggttctttctgggtgacctctgcagccgacaggatctgtacccagctctgaaaggtgtaaacacagttttccactgtgcgtcacccccaccatccagtaacaacaaggagctcttttatagagtgaattacattggcaccaagaatgtcattgaaacttgcaaagaggctggggttcagaaactcattttaaccagcagtgccagtgtcatctttgagggcgtcgatatcaagaatggaactgaagaccttccctatgccatgaaacccattgactactacacagagactaagatcttacaggagagggcagttctgggcgccaacgatcctgagaagaatttcttaaccacagccatccgccctcatggcattttcggcccaagggacccgcagttggtacccatcctcatcgaggcagccaggaacggcaagatgaagttcgtgattggaaatgggaagaacttggtggacttcacctttgtggagaacgtggtccatggacacatcctggcggcagagcagctctcccgagactcgacactgggtgggaaggcatttcacatcaccaatgatgagcccatccctttctggacattcctgtctcgcatcctgacaggcctcaattatgaggcccccaagtaccacatcccctactgggtggcctactacctggccctcctgctatccctgctggtgatggtgatcagtcctgtcatccagctgcagcccaccttcacacccatgcgggtcgcactggctggcacattccactactacagctgcgagagagccaaaaaggccatgggctaccagccactagtgaccatggatgatgctatggagaggaccgtgcagagctttcgccacctgcggagggtcaagtgagggacactggaggctgggctctctcgacacgttgctcagccagtcactccttcccctgtggattgatgaaataacatcctttgaatgagtttgctctgagcctgtgactccttctgctaggcagagagcgcaccctactctttccgtgacgatgagggcggcaaaaacagacatttcttccttcatggaactggatttggatttcttgaagcaggcagcttcatattataccgatttgttctctgtc

SEQ ID NO: 357722 - DNA, 1605 bp, Homo Sapiens
  misc_feature (1032)..(1032): n is a, c, g, or t
  misc_feature (1041)..(1041): n is a, c, g, or t
  misc_feature (1058)..(1058): n is a, c, g, or t
  misc_feature (1100)..(1101): n is a, c, g, or t
  misc_feature (1104)..(1104): n is a, c, g, or t
  misc_feature (1110)..(1110): n is a, c, g, or t
  misc_feature (1113)..(1113): n is a, c, g, or t
  misc_feature (1119)..(1119): n is a, c, g, or t
  misc_feature (1128)..(1128): n is a, c, g, or t
  misc_feature (1136)..(1136): n is a, c, g, or t
  misc_feature (1151)..(1151): n is a, c, g, or t
  misc_feature (1162)..(1162): n is a, c, g, or t
  misc_feature (1165)..(1165): n is a, c, g, or t
  misc_feature (1171)..(1171): n is a, c, g, or t
  misc_feature (1197)..(1197): n is a, c, g, or t
  misc_feature (1232)..(1233): n is a, c, g, or t
  misc_feature (1239)..(1239): n is a, c, g, or t
  misc_feature (1243)..(1243): n is a, c, g, or t
  misc_feature (1254)..(1254): n is a, c, g, or t
  misc_feature (1257)..(1257): n is a, c, g, or t
  misc_feature (1273)..(1273): n is a, c, g, or t
  misc_feature (1280)..(1280): n is a, c, g, or t
  misc_feature (1283)..(1283): n is a, c, g, or t
  misc_feature (1285)..(1285): n is a, c, g, or t
  misc_feature (1317)..(1317): n is a, c, g, or t
  misc_feature (1322)..(1322): n is a, c, g, or t
  misc_feature (1348)..(1349): n is a, c, g, or t
  misc_feature (1360)..(1360): n is a, c, g, or t
  misc_feature (1379)..(1379): n is a, c, g, or t
  misc_feature (1383)..(1385): n is a, c, g, or t
  misc_feature (1432)..(1432): n is a, c, g, or t
  misc_feature (1479)..(1480): n is a, c, g, or t
  misc_feature (1482)..(1482): n is a, c, g, or t
  misc_feature (1485)..(1485): n is a, c, g, or t
  misc_feature (1488)..(1488): n is a, c, g, or t
  misc_feature (1497)..(1497): n is a, c, g, or t
  misc_feature (1500)..(1500): n is a, c, g, or t
  misc_feature (1503)..(1503): n is a, c, g, or t
  misc_feature (1518)..(1518): n is a, c, g, or t
  misc_feature (1521)..(1522): n is a, c, g, or t
  misc_feature (1539)..(1539): n is a, c, g, or t
  misc_feature (1559)..(1560): n is a, c, g, or t
  misc_feature (1572)..(1572): n is a, c, g, or t
  misc_feature (1576)..(1576): n is a, c, g, or t
  misc_feature (1578)..(1578): n is a, c, g, or t
  misc_feature (1593)..(1593): n is a, c, g, or t
  misc_feature (1601)..(1601): n is a, c, g, or t
gcttccgagtcctgcggccgcgggggccccgcctgctgcgcgcgcgggctacgcccacttcctgaacgtgcagggccggacgctctatgacgtcatcttgtacgggctccaggaacactcggaggtgtctggcttccttctggagtgtgacagctcggtgcagggcgcgctgcagaagcacctcgcgctatacaggatccggcggaaggtcacggtggagccgcacccggagctgcgagtgtgggcggtgttgcccagttcccctgaggcctgcggggctgcatcgctgcaggagagggcaggggctgccgccatcctcatccgcgacccgcgaacagcacgcatggggtggcggctcctcacccaggatgaaggcccagccctggtgcccgggggccggctcggggacttgtgggattatcaccagcaccgatacctgcaaggcgttcctgagggggtccgagacttgcctcctggggtggccctgcccctggagtccaacctggccttcatgaacggcgtgagcttcaccaaaggctgctacattggccaggagctgacggcccgcacccaccacatgggcgtcatccgcaagcgcctcttccctgtccggttcttggacccccttcccaccagtggcatcacccctggtgccacggtgctgactgcctcaggacagactgtgggcaagttcagggctggccagggcaacgtggggctggaccctgctgtggtcagagaagatcaagggtcctctgcacatcagagcctctgagcggtgcccaagtggccttagccgcatctgtgccagactggtggcctacagtctccaagtagtccgaagcctgggctggcgcaggctgatggggaggctggggcctggggcctttggcctctgtccagggtcttcccgtcccatctgtgctgctgcgcctactgggtgggagccctggtttccatctgggaaagtcccccttgtaggtccctgcctggccccacccatgctcagggccccaaacacgtgggttattntctccctgnacttcctgtggccccanagtagcccaccgtgtgagtgctgagcacaataatggctccanntanaaatcntanctccanacaaggttntctggganaacgggacggtaaanctaaccaaaantancaactnccgaaccttataccccactctacctngcatgaacatcatgggaggttggtccctgtgcctnnaagcgnggtnatatccaaaanctncaagctggaactcganctttggnagntntttcactaagcttcttccaacatatctcaggntgggnctatgcgtggtctagagggatctggnncattggaacanatagcatgtgggtatctanacannnagaagcaaacagggatgagccactaggtatcccatgctggaagcttntggaaagctatgcccatctcccatgtttccccacctctgttcctccnnanaanccnccaggaacntgnagngggaaccaaaacagntannaggatccagcagggcanaattctgcctgtgtttgctnnttttttgcatancctntntttgcagtgagagtnacttgctntcat

SEQ ID NO: 357723 - DNA, 896 bp, Homo Sapiens
  misc_feature (819)..(851): n is a, c, g, or t
gccagccccaccagctccttggagacgtcgcggacgccgtgcgccgagtagtcaaactcgccgcgggccgtgcggctgtcagcgcgctcatggtacacctgcgtggtggtgtaggcgtcgccgttgcggtagcgcgtgatctggcgtgtgcgccgcacgtagtgatagctggtggccttccaccagacgcacggcggcgcctgctgcagccggcggatcagcgccagcaccgtgtgggcgtcggtgcgtggcgcctggcaggaccgcacgtgacagtgccagcactcagccaggtagaggaggtagaggagggagacgaaggccagcgggatgtacaggtagccatcggagcaggggctggccgggtaggtcggtggcgggcccccggctccccgggccaaggcggcctcgggccccaggaccagccgcggcactgtggccaggcgacaccaggccaccacggccccgcaggcgtggatgagcagcgtgaggagcaggcacttccagtgcgactcgcggcacagggagcttcccagggactgtttcaggggccgctgctcttcccgcagcggctcgccgtccgggatgagcgcgggcacctccccgccgtcgccagcgccgtcctcgggcatggtgtcctggctgcttgggcggccccagcctgggcaccgggcatgataggggggagcacggagggctgcgacgcggcccccgggggcgtccgctcggctcagcggccgcggagggagtgcgcggagctcgagccacgagcgcggcccgctctcgacgaattcgagcttcggccgatttggcctgatnnnnnnnnnnnnnnnnnnnnnnnnnnnnnnnnngatgcgccgccaccgcgataatcccggtccccaagacgacatccc

SEQ ID NO: 357724 - DNA, 1393 bp, Homo Sapiens
  misc_feature (274)..(302): n is a, c, g, or t
  misc_feature (1178)..(1186): n is a, c, g, or t
  misc_feature (1207)..(1217): n is a, c, g, or t
agataagcaaataaagaatggtgaatgtgacaaggcatacctagatgaactggtagagcttcacagaaggttaatgacattgagagaaagacacattctgcagcagatcgtgaaccttatagaagaaactggacactttcatatcacaaacacaacatttgattttgatctttgctcgctggacaaaaccacagtccgtaaactacagagttacctggaaacatctggaacatcctgaggatataacaactggatgcatcaagaactattgtgnnnnnnnnnnnnnnnnnnnnnnnnnnnnnggttgtgattttttgttcttgttgtttatatgaaaacactcaaaatgatgcaaccaaaagggaaaaaataaaaatcaaacaaccttcagctttatttttctttaaagccagtcatcatctcttgataaaggagaggttaaagcaaaccagcctcagcggaccactcttctctccaaggaaatccccgggaagagttagcctggatagccttgaaaacaaacaaatcaaacacaacacaagaaaactcaaagaatgtgtatggtatcatgtatctctctgtggtggttcattccacaggacgaatgcatattcaacacactgccttattacataactgatctatttattatcgcatacagatattctaagtcgttgagggaatgacaccatcagacattataagtacttggtcccgtggatgctctttcaatgcagcacccttgccatcccaagcccagtgaccttactcgtataccgtgccactttccaccaactttttccaagtcctttaactcgttgcagtctgtattttccaccttttgtttttccagttccaggacacagattatcaactggggggaccaaatagccaccttgattttcttctttgtggtctttttcctgaaagttggggcccagtccttggctgtatccatgtaatgatcttggaccatggtagaaaatgcaccaaataggatcatatgaattgctgtctagccttagtcaataaacttgtaggacttttaaacaaaagtgtacctgtaaatgtcctgaatccagccattgttgagctgtcatcaacattcttgtgtctgttttactgttacaatattaggtgaatatggaagtaaaggcattccacaggatcatcatttnnnnnnnnngaattctggtcctgttttctnnnnnnnnnnnctgttgtagaaattcttaatttggatctatttattagtcagagtttcagctttcttcagctgccagtgtgttactcatctttatcctaaaaatctggaatcagagatttttgtttgttcacatatgattctcttagacacttttatatttgaaaaaattaaaatctttctttgggg

SEQ ID NO: 357725 - DNA, 460 bp, Homo Sapiens
  misc_feature (31)..(31): n is a, c, g, or t
  misc_feature (264)..(264): n is a, c, g, or t
aatccaaaaaactgccttaattacataatgnacctatttaataacgccaaacagataatccaaagtcgttgagggaaatgaacacccatcagaacattaataagtacttggtccccgtggatgcctccttccaatgcagcacccttgcccatccccaagccccagtgaccttactcgtataaccgtgcccactttccaccaactttttcccaagtcctttaactcgttgcagtctgtattttccaccttttgtttttccagttnccaggacacagattatcaactggggggaccaaatagccaccttgattttcttctttgtggtctttttcctgaaagttggggcccagtccttggctgtatccatgtaatgatcttggaccatggtagaaaatgcaccaaataggatcatatgaattgctgtctagccttagtcaataaacttgtaggacttttaaac

SEQ ID NO: 357726 - DNA, 777 bp, Homo Sapiens
  misc_feature (285)..(285): n is a, c, g, or t
  misc_feature (554)..(617): n is a, c, g, or t
  misc_feature (705)..(705): n is a, c, g, or t
ccatgccctcagagctcctccggaccagccaagtcatgctcctctggggaccggccctcagcatccccctcgacgggcctggagggaccacagcccccggccagaggcgcagggcagaggacatcccttccggaggttctgcggcggagggctgccgacctctccctcacgcgccaggtgaggcgcgtaaaggaaggggagcttgtctcactcacagagggcccggctcgcgggaggcgctgcggggtgggcgcgaactgagatccaaatttctgcccttttccntacgttccatacccccgcccctaacacagtctctcaatccagctcccttctaactccccgaaacatccagaggggtgggcgggaggagaagggaaggccctcaggccacagacggtgggagtggaaaggtctgtcggaagtcactcttggggcccaacccaactttcaaaaagaggcagctgcaaccctcctagccggtctccgtactcaaggactctcccgagccgagaggcgaaggccgagcctgcgtccagcagctgagggggggnnnnnnnnnnnnnnnnnnnnnnnnnnnnnnnnnnnnnnnnnnnnnnnnnnnnnnnnnnnnnnnncccggccctccccagatcccggaaggaggccgccgccagccgcgccagcgccagttgttcacgttggtcccgtcctcccgctcctccncgatccagtgggggttcccctggccccacttggccatggcggcgtggactgggcggaaaacaaggaaaggcc

SEQ ID NO: 357727 - DNA, 947 bp, Homo Sapiens
gtagtccagctactcagaaggctgaagcaggagacttggctgaagctcggaaactgagttgcagcgagcccaagatggcccatgcccctcagagctcctccggaaccagccaagtcatgctcctctgggggaccggcctcagcatccccgtcgacgcctggaagggaccacagcccggccagaggcgcagggcagaggacatcccttccggaggttctgcggcggagggctgccgacctctccccaacgcgccaggtgaggcgcgtaaaggaaggggagcttgtctcactcacagaggcccggctcgcgggaggcgcctgcggggtgggcgcgaactgagatccaaatttctgccctttccactacgttccatacccccgcccctaacacagtctctcaatccagctcccttctaactccccgaaacatccagaggggtggacgggaggagaagggaaggccctcaggccacagacggtgagagtgaaaaggtctgtcggaagtcactcttggggcccaacccaactttcaaaaagaggcagctgcaaccctcctagccggtcaccgtactcaaggactctcccgagcccagaggcgaaggccgagccctgcgtccagcagctgagggggggcggccccctgaccccctggccccgcggccccgcacagaccccagggcagccccggctcccgcggcccggccctccccagatcccggaaggaggccgccgccagccgcgccagcgccagttgttcacgttggtcccgtcctcccgctcctccacgatccagtgggggttcccctggccccacttggccatggcggcgtggactgggcggaaaacaaggaaaggccgcggcgcctaaggctccgaagccagcgtttccggccgccgagccccggggcggcgcgttcgcagctcccagaaactgccagaaggcccgct

SEQ ID NO: 357728 - DNA, 1198 bp, Homo Sapiens
  misc_feature (978)..(978): n is a, c, g, or t
tggctgttctgtagctggagagctccgtgggtggcaggactgaacttgaacaccagaaacaacccccaagccttgtgacctgggaggcaggaggcgggtctgtctccctgggacttgggtggctgagccgaggtactcgggaccctgtcccgcgcatggcagagtggctcctcacagcctgaagctcatccttctgcacgggccagccaggccagcacagaggcaccagggcagcagtgcacacaggtccccggggaccccaccatgtggagcggatggtggctgtggccccttgtggccgtctgcactgcagacttctttcgggacgaggcagagaggatcatgagggactcccctgtcattgatgggcacaatgacctcccctggcagctgctggatatgttcaacaaccggctgcaggacgagagggccaacctgaccaccttggccggcacacacaccaacatccccaagctgagggccggctttgtgggaggccagttctggtccgtgtacacgccctgcgacacccagaacaaagacgccgtgcggaggacgctggagcagatggacgtggtccaccgcatgtgccggatgtacccggagaccttcctgtatgtcaccagcagtgcaggcattcggcaggccttccgggaagggaaggtggccagcctgatcggcgtggagggcggccactccattgacagcagtttgggcgtcctgcgggcactctatcagctgggcatgcggtacctgaccctcacccacagctgcaacacgccctgggctgacaactggctggtggacacgggagacagcgagccccagagccaaggcttgtcaccctttgggcagcgtgtggtgaaggagctgaaccgtctgggggtcctcatcgacttggctcacgtgtctgtggccaccatgaaggccaccctgcagctgtccagaagccccggtcatcttcagccactcctcggncctacaacgtgtgcgcaagcccgcgcaacgtgccttgagacttcctgaagcttggggaacaaacaacagccctggggatggtgaacttcttccaccattacttttcctggccccacaaaggccaccctgccccaggggcccaacatctgggacccttccaggaagggggccgggaccacaaaccctgggttttgggggggaactctctgggtttccacgg

SEQ ID NO: 357729 - DNA, 660 bp, Homo Sapiens
atatcttactcaaccgtgtttttccttgtttaaaagaaaatgatgctctaagctacaaaattttgtcaaaaactcatattgaattttcaatgccaaagatgtagctattgatgttatcagacagagcactgactatgtactatcaaactatctaacaatctgcataagtctgattctatttctatgactttgaatttagaatcacttaaagcttttataaagaatcgataaattcacctgtatttgttgttagaaaaaaactgggtgtctgtacattttgtggtgtaaaatatgtaattgaagattactattttaagaagtcatcagtcatatcactcacacagaattttattttacatagttttgtgacttaattacacatgaatataaaatctataattctatatgaatatatagagatatagaaacatctgaactggtaaagaataactataaaatatgaaagctctaaatttaaaataaatttagagatagaatcatggtacattattgtttcagtattccatgtgaaaattttatagcttaaatgtagtcagtgtttgattaatgaaaaaattcttcatgagtcagccttcaaaagttaagcttgccttttacttttatgtcaacaatattaattattaaaattagtaagacgtc

SEQ ID NO: 357730 - DNA, 1070 bp, Homo Sapiens
agacgtactgacggcatatctttcagggcagagtccgagcagcgcttggtgacagcctgtcctctcctgctctccaaaggccctgctccctgtcctctctcactttacagcttgtgtttcttctggattcagcttctcctaaacagacagtttaattatagttgcggcctggccccatcctcacttcctctttttatttcactgcagctaaaattgtgtttttacctactactttggatggttgtcctcttttcggcaaagttggagcgagtgccaagctctccatctgtggtcctttctgccaagagcgactcatagtaaccaggatgggagagcagctgccttattctgaatcccaaaaattacttgggggtgattgtcacagaggagggacagaaagggtatctgctgaccaccagcctgcctacccatgcccatgtctccattcctgctcaagcgtgtgtgctgggccggggagtccctgtctctcacagcatctagcagtattattaaatggattcattttaaaaatagctcctatattttgtaacatgtctcaaacactcatactgggttccacaatccactgttagaatacctatggttagggcttctgaactaaaataatggaaaattttaacaatttgtatagtgcctggatcattactagtgccataaccctgcttcttcaacatttcacagaacttctcttttatataaaggcaagagcacaaaatgagttcagatgatcacaaacaggtgagttttgttggagaagaaagttggagtaggagactttcacaagtggtttccatggagatagaatgaagcattctgtggtcaagtaagtttagggagctattcatgtttcacttgctttgtggagattcacactatgcactgggaaagtatctgaaaagtcttataataaagaaacaggcttaactttgtgtaagaacactgtttatcaatgtcatttggctatagaaacattttctcctgctgattgtgtgtgtgaaacatgtattaacattccaatgaactagcatttaataaagcacaattttggg

SEQ ID NO: 357731 - DNA, 1765 bp, Homo Sapiens
  misc_feature (1030)..(1030): n is a, c, g, or t
  misc_feature (1042)..(1042): n is a, c, g, or t
cggcgctgggggcggcaggttgcggcggcgccggagcgggtctccaggctggcgagcgcccaggacaggcatgttgttgggactggcggccatggagctgaaggtgtgggtggatggcatccagcgtgtggtctgtggggtctcagagcagaccacctgccaggaagtggtcatcgcactagcccaagcaataggccagactggccgctttgtgcttgtgcagcggcttcgggagaaggagcggcagttgctgccacaagagtgtccagtgggcgcccaggccacctgcggacagtttgccagcgatgtccagtttgtcctgaggcgcacagggcccagcctagctgggaggccctcctcagacagctgtccacccccggaacgctgcctaattcgtgccagcctccctgtaaagccacgggctgcgctgggctgtgagccccgcaaaacactgacccccgagccagcccccagcctctcacgccctgggcctgcggcccctgtgacacccacaccaggctgctgcacagacctgcggggcctggagctcagggtgcagaggaatgctgaggagctgggccatgaggccttctgggagcaagagctgcgccgggagcaggcccgggagcgagagggacaggcacgcctgcaggcactaagtgcggccactgctgagcatgccgcccggctgcaggccctggacgctcaggcccgtgccctggaggctgagctgcagctggcagcggaggcccctgggcccccctcacctatggcatctgccactgagcgcctgcaccaggacctggctgttcaggagcggcagagtgcggaggtgcagggcagcctggctctggtgagccgggccctggaggcagcagagcgagccttgcaggctcaggctcaggagctggaggagctgaaccgagagctccgtcagtgcaacctgcagcagttcatccagcaggaccgggggctgcgctgccaccgcccccacggccctgacaggggccctcctggcactcagtttttnttggttctgggnggaggctgggaggtgaggacctggcccagccccactccaagctgacttcccaacccacagggccctctgcctccagccagagaggagtccctcctgggcgctccctctgagtccaatgctggtgcccagcctaggccccgagggtatgtctggtgccccacctccccctggggcaccgggccctcctgtggctgcagccacctcagcctgtgtcctcccgcagtggcccccatgacgcagaactcctggaggtagcagcagctcctgccccagagtggtgtcctctggcagcccagccccaggctctgtgacagcctagtgagggctgcaagaccatcctgcccggaccaaagaaggagagttggcggtcaaagagggctcatctaccaagcagtgggaagccctgggtttggcctcaggagctgggggtgcagtgggggactgccctagtccttgccaggtcgccagcaccctggagaagcatggggcgtagccagctcggaacttgccaggccccaaaggccacgactgcctgttggggacaggagatgcatggacagtgtgctcaagctgtgggcatgtgcttgcctgcgggagaggtccttcactgtgtgtacacagcaagagcatgtgtgtgccacttcccctaccccaacgtgaaaacctcaataaactgcccgaagcagctttgagaacatacggagcaatactaaaaccaaaggg

SEQ ID NO: 357732 - DNA, 1647 bp, Homo Sapiens
agcggagggggactcctcggactgcgcggaacatggcgttctggggttggcgcgccgcggcagccctccggctgtggggccgggtagttgaacgggtcgaggccgggggaggcgtggggccgtttcaggcctgcggctgtcggctggtgcttggcggcagggacgattattaaaggtggaagaaggtccatatctttttctgtgggtgcttcaagtgttgttggaagtggaggcagcagtgacaaggggaagctttccctgcaggatgtagctgagctgattcgggccagagcctgccagagggtggtggtcatggtgggggccggcatcagcacacccagtggcattccagacttcagatcgccggggagtggcctgtacagcaacctccagcagtacgatctcccgtaccccgaggccatttttgaactcccattcttctttcacaaccccaagccctttttcactttggccaaggagctgtaccctggaaactacaagcccaacgtcactcactactttctccggctgcttcatgacaaggggctgcttctgcggctctacacgcagaacatcgatgggcttgagagagtgtcgggcatccctgcctcaaagctggttgaagctcatggaacctttgcctctgccacctgcacagtctgccaaagacccttcccaggggaggacattcgggctgacgtgatggcagacagggttccccgctgcccggtctgcaccggcgttgtgaagcccgacattgtgttctttggggagccgctgccccagaggttcttgctgcatgtggttgatttccccatggcagatctgctgctcatccttgggacctccctggaggtggagccttttgccagcttgaccgaggccgtgcggagctcagttccccgactgctcatcaaccgggacttggtggggcccttggcttggcatcctcgcagcagggacgtggcccagctgggggacgtggttcacggcgtggaaagcctagtggagcttctgggctggacagaagagatgcgggaccttgtgcagcgggaaactgggaagcttgatggaccagacaaataggatgatggctgcccccacacaataaatggtaacataggagacatccacatcccaattctgacaagacctcatgcctgaagacagcttgggcaggtgaaaccagaatatgtgaactgagtggacacccgaggctgccactggaatgtcttctcaggccatgagctgcagtgactggtagggctgtgtttacagtcagggccaccccgtcacatatacaaaggagctgcctgcctgtttgctgtgttgaactcttcactctgctgaagctcctaatggaaaaagctttcttctgactgtgaccctcttgaactgaatcagaccaactggaatcccagaccgagtctgctttctgtgcctagttgaacggcaagctcggcatctgttggttacaagatccagacttgggctgagcggtccccagccctcttcatgttccgaagtgtagtcttgaggccctggtgccgcacttctagcatgttggtctcctttagtggggctatttttaatgagagaaaatctgttctttccagcatgaaatacatttagtctcctcaaagggaa

SEQ ID NO: 357733 - DNA, 577 bp, Homo Sapiens
  misc_feature (373)..(373): n is a, c, g, or t
  misc_feature (523)..(523): n is a, c, g, or t
  misc_feature (535)..(535): n is a, c, g, or t
  misc_feature (546)..(546): n is a, c, g, or t
gaatactaggcgaccccctgaggcgaagggcaaaccagaccacgccacaccaccccactcccccggcccggagcccggcggggtcggccgttctctcaaggaaccgggccggaattttcaagattggcgttctggggttggcgcgccgcggcagccctccggctgtggggccgggtagttgaacgggtcgaggccgggggaggcgtggggccgtttcaggcctgcggctgtcggctggtgcttggcggcagggacgatgtgagtgcggggctgagaggcagccatggggcccgcggtgagcccttggacccggctgcgccccttgcagaggcctcccagacccgaggtgcccagggcattccggaggcagccnagggcagcagctcccagtttcttcttttcgagtattaaaggtggaagaaggtccatatctttttctgtgggtgcttcaagtgttgttggaagtggaggcagcagtgacaaggggaagctttccctgcaggatgtagctgagctgatttcnggccagagcttnccagagggttngtgtgtcatggtgggtgccggcattagcaca

SEQ ID NO: 357734 - DNA, 877 bp, Homo Sapiens
tcctttcgagaccatccgggctaccactgactactgccgccgccacaagatcccctttccccaagtagaagaggctgagctggatttgtggtccaaggcccccgccagctgctacatcctgaaaggagaaactgaccagtggtgatgcattttcccctgttcaacatagatgcctgtggaggtgatattgaggcatggagtgacacatacgacacattcaagcttgctgacacctacactctagatgtggtggtgctactcttggcattagccaagaagaatgtcagggaaaacaagaagaagatccttagagagttgatgaacgtggccgggctctactacccgaaggatagtgcccgaagttgctgcttggcatagatgagcctcagcttccagggcactgtgggcctgttggtctactagggccctgaagtccacctggccttcctgttcttcactcccttcagccacacgcttcatggccttgagttcaccttggctgtcctaacagggccaatcaccagtgaccagctagactgtgattttgatagcgtcattcagaagaaggcgtccaaggagctgaaggtggtgaaatttgtcctgcaggtccctcgggagatcctggagctggagcatgagtgtctgacaatcagaagcatcatgtccaatgtccagatggccagaatgaatgtgatagttcagaccaatgccttccactgctcctttatgactgcacttctagccagtagctctgcacaagttagctctgtagaagtaagaacttgggcttaaatcatgggctatctctccacagccaagtggagctctgagaatacaacaagtgctcaataaatgcttgctgattgactgatggatt

SEQ ID NO: 357735 - DNA, 800 bp, Homo Sapiens
  misc_feature (507)..(511): n is a, c, g, or t
  misc_feature (517)..(517): n is a, c, g, or t
  misc_feature (597)..(597): n is a, c, g, or t
  misc_feature (634)..(634): n is a, c, g, or t
  misc_feature (664)..(664): n is a, c, g, or t
  misc_feature (710)..(710): n is a, c, g, or t
  misc_feature (715)..(715): n is a, c, g, or t
  misc_feature (720)..(720): n is a, c, g, or t
  misc_feature (768)..(768): n is a, c, g, or t
  misc_feature (778)..(778): n is a, c, g, or t
  misc_feature (785)..(785): n is a, c, g, or t
  misc_feature (795)..(795): n is a, c, g, or t
aggcccctgggaggggcgaagcccttaggggtcgaggccaggagggaggaggaccagcacctgatgcccctgggggcccgctgggtcatggaactgtgtgtgtggagggtggggggtcagcccaccacgggccatttctccccaaggctaagggcgggggagcaagtaaagctgaggagagggcttcatgggacagggttcccatcccctgctgggagggtgttcctggataccccacaaggcactacagatgcagactgtaggcgagcacccccatctttggcccccgattgcctggctctccccctgccccagctcccactgtggtttggcgggggagaagagaaggggctgggccccccactccctcagcagacaccagccaggaaccgacccggcgggccgaggctaggaaggaccctctcccgctgctctgggctcctggggtcctcttggctcggcctccccctcttttagcgctggctgttgcgaataaataaataaatnnnnncgtggncgccccgcccctacagctgggtgtcctcctcctccagggagcggttgagtccggggatgacttgagcagcgcggcggaantgcggtacttggttttgcgcagccggggcgcataggnctgctcgcgagctcagtccagagcgcgccngcgccgcccgcctccgccccgccaggcccgcgcacgcacactgggntgcgntcacncggccgcgcccacggcccgcccaccgcagggtctcgccgggccgggcnaagcgcgccngcggcgncggggcgcanccgcg

SEQ ID NO: 357736 - DNA, 1036 bp, Homo Sapiens
  misc_feature (187)..(977): n is a, c, g, or t
  misc_feature (980)..(981): n is a, c, g, or t
  misc_feature (990)..(990): n is a, c, g, or t
  misc_feature (998)..(998): n is a, c, g, or t
  misc_feature (1012)..(1012): n is a, c, g, or t
  misc_feature (1017)..(1017): n is a, c, g, or t
  misc_feature (1019)..(1019): n is a, c, g, or t
  misc_feature (1024)..(1024): n is a, c, g, or t
tgaattagaaattcaaagctgagaaagctacttaaaaatggtcaagaaaaagatacacattaagtaaaagaaagttggcatggcaatagtagtatcagataataggcctcaaaacaatgtatatggcaggagataggtaacagtcataaaagagcaggtcattaggaatttgcatatacatttgtcnnnnnnnnnnnnnnnnnnnnnnnnnnnnnnnnnnnnnnnnnnnnnnnnnnnnnnnnnnnnnnnnnnnnnnnnnnnnnnnnnnnnnnnnnnnnnnnnnnnnnnnnnnnnnnnnnnnnnnnnnnnnnnnnnnnnnnnnnnnnnnnnnnnnnnnnnnnnnnnnnnnnnnnnnnnnnnnnnnnnnnnnnnnnnnnnnnnnnnnnnnnnnnnnnnnnnnnnnnnnnnnnnnnnnnnnnnnnnnnnnnnnnnnnnnnnnnnnnnnnnnnnnnnnnnnnnnnnnnnnnnnnnnnnnnnnnnnnnnnnnnnnnnnnnnnnnnnnnnnnnnnnnnnnnnnnnnnnnnnnnnnnnnnnnnnnnnnnnnnnnnnnnnnnnnnnnnnnnnnnnnnnnnnnnnnnnnnnnnnnnnnnnnnnnnnnnnnnnnnnnnnnnnnnnnnnnnnnnnnnnnnnnnnnnnnnnnnnnnnnnnnnnnnnnnnnnnnnnnnnnnnnnnnnnnnnnnnnnnnnnnnnnnnnnnnnnnnnnnnnnnnnnnnnnnnnnnnnnnnnnnnnnnnnnnnnnnnnnnnnnnnnnnnnnnnnnnnnnnnnnnnnnnnnnnnnnnnnnnnnnnnnnnnnnnnnnnnnnnnnnnnnnnnnnnnnnnnnnnnnnnnnnnnnnnnnnnnnnnnnnnnnnnnnnnnnnnnnnnnnnnnnnnnnnnnnnnnnnnnnnnnnnnnnnnnnnnnnnnnnnnnnnnnnnnnnnnnnnnnnnnnnnnnnnnnnnnnnnnnnnnnnnnnnnnnnnnnnnnnnnnnnnnnnnnnaannatgcctctnctggtacncctgaaggcttgcnggggngnttacngtactttttttt

SEQ ID NO: 357737 - DNA, 1521 bp, Homo Sapiens
  misc_feature (15)..(15): n is a, c, g, or t
  misc_feature (531)..(539): n is a, c, g, or t
  misc_feature (900)..(900): n is a, c, g, or t
  misc_feature (913)..(913): n is a, c, g, or t
  misc_feature (1011)..(1012): n is a, c, g, or t
  misc_feature (1047)..(1047): n is a, c, g, or t
  misc_feature (1063)..(1063): n is a, c, g, or t
  misc_feature (1065)..(1065): n is a, c, g, or t
  misc_feature (1067)..(1067): n is a, c, g, or t
  misc_feature (1085)..(1085): n is a, c, g, or t
  misc_feature (1092)..(1092): n is a, c, g, or t
  misc_feature (1094)..(1094): n is a, c, g, or t
  misc_feature (1109)..(1109): n is a, c, g, or t
  misc_feature (1111)..(1111): n is a, c, g, or t
  misc_feature (1118)..(1118): n is a, c, g, or t
  misc_feature (1128)..(1129): n is a, c, g, or t
  misc_feature (1131)..(1131): n is a, c, g, or t
  misc_feature (1146)..(1146): n is a, c, g, or t
  misc_feature (1150)..(1150): n is a, c, g, or t
  misc_feature (1152)..(1152): n is a, c, g, or t
tctttccaatttggntctaattttccagatgttgcaagctgagaccctaaaaggttaggtgacaggttatacaacttggagtgtgggaggaggagagaggaacctgaacagggcaagttggggatctgacttttgtttgggtagatgtaggcacattgtatttttggcttagatgctttattcatcatggctgaaggtaataccatttactcactcaccgaaaattgtttacaataatctagatggatttgctgtctttggacatctgtcttttgactggaccccagtatatagtctgtggaagctcacttaaggagagagctcctttttgtttggttagagaaattttctgtcctaaaagtagaaatagccccttctaggtaaggatggagcatttgatcatactggtttcattatattcctctaacagttggaaccgattgtttttgagtacttgtttcaaacttctgagtatcttccttctggaaaatagctcagtgtttaaaatttacatgaacttaaaaggttaannnnnnnnnaaagaatgtttgaggagcaatcaagtctgattttgtcttatggatagaaatagaattagccattttcctcaagaaaagtgattcttctgaatcttagcttttcagtaatgagaactggactgtttccacttgacctctatggcctgttagtgggaaaccgcttcccagaggtgctgtgtgaaagattgctggggaaagggtttctagatcccagcataacaagttcaagagtccagcgatattgtcattagaataatggccttcattaagtactagttttcataatcctgaagcttcattttcaccaattttgaaaggcagctaggggagggagaagactatgccagggaaggaggaaaantctggagtgcatnacagagaccttgagtgagttaaggcagggaagaagcagatttgctatccactgaatgaaaataagaagaattccattgtccaaggtcagagcaagaanncaaaggttttagtttacttagttaattccttaggnttggacattacaggananangggggtgaccatagcaanttagctnanaaatgtatcagaaantnaatcaanaatatctaanncnattttttttaggcanaccngntccctgatgtgttacctgcttctgctactgatccaaactgcagaacttctcattcatccccaaggcctccaggcagtatccaatggggaatcagctctaaaaggaaccagaccaacgttttccagccccttcattctgtagcttccctctgtgtgaggaaaggatagaaatgttcaggacatcatcatacaggctcctcatctacaaagttccagtagcagtgacgcctacacggaagacttggaactgcaaacaggctggggtcacctcagtgacatctgacgctgtccaaccagaagttcgatttttgttctgggggtgaaggaggaaacagactgtactaaaggactaaaataatttgtctatact

SEQ ID NO: 357738 - DNA, 956 bp, Homo Sapiens
  misc_feature (155)..(155): n is a, c, g, or t
  misc_feature (157)..(157): n is a, c, g, or t
  misc_feature (159)..(160): n is a, c, g, or t
  misc_feature (167)..(167): n is a, c, g, or t
  misc_feature (184)..(184): n is a, c, g, or t
  misc_feature (239)..(239): n is a, c, g, or t
  misc_feature (642)..(674): n is a, c, g, or t
  misc_feature (919)..(919): n is a, c, g, or t
ttccagaaaaccggccattcccgccgggcctttggcgactcacccatggtgcgtggaccgtgggcgtccttgctctagcccatgcctactcctcctcttggtccctgtccctctgtgaggcatcgagttcctgaagacagcccatgagatgtggngncnngccactnaggcccacacttatctncgacccacccgaccaggccccctgtgccctacagctgagagaggacccagcagangggagggcggctcactagcacacccctgcatggactgggtgccctgttctccatgtgaggcctaatgggaaggagttcattgccatgctttggcaaccagtacgtggctcctgcttgtcatggcagccagagggaaactgaggcacagaacctgctagaatctgggaaagttgaaaatactcccaggaaccttttctcctaacctaaccactgggcatttttgaggacgattcaacagtagaagggagggaccttgaggaaggtgcctgtcacatcatgatgcagacagataaggggttggtttgcaaagaggggtcaaagcacaatgcaaatattgtaatagagggtgggcctgactcctaatgggaggcccaggtctgcggctggactggacacaagcagnnnnnnnnnnnnnnnnnnnnnnnnnnnnnnnnngccagtggcagcaccagtaagtgccaaggataccagaaccactggggcagctggaataacaagcccaagtatgggggtccccgtgctgggcacatcccaggtatctccctccccacccattgccacaggacacctctggggactgggtgcctcacgccccttctgtcttgactgccctccatgccctgccccacaaacgctctgataacagtctgtccctgtctctctcctgctgctcttatggnagcggagttttccgctcctgcagaaagcaaagttacg

SEQ ID NO: 357739 - DNA, 1029 bp, Homo Sapiens
  misc_feature (848)..(848): n is a, c, g, or t
  misc_feature (898)..(898): n is a, c, g, or t
  misc_feature (916)..(916): n is a, c, g, or t
  misc_feature (943)..(943): n is a, c, g, or t
  misc_feature (949)..(949): n is a, c, g, or t
  misc_feature (975)..(975): n is a, c, g, or t
  misc_feature (983)..(984): n is a, c, g, or t
  misc_feature (988)..(988): n is a, c, g, or t
  misc_feature (992)..(992): n is a, c, g, or t
  misc_feature (1009)..(1010): n is a, c, g, or t
accggtccggaattcccgggatgcggacccaggccctcggccgccccgcgttcatggccgcgccgtgccccggtcacgcggcagcattttcctgtgttacatctgcaaggaatacgtagaggatctggccaaaatccccaggagtttcttacaagaagcataattgtcacccttattagtgattggacagtcatccttacctatcattattgagcctttttgcaagctgactggatattctcatgaaatctatgtcgatcctgagagagaaatttataaaagattgggaatgaaaagaggtgaagaaattgcttcctcaggacagagcccccacataaaatcaaatctactctcaggaagccttcagagcctgtggcgggcagtgactggccctctctttgattttcaaggagacccagctcagcaaggtggaaccctcattttaggtccaggtaacaacatccattttatacaccgcgataggaataggttggatcacaaacctatcaactctgttttacagcttgtaggagttcagcatgtgaactttacaaacagaccttcagttatccatgtgtgacttaaaatgcactcagtcactttcaactggaccttctggaatgtgaccttcaatgcctgggtgtaatatcctcgtgcagtgtctaacctgctgtcccttcccagcctttgaggagttagggaagcataaagggggcttgaacctgttgaattgcatgctgggaagcatcagttgtcaaaatatgttatatacttccattttataacttttaacattttatacaaaaaaaatgaatatacaaaatataactttaaaagctataaaatcntaaatactctaaattattttacattatggtatattcagtcaatgaaaganttttttggcaatataaantctgacagtatataaggggaccggagnccaacncaagaccattatattcagtgaagaanccaaaatnncaantctntcaacaatgtaactgcnnttttatatgtatatatttg

SEQ ID NO: 357740 - DNA, 1642 bp, Homo Sapiens
  misc_feature (790)..(1018): n is a, c, g, or t
  misc_feature (1020)..(1020): n is a, c, g, or t
  misc_feature (1030)..(1030): n is a, c, g, or t
  misc_feature (1032)..(1032): n is a, c, g, or t
  misc_feature (1109)..(1109): n is a, c, g, or t
  misc_feature (1169)..(1169): n is a, c, g, or t
  misc_feature (1231)..(1231): n is a, c, g, or t
  misc_feature (1240)..(1240): n is a, c, g, or t
  misc_feature (1269)..(1269): n is a, c, g, or t
  misc_feature (1280)..(1280): n is a, c, g, or t
  misc_feature (1287)..(1287): n is a, c, g, or t
  misc_feature (1296)..(1296): n is a, c, g, or t
  misc_feature (1301)..(1301): n is a, c, g, or t
  misc_feature (1305)..(1305): n is a, c, g, or t
  misc_feature (1313)..(1313): n is a, c, g, or t
  misc_feature (1347)..(1347): n is a, c, g, or t
  misc_feature (1351)..(1351): n is a, c, g, or t
  misc_feature (1362)..(1362): n is a, c, g, or t
  misc_feature (1378)..(1378): n is a, c, g, or t
  misc_feature (1380)..(1380): n is a, c, g, or t
gggatatgatcacatctgggatttggggaagtccctctccaggcagctggaggatctgagtccctggccaacctcagcactgagacgggccgctcagcgaggctggagttgagccgccgctgtgcagcacagaacagggtggggcaggagctggggcagggcctggctgggagggagccaggcagtgcaggagccatcccctgccatactttcggtccagggcagaagcacaggaggccaatgccgggcctctccccaggcatggtcagcagggaaggtgcagcaggaggaccaggaacgggaggcttgggtgcttaacatggcttcttgatgtgtgggccttgaggtttcgctggaggggaggatgtggagccaggatggttccacggcctgagggacacgtgaggggatgaaggactgcaggccgaagtgagtgtcaggtgtggggcctggggggctacatgggtgggttggggaccatgcagggcagagatcagcagaggggtgacctgaagattggccggcggtcgtgggctgtgagctgaggaggctcaggtagctggaatgggaacccctgcttgacccttcgggctgggaggggcagtggctgcagccccttgggagtcagggtgtccttgtttcttctcagccaggtcatagaggatgcaagccacaggaattcccatagcctttgtgtgtgtgtctgtcttctacctggaaaacagtaagaatactttcctgttcttttcttgtaaaagttcattaaggggctggatgcagtggatcatgnnnnnnnnnnnnnnnnnnnnnnnnnnnnnnnnnnnnnnnnnnnnnnnnnnnnnnnnnnnnnnnnnnnnnnnnnnnnnnnnnnnnnnnnnnnnnnnnnnnnnnnnnnnnnnnnnnnnnnnnnnnnnnnnnnnnnnnnnnnnnnnnnnnnnnnnnnnnnnnnnnnnnnnnnnnnnnnnnnnnnnnnnnnnnnnnnnnnnnnnnnnnnnnnnnnnnnnnnnnnnnnnnnnnncntcagagcaanantttcaatcataatcaatcagtaaagctgatgaaaataaaaaagcctgcaaattaatgtaggcacccaggtctctttnaatttagaatcctttcctctaaagtctccgttgatacagaaacacttttgaagccagatntgaagcaccagttgacccgcaggtgggggttccaactggtaggctgtagggttagttttgtntttttgcanccagccagttttctcctaagaaaatactntggcgtgaatncaaaatntgattcatnacttngctnctaatttntttttattttttcccctagagcaaggtccgtggncctntcagtggaagnccggatagcatgaatncntctcgacttagccagcctgggcagctgatgtctcagccctccacggcctccaacagcttacctgagccagccaagaagaggtaggtcctccttagcagtgccaagtgtgaccatcaagggcacgtcaggagatcggggatggaggcgtttgtcactggtaaatgtctgtctgatggtattaccacctctctggatgtttgttgcatctgctgggtcctgtggggacaaaagtgatacatgtttggctttcatagcagcttga

SEQ ID NO: 357741 - DNA, 868 bp, Homo Sapiens
  misc_feature (551)..(553): n is a, c, g, or t
  misc_feature (577)..(578): n is a, c, g, or t
  misc_feature (581)..(581): n is a, c, g, or t
  misc_feature (588)..(589): n is a, c, g, or t
  misc_feature (591)..(592): n is a, c, g, or t
  misc_feature (600)..(600): n is a, c, g, or t
  misc_feature (618)..(618): n is a, c, g, or t
  misc_feature (624)..(625): n is a, c, g, or t
  misc_feature (645)..(646): n is a, c, g, or t
  misc_feature (649)..(649): n is a, c, g, or t
  misc_feature (669)..(669): n is a, c, g, or t
  misc_feature (676)..(676): n is a, c, g, or t
  misc_feature (699)..(699): n is a, c, g, or t
  misc_feature (716)..(716): n is a, c, g, or t
  misc_feature (721)..(721): n is a, c, g, or t
  misc_feature (730)..(730): n is a, c, g, or t
  misc_feature (746)..(746): n is a, c, g, or t
  misc_feature (749)..(750): n is a, c, g, or t
  misc_feature (754)..(754): n is a, c, g, or t
  misc_feature (757)..(757): n is a, c, g, or t
  misc_feature (782)..(782): n is a, c, g, or t
  misc_feature (803)..(803): n is a, c, g, or t
gcctgaagagcttcctttaggatttcttgtgagacaagtcagcttttatttgtctggaaaaatctttatctcacttttatttgtgaagaactgctttggcagccgtaccctcaagaactgcaccttccaaccacccttatatgagcctgctccaaaaccttgccagccagcacttccaggttacgactattgacctccagctcccactctcagagagctcccccactcccctggatcacactggtccgaaagctctttggtagacaaccttcgagtccctccgcccgcatactgtgggtataccgttctcccaactgaaaacccgtttattttcttatctgtctactcaaagcctaaccaacaccaaatggcctagaaatgccacgtacctaccagttgccccttcccccctccagcccctgtgaatgtgaattcacagctctgttctccgtgttccctggccacttagtaccatccacaatatctctcatagctagctctctgccctagggctggcccatgggactaaaattccttgtggtaggtatttnnntttcatatttctattcttatagcnnctngcatagnncnnatagcctngtatctagtgggtatccnataccnncttatgccggtgattaggcnnganaaagaaataaagcctcttcnaattggnaaggtggaagtcaaattgtcccnatttgctggcaacatantcttntatatagangaacttaaacaccctnccnnaaanccnttagatgtgataaacaattcagtanggttgtattgtatgtatcaanacatccctatgtaacccatagagatgtataattattttatgttgatcaaaaataaaataataaaa

SEQ ID NO: 357742 - DNA, 2109 bp, Homo Sapiens
  misc_feature (21)..(21): n is a, c, g, or t
  misc_feature (62)..(62): n is a, c, g, or t
  misc_feature (180)..(180): n is a, c, g, or t
  misc_feature (186)..(186): n is a, c, g, or t
  misc_feature (189)..(189): n is a, c, g, or t
  misc_feature (200)..(200): n is a, c, g, or t
  misc_feature (218)..(218): n is a, c, g, or t
  misc_feature (220)..(220): n is a, c, g, or t
  misc_feature (222)..(222): n is a, c, g, or t
  misc_feature (233)..(233): n is a, c, g, or t
  misc_feature (235)..(235): n is a, c, g, or t
  misc_feature (251)..(251): n is a, c, g, or t
  misc_feature (492)..(492): n is a, c, g, or t
ggatgcttggcctagagtggnggcgggaggtagtgagggctgcctgggaagcaggatggcanggagggggctggaggtggtggcggtggcagcttggatggccctgggaggggcaggcccggggcaaagcgtcagagctcagctctggatctggggtcctggataccaggcacctttgangaggcnccnaaggagtcatnaaacgggcttgtagagtnantnccctgcatatnanggctcaggtggggcanagtgggcccgtcctgcaccccatggtcctggggccccacccccacgctggctcacgggccctggccatgttgcctgctgctggtcagcgtacagcttcccagggccagccacctcggcttcacacctgcccagagctggcttctgtctgcctggacactcctcccatggctctggggctagggacacccagggctgccttggacacctggggctctcgtccagccagagcctctggcagtncctggggtcggggtcggggccggggccgagtcaggcctgcctgtctcgtggagctcagcaggttgccctcctgttgcatgaacctgggcagccacacacagctggggggcccctcacgcccctctttgtcgctcagacaccactccttctgggtgggcgacgtggtccgggtcatcggcgaccttgacacagtgaagcggctgcaggctgggcatggcgagtggacggacgacatggcccctgccctgggccgcgtcgggaaggtggtgaaagtgtttggagacgggaacctgcgtgtagcagtcgctggtcagcggtggaccttcagcccctcctgcctggtggcctaccggcccgaggaggatgccaacctggacgtggccgagcgcgcccgggagaacaaaagctcactgagcgtggccctggacaagcttcgggcccagaagagtgacccagagcacccgggaaggctggtggtggaggtggcgctgggtaacgcagcccgggctctggacctgctgcggaggcgcccagagcaggtggacaccaagaaccaaggcaggaccgctctgcaagtggctgcctacctgggccaggtggagttgatacggctgctgctacaagccagggcgggcgtggacctgccggacgacgagggcaacacggcactgcactacgcggccctggggaaccagcccgaggccaccagggtgctcctgagtgctgggtgccgggcggacgccatcaacagcacccagagcacagcactgcacgtggccgtgcagaggggcttcctggaggtggtgcgggccctgtgtgagcgcggctgtgacgtcaacctgcccgacgcccactcggacacgcccctgcactccgccatctcggcgggcactggagccagcggcattgtcgaggtcctcacggaggttgccaaacatcgatgttaccgccaccaacagccagggtttcaccctgctgcaccatgcctccctcaagggtcacgcgctagctgtgagaaagattctggctcgggcgcggcagctggtggacgccaagaaggaggacggcttcacggcgctgcatctggctgccctcaacaaccaccgcgaggtggcccagatcctcatccgggagggccgctgtgacgtgaacgtgcgcaaccggaagctgcagtccccgctgcatctcgccgtgcaacaggcccacgtggggctggtgccgctactggtggacgctgggtgcagggtcaacgccgaggacgaggagggggacacaaccctgcacgtggcgctgcaagcgtcatcagctgcttgcccctgggtggctgatggggccgggggggacccaaggacccttgccagcctgctggccaggctacaggcctcgggcctccccggcagcgcggagctgacggtgggcgcggcggtcgcctgcttcctggcgctggagggcgccgacgtgagctacaccaaccaccgcggtacggagcccgctggacctggccgccgagggtcgcgtgctcaatggcccttcaggggctgatgcccagcgcttccgggagcggcaggcgggctggggtgcgggcccggtgccccaatggaacgctctgggagcccc

SEQ ID NO: 357743 - DNA, 713 bp, Homo Sapiens
  misc_feature (146)..(531): n is a, c, g, or t
  misc_feature (695)..(695): n is a, c, g, or t
ccatcaccactaattcatcaaattttaataatcttttaatttttgagccagatttagcagtgaggggctatataccaactttaatgacactaatgttaataagttctgataacccactaccatcagaccagctgtaattcatccannnnnnnnnnnnnnnnnnnnnnnnnnnnnnnnnnnnnnnnnnnnnnnnnnnnnnnnnnnnnnnnnnnnnnnnnnnnnnnnnnnnnnnnnnnnnnnnnnnnnnnnnnnnnnnnnnnnnnnnnnnnnnnnnnnnnnnnnnnnnnnnnnnnnnnnnnnnnnnnnnnnnnnnnnnnnnnnnnnnnnnnnnnnnnnnnnnnnnnnnnnnnnnnnnnnnnnnnnnnnnnnnnnnnnnnnnnnnnnnnnnnnnnnnnnnnnnnnnnnnnnnnnnnnnnnnnnnnnnnnnnnnnnnnnnnnnnnnnnnnnnnnnnnnnnnnnnnnnnnnnnnnnnnnnnnnnnnnnnnnnnnnnnnnnnnnnnnnnnnnnnnnnnnnnnnnnnnnnnnnnnnnngactagatgatgaatcaactaaaaacgaggtagcagctctacctctttagctttttggggcctcatttcactttacagaaggtaggatatatatataacttagtgactctcaaacagtatgcacaaaaaccacctgggaagcctttttaaagatgtagattgcnagtctcatgtccaactgg

SEQ ID NO: 357744 - DNA, 437 bp, Homo Sapiens
  misc_feature (62)..(62): n is a, c, g, or t
gtagttatcaggaactagggagggggtgaaaagggagtgactgcgtaatgcgtatggggatnccttttaggatgatgaaaattggatgaattacagctggtctgatggtagtgggttatcagaacttattaacattagtgtcattaaagttggtatatagcccctcactgctaaatctggctcaaaaattaaaagattattaaaatttgatgaattagtggtgatggttgcacaacattgtaaatataataaatgtcactgaattgtacactttaaggtggttaaaatggcaaattttacatgtcttactgaaactactgtactatttaatacaaagtacatagtataaaattttaaaagtgataggaaaatgcttagattaatattcacctattccaagtatattttaaataaaaacagtcttggtaaagaaaaaa

SEQ ID NO: 357745 - DNA, 878 bp, Homo Sapiens
aaacaagcactgattctgatggtggtggtcttccgacacttgaggaactttggtgactgctctttctcaatggaaatcaaacaggcaaagggcactaagaaaagtaaaatgtcactttcctaattatcaactttcaaaaaaccctgaaacttggatgatagatattatggtacaatatatttgctaggggaaaaactgtctatagtagcaccatcttcttcctttgaatgggaaaagtttgaccaagaagcaacataaagtattagcagcaaaatactgttgaaccagctatcatccccaagactcccactataaacatgttagcaacagtgatacacactgccttacagcaatttttggctgtaaaaatctagccaattcagttttttgatatttggtttttaatagtcttgttcaagtaagaaactagctgctagtttctgttctgaaaagacatggaagattcattagaggcacacaattgcttaatgtgagacttactgaaaaacaaaagtcacattaccccctagcttaaggcttcatttcctaaaaagctgacgtgatttatttttagaaccacctgtcaagtcagtcttggaaggtgattctgatttgaagtattctaactgatgttagaccttaaaaactcaagaccatcttgagtattaactacctttaattaatcatattttatagaagctcaaaacacccaaatatttatcctttatatgaataaacaaaagccctatgaattacaatatgcagaacactatataaaagaattcccataaaaattacattggaatatttttcatcagtggagcaactgctgtagcttcctctgaatgggacagcatctgcctgaatgcatgttcttc

SEQ ID NO: 357746 - DNA, 433 bp, Homo Sapiens
aatttgccaactgcataaccgttcagtaattccaaaaagacatacctagaatcctttttcctgaaagtgttcccttcaatctgccttttgttgaaaacggtagtccaggaccctatgatatccctcccacttcattcattatgaaagaaatcccttgtagataaacaagatattggcatctgcatgtaattatccccagattcagctgaaaactcccaacacagatggaattggctagacattttaatatatgtgatacctatatctagatatagaaggctgagagtgagcactggatataattcattttgattgaaattgatatggtgttattgttcttccagttgtctgtcctttgtgtatgttcttatttatatgttgatacactgtaacactatatgctattgctaaataaaattgattgagaaattca

SEQ ID NO: 357747 - DNA, 1023 bp, Homo Sapiens
  misc_feature (48)..(84): n is a, c, g, or t
tgtatagactcactataggggaaccggcggtatcgcggtggcggccgnnnnnnnnnnnnnnnnnnnnnnnnnnnnnnnnnnnnnatcaggccaaatcggccgagctcgaattcgtcgagagcggagctttccgaagcgtcgagtggcctaacggtcacagctgtcgcccatcggagaggcaggactactgcgagcagttttaccgcgacctccggaggccggcgtgacaggctctgtcactaaaatagcaggaaccgaatattgtatctgacgcatcctgtaatactgaagagcaactgaagacagttgatgatgtccttattcattgccaggttatatatgatgctctgcaaaacctggataagaagattgatgtgattcgtagaaaggtttcaaaaatccaacgtttccatgcgagatccctgtggacaaatcataagcgatatggatataaacaagcattcttaccggcttgttaaaaagcttaaactccagaaaatgaagaaaaatgaggtttacgagacattctcctaccctgaacagttacagccccactttaccagtgtcaaggcgtgagaataattccccgagcaaccttccaaggccatccttttgcatggaagaataccagcgagctgagctggaggaggacccgatcctcagccgcactccgagtccagtgcatccctcagatttctctgagcataattgtcagccgtattatgcatctgatggtgcaacgtatggttcttcttcagggctctgccttggcaaccctcgggctgacagcatccacaacacttactcaactgaccatgcttctgcagcaccaccttcagttacaaggtcaccagttgaaaatgacggttacatagaggaaggaagcatcactaagcacccttcaacctggtcggtggaagcagtggtcctatttctaaaacaaacagatcctcttgcattatgccctcttgtcgacctcttcagaagccatgaaattgacgggaaggctctgctcctactctg

SEQ ID NO: 357748 - DNA, 1821 bp, Homo Sapiens
  misc_feature (1234)..(1234): n is a, c, g, or t
  misc_feature (1318)..(1318): n is a, c, g, or t
  misc_feature (1329)..(1329): n is a, c, g, or t
  misc_feature (1368)..(1368): n is a, c, g, or t
  misc_feature (1379)..(1379): n is a, c, g, or t
  misc_feature (1403)..(1403): n is a, c, g, or t
  misc_feature (1428)..(1428): n is a, c, g, or t
  misc_feature (1465)..(1465): n is a, c, g, or t
  misc_feature (1471)..(1471): n is a, c, g, or t
  misc_feature (1498)..(1498): n is a, c, g, or t
  misc_feature (1503)..(1503): n is a, c, g, or t
  misc_feature (1523)..(1523): n is a, c, g, or t
  misc_feature (1529)..(1529): n is a, c, g, or t
  misc_feature (1544)..(1544): n is a, c, g, or t
  misc_feature (1584)..(1584): n is a, c, g, or t
  misc_feature (1595)..(1600): n is a, c, g, or t
  misc_feature (1623)..(1623): n is a, c, g, or t
  misc_feature (1683)..(1683): n is a, c, g, or t
  misc_feature (1690)..(1690): n is a, c, g, or t
  misc_feature (1698)..(1698): n is a, c, g, or t
  misc_feature (1700)..(1701): n is a, c, g, or t
  misc_feature (1707)..(1707): n is a, c, g, or t
  misc_feature (1711)..(1711): n is a, c, g, or t
  misc_feature (1721)..(1721): n is a, c, g, or t
  misc_feature (1740)..(1742): n is a, c, g, or t
  misc_feature (1756)..(1756): n is a, c, g, or t
  misc_feature (1758)..(1758): n is a, c, g, or t
  misc_feature (1760)..(1760): n is a, c, g, or t
  misc_feature (1770)..(1770): n is a, c, g, or t
  misc_feature (1779)..(1779): n is a, c, g, or t
  misc_feature (1807)..(1808): n is a, c, g, or t
gcccagactgtgaggcggtcacccagcgccgaccagagcctcgaggacagccccagcaaggtgcccaagagctggagcttcggggaccgcagccgggcacgccaggctttccgcatcaagggtgccgcgtcacggcagaactcagaagaagcaagcctccccggagaggacattgtggatgacaagagctgcccctgcgagtttgtgaccgaggacctgaccccgggcctcaaagtcagcatcagagccgtgtgtgtcatgcggttcctggtgtccaagcggaagttcaaggagagcctgcggccctacgacgtgatggacgtcatcgagcagtactcagccggccacctggacatgctgtcccgaattaagagcctgcagtccagagtggaccagatcgtggggcggggcccagcgatcacggacaaggaccgcaccaagggcccggccgaggcggagctgcccgaggacccccagcatgatgggacggctcgggaaggtggagaagcaggtcttgtccatggagaagaagctggacttcctggtgaatatctacatgcagcggatgggcatccccccgacagagaccgaggcctactttggggccaaagagccggagccggcgccgccgtaccacagcccggaagacagccgggagcatgtcgacaggcacggctgcattgtcaagatcgtgcgctccagcagctccacgggccagaagaacttctcggcgcccccggccgcgccccctgtccagtgtccgccctccacctcctggcagccacagagccacccgcgccagggccacggcacctcccccgtgggggaccacggctccctggtgcgcatcccgccgccgccagcccacgagcggtcgctgtccgcctacggcgggggcaaccgcgccagcatggcagttcctgcggcaggaggacaccccgggctgcaggccccccgaggggaacctgcgggacagcgacacgtccatctccatcccgtccgtggaccacgaggagctggagcgttccttcagcggcttcagcatctcccagtccaaggagaacctggatgctctcaaacagtctgtacgcggccgtggcgccttgtgccaaagtcaggccctacattgcggagggagagtcagacaccgactccgacctctgtaccccgtgcgggcccgcgccacgctcggccaccggcgagggtccctttggtgacgtgggctgggccgggncccaggaagtgaggcggcgctgggccagtggacccgcccgcggccctcctcagcacggtgcctccgaggttttgaggcgggaancctctgggggncttttcttacagtaactgagtgtggcgggaagggtgggncctggaggggnccatgtgggctgaaggatgggggncctggcagtgactttttacaaaagntattttccaacaggggctggagggctgggcagggccntgtggngccaggagcagcgtgcaggagcaaggntgtcntgtccactctgctcagggcngcggcntacatcagcccggtntgaggaggggcgggagtgatgacgggtttttgccagcgtngctacaggcgnnnnnntgtttcagccgagcccaggggangcacaaagggcaggcctgttccctgaggacctgcccaaagggcggccctttttggtgagnactgcgnccttgganannggtggnaaanccgggcagcnacaggcgggtgtggcgggnnnctgttcttggtttntntnttcactcttntccttcccngcgggctttcgtgttcccctctttaggnnttttaaaatacag

SEQ ID NO: 357749 - DNA, 967 bp, Homo Sapiens
  misc_feature (947)..(947): n is a, c, g, or t
gtagcgaggcctgggtggcgaattcggcacgaggctccgcgcgttgggaggtgtagcgcggctctgaacgcgctgagggccgttgagtgtcgcaggcggcgagggcgcgagtgaggagcagacccaggcatcgcgcgccgagaaggccgggcgtccccacactgaaggtccggaaaggcgacttccgggggctttggcacctggcggaccctcccggagcgtcggcacctgaacgcgaggcgctccattgcgcgtgcgcgttgaggggcttcccgcacctgatcgcgagaccccaacggctggtggcgtcgcctgcgcgtctcggctgagctggccatggcgcagctgtgcgggctgaggcggagccgggcgtttctcgccctgctgggatcgctgctcctctctggggtcctggcggccgaccgagaacgcagcatccacgacttctgcctggtgtcgaaggtggtgggcagatgccgggcctccatgcctaggtggtggtacaatgtcactgacggatcctgccagctgtttgtgtatgggggctgtgacggaaacagcaataattacctgaccaaggaggagtgcctcaagaaatgtgccactgtcacagagaatgccacgggtgacctggccaccagcaggaatgcagcggattcctctgtcccaagtgctcccagaaggcaggattctgaagaccactccagcgatatgttcaactatgaagaatactgcaccgccaacgcagtcactgggccttgccgtgcatccttcccacgctggtactttgacgtggagaggaactcctgcaataacttcatctatggaggctgccggggcaataagaacagctaccggctctgaggaggcctgcatgctccgctgcttccgccagcaggagaatcctcccctgccccttggctcaaaggtggtggttctggcggggntgttcgtgatggtgttgatc

SEQ ID NO: 357750 - DNA, 1043 bp, Homo Sapiens
cccccacacgggaacaggtccggaattcccgggatcgcgcaggtgcctgccctttgcgcctgcgcccagctcgccctgcctagccaggtgcgccccgccccctgcctgcccggccaccttcgggagccgcttccaataggcgttcgccattggctctggcgacctccgcgcgttgggaggtgtagcgcggctctgaacgcgctgagggccgttgagtgtcgcaggcggcgagggcgcgagtgaggagcagacccaggcatcgcgcgccgagaaggccgggcgtccccacactgaaggtccggaaaggcgacttccgggggctttggcacctggcggaccctcccggagcgtcggcacctgaacgcgaggcgctccattgcgcgtgcgcgttgaggggcttcccgcacctgatcgcgagaccccaacggctggtggcgtcgcctgcgcgtctcggctgagctggccatggcgcagctgtgcgggctgaggcggagccgggcgtttctcgccctgctgggatcgctgctcctctctggggtcctggcggccgaccgagaacgcagcatccacgacttctgcctggtgtcgaaggtggtgggcagatgccgggcctccatgcctaggtggtggtacaatgtcactgacggatcctgccagctgtttgtgtatgggggctgtgacggaaacagcaataattacctgaccaaggaggagtgcctcaagaaatgtgccactgtcacagagaatgccacgggtgacctggccaccagcaggaatgcagcggattcctctgtcccaagtgctcccagaaggcaggattctgaagaccactccagcgatatgttcaactatgaagaatactgcaccgccaacgcagtcactgggccttgccgtgcatccttccacgctgggaactttgacgtgggaaaaggaactcctgcaataacttcatctatggaagctgccccgggcaataagaaacagttacccgctctgaaggaagcctggcatgctccccctgctttccgcccgccagaaaaatc

SEQ ID NO: 357751 - DNA, 1713 bp, Homo Sapiens
agcgggggggccgcttccaataggcgttcgccattggctctggcgacctccgcgcgttgggaggtgtagcgcggctctgaacgcgctgagggccgttgagtgtcgcaggcggcgagggcgcgagtgaggagcagacccaggcatcgcgcgccgagaaggccgggcgtccccacactgaaggtccggaaaggcgacttccgggggcttggcacctggcggaccctcccggagcgtcggcacctgaacgcgaggcgctccattgcgcgtgcgcgtgaggggcttcccgcacctgatcgcgagaccccaacggctggtggcgtcgcctgcgcgtctcggctgagctggccatggcgcagctgtgcgggctgaggcggagccgggcgtttctcgccctgctgggatcgctgctcctctctggggtcctggcggccgaccgagaacgcagcatccacgacttctgcctggtgtcgaaggtggtgggcagatgccgggcctccatgcctaggtggtggtacaatgtcactgacggatcctgccagctgtttgtgtatgggggctgtgacggaaacagcaataattacctgaccaaggaggagtgcctcaagaaatgtgccactgtcacagagaatgccacgggtgacctggccaccagcaggaatgcagcggattcctctgtcccaagtgctcccagaaggcaggattctgaagaccactccagcgatatgttcaactatgaagaatactgcaccgccaacgcagtcactgggccttgccgtgcatccttcccacgctggtactttgacgtggagaggaactcctgcaataacttcatctatggaggctgccggggcaataagaacagctaccgctctgaggaggcctgcatgctccgctgcttccgccagcaggagaatcctcccctgccccttggctcaaaggtggtggttctggcggggctgttcgtgatggtgttgatcctcttcctgggagcctccatggtctacctgatccgggtggcacggaggaaccaggagcgtgccctgcgcaccgtctggagctccggagatgacaaggagcagctggtgaagaacacatatgtcctgtgaccgccctgtcgccaagaggactggggaagggaggggagactatgtgtgagctttttttaaatagagggattgactcggatttgagtgatcattagggctgaggtctgtttctctgggaggtaggacggctgcttcctggtctggcagggatgggtttgctttggaaatcctctaggaggctcctcctcgcatggcctgcagtctggcagcagccccgagttgtttcctcgctgatcgatttctttcctccaggtagagttttctttgcttatgttgaattccattgcctcttttctcatcacagaagtgatgttggaatcgtttcttttgtttgtctgatttatggtttttttaagtataaacaaaagttttttattagcattctgaaagaaggaaagtaaaatgtacaagtttaataaaaaggggccttcccctttagaataaatttcagcatgtgctttctttatgggagtcctaatttcaaccctaccaaaatgatcacaagacactatctgaggtgtcccattctagaaatagacccctcaaaatagcgtctttcagatctttttgaatgaatccacaagatgaaataaatgtcctattactg

SEQ ID NO: 357752 - DNA, 1003 bp, Homo Sapiens
  misc_feature (71)..(71): n is a, c, g, or t
  misc_feature (202)..(202): n is a, c, g, or t
  misc_feature (205)..(205): n is a, c, g, or t
  misc_feature (266)..(266): n is a, c, g, or t
  misc_feature (352)..(352): n is a, c, g, or t
  misc_feature (459)..(461): n is a, c, g, or t
  misc_feature (673)..(736): n is a, c, g, or t
gtgtgatctaccatgcattgtctcaaaaagaggcgaatgactccgatgtccagccttcaggagcacagcgngccgaggccttcgtgagggccttcctgaagcgcacacgccccgcatgagcccgcaggcccgcgaggaccagctgcagcgcaaggcggtggtcctggagtacttcacccgccacaagcgcaaggagaagaanaanaaagccaaaggcctctctgccaggcaaaggagggagctgcggctctttgacattaaaccanagcagcagagatacagccttttcctccctctccatgaactctggaaacagtacatcagggacctgtgcagtgggctcaagccaaanacgcagccacaaatgattcaggccaagctcttaaaggcagatcttcacggggctattatttcagtgacaaaatccaaatgcccctcttatgtgggtattacaggaannnttctacaggaaacaaagcacattttcaaaattatcaccaaagaagaccgcctgaaagttatccccaagctaaactgcgtgttcactgtggaaaccgatggctttatttcctacatttacgggaacaaattccagcttcggtcaagtgaacggtctgcgaagaagttcaaagcgaagggaacgattgacctgtgaattctttgccgtctaagnnnnnnnnnnnnnnnnnnnnnnnnnnnnnnnnnnnnnnnnnnnnnnnnnnnnnnnnnnnnnnnngttaagccaattccatttatagaccacctccagccagtgacgctccgagttgaggatgttgaacaacatgggaaggtcgacagcgtactatagtgaagaagctcagaggatcagaggaattcctctttctaggagattttcattttgtgtgactcccatgagggaggaacagactggcaggagcacagccgggctgactctgctgaacttgattagcagtcatgcgatttttatgcagactattccatgttttctgggtaatctatt

SEQ ID NO: 357753 - DNA, 1094 bp, Homo Sapiens
tccgagaatgaagagtgtgatctaccatgcattgtctcagaaagaggcgaatgactccgatgtccagccttcagtgagcacagcgggccgaggccttcgtgagggccttcctgaagcgcagcacgccccgcatgagccctgcaggcccgcgaggaccagctgcagcgcaaggcggtggtcctggagtacttcacccgccacaagcgcaaggagaagaagaagaaagccaaaggcctctctgccaggcaaaggagggagctgcggctctttgacattaaaccagagcagcagagatacagccttttcctccctctccatgaactctggaaacagtacatcagggacctgtgcagtgggctcaagccagacacgcagccacagatgattcaggccaagctcttaaaggcagatcttcacggggctattatttcagtgacaaaatccaaatgcccctcttatgtgggtattacaggaatccttctacaggaaacaaagcacattttcaaaattatcaccaaagaagaccgcctgaaagttatccccaagctaaactgcgtgttcactgtggaaaccgatggctttatttcctacatttacgggagcaaattccagcttcggtcaagtgaacggtctgcgaagaagttcaaagcgaagggaacgattgacctgtgaattctttgccgtctaaggcagttgtttatgacagctgaaaactggacactccctaaatgtccacctttcagtgaagagatagttaagccaattccatttatagaccacctccagccagtgacgctccgagttgaggatgttgaacaacatgggaaggtcgcagcgtactaagtgaagaagtcagaggacagaggaatttctctttctaggagattttcattttgtgtgactcccatggggaggaacagactggcaggaagcacaccggggttaacactggttgacttgaataggattattcgatttttaaaaatacttttccatgttttctgagtgctctatgataaatcagttgcatctgtgataatacaatacatatgtggacataaacagggatcaaataaaggaggtattgctgcaaa

SEQ ID NO: 357754 - DNA, 1092 bp, Homo Sapiens
  misc_feature (726)..(773): n is a, c, g, or t
  misc_feature (989)..(997): n is a, c, g, or t
gtagcgaggcctgggtggcgaattcggcacgagggcggtccgagaatgaagagtgtgatctaccatgcattgtctcagaaagaggcgaatgactccgatgtccagccttcaggagcacagcgggccgaggccttcgtgagggccttcctgaagcgcagcacgccccgcatgagcccgcaggcccgcgaggaccagctgcagcgcaaggcggtggtcctggagtacttcacccgccacaagcgcaaggagaagaagaagaaagccaaaggcctctctgccaggcaaaggagggagctgcggctctttgacattaaaccagagcagcagagatacagccttttcctccctctccatgaactctggaaacagtacatcagggacctgtgcagtgggctcaagccagacacgcagccacagatgattcaggccaagctcttaaaggcagatcttcacggggctattatttcagtgacaaaatccaaatgcccctcttatgtgggtattacaggaatccttctacaggaaacaaagcacattttcaaaattatcaccaaagaagaccgcctgaaagttatccccaagctaaactgcgtgttcactgtggaaaccgatggctttatttcctacatttacgggagcaaattccagcttcggtcaagtgaacggtctgcgaagaagttcaaagcgaagggaacgattgacctgtgaattctttgccgtctaagnnnnnnnnnnnnnnnnnnnnnnnnnnnnnnnnnnnnnnnnnnnnnnnnctttcagtgaagagatagttaagccaattcccatttatagaccacctccagccagtgaccctccaagttgaggatgttgaacaacatggggaaggtcgcagccggacttaagtggagaaagtcagagggaccgaggaattttctcctttctaggaaaaatttccattttggggtggactccccacgggggaaggaaccagcactgggcaggaaaannnnnnnnngggggttaaacacctgggggttgcacttggagataaaggaataatttccaaaatttttttcaacgcgaccaaacagttttgaacccctcccgggt

SEQ ID NO: 357755 - DNA, 1498 bp, Homo Sapiens
  misc_feature (1183)..(1243): n is a, c, g, or t
  misc_feature (1273)..(1273): n is a, c, g, or t
  misc_feature (1302)..(1314): n is a, c, g, or t
  misc_feature (1427)..(1427): n is a, c, g, or t
gggatcagcattggggttgagcgaatcttctacattgtggagcagaggatgaagaccaaaggtgagaaggtgcggactacagagactcaagtgtttgtggccacaccacagaagaactttctccaagaacggttgaagcttattgcagagctttgggattctggaatcaaggcagagatgctatacaagaacaaccccaaactattaacccagctgcactattgtgagagcacaggcattccactggtggtcattattggtgagcaagaactgaaagaaggggtcatcaagatccgttcagtggccagcagagaggaggtggccattaaacgggaaaattttgtggctgaaattcagaagcgactgtctgagtcttgatccttgcctgattcccatctgctgctctttgtagaaaaggtttcctctagaactgaattcctctggaattgagtgatggacttcacaacaactagccaggaagggtgacaagtaccttctgcctcctccattcttcctgggtgcagaactgtagaagaccctgaggactcctgggctagtgtgagcagctattctgcatgggtgcagatggctggatgtgaaagagacatgctctagctgcagaggcaaatttgaagtgccacggaacgttgtcaagaggtagtgagattgttgctgtgagcaaggctctgggagagtcacctcaggctcaggattctgaaccattgagatcagaaaccagatacttagccttctactgtagctacggaaccagattctggtgaatttgtccacaatcagccattggcctgtctggggagtttttggaagacagcaaagaggggcaatggctgctttcagctttgaggacagatgctatcctaagggcatggcagtacccatgttgatttgacatctctctagcccatccattgcttacagtagaagagtggggctgtatgcttgataatcttgaacattgaacttaatagatgacttgacaaggtagagatctgatattttgagattttggagaccatttcctgtgccagaatcactgctctattccataccgtgccatggaggctgttttagaagtggttggataacatgttaaataaaatattaagtgtaaaaaacaaaccccccatatcatcttttcttccgcccttcctccccaccttgnnnnnnnnnnnnnnnnnnnnnnnnnnnnnnnnnnnnnnnnnnnnnnnnnnnnnnnnnnnnngccctctcctgggtcgcgcggatttcactngacctatactttgctatttttttcggcgnnnnnnnnnnnnntcaaaaaaatcttttctaaaattttttttgtttgggagggggcggccccccctaccacaaaacaaaaacaaatgggtaaataatttttcttccccacaaagagacatccgcgngcccacaacaaaagagttgggttgtgttttctcctccgcccccaagaataacacaccccccggcggcgcga

SEQ ID NO: 357756 - DNA, 1133 bp, Homo Sapiens
  misc_feature (8)..(8): n is a, c, g, or t
  misc_feature (17)..(17): n is a, c, g, or t
  misc_feature (20)..(20): n is a, c, g, or t
  misc_feature (22)..(23): n is a, c, g, or t
  misc_feature (27)..(27): n is a, c, g, or t
  misc_feature (34)..(35): n is a, c, g, or t
  misc_feature (38)..(39): n is a, c, g, or t
  misc_feature (46)..(46): n is a, c, g, or t
  misc_feature (56)..(57): n is a, c, g, or t
  misc_feature (60)..(60): n is a, c, g, or t
  misc_feature (68)..(68): n is a, c, g, or t
  misc_feature (92)..(92): n is a, c, g, or t
  misc_feature (97)..(97): n is a, c, g, or t
  misc_feature (102)..(102): n is a, c, g, or t
  misc_feature (106)..(106): n is a, c, g, or t
  misc_feature (109)..(109): n is a, c, g, or t
  misc_feature (114)..(114): n is a, c, g, or t
  misc_feature (117)..(117): n is a, c, g, or t
  misc_feature (128)..(128): n is a, c, g, or t
  misc_feature (140)..(140): n is a, c, g, or t
  misc_feature (146)..(146): n is a, c, g, or t
  misc_feature (153)..(153): n is a, c, g, or t
  misc_feature (162)..(162): n is a, c, g, or t
  misc_feature (230)..(230): n is a, c, g, or t
  misc_feature (235)..(235): n is a, c, g, or t
  misc_feature (238)..(238): n is a, c, g, or t
  misc_feature (281)..(328): n is a, c, g, or t
  misc_feature (373)..(373): n is a, c, g, or t
  misc_feature (490)..(490): n is a, c, g, or t
  misc_feature (501)..(501): n is a, c, g, or t
  misc_feature (521)..(521): n is a, c, g, or t
  misc_feature (558)..(558): n is a, c, g, or t
tttggatnccacctttnttncnntttntggactnncgnnaacaganactaaggacnngantgggaacncccacagagccggaactgcagtgntttgncaggntctnccncaggntgntaggaagcagncagccactggcnaaactntgttctnattctaccncctctagcattcagctctactgtgtgatgggacgttaaaaataccaaaacagaaagggggtttaaaanacagntgnacaaaccagaacaccgattcagaatcttttctccctcttgagnnnnnnnnnnnnnnnnnnnnnnnnnnnnnnnnnnnnnnnnnnnnnnnnccctcccaggagaagacatttgggtcttggcctgaggcaggggtnttgagcgatgatgctctgatatggagctgtcactctagagctcggtcagatggaagacactatagaaccaggttggacagatttggggtcagggttggaggctgagttcttttgagnactggttggantggcagccagatggttgctnctgacaaggcaagaggaatttcagagattaaacattntcctttgaggaagggagaggaggtgaatgaactccccagaggaggtgagtgccttgttgggaggaagccccagttccagaacttacctcagtgcacttgggaggggtggagtcctgagcattccatgatttctgccctggccccacctatcctaggatggggtgggatggagagtgggttcagttttcttgtactttagcctggctgaacatgaactttgtgtttacctggaagtggtaggggtgggagagattctcatctttagttctggtgcccaaaatctttggtagatggagggaactgggattccagaagatgtggtaaaggtctatttctgtagtgtggcagagatgtgtttttcctaaagtgtttgcagggcatttttccctcttacctcagattaagttatttatatattgttgattgaaggttttttaaaattgcttttaaacttctatttctcgggtaaattttttggtgacatgatatatttaacaccctatttatatactcctacctcttttcatataaatctcttactaagactactgaccaaaaaagaacattttaaaatt

SEQ ID NO: 357757 - DNA, 1001 bp, Homo Sapiens
  misc_feature (415)..(415): n is a, c, g, or t
  misc_feature (428)..(428): n is a, c, g, or t
  misc_feature (476)..(476): n is a, c, g, or t
attcccacctcagctcctgagctctttcatcaaacggcagccactggttatagccagactggcttccttccttggtaggtagcatctcaccgtcaagatggtgctgctgagatgcaggcccaggctgctcaagagagacactgtggcagctccttgttactttccataccacagtgcaggaaaagctgatgctacctgctgtggccgattggggcagacagcactggcccagggatgctagcaaagcccagtcagtacttggtcacagctggcaccagtgcagagcaaacggcctgagctcctggcccagactatccagagtgaatgcagctccgctcaccttttggatttctcacctttctttcctgtttctggggactctgcggcagacaggacacttaaggaccagggactngggcacagccagncagagccgggggactgcagtgcttttggcaaggtgcttccgcaggctnggtaggggaagcaggcagccactggccaagactctgttctgaatctacctcctctagcattcagctctactgtgtgatgggacgttaaaaataccaaaacagaaagagggtttaaaaaacagctgcacaaaccagaacaccgattcagaatcttttctccctcttgagtttttgcaaaatactttattattgatttttgatttttttctccctttccctcccaggagaagacatttgggtcttggcctgaggcaggggtgttgagcgatgatgctctgatatggagctgtcactctagagctcggtcagatggaagacactatagaaccaggttggacagatttggggtcagggttggaggctgagttcttttgaggactggttggagtggcagccagatggtggctcttggacaaggcaagaggaatttcagagattaaacattgtcctttgaggaagggagaggaggtgaatgaactcccagaggaggtgagtgggcttgttgggaggaagctcagttccaga

SEQ ID NO: 357758 - DNA, 1085 bp, Homo Sapiens
  misc_feature (931)..(931): n is a, c, g, or t
  misc_feature (983)..(983): n is a, c, g, or t
  misc_feature (1002)..(1002): n is a, c, g, or t
  misc_feature (1026)..(1026): n is a, c, g, or t
  misc_feature (1036)..(1036): n is a, c, g, or t
  misc_feature (1042)..(1042): n is a, c, g, or t
  misc_feature (1050)..(1050): n is a, c, g, or t
  misc_feature (1055)..(1056): n is a, c, g, or t
  misc_feature (1059)..(1060): n is a, c, g, or t
  misc_feature (1067)..(1068): n is a, c, g, or t
  misc_feature (1072)..(1073): n is a, c, g, or t
agcgcggtcggcggcggctatttcccgccattgtgcgaagtgaaggctaggggcccgtacgcgcccgcctgactgtcgccagcagctcctcggcggccccaccgcagccgccgctccctgaggcgcgggaggcccgcgccccgcggctcgctgtgcgtgggagggcgcgagcgaacgcgggcgaggagcggccgagccgctgaagaggagctgggcgccggccgcccggccgcgctcggcccgcggatcgcctccgcccggtcttcgccggccccggcccctggcgagatgccgtgtggggaggattggctcagccacccgctgggaatcgtgcagggattcttcgcccaaaatggagttaatcctgactgggagaagaaagtaattgagtattttaaggaaaagctgaaggaaaataatgctcctaagtgggtaccatcactgaacgaagttccccttcattatttgaaacctaatagttttgtgaaatttcgttgcatgattcaggatatgtttgaccctgagttttacatgggagtttatgaaacggttaaccaaaacacaaaagcacatgttcttcattttggaaaatatagagatgtagcagagtgtgggcctcaacaagaacttgatttaaactctccacgaaataccactttggaaagacagactttctattgtgttccggtgcctggggaatctacgtgggtaaaagaagcctatgttaatgcaaaccaaggctcgagtcagtcccctcaacatcctacactcctagtcgccacaaggaggagttattgaagatgatgacgatatggacctacagcccaataagcagaaagaccaacatgcaggtgccagacaagcagggagtgttggtggtctcaatggtgtggagagcaaaacgtttagaaactgaacttctactgggcanagctgaactctctgaacttggcctctccttttgatttgaatttccattgcangagagaaggccttcatgcntgtgaaggttatgagattggattnttcaaataangaaatnttgagtanatggnnacnnctgtggnnctgnntgagatactgaa

SEQ ID NO: 357759 - DNA, 1619 bp, Homo Sapiens
  misc_feature (3)..(3): n is a, c, g, or t
  misc_feature (92)..(92): n is a, c, g, or t
  misc_feature (116)..(116): n is a, c, g, or t
  misc_feature (320)..(320): n is a, c, g, or t
  misc_feature (324)..(324): n is a, c, g, or t
  misc_feature (327)..(327): n is a, c, g, or t
  misc_feature (329)..(329): n is a, c, g, or t
  misc_feature (331)..(331): n is a, c, g, or t
  misc_feature (334)..(335): n is a, c, g, or t
  misc_feature (341)..(343): n is a, c, g, or t
  misc_feature (345)..(346): n is a, c, g, or t
  misc_feature (350)..(350): n is a, c, g, or t
  misc_feature (352)..(352): n is a, c, g, or t
  misc_feature (355)..(355): n is a, c, g, or t
  misc_feature (357)..(357): n is a, c, g, or t
  misc_feature (361)..(362): n is a, c, g, or t
  misc_feature (365)..(365): n is a, c, g, or t
  misc_feature (373)..(373): n is a, c, g, or t
  misc_feature (381)..(381): n is a, c, g, or t
  misc_feature (384)..(385): n is a, c, g, or t
  misc_feature (387)..(388): n is a, c, g, or t
  misc_feature (392)..(392): n is a, c, g, or t
  misc_feature (394)..(394): n is a, c, g, or t
  misc_feature (405)..(405): n is a, c, g, or t
  misc_feature (425)..(425): n is a, c, g, or t
  misc_feature (456)..(456): n is a, c, g, or t
  misc_feature (469)..(469): n is a, c, g, or t
  misc_feature (476)..(476): n is a, c, g, or t
  misc_feature (500)..(500): n is a, c, g, or t
  misc_feature (502)..(502): n is a, c, g, or t
  misc_feature (508)..(508): n is a, c, g, or t
  misc_feature (521)..(533): n is a, c, g, or t
  misc_feature (861)..(861): n is a, c, g, or t
ttnttacttgtataatatattacttcacacataataacataaaacatcatttcactaaagaaaaatacacattcaatatagccaagttctanttttaaaaagaagcacctgatganttttcttctgaattcatttctccagaagaccagtccttaaagacttctggagtctagctatgttggcatctaatgccgcaaggccatttctgaagtcttgttcatcacgagaagtgaacgttgaaaacgaagagatgctccagtcagacatcaagtcagaagtgaaaacactaccatcacagacagtattgcctttcacttganggcngtngntnagnnaccctnnngnnccangncgngnggtnngtncctcgggntccttggnggnngnngggntntttccatttgnttcctttattttcttgaggngctgtgtgtccttcttttcagttgctctggnttgtttttcaggngcatctnctgcttcctttgttgaaggggttntntttttntggtgttctctgnnnnnnnnnnnnnccagagacagcaagtccactgttgctgactagctgtgttgtagctgctcttatttgtggctgaggggatagtctcttagaaagtggtgatttcttttcaggagtgcttctagcaaaaggaatgtaaattgtattatccaaattatgctcatcttctattaaagccatagtttcactcccttcatcagaatcctgttttgaaagggcagaaataattccaggtgcagatgcttcctccatgcccctagtgttactattttgagggcctctggaggacagaacattttcataggttttgtctggctctatggttccctcatttttaattngtagaaagtggctctgaatgtgtaaaactgtaatttgtgtctaacttatttagatagctaattatggaagtgtgagcaggagctgggtcatgttgaagttgtttatcatgaatgttcaagagtgatttggtaaggttattcccaggcttgcagcgagcactgtccacactaagatcggagagaagctttgccatgctagtctgtaaagttctggttaattctcttagtcgagtcacctcagcatcacgctgacgtaatgttatccccaatatctggttttccttttcagcagtttctaacttaaactgggagcttttcacattgactagggcttcctccaattcaatttttattcttgttatctcaatatcatattgctgtttattttcaagtatagtttgatctttgtctttaaatatactactaaattttttgttttcatctttctgattttcaatcacttttaacagctcttcatttttactctgcagtaattcctggctctttagtgactcctccaattgattttgcagtgacatattcaatgactgaagagaaaacaattcaaggttgcaatccacagcaccagatggtttttgagttttctgttgttctctgagttgctggttcaaaattctcaactgccttcgtaactgagcattctcacttcttaatggttgcatggccagtgctatctcaacttgaatatctgtgtttccacttactgttggaagtacagatatacatgcctccatttc

SEQ ID NO: 357760 - DNA, 1240 bp, Homo Sapiens
  misc_feature (6)..(6): n is a, c, g, or t
  misc_feature (365)..(365): n is a, c, g, or t
gcaagnaagctctggacagcgcacacccgaccccagcttaccgtagagttgccgttagtgcaggaatgctgctgaggaatgtaaagaaaattacaacgaatatgaaaaccagaaggaggggctttctctgacaagttgaagtgcatttccctgcagtggcatggccaaaaccagaggaaagattctgagggatacagctacagtctcggtacacctgggaagcccaacaatagctccgattacaaggggaaggcacggggccccttcccagggtccaggggaggacaggggcggtaggcagcggctccactcaccttctggccgtccacatttcgtctccgtggctgcagggcaccctgcgtggncacagtgagaagtacatgaggccgtccgagccgcacacagggctgtagtgttctggctggcagctgcaggcagcgttgcagggagccgttaggttcaggtggccttcgggcaggaggctcccgccgtagctggctgtgacgcccgccatgggcacactggggcagtgcagtgagaagacgaggatgcccagcaggctgacaacggtgcagaacaggcagaacttgatgaccgcggagccccggagcctgagcttgttcacaaagaagccgcccaggaaggtgccgccaccacccgctggcaccaccaggtacccaaacaaggtggcagcttctgaggcactcaggctgaactgggactccaagaacttggggctgaacgtggacatgccggtgatgagagtggcctcggtggccccggccaggcagagcaggatgaacgtggggttcttcagcaggagccagatggagagaggcaggtctctgatggttttcccaaagtccgggttgctcgcctccccacggctgctgtccttcaactggtgcatttccgccgctctcatgaaccgcgtagcgctgggagcctggcagctgccgagggtaaccaaggatgggaacggcggtgaagaaagcagcggccccagagcccaggaagcacgacaccaccaggcgccgacccacagtgggcatctcggtggtcagacgtccgtcacgtcaggccacatttccgtgtagatattcagcagggcacctccaatcaggtagccggcagctggacccaggatggccgctgtgtagaagatggcaagtgtagacgggcgagcagctggaatcgacgttctcatccgggtaggtgacgcccagcgtgtagaggggtg

SEQ ID NO: 357761 - DNA, 1382 bp, Homo Sapiens
ctcaataggggtccccagatctttgaacaccttgttgatctgatcgatttctacttcccggggaacaagggttctgagtcagcagctcaccaaagatgcaacccactgaccacatgtcaacgaccgttgaagtattccttggcaccaagcagcagctctggggcacggtaccacagggtcaccacgaccggggtgtaggccttcagaggggatccgtactcccgcgccagcccgaagtcacccaccttgaggatgccggcgtggctcagcagcaggttgaacgtcttgaggtcacggtgcaggatccagttgtcgtgcaggtgtttcaccccacgcagcagctggatcatcagggtcttcacctcccctgggagggagggaagctcccatgtggacctggctgcccccagcccagggcactcagggtggcccactcgcctcggcagcaacagaggcttctcagggctttccctgtggatgcagctggccctccctgcagcactgtcaccgcgggggtgaccaggaccctgcccccacttgtacgcagacaggcccctggggcgcggctgtacctggcaggaagggctgtttcatggtctccatcaggctcttgaggtcgtgctccacatagttcatcacgatgtagatcttgtccatgttgctgcccaccacaatctcctgcagggcacggctctgtgggtgctgggcacctccaggcccccacccacccctgcacccgggcgcagatgctgagggacagtaaggacctccggtgccacccgggaggcaaatacttgcttctgtgtggtctgtgaagggctccactaagtgcaggagagtgtaggaagcacccggccccaggacagcacggggccctgtcggaaaagccttccacccggggccaggcgtggtggggccatgctcactctaacggtgacaatgttgggatgctgggccttgaggatggtgttgatctccctcagggacgtgatcgggaagccctccttctccttctccatcttcagccgctttagagccacaatttcatctgttttcttgtcttttgctctgtagaccactccataggtgccctcctcgatcctgttcaggcactggaactcctcgacgctccggcagccctgcagggccggcaggtacttgggcagctcctgcttgagctcgatgggcaacagggcaggggagtcgggcacatagtcgccctctgtcagggcgctgctctgcggcgttccctcacccacttcttcctctgcttcttcactctccccggaatctcggtcgaaccgtgactctggaactggaaaagttgaaccaaccaagaggtggttttcattttctcgttcttcatcttcactcatttcttc

SEQ ID NO: 357762 - DNA, 394 bp, Homo Sapiens
  misc_feature (296)..(321): n is a, c, g, or t
tgtagaattaaatcattttccttgttgtggaggaaagagctgtgttttctccgtgacttgcccagggcggaaagggtgggcatcttcgggtgcccacgtggggcagcacaaacctcaacaccaccctctcccactctcgacacgcacggggctggctgggccgtgatttggaaaggaactggtgggagccgggtggattgtttaatcttcggagctggagacctgtttctgtgttgggatgagcgatgccctcttgccccaacccactcgtccagaccagccctgtccacacaggnnnnnnnnnnnnnnnnnnnnnnnnnnctgtgccagcagactcgacaggtttttatacaaggttgttgagttttaaaatgtattaaaatattcttcgagg

SEQ ID NO: 357763 - DNA, 291 bp, Homo Sapiens
gcctactactactactatacggctgcgagaagacgacagaaggggacgggcttccaccttaccaccacgaaccagggggcctctgccgcgggccccggcttcagcctcaagttctgaaggtcagagtggaccccgtcatggggagaactcagccgggaccacaggcgtggctactgcggctggagctgcgatgagactcggaactcctcgtcttactttgtgctccatgttttgtttttgtattttggtttgtaaatttgtagaattaaatcattttccttgttgtggagc

SEQ ID NO: 357764 - DNA, 2121 bp, Homo Sapiens
  misc_feature (2015)..(2041): n is a, c, g, or t
accggcagcaactctgaggaggcatcagagcagtctgccgaagaagtaagtgaggaagaaatgagtgaagatgaagaacgagaaaatgaaaaccacctcttggttgttccagagtcacggttcgaccgagattccggggagagtgaagaagcagaggaagaagtgggtgagggaacgccgcagagcagcgccctgacagagggcgactatgtgcccgactcccctgccctgtcgcccatcgagctcaagcaggagctgcccaagtacctgccggccctgcagggctgccggagcgtcgaggagttccagtgcctgaacaggatcgaggagggcacctatggagtggtctacagagcaaaagacaagaaaacagatgaaattgtggctctaaagcggctgaagatggagaaggagaaggagggcttcccgatcacgtcgctgagggagatcaacaccatcctcaaggcccagcatcccaacatcgtcaccgttagagagattgtggtgggcagcaacatggacaagatctacatcgtgatgaactatgtggagcacgacctcaagagcctgatggagaccatgaaacagcccttcctgccaggggaggtgaagaccctgatgatccagctgctgcgtggggtgaaacacctgcacgacaactggatcctgcaccgtgacctcaagacgtccaacctgctgctgagccacgccggcatcctcaaggtgggtgacttcgggctggcgcgggagtacggatcccctctgaaggcctacaccccggtcgtggtgacccagtggtaccgcgccccagagctgctgcttggtgccaaggaatactccacggccgtggacatgtggtcagtgggctgcatcttcggggagctgctgactcagaagcctctgttccccgggaagtcagaaatcgatcagatcaacaaggtgttcaaggtgggtctggccctgcggcaagtggcccgctatagcgatctcccaggagttgcaagaatggggctgcggcgcgcacagctgctgcgttgagcaagggcaccagggccactgagagccctccaggtggcttgtcttatctcacgggacacaggtgccaacctactttcccggccacttggtcagcgctgttgaagcacctctatctttcaggagctggggacccccagtgagaaaatctggcccggctacagtgagctcccagtagtcaagaagatgaccttcagcgagcacccctacaacaacctccgcaagcgcttcggggctctagctctcagaccagggcttcgacctcatgaacaagttcctgacctacttccccgggaggaggatcagcgctgaggacggcctcaagcatgagtatttccgcgagacccccctcccgatcgacccctccatgttccccacgtggcccgccaagagcgagcagcagcgtgtgaagcggggcacacagcccgaggccccctgagggaggcctggcctacagccaactgggtgacgacgacctgaaggagacgggcttccaccttaccaccacgaaccaggggggcctctgccgcgggccccggcttcagcctcaagttctgaaggtcagagtggaccccgtcatggggagaactcagccgggaccacaggcgtggctactgcggctggagctgcgatgagactcggaactcctcgtcttactttgtgctccatgttttgtttttgtattttggtttgtaaatttgtagaattaaatcattttccttgttgtggaggaaagagctgtgttttctccgtgacttgccagggcatcttcgggtgcccacgtggggcagcacaaacctccacacaccctctcccactctcgacacgcacggggctggctgggccgtgatttggaaaggaactggtgggagccgggtggattgtttaatcttcggagctggagacctgtttctgtgttgggatgagcgatgccctcttgccccaacccactcgtccagaccagccctgtccacacaggnnnnnnnnnnnnnnnnnnnnnnnnnnnctgtgccagcagactcgacaggtttttatacaaggttgttgagttttaaaatgtattaaaatatttttcgaggaaaaaaa

SEQ ID NO: 357765 - DNA, 1015 bp, Homo Sapiens
  misc_feature (11)..(11): n is a, c, g, or t
  misc_feature (20)..(20): n is a, c, g, or t
  misc_feature (22)..(22): n is a, c, g, or t
  misc_feature (26)..(27): n is a, c, g, or t
  misc_feature (31)..(31): n is a, c, g, or t
  misc_feature (34)..(35): n is a, c, g, or t
  misc_feature (43)..(43): n is a, c, g, or t
  misc_feature (53)..(54): n is a, c, g, or t
  misc_feature (93)..(93): n is a, c, g, or t
  misc_feature (499)..(499): n is a, c, g, or t
  misc_feature (506)..(506): n is a, c, g, or t
  misc_feature (539)..(539): n is a, c, g, or t
  misc_feature (568)..(576): n is a, c, g, or t
  misc_feature (614)..(614): n is a, c, g, or t
  misc_feature (653)..(661): n is a, c, g, or t
tttagggtctntctttaaantntganncaancgnnaggggggntgccttggcnncagtttttttccttcaagaatgcagtactaacatttatntggagtggagttactgaacagtaacatagctgtgatttttggtatttgaaacactggttttaaatattttgacttgttgagggtatgttttatatagcaagacattatatagcagtaaaaaatggtgttttatcttctatataattcctgtttttattattaacaaaacagtcctaaatagcagccctcaattgtgaaaaaatttactttaaactacattaggttgtgaatgcaggttttatcagaactatgtttttgttcagtttatctgttcatatggataaatattggttgggatgacttggtgtctaatgtgtagtgctacacacctaacttatggggccaaaatagcatgtcctaatgcttgctgctgatttaaacacattaaaggtactttgcaggaaanccttgcnccatgggattaatatccaattgctgcttgtacnctcattcattactaaaagttttgagaaannnnnnnnnccagtaatgagcttaagaaatttgtggaaaataactcncctggcatcttacatctgaaataaggaatgatataaggnnnnnnnnnctcccagaagatgaagcacacaggaacctaatgggccaactgggatgaggtgactattctgagatgactattcagtggctaacttgggttaggaagaaaataattaggtattttctccaaatgttcactggtactctgccactttatttctctcatctgttacacaaagaaccaccaggaaagcaaatcagtttggttggtaactctgtaattcctaactatcactggtttggttctggactaaaactacattgacagattgaatttgcctaatatgatgactgtttttaatatggatctgtatgtgttctattcagcacaaggaaataaaattttagttgaggattcagccct

SEQ ID NO: 357766 - DNA, 2127 bp, Homo Sapiens
  misc_feature (1922)..(1922): n is a, c, g, or t
  misc_feature (1924)..(1924): n is a, c, g, or t
  misc_feature (1937)..(1937): n is a, c, g, or t
  misc_feature (1991)..(1991): n is a, c, g, or t
gggagaaacagcccacagagctcaccaacaagtactccaaaactaagtaagagtttaagctttgagatgcaacaagatgagctaatcgaaaagcccatgtctcctatgcagtacgcacgatctggtctgggaacagcagagatgaatggcaaactcatagctgcaggtggctataacagagaggaatgtcttcgaacagtcgaatgctataatccacatacagatcactggtcctttcttgctcccatgagaacaccaagagcccgatttcaaatggctgtactcatgggccagctctatgtggtaggtggatcaaatggccactcagatgacctgagttgtggagagatgtatgattcaaacatagatgactggattcctgttccagaattgagaactaaccgttgtaatgcaggagtgtgtgctctgaatggaaagttatacatcgttggtggctctgatccatatggtcaaaaaggactgaaaaattgtgatgtatttgatcctgtaacaaagttgtggacaagctgtgcccctctgtaacattcggagacaccagtctgcagtctgtgagcttggtggttatttgtacacaatcggaggtgcagaatcttggaattgtctgaacacagtagaacgatacaatccttgaaaataatacctggactttaattgcacccatgaatgtggctaggcgaggagctggagtggctgttcttaatggaaaaactgtttgtatgtggtggctttgatggttctcatgccatcagttgtgtggaaatgtatgatccaactagaaatgaatggaagatgatgggaaatatgacattcaccaaggagcaatgatgggattgcaactgtagggaacaccatttatgcagtgggaggattcgatggcaatgaatttctgaatacggtggaagtctataaccttgagtcaaatgaatggagcccactatacaaagattttccagttttaacaaatttaagaccctctcaaactaacaggcttagtgatgtaattatggttagcagaggtacacttgtgaataaagagggtgggtgggtatagatgttgctaacagcaacacaaagcttttgcatattgcatactattaaacatgctgtacatactttttgggtttatttggaaaggaatgcaaagatgaaggtctgttttgtgtacttttaagactttggttattttactttttggaaaagaataaaccaagaattgattgggcacatcatttcaagaagtcccctctcctccacatttgttttgccaatttgcacattaaatgactcttccctcaaatgtgtactatggggtaaaaggggtagggtttaaagatgtagacagttgggttttttaagggccctttttcaataactggaacactctataacaaaggatacttatttaaatagatgacattgactatttttgtttttattaaaaggaagcttacatgcctaccaatatttaatcttttatgattgcctttttataactttttatattctcagcagagtgctttaccaattgaagtaaaatgtggcaggctggagttattgaagcagagtggcagtcttcagtttgcagagtaggggtctgtcttttaaactctgagtgcaaacttcagagttcttgccttggctgcagtttttttccttcaagaatgcagtactaacatttatttgagtggagttactgaacagtaacatagctgtgatttttggtatttgaaacactggttttaaatattttgacttgttgagggtatgttttatatagcaagacattatatagcagtaaaaaatggtgttttatcttctatataattcctgtttttattattaacaaaacagtcctaaatagcagccctcaattgtgaaaaaatttactttaaactacattnangttgtgaatgcangttttatcagaactatgtttttgttcagtttatctgttcatatggataaatatntggtttgggatgacttgggtgtccaaatgtggaagtgctacccaacctaaacttatgggggccccaaaatagccatgttccctaaatgcttttgcttggctggaatttaaacccccctttaaaaaggtaccttttc

SEQ ID NO: 357767 - DNA, 858 bp, Homo Sapiens
  misc_feature (13)..(13): n is a, c, g, or t
  misc_feature (16)..(17): n is a, c, g, or t
  misc_feature (19)..(21): n is a, c, g, or t
  misc_feature (24)..(26): n is a, c, g, or t
  misc_feature (45)..(61): n is a, c, g, or t
  misc_feature (83)..(83): n is a, c, g, or t
  misc_feature (96)..(96): n is a, c, g, or t
  misc_feature (121)..(124): n is a, c, g, or t
  misc_feature (134)..(134): n is a, c, g, or t
  misc_feature (141)..(141): n is a, c, g, or t
  misc_feature (151)..(151): n is a, c, g, or t
  misc_feature (170)..(170): n is a, c, g, or t
  misc_feature (172)..(172): n is a, c, g, or t
  misc_feature (181)..(181): n is a, c, g, or t
  misc_feature (187)..(187): n is a, c, g, or t
  misc_feature (193)..(193): n is a, c, g, or t
gttttttaggtcnggnnannnccnnnggggggtgtgtgtgggggnnnnnnnnnnnnnnnnntttctactatttttgttcaggntggtctcaatctnttgacctcatgatccacccgccttnnnntcccaaattnctgtatntttataggtnttttcgtttttgttcggcntntggtattgnttttgntatttnattctatacatttgaattgagggtaggtgtcctatctacttgttcctcttatttccccaaggttcttaccaagatgcccttttctctttactaattaccactagcttcaatttagaacagtcagattggctcattataaaacattctgaaaatgcttaaaagcaaagagaaaatatgaaaattaccttaaatcatatcatttattgataacaatcatgaacatttttactaatttgcttccagtcttttcgtctttatagacattacttgcaatctttaaataaagctgggatcatactacaaatgcatccgagcagccttcttttcatgtatacatttaaaatagtatcttatgccattaaatatttaaaaaatataatttgcaatggggcttaacatcccattctatgactctatactattcacccttcctcctttatgagacattcagattgtatcagtattttgatattctaaataaataataatatcgtttgcacattgatgcttagtagacattgttggctgatttctgtcactcaggtgccatttaatccacaattttgatggatagcacataaaactgtaatttagatttctaggccacttagtaccctcagcttgttccccatgctgtagcctatttattataaagggagtagaag

SEQ ID NO: 357768 - DNA, 930 bp, Homo Sapiens
gcaggctggtaccggtccggaattcccgggatgtccagcggcctcgaccaccgcctctagcctccgttcccggtcctttctcccgggccgagatgacagcgtcgccgacaggggctcattcccctccggttctcctcggtgactcacctcgggcgggccgttttgtctttaggggccgccttggtggggctgaggtttccgtgacgaatctcctggggccgtccgtgccggctcgggccgtcgtggcgactcgagctcctggaacttgctcaggctccggaggtccgaggccctcgaagttatgcgtcgcctccaggcggttgcggcgggcgcgggctcctaaagggcgtcacacccggactccgccgactaggcaacctccattcatctttccactgcgcctccagcgcccccgccttctccggtcccctcctcggagtcatattttcctgttccccctctgccgccctttcctcacgccccgggtgaggcaattctcttggaagcgaaggtgtcggctatgagccggagcctccttccttgaatttctccgtggaggacccgacgcgccccccggcatgggggtgaacagccgtgcactggttccgaaaggggctccggctccacagacaaccccagccctgaaggagtgcatacagggcgccgacaacatccgatgcgtctacatcctggacccctggattcagccggctcctccaatgtgggcatcaacaggtggcgatatgagcttcagagtcttgaggatcttgatgccaatctacgaaaattaaactcccgtctgtttgtgatccgtggacaaccagcagatgtgtttcccaggcttttcaaggaatggaacattactaaactttcaattgagtatgattctgagccctttggaaaggaacgagacgcagctattaagaaact

SEQ ID NO: 357769 - DNA, 939 bp, Homo Sapiens
  misc_feature (42)..(78): n is a, c, g, or t
  misc_feature (210)..(254): n is a, c, g, or t
agtttgatactatggcgaatggagctcacgcggggcggccgnnnnnnnnnnnnnnnnnnnnnnnnnnnnnnnnnnnnnatcaggccaaatcggccgagctcgaattcgtcgagagcgggaggcgctatcgcaagatggcgtctgcgaggccgcgggatgcggagtgagcgcgccccgccgggggctgtgcgaggctgctgctgctctccnnnnnnnnnnnnnnnnnnnnnnnnnnnnnnnnnnnnnnnnnnnnnagccactgcgccgcggccaagcctcctgcctcgcagcggtcccccgcgtcccggcctgcagcctccccgggcgccggcgcccccagcacgccccatcgggcaccccactctctccgaggtgtgggtgcggcgggctgatgaggtgatccctagcccgcctgggaggagcgcctggactcgcgggcggcggcgagcgcctttacaatggccctgaccctgtttgatacagatgaatatagacctcctgtttggaaatcttacttatatcagctacaacaggaagcccctcatcctcgaagaattacctgtacttgcgaggtggaaaacagaccaaagtattatggaagagagtttcatggcatgatctccagagaagcagccgaccagctcttgattgtggctgaggggagctacctcatccgggagagccagcggcagccagggacctacactttggctttaagatttggaagtcaaaccagaaacttcaggctctactacgatggcaagcactttgttggggagaaacgctttgagtccatccacgatctggtgactgatggcttgattactctctatattgaaaccaaggcagcagaatacattgccaagatgacgataaacccaatttatgagcacgtaggatacacaaccttaaacagagagccagcatacaaaaaacata

SEQ ID NO: 357770 - DNA, 1612 bp, Homo Sapiens
  misc_feature (31)..(31): n is a, c, g, or t
  misc_feature (40)..(40): n is a, c, g, or t
  misc_feature (88)..(95): n is a, c, g, or t
  misc_feature (175)..(305): n is a, c, g, or t
  misc_feature (315)..(315): n is a, c, g, or t
  misc_feature (330)..(330): n is a, c, g, or t
  misc_feature (334)..(334): n is a, c, g, or t
  misc_feature (337)..(337): n is a, c, g, or t
  misc_feature (339)..(339): n is a, c, g, or t
  misc_feature (342)..(342): n is a, c, g, or t
  misc_feature (348)..(348): n is a, c, g, or t
  misc_feature (377)..(377): n is a, c, g, or t
  misc_feature (440)..(440): n is a, c, g, or t
  misc_feature (597)..(597): n is a, c, g, or t
  misc_feature (1278)..(1278): n is a, c, g, or t
  misc_feature (1600)..(1600): n is a, c, g, or t
ctagcccataatcgtatttccttcaattatnccccaaatngtctttacagctggtcctccgaagatccaaccccaaaccaggtattgnnnnnnnntttattttatagtagttatatggtcatgttgaatttttcttttgaggtgtagtctatgaatttttgtgtatgtatagcgnnnnnnnnnnnnnnnnnnnnnnnnnnnnnnnnnnnnnnnnnnnnnnnnnnnnnnnnnnnnnnnnnnnnnnnnnnnnnnnnnnnnnnnnnnnnnnnnnnnnnnnnnnnnnnnnnnnnnnnnnnnnnnnnnnnaaagactggngtgctattcattgcngggngtngngcngcaccntagacctcctcatccactggatgccagtngccccaaccccatccccggttgtgacaaccaagtctgcagacattgtccagtgtcccctgggngtaaaatttctcctcccctctttgataatcactgctttagactctatttggtcttagagtcttttctctgaagtccatcattttatccgccgtaaccctgctgtcttcacttaaggggtccaagacgtttacaggagggtgataatggtgatgatgngctgccaataataatccacacacagcactatttgacaaatgcaggtaatgttatatattttacagacctggaaactgaggcgacttaggggcttggcaacttgcctaatatcacccgagagctgattaaggcttggggccaggactgggaccccaggatgaagcccagctgagcagaaaacctctgtgcacaggatgcagcaatcaagataataaaaatcaactccgactgagaaagtatctgcctacacattcatcaggctgggaggacagacccagatggtatcagttggaaaattaacagaaaacagtatttttgccaagaacacctttttctgagccatcaatgtcttctagctcgctaaatgccttccttgcccattacaatcatacacagtgattgacattttatcagtaagaataaacttaccttttccggccggagggtctgattttcttggacacagagaatccgtctccatttccaacccaggtgcagggctctgataagcggtttccggacataacaatctacagcggtcttatcttgtggttcccaaggaaacaggtcccggctgcacttcgcagcccagacccgagggtgacccctttacaagcttgctctttgccaaatggaaaccacgcagtatttacatttcacctaaaccccacccttccctcnaaatccgatgggttactcaggcctaggatcctcaggcctagggggtcaaaacgccccgcgtccccaaccaagacccctgaagtctagcggggttccactggcctccggagcctcctccctggggcgcggtgccaggacttcgccattaaacgagcccgccccctgcactttgaactctgcccccatcctttgacccaaacccccctacgccccggcatcggagtccccttgcttggcctctgccacgaagatacggggccaggtccagcagtacaaggaggagaaaccgctctcacgggaggcgctgcggccactgaggganacggccgccgcg

SEQ ID NO: 357771 - DNA, 825 bp, Homo Sapiens
  misc_feature (9)..(9): n is a, c, g, or t
  misc_feature (136)..(136): n is a, c, g, or t
  misc_feature (183)..(183): n is a, c, g, or t
gggaatgcngagaaaagggaggcttgaccccgggcaccatgggccactccaggatgggacacggcccctctttcttggggacccagtatgtcctctcctctagacccagacatacagttataaccgtctgtcctancccctccctaatccctggccctcccagctgtctgggacttcagtggncccccagcccctgcccccactcaccaaggcctcgctcgtccctctcgtctgacatgtctgtgtgcacccccctcctctccaccctaccttccatcaaccagggcagatccaccgtgccctggttccccagacattccagaatgccccacatcattggcacaggagtggggcagccccggaaggaaccagggattaggctgtaggggggtgagaaggagagaagggaccaccccattcttctcaagcaaggattgccagcgcgcgctgacacagtgatgggctgcccagggctggaggggacgctgttcctcccgccgccactgcccaacctttcctgataatcgtggcatgcgccctttcctcttccctgccccaccccctggccgcagcaggccagcactgcagagtttgggtgctggtggtgtggctgtaggggaggggagaccacacccaaggtgggggctgtggccatgtgtggccgtgatgtcgatgatactcgttttccctgatccgtggtgttgcagtccgttgtcaccagccttgtttctagtgtgtatatatgtcgcccccgtgatgcatatatacacaggtattaaatatatcgctctatataatattatatatgtgtgtggtatccaagga

SEQ ID NO: 357772 - DNA, 469 bp, Homo Sapiens
  misc_feature (143)..(143): n is a, c, g, or t
  misc_feature (146)..(146): n is a, c, g, or t
  misc_feature (158)..(158): n is a, c, g, or t
  misc_feature (168)..(168): n is a, c, g, or t
  misc_feature (173)..(173): n is a, c, g, or t
  misc_feature (177)..(178): n is a, c, g, or t
  misc_feature (183)..(183): n is a, c, g, or t
  misc_feature (195)..(195): n is a, c, g, or t
  misc_feature (200)..(200): n is a, c, g, or t
  misc_feature (207)..(208): n is a, c, g, or t
  misc_feature (215)..(215): n is a, c, g, or t
  misc_feature (227)..(227): n is a, c, g, or t
  misc_feature (232)..(232): n is a, c, g, or t
  misc_feature (242)..(242): n is a, c, g, or t
  misc_feature (267)..(267): n is a, c, g, or t
  misc_feature (274)..(275): n is a, c, g, or t
  misc_feature (301)..(301): n is a, c, g, or t
  misc_feature (308)..(308): n is a, c, g, or t
  misc_feature (316)..(316): n is a, c, g, or t
  misc_feature (324)..(324): n is a, c, g, or t
  misc_feature (328)..(328): n is a, c, g, or t
  misc_feature (330)..(330): n is a, c, g, or t
  misc_feature (337)..(337): n is a, c, g, or t
  misc_feature (349)..(349): n is a, c, g, or t
  misc_feature (381)..(381): n is a, c, g, or t
  misc_feature (437)..(437): n is a, c, g, or t
  misc_feature (439)..(440): n is a, c, g, or t
  misc_feature (456)..(456): n is a, c, g, or t
ccatgcctccccaagggcagggctggtcctggttcactaacccatccccagcacccattggaatgctctagacttcagcccagtgagtcactaagaaaggacagataccttggcagaagagctgaggaaagcccaggtccctntcntcagcccaaccntctcttcccntttcnccanncctcncatatgtgtgtntgttncattgannaactatntcaaggtatctntcaanccattcgganccttggccaggtgcagtggctcacncccatanncttaggacttggggaagccaaggtangcagatngcttgagnacaggaantcangnccagccnggggggaatggngggaaataaataaatagtccatttggattttnatttcatctatggataggataaataatatgcctcataatatatgccctaatatttntnnaatatatgtagctgcntctatgatgaata

SEQ ID NO: 357773 - DNA, 1914 bp, Homo Sapiens
actcccggccgcccctttctttctcctcgccggcccgagagcaggaacacgataacgaaggaggcccaacttcattcaataaggagcctgacggatttatcccagacggtagaacaaaaggaagaatattgatggattttaaaccagagtttttaaagagcttgagaatacggggaaattaatttgttctcctacacacatagatagggtaaggttgtttctgatgcagctgagaaaaatgcagaccgtcaaaaaggagcaggcgtctcttgatgccagtagcaatgtggacaagatgatggtccttaattctgctttaacggaagtgtcagaagactccacaacaggtgaggagctgcttctcagtgaaggaagtgtggggaagaacaaatcttctgcatgtcggaggaaacgggaattcattcctgatgaaaagaaagatgctatgtattgggaaaaaaggcggaaaaataatgaagctgccaaaagatctcgtgagaagcgtcgactgaatgacctggttttagagaacaaactaattgcactgggagaagaaaacgccactttaaaagctgagctgctttcactaaaattaaagtttggtttaattagctccacagcatatgctcaagagattcagaaactcagtaattctacagctgtgtactttcaagattaccagacttccaaatccaatgtgagttcatttgtggacgagcacgaaccctcgatggtgtcaagtagttgtatttctgtcattaaacactctccacaaagctcgctgtccgatgtttcagaagtgtcctcagtagaacacacgcaggagagctctgtgcagggaagctgcagaagtcctgaaaacaagttccagattatcaagcaagagccgatggaattagagagctacacaagggagccaagagatgaccgaggctcttacacagcgtccatctatcaaaactatatggggaattctttctctgggtactcacactctcccccactactgcaagtcaaccgatcctccagcaactccccgagaacgtcggaaactgatgatggtgtggtaggaaagtcatctgatggagaagacgagcaacaggtccccaagggccccatccattctccagttgaactcaagcatgtgcatgcaactgtggttaaagttccagaagtgaattcctctgccttgccacacaagctccggatcaaagccaaagccatgcagatcaaagtagaagcctttgataatgaatttgaggccacgcaaaaactttcctcacctattgacatgacatctaaaagacatttcgaactcgaaaagcatagtgccccaagtatggtacattcttctcttactcctttctcagtgcaagtgactaacattcaagattggtctctcaaatcggagcactggcatcaaaaagaactgagtggcaaaactcagaatagtttcaaaactggagttgttgaaatgaaagacagtggctacaaagtttctgacccagagaacttgtatttgaagcaggggatagcaaacttatctgcagaggttgtctcactcaagagacttatagccacacaaccaatctctgcttcagactctgggtaaattactactgagtaagagctgggcatttagaaagatgtcatttgcaatagagcagtccattttgtattatgctgaattttcactggacctgtgatgtcatttcactgtgatgtgcacatgttgtctgtttggtgtctttttgtgcacagattatgatgaagattagattgtgttatcactctgcctgtgtatagtcagatagtccatgcgaaggctgtatatattgaacattatttttgttgttctattataaagtgtgtaagttaccagtttcaataaaggattggtgacaaacacagaaa

SEQ ID NO: 357774 - DNA, 1321 bp, Homo Sapiens
  misc_feature (53)..(53): n is a, c, g, or t
  misc_feature (278)..(279): n is a, c, g, or t
  misc_feature (281)..(281): n is a, c, g, or t
  misc_feature (286)..(287): n is a, c, g, or t
  misc_feature (296)..(296): n is a, c, g, or t
  misc_feature (303)..(303): n is a, c, g, or t
  misc_feature (323)..(323): n is a, c, g, or t
  misc_feature (325)..(325): n is a, c, g, or t
  misc_feature (327)..(327): n is a, c, g, or t
  misc_feature (331)..(332): n is a, c, g, or t
  misc_feature (341)..(341): n is a, c, g, or t
  misc_feature (343)..(343): n is a, c, g, or t
  misc_feature (350)..(351): n is a, c, g, or t
  misc_feature (353)..(354): n is a, c, g, or t
  misc_feature (359)..(359): n is a, c, g, or t
  misc_feature (367)..(367): n is a, c, g, or t
  misc_feature (371)..(371): n is a, c, g, or t
  misc_feature (383)..(383): n is a, c, g, or t
  misc_feature (393)..(393): n is a, c, g, or t
  misc_feature (400)..(400): n is a, c, g, or t
  misc_feature (418)..(418): n is a, c, g, or t
  misc_feature (423)..(423): n is a, c, g, or t
  misc_feature (429)..(429): n is a, c, g, or t
  misc_feature (432)..(464): n is a, c, g, or t
  misc_feature (481)..(481): n is a, c, g, or t
  misc_feature (488)..(488): n is a, c, g, or t
  misc_feature (491)..(491): n is a, c, g, or t
  misc_feature (497)..(497): n is a, c, g, or t
  misc_feature (554)..(554): n is a, c, g, or t
  misc_feature (563)..(563): n is a, c, g, or t
  misc_feature (597)..(597): n is a, c, g, or t
  misc_feature (668)..(668): n is a, c, g, or t
gcgtgacgccgccgccgcctgtaactgatgcagaggttaccccaccgcctcanccgccacccacagcccgccgccgccgccgcctcccgggcgacgccgggggccgacgcactgcagaggtgccggcaggttccgcccgcggaagtgtcctcggccggcgcaccgcgctccgcccgcgctccgaccccggcccggctggcaccccctcgacgcctccgccgccgcgctcctttcctcctcctctcctctggcgcgcccgctcgctccctcgctttttnncnttttnntcttccctnttccctntccttccctcacctcttttnantntaanntccctcttntnggttttnntnnccatncccttgantctnccctcccagccntcgctctctngctagcnctcagcgcggcccccgcnatganggaggnggnnnnnnnnnnnnnnnnnnnnnnnnnnnnnnnnnggggggagtcgggttancagaaantanattgangagtgtccaaagtagcagtggaagtttggaggggcagacatcttggtcccagctctncaagtctcnaaacccgggctcggcggcggcggccaggtccctnctgaatcacacgccgccatccgggaggcccagggaaggtgcaatggatgagcttcatagtctggatccaanaaggcaagagttattggaagctagatttactggagttgcaagtgggagcactggaagtacgggcagttgcagtgttggagctaaagcctcaacaaataacgaaagctctaatcacagttttggaagcttgggatctttaagtgacaaagaatcagagacaccggagaagaaacaatcggaatcatccaggggaagaaagagaaaagcagaaaaccagaatgaaagtagtcagggaaaaagtattgggggacgtggccacaaaattagcgactattttgaataccagggtggaaatggctcaagtccagtaagaggcatacctcctgcaatccgttctcctcaaaattcacattcacattccactccttcctcatctgttcgaccgaatagcccttctcctactgcattagcatttggggaccaccctattgtacaaccaaagcaattatcctttaaaattattcagactgatctcacaatgctgaaattagcagcattagaaagtaataaaatccaggacctggaaaagaaggagggacgtatagatgatttgctcagggctaactgtgatctcagacggcaaatagatgtacttactctcattacgttgctaaatactaacgcaacgattaaataagtgcatatcccatgag

SEQ ID NO: 357775 - DNA, 727 bp, Homo Sapiens
  misc_feature (17)..(17): n is a, c, g, or t
cctgtagagacaagacncctaaaagcataccaacaaccccatatgcaattccatgtgttaaatttaaaaatgtatgtgcctcagtgtttgtagtcctagaagctccctttccccttggaggaatgccaagcagtttgcaaaaataaatgctgttagttaaaaaccacataatcacatgggcctactgaataaatatgcatcagtgattatatacttatatttcagtcttgtcaaaagtgaatcactgtttcatttgatgtatttacccagtctttttatccagtttttcttgggcatattctctctgaagacccactgttgcacttctaaatttgacagttaagaaatgagctagttctatacacactgatttttaaaggcgtttctgaataaactaatacttaaaatgtccaaagtcacatctgtacagcattagatttttatatttaatatatatttgactaattaaaagtgaaagttgttacctgaactggatattcatactattttaagggcaagttgcttacatttcaataacaacaaaaaaagaatctgtttcccattgtcctcctactcaactaaaattcatagttggctttaagcccaaaagaattttgaacaatgtgacagaaacaagtaatgtaaaacttattttgttttatttatactttataatagttagatataacagattatggacaacttaatatttcttctttttggctgg

SEQ ID NO: 357776 - DNA, 518 bp, Homo Sapiens
  misc_feature (201)..(209): n is a, c, g, or t
ctagtttttttgttcggttttgttttccatcaggaatttgagttctctctaacccagcttactgtgggacataggaaaactcagtagaaatacctttggtgatcttgttgagtttaagtctgatcttgatcttaaactcagtaagccactatctgcaattttgtacattatatagtattttgaagatatggaaccttatgnnnnnnnnntagcaaattagttccttttcccccagaggggaaagttatgttctgcaaatagtgtgtgtcttattttactgttgaacagcaattgctatttatttttttattgcctagaacttcaacatgttgtataggaatcctgtagtgccactagttaaatgccgaattctcatctggatgttaccatcaaacatcagtacacttgtcatttcacatgtgtttaatgtgacagtttttcagtactgtatgtgttaatttctactttttttaatatttaaaattgcttttaaataaacatattctcagttgatccca

SEQ ID NO: 357777 - DNA, 1000 bp, Homo Sapiens
  misc_feature (4)..(4): n is a, c, g, or t
  misc_feature (14)..(14): n is a, c, g, or t
  misc_feature (16)..(17): n is a, c, g, or t
  misc_feature (19)..(19): n is a, c, g, or t
  misc_feature (21)..(21): n is a, c, g, or t
  misc_feature (28)..(28): n is a, c, g, or t
  misc_feature (40)..(40): n is a, c, g, or t
  misc_feature (42)..(42): n is a, c, g, or t
  misc_feature (51)..(51): n is a, c, g, or t
  misc_feature (56)..(56): n is a, c, g, or t
  misc_feature (72)..(72): n is a, c, g, or t
  misc_feature (75)..(75): n is a, c, g, or t
  misc_feature (93)..(93): n is a, c, g, or t
  misc_feature (114)..(114): n is a, c, g, or t
  misc_feature (170)..(170): n is a, c, g, or t
  misc_feature (298)..(298): n is a, c, g, or t
  misc_feature (327)..(327): n is a, c, g, or t
  misc_feature (353)..(356): n is a, c, g, or t
  misc_feature (358)..(358): n is a, c, g, or t
  misc_feature (365)..(365): n is a, c, g, or t
  misc_feature (368)..(368): n is a, c, g, or t
  misc_feature (370)..(370): n is a, c, g, or t
  misc_feature (438)..(438): n is a, c, g, or t
  misc_feature (457)..(457): n is a, c, g, or t
  misc_feature (482)..(482): n is a, c, g, or t
  misc_feature (493)..(493): n is a, c, g, or t
  misc_feature (556)..(556): n is a, c, g, or t
  misc_feature (566)..(566): n is a, c, g, or t
  misc_feature (581)..(581): n is a, c, g, or t
  misc_feature (628)..(628): n is a, c, g, or t
  misc_feature (668)..(668): n is a, c, g, or t
  misc_feature (671)..(671): n is a, c, g, or t
  misc_feature (676)..(676): n is a, c, g, or t
  misc_feature (718)..(718): n is a, c, g, or t
  misc_feature (751)..(751): n is a, c, g, or t
  misc_feature (929)..(959): n is a, c, g, or t
cccnggcccacagncnntntnttactgngttaagagaccncnacaggcagnggggngccccgcacgtactcncancctcatgtaagtgccccntaataactacagcttcagcanacaactaaagagactgcattaaggtgatttctctggctataaagagagcccggccngcagagcagtgtgactgctgggacctctgggataggcaacactgccctctctccccccagggctactccccgggcaggtcggggcccaaggaatgacccagcaactgctccttacccagcacactctntttactgccacctgcaattatgctgtgangatgactgggtgtggtcatcacgatnnnnanaaaccangancnatgaccatgctaggcaaagagagaaacttggagaattgctgaggactactgaaccttgttttgctttnttaaaaaacactaaacccncacttcagcatatttagttgacatnaaaaccaagcngatattattaaggggttgatgaactgaggtgtcacccacaattactgccccccaagtattcanggggtagatntcagtaattcttgtncgcttctggcttagaaacttgtcagaatgatttttcttttatacttnccaatacttgacttaatatgcatttagtgacattctgttnttntcaanatacggtttacaagatgacagaagaatcccagttcttaggtnagaattggatttccccctctacaattacacaanaactctcaaaaaccaagaaagcatactgctcgactcaggctctggcatgattcttaaaaagaaaactgcctctagactatgggggcttacaaaaaggggatttttgccactgagacatttgtcatgttaactgtagcggaaaacatcccaccaatagtcaaaactcatgagcgggaannnnnnnnnnnnnnnnnnnnnnnnnnnnnnnaaaaaaaccctgtttcttgggtgggtgtgggatataatact

SEQ ID NO: 357778 - DNA, 902 bp, Homo Sapiens
  misc_feature (112)..(164): n is a, c, g, or t
agtctgcctccccgaaccggcgccgccgcccgcactcgccgcaggaccggcccgcccggctcccggggtgcgccctcctcggtcccgcgccctccgggctcgcagggacgtnnnnnnnnnnnnnnnnnnnnnnnnnnnnnnnnnnnnnnnnnnnnnnnnnnnnnagcgcgccgaggatgtgagtcctgctcgcctctggcggagcagcagccactcgcgcgcggagccggagcgcagcgcagtgcagccgcgggtcgctctccgggccgctcgcgcgaatgccgcgctcttgccctagcggcgtcccccgggcctctcgccggcgccaccgccgcaacagcccgcgggccgtccccggacgggcgcccccggccccaagcgccgctgaccctgtccgccgcgggcggggacgcgggcggaggaggcgccgcggcggagcccccggacgcgaccatgtcggaggtgctgccctacggcgacgagaagctgagcccctacggcgacggcggcgacgtgggccagatcttctcctgccgcctgcaggacaccaacaacttcttcggcgccgggcagaacaagcggccgcccaagctgggccagatcggccggagcaagcgggttgttattgaagatgataggattgatgacgtgctgaaaaatatgaccgacaaggcacctcctggtgtctaactcccccaaagacaatgagttaagggagagaataagaacggcggtaacagttattggcaaaaagcatgaaaagagaaagcactttgaaatttattactagcttgctacccacgatgaaatcaacaacctgtatctggtatcaggccgggagacagatgaggcgagaggaggaggaggaggaggagaaggctctgggctcctctgcaaaaaaa

SEQ ID NO: 357779 - DNA, 1346 bp, Homo Sapiens
  misc_feature (468)..(476): n is a, c, g, or t
  misc_feature (824)..(887): n is a, c, g, or t
  misc_feature (1228)..(1306): n is a, c, g, or t
tgacgggaataaagagtgagggcgggggacaacgtggattgagaatgtagcgtcttgtcgtgcttggaagtattattccagggtaacatagtaggcagcgttgcaagagaacgcggcgctagcagggaagaaagaaggaggcgggcgtaatataggggggtaatagcgggcggagaggaggggattcggggaggcagagaactaagaaagggtgggggatagcggtagcggttcggagtgaagcgacgggaaaaaggagtgggcggccgaataagggcgggctgggcgcggaaagaacacacgtaagcgggagtatcagggtagggcgaggtgaaagtagcagatgtggcgactcaaaggagtcaagcggcgcgtaggaaacgggaaatacgcggggaacggtttggcggcacgaggcggggggtaggggattattgagggcggtaatttaaggatggatgggtgtannnnnnnnnattgcgaaagaacgggggaggaaggggcgccagcttgcgggagaccgatttttacggattcgcggtagggggtgcgtgtagggagcaaaaaacgcatggtatggggggaagggagggtccccttgaagggatattttaagaaggggtacactgtttgtcacccggcgccgaaggaagttttgggctcggtaagtcggcaggagagattttggcccaggtcgccgccgtcgccgtaggggctcagcttctcgtcgccgtagggcagcacctccgacatggtcgcgtccgggggctccgccgcggcgcctcctccgcccgcgtccccgcccgcggcggacagggtcagcnnnnnnnnnnnnnnnnnnnnnnnnnnnnnnnnnnnnnnnnnnnnnnnnnnnnnnnnnnnnnnnngagaggccgggggacgccgctagggcaagagcgcggcactcgcgcgagcggcccggagagcgcccgcggctgcgctgcgctgcgctccggctccgcgcgcgagtggctgctgctccgccagaggcgagcaggactcacatcctcggcgcgctggggctctgggcgggggccgggccgggcgggcccgcgagccgggagggaggagacgtccctgcgagcccggagggcgcgggaccgaggagggcgcaccccgggagccgggcgggccggtcctgcggcgagtgcgggcggcggcgccggttcggggaggcagactgggagctgcgagcggcgggactacnnnnnnnnnnnnnnnnnnnnnnnnnnnnnnnnnnnnnnnnnnnnnnnnnnnnnnnnnnnnnnnnnnnnnnnnnnnnnnnccgagagggagacggggttgaaaaacagggactgaaagac

SEQ ID NO: 357780 - DNA, 846 bp, Homo Sapiens
  misc_feature (582)..(582): n is a, c, g, or t
  misc_feature (623)..(677): n is a, c, g, or t
gaccgtggcgtcccgtccactgctacctcacggcagccacggcggcttctgagggcacaactgtgggaccacacgtgtttcaaaacacaaaacacatgaaactgggcagaagagccaggagtcctgagccccgagggctgcccagagctcaggtcccaagcgcagcgtcctctgccttctgcccgataccctgaccccagagacccgggtgagctgctgagaaaaacaaaccccaaagcccaaaggggcaggcggcctctgtccagaagcccctagcccggctccgttaggacagcccgtgggtggaaagctcgtgtcctcagcaatctctgagggcggcgacccagagagaggcggatattgggaagctgggagccaggcagggcctcagggcctctcacctccagccacacgcctccccttccttcgaaatgcaagggaaggcccccagagctgccaaggagcacagcagaatccacacagaacctcacactgtgcctagcactcgcctgccaggaacagcccagcccaaggggaagcgtggggagtgcctcctcccgccaggaccttgcagccctcccnacagcaccttctgaggtcagactccccaggcaccgctacannnnnnnnnnnnnnnnnnnnnnnnnnnnnnnnnnnnnnnnnnnnnnnnnnnnnnngtgcatatgcgtgcacacggctccgaggctgcgtggcagtgcacaggtcacggcccccaaggccacggggacaggaatgttcacgtctgagcacgtcaggtgagctctgggcaggcgcagttgatcaagttttggcagcgccattttctttctcctcttcttcttcttt

SEQ ID NO: 357781 - DNA, 1031 bp, Homo Sapiens
  misc_feature (51)..(51): n is a, c, g, or t
  misc_feature (77)..(77): n is a, c, g, or t
  misc_feature (87)..(123): n is a, c, g, or t
tgaaaaacacggataatccagatatattgaggtgacccctctgagattagnacaggagagttagaaagattataaanatacacggtnnnnnnnnnnnnnnnnnnnnnnnnnnnnnnnnnnnnnaacaaaaacacacagaacaacagcccctctccctcccacccccccgtacaaatatggcttctgtgtaatatggacagagtggttcagcttgaagaggaaaagtcattttcccaaaagcgggtgctgggagacaagaagctcaacaggcctggggccccagggctctcttgctgttgtaagaggagtaggccccggcttaggtgaggggctgcctgtggtgcccaaggccctaaccagcggctggaagattcacaactgtattacctgaactgaagggggtgggcaggcctgctagattgcagctgcccctttttgcatgcccattgtcagaccagggaggaaaagctgggggagggtgggagcgatgccaagggcatcctggatctgaggcggggcagtccagccaggacagggaggaccaggaacctcatctccacagcaaccagctggggccacgagaaggaagacaggaaatcaaaaggaagggtggggacccagccttcaactcactgggtacagactatgggaaaaaataggtggtggtaggtctttccagggtcaacgccaaggagaggcctgagaggtgcatagcaaaggctgtggcactgactccatggctcagaggagggaaatccagggaagggctgaatgctctgtgtttaagggagagatagaatggacagctgggcaaacacacacccggggactcctttctccaagaccgatgggcactgggggtggcagaggaaataccagcatggaacaacatcccaggtgaggtgtgaaccctgactaggaataccccattcccaaagcctccccaacatgtcccacagccctgtccacttgcccaggacccctggctcttagccctcctcctcagttcctcgctctgcctctcactcact

SEQ ID NO: 357782 - DNA, 1806 bp, Homo Sapiens
  misc_feature (293)..(293): n is a, c, g, or t
tagcttaccagcttttttttaggacttgagccttggaataagggtcctgcaaacatttactcatgtcttcctgttccagagcctgtcccactgtgaactcatcacagatgatgggatcctgcacctgagcaacagtacctgtggccatgagaggctgcgggtactggagttggacaactgcctcctcatcactgatgtggccctgggaacacctagagaactgccgaggcctggagcgcctcgagctgtacgactgccagcaggttacccgtgcaggcatcaagcggatgcgnggctcagctccctcatgtcaaagtccacgcctactttgctcccgtcaccccaccgacagcagtggcaggaagtggacagcgactgtgcaggtgctgtgtcattctctgacagcagctgcctgggcccaaggggtgatgaggcatcctttcctctagaagacctgagtcttcctgaccgactccaccatcacccaatctgttgattctccattgggaaaggcatttacaggtaaaagaattctgtatggattacagttactctggtgatagttttcacctatattctactgtgaaacaatcaaatcaaagcattgtgtcagttaacacatgacaagtggtctcaatgcagctaggaccatgccagaaacctggatctcttaagagattggtacctacctaggtacgaaagttctacccttggcatactcagcattcctcaaaaagaccatcagtgttagcacaaactgagcagaaaaaataagctgttgattttctacctgatacttaagccagtggcctactttaattcacaattccattttgattagcaggacttttccactttgaagataaatagcaactttatcaaagtgactgtactgcaaattaattcataatgcctgatagttttatatatagagacttatgtggaaggcatgttaataggtttccatgagacaccaaagaaaagaggactctatactgggtggagcagggtcttcacctttttgtttctgtcaacttgtcatatacacctccagggaccaaaaacaaaagcagctcggagtctgtgttgcctgattggaaagtagaagctctggtgtatgctacagcacataacacatttttactaaaggaaaaaagctaattatgtccatgcctctcgtaaaactggggggaaccttaaagagaaagaactaaggcttaagttatctgtagtataatcaattagaagtaatgaatggatgcatgtaaaatggatgtgatttttttccaagcttattttgaaatcttaaaaatcaggttacaccatagctactcaaaagttttacacacttaaaactcagatcagtaagtgttggtaccttttagactcataaaattgaataaaccattgcaatgctttaaaaaaaattaagtcagagggttttattgctatgattttatggcagacacatccaagcaaaaccattttccaaatgcagaccttcctgatgttatctgaaatctgataaaatgaccctactctctgctgtggttcattcttgctccatgctgtccatatttatgatctttattaagaacctatcaatcagtcatcaccaccttcattgtaaacttaggtgttcatggtggctggcccttccaaacaaccactcccccaaactgaagggccagagctcatgagaaacttaaagtgaacggcaaaagcaagatgttgtcccatgactaccaatacctttattaggcagttttagagtggtttaaagatatattatgtcagctgcattca

SEQ ID NO: 357783 - DNA, 1040 bp, Homo Sapiens
  misc_feature (72)..(72): n is a, c, g, or t
  misc_feature (75)..(75): n is a, c, g, or t
  misc_feature (876)..(926): n is a, c, g, or t
gaaatctgttccagccacttcaatgttctctctgtttttcccttcctctttctgtcaaagcgaatactcctnatnttccatccacatgtaaacctcttcttccagggatgaactgccgttaggtcagcaacccctgtgtcatcagggcctggcagggcagaggctgagaatgctgctgggactatataagagccagaaatgcacaactctctgatgttgctgctgtgtccgcaggcactgagcgggggtctgtggactgcggaggcaggagtgctgccctggaaatgctggacgccttcgtcagtgggcaggatcagctgtcttcctaatactctcaaatggagggatcttcttgtccactccccgcattcggccagcagactctgggtctgagggttcactttcccttcaaataacatttcctccacctcccagagtaaccgctgcactgactgtgaactggcttcgtcaaattcgtcatctctccaggaataaacggagcccctctccgtggatgagccggtggtagagctctgtgtggccgacccagaccaagaggtgtgggctcccgtgggtgtatggcttccgctggaggaaaaggatgacaaggatttgcaggtatatttatcaatggctttctgcacatttcttgtaaaatgcgtaggtaaagaatctttgctcctcacagtaaaaccgtgccttctacgtccttctgacagtcctcttccgattacgatcagccccgggcctgtgctcgcagcccccgcgccaggctccgcgctaggctcgggcacggtcaggcagaggcaccgcgcgcgggccccacgcagacagccggtcacgcgcccccgcaaccccggggctggggctccccannnnnnnnnnnnnnnnnnnnnnnnnnnnnnnnnnnnnnnnnnnnnnnnnnngctggcccagctcaggcggcccgggcgcgcccggggtccgcggggctcgcacgccccttccctctccagatcctccgccccaaccgcgccggcgccgcctccatccgggtcatt

SEQ ID NO: 357784 - DNA, 959 bp, Homo Sapiens
gggcagcgccgggagctggaccaagcggccggtgagaggccgctgtagcggtgctcagccacctgtgctgcctgccagggggcgggccgaaacctggaggcccggggggcccagctcccgtagggagccgtgggcgctcggtgcccgggccgggcaggacagaataataagctgaatagaatctgaccattggctttcacctggccaggaccttctatgtagctctccttttgtggcccatgtgctgcatcctctgccctcagtgtgcaactggcccccaacgcaatgtgtgtttgtcaaaccatggaagtggggcagtatggcaagaatgcaagtcgggctggagaccggggagtcctcctggagcccttcatccaccaagtaggcggacacagcagcatgatgcgttacgacgatcacactgtgtgcaagcccctcatctcccgggaacagcgcttttacgagtccctccctcccgaaatgaaggagttcacccctgaatacaaaggcgtggtatctgtctgttttgagggggacagtgatggttacatcaacttagtggcctatccttatgtggaaagtgagactgtggaacaggatgacacaacagaacgggagcaacctcggcgcaaacactcccgccggagcctgcaccggtcaggcagtggcagtgaccacaaggaggagaaagccagcctgtcccttgagacctctgagagctcacaggaggcaaagagtccgaagtgggagctgcacagccactcagaggtccctttccagatgctagatggcaacagtggcttgagttctgagaagatcagccacaacccctggagcctgcgttgtcacaagcagcagctgagccgcatgcgctccgagtccaaggaccgaaagctctacaagttcctcctgcttgagaacgtggtgcacacttcaagtaccctgcgtgttggacctga

SEQ ID NO: 357785 - DNA, 990 bp, Homo Sapiens
gtcgtattgtaatataaaaccggttattagcggctgtacggtccggaattcccgggatatcgtcgaccacgcgtcgtccgtacccagtgggcagcgccgggtagctggaccaagcggccggtgagatggcctgctgtagcggtgctcagccacctgtgactgcctgccagtggggcgggccgaaacctggaggcccggggggcccagctcccgtagggagccgtgggcggctcggtgccctggtgccgggcaggcgtggtatctgtcatgttttgagggggacagtgatggttacatcaacttagtggcctatccttattgtggaaagtgagactgtggaacagtgatgacacaacagaacgggagcaacctcggcgcaaacactcccgccggagacctgcacctggtcaggcagttggcaagtgaccacaaggaggagaaagccagcctgtcccttgagacctctgagagctcacaggaggcaaacgagtccgaaggtggatgctgcacaggccactcagaaggtccctttccagatgctagatggcaacagtggcttgagttctgagaagatcagccaagaccctggagcctgcgttgtcacaagcagcagctgagccgcatgcgctccgagttccgaaggaccgaaagctctacaagtacctcctgcttgagaaacgtggtagcaccacttcaaagtacccctgagtgttggaccctgaagatgggcacgcggcagcatgggcgatgacggcgtcaggtgaagaagggcaaggccggaagatgcggaaattgcgagcagagcacatcaggccagctgggggtacagggtctgcggaatgaagggtgttacccagttggaacacaaggggacattaactctgcaggcaccaagtactatggccgtgggaccgcgattgaaggttccgaatggcctcttacagtatctgcacaagggctggacctgcaacgtgacagtatgagctatct

SEQ ID NO: 357786 - DNA, 942 bp, Homo Sapiens
aaaaagcaggctggtaccggtccggaattcccgggatcacagcacaagggggtggaggtttggccctaaagcttcaggacaccaaagaaattcagtcgaacagcccaccagttctctccatagggacctgggtcccgtgaatgctggttatctcacaccctgaggaataaagattggaatccgcactggatgctggaagttgactcggagaaaattgcgacaggagggaaatggcggctctgcaaaagttgccacactgcagaaagctggtcctgctgtgcttccttttggcgaccctgtgggaggccagggccgggcagattcgctattctgtgcgggaagagatcgacagaggctccttcgtaggcaacatcgccaaggacttgggtttggagcccctggcactggcagagcagggagtccgcatcgtctccagaggtaggtcccagctctttgctctgaacccgcgaagcagcttggtcactgcgaacaggatagaccgggaggagctctgcgctcagagcgcaccctgtctgttgaattttaacattctgctggaggataaattgactatttattcagtagaggtggaaataacagatattaacgataatgcccctcgctttggagtagaggaactggagctaaaaatcagtgaaaccactacgccaggattccggattcctcttaagaatgcgcatgatgcagacgtaggtgagaacgcccttcagaagtacgcactcaacccaaatgaccacttctccctggacgtgcgatggggagctgatgggaacaagtacccagaactggtgctggagcgctctctggaccgcgaggaagaggctgttcaccacctcgttctcgtggcttctgatgggggtgaccagtgctatctggcacctcccgcatctgcgtgaaggtcctggatgcgacgacaatgcg

SEQ ID NO: 357787 - DNA, 823 bp, Homo Sapiens
  misc_feature (769)..(769): n is a, c, g, or t
atgagttgcttaagatttacatatgagatgttagattttctggggccgccccccagcctgcacacttaaaaccaccatcaaaatacacacaaaactctactgcctaattctagcctcatcaatcagaattagtacatcacagtttaattttcatagattattaatgtagtagtttccatatggctgcttacctgctactttatttcaatcctgtcaaatatattttaagtatttaatgagccggtctaattttcaaactacaaatttaatttaaataaagctgcagggacaccaggacatgacagctttgtaaggagtcagtcatattcccaaaccatacatttcctgcatgttgactgtggaatctgaacacgtactttctctcttgtaatcatacataaactccatgaagtctttctttttgaagtttgagtctcaggaagatgagaaattacttcaagcaactgagaagtttcaagctgaatgtgccttaaagtttccaaatcgtcagtgccttacaacagtaattgatataagcggaaaaactgtttttatcacacgttatctcaaacctttaaaccctcctcaggagctccttaatgtctaccccaataatctacaggcaactgcagtaagtatttcatagtcaataagtgctgtgctaaaactgttttcacatttcaatatattgccattttaattaccatatttcatagtgcttaagatgttaactatatcgagatcattaatgacaaaagtaatgattaanacatttttattaacatgaggttttctccctttagaaaactctgaaggcagccag

SEQ ID NO: 357788 - DNA, 847 bp, Homo Sapiens
aaagccggggccatcgtggggtgggcgagtcgccctcccaggcctgggggcgcggaccagaggggacgtgtgcagacggccgcggtcagccccacctcgcccgggcggagacgcacagctggagctggagggccgtcgcccgttgggccctcagggtgcctgaacgcccaggggtcgcggcgagtccacccggagcgagtcagcagcagcccgtggagtctgaagcaatgcactgcagcaaacccaagagtggagttgtgctggctacagtggcccgaggtcccgatgcttgtcagatactcaccagagccccgcttgggccaggatcccccgcagaggacagtgctagggctgctaactgcaaatgggcagtacaggaggacctgtggccaggggatcacaagaatcaggtgttattctggatcagaaaatgccttccctccagctggaaagaaagcactccctgactgtggggtccaagagccccccaagcaagggtttgacagtctacatggatgaactagagcagggggacagagacagctgctcggtcagcagaaggggatggcatttgacggatgtgtatgaagtacacaccggcacacctcaagtcagacctgcacttcctgctggatttcaacacagtttcccctatgctggtagattcatctctcctctcccagtctgaagatatatccagtcttggcacaggatgtgatacatgttgacttgaatattgctgaagacactttatcagctaccttagggaaggctgacataaggcccagaccccaaagcacacctacattgaacgaagcagccagacatcacggaaggcattgcgcac

SEQ ID NO: 357789 - DNA, 3272 bp, Homo Sapiens
  misc_feature (200)..(265): n is a, c, g, or t
  misc_feature (1385)..(1481): n is a, c, g, or t
  misc_feature (2574)..(2574): n is a, c, g, or t
  misc_feature (2660)..(2660): n is a, c, g, or t
  misc_feature (2924)..(2924): n is a, c, g, or t
tagttagtgtgggttgtgtggggggtggtcttgttagattagtatgtgcgtacgtcggccggagagagggggtgcggagcgggatactaaggggtacgggaagtggtggatatggcggggggcacatattcatgcgttagtggttggctgtcgtgagagtcgggtgaatcggggccccaagaagagggttcagggtagcnnnnnnnnnnnnnnnnnnnnnnnnnnnnnnnnnnnnnnnnnnnnnnnnnnnnnnnnnnnnnnnnnngtttattcgcagctttgtaaggtgacgggtgctatagtaggcgagggtggtattgagaaaaaatagatgtgggatcggttgccgctggggtttagggttcacctaagggggacgtttggaaccccccgggtttccaggaagccccccgtataaggaccccagggggttctttgaaacagagggccggggcgccccgcccggcccccaggcccggagagctgccaccggacccccgtcaacgtcccaagccccagcttctgtcgcccgcgttccttcctcttcctgggccacaatcttggctttcccgggccggcttcacgcagttgcgcaggagcccgcgggggaagacctctcgtggggacctcgagcacgacgtgcgaccctaaatccccacatctcctctgccagcctcgcaggccacatgcaccgggagccgggcggggcaggcgcggcccgcaaggacccccgcgatggagacgcaacactgccgcgactgcacttggggcagccccgccgcgtcccagccgcctcccggcaggaagcgtaggtgtgtgagccgacccggagcgagccagcgccctcgggccagcgtgggcagggcgccgcagcctgcgcagccccgaggaccccgcgtcgctctcccgagccagggttctcaggagcgggccgcgcaggagacgttagagggggttgttagcggctgttgggagaacgggtcacggaaacagtcccttccaaagccggggccatcgtggggtgggcgagtccgccctcccaggccgggggcgcggaccagaggggacgtgtgcagacggccgcggtcagccccacctcgcccgggcggagacgcacagctggagctggagggccgtcgcccgttgggccctcaggggcctgaacgcccaggggtcgcggcagagtccacccggagcgagtcaggtgagcaggtcgccatggcgatgcggccccggagagcgcacgcctgccgcggtcggcatggaaacgctcccgctaggtccgggggcgccgctgattggccgattcaacagacgcgggtgggcagctcagccgcatcgctaagcccggccgcctcccaggctggaatccctcgacacttggnnnnnnnnnnnnnnnnnnnnnnnnnnnnnnnnnnnnnnnnnnnnnnnnnnnnnnnnnnnnnnnnnnnnnnnnnnnnnnnnnnnnnnnnnnnnnnnnntgccccgcccagccggccacctcttaaccgcgatcctccagtgcacttgccagttgttccggacacatagaaagataacgacgggaagagcggggcccgctttggggtccaggcaggttttggggcctcctgtctggtgggaggaggccgcagcgcagcaccctgctcgtcacttgggatggagaccggctttcccgcaatcatgtaccctggatcttttattgggggctggggagaagagtatctcagctgggaaggaccggggctcccagatttcgtcttccagcagcccgtggagtctgaagcaatgcactgcagcaaccccaagagtggagttgtgctggctacagtggcccgaggtcccgatgcttgtcagatactcaccagagccccgctgggccaggatcccccgcagaggacagtgctagggctgctaactgcaaatgggcagtacaggaggacctgtggccaggggatcacaagaatcaggtgttattctggatcagaaaatgccttccctccagctggaaagaaagcactccctgactgtggggtccaagagccccccaagcaagggtttgacatctacatggatgaactagagcagggggacagagacagctgctcggtcagagaggggatggcatttgaggatgtgtatgaagtagacaccggcacactcaagtcagacctgcacttcctgctggatttcaacacagtttcccctatgctggtagattcatctctcctctcccagtctgaagatatatccagtcttggcacagatgtgataaatgtgactgaatatgctgaagaaatttatcagtaccttagggaagctgaaataaggcacagacccaaagcacactacatgaagaagcagccagacatcacggaaggcatgcgcacgattctggtggactggctggtggaggtttggggaagaatataaacttcgagcagagaccctgtatctggctgtcaacttcctggacaggttcctttcattgtatgtcttgttctgagagggaaactgcagctcgtaggaacagcagctatgcttttggcttcgaaatatgaagagatatatccncctgaagtagacgagtttgtctatatcaccgatgatacatacacaaaacgacaactgttaaaaatggaacacttgcttctgaaagntctagcttttgatctgacagtaccaaccaccaaccagtttctccttcagtacttgaggcgacaaggagtgtgcgtcaggactgagaacctggctaagtacgtagcagagctgagtctacttgaagcagatccattcttgaaatatcttccttcactgatagctgcagcagctttttgcctggcaaactatactgtgaacaagcacttttggccagaaacccttgctgcatttacagggtattcattaagtgaaattgtcccttncctgagtgagcttcataaagcgtaccttgatatacccccatcgacctcagcaagcaattagggagaagtacaaggcttcaaagtacctgtgtgtgtccctcatggagccacctgcagttcttcttctacaataagtttctgaatggaagcacttccagaacttcacctccatatcagaagtgccaataatcgtcataggcttctgcacgttggatcaactaatgttgtttacaatatagatgacattttaaaaatgtaaatgaatttagtttcccttagactttagtagtttgtaatatagtccaacattttttaaacaataaactgcttgtcttatgacaaaaaaaa

SEQ ID NO: 357790 - DNA, 1841 bp, Homo Sapiens
ggccggagctccaagctggtttgaacaagccctgggcatgtttggcgggaagttggcttagctcggctacctgtggccccgcagttttgtagtccccgccttgtttctccccagaggcctctcaatcctccctccatgatcttcgcatagagcacagtaccccttcacacggaggacgcgatggctcccaagaaacgcccagaaacccagaagacctccgagattgtattacgccccaggaacaagaggagcaggagtcccctggagctggagcccgaggccaagaagctctgtgcgaagggctccggtcctagcagaagatgtgactcagactgcctctgggtggggctggctggcccacagatcctgccaccatgccgcagcatcgtcaggaccctccaccagcataagctgggcagagcttcctggccatctgtccagcaggggctccagcagtcctttttgcacactctggattcttaccggatattacaaaaggctgccccctttgacaggagggctacatccttggcgtggcacccaactcaccccagcaccgtggctgtgggttccaaagggggagatatcatgctctggaattttggcatcaaggacaaacccaccttcatcaaagggattggagctggagggagcatcactgggctgaagtttaaccctctcaataccaaccagttttacgcctcctcaatggagggaacaactaggctgcaagactttaaaggcaacattctacgagtttttgccagctcagacaccatcaacatctggttttgtagcctggatgtgtctgctagtagccgaatggtggtcacaggagacaacgtggggaacgtgatcctgctgaacatggacggcaaagagctttggaatctcagaatgcacaaaaagaaagtgacgcatgtggccctgaacccatgctgtgattggttcctggccacagcctccgtagatcaaacagtgaaaatttgggacctgcgccaggttagagggaaagccagcttcctctactcgctgccgcacaggcatcctgtcaacgcagcttgtttcagtcccgatggagcccggctcctgaccacggaccagaagagcgagatccgagtttactctgcttcccagtgggactgccccctgggcctgatcccgcaccctcaccgtcacttccagcacctcacacccatcaaggcagcctggcatcctcgctacaacctcattgttgtgggccgatacccagatcctaatttcaaaagttgtaccccttatgaattgaggacgatcgacgtgttcgatggaaactcagggaagatgatgtgtcagctctatgacccagaatcttctggcatcagttcgcttaatgaattcaatcccatgggggacacgcttggcctctgcaatgggttaccacattctcatctggagccaggaggaagccaggacacggaagtgagagacactaaagaaggtgtgggccagacaaggccttggagcccacacatgggatcaagtcctgcaagcagaggtggcgatttgttaaagggccaaaagtatccaaggttagggttggagcaggggtgctgggacctggggcactgtgggactgggacacttttatgttaatgctctggacttgcctccagagactgctccagagttggtgacacagctgtcccaagggcccctctgtatctagcctggaaccaaggttatcttggaactaaatgacttttctcctctcagtgggtggtagcagagggatcaagcagttatttgatttgtgctcacttttgatatggccaataaaaccataccgactgagaaaaaaa

SEQ ID NO: 357791 - DNA, 460 bp, Homo Sapiens
cggcagcgagtagaggaagctggctttccctctaacctggcgcaggtcccaaattttcactgtttgatctacggaggctgtggccaggaaccaatcacagcatgggttcagggccacatgcgtcactttctttttgtgcattctgagattccaaagctgcagagaagagctcggttcaggtggggacacagaaccgaggtgggggtgagggagggaaaggcaggacctcggagaacgcacctctttgccgtccatgttcagcaggatcacgttccccacgttgtctcctgtgaccaccattcggctactagcagacacatccaggctacaaaaccagatgctggagggagagactgtgttgtaagattcttggggacagagatagtcctatttactcactgttgccgctccggtgactaacccacagcgggcattcaataaatatttgttgaatgaatga

SEQ ID NO: 357792 - DNA, 730 bp, Homo Sapiens
  misc_feature (12)..(12): n is a, c, g, or t
aaaggccgcagnaggttgatgagacagagattaaccgtgccgaatgaaacaaggcttcctttcggggaattcagcagaaaaacctttcgtgagattggagaggaaaatatgtctgtcctgcttggcaggtcctagcagaagatgtgactcagactgcctctgggtggggctggctggcccacagatcctgccaccatgccgcagcatcgtcaggaccctccaccagcataagctgggcagagcttcctggccatctgtccagcaggggctccagcagtcctttttgcacactctggattcttaccggatattacaaaaggctgccccctttgacaggagggctacatccttgggcgtggcacccaactcaaccccagcaccgtggcttgtgggttccaaagggggagatatcatgctctggaattttggcatcaaggacaaacccaccttcatcaaagggattggagctggagggagcatcactgggctgaagtttaaccctctcaataccaaccagttttacgcctcctcaatggagggaacaactaggctgcaagactttacaaggcaacattctacgagtttttgccagctcagacaccatcacacatctggtttttgtagcctggatgtgtctgctattagccgatggtggtcccggagacaccgtggggacgtgatccgctgaacatggcggcaagagcttggatctcgaatgccaagaaatgcc

SEQ ID NO: 357793 - DNA, 935 bp, Homo Sapiens
gcctcgtgggccaggccgggaaactgccgcagggtgtagaagagtggcagcaggtcgtcatgaaagacgtgcatgaggttgtcggggttgaagcggttggcgatgagggccacgtctggcacgaacaccggcttgggcatgaagcgcagggcagcagcaggcagctccacgaagttgaagtactgagtgttgtggtcctccacggtggataggtcgagcagggctggctggaagcgccgggaccccaggttgggcagcatgacagaggtgttgccatggaagaagatgaactcctcagcctcgttggagtagcagagccacttgaagcggcagatgcggtctgtgtgcgtgcggcccgtgcacaccatgtgtgtgccgccctccatcaggatctgcagtgccttcgggtagtcgatcctcagtgctggggctggctctgtggcctgtcggctgagggccagctcctcctccagtgtggctgcaatgctcacgcagccgcacatgcttccacaggaccgctgccagcaccgacaccaggagggcgttgaacaccgccgagaggtgcatcctaatgccactgtggggccctaatgagatgacggccactggaaagcaccacaggccaggcaggcttcacccatccctatgggcatcctgagaactggtgaaagcctgaagcctggactccgcgggacgaagccacctccgccgacgcgtccaggaggccccacggcggcgccgctttcccaccccgccgccgcccccagcgccagcttctggcccaggaggcccagaaggcccaggcagccagcacaggtttggccgcgccgccgggttcgcagcgaccgccacctccaggctcgcaggtgcccgccgtgcgccggcccggcggcgcgacgcgtggtcacatatcccaaacttccgccgtacaggca

SEQ ID NO: 357794 - DNA, 1054 bp, Homo Sapiens
  misc_feature (799)..(799): n is a, c, g, or t
  misc_feature (804)..(804): n is a, c, g, or t
  misc_feature (863)..(863): n is a, c, g, or t
  misc_feature (867)..(867): n is a, c, g, or t
  misc_feature (882)..(882): n is a, c, g, or t
  misc_feature (888)..(888): n is a, c, g, or t
  misc_feature (892)..(892): n is a, c, g, or t
  misc_feature (952)..(952): n is a, c, g, or t
  misc_feature (991)..(991): n is a, c, g, or t
  misc_feature (1003)..(1003): n is a, c, g, or t
  misc_feature (1005)..(1005): n is a, c, g, or t
  misc_feature (1013)..(1013): n is a, c, g, or t
  misc_feature (1018)..(1018): n is a, c, g, or t
  misc_feature (1026)..(1026): n is a, c, g, or t
  misc_feature (1031)..(1031): n is a, c, g, or t
  misc_feature (1050)..(1050): n is a, c, g, or t
cgaagcgggaaaaaggctgggtgccgccgtcccccagctgcgcaaccctaggaactctcgggttcacagtctctctttttctaggaacttggctgtgttgtcctgcctcagagacaaattcatctattgtaggcctagcccctgcctttgaaaacaaggaaaggttggtagaacatcaacacagcatggaatttccagggaggtctcatttcaaaacttcataaagaacaagaaccacctggacttctgtgagggcgatgattaaactggcctgagtttgaatgaagggataatgtatgctcaacctgtgactaacaccaaggaggtcaagtggcagaaggtcttgtatgagcgacagccctttcctgataactatgtggaccggcgattcctggaagagctccggaaaaacatccatgctcggaaataccaatattgggctgtggtatttgagtccagtgtggtgatccagcagctgtgcagtgtttgtgtttttgtggttatctggtggtatatggatgagggtcttctggccccccattggcttttagggactggcctggcttcttcactgattgggtatgttttgtctgatctcattgatggaggtgaagggcggaagaagagtgggcagacccggtgggctgacctgaagagtgccctagtcttcattactttcacttatgggttttcaccagtgctgaagacccttacagagtctgtcagcactgacaccatctatgccatggtcagtcttcatgctgttaggccatctcatctttttgactatggtgccaangctgncattgtatccagcacactatccttgaacatggccatctttgcttctgtatgcttggcancacntcttccccggtcccntgcatncctncatcatggtgacatttgccattcagatttttgccctgtggcccatgttgcagaagaaacnaaggcatgtactccccggagctatgtgggggtaaactgntttttgcatttnancgtgggangctantgtccatngtgcngtggggcgtactcttgccntctg

SEQ ID NO: 357795 - DNA, 1501 bp, Homo Sapiens
  misc_feature (922)..(922): n is a, c, g, or t
ggctggaccggtccggattcccgggacccggaagtgcttggccacagtcgcagccccggcgccccgaagcgggaaaaaggctgggtgccgccgtcccccagctgcgcaaccctaggaactctcgggaacttggctgtgttgtcctgcctcagagacaaattcatctattgtaggcctagcccctgcctttgaaaacaaggaaaggttggtagaacatcaacacagcatggaatttccagggaggtctcatttcaaaacttcataaagaacaagaaccacctggacttctgtgagggcgatgattaaactggcctgagtttgaatgaaaggataatgtatgctcaacctgtgactaacaccaaggaggtcaagtggcagaaggtcttgtatgagcgacagccctttcctgataactatgtggaccggcgattcctggaagagctccggaaaaacatccatgctcggaaataccaatattgggctgtggtatttgagtccagtgtggtgatccagcagctgtgcagtgtttgtgtttttgtggttatctggtggtatatggatgagggtcttctggccccccattggcttttagggactggcctggcttcttcactgattgggtatgttttgtttgatctcattgatggaggtgaagggcggaagaagagtgggcagacccggtgggctgacctgaagagtgccctagtcttcattactttcacttatgggttttcaccagtgctgaagacccttacagagtctgtcagcactgacaccatctatgccatgtcagtcttcatgctgttaggccatctcatcttttttgactatggtgccaatgctgccattgtatccagcacactatccttgaacatggccatctttgcttctgtatgcttggcatcacgtctccccggtcccntgcatgcattcatcatggtgacatttgccattcagatttttgccctgtggcccatgttgcagaagaaactaaaggcatgtactccccggagctatgtgggggtcacactgctttttgcattttcagccgtgggaggcctactgtccattagtgctgtgggagccgtactctttgcccttctgctgatgtctatctcatgtctgtgtccattctacctcattcgcttgcagctttttaaagaaaacattcatgggccttgggatgaagctgaaatcaaggaagacttgtccaggttcctcagttaaattaggacatccattacattattaaagcaagctgatagattagcctcctaactagtatagaacttaaagacagagttccattctggaagcagcatgtcattgtggtaagagaatagagatcaaaaccaaaaaaaatgaaccaaaggcttgggtggtgagggtgcttatcctttctgttattttgtagatgaaaaaactttttggggacctcttgaattacatgctgtaacatatgaagtgatgtggtttctattaaaaaaataacacatccaaa

SEQ ID NO: 357796 - DNA, 1431 bp, Homo Sapiens
  misc_feature (37)..(37): n is a, c, g, or t
  misc_feature (78)..(89): n is a, c, g, or t
  misc_feature (122)..(184): n is a, c, g, or t
  misc_feature (213)..(213): n is a, c, g, or t
  misc_feature (1266)..(1280): n is a, c, g, or t
gggggggtgtggcaacctctcgtgaagagcattcgtncgttatgtgggaagactgcgggcagtgggtgggcatggtannnnnnnnnnnnaaagatgtttaaggggtggttatggtttagtgnnnnnnnnnnnnnnnnnnnnnnnnnnnnnnnnnnnnnnnnnnnnnnnnnnnnnnnnnnnnnnngtttgtatgtagttattttaatggtgtanggttgggggccaataaaatcaaactttaaattggggagccagataaatattgccttttctttccaaaattttaatttatactttttagtaaaaaacataacacatttctcattcatttaaccaattaatccaaaggaaaaaagtgaagtactataatcacaggtacactaacaaacacttttacaaagacattcagaaatatttgcagcaggttttataagactctgatataaaacaaagtaaaataaaacgttttgaaatggcaaaatcggtttacctagcctgaattgcttcaaagaggcatttgcacttcttgtcctggcttaataaaacaaagtaaaataaaacattttggaaatttcaaaatcagtttagcctaaattgcttcaaagaggcatttgcacttcttgtcctggcttaaaaacaaaccctgaaattactttcttttatccaaatcaattgaccatattaatctgcataaagtctatgaggatacgttttgataaatgctataaacacaaaattaaggcaaatctgatagttattgtcaaataaatagcacatttagaagggcctttgttaataaaatgcctctaatgtatccagaggtatagatttcaaagggcaagtctgtacctgttgcacatctgattctcacagcattcatgaaagaggagacaatgatattcccatttcactgaaaactaaggtgacttgtttaaggtcatacagtccgatcagtggcaccaacacatttaccaatggccttggaatacagagtacagggcttcctgttggtagatttaccttcctaacctcacggagatgtgatccaagtatcaaaacaagtgtgagtcccttcaggtctggaaaatactccagccataacaggtgaagaggaaagtcagctcaagatttgtcatatgctacacaatttacagtaaaacactgggaaaagcaggaagctgatgtgaggaagggtgaagaatgatttgaaagattacaaaatggcaaagttcctccaaaacctataataagctaaaacaaactggnnnnnnnnnnnnnnnggtcttaattgggaagccaatattcacaccaaaggagggagtgggaggagaagatgtaggaggaaagcaggaaattatcatcttaacagctcaaaggatttggcacatatccatgttatctaaataatcttgaaatttctttgaggtagat

SEQ ID NO: 357797 - DNA, 1794 bp, Homo Sapiens
  misc_feature (302)..(302): n is a, c, g, or t
  misc_feature (1092)..(1093): n is a, c, g, or t
  misc_feature (1096)..(1097): n is a, c, g, or t
  misc_feature (1192)..(1192): n is a, c, g, or t
  misc_feature (1250)..(1250): n is a, c, g, or t
  misc_feature (1439)..(1439): n is a, c, g, or t
  misc_feature (1452)..(1452): n is a, c, g, or t
  misc_feature (1520)..(1520): n is a, c, g, or t
  misc_feature (1564)..(1564): n is a, c, g, or t
  misc_feature (1625)..(1625): n is a, c, g, or t
  misc_feature (1629)..(1629): n is a, c, g, or t
  misc_feature (1668)..(1669): n is a, c, g, or t
  misc_feature (1680)..(1680): n is a, c, g, or t
  misc_feature (1694)..(1694): n is a, c, g, or t
  misc_feature (1698)..(1698): n is a, c, g, or t
  misc_feature (1718)..(1718): n is a, c, g, or t
  misc_feature (1740)..(1740): n is a, c, g, or t
  misc_feature (1750)..(1750): n is a, c, g, or t
  misc_feature (1752)..(1752): n is a, c, g, or t
  misc_feature (1758)..(1758): n is a, c, g, or t
  misc_feature (1761)..(1761): n is a, c, g, or t
  misc_feature (1770)..(1770): n is a, c, g, or t
  misc_feature (1775)..(1775): n is a, c, g, or t
  misc_feature (1791)..(1791): n is a, c, g, or t
tggggagcggcaggacgggcagggtccccggaggcccccgggctctgccctccagctagagaggcagccgaaccctagcggcctggaaggggccgggaaaccgcggccagctggcaaggagtggcccccgggggcggggcgccggcgggtgtgtgagtagcccgcccggcccgggtccgagttccagccccgcgatggcctccgcgggcagcaccgctcggcgggcgggctccggaagctggcactcagaaaggggagaagggagaggtgctcggccgcagccaactccaagtggctccatncagcaggcgaacaaagtctccttgaaggccacctggactgacgcggagtccaagcagcccagccccagcaaggagtccgaccagacggcaatcgaccagacggcgatcgggagctactaccagctgttcgcagcggctgtgggcaacgtggaatggctgcgattctgtctgaaccagagcctcagggaaatccccaccgacgacaagggcttcactgccatccacttcgccgcccaatggggcaagcttgcatgcctgcaggtcctggtagaggagtacaagtttcccgtggacctgctgaccaacaatagccagacacccctgcacctcgtcatccacagggacaacaccaccgtggccctcccctgcatctactacctgctggagaaaggcgcagacctcaatgcgttcttgaaggatgccatgtggaaaaaggacaagaaggactttgcccgtgagatgacgaaaatgaagatgttcaagagccagctgaccctcatggagcacaactacctgattgagtatcaaggtcaaagatgcagtgtgcactccccatttgccttttcccccatcacaccagagactctcctatggcaggacatttctctactatcagactgtggattcctttggagaagaagggaattgtctttctaaagagcacaaaattctcagagaagctgctatcagaaagtggctccacggcaagctgcacccaggccactctctgctctccaataccaagcaagcccgggccaccgccctctccaagaccccagagcaacggganncgnngcgttccaggagcttccacccctctgtggatgcacgcctgcaatgcattccacagcccacggagatgcccaagcccatctacaggaagcccacgntcaagcggccacaatgtggaatgttagcaacaaccccgccagaccccccaccacccanatcagccactcgcagggcatccgcctgggcgtgcatccagaccccactccggagcacgacttcagcagcttcctggaggtgaggcctgatgggcacggcggtgcgcggctgcacacagtggacggccactgggtggcgcccgtgccgcggctaccttttgaggtgctctgcgcatgctgtacccacgtntatggccatacanaatgaaggtgccccagggcttttaccccatcagcatgagggaagtgcccaggaagcggcacctgggtnacaacaccttctggaccgacactctggccatgaacctgcgtganacattcgatgaagccttcctggcagctgtgctatctcatcaaggactcccaaccctaccanaaancaaaaccaacccataaagttattattgctacctctcccnntgaggcagccnagtgaaggctgaantgtngcaattcacgttgtgggtgncgaggaaagggggaggggtgcntatgggcttncnactccnaanctcgaggantaccnttccaaatcaaaaccncag

SEQ ID NO: 357798 - DNA, 1625 bp, Homo Sapiens
cggtccggaattcccgggatctgagtttcccgggcagcaggactgggaggttgagtgggggttttggctcagaccgggagcagagcggcgggtggggagcggcaggcgggcagtgtccccggaggcccccgggctctgcccctccagctagagaggcagccgaaccctagcggcctggaaggggccgggaaaccgcggccagctggcaaggagtggcccccgggggcggggcgccggcgggtgtgtgagtagcccgcccggcccgggtccgagttccagccccgcgatggcctccgcgggcagcaccgctcggcgggcgggctccggaagctggcactcagaaaggggagaagggagaggtgctcggccgcagccaactccaagtggctccatgcagcaggcgaacaaagtctccttgaaggccacctggactgacgcggagtccaagcagcccagccagcccctgcccgacctcgcagaccacctcagtgcgcaggcgactgccctcgccaggccgcgccgccctgcctcgctcaccccgccccgcgctgaccccagccccagcaaggagtccgaccagacggcaatcgaccagacggcgatcgggagctactaccagctgttcgcagcggctgtgggcaacgtggaatggctgcgattctgtctgaaccagagcctcagggaaatccccaccgacgacaagggcttcactgccatccacttcgccgcccaatggggcaagcttgcatgcctgcaggtcctggtagaggagtacaagtttcccgtggacctgctgaccaacaatagccagacacccctgcacctcgtcatccacagggacaacaccaacgtggccctcccctgcatctactacctgctggagaaaggcgcagacctcaatgctcagacatgcaacggctccacagcccctgcacctggcagcccgtgacggcttgctggaactgtgtgaaggtcctggtgcagagttggcgccaaagtcgcatgcccaagatgccatgggctacaaacccattgacttctgcaaaatatggaaccaccgtgcctgtgcccggttcttgaaggatgccatgtggaaaaaggacaagaaggactttgcccgtgagatgacgaaaatgaagatgttcaagagccagctgaccctcatggagcacaactacctgattgagtatcaaggtcaaggatgcagtgtgcactttcccatttgcccttttcccccatcacaccagagactctcctatggcaggacatttctctactatcagactgtgggattcctttggagaagaagggaattgtctttctaaagagcacaaaattctcagaagaaactgctatcagaaagtggctccacgggaaagctgcaccccaggccactcctctggtctccaatacccagcaagccccgggccaacgcccctctccaaagacccccaaaacaacgggaaatcccaccggttccaggaagcttcccaccccctccgtggaatgcacccccctgcaattgccattccaaaggccccacgggaagatggcccaaagccccattcttacaaggaaagccccccgggtcaaagcgggcccccccaatggggggaatggtttat

SEQ ID NO: 357799 - DNA, 1837 bp, Homo Sapiens
  misc_feature (1094)..(1121): n is a, c, g, or t
ggacaggaggatcacctactccatgtacacggcactactgacccgggggctcctctctgggcagaggccccctccaactcaggacgacccctctaactaccttagccctctgtctgggtgccagacctgctgggtgacctgtcttcactgaccagcagccctggagccctccccagcctgttgcagcctcctggccctcttctctctggccagttggggctgcagctcctccctggggggggagctcctccacccctctcagaggcttctagtcccctagcctgcctgctacagagtctccagatccctccagagcagccagaagccccctgtctaccccccgagagccctgcctcagccctcgaaccagagcctgccaggcctcccctcagtgccttagccccaccccatggttctcccgaccccccagtccctgagctgctcactgggagggggtcagggaaacggggccggaggggaggagggggacttaggggcattaatggtgaggccaggccagcccggggccgaaagcctggcagccggcgggagcctggccgactggccctcaaatgggggacacgtggtggcttcaatggacaaatggaaaggtccccaagaagaacccaccattggcagcataatggggagctggctgaagggggtgctgagcccaaggatccaccccctcccgggccccattctgaggaccttaaggtgcccccgggagtagtcagaaagtctcgtcgtggccgtaggagaaaatacaaccctacccggaacagcaatagctcccgccaggacattaccttggaacccagccctacagcccgagcagctgtccctctgcctccccgggcccgccctggccgtcctgccaaaaacaagaggaggaaactggccccatagcagccatacctggagctggatctgaccctgattggggagagctgagtgctgagccttgggagcccctgccagccacctgcacctgtggacagtgggtgggggcactactccccactcagagcacaaatgcaactccttcccctacaatcccatcctgagccattgcagggggcagggaagttcannnnnnnnnnnnnnnnnnnnnnnnnnnngaagccatgtcactgaaaaggcctgggggggatggtatatggccctttccccaccaggcgctaaggggaacacccccttccccaggtcttttatttgtttaagttatttttgcacaaatgactcttttatatttaattcgatttcattgcctcccttcttaaagccaacaggctcagtttacaaacctgtgagctactgttggctgctgccctccttcccagtgaaaggtacaaagcaataagcatcatgcatcctccccttacccctccaacacccctctgcctctggctcaggttgctcaaagcacagatcctctcttaccccgtccccaggtttgaaacacatagcctcatttcaaggtgtagccaggttcccccgactttcctctgggatataaaaaagggggtaagggggcaaagagagccctctgggcctctcctcccatacacactacactgccccttctccccccatcaaaacgctcagagacgttgtgatgatgcgactgaggattatgcaacgtggtccaaccggagcggccagcatgaccagctgtccaggggctgcctcctgccttttcttttgtaaagacaagacccttgggagttttaattctgttttgtacttgccctgtggggcctccactgcttttctatgggagacactcttaatttaacagatgagaatattttgaaactctgaaaaaggaacaaag

SEQ ID NO: 357800 - DNA, 881 bp, Homo Sapiens
cggcagtaactataacggttctaaggtagcgaggcctgggtggcgcatgcctgctacagagtctccagcagatccctccagagcagccagaatgcccccatgtctaccccccgagagccctgccctcagccctcgaaccagagcctgccaggcctccccctcagtgccttagccccacaccatggttcgtcccgacaccacaccgagtccctgcagctgctcactgcggaggggcggtcagggaaacggggccaggaggggaggagggggacgttaggggcattcatggtgaggccagagacagaccgggaccgaaagcctggcgaaccaggcagggaaccctaggccgacatgaacctcaaaaatgggtggacacggtggctggcgttcaaactgggacaagatgcgacgcaggtcccccaacgacagaaagccaaacgacgaggcgagcatacatggggcacgacttggctggaccacgcgcggtgctcggagcagccaagcgagtcgcagcacccctacaccgggcgccccataactgacggaccgacaaagggtggccaccacggcggaggagaggtcacggaagacgactccggcgacggcggataggggcgacacactacgacacccataggccaggaagcaggcgacagaggctgccacggaccacaagcacaatcgacccgatacgggagacccgcagcagcggtacgcgagccccgaggcaaggattgtccacgtcgtagcgagaccccagggggccgcggcacgtcggccaagtccgatggccagagaaaccaacgacgtgagggacacgatcgggccgccgggagacagcccgagagccataggaggcggggagccggcaccctgacgcg

SEQ ID NO: 357801 - DNA, 1151 bp, Homo Sapiens
tcgactgcagaggaagcaggaagctgtcggcccagctctgagcccagctgctggagccccgagcagcggcatggagtccgtggccctgtacagctttcaggctacagagagcgacgagctggccttcaacaagggagacacactcaagatcctgaacatggaggatgaccagaactggtacaaggccgagctccggggtgtcgagggatttattcccaagaactacatccgcgtcaagccccatccgtggtactcgggcaggatttcccggcagctggccgaagagattctgatgaagcggaaccatctgggagccttcctgatccgggagagtgagagctccccaggggagttctctgtgtctgtgaactatggagaccaggtgcagcacttcaaggtgctgcgtgaggcctcggggaagtacttcctgtgggaggagaagttcaactccctcaacgagctggtcgacttctaccgcaccaccaccatcgccaagaagcggcagatcttcctgcgcgacgaggagcccttgctcaagtcacctggggcctgctttgcccaggcccagtttgacttctcagcccaggacccctcgcagctcagcttccgccgtggcgacatcattgaggtcctggagcgcccagacccccactggtggcggggccggtcctgcgggcgcgttggcttcttcccacggagttacgtgcagcccgtgcacctgtgagcagcccggcggccgatctggccaacgggcctttttacaggaactgagggtccagagaggacattggacacccccagctcctgtcagagtcacacgggggcttcaggggaacggcctttggaactgaaacggggggcttctaaatggccctccgggcggctcttgcccaaactggggaatggccccaactccccccccgatagggggatccccagcagggggtagcatcccgcgggccttcccccgaccgggttgtcacttcaatctaggctttaccactcttgttagcctccccgcctgcggggtgataacggaaggagacccgcgcctacccgccccccttgcgatcaggggtctcacgcagtggaacggcaagagtgagaacaaccccaccgcagctgctacgcgccaggcggcaggccacccc

SEQ ID NO: 357802 - DNA, 1524 bp, Homo Sapiens
tgtattctctgcgtagtgctttttatcgttgtgctgatgtccgtacttttagcgtgactacattgggcctgctgagcgggtcctgggttgttccgtacgtttttgctcacgtctgctgcgtcgtgtctttattgagggtgacccgctgctcgagtgttgcttttgccctgcttaacacgctagatgcagggctgagccaggattttactccgggttgtctgaccaagtcatgtgtcgtctcccatcttcaagtctaggtgctgcacagcctaggaacattccgtgtcctgccttgcgccgacttctccttctgctgtcagtcacaggttcatatgagacttataggggcctttgctgcccctctaaccaggtacgggtcctggctagacgctcttctttgtttattttctctgtgcagcagcttggttccactgcaatgaatgtaattctttgatgatagcggttgtgtcctcgtctgcgccccgtctgggctgtaagcttctggggcactcatggctgttcttgctcactcacggctccagggtccagctgggtgcctggcacacaggaggtgtgcacgatttggttcggatctgaggcagccgggaaagcaggtacaacacgctggagatggagtccgatgacgaagccaatgacttcctgccgggtgaagggcttgctgcccgactccacggacaggagcgcccgccacccggaaggcttccctaggggcagccacgggcccagcagcactcagcagcggtgtggcgcacgccatccccatgaggaacaacagcacggagttgatgggggcagacaacagagaggggcgtgtcctgaacttgtagtaaaagtacagcgatcagcatcaccaggttctgccaagacataatacacagccgtgtaggtctgcaggggcagctggtcagcaaggaaggagcccgatgaggttgcaggagtctccgccaatccagcccaggaggaaccacagggacagcgcctggtccatgttgcccgtcttgtaggctttgatgaactgggggaaggtagatgcagcaaagcagagaatggagatcaagccccaggcccacgctggcctcgtcccagccgtcctgggcacattcacccaacacatcccatatccactggatggagccactggggcagctggagaagttgcgggagcccagtttcttccagaccatggctgtggaggaggggcccccggccaggcagggctgcaccggagggagggcgctggtgttctgaggccagcaagggttcctaagcacggcgtgggaggaggcagtgtaggccctcggtccctgcagacctggggagattgtggagggaggagcgtcccagctcggggctaccacccactccaggcctcggcgtcctcggccacagctccctcctggtgactcagcccggcgcgggccgccacgtccagatccgccgccagggcccagcttctgggtcaaggcccgccgggtcagctgaccgcgcgccaccgcccccgcg

SEQ ID NO: 357803 - DNA, 1760 bp, Homo Sapiens
  misc_feature (1008)..(1008): n is a, c, g, or t
agcgggagtccccgcggagcagcggcggtcgaggtggcggggacggtgggcgtgagcccagtgaacgccggcccccaggtgctggaggctggggcggccctgaggacgcgtgcggggcaggtcacgcttgggcctggctgcctcaggagccaccctgcacggcgccgggcgaggctgtgcgcgccctcccggaccctccactttggggctttgcggtgtagcggcgcgccccactcccttacgtgttcagtcccgaatcacgtacgggccgctgcagctccaggacggcggacgccagcgctctcggatccccaggcccctccgtgctcatcccggaccgctccgtccctgaggaaaaaccgccccgtgcccggaaccgcggcttctcccacgcggggcaggccggggctgtgagggggcagcccgcctgcggactaggccgggggtttgaggaggcggctctgccggggacaaagccgggggcgtgaggggcggttctgccgggttcggggcgcgcggggcaggttgcgtgaagaggcggaaagtcccactcgccctcggcttctccctgcccggccgccggtgtcccgcccgccgcctccccgcgcagccggcccgacccgcggcgatggcccagcccggggacccgcggcgcctctgcaggctggtgcaggagggccggctgcgcgccctgaaggaggagctgcaggcggccgggggctgcccggggccggccggggataccctcctgcactgcgccgcgcgccacgggcatcgggacgtgctggcctatctggccgaggcctggggcatggacatcgaggccaccaaccgagactacaagcggcctctgcacgaggcggcctccatgggccaccgagactgcgtgcgctacctgctggcccggggggcagcggtcgactgcctgaagaagtgccgactggactcctctgatgatggcctgcacaaggaagaacctgggggtgatccaggagctggtggaacatngcaccaatccactcctgaagaacaaaaatggctagaacagtttccacattgccagtcgagaaggcgaccctctgatcctccaatacctgctcactgtttccccaggtccctggaagacagagaccaaaattagaaagactcctctccatactccaccaatgcatggccatttggaggcagtcaaggtgcttcttaagaggtgccaatatgaaccagactacagagacaactgtggcgtcaccgccttgatggacgcaatccagtgtggtcacatcgacgtcgctaggctgctcctccgatgaacatggggcttgcctttcagcagaagacagcctgggtgcccaggctctgcacagggcagctgtcacagggcaggacgaagccatccgattcttggtctctgaacttggcgtcgatgtagatgtgagagccacatcaacccacctcacagcacttcattatgcagctaaggaaggacatacaagtacaattcagactctcttatccttgggagctgacatcaattctaaagatgaaaaaaatcgatcagccctgcatctggcctgtgcaggtcagcacttggcctgtgccaagtttctcctgcagtcgggactgaaggattctgaagacatcacgggcaccctggctcagcagctcccaaggagagcagatgtccttcggggctctggccatagcgcaatgacataaggatgtttccaagaggaggcaataaagtgcatggtaattcaaaa

SEQ ID NO: 357804 - DNA, 1175 bp, Homo Sapiens
  misc_feature (5)..(5): n is a, c, g, or t
  misc_feature (25)..(25): n is a, c, g, or t
  misc_feature (32)..(32): n is a, c, g, or t
  misc_feature (43)..(43): n is a, c, g, or t
  misc_feature (61)..(61): n is a, c, g, or t
  misc_feature (68)..(68): n is a, c, g, or t
  misc_feature (84)..(88): n is a, c, g, or t
  misc_feature (90)..(90): n is a, c, g, or t
gcctnaacccgggcggcggaggttntagtganccaagatccancctgggccacagagccanactcttntctcgaggggaaaaannnnnanaattatgtaacaaggaattagcctcaaaaccacatggctttggacgtgctaattcaacttttgtacatctatttgtgagagacctcttgaaattgtttaaatggttacatcaagagtttaatattcactaaactggcatcataaaattgtatgactttctccagccttgtctgatcatgctcgttgttgcccagctcagtaataagctttgcaggatccagcctgttctgacctatccctactgagtccccatagcattttgttccctcctgtggctcttaccttgttcccccttgcagagtatgggcatggagggcttctcttcctaatccttcctaatggtaggatcctaacagcacaaacccgtctacctatctttctatcctccctgagcctgtaccaactagattcttcatatgtatttgtaacagattaaattggaaagcaaacacagtattgataagtctgtcttgaaaatagctagaaagtgttagacacatgaacacgttagataacctacttattacacaaatctcatgttccttatgtcccagttggacatatttgcttcagttactctgacagtttgggttaacttgctagttaagcagctagcaaatttgggacatgtattcaatatctcaaaagaaccaacagattacttctctgctgtgtcccctccccttcacaatttaattcctaaggaactgttcacctaatcagtacttttctatttaaaaactggctagacagttcataataaaagatatgggaccaacctaagtacccatcaaccaatgaatggataaagtgtggtatatatatcccatggaatattagccataaaaaatgtcttttgcagcaacttggatagtattggaagctattattcttagtgaagtaactcaggaatggaaaaccaaataccaaatgttcccactttaagtgggagctaagctacaggtaagcacacagagtggtataacagatactggagacccggaacagggaagggggataggataaactacatactgggtacaatatatagtactcaggtgattgtacacgcatacgtatcctgg

SEQ ID NO: 357805 - DNA, 881 bp, Homo Sapiens
gccacaatgacccactcacagtccacacccccagggtagttgttgtcgccaaactgggcgtgggactaaaggtccttggtcttcacgtctgcccgtacctggcccccgcactctgtggcgtgggaggcctggaagccctttcgctggaccgagttatctgagtagaagcgcaggaacatgcggctgcctgtggccaggacgggctcgggcttcttgctcccacagaagcggccgaggacgggggccttggcgtctcgcccgtcgaacacctctaggtggtcgtaggcacactcaggctgggactcgatgtccatctccatgaaggtcagcttgacccggtgcccgggggtgctggagatggcccacgtgcactccttcttgctgggatacttgtcaggccagttggggctggtgatggtaccactggtggatgtcaccttgtggtcacagccggcttctttgcagtcgtgcttgttgtcatggaggacgaagccactgcggcattggcactcataactgccgaacgtgttgacgcagtcctgctggcagccgccgttatccttggagcactcgtccttgtctgcaggggagcaaataagggcagacgctgggtctgtgcagggctgaggttgggatgccccaggggaagtggaggcctggctggactttctcccaccgggacagagcaacagctggcagagctggccaggccaggtggccgggagtgggaggccaggcgacaagggggtccaaaggggcactgcatccagcaggaccagctgagcagggcccagctgtggggagaggaggatgggggtccgagcggaccagcatgggtcaccattacctgcttactggacagatggacaagtggaaaaata

SEQ ID NO: 357806 - DNA, 1402 bp, Homo Sapiens
  misc_feature (824)..(824): n is a, c, g, or t
cgccccccctacctcgcccctaccaacctcccccgactctcactttcgcaggaaccggcccggaattctccggatggctgtgaccacaaggtgacatccaccagtggtaccatcaccagccccaactggcctgacaagtatcccagcaagaaggagtgcacgtgggccatctccagcacccccgggcaccgggtcaagctgaccttcatggagatggacatcgagtcccagcctgagtgtgcctacgaccacctagaggtgttcgacgggcgagacgccaaggcccccgtcctcggccgcttctgtgggagcaagaagcccgagcccgtcctggccacaggcagccgcatgttcctgcgcttctactcagataactcggtccagcgaaagggcttccaggcctcccacgccacagagtgcgggggccaggtacgggcagacgtgaagaccaaggacctttactcccacgcccagtttggcgacaacaactaccctgggggtgtggactgtgagtgggtcattgtggccgaggaaggctacggcgtggagctcgtgttccagacctttgaggtggaggaggagaccgactgcggctatgactacatggagctcttcgacggctacgacagcacagcccccaggctggggcgctactgtggctcagggcctcctgaggaggtgtactcggcgggagattctgtcctggtgaagttccactcggatgacaccatcaccaaaaaaggtttccacctgcgatacaccagcaccaagttccaggacacactccacagcaggaagtgaccactgcctgagcaggggcgggngactggagcctgctgcccttggtcgcctagactggatagtgggggtgggcggaaggcaacgcaccatccctctcccccaggccccaggacctgcagggccaatggcctggtgagactgtccacaggaggtgggggaactggactccggcataagccacttccccacaaacccccaccagcaaggggctggggccagggagcagagcttccacaagacatttcgaagtcatcattcctctcttagggggccctgcctggtggcaagagggaatgtcagcaggaccccatcgccatccctgtgtctctacacgctgtattgtgtatcaccgggggcattattttcattgtaatgttcatttcccacccctgctccagcctcgatttggttttattttgagcccccattccaccaccccagtttcctggggcacaagtgtctgtgcatgtcccccaggagccaccgtggggagccgatggggaggggatggagaaacaagacagggcttctctcaggcccagtggccggtcagccacaccagggcaccgcagccaataaaccgaaagtgttacagccaaaa

SEQ ID NO: 357807 - DNA, 832 bp, Homo Sapiens
  misc_feature (734)..(734): n is a, c, g, or t
  misc_feature (754)..(754): n is a, c, g, or t
  misc_feature (785)..(785): n is a, c, g, or t
  misc_feature (796)..(796): n is a, c, g, or t
  misc_feature (814)..(814): n is a, c, g, or t
ctgacactgagctcatgcagagagatgatggctgatgttccttctcccttgggacatgggtctggcacctgtgggctgtcgatagtgccctctgagcagagggtcacggtcatgtcagtttgggggaattctctgttgtgcctcacagactcccccctttctttcctccctccccttctcattttgatgtctaaagcatcaagtccctcttcctcggagtttctctagctgcagtggaagattctgttttcctgtggggaaaatgctcacttgagattttgcagggacccgggtctgtctggtttctgatgacatagtaagagaaaggtcttttttcaggttggctggtgaaaggaattgcatgtgactcacacaaacaggagctagcccaatcatacactgactcgcgtgggtgttaaaatgtttatcatgcctaagggagacatttatgattaaaccatttatgctacatataactggggaaaactatgatgctttcggtgctgggaatgcagtgaggtcccacgtgggcagagcttggctgggctgggcaactccgacacacgtctctgggggtgtggcggcgctctcagtcggcaccggagaagaggctgcaaggaagtcgctgtccctgtctccactggaagtgagtggtgcagcatctctttggcaggtggggggcatcagtaactggccagaaggggtcccccgtcgctgaaccccctggaatcaangggtctttggggaccttggngtcctggttttccggaatttccaaagtcccncttaagcttcntttttttaaaaaaagtcngtttatggggaaccccaa

SEQ ID NO: 357808 - DNA, 782 bp, Homo Sapiens
  misc_feature (26)..(26): n is a, c, g, or t
  misc_feature (50)..(50): n is a, c, g, or t
  misc_feature (65)..(65): n is a, c, g, or t
  misc_feature (78)..(78): n is a, c, g, or t
  misc_feature (81)..(81): n is a, c, g, or t
  misc_feature (83)..(83): n is a, c, g, or t
  misc_feature (105)..(105): n is a, c, g, or t
  misc_feature (108)..(108): n is a, c, g, or t
  misc_feature (119)..(119): n is a, c, g, or t
  misc_feature (121)..(121): n is a, c, g, or t
  misc_feature (145)..(145): n is a, c, g, or t
  misc_feature (179)..(179): n is a, c, g, or t
  misc_feature (217)..(217): n is a, c, g, or t
  misc_feature (223)..(223): n is a, c, g, or t
  misc_feature (226)..(226): n is a, c, g, or t
  misc_feature (228)..(228): n is a, c, g, or t
  misc_feature (235)..(236): n is a, c, g, or t
  misc_feature (238)..(238): n is a, c, g, or t
  misc_feature (244)..(244): n is a, c, g, or t
  misc_feature (247)..(247): n is a, c, g, or t
  misc_feature (252)..(252): n is a, c, g, or t
  misc_feature (267)..(267): n is a, c, g, or t
  misc_feature (270)..(270): n is a, c, g, or t
  misc_feature (278)..(278): n is a, c, g, or t
  misc_feature (280)..(280): n is a, c, g, or t
  misc_feature (291)..(291): n is a, c, g, or t
  misc_feature (293)..(293): n is a, c, g, or t
  misc_feature (298)..(298): n is a, c, g, or t
  misc_feature (302)..(304): n is a, c, g, or t
  misc_feature (322)..(322): n is a, c, g, or t
  misc_feature (326)..(326): n is a, c, g, or t
  misc_feature (340)..(340): n is a, c, g, or t
  misc_feature (344)..(344): n is a, c, g, or t
aagttgtgctgacaccaaacacatcnagtttataatcagtataatagaangctggtattgatgtngaaccagcgcatnacncnttatggggttttgttattggtnctnttttgaaaagngngaaaaaaaggtatgttcacccatntcccccgaacactgtgttggtaatgtgcatcatnacaattcccagtgaaggtgagccggagccggttggacnaatganacngnggaagcnncncccccnacnacccncattacgtaatcacnggnccagagancnttatggaagcngnagagnaggnnnacccacccatgtcgtatntgtnaatggaggatcccncccncccatagatgctggaactagagtgcacttgttagatgctaaaggtttgagctttacacaaaatgtcttcatctgtatttgttattgtctacaatatatttgaatttggggcagcatattaagatgtaatggcctgttatgtcttgaaaatacttgttttgcctcttccaggcatactgcattctgtggatcagtttgaacagcttctccaccttatttggacagtgataaattgaaccaagagtgtagatttacaagtgtaaccttcaaaagaggaagaactatttggggtctgtaggtaatgaacagtcacaccaaaatagactatgatgcttttgttaagaaaggtttcatgttttagatattttccgtgtcctaaataattttcaataatctataatccctaaaatgcaataaaaactagtatgttttcaaaaaa

SEQ ID NO: 357809 - DNA, 811 bp, Homo Sapiens
atgcagcaagcaagagaaatggtactagagattatccgagaaaaagaccaagctgactttcggggtgtacgcggcgatttcaactctcgaatgggaggaggcagtatagaggtatgcttaaattacaggttagtaggcaaatgagatgaggactaaagttgtaggtcacacttttgttagctctttaaccctgagcaagttagttaagttttgtctcaaaaccttaagaattctctggctccttagggtgggtgtgagggtggactggaacagcagcagcctgcagtgagggagctggctacacttcagggcgtggggccatttccctcggttttgaagctttgctttagaggttaaccagttgcccaggtaaaaaccaaagttcaggttttcttggtgatgtatatcatgattctgtcaaactcagcagcctgagtttattgatgaggttgcaatggggtcagaatctatcctagagaatgaaattttgttgtatgcgacaacatggatgacccttacaaacagtatgctcagtgcaataagacagatacagaacaaatattgtacgattcccccttatttgaggcccctagaagaggcaaatgcatacaggcagaaagtagcaaaagctgtcagatgctgggggaaggaggagtattgtttaatgggtacagagttgttggggatgatgaaatgttttggatatggatggtggtgatggttacccaacattgtgaatgtatgtaatgtcattgaattgtgtacttacaagtggttaaatgataaatattatgtatattttagccccaat

SEQ ID NO: 357810 - DNA, 1500 bp, Homo Sapiens
  misc_feature (92)..(140): n is a, c, g, or t
agcgcccacccaccgcggcacacacaccaacacggctggtaccggtccggaattcccgggatcggagcgggaggccggaccggggagccgannnnnnnnnnnnnnnnnnnnnnnnnnnnnnnnnnnnnnnnnnnnnnnnntaatggcggagctggtgcaggggcagagcgctcctgtggggatgaaggccgagggcttcgtggatgccctgcaccgggtccggcagattgctgctaaaattgattcaattcctcacttgaataattccacacctctagtggacccctcagtatatggatacggagtacaaaaacggcccttggatgatggagtaggtaaccagttaggggccttggtacatcaaaggacggtaataacggaagaattcaaagtgcctgacaaaatggttggatttattatcggcaggggaggtgagcagatttcacggattcaagcagaatctggttgcaaaattcagattgcttcagagagttctgggattccagagaggccctgtgtacttaccggaaccccagaaagtattgaacaagccaaacggctcctgggacagattgtggaccgctgtcgaaatggacctggctttcataatgacatagacagcaacagcacaatccaggagattctcattcccgcatctaaagtgggtctggtcatcggcagaggaggggaaacaatcaagcagttgcaggagcggacaggggtgaagatggtcatgatccaggatggcccattgcccacggggagcagacaaggcctcttcgtaatcactggacaatgcatttaaagtacagcaagcaagagaaatggtactagagattatccgagaaaaagaccaagctgactttcggggtgtacgcggcgatttcaactctcgaatgggaggaggcagtatagaggtatctgtgcctaggttttgctgtggggattgtaataggaagaaacggggaaatgatcaaaaagatccagaatgatgctggtgtgaggattcagtttaaaccagatgatgggattagtccagaaagagctgcccaggtcatgggccctccggatcggtgtcagcatgcagcgcatatcatcagcgagctgattcttacagcccaggaaagagacggctttggaggcctggcagcagccagaggaagaggtcgtggccgtggcgactggagcgtgggagcccctggtggcgtccaggagataacatacacggtgccagccgataagtgtggcctcgtcataggcaaagggggtgagaacatcaaaagcatcaaccagcagtcaggggcgcacgtggagcttcagaggaacccccctcccaacagcgaccccaacctgcggagattcaccatcaggggggttccccagcagatcgaggtggccaggcaggtcatagatgagaaagttggccgggaccaatctcggagcacctggagccttcggaacagagtccatttcagccagccacctgcccacctcatcaaa

SEQ ID NO: 357811 - DNA, 945 bp, Homo Sapiens
catccgaccctattccccaccgggtttctagttataggccacaatcctggagatagtggacctcacggtaacattcgaaggaacaaatgacacccgtctccatgggcttattactgctccagtctatggggaattcagagctgagaccaagtcccaatgaagtcttcagcggcctagtagtaaacacccctgcttcaccaatccacattaggtcagccatttaccagaggttctccctctggaccagcttgtccaagaatatgagttcaaccactggctcaagagaacgggaatggtcttctcaatggttcaaaattcactttatgttcaactacaggccttctgcaaactgaggatctgagccctttagggcagtgactataattcttcccggacatagaaggccaacaaggtgactgtcacacatcagcacagagcgaaagccattacatattagtagccagtgagaaacaaggttcaggaccctgtactgtagaggagagcactgtaacacgccagcaagcagagtggtggaaggggagctgggtggcatgttcatccattacagccatgggtggatctgaagtctaagtaagatggatactcactactgtactggttggcagctaggcagtaaagtaacaattcatcagataaaattttaggtggaaccacaggtttggaaagttctgggatccaatataatgtctataggagcatcaatatataacatgaaaagtcagttatcagggaaacaggtagggttccctcccctggaatactggaaagagatgtaaagaccatatcttcaagcgcccgagtgaagaccttcttctaatacaatgactcctgtggctttctgccggacccggtgcagggcatccacgaagccctcggccttcatccccacaggagcgctctgcccctgcaccagctccgccatta

SEQ ID NO: 357812 - DNA, 763 bp, Homo Sapiens
  misc_feature (484)..(516): n is a, c, g, or t
tcccgggatgtcccggggactgagtaaggtgtctggatcggagggaggttcgggtgtggcatcgggcggctggaagagctcgactcgtcccgctgggaaagcgcgagtctgagtggaaccctggacgacttgcagagcggctggcgcagtcatggcggactactggaagtcacagccaaagaaattctgtgattactgcaagtgctggatagcagacaataggcctagtgttgaatttcatgaaagaggaaagaatcataaggaaaatgtggcaaaaaggatcagtgagattaaacagaaaagcctggataaggcaaaggaagaagaaaaggcatcaaaggagtttgctgcaatggaggcagctgccctgaaagcataccaagaggatttgaaaagacttggcttagagtcagaaattttggagccaagcataacaccagtaaccagcactatcccacctacctcgacatccaatcaacagacnnnnnnnnnnnnnnnnnnnnnnnnnnnnnnnnntccttcccagggcagatgggtagaaggcataacctctgagggttaccattactattatgatcttatctcaggagcatctcagtgggagaaacctgaaggatttcaaggagacttaaaaaagacagcagtgaagaccgtttgggtagaaggtttaagtgaagatggctttacctattactataatacagtaaccagcactatcccacctacctcgacatcaaatcaacagaaagaaaagaaagaaaag

SEQ ID NO: 357813 - DNA, 2048 bp, Homo Sapiens
  misc_feature (456)..(465): n is a, c, g, or t
  misc_feature (1358)..(1394): n is a, c, g, or t
  misc_feature (1724)..(1724): n is a, c, g, or t
gggtgttcgttgtgtagtgcgcccttggttgtgtgtttaggtgtattgtgtgcgttctgtgtgtttcccggggtgtccgtgtggagagggtctgaggtccctgatgtgtggccccggtcgtctctgtgtgacttctcttccttccttcgttcatgctgttcttgggccctgtatcttgggcagtgtgaggttgccctctggcctcggttgcgccgctacctgtgcgccatccgccgcctgttgctgctactgtagtctgttggctgccgccgtccgtcctgcgcgtccgccgtccgctgcttctgcccacacgctcccgtagctatgggttctagccccatccgtagcgcgtgggctgtcgtaggggagaggaggggcgggtccgctccgctgcaacagcaaagtttgaggcgaagcctagcgactcgcagcgtccggtcccgcagtttcacctcnnnnnnnnnnaactccgccagaggaccccgacccacaggtcccggttgctccgctggtcaaagtgcgtgcggagtagttggcaaagttgagagcggagacgtctctgggaacagctgtttgcgttccgggcggaggcggcgcgctgagctccttggccttgagccagcgagcctagaaggaggatggaggttttgggccccaggggaggacacagagacggcgggatggcgcagggacttgaggcttgagatcccgtccttcagctcaggtcccgtcgcgcttttaccccttcccggtgacctcaacccctttataccgaccccacctctttggagccgggagtaccgcccctgtagggggaggggagaggaggcgatttcgaacgcggattggatcgtctgggcacccgtagttgggaacagcggaacgctggtcccggggactgagtaaggtgtctggatcggagggaggttcgggtgggcatcgggcggctggaagagctcgactcgtcccgctgggaaagcgcgagtctgagtggaaccctggacgacttgcagagcggctggcgcagtcatggcggactactggaagtcacagccaaagaaattctgtgattactgcaagtgctggatagcagacaataggcctagtgttgaatttcatgaaagaggaaagaatcataaggaaaatgtggcaaaaaggatcagtgagattaaacagaaaagcctggataaggcaaaggaagaagaaaaggcatcaaaggagtttgctgcaatggaggcagctgccctgaaagcataccaagaggatttgaaaagacttggcttagagtcagaaattttggagccaagcataacaccagtaaccagcactatcccacctacctcgacatcaaatcaacnnnnnnnnnnnnnnnnnnnnnnnnnnnnnnnnnnnnntccttcaaagggcagatgggtagaaggcataacctctgagggttaccattacctattatgatcttatctcaggagcatctcagtggggagaaccctgaaagaatctcaaggggaacttggctaagacctccccccgcaccccccgcctggcataaaaccaaccacacctaatttcatctccctcccctccttccccatcagcatgtggaaaacgatcgtatccaaatcaccgcccaaccaacaccgaacagcattcgcctcccccaactccccataaaatcttcacatacgccaattaccccgccccacccgctacgcaaatccccccancccacgcattattttatccagcgaatgtctccttagaagcataacaccccccggtaaaatcgccccgcgtaataagagctcaccctcccaaagatacaggcgcaccggtattcgaggcctcaaatatgaagataatctctccccgctcctcacccaccactcccatattattatgctgctttgcataataaccgtacccagctctcaccgcctctcaaccataaacgtcccgcctcatctgccaaagcgcccttctcatccctcctattactcccgttttgtttccattatccgctcacacgattttctctacatccctccgcc

SEQ ID NO: 357814 - DNA, 1081 bp, Homo Sapiens
  misc_feature (11)..(11): n is a, c, g, or t
  misc_feature (18)..(18): n is a, c, g, or t
  misc_feature (21)..(21): n is a, c, g, or t
  misc_feature (29)..(29): n is a, c, g, or t
  misc_feature (43)..(43): n is a, c, g, or t
  misc_feature (45)..(45): n is a, c, g, or t
  misc_feature (86)..(86): n is a, c, g, or t
acttccattgntatgcanttnacaacacnatatcaaactttcncnatctccaccaggagctcttaaggaaactgctaattaacgtnctatcttgtctccatctatgagatgagagtgcccatctgcatcatggtagtaataaacaattctgtctgcatctccatcaaaagaacagcatctttcattggacttaatttccattccctgtggaggtttctgatgacttttcacaaagtcagctccacataaatgattgagtttgcccttggacccatcattaaacagctgaactgacaggccctgtgagaagtagtgttccatttcccgtagcttcagggcccctatgccattggcacagtcaaccttaagtgatcggtaatcatcgtgccactgcaagaagcctgtttggtgagttccacaaaagccttagagagtttctggtagtaaccttctatagttgcctttgccatatcggccacccgtgtttcgacaatacaccatgtagtgcagctggggtgttgttaacaagccataatcatggaattgacctcctagaacagtcacaccatctattacagattgtgaaagtttctcactgctgggcctggtatctctaccaataactacaaaggcatcttgttgcagattcacagcttctttctcgctgatgtcaataagcactctctgcatatcttgttcctcagcatttgctaaacaggtggcatgttcctcccaggatggtgccaacatttcacccaaaggatcaaccaattttacaccattgtcttcctcaggattgtgggacgctgttaccatgactcctatagtggattttgtctgttttgacctcaggacagctaataatcccatgcgaaacatgacatgatcaagatgttctgccttcgttcgaaatccagcagtcccgtattgaaggatcagtccattcggcttggcgtgtaatgctgagtattttgtaatagcacctaaatccatgtctcggtcaggaagcccccttcacctacacgcagcggagaagcgcccaagcaacaacgtctgcacccaaacccagtccccagccgct

SEQ ID NO: 357815 - DNA, 1528 bp, Homo Sapiens
  misc_feature (605)..(613): n is a, c, g, or t
agccacaggaagctgagaaagatgcggaagattcgctccatgaatggcaagatattaatttggaggagttggaaactctggagagcaacctcttagcacagcagaattcactgaaagctcaaaaacagcagcaagaacggatcgctgctactgtcaccggacagatgttcctggaaagccaggaactcctgcgcctgttcggcattccctacatccaggctcccatggaagcagaggcgcagtgcattcctgggacctgactgatcagacttccggaaccatcactgatgacagtgatatctggctgtttggagcgcggcatgtctatagaaacttttttaataaaaacaagtttgtagaatattatcaatatgtggactttcacaatcaattgggattggaccggaataagttaataaatttggcttatttgcttggaagtgattataccgaaggaataccaactgtgggttgtgtaaccgccatggaaattctcaatgaattccctgggcatggcctggaacctctcctaaaattctcagaatggtggcatgaagctcaaaaaaatccaaagataagacctaatcctcatgacaccaaagtgnnnnnnnnnttacggacattgcaactcacccctggctttcctaacccagctgttgccgaggcctacctcaaacccgtggtggatgactcgaagggatcctttctgtgggggaaacctgatctcgacaaaattagagaattttgtcagcggtatttcggctggaacagaacgaagacagatgaatctctgtttcctgtattaaagcaactcgatgcccagcagacacagctccgaattgattccttctttagattagcacaacaggagaaagaagatgctaaacgtattaagagccagagactaaacagagctgtgacatgtatgctaaggaaagagaaagaagcagcagccagcgaaatagaagcagtttctgttgccatggagaaagaatttgagctacttgataaggcaaaacgaaaaacccagaagagaggcataacaaattccttaaaagagtcatcaagcctgaaaagaaagaggctttcagattctaaacgaaagaatacatgcggtggatttttgggggagacctgcctcctcagaatcatctgatggatcttcaagtgaacatgctgaaagttcatctttaatgaatgtacaaaggagaacagctgcgaaagagccaaaaaccagtgcttcagattcgcagaactcagtgaaggaagctcccgtgaagaatggaggtgcgaccaccagcagctctagtgatagtgatgacgatggagggaaagagaagatggtcctcgtgaccgccagatctgtgtttgggaagaaaagaaggaaactaagacgtgcgaggggaagaaaaaggaaaacctaattaaaaaatatgtatcctctataattagttatgacagccatttgtaatgaatttgtcgcaaagacgtaataaaattaactggtggcacagtctttgtaaaaaaa

SEQ ID NO: 357816 - DNA, 261 bp, Homo Sapiens
acagaggaagacttccataaatgtttgccatcattatacattgtggctaatagtactaaaattaataaaatattctatatagcatacaatttgagttagaacttgagtttacatgttctaagtttagttcttcatccatagtgtatgaactataatgtctcattgctgtgtaagtaattgtttcctttattttacagagaatggtggcatgaagcttaaaaaaatccaaagataagacctaatcctcatgacaccaaagtg

SEQ ID NO: 357817 - DNA, 1416 bp, Homo Sapiens
  misc_feature (5)..(5): n is a, c, g, or t
  misc_feature (12)..(12): n is a, c, g, or t
  misc_feature (16)..(16): n is a, c, g, or t
  misc_feature (20)..(20): n is a, c, g, or t
  misc_feature (27)..(27): n is a, c, g, or t
  misc_feature (29)..(29): n is a, c, g, or t
  misc_feature (78)..(78): n is a, c, g, or t
gcatncttcaanaatntctncgcgctngnaactcttcatatcatcaagatttcatgcttacttcaggggcaggtgctnagtcctcagactcaatatctatcgcttgaggattatgaaagaactcttcctgtaatgcttgtttttgattcattctttcttgccattctttttcatcttcctcttctgaactgtgttttcttcctcttgtaaaggaggcaaaacatagaggtcgttttctcttcgaacttgggtaagactgggtagtgcttcatctcttttgcttctgaaggcagttttgatggcttgtcttttcaaaaatgttttcagaagcttctctgtcgttttcctggagtcactggacgctaagtcctttctctgccttctcttcaccaaagtctgtttcttcaatagtggagcatccccatcaaacacaaaaataggacgaattcgaaaaaataagagtttgcagagccgatgaaacaaagtgagaagatgaggattttctattgagttcccgtggcgatcccggactcctttaagtgcttggtttaaccaaatgctaatatcaacagccaggatcttcccttccagcgcttcggggctgacctgccgcccggagcactccagcagcttccagagcccctggacccccatgaggcggctgcgtcctaagagcggaccccgacaacttctactctaattcttctacgacggactgcaccgccgcctaggaccccgggaggaagccctccctgctcctacacaacaaagatggcaaataatacagaagccacggttttccagtgggggacggcactaatgggagcgcattaaagcggagagactctggctgcaacacgtctcagcagctgtcaccgcctcccggaagaaagacaggtccagagaatggccgttggcggggaggggcagggcctcgcctcgcccagcgcttaggcccaaacgtctgcgccgctaatggaagaccggggtgcaagggccacgcaggcgacggaaacagccagaagatgtccctgcgacacctcccgccttcgctggtgggtccgcaaacccacgaacaatgggcccgctcggtttccgtctaatacgacgcgcagggcggaagctccgactccgcacatgacgtatattttctgcgcttgcagcactccggaagtgagaagtttagcgccagtggtgatgccttggttggttacttgctatccgtcacgctgggcgatctgaaggcgttaagcattaaaacaatgttgcaaaagcgccttcttggtggagtaacgggcttatgtgaaaggttgagaaagggtctcacgctgtcgccaatactgggagtccagtgggcattcttagctcacttcagcctggaacatcctggtgaccgagctccagccaactttccag

SEQ ID NO: 357818 - DNA, 1190 bp, Homo Sapiens
cagcggggtgttggactgctctgtcagcttttgctcccacatctttaaacgtctttctcgttctttaagctcctgctccttaaagctgagatcacgctctagtttctttagcctctcaagagttgcctcaatttcgcacctccactccgccttgttgtgtaggaatgagttacacttgtcaggaaggctcgtgtcatttgacatggactccaggattgaaatgatttgcttgaatgatggccgtttcttggcatcagctccccaacactgatgtaacagttcagcaaaacttctggggcaactgcttggaatggttaatctctcgtttttttccactacaagccaagctacttgtaatccttccaaacctttaaaggggacctcccttgttagcatctcccagagaaccacaccataggaatatgtgtcacaagtttctgacacagggagactctggataacttctggagccatccatgggaaagttccaaccaaggacatgtgtgttgtatggttatggaaccgagaggcaccaaagtcacagatcttcaatactccatcagcagctataacaacgtttcttgacttgaggtctctgtgaatcaccttgacaggagcctccatatgtaaataatgcattcctttggctacatcagtggcccaggtcataatgtgatccatatccatctcctcacttctgttactgttaatgtaatcatagagtgatcccagagaagcatattctgtgacaatgccatagttgggaggttcaagaattactccataaaactggatgatgtttctgtgactgaggacactgagtatttctgcctctttctctattttgaggagcttctttacagccacctccttgtcctgtgatatccatttggctcgataaacactcccaaaacttcctccaccgcagttttcaaaaaactgcaagtcatcaaatttaatttgcacaaaggaggcaccgagagacgacatctcataatgacaaagtattatacttccacaaaatctggctcccgggcggggcgtgagcagcagccgggggcgcggaggccccgcgcgcgacgagggcggcgggggttgggacgacagcggcccgcgcggctcccacgtttccgccgcagttaggagttgaacattccgcctctctgcacggcgccaatgaggaagacagt

SEQ ID NO: 357819 - DNA, 1275 bp, Homo Sapiens
  misc_feature (70)..(105): n is a, c, g, or t
  misc_feature (822)..(822): n is a, c, g, or t
  misc_feature (835)..(835): n is a, c, g, or t
  misc_feature (841)..(857): n is a, c, g, or t
  misc_feature (863)..(863): n is a, c, g, or t
  misc_feature (868)..(868): n is a, c, g, or t
  misc_feature (870)..(871): n is a, c, g, or t
  misc_feature (888)..(888): n is a, c, g, or t
  misc_feature (892)..(893): n is a, c, g, or t
  misc_feature (896)..(896): n is a, c, g, or t
  misc_feature (906)..(906): n is a, c, g, or t
  misc_feature (918)..(918): n is a, c, g, or t
  misc_feature (921)..(921): n is a, c, g, or t
  misc_feature (929)..(929): n is a, c, g, or t
  misc_feature (938)..(938): n is a, c, g, or t
  misc_feature (940)..(940): n is a, c, g, or t
  misc_feature (942)..(942): n is a, c, g, or t
  misc_feature (947)..(949): n is a, c, g, or t
  misc_feature (952)..(953): n is a, c, g, or t
ctactcatataggcatagcgttgagagcgaacgacgagcgccagcgagtcagtgagcgaggaagcggcgnnnnnnnnnnnnnnnnnnnnnnnnnnnnnnnnnnnnagtcgacggtaccggacatatgcccgggaattcggcattacggccgggtcagaaagggtcttctgccatgctgtatctttatgaaagaaatagtgttttttcttaaggtaactatcagaggtgggattatcttgcctcctcacttagaataccaacagtcaaaaggaagaaccatcctctgagttttaaaaaccagaaggttatgttaaaatctgggcatttagtgacagatcaaatgcatacttgaactaagattggcttcagcttagcagtctttcatggtggaagtgacacatctgggtgaaaataatttgtgtattttcagtaaccatgtatggcttccttctttatgtatgtgtgtgacttgttttgattggtaagttataagccagacatagatcttagctctttaataaaaacttcaggggcacgtatgtcccagtacaagtgtactgactatcaagttttaactcagatgcaagctttggctctttcacaaaaagcccttacgcatatgtgtccccacacaagtggctcatcaaaataagaacttcgtaaactcactcaaaatcagataccctctcaagagttagggaaagttgaagtgttttactgttttgtctcttgagccctttctctggggaaaaaatacatacccatctatctatctatatataaactgtgtatacattcttactgtttgaacaactattgccnttaattaaatgtntcattnnnnnnnnnnnnnnnnnaacccncatcncnncatcatagtcacccccnagannccngtagagaacnaaagcattgacnccnttagaggnaaaatgggngncnctggnnnaannccaacgaagcatacctaggggtaacagtgaacctacctgggtttgttttgttttggtaaggatttatgtagtgtctggctgtaagcaagaatgagtggattataaacttgaagatttctctgttaaagtcacaaaaatgatcgacaaacaatatttttgtgatgtttatttaaacgttgtattttataacatacttcaaggaagagtatcgaagtaagttgctttataaattaagactaaattcgtatggatgcagaattcaattaataaaatttgagcctgttacgtaaattgaatattaataaaattgaaaatttaaaaa

SEQ ID NO: 357820 - DNA, 1687 bp, Homo Sapiens
  misc_feature (127)..(145): n is a, c, g, or t
  misc_feature (154)..(404): n is a, c, g, or t
  misc_feature (431)..(431): n is a, c, g, or t
tgccattctcattattcacagctttcagaacaagtgttgctaaaactccggggcctttgacagttgttctgaggtgatttaataatggactttttataagttatgttttcctggctctaaagtaaannnnnnnnnnnnnnnnnnngagacagannnnnnnnnnnnnnnnnnnnnnnnnnnnnnnnnnnnnnnnnnnnnnnnnnnnnnnnnnnnnnnnnnnnnnnnnnnnnnnnnnnnnnnnnnnnnnnnnnnnnnnnnnnnnnnnnnnnnnnnnnnnnnnnnnnnnnnnnnnnnnnnnnnnnnnnnnnnnnnnnnnnnnnnnnnnnnnnnnnnnnnnnnnnnnnnnnnnnnnnnnnnnnnnnnnnnnnnnnnnnnnnnnnnnnnnnnnnnnnnnnnnnnnnnnngtgttgagcaaccctgcccggccagtnaaattgtatttttttaatgacatcattggatttgaagatctagatggcataaattacgacgtctgccatcgcatattagaaaggggacagtcatatttgtaacgtggagagaacacggagcaccagtcaccacgtgcacttaggatgcagagcttaccgcacaccgctgatggggacctccggaaagagcggtgccttgtggttggcctggaagttctctcccaaggtgaaattcctttaaaacctcaggctctgacctatgtctttgaagcagctgctttgtagagtccctctctttactgtcctcgttaggactgttttgtggttccatgaaaatgtttagcatccttgcagaattacttgagaaggggctggtaccagtgtaaagaatctatttcctgtaaactacgaacttttgcatagggaatttattctaagcaggtcatagccgtgatccagagctgctgctgctcactgccagtccttgcggctggcggcgattgccggacagactctctgtggcctggctctcatccttggcgtgtcagcctgcggcaggctgccagccatccatgacaatcatgtgagctcagccacagacctcagctggcggtttgatccctggcaggtccctcgagcagtactggtaagaggcttaacacattttcccactcttacagttcatttttcatagtaggaagggcccttggcctccccagtgcctcttccagagcctccaccagcactaagctcagaggaaagaagaaaagggccaggagtcagacgtcacacccgggggctcccctttcccatgtagaagtgttggcatgcgtcagtctcctttacagaggggtggatgtatccgtggaggaggggccttctctctttctaattgcactatacttgttctagcttcagtctggagatacttaagacctccatggggtcgtgatccatagacttagcaagtcttgccttatctatggagctcgatggtgagaattgtgaccattgtctgatgtccatagttccttccccctagattgtttctttccacggattgtgttcatctgaaccattttattttttatttaccaaagtactgtacttggctatttgcagtgttttcaaaaccaaatgtttctttttttgtgtttttaatcttcgatacttggtgcaatagaagctgcaaagatgtgccactttatctatgaaatggagttttgtataccaataaattctagtttaaaaacaaa

SEQ ID NO: 357821 - DNA, 438 bp, Homo Sapiens
gcggccgcgggcgactcctggtacccccgaggccccgcgaactcaccttcacaaagctgtcggcgtccgggaagcctggcagcaccatctctccgtcggatttggttgcgctggtcgccgacaggaccctgggctcccgggtaagctcctgaagaaagcgtctagctccaactgtgcttcctccctccagtaccctctgaactcctccaagcagacgttgtttcctgcagacatcgctggaaccattctggttaacacagagtgggaactcagtacacatttgtgaagtgaactcctggaagagctcttgtgagggaggcaccgaattatcaggcagctcaagagatagattcactctcctgaaattagagatgggatgcccttaatacaattcattccacccatttaagtcttcaataaaatggttcagcattatcc

SEQ ID NO: 357822 - DNA, 903 bp, Homo Sapiens
  misc_feature (718)..(718): n is a, c, g, or t
  misc_feature (799)..(799): n is a, c, g, or t
  misc_feature (812)..(812): n is a, c, g, or t
  misc_feature (846)..(846): n is a, c, g, or t
  misc_feature (871)..(871): n is a, c, g, or t
ggggagccgtgcaggctgaaaaaatggcgccacccagtacccgggagcccagggtcctgtcggcgaccagcgcaaccaaatccgacggagagatggtgctgccaggcttcccggacgccgacagctttgtgaagtttgctcttgggtccgtggtggcagtcaccaaggcatctgggggcctaccacagtttggcgatgagtatgatttttaccgaagttttcctggcttccaagcattttgcgaaacacagggagacaggttgcttcagtgcatgagcagagtaatgcagtaccatgggtgtcgcagcaacattaaggatcgaagtaaagtgactgagctggaagacaagtttgatttactagttgatgccaatgatgtaattctggagagagtgggtattttactggatgaagcctcaggtgtaaacaagaatcaacagcctgtcctccctgccggcttgcaggtccccaaaacggtagtgtccagctggaaccgtaaggcagcagaatatggcaaaaaagcaaaatctgaaactttccggctgcttcatgcaaaaaatatcatccgacctcagctcaagtttcgagagaagattgacaattccaacacaccatttcttcctaaaatcttcatcaaacccaatgctcagaaacctctccctcaagctctctcctaaggaaagggcggggaacgcaaccaggaatcgtcctggaggantttgggacgtcccccctggcactggctggattttcatcccatccaggcaggaggaacccagccaggtttggaggcaggacntgtttttgcaccntcctttatccattttggaacttaaattcattttnacccccggcaggtggcagtggtttncaaaggccacaaccccgtttttacaggccttt

SEQ ID NO: 357823 - DNA, 476 bp, Homo Sapiens
  misc_feature (21)..(21): n is a, c, g, or t
  misc_feature (44)..(44): n is a, c, g, or t
  misc_feature (60)..(60): n is a, c, g, or t
  misc_feature (82)..(82): n is a, c, g, or t
taacctgtcgtcccaaaaaancctgggtttgaacccctacccangctcattgaaatgaanggccatccagccttttcgcccngcatcttccagccaccgtaaaagtgcccctctgcccgaggagatgcctcaactacgccccgggatgacacccattacctgctatatatctatgacaaaatgaggctggagatgtgggagcgcggcaacgggcagccggtgcagctgcaggtggtgtggcaacggagcagggacatctgcctcaagaaattcatcaaacctatcttcacggatgagtcctaccttgaactctataggaagcagaagaagcaccttaacacacagcagttgacagcctttcagctgctgtttgcctggagggataaaacagctcgcagggaagatgaaagttatgggtaagggattagaggttcttttaatacttgtttccagactgaggagatctaataacaagt

SEQ ID NO: 357824 - DNA, 2800 bp, Homo Sapiens
acaagctctcgcgagacgagccgtgcaggctgaaaaaatggcgccacccagtacccgggagcccagggtcctgtcggcgaccagcgcaaccaaatccgacggagagatggtgctgccaggcttcccggacgccgacagctttgtgaagtttgctcttgggtccgtggtggcagtcaccaaggcatctgggggcctaccacagtttggcgatgagtatgatttttaccgaagttttcctggcttccaagcattttgcgaaacacagggagacaggttgcttcagtgcatgagcagagtaatgcagtaccatgggtgtcgcagcaacattaaggatcgaagtaaagtgactgagctggaagacaagtttgatttactagttgatgccaatgatgtaattctggagagagtgggtattttactggatgaagcctcaggtgtaaacaagaatcaacagcctgtcctccctgccggcttgcaggtccccaaaacggtagtgtccagctggaaccgtaaggcagcagaatatggcaaaaaagcaaaatctgaaactttccggctgcttcatgcaaaaaatatcatccgacctcagctcaagtttcgagagaagattgacaattccaacacaccatttcttcctaaaatcttcatcaaacccaatgctcagaaacctctccctcaagctctctctaaggaaaggcgggaacgcccacaggatcgtcctgaggacttggacgtccccctgcactggctgatttcatccatcagcagagaacccagcaggttgagcaagacatgtttgcacatccttatcaatatgaactaaatcactttaccccagcagatgcagtgcttcaaaagccacaaccccagttatacagacctatagaagagacaccatgccatttcatatcctccctggatgaactcgtggaactcaacgaaaagctcttgaattgtcaggaattttgcagttgacttggaacaccactcttacaggagcttcctgggactgacctgcctgatgcaaatttctactcggacggaagacttcatcattgacaccctcgagcttcgaagtgacatgtacattctcaatgagagcctcacagacccagccatcgttaaggtctttcatggtgctgattcagacatagaatggctacagaaagactttgggttgtatgtagtaaacatgtttgatactcatcaggcagcacgccttcttaacctgggcaggcactcactcgatcatctcctgaaactctactgcaacgtggactcaaacaagcaatatcagctggctgattggagaatacgccctctgcccgaggagatgctcagctacgcccgggatgacacccattacctgctatatatctatgacaaaatgaggctggagatgtgggagcgcggcaacgggcagcccgtgcagctgcaggtggtgtggcaacggagcagggacatctgcctcaagaaattcatcaaacctatcttcacggatgagtcctaccttgaactctataggaagcagaagaagcaccttaacacacagcagttgacagcctttcagctgctgtttgcctggagggataaaacagctcgcagggaagatgaaagttacggatatgtactgccaaaccacatgatgctgaaaatagctgaagaactgcctaaggaacctcagggcatcatagcttgctgcaacccagtaccgccccttgtgcggcagcagatcaacgaaatgcaccttttaatccagcaggcccgagagatgcccctgctcaagtctgaagttgcagccggagtgaagaagagcggaccgctgcccagtgctgagagattggagaatgttctctttggacctcacgactgctcccatgcccctccggatggctatccaatcatcccaaccagtggatctgtgccagttcagaagcaggcgagcctcttccctgatgaaaaagaagataacttgctgggtaccacatgcctgattgccacagctgtcatcacgttatttaatgaacctagtgctgaagacagtaaaaagggtccattgacagttgcacagaaaaaagcccagaacatcatggagtcctttgaaaatccatttaggatgtttctgccctcactgggacaccgtgctcccgtctctcaggcagcgaagttcgatccatcaaccaaaatctatgaaatcagcaaccgttggaagctggcccaggtacaagtacaaaaagactctaaagaagctgtcaagaagaaggcagctgagcaaacagctgcccgggaacaggcaaaggaggcgtgcaaagctgcagcagaacaggccatctccgtccgacagcaggtcgtgctagaaaatgctgcaaagaagagagagcgagcaacaagcgacccaaggaccacagaacagaaacaagagaagaaacgactcaaaatttccaagaagccaaaggacccagagccaccagaaaaagagtttacgccttacgactacagccagtcagacttcaaggcttttgctggaaacagcaaatccaaagtttcttctcagtttgatccaaataaacagaccccgtctggcaagaaatgcattgcagccaaaaaaattaaacagtcggtgggaaacaaaagcatgtcctttccaactggaaagtcagacagaggcttcaggtacaactggccacagagatagtcctggaagacacgtggcgcctgtggaccggaagcaccaaatgctggtgctgcttttgtacatacatatttttaaaccattaaaattcttcctgaagaaaaaaaa

SEQ ID NO: 357825 - DNA, 1695 bp, Homo Sapiens
  misc_feature (1275)..(1275): n is a, c, g, or t
  misc_feature (1660)..(1660): n is a, c, g, or t
  misc_feature (1670)..(1670): n is a, c, g, or t
  misc_feature (1672)..(1674): n is a, c, g, or t
  misc_feature (1691)..(1691): n is a, c, g, or t
  misc_feature (1693)..(1693): n is a, c, g, or t
tgccaggacaccacatgggagggggctcaggcctcagcctcaagatcttcagctgtggcctctcgggctcggcagaagggacgccggatcaggtgcctggtctccagcacctgcccgagtggccgtggccaggatggggtgcgcattccgtgtgctttgcttgtggctgtgcaggctgaggtctggagccaggcccagagctggcttcagggtggggccttgagaaggggaatgtgggacaggggcgatggtgcctggtctctgagtaagatgccaggtcccaggaactcaggcttcaggtgagaaggagcggtgtgtccaggcaccgctggccggcagccctgggctgaggcacagactcatttgtcaccttctggcggcggcagccctggccccggcctccaagcagttgaaaaagctggcgcctccttggtctctaggatccaggctccacagagcacatgactagccaggcccctggcttaagaaggtcgcctaagcctaagagaagacagtcccaggagaagctggccgggaccagccaggagctgggagccacaggaagcaaaagtcagccttttcttcaagggatttccctgtctcagagcagcctttgccccagggaaatgggctctgggctggctgcctgcaccggccatgtcgacccaggacccggacacctggtcttgggctgtgttcagccactttgccttctctggactcagtttccccgtctgagaaatgagagtcgaatgctacagtatctgcagtcgcttggatctggctgttgagttgacgggttccttgaaccccacaaaatccctctccaaccacaggaccttcggctcaccaagaacggggcccaggggagtcaggcctattcgctgcacttcctgccaaactttgcccccacaagcctggtcatcagccaggcagccctcccagtgcccaagggccaccaaccccagggaaacagggccagcacagaggggccttcctcccccacagagctcccatgacatagtctgctctgggcggaagagctttgctgccagccagggatgtccagaggtcggtgcagcccctatccctgctcaggagtgggctcaaagtctagcaaatgctaaggcccctcaagctgggctctgaacgaggacctggactcaaaaccagaaagggcagccctcagacccttctctggggctcctggaccttggtttataatttctgagcctcggtttccccatctaaggaacagatgtggtcgttccgtcntctcagctggatgagattgtcctggaggatccaccccggaacagacagaatggtgtttctcaggatggtgctctgagagagggcagagtggatgccccactgccctagaccttcggtagacgtggggtctctggggcggggtctgtggctgtgactgaaaatcggcttttcccgttgatgtcttgatgcacctatctgtgcacttaccgtaggtaaggacacgtgaccacgcacaacagacacacccacgacacctgatctcgtatcactagcttgcggcccaggtcatgatgtggccccggaagactggccctgcgtgccatgagtgcgtcggtcatggagtccggagcccctgagccggcccctggtgacgcacagcgtcacngtcaaacaanannnatactcccaccactgcngntg

SEQ ID NO: 357826 - DNA, 891 bp, Homo Sapiens
tggaaaacaaatctaggtgaaaggggaaggttacagaccagccaacttcaaagaatggctccaggttatggagatgttaggttgtctttggaggcaataccagataccgtaaaccttgaagaaccttttcatattacctgtaaaataacaaactgcagtgaaaggactatggatctggttttggaaatgtgcaataccaattccatccactggtgtggaatttcaggaagacagctgggaaagctgcatccaagttcttcgctctgtcttgcccttactctgctttcttcagtacagggactgcaaagcatctctggcttaagactaacagacacattcttaaagagaacatatgaatatgatgacatcgcacaagtctgtgtggtatcttctgccattaaagtggaaagctgaaggaaacttccaatgttaggcttttcatttagtttcacagaactgctctttttgttacctttgtaaaatgatgacgtcaacaacgaagtaaatatgttacttaaattttctttcctgtaaaatggttaaaatattaaatatttgttttgaacgagatctgattttatcttgtaatttatatttgaaatgaacatgtgtatatttgctacacctattatgtaattttcatttcatattgagatgaccactggacttatgttctccaagaagctgtgtaatcttgagaccatttgtccctaggcaagttaatctagaacacgagtcagcacacttgctatgtaaggtacaagatactaaatattttaggctttgcaggccgtaaggtttctgtcacaaatactgaactctgccatcgtacttcaagagcagccagtaggcaaaaaaagtacagtggtgtacacaaaaagaagcagttgg

SEQ ID NO: 357827 - DNA, 1590 bp, Homo Sapiens
atggcaaacacaagcacgcacacaccactgggagatcagatcttctagctggctctctgctgccacagctccgccgaagggagggggtggaagaggaggactaaactcagagctgagaggagaggcaggtgtgtgcaggtgcatcacctggatcatgaggtcacccctctgctggctcctcccacttctcatcttggcctcagtggcccaaggccagccaacaagacgaccaagacccgggactgggcccgggcgcagacccaggcccaggcccaggcccacacccagctttcctcagcctgatgaaccagcagagccaacagacctgcctcctcccctccctccaggccctccatctatcttccctgactgtccccgcgaatgctactgcccccctgatttcccatctgccctctactgtgatagccgcaacctgcgaaaggtccctgtcatcccgccccgcatccattacctctatctccagaacaacttcatcactgagctcccggtggagtccttccagaatgccacaggcctgcgatggattaacctggacaacaaccgaatccgcaagatagaccagagggtgctggagaaactgcccggcctggtgttcctctacatggagaagaaccagttggaagaggtcccctcggccctgccccggaacctggagcagctgaggctgagccagaaccacatctccagaatcccgcctggtgtcttcagcaagctggagaacctgctgctcctggatctccagcacaacaggctgagcgacggcgtcttcaagcccgacaccttccatggcctcaagaacctcatgcagctcaacctggcccacaacatcctgagaaagatgccgcccagggtccccaccgccattcaccagctctacctggacagtaacaagattgagaccatccctaacggatacttcaagagctttcccaatcttgccttcattcggcttaactacaacaagctgacagacaggggactccccaagaactcctttaatatctccaacctgcttgtgctccacctgtcccacaacaggatcagcagtgtgcccgccatcaacaacaggctggaacacctgtacctcaacaacaatagcatcgagaaaatcaacggaacccagatttgccccaacgacctagtggcgttccatgacttctcctcggacctggagaacgtgccacacctgcgctacctgcggctggatggaaactacttgaagccgcccatcccgctggacctcatgatgtgcttccgcctcctgcagtccgtggtcatctaggccctactccgccaccggatctgctctgaccgcacttgaaggctggggcccaggcacctgtgccggccattcgttttctctctctccctttctttctcccagctttgcctcccttatcccaccctcgaggcagggaaaagccatctattcttctgcagcctcaggagcgagacttcaaggactcagtttggttccacccagttgaaagacacccagtgcacacccaaactcctggccttctgtggtttccctttgctccagaaacacagatgtgtctaaagaaaaaa

SEQ ID NO: 357828 - DNA, 1026 bp, Homo Sapiens
ttcccgggatctgggagatcgatcttctagctggctctctgctgccacagctccgccgaagggagggggtggaagaggaggactaaactcagagctgagaggagaggcaggtgtgtgcaggtgcatcacctggatcatgaggtcacccctctgctggctcctcccacttctcatcttggcctcagtggcccaaggccagccaacaagacgaccaagacccgggactgggcccgggcgcagacccaggcccaggcccaggcccacacccagctttcctcagcctgatgaaccagcagagccaacagacctgcctcctcccctccctccaggccctccatctatcttccctgactgtccccgcgaatgctactgcccccctgatttcccatctgccctctactgtgatagccgcaacctgcgaaaggtccctgtcatcccgccccgcatccattacctctatctccagaacaacttcatcactgagctcccggtggagtccttccagaatgccacaggcctgcgatggattaacctggacaacaaccgaatccgcaagatagaccagagggtgctggagaaactgcccggcctggtgttcctctacatggagaagaaccagttggaagaggtcccctcggccctgccccggaacctggagcagctgaggctgagccagaaacacatctctcagaatccccgcctggtgtcttcagcaagctgggagaacctgctgcttcctggatctccagcacaacaaggctgaacgacggccgtcttcaagcccgacaaacttccatggccctcaagaaactcatgcaagctcaacctggccccacaaaattcctggaaaaaaaagcccccccaagggtcccccaccgcccattttacccgagtttttccttggaacagtaaaccaagactttgaaaaacattccctaaccgggataactttccaggaagcttttccccaaaatccttggcccttaatttcggggtttaaacttacacaaaaaaccctgaacagaa

SEQ ID NO: 357829 - DNA, 904 bp, Homo Sapiens
  misc_feature (50)..(50): n is a, c, g, or t
  misc_feature (149)..(216): n is a, c, g, or t
accgattgctgtgtcggccccagtgcggccgaagtcgcggtagagcgtancccacgcccctcccccgtccgcgccctccctctttccctggggatggagaaggcgacggttccggtggcggcggcgacggctgcagaaggagaagggannnnnnnnnnnnnnnnnnnnnnnnnnnnnnnnnnnnnnnnnnnnnnnnnnnnnnnnnnnnnnnnnnnnagcagcagagctcgctcggcctcgtctcctcgtgggatggtgcgagtctgcgacctgctcctcaagaagaagccgccgcagcagcagcaccacaaggccaagcgtaaccggacttgccgaccccccagcagcagcgaaagcagcagcgacagcgaacaacagcggcggcggtggaggcggcggtggaggcggaggtggcggcggcggcaccagcagtaacaacagcgaggaagaagaggacgacgacgacgaggaagaggaggtttctgaggtggagtctttcattttggatcaggatgatttggaaaatccaatgctggaaacagcttccaagttgctcttatcaggtactgctgatggtgcagacctcaggacagtacatccagaaacacaggctagactggaagctttactagaagctgcaggaataggaaaattgtccacggctgatggtaaagcctttgcagatcctgaagtacttcggaggttgacatcgtctgttagttgtgcgttggatgaagctgctgctgcacttacccgtatgagagctgaaagcacagcacatgcagggcagtcggacaaccgcagcttggcagaagcctcgtcagaaggagatgtaaatgctgtgcgaaagttactcattgaagggcgaagtgtaaatgaacacacagaggaaggggagagcctc

SEQ ID NO: 357830 - DNA, 2303 bp, Homo Sapiens
  misc_feature (1365)..(1365): n is a, c, g, or t
  misc_feature (1451)..(1451): n is a, c, g, or t
gagcggagtggcggcgactctgggaccacttgggtcgtggcagcagtggcggcgatgtttgtcggctcgggatgggtccaggatgttactccttcttcttttgttggggtctgggcaggggccacagcaagtcggggcgggtcaaacgttcgagtacttgaaacgggagcactcgctgtcgaagccctaccaggtgtgggcacaggcagttcctcactgtggaaatctgatgggcaatgccatggtgatgacccagtatatccgccttaccccagatatgcaaagtaaacagggtgccttatggaaccgggtgccatgtttcctgagagactgggagttgcaggtgcacttcaaaatccatggacaaggaaagaagaatctgcatggggatggcttggcaaatctggtacacaaaggatcggatgcagccagcgggtattcccctacatctcagccatggtgaacaacggctccctcagctatgatcatgagcgggatgggcggcctacagagctgggaggctgcacagccattgtccgcaatcttcattacgacaccttcctggtgattcgctacgtcaagaggcatttgacgataatgatggatattgatggcaagcatgagtggagggactgcattgaagtgcccggagtccgcctgccccgcggctactacttcggcacctcctccatcactggggatctctcagataatcatgatgtcatttccttgaagttgtttgaactgacagtggagagaaccccagaagaggaaaagctccatcgagatgtgttcttgccctcagtggacaatatgaagctgcctgagatgacagctccactgccgcccctgagtggcctggccctcttcctcatcgtctttttctccctggtgttttctgtatttgccatagtcattggtatcatactctacaacaaatggcaggaacagagccgaaagcgcttctactgagccctcctgctgccaccacttttgtgactgtcacccatgaggtatggaaggagcaggcactggcctgagcatgcagcctggagagtgttcttgtctctagcagctggttggggactatattctgtcactggagttttgaatgcagggaccccgcattcccatggttgtgcatggggacatctaactctggtctgggaagccacccaccccagggcaatgctgctgtgatgtgcctttccctgcagtccttccatgtgggagcagaggtgtgaagagaatttacgtggttgtgatgccaaaatcacagaacagaatttcatagcccaggctgccgtgttgtttgactcagaaggcccttctacttcagttttgaatccacaaagaataaaaaantggtaacaccacaggctttctgaccatccattcgttgggttttgcatttgacccaaccctctgcctacctgaggagctttctttgnaaaccaggatggaaacttcttccctgccttaccttcctttcactccattcattgtcctctctgtgtgcaacctgagctgggaaaggcatttggatgcctctctgttggggcctggggctgcagaacacacctgcgtttcactggccttcattaggtggccctagggagatggctttctgctttggatcactgttccctagcatgggtcttgggtctattggcatgtccatggccttcccaatcaagtctcttcaggccctcagtgaagtttggctaaaggttggtgtaaaaatcaagagaagcctggaagacatcatggatgccatggattagctgtgcaactgaccagctccaggtttgatcaaaccaaaagcaacatttgtcatgtggtctgaccatgtggagatgtttctggacttgctagagcctgcttagctgcatgttttgtagttacgatttttggaatcccactttgagtgctgaaagtgtaaggaagctttcttcttacaccttgggcttggatattgcccagagaagaaatttggctttccttctcttaatggacaagagacagttgctgttctcatgttccaagtctgagagcaacagaccctcatcatctgtgcctggaagagttcactgtcattgagcagcacagcctgagtgctggcctctgtcaacccttattccactgccttatttgacaaggggttacatgctgctcaccttactgccctgggattaaatcagttacaggccagagtctccttggagggcctggaactctgagtcctcctatgaacctctgtagcctaaatgaaattcttaaaatcaccgatggaaccaaaaaaa

SEQ ID NO: 357831 - DNA, 886 bp, Homo Sapiens
gcttcaaggaaatgaccatcatgatatgtctgagaagatccccagttgattggaatgaaggtcccgaaagtatgtagccgcgggggccaggcggacccccgggccacttctatgcagtcccttccactcatgctttgccatcgattatccatcattatcgtcaaatgcctcttgacgtagcgaatcaccaggaaggtgtcgtaatgaagattgcggacaatggctgtgcagcctcccagctctgtagccgcccatcccgctcatgatcatagctgagggagccgttgttcaccatggctgagatgtaggggaatacccgctggactcctggagaatatcgcctcttctgggcctcttgctgcttctcctcattggggtaggtgtctacaaatactcccagccccacaaatttgtccatgtttccaaacacaggcctggctgcatccgatcctttgtgtaccagattgccaagccatccccatgcagattcttctttccttgtccatggattttgaagtgcacctgcaactcccagtctctcaggaaacatggcacccggttccacaaggcaccctgtttactttgcatatctggggtaaggcggatatactgggtcatcaccatggcattgcccatcagattccacagtgaggaactgcctgtgcccacaccctggtagggcttcgacagcgagtgctcccgtttcaagtactcgaacgtttgacccgccccgacttgctgtggcccctgcccagaccccaacaaaagaagaaggagtaacatcctggacccatcccgagccgacaaacatcgccgccactgctgccacgacccaaggggtcccagagtcgccgccatctttcccaccaacgaccctccatccgct

SEQ ID NO: 357832 - DNA, 933 bp, Homo Sapiens
agcggagtggcggcgactctgggaccacttgggtcgtggcagcagtggcggcgatgtttgtcggctcgggatgggtccaggatgttactccttcttcttttgttggggtctgggcaggggccacagcaagtcggggcgggtcaaacgttcgagtacttgaaacgggagcactcgctgtcgaagccctaccagggtgtgggcacaggcagttcctcactgtggaatctgatgggcaatgccatggtgatgacccagtatatccgccttaccccagatatgcaaagtaaacagggtgccttatggaaccgggtgccatgtttcctgagagactgggagttgcaggtgcacttcaaaatccatggacaaggaaagaagaatctgcatggggatggcttggcaatctggtacacaaaggatcggatgcagccagcgggtattcccctacatctcagccatggtgaacaacggctccctcagctatgatcatgagcgggatgggcggcctacagagctgggaggctgcacagccattgtccgcaatcttcattacgacaccttcctggtgattcgctacgtcaagaggcatttgacgataatgatggatattgatggcaagcatgagtggagggactgcattgaagtgcccggagtccgcctgccccgcggctactacttcggcactcctccatcactgggggatctctcagataatcatgatgtcatctccttgaaggtgtttgaactgacagtggaagagaaccccagaagaggaaaagctccatcgagatgtggtcttggcccccagtggagcatatgaagctggctgagatgaacagctccctgacggccctgaagtgggctgggcctctttctccatcgcttttctcacccggggttccggatttgccgaaccctgggatactactcttcaag

SEQ ID NO: 357833 - DNA, 457 bp, Homo Sapiens
  misc_feature (414)..(414): n is a, c, g, or t
ttgatggcaagcatgagtggagggactgcattgaagtgcccggagtccgcctgccccgcggctactacttcggcacctcctccatcactggggatctctcagataatcatgatgtcatttccttgaagttgtttgaactgacagtggagagaaccccagaagaggaaaagctccatcgagatgtgttcttgccctcagtggacaatatgaagctgcctgagatgacagctccactgccgcccctgagtggcctgggcctcttcctcatcgtctttttctccctgggtgttttctgtatttgccatagtcattgggtatcatactctacaacaaatgggcagggaacagagccgaaagcgctttttacttgaggccctcctggcttgccaccactttttgtggactgttcacccntgaggtatgggaagggagcaggcattgggcttgaggcatgcag

SEQ ID NO: 357834 - DNA, 1518 bp, Homo Sapiens
  misc_feature (8)..(9): n is a, c, g, or t
  misc_feature (15)..(15): n is a, c, g, or t
  misc_feature (1021)..(1033): n is a, c, g, or t
ataaaagnntgacantcaacactaacctacctgatgcggagattttaaagatgacaaagccaccatttgtaatggagaagtggattgtaggaatagcaaaaagtcagactgtggagtgcactgtcacatatgagagtgatgttagaactccaaaaagcactaaacatgtccatttgattcagtggagtagaacaaaacctcaggatgaagtgaaagcagtccaacttgccattcagacattattcaccaattcagatggcaaccctggaagcaggtccgactcaagtgctgattgccagtggttagatactctgaggatgcggcagattgcatccaacacttctttacagcgttcccagagcaatcctattctggggtcaccgttcttctcacactttgatggccaggattcctacgctgctgctgtgagacggccccaggtgcccattaagtatcaacagattacacctgtgaaccagtccagaagctcgtctcctactcagtatggactgaccaaaaacttctcttccctacatctcaactctagggacagtggcttttccagtggcaatactgacacctcttcagagaggggtcgatactcagacagaagcaggaacaaatatggacgtggtagtatatcactcaattcttctcctagaggaagatacagtggaaagagtcagcattccactccttcaagaggaagataccctggaaagttctacagggtttctcagtcagcactcaatcctcaccagtcgcctgacttcaagagaagccccagggacctccaccaacccaacaccataccagggatgcctttgcaccctgagactgactcaagagccagtgaagaggacagcaaagtcagcgaagggggctggacaaaagtggaataccggaaaaagccccacaggccatctcccgccaaaaccaataaagagagagccagaggggaccaccgtggatggagaaactttttgatgaattgaactacatagcttttctaagcaggttnnnnnnnnnnnnngaaagaaatgtaatggtttttgataatatgatcccttcagattgaattaacgaaaagacaacacttccactttttggattgggaaataccctttctaattgagactatagccaaaccaaggcccaaaattattggaaatttggtcacccagtgatcataactaggcttggaaaatccctacacattttttttctgccctgagttgaaccttttctaaaggaaagggttatggccactcttttttacccttaaccactgtatatttcctgggttaagcaaggggccggggaacaaagggtaaaagaaaaattgagggtctcagcgtaagaggttcccattttttttccggacacacataaggtaggaattgtctaactggattttttcccccttttaggagtgaaggcccgttcaaatatggggcctggagacaaagggtcaccgtgtttacatagaactctctgtcccctttcgaaatgtttatg

SEQ ID NO: 357835 - DNA, 723 bp, Homo Sapiens
  misc_feature (718)..(718): n is a, c, g, or t
ataaaagaaacacacttgtggggatattgttttaaggtgtattaattactcagtgatgataccactcaatagggcatgccactacttttcttaagatgctaattatgaagcagtgctcacaggcatgttttaactagcaaattagtagatggacttttggggtctgtcactttttaaaagtatttaagacttaaattctattagcaccacagtctgccttcagtaatacacctaaaatatttttcaggaccagaagcattcagtttgaaaatttgcagatgcaaaccagtattattactaacgctctgggtcaaagattaggtttttaatattaacagtagtctggtaaatatttagaagtctggcattgagaaacaaaagcttgtacctgactagtatttttatttaaaaaaattagttctgttagcttatttaaattgtgttttatttatccgtagaatttatatttatttcattcctttcatctcactgaaaactgtctgcaggccctttgatttggattagatgtgtgaagtactgtcttttgccaaaaacctcaaattacctgttcttttcaacgtagtgggtttgtgcttgtttggagatcagttcaaaaactatctgtactatctgtactgcctctgatgttaagattttatgtatagcataaggaagctagctctgactatattttcctaagaataaagacctatttttntagca

SEQ ID NO: 357836 - DNA, 1378 bp, Homo Sapiens
  misc_feature (1111)..(1111): n is a, c, g, or t
  misc_feature (1235)..(1235): n is a, c, g, or t
  misc_feature (1245)..(1245): n is a, c, g, or t
  misc_feature (1251)..(1251): n is a, c, g, or t
  misc_feature (1281)..(1284): n is a, c, g, or t
  misc_feature (1286)..(1286): n is a, c, g, or t
  misc_feature (1315)..(1315): n is a, c, g, or t
  misc_feature (1319)..(1320): n is a, c, g, or t
  misc_feature (1322)..(1322): n is a, c, g, or t
  misc_feature (1326)..(1327): n is a, c, g, or t
  misc_feature (1333)..(1333): n is a, c, g, or t
  misc_feature (1347)..(1347): n is a, c, g, or t
  misc_feature (1355)..(1355): n is a, c, g, or t
  misc_feature (1374)..(1374): n is a, c, g, or t
  misc_feature (1376)..(1376): n is a, c, g, or t
gatggggccacttcgcggggcagagggtccccctttgcccctccacactgcctcgcgcctttcacgcagagttctagaaggaggttctcaggggttcaggaatccgtgcatgtggccagggcggggccgtggacagggaggtgacaagtcttggagcccacagtctccttcactgcacgtgtgtcttcctcccccacagcctgccgccatccagtccccaccccgcggagagcagggcctcgcggccacaccaggcccaggctctgcccgggacgccccctcccaggggtcaggcttggctctgggagaccccagcttcccaggctccggtggggagtggggccaggcgagggtgccctgacgagggtgggcgcggagggagcagccgctgccacagtcggagcagaggaggtcttggcagaggtccgcggggaggagacggctctcctggcctgttttcctccaacactgtcgccgctggctttttgggtacaggcccgtctggccattactgctgtggcgccggagggtcttgctcagagatgcccagagagcagccctatggcccatccgtcctcgctgggggctgccaccccgtcgcccttttgtccagcgtctgcagctgggagcgacacgcagtaattgacgggccgtggctttgacgccacgtgtgtaaataggctgtggctacggtgggtgggtcggagcccaggaggcagctggggggacctggctatggcctttcctgctgtaaggtggctgcaaggcttccattgtgtggttatgtgggtccttgaatgattttggggaggtttccagctcagaatgatgcagaaatgataagactcaaagcaggggccaggccaggccagtgccttcgcctctcccggctgctggtgggcacggaggaaccagggcacatctgtggtacccagggacgtcccttgtcagcccgtttgccacacattgttcctcttgtccaggggagggtggaggagctgcttcccaggactggaggagcagctgggcccctgctgcacgtccggtgggacacacctgtgagccctccagagggagagtgcaggccccttctgagcctggtgttgcaggntccgctctctcccggaagccagggcacccagggcggaggctcctcaggccggggaggcggggagggtgccctgcatggaagaagaagaacagacacaggcgctccccgccttacatacatagangctcaccccncccagnccctgatacatacacactggagaacccccnnnnantagcacacaccctgacaacatcatatatnatannanagtnnctgagnaagaactaatagantaaaactnaaagacactccaccaactntntt

SEQ ID NO: 357837 - DNA, 1775 bp, Homo Sapiens
  misc_feature (60)..(74): n is a, c, g, or t
  misc_feature (90)..(279): n is a, c, g, or t
  misc_feature (1367)..(1377): n is a, c, g, or t
ggccactgtgcatatgcaaaatgggtattacataactgtatcatatttggtattgataannnnnnnnnnnnnnngagacggagtcttgcnnnnnnnnnnnnnnnnnnnnnnnnnnnnnnnnnnnnnnnnnnnnnnnnnnnnnnnnnnnnnnnnnnnnnnnnnnnnnnnnnnnnnnnnnnnnnnnnnnnnnnnnnnnnnnnnnnnnnnnnnnnnnnnnnnnnnnnnnnnnnnnnnnnnnnnnnnnnnnnnnnnnnnnnnnnnnnnnnnnnnnnnnnnnnntcatgtatttttttgtagtgctgggattacaggcatgagccactgtgcccagcctggtattgataatttatattcagataatttgttatggctctttaatatcccacaaggggctctaaaaagcaaacattcaagagtatgtagtttttagacattaagttaattattttaaacagtgacagcaaaacacaagtgattaaatatagtttatttgttccaatgactaaattttacctcatttattaatctggtcattaaggaatatatttaataatattatgtaattattctttttatgcatgatacacctagaaaaatgccttttgtttctattgatggctttgttgtttggagctacttttgattacttattgcagtttcccaatttagtctttactttatctaactcacaaagtaaaattaactgatcacatggcaactactgtatttaaatagttctggaaaaatgaaagtgctttttgctgcttggtaaatgggtaatgcccttgattccttgactgtaggacatagctgatctaaagtactctgtcagttttaccttcacccatgactgtcattagttgtcaaagttgaaaagtactttagctgtgagaaatccttgtatgtttttattataagaggtataatcatcctcaaagcctgtttttattacatgatgtggactgattattttttctatcacagtgttaacagatggattttattgtaaatacaaagaaaacatattgattattgtagtattcttatgtcacctggccttttgcgtgagattatttattatttctagcaaggctttcttcctttcttattgcccagagactgactgatacatcttttgttatttttacacataaattaaacatagcctttttggacaaattcactaaatattaatgtataaaatgtaattgagtaaatttttatcagaattttaaaaataaaagagcttagactcagtagaactcagtagaagcttcactatttactccagcgtgtgtaaattgtacttactctattctcagagtatatttactgtccttaccattgattctttcccctttgctaannnnnnnnnnngttaatggtagctgcgactttaggtggggtatattttcttctcctaagagaatagacagtttttccagattcatcatcattgactgtcaagaaaggacccttcagcaaggctgtaccctcaatgcagttgatggcctgtcttcacggatttacagacttggcctgatgcccatgtaaattcaagctttggcttgtggtaacaaccacaagaagacaagcatctgtggtgcggaggcaagcaggctaactaggagttgacaagctaagaaagtgaaactgttctttcttagttaactgtctttctctggagctctgttattttgagtataatatttccacgacacttagtaaatgcaagctaaaatgtaataataataaattgtattggagaaacctaa

SEQ ID NO: 357838 - DNA, 412 bp, Homo Sapiens
  misc_feature (22)..(22): n is a, c, g, or t
  misc_feature (33)..(33): n is a, c, g, or t
  misc_feature (156)..(156): n is a, c, g, or t
  misc_feature (195)..(195): n is a, c, g, or t
agccggcgactttaggtggggnaaaatttcccntcccccctaagagaatagacagtttttcccagattccatcatccattgactgtcaagaaaggacccttcagcaaggctgtaccctcaaatgcagttgatggccctgtcttcacggattttacnagaccttggcctgatgccccatgtaaattccaagctttnggcttgtggtaacaaccacaagaagacaagcatctgtggtgcggaggctaagcaggctaactaggagttgacaagctaagaaagtgaaactgttctttcttagttaactgtctttctctggagctctgttattttgagtataatatttccacgacacttagtaaatgcaagctaaaatgtaataataataaattgtattggagaaacctaaaaaaaa

SEQ ID NO: 357839 - DNA, 796 bp, Homo Sapiens
agcgggaaacgtacctaagtattatggacagccggagtattttacagtggttgctgctcaggaaatttcgagtgaatggactgcaaagagaggagcaaagcagacccgagagagaaggcagcaggtgctcccctgtgacgtgctccatcaccgggcagggaagacaccgctgccaccgtctccacaggcttgttcaagagcactggaaattgatggtacaaaacagaagagggaacggaaaaagacagtctcattcagcagcatgccaacagagaagaagatcagcagtgcaagtgactgtattaattcaagtggttgaaggttcagaactcaaaaaggttcgctccaactctagaatttatcataggtactttctactggatgctgacatgcagagcctaaggtgggagccatctaagaaggattctgagaaagccaagattgacattaaatccatcaaggaagtgagaacaggaaaaaacacagacatattccgcagcaatggcatttctgaccagatatctgaagattgtgcgttttccgtcatatatggagagaattatgagtcactggatttggttgccaactccgcagatgttgcaaaccatctggggttacaggactgcggtacctaatttcttatggaaaacatacacttgatatgttagaaagtagccaagataacatgaggacttcttgggtttcacaaatgtttagtgaaattgatgtagataaccttggacatataactctgtgtaatgctgtgcaatgtatcagaaacctcaatcctggttta

SEQ ID NO: 357840 - DNA, 910 bp, Homo Sapiens
tcaggtggaaacagcactgagagctgctggagaaccagttcaagaacggacctgctgagaatgttcaaaggctcagcgactccatttagcaagcccacactcaggcctgtgtggggcctggttggtcccagagcaggcagtacccctactccgtttcgcagtcctgaccctgctgtaggtctctccagggtgcatattactgcctgatgctctatcaggaatttatttagatactgctactgcccactacacagagagcaggcctggaccccgtcagctgagcagtggggtgcagcacaatggtgccgcaggaggaactccgtatctgtgggatgaaacaaaatgaatgcatccccagaccctgccctcaaggatctaggagcttggagttctgtttggtggaggaaaaaaaactatgtgaagaggttctacgcacagcaatgtgatcgtgctctgatgcgggaatacggaggccagggcagcccacctgaggcacttaagtgagggttgggatggggacggtggtggtcagaagtttcccaaaataagaaacacttatgctaaacctggaaggacaagtggaggatagcctgacaaacagtaatggggaggggagaaggcaagaagcctcccagacaaaaggagcagcacctacaaaggccagagctaatgaagccgcagagcaccctgggagctgcgaggagctggattggctggagggtgcaaagggaagcaggagctggagtggagcactgggcagggccttaggtaggggcgggactgaaggagtcctccaggcagagatcccgggtgggaagtccccagggccagggctctcctcacagagcaccccagcaatcccacctgaggctccagcagtagccacagggatcctcaagaacagcacacg

SEQ ID NO: 357841 - DNA, 1360 bp, Homo Sapiens
  misc_feature (256)..(256): n is a, c, g, or t
  misc_feature (319)..(319): n is a, c, g, or t
  misc_feature (326)..(326): n is a, c, g, or t
  misc_feature (401)..(481): n is a, c, g, or t
  misc_feature (509)..(509): n is a, c, g, or t
accgcgtcctgcctgctcttcctgtttctttcccaagggtcacactcagtagggagatgaaggtggaaacatccttgctgtggctttctggcctcagagcaggttttagaggaaggggccacaggctgcctagtgcatcctggctgtgggcagcccctttcctggagccctcctgcctaccccgtacctcccatctggctgcacagctccatccttagccacgcaaggggagaacatgggcagagtctccatccancagctgggggttctggtggcactccctgtgcccctgctgctgctgggctgtgggtctgccctncacccangagccccacggtccatcccccacaccatgcccagcaccagggaggttgggcagacaagacctgggccatgccagnnnnnnnnnnnnnnnnnnnnnnnnnnnnnnnnnnnnnnnnnnnnnnnnnnnnnnnnnnnnnnnnnnnnnnnnnnnnnnnnngcatggaggagcactctgtcccaccaanggacaactagaaaccaaagccatctgacagccagtgcggtaagggcgggggatgtgtgtgtgaggtgtgcacaccccccgagaacctggccctgaactggcctcacaggacaggaggcagccccttgtagagctagggcgcagccccatcagtctcaaaggttaagccaccagtcaccaccgaggcacccttaaggcctggtggccactgtccactattacgtagacagaccccaccctcaacccaggccagctgtgggccagtcccgccctgcaatctggtctgctgccttcctcttccatgttggtccccttggccactgtctctgggcatgcaagccagtgtcctggttcagtgcctcggccagagctggggcaggagaggggcctctgggtgagagctgggggtgtctctgcagggtactggcagccttgccacactgtcctcattcccagatggaaagacctgagtgcctctcgccttcctccgggaatgaattcctcatgaaaatgaccaggccacttcttccgagggccaggccgccccctccccgagacctgtcctgccgtccgcgggtgtgtggcctgtaggggactgagagctgggcttgctgggcacctctggaatctgaccctgtgggccaaagaagcaccactgtagtttctgcagacccccatgcggttcattgtgcattgtttggtttctaggatgtatgtgttgctagttttttttaatgaaaccctggattaatgtaaatagctttttggggaacggattctaatgtcacgtatgtgaccgtgtggactatttcaaggtgctgatgcaacactaataaacctggaggggccggc

SEQ ID NO: 357842 - DNA, 1515 bp, Homo Sapiens
tgatttaaaagtttgtgttatcaggtatcttatttgaacatggtcatttttggccacattgctgtttcatactaggacttgggatgatgtagccagaataaaactcaagttgcaccctcctgttggtggaagattgctgaccgtgccgtttctgggcaggagaagacatcatggtgtccagcaactcagcaaagccattcttaagagtcgtgaggtccttctgaatgtaaaactggagcccaggagaagctgtcccaggagggctgttaactccctatagagccaggagacaggataggggtttctagggtccaacaccagcttaccttggagtatgaatctacccatgaaggatgagagatgttttgaaaaactagccaggacacacccacaggatcctactggctccttagcagctgattggtgttacataattaacttaattggagatgcattaggtcacttgaatgtataagcaagcacctatggtaggcgctacagacatttaaatctcttgggaattcgatgctcccatggaatttataccagttatatgaattgacttaagtatcttgaaaaagaaactttagagaaagcatcaggggtgtgtactcagtatttcaaatcagaacacaagattggaacttttggaaaaatgggttcaagctttcctattagccatggaaatgcaaagtttagcagaagcaagcaattaggcagagaacaaaaatgttaagcatggtgttgtctatcttattgaagtggttggaaatgaaagcttttaatttgatagatttatcagtataaaattagggaaaccacgtgtggggaatgaatcaatttagagcttcgggaattgtgaggtgacttttgtaacttttgttctgtgtgtgacctgtgaaccactaggatgtgatctgcccttgtgggcaggtccagcatagttaggagttaggctttagcataaatttctagctgcatctgagtctcctgggatgggtgctctttggctggttttggctgcggatggtgagatcagagcagctcttcctgctgctggcccctgcaatcagttgttgggatgccagtgcagatcactaagtagtaagattttaatcaaacacgaccaggtccgaaatgcaggtcatgagtgtgaaattctcaaatttacataaaaagtagaagtatagacagtttaacatttggtattaaaggagaggaaattgtagcagcttttcacgtttcccagtccccattagagggcttgagaccttgtacctgaacaacccattttgcactcagtgctttctgatgccttaggagaattgttttgtttcacaaaagctgggaaggaagaagtccattctgcagctgttagatctgcctctcaggaaaaagtactaacttgttctttttgttcctggctttcatcagtttgtgagatttctctattttttttaaatataattttatttctttcaaaaaatataaaataaaaaacaactttggaacaat

SEQ ID NO: 357843 - DNA, 1173 bp, Homo Sapiens
  misc_feature (1032)..(1032): n is a, c, g, or t
  misc_feature (1036)..(1036): n is a, c, g, or t
  misc_feature (1038)..(1058): n is a, c, g, or t
ggccccggcgagcaggggaagccggtggccgcggctgcggaacgggcggaggctgccggtttcgtaaccgtcgctcctcctcgctgactcgcgggctgtgaggcctgggtcggctcgggccgcaccgcgcggggccgctcggagtggaggccgcctgggggcaggcgggctagaggagcaggtacatgtgaagattttttggcagcttagcgtggaaaccattgatcaccctgctctcatttctacctgttctgtgttggcaagggagagtgcccaaatgagcaagatatcgcagcaaaacagcactccaggggtgaacggaattagtgttatccatacccaggcacatgccagcggcttacagcaggttcctcagctggtgcctgctggccctgggggaggaggcaaagctgtggctcccagcaagcagagcaaaaagagttcgcccatggatcgaaacagtgacgagtatcggcaacgccgagagaggaacaacatggctgtgaaaaagagccggttgaaaagcaagcagaaagcacaagacacactgcagagagtcaatcagctcaaagaagagaatgaacggttggaagcaaaaatcaaattgctgaccaaggaattaagtgtactcaaagatttgtttcttgagcatgcacacaaccttgcagacaacgtacagtccattagcactgaaaatacgacagcagatggcgacaatgcaggacagtagacctcaccctttccagactttagagcttgtggcttgaatgttaaaggtgtgaccaccgacaccactcatgtcaatggctgaaaagttgtccatttccatgactcaaagacccattggaggctattttctgggatcagcactgaagagttgattagctaaaaaatgttagccttgtaattcgaatatctggttttaaatgatagaggtttttgtgggaatcaaaatcccccaaatgttaaggtatatggtaaaaaaagaaatatctgggatcccgatgttcttaataaatcctgacttcccantaanannnnnnnnnnnnnnnnnnnnnaaaaacatgtcgggccgcctcggcccctccaagaaactttctaggaccatttcgttttggccgccgcggggccccggtagggtaaagtgaaacctgggcgcaataagctggcttt

SEQ ID NO: 357844 - DNA, 579 bp, Homo Sapiens
cagcaaatcagtttattgaccagctcacaagtgttatttttttcaaaagttaacttctcttggtgttcactttaacttttggtgattcatacaagttttctaaaaagcacatgtctcttagatctttagtttcctctctatataaatgtcattccctgcccctacacaccagggacatgcacagacacatgcacacaacatatataagtcttactggatttttgtgaaattaacaatattcatgtagtgcatccaccttggtctctggcacatagtagccatctcaaatgcttgttagggagattcaggcatatacaagttaatattataaagtcaatatgtctaagaaaaaataaaatttaaataagcaatttaaaatttggagccaagtataagaataaacagctaaaagccataagtagccgtgaatggtggtaggagactattttccattatgagcctttgggttatttaaagaagaacatgtgcatactttcattaaaagttttttaacttatttaagctgaactggtgatatctattataagcagaagtagtctttcttggtaaataatccag

SEQ ID NO: 357845 - DNA, 1143 bp, Homo Sapiens
agcggagtcgagtcctgcccggctagaagccggctgtcggtctccgtgtcgccgccgccgcccggcatcgtggagctggggcccccttttgcctgggagttttgtagtcgcctagggtcagcggtgacatcccaaagggcaggcccggcagccgccatggtggccaaggattaccccttctacctcacggtcaagagagcgaactgcagcctggagctacccccggccagcggtccggccaaggacgctgaggagcctagtaataaacgggtcaaacccctttcccgagtcacgtcgctagcaaacctcatcccgcccgtgaaggccacgccattaaagcgcttcagtcaaaccctgcagcgctccattagcttccgcagtgagagccgccctgacatcctcgccccccgaccctggtccagaaatgccgccccctcgagcacgaaacggagagatagcaagctgtggagtgagaccttcgatgtgtgcgtcaatcagatgcttacatccaaggaaatcaaacgtcaggaggcgatctttgagctttcccaaggagaagaagacttgatagaagacttgaaattagcaaaaaaggcctatcatgaccccatgctgaaactctccataatgacagaacaagagttgaatcaaatttttggaacactggactctctaattcctctacatgaagagctccttagtcagcttcgagatgttaggaagcctgatggctcgactgaacatgttggtcccatcctcgtgggctggctcccttgcctcagctcctatgatagctactgcagcaatcaagtagccgccaaagctctgctggaccacaaaaagcaagatcaccgagtccaggatttcctacagcgatgtttagaatccccctttagccgcaaactagatctctggaatttcctcgatattccaagaagccgcctggtaaaataccctctgcttctccgagaaatcttgaggcacacaccaaatgataatccagatcagcagcacttggaagaagctataaatatcattcagggaattgtggcagaaatcaacaccaagactggtgaatctgaatgccgctattataaagagcggcttctttacttggaagaaggccagaaagactccctgtga

SEQ ID NO: 357846 - DNA, 1798 bp, Homo Sapiens
  misc_feature (1204)..(1211): n is a, c, g, or t
tctctccctgtgtcgcttaaacaacagtcctaacttttgtgtgttgcaaatataaaaggcaagccatgtgacagagggacagaagaacaaaagcatttggaagtaacaggacctctttctagctctcagaaaagtctgagaagaaaggagccctgcgttcccctaagctgtgcagcagatactgtgatgatggattgcaagtgcaaagagtaagacaaaactccagcacataaaggacaatgacaaccagaaagcttcagcccgatcctgccctttccttgaacgggactggatcctaggaggtgaagccatttccaattttttgtcctctgcctccctctgctgttcttctagagaagtttttccttacaacaatgagaaaacatgtactagctgcatccttttctatgctctccctgctggtgataatgggagatacagacagtaaaacggacagctcattcataatggactcggaccctcgacgctgcatgaggcaccactatgtggattctatcagtcacccattgtacaagtgtagctcaaagatggtgctcctggccaggtgcgaggggcactgcagccaggcgtcacgctccgagcctttggtgtcgttcagcactgtcctcaagcaacccttccgttcctcctgtcactgctgccggccccagacttccaagctgaaggcactgcggctgcgatgctcagggggcatgcgactcactgccacctaccggtacatcctctcctgtcactgcgaggaatgcaattcctgaggcccgctgctgtgtgtggcttctggatgggacaactgtagaggcagttcgaccagccagggaaagactggcaagaaaagagttaaggcaaaaaaggatgcaacaattctcccgggactctgcatattctagtaataaagactctacatgcttgttgacagagagagatactctgggaacttctttgcagttcccatctcctttctctggtacaatttcttttggttcattttcagattcaggcattttcccccttggctctcaatgctgtttgggtttccaacaattcagcattagtgggaaaaagtgggccctcatacacaagcgtgtcaggctgtcagtgtttggtgcacgctggggaagaactttactttggaaagtagaaaagcccagctttccctgggacatcttctgttattgttgatgannnnnnnnaccttgtcattttggtctaaggttgccattgctgctaaaggttaccgatttcaaagtccagataccaagcatgtggatatgtttagctacgtttactcacagccagcgaactgacattaaaataactaacaaacagattcttttatgtgatgctggaactcttgacagctataattattattcagaaatgactttttgaaagtaaaagcagcataaagaatttgtcacaggaaggctgtctcagataaattatggtaaaattttgtaagggagcagacttttaaagacttgcacaaatacggatcctgcactgactctggaaaaggcatatatgtactagtggcatggagaatgcaccatactcatgcatgcaaattagacaaccaagtatgaatctatttgtgggtgtgctatagctttagccgtgtcacgggcatcattctctaatatccacttgtccatgtgaaacatgttgccaaaatggtggcctggcttgtcttctgaacgtttggttcaaatgtgttttggtcctggaggctcaaattttgagttattcccacgttttgaaataaaaagagtatattcaa

SEQ ID NO: 357847 - DNA, 1020 bp, Homo Sapiens
  misc_feature (900)..(900): n is a, c, g, or t
  misc_feature (918)..(919): n is a, c, g, or t
  misc_feature (921)..(921): n is a, c, g, or t
  misc_feature (980)..(980): n is a, c, g, or t
  misc_feature (985)..(986): n is a, c, g, or t
  misc_feature (995)..(997): n is a, c, g, or t
  misc_feature (999)..(999): n is a, c, g, or t
  misc_feature (1010)..(1010): n is a, c, g, or t
  misc_feature (1013)..(1014): n is a, c, g, or t
cgttgccggggtaacggcgagcgcgtggggccaagaaagaatacctcctctgaaaaatggcagaagcagttttccatgccccaaagaggaaaagaagagtgtatgagacttacgagtctccattgccaatcccttttggtcaggaccatggtcctctgaaagaattcaagatattccgtgctgaaatgattaacaacaatgtgattgtgaggaatgcggaggacattgagcagctctatgggaaaggttattttggaaaaggtattctttcaagaagccgtccaagcttcacaatttcagatcctaaactggttgctaaatggaaagatatgaagacaaacatgcctatcatcacatcaaagaggtatcagcatagtgttgagtgggcagcagagctgatgcgtagacaggggcaggatgagagtacagtgcgcagaatcctcaaggattacacgaaaccgcttgagcatcctcctgtgaaaaggaatgaagaggctcaagtgcatgacaagcttaactctggaatggtttccaacatggaaggcacagcagggggagagagaccttctgtggtaaacggggactctggaaagtcaggtggtgtgggtgatccccgtgagccattaggctgcctgcaggagggctctggctgccacccaacaacagagagctttgagaaaagcgtgcgagaggatgcctcacctctgccccatgtctgttgcctgcaaacaagatgctctcatcctccagcgtggacttcatcatgaacgacggcagccagcacatcggcctcctgcatcctggggacagagggcctgaccatgagtacgtgctggtcgaggaagcggagtgtgccatgagcgagagggaggctgccccaaatgaggaattggtgcaaanagacaggttaatatgcannanaaatccatataggatctttgagtatttgcactcagcctagagagtgccccagaaatgtnttttnngcctttgannnangaccgcttctnggnnccccct

SEQ ID NO: 357848 - DNA, 1144 bp, Homo Sapiens
ggaaagcgcggcctttccgagttggtgttttgcagcgaaaggaaatctcgctcttccgaaagtcctccagggcgagagaggaaagggcctaggtactgtgctggggtcgcacagccggccgagacagtgccgggacggggagccaggcttccgagtgcgcccggtcactgactcctccgcgctttcctcgtgcgcctgcagcccttggttcttggaaacgccggcgccttgttcagggctggtggggctggggcgcaaggtgcagctgacaatgcccgagaggagccgcagcctctggtggagttcggtcgggtgtgggggtagtcaaggaaagaagcaaagggaatacctcctctgaaaaatggcagaagcagttttccatgccccaaagaggaaaagaagagtgtatgagacttacgagtctccattgccaatcccttttggtcaggaccatggtcctctgaaagaattcaagatattccgtgctgaaatgattaacaacaatgtgattgtgaggaatgcggaggacattgagcagctctatgggaaaggttatttcggacacaaggtattctttcaagaagccgtccaagcttcacaatttcagatcctaaactggttgctaaatggaaagatatgaagacaaacatgcctatcatcacatcaaagaggtatcagcatagtgttgagtgggcagcagagctgatgcgtaagacaggggcaggatgagagtacagtgcgcagaatcctcaaggattacacgaaacccgcttgagcatcctcctgtgacaaaggcactgcacgaggctcacagtgcttgaccaagccttaactctggaatggtttccacatgggagcacagcgggggaaacagaccttctggtggcaaaacgggggactccgggacagtccacggggcggataaggtgataccccggtgaagccaaaaggctgcgcctacacgagagccgctgaggctcccaccccacacacacacagaggcgccggagcacaaagcgtcgccacaaaggagcgcccacacacggcgcccgagcactgtgcggagagaacaaagacgccgtcacacgcacaacagggggggcgacgcatagcaaacggggacaccacaatgggcgccgagccg

SEQ ID NO: 357849 - DNA, 1147 bp, Homo Sapiens
  misc_feature (19)..(19): n is a, c, g, or t
  misc_feature (34)..(37): n is a, c, g, or t
  misc_feature (39)..(39): n is a, c, g, or t
  misc_feature (45)..(46): n is a, c, g, or t
  misc_feature (57)..(57): n is a, c, g, or t
  misc_feature (62)..(62): n is a, c, g, or t
  misc_feature (65)..(66): n is a, c, g, or t
  misc_feature (74)..(74): n is a, c, g, or t
  misc_feature (80)..(80): n is a, c, g, or t
  misc_feature (84)..(84): n is a, c, g, or t
  misc_feature (91)..(91): n is a, c, g, or t
  misc_feature (93)..(93): n is a, c, g, or t
  misc_feature (97)..(97): n is a, c, g, or t
  misc_feature (115)..(115): n is a, c, g, or t
  misc_feature (118)..(118): n is a, c, g, or t
  misc_feature (127)..(127): n is a, c, g, or t
  misc_feature (133)..(133): n is a, c, g, or t
  misc_feature (143)..(143): n is a, c, g, or t
  misc_feature (156)..(156): n is a, c, g, or t
  misc_feature (183)..(183): n is a, c, g, or t
  misc_feature (229)..(229): n is a, c, g, or t
  misc_feature (232)..(232): n is a, c, g, or t
  misc_feature (754)..(754): n is a, c, g, or t
  misc_feature (852)..(852): n is a, c, g, or t
  misc_feature (855)..(855): n is a, c, g, or t
  misc_feature (860)..(860): n is a, c, g, or t
  misc_feature (863)..(863): n is a, c, g, or t
tgctgttcccaatccaccnttttgtaggggaggnnnncntgattnngcccaaccccnccaanctnngcctgganatgctntgantggccananttgnattgcactgagccttcanaantgcctcccntggagntcctccactntaggtttgagggntggaatcagggccagggcctaacagtnttctcccccccgccccacggcccatactcaccccttcacctgaggntcncccctctcaacttgctgttgatttcttttgagggtaaaagaaagaccgagttcattgaagcagagatgggaggtggtgaggcgtcctcacctcccccccaccacagctgtggctggtaaggcaactgcttgaccactggcccagcaagcagaggcgggcaggaggatctgggcatcctgagccccttccctgaggctgtctcctgggaatgctggaccagggggattacttcccccacccacacccccatttggacatctggggaagtggagattaacccctcccccagactcgtgccttgcctctcaggacctggcacagtggctggccttatggagtatggaaaaggcctctgccttcctcaggagggacacatagtgggtcatcaccctttctcacacctgcttcccaatgagcactcagcagcatggctgagacctggggcttgacaggcctgcgctccttagattaggatgctctggtattcctggggccagttaaaatgggtcagtgaggggctcncctggcctcaatctccatctttagggtctccacagactaacattgaagtcttccagaaacctcgaggagctgggctagatacttcgagagtagccctntcntgccnccncctacccccagattagcaccacccctctcactcttgggttggatgctatgggaattacaacccatcactcccaatgcctccctttcctggaggagcctgctgcattctcctgctgagggatcccagagagggcaggtgcccaccccacaggccctttcctggaccatggagccaggtgaaacctgtctggccccttacccattgggttcttactccttcacaacggtcagcactcctctcccagcccccctgcccactgttctcaataaaatgtgagtggtgag

SEQ ID NO: 357850 - DNA, 1663 bp, Homo Sapiens
ggaccggtccggaattcccgggatccgaagatggcggcggtggctggatctggggctgccgcggctccgagctcactgctcctcgtggtgggcagcgagttcgggagcccggggctcctcacctacgtcctggaggagctcgaaagaggcatccggtcttgggatgtcgatcctggcgtctgcaaccttgatgaacagctcaaggtctttgtgtcccgacactctgccaccttctccagcattgtgaaaggccagcggagcctgcaccaccgtggagacaacctggagaccctggtcctcctgaacccatcagacaagtccctgtatgatgagctccggaaccttctgttggaccctgcctctcacaagctactggtgttggctgggccctgcctggaggagacgggggagctgctgctacagacagggggcttctcgcctcaccacttcctccaggtcctgaaggacagagagatccgggacatcctggccaccacgcccccacctgtgcagccgcccatactcaccatcacctgccccaccttcggtgactgggctcagctggcacccgctgtgcctggccttcagggggcgctccggctccagctgcggctgaaccccccggcgcagctgcccaactctgagggcctgtgcgaattcctggagtacgtggctgagtctctggagccaccgtcccccttcgagctgctggagcccccgacctccgggggcttcctcaggctgggccggccctgctgctacatcttccctggaggcctcggggatgccgccttcttcgccgtcaatggcttcactgtgctggtcaacggtggctcaaaccccaagtccagtttctggaagctggtgcggcacctggaccgcgtggatgccgtgctggtgaaccaccctggcgccgacaacatccccggcctcaacagcctgctgcggcgcaaactggcggagcgctccgaggtggctgctggtgggggctcctgggacgacaggctgcgcaggctcatctcccccaacctgggggtcgtgttcttcaacgcctgcgaggccgcgtcgcggctggcgcgcggcgaggatgaggcggagctggcgctgagcctcctggcgcagctgggcatcacgcctctgccactcagccgcggccccgtgccagccaaacccaccgtgctcttcgagaagatgggcgtgggccggctggacatgtatgtgctgcacccgccctccgccggcgccgagcgcacgctggcctctgtgtgcgccctgctggtgtggcaccccgccggccccggccgagaaggtggtgccgcgtgctttttccccggttgaaccccgcccgtctggcctcctggaaaggcccggtccgcctggcatccctttgaaggtcctggctaaagccccgggtgccctccccagaacttgggaagccctcccccgcctgctccgcacttagtaaacccgctcgtgccgtttgataaccctcatcaacaaacctttgctccccggccccgcaccatgaattttttctttcccgcccacgctctacaatctccgcacaccatcttttgtacgtgcccgctcccggtcccatggatacactattttgatccaccctcccctgtctattcccaccaccaatcgcgttgactgtctc

SEQ ID NO: 357851 - DNA, 1153 bp, Homo Sapiens
  misc_feature (3)..(3): n is a, c, g, or t
  misc_feature (24)..(24): n is a, c, g, or t
  misc_feature (36)..(37): n is a, c, g, or t
  misc_feature (42)..(42): n is a, c, g, or t
  misc_feature (62)..(62): n is a, c, g, or t
  misc_feature (67)..(67): n is a, c, g, or t
  misc_feature (70)..(70): n is a, c, g, or t
  misc_feature (81)..(81): n is a, c, g, or t
  misc_feature (91)..(92): n is a, c, g, or t
  misc_feature (94)..(94): n is a, c, g, or t
  misc_feature (166)..(166): n is a, c, g, or t
  misc_feature (176)..(176): n is a, c, g, or t
  misc_feature (309)..(309): n is a, c, g, or t
  misc_feature (981)..(1067): n is a, c, g, or t
cancacgtcgggtcgatttctcangctggcagcganngatcncacttgcgaggaatggctgntctgnttnggctcattttnccccctatanncnatatgtgtttctgaatgtgctctagcgtgaggcggcgtgcggcgtccacctcgatcatgccccgtagcagantctggcagtngggcgggataaagtgcggcatgtggaacacgccccgcttcaccttctccagcagtgtcgcaagttgtcatcgtcgaagggcagagcccccaccagcaaggcgaacaggatgacgccgcagctccacacgtccncttccggccgtcatacttctccccccggatcacctcggggcaggcgtagtggggggacccacagctggtctccaacagctgtcgccaacctgcagggacgccatgccaaagtctgcgatgcggatgttgttcttctcgtccagcaggaggttttcaggtttcagatccctgtggcatatggagtggctgtggcagaagtccagcgcagagatgatctgccggaagaacttccgagcctccttaggcgtcagcctccccttcttcaccaggtagtcgaagagctcaccacctgacacgtgttctagcaccaggtacaaatattttttgttttcataaacgtcgtgcagctttaggacgtgggggtgctcaatgagcttcaggatcgcgatctcccgctccaccttcatcagcaccgactcgctgagcttctcacggttgacgatcttgatggccaccttctggcaggtgacgcagtgaacccccagcttcaccagacctgtctgccccttgcccagcgtcttctccagccggtagggcccaacatactgcgcgtgctgcgcgccgccgtccttccccgtcgatgtcatcgctctggggcccagcgccggccaggggcgcccgggcgcgcgggcagggaggggccgcccagcgtccgcccgcgtccgccgagtnnnnnnnnnnnnnnnnnnnnnnnnnnnnnnnnnnnnnnnnnnnnnnnnnnnnnnnnnnnnnnnnnnnnnnnnnnnnnnnnnnnnnnnccactccgacgcggcagtccgaggcctggcccgcggcgacgcctccgcctcgtcgagaggacagggcgggcgggggcacctggctt

SEQ ID NO: 357852 - DNA, 1146 bp, Homo Sapiens
  misc_feature (44)..(191): n is a, c, g, or t
  misc_feature (1002)..(1011): n is a, c, g, or t
agtcgacggtaccggacatatgcccgggaattcggccattacgnnnnnnnnnnnnnnnnnnnnnnnnnnnnnnnnnnnnnnnnnnnnnnnnnnnnnnnnnnnnnnnnnnnnnnnnnnnnnnnnnnnnnnnnnnnnnnnnnnnnnnnnnnnnnnnnnnnnnnnnnnnnnnnnnnnnnnnnnnnnnnnnnnnngcaattgtacttcactatgccatatgtatgtattcactgaccaaaaattcactgaccaaccaaccaaactccacacttcatctgatcccccatagacttggggatggacagctgttctttggccatatggtataagaggatcattcttgtcactacttaagttagcctcatcattttgtgctgctccaacaccagcagggtatctcccaataaagtgttcctaagcagcctgtatactgagtgcaagcaggctatcaattttaataatagtccataccatgtatgtgtttctgtcagcagaatgtacatgttgtacaaaacctccaggttccttaagctttttgctgtccatgaatcctctgtggcaactgtaatcacagagccagaagccagagggccagggatatgagaggctgacaaacatcaggggacatctggggaggagatccctgtcatgtctcttgtgccatggagctattatggctggtcttccatttgctttttctttaagtgaaaaccatttttctactttgcttttctctccatacttaaatggtcagtagctactgagtggtgctttatctgaataggcctggatcgaagtaaaatagaaatgggactggctttccacaggaagtaaactgcttcagagcccacagtcccctgctcagtgtccggaaagaagtcagtcatccctgttggcagtaaatcttcccacaggccgtccattagagatttaactagatatgttcaatagaaagagtctgaggcaagtggaaatgaggaacggaaacttaggttgggagaatannnnnnnnnnattcattctgtttgcttaattcagagtacagtttgtgctatttcatatctgtactccaggcagaaatataacttgaaaatactgtgtctaaagaaatttcagtgttctatcattaaattatttacttaatattgc

SEQ ID NO: 357853 - DNA, 1053 bp, Homo Sapiens
  misc_feature (915)..(915): n is a, c, g, or t
  misc_feature (922)..(922): n is a, c, g, or t
  misc_feature (937)..(937): n is a, c, g, or t
  misc_feature (939)..(939): n is a, c, g, or t
  misc_feature (941)..(941): n is a, c, g, or t
  misc_feature (943)..(943): n is a, c, g, or t
  misc_feature (949)..(949): n is a, c, g, or t
  misc_feature (953)..(953): n is a, c, g, or t
  misc_feature (957)..(957): n is a, c, g, or t
  misc_feature (975)..(975): n is a, c, g, or t
  misc_feature (988)..(988): n is a, c, g, or t
  misc_feature (995)..(996): n is a, c, g, or t
  misc_feature (1003)..(1003): n is a, c, g, or t
  misc_feature (1006)..(1006): n is a, c, g, or t
  misc_feature (1015)..(1015): n is a, c, g, or t
  misc_feature (1028)..(1029): n is a, c, g, or t
  misc_feature (1038)..(1038): n is a, c, g, or t
agcggggtggcggctcccggtctcggcccgggcacggccctgggcaggccgcccgccagccgcaggggcgctccttagcttcgcggggccgcagtccgggatgcctgcgcgaagggaggggcgaagggccggccgttgccgacgtgggtgttaagtggccgccccagccggcgacccggagccgagagcgggcggcggagcctgagctggacgcggccacgccggcgcggcgggatatgtggtgcctgtcataagctccagagagctgccttccacaagaccagcagaagagtgggcaaacatgaaatccaatcctgctatccaggctgccattgacctcacagcgggggctgcaggaggtacagcatgtgtactgaccgggcagccctttgacacaatgaaagtgaagatgcagacgttccctgacctgtaccggggcctcaccgactgctgcctgaagacttactcccaggtgggcttccgtggcttctacaagggtaccagtccagcactaatcgccaacatcgctgagaactcagtcctcttcatgtgctacggcttctgccagcaggtggtgcggaaagtggctggattggacaagcaggcaaagctgagtgatctgcagaatgcagccgccggttccttcgcctctgcctttgctgcactggtgctctgccccacggagctcgtgaagtgccggctgcagaccatgtatgagatggagacatcagggaagatagccaagagccagaatacagtgtggtctgtcatcaaaagtattcttaggaaagatggcccttggggttctaccatggactctcaagcactttacttcgagaagtacaggctatttctacttcttcggtggctatgaactgagccggtccttttttgcatcagggagatcaaaaaatnaataggncctgtacctttgatntnantngtgggntggngggntttcctctggcttgcggnataccagtggatntatcaanncaaattnaantctttcatntctggaaaaaggnnggtttttanaaccttttaaatctt

SEQ ID NO: 357854 - DNA, 1204 bp, Homo Sapiens
gcctgcaggtgcgctcctgagcttcgcggggccgcagtccgggatgcctgcgcgaagggaggggcgaagggccggccgttgccgacgtgggtgttaagtggccgccccagccggcgacccggagccgagagcgggcggcggagcctgagctggacgctggccacgcctggcgcggcgggatatgtggtgcctgtcataagctccagagagctgccttccacaagaccagcagaagagtgggcaaacatgaaatccaatcctgctatccaggctgccattgacctcacagcgggggctgcaggaggtacagcatgtgtactgaccgggcagccctttgacacaatgaaagtgaacgatgcagacgttccctgacctgtaccggggcctcaccgactgctgcctgaagacttactcccaggtgggcttccgtggcttctacaagggtaccagtccagcactaatcgccaacatcgctgagaactcagtcctcttcatgtgctacggcttctgccagcaggtggtgcggaaagtggctggattggacaagcaggcaaagctgagtgatctgcagaatgcagccgccggttccttcgcctctgcctttgctgcactggtgctctgacccacggagctcgtgaatgtgcctggctgcagaccatgtatgagatggagacactcagggaagatagccaagagccagaatacagtgctggtcctgtcatcaacaagtattcttaggaaagaatggcccattgggagtctaccaatggactctcaagcacttcacttcgagaagtaccagggctatatcttcttcttcggtggctatgaactgagccggtccttttttgcatcagggagatcaaaagatgaattaagccctgtacctttgatgttaagtggtggagtttggtgggatttgcctctggcttgcggtatacccagtggattgtatcaaatccagaaattcaagtttctttccaggtctggaaaacaggccaggatttatcagaaaccttttttaaatggtggggaaaaatgaagggaataacgggcctttatatttctggaactggaaaccctaactatgaattccgagcaatcccctgcccaatgggaaccacttctttttgggccttacgaaatattacccagggaagtttgatgaatgaaaccccgttggaaaacccattctgggaaaggg

SEQ ID NO: 357855 - DNA, 1133 bp, Homo Sapiens
cggaacgtggggcgaggcggtgagtgtggcctcctggcctctttttcctttcctgattccttgtgtatgtgtggcgtgggccgcccctcttctcggctcagagtcacggagtgccttgaactaggcccacctcgccggggcggctggttctctgtttgtgggacgctggtgtctctggaggcccttcctgagaagccgtcgccagagttacgtcgcggttttcttaactttagagcctgggggccggagaccctgattgcactcgacctggctctgccctactctctgcgtgacttccactgttcatcaaagaaaaagggttcttttggtcacccaccactggccccatggctgccgtgcagatggatcctgagctagccaagcgcctcttctttgaaggggccactgtggtcatcctgaacatgcccaagggaacagagtttgggattgactataactcctgggaggtcgggcccaagttccggggcgtgaagatgatccctccaggcatccacttcctccactacagctctgtggacaaggctaatccgaaggaagtaggccctcgtatgggtttcttccttagcctgcaccagcgggggctgacagtgctgcgctggagcacactcagggaagaggtagacctgtccccagccccagagtctgaggtggaggccatgagggccaacctccaggagctggaaccagttcctcgggggccttacccatatgccaccctggaagaagtggatctcactcaaccaacttcatcagcgaagccacagtggagaagctacaggcccgagaattcgacagatctgtgccttttccgatgtgctacctgtgctctccatgaagacaaccaaggaccgcggtggggcagaatctaaccccgctgtggcatttgagtgcaaaaggtaaccaaagggccctgggccgggtacaaagattaacccaaagccggaaagaaaccggttccagaatgccacgcaatttcccaaggtgcccaccagtaagatacaagcatggaccacataccctgaaatgtttaaacacgaggacccaaccccagagagactagcaacacctagattaggaaaccacggaaatacagaatacacatagaccatcaa

SEQ ID NO: 357856 - DNA, 1697 bp, Homo Sapiens
  misc_feature (1620)..(1620): n is a, c, g, or t
agcgggtttccgctgtaccggaacgtggggcgaggcgctgttcatcaaagaaaaagggttcttttggtcacccaccactggccccatggctgccgtgcagatggatcctgagctagccaagcgcctcttctttgaaggggccactgtggtcatcctgaacatgcccaagggaacagagtttgggattgactataactcctgggaggtcgggcccaagttccggggcgtgaagatgatccctccaggcatccacttcctccactacagctctgtggacaaggctaatccgaaggaagtaggccctcgtatgggtttcttccttagcctgcaccagcgggggctgacagtgctgcgctggagcacactcagggaagaggtagacctgtccccagccccagagtctgaggtggaggccatgagggccaacctccaggagctggaccagttcctggggccttacccatatgccaccctgaagaagtggatctcactcaccaacttcatcagcgaagccacagtggagaagctacagcccgagaatcgacagatctgtgccttttccgatgtgctacctgtgctctccatgaagcacaccaaggaccgcgtggggcagaatctaccccgctgtggcattgagtgcaaaagctaccaagagggcctggcccggctaccagagatgaagcccagagccgggacagagatccgcttctcagagctgcccacgcagatgttcccagagggtgccacgccagctgagataaccaagcacagcatggacctgagctatgccctggagactgtgctcaacaagcagttccccagcagcccccaggatgtgcttggtgaactccagtttgcttttgtgtgcttcctgctggggaatgtgtacgaggcatttgagcattggaagcggctcctgaacctcctgtgccggtcagaagcagccatgatgaagcaccacaccctctacatcaacctcatctccatcctgtaccaccagcttggtgagatccccgctgacttcttcgtagacattgtctcccaagacaacttcctcaccagcaccttacaggttttcttttcctctgcctgcagcattgccgtggatgccaccctgagaaagaaagctgaaaagttccaagctcacctgaccaagaagttccggtgggactttgctgcggaacctgaggactgtgccccggtggtggtggagctccctgagggcatcgagatgggctaactcggggagcgctctcagctgcgagggaccccttccccacagggctgcagtcctgagcctctccatttacttcttcccatcctggggacctgccaggggcagcaatctctcccagggcctgcaaagatgggagccagaaattcccttttttcactggataaaccaaattttctttcatttgcccaaagaaggctggacccccttcctgaaaggccccatttgtgggattcccccattcagccagggccctgggaggctaacctgggctgtacttttcacacaggactcttaacacacaacctgcttccttaggaaaacattcttgccctatcagggggcacctcttattttcccctttgactgatgaacggaatgttcanaccccacagattccctggaaagaaacgtgaatttggcttggtctcccactacgcagcctctcggggacactcagaaa

SEQ ID NO: 357857 - DNA, 1578 bp, Homo Sapiens
  misc_feature (294)..(349): n is a, c, g, or t
  misc_feature (557)..(565): n is a, c, g, or t
  misc_feature (1195)..(1477): n is a, c, g, or t
  misc_feature (1491)..(1492): n is a, c, g, or t
  misc_feature (1500)..(1500): n is a, c, g, or t
  misc_feature (1509)..(1509): n is a, c, g, or t
  misc_feature (1520)..(1521): n is a, c, g, or t
  misc_feature (1526)..(1526): n is a, c, g, or t
  misc_feature (1534)..(1534): n is a, c, g, or t
  misc_feature (1539)..(1539): n is a, c, g, or t
  misc_feature (1547)..(1547): n is a, c, g, or t
  misc_feature (1554)..(1554): n is a, c, g, or t
  misc_feature (1560)..(1560): n is a, c, g, or t
  misc_feature (1562)..(1562): n is a, c, g, or t
  misc_feature (1565)..(1565): n is a, c, g, or t
  misc_feature (1573)..(1573): n is a, c, g, or t
tctataggccttgcatatcactgtgcaccagagatacctcttttacatctgggctctgttttctctctatcaatcctatcctccaccctctttaaatcagaccccaggtttaaccgtcccacagtcagtataaatcatttttcagaactttcagctttccatcaagtgaaagttgattttagttacccagtaatgtacagaaaccttcaataatgttaagcttcaaaggcctctggtacgtttgtctaccacagaaccaccacaatatatatgcttgttctcaggtttattgcnnnnnnnnnnnnnnnnnnnnnnnnnnnnnnnnnnnnnnnnnnnnnnnnnnnnnnnnaaagtcaagtttagtttttactcaggtaaaggcctgaagtttcttgggcgtggaagaaaaagcttgggaagcctattaattcatggtgcagttcagaattgtttaaataagctctgtgccactgagcttaatctgaaagtatagtgacatgtgaaggatgcacatatgaatgaaaaactaaaataattgtaggctcttctataaatgnnnnnnnnngtgattggattgtgtctacctttttcctcaaagtaatctaacctaaacggtcatggtgttaaaactttttatggtgctaatcagaaaaattgatgttgcaagaaatgaggtctcaaaaatgggaatgtgcctcctcactctgcgtcacatgggaaataaatcctgaggccaggatcaccagtggggtagagtcatcttcatagtctcctgttatcctccccctgaacaaagaacaaagtgagactgggaagctagtgttggggaaacatttctgggataaactgtggagtggagaagacaatggagggcaaggcaaaaacccacagacttgtttacccatagagaccccactcacctccatgctgacagaattccagaaaaattccttccctatctcccaaacacctgaaattctgaaatattgccctactatttagcactttaagcttcagtgaggtgctgtaatggagagatagcttcatagtttagcctatagccaactttgcctcaagacctccagataagatgaagtggcttttacctcatgtgagtctcaaacgctggagagagagttccacaaccacccctgccctttctcccatattacgctcattagaaagtctactcagnnnnnnnnnnnnnnnnnnnnnnnnnnnnnnnnnnnnnnnnnnnnnnnnnnnnnnnnnnnnnnnnnnnnnnnnnnnnnnnnnnnnnnnnnnnnnnnnnnnnnnnnnnnnnnnnnnnnnnnnnnnnnnnnnnnnnnnnnnnnnnnnnnnnnnnnnnnnnnnnnnnnnnnnnnnnnnnnnnnnnnnnnnnnnnnnnnnnnnnnnnnnnnnnnnnnnnnnnnnnnnnnnnnnnnnnnnnnnnnnnnnnnnnnnnnnnnnnnnnnnnnnnnnnnnnnnnnnnnnnnnnggaagaaaaatgtnnctcagtangcagtgatngcaagtgtgannccagnacggcatnttggntctctggngctgttnaaatgngntanattttcanaactt

SEQ ID NO: 357858 - DNA, 465 bp, Homo Sapiens
  misc_feature (109)..(194): n is a, c, g, or t
agctcagtggcacagagcttatttaaacaattctgaactgcaccatgaattaataggcttcccaagctttttcttccacgcccaagaaacttcaggcctttacctgagnnnnnnnnnnnnnnnnnnnnnnnnnnnnnnnnnnnnnnnnnnnnnnnnnnnnnnnnnnnnnnnnnnnnnnnnnnnnnnnnnnnnnntaagaacaagcatatatattgtggtggttctgtgctagacaaacgtaccagaagcctttgaagcttaacattattgaaggtttctgtacattactgggtaactaaaatcaactttcacttgatggaaagcatgaaagttctgaaaaatgatttatactgactgtgggaaggatcaaacctggggtctgatttaaagagggctggaggataggattcgatagagagaaaacagagccctagatgtaaaagagtatctctgtgcagtgatatc

SEQ ID NO: 357859 - DNA, 1172 bp, Homo Sapiens
  misc_feature (788)..(830): n is a, c, g, or t
aaaccttactttaggacatataacacttcttcttcctcctccgggatgcttttcctgaaggccagctctttcttccccaaaaggaattctattcttgaggttacttcctcttgtcgtccaggtagtgtgcacggagagcacttctggctccaaaactgccatctcgtgacttgtgaagccttcttcttggtcattttcacaatagcgtagagcctctcacgtcactttgggaccactgctccctagcaggtaccacatggctggaaggccaaggcacaggaagcaacggagacactagaaagacaggtgacatggtcgcacacacctgtgctcactcaaaaggccatgcacccaggcccgatcccgaccagtcacagccgcacactcgctggccctttcacacccacagacgctcacaccagagggacactgcctgtccctgtcaacctgacagaagtgcaaaggcacatttcagagacacggagacccgtcctggccgtgccacctctgcagaccccaccagcattgacctcgcacagaacggaggtgcagagacacagcccggctgcgtcacccctacagatgcccttacagcccggcgctatggccctcatagacgtctacacacacctgtgtcacagtttatggggacagagcccggccgcgtcaaccccgcatgcatcacggcttaggggaacggggcttgttcgcattaccccacagacgaagacaattatctcagtcactgggccacgccggggccccaccaggcagcctctggcttattnnnnnnnnnnnnnnnnnnnnnnnnnnnnnnnnnnnnnnnnnnntcccacttccctgctcgccgctcccgaagcctcaggccgaagcttcttcattttagggcctccgcgtcccgagtggctccctcaccgccattccccgcggaaccctgccctggcttcctcctgggaggcaaatagctcccggctcgaggcctaaccacacccagcacatcaggaggtgaaacaaggtctcaggcgcagttgggataagatccaggagaaaccatttttaaaaatcccgcgagcatgaagcacgcccctcagccggccacccggctcgctcctcattggactgtgccccaaggccctctgggaaatgtaatgcgaaaccagagaagcttcgac

SEQ ID NO: 357860 - DNA, 1116 bp, Homo Sapiens
  misc_feature (1016)..(1016): n is a, c, g, or t
  misc_feature (1018)..(1018): n is a, c, g, or t
  misc_feature (1061)..(1061): n is a, c, g, or t
  misc_feature (1066)..(1066): n is a, c, g, or t
  misc_feature (1073)..(1073): n is a, c, g, or t
  misc_feature (1096)..(1097): n is a, c, g, or t
  misc_feature (1103)..(1103): n is a, c, g, or t
  misc_feature (1107)..(1107): n is a, c, g, or t
  misc_feature (1113)..(1113): n is a, c, g, or t
tggtacaggtccgcgaatcccgttgatgaatgaacgagcatgaagatttgaaattgctccgattggaaggaagcccaggttaggtttgggcacctccaaacgcacccgttttaaagccacctggactgaggcgtcgagctttcagctccaccaaacgctcacctggcctggcagcgagcggcggaagagcccgggagcccctcacagagcgcaccgagccgggcggagagctgagccgcaggcacccgcgtctccaggatgataggcgacattgcaacaaatctctacacccagcagctcagggggctccaagcagagcagcaagttcgaggatccgggcgtggagccgagtgaggccgcagcccagcgggcctcgggcgaaaaatcttggaaaatgtataccagtcatgaagatattgggtatgattttgaagatggccccaaagacaaaaagacactgaagccccacccaaacattgatggcggatgggcttggatgatggtgctctcctctttctttgtgcacatcctcatcatgggctcccagatggccctgggtgtcctcaacgtggaatggctggaagaattccaccagagccgcggcctgaccgcctgggtcagctccctcagcatgggcatcaccttgatagtgggccctttcatcggcttgttcattaacacctgtgggtgccgccagactgcgatcattggagggctcgtcaactccctgggctgggtgttgagtgcctatgctgcaaaacgtgcattatctcttcattacttttggagtcgcagctggcctgggcagcgggatggcctacctgccagcggtggtcatggtgggcaggtatttccagaagagacgcgccctcgcccagggcctcagcaccacggggaccggattcggtacgttcctaatgactgtgctgctgaagtacctgtgcgcagagtacggctggaggaatgccatgttgatccaaggtgccgtttcctaaacctgtgtgtttgtggggggncntgaggccctctctcctggtaaaaccaaacgaccaggagagaanatgtngtggctncacggcctcacagaattgtgagnnactggnagcnggaganaga

SEQ ID NO: 357861 - DNA, 1499 bp, Homo Sapiens
  misc_feature (482)..(482): n is a, c, g, or t
  misc_feature (540)..(540): n is a, c, g, or t
agtttttatagttttatttcaggtaaaagtgcatttcttaaaaaaatgtttcaatatccagtttccattggcaagtgataacagttaaccctcaatgattcatgaaaagttttactgtgaatcaaacatagaattctgcccccctcaacagtcataaagaaccagaaatagtaactgtaagtgtgcctacttcaaacactgtataaagcagtggtcccctaaccttttttcaacagggaccggtttcgtggagacaatttccacagacacaggtgttggggtagatggtttcaggatgagactgttccacctcagatcatcgggtattagattctcataatgagcgcacaacctagatctcttgcatgtgcagttcacaatagggttcacgctcctgtaagaatctaatgccacccaggggtttgagacccctagtataaagcattacacaatcaaataaaactgactgcaccattatttcngttatttgcaggtaactgaggaatgaacaagtacttctgttagggttcaacttaaatnatttttaagacttatcaaatacaaatactttgtgaatgtaaaactaagctctcttagcgtttaccaaatgatcgggacaacaatattagagggttaataaatgactgatttggcatctatcagtctttttgtaagtgctatcagtcaggtctatctacaggaggtagtgcagaaagcaactgataattcacagaccatcaaggtcccttaacatcatggcaaatacgtaactgtagtttgagagtttaagtaggaaaaagaagtgtacttataaagtagtagtgtttcctagtatctgtaatttgagcaatagtaaaacacgtaagtaaaatcaggagaagccattctggaaaacacaggggtaacagaaattaagtaatcaagaccacattctgccagctagaagcaaataactaaattgactaacatgccatgcatgagcaaaaccttcctccataaaagggattgacaaactctttaaaaggccaggcagtattttgactgttggaagccatacagactctgctatactactaaactcagccactgtaccaggaaagcagctaaagacaataagcacagctgttccaataaaactttatttctggatactgaaattttaatttaatatgttttcatgtgtcacaaaatgtccttcttttgacttttttcaccattaaaaaatgtaaaaaacccagtctcagcctcacagatagtacaaaaaacaggtggcatgcctagtttaccaatctgtgctctgtaaaaaacttaggagttaagactgccatccttcagtttctatactcaaaaccaattttgctcttaattgttttcttttagaaacttcctattctataaaaataaaaaattctttagacacttgttagctattcaatagtgtatcaaaataattgttagactatactctattttcagttccatgacactttattttgaag

SEQ ID NO: 357862 - DNA, 493 bp, Homo Sapiens
ttttaattgaatgtgtaaagcctttaaaacctaggggtcctcaaaaacccccgggtggccattaagaatccttaacaggaaccgtgaaaccccaattgtgaaacctgccacatgccaagaagatcctaggttgtgccgcctcatttatgagaatcctaatacccgatgatcctgaggtggaacagtcctcatccctgaaacccatcctacccccaacaccctgtgtcctgtggaaattgtctccacgaaaccggtccctgttgaaaaaaggttaggggaccactgctttatacagtgtttgaagtaggcacacttacagttactatttctggttctttatgactgttgaggggggcagaattctatgtttgattcacagtaaaacttttcatgaatcattgagggttaactgttatcacttgccaatggaaactggatattgaaacatttttttaagaaatgcacttttacctgaaataaaactataaaaact

SEQ ID NO: 357863 - DNA, 964 bp, Homo Sapiens
ttctcctccggtgtgcaggaagctccttggccgatgtggagaagcttttttggggcccagagttcttgggccaggccggcatccttgtcagcccttctgggggtgtttcctcaagagtcaggttcctcaccccacgtcgctgtccggcctcctcctggcgggtgaccttcgggacctggctgtccagggccatctctgcgtgcgcccccaagtacagtggggcttgggccagcctccaagccctcctcgcagggaaagttctctccagccacactggaggagggactgtcgatcccgctgtcccggttggggatctttaagctaccactcagctctcccgtggggcctatgtctggagagccgtcccctgctgcagccaggctgacagggtccccacagtgggctctgggcccaacagggagcgcctgaagcttccctagggaggaactgccaggcccagtgtctggcatccctagggcagcaatgggtcctggaggggttgaggaccccctgcctgactccatccttaaagctgagctcactgggctcaggtggaggctggccaggggcttcctgatgccaccagcctttctgaggaggatgctgagggtcggcgggcacaggcgcctggctccgtgctggggtctggggttggccggcaggagcttgcacacggtagatggtttccttgaaaatctcttccttgcccagcaggttcaaagtagagccatttaggaggtacgccttcctctggggacgaaaataattaacaaagcaaacaggaaagccggaggctcccccagctccgcacaggcaaactcgatacttgccggagccgcttccagaggagccccggggaggtcgctcacagtgggcagcaggaggctggggtctccttggggacctggagggccgggctgtgcttcccgcgccatcccgggaattccggaccggtaccagccgc

SEQ ID NO: 357864 - DNA, 229 bp, Homo Sapiens
ttatttaaatactgtgtaaaaactttttttacacctaagctgtgtttttgatactgatattttcctatgctgaatagttttcttactttcagggaaggtaagaaaatactttttttatatttgttacttatgtaacattcatatttttctcattttgatatttgtaacatactgtatgctttctacttgtaaatgtcaacaatagaattaaaatatttatttaaaataa

SEQ ID NO: 357865 - DNA, 737 bp, Homo Sapiens
  misc_feature (521)..(571): n is a, c, g, or t
  misc_feature (646)..(646): n is a, c, g, or t
  misc_feature (697)..(697): n is a, c, g, or t
aatccttgtaaagtgtaaaaaggaaccctcctatcgtggaatgaaagattaagtatattaacacttttcagaatgatagtttctgtatttgatgttgctcagaaatgtctgagtatttgagtaagttttacatgacagtgggtactgaaattaagtcattttgttcagcactttaacgctttcttatagaattgtcttaaaacttctggatccttgagcaaatgattatagtctcctgactttcatgaggcttccattaggaacagaatgattgcatgttgtccccagaacactgccaccttgctatgcgaatgatgttctcagcagcacttctaagaaacactcttaaaagttatttattgaaaatttttcgtatgcttttaatattttaaagaattgacctaaggaaagcttatgattggacttattttccaaccagataacatttactctaagtacccagtttttataatttatatgaaatcagatttcaacacttactttgtcattttgtagatcannnnnnnnnnnnnnnnnnnnnnnnnnnnnnnnnnnnnnnnnnnnnnnnnnngatactgatattttcctatgctgaatagttttcttactttcagggaaggtaagaaaatactttttttatatttgntacttatgtaacattcatatttttctcattttgatatttgtaacatactgnatgctttctacttgtaatgtcaacaatagaattaaaatat

SEQ ID NO: 357866 - DNA, 1714 bp, Homo Sapiens
  misc_feature (84)..(123): n is a, c, g, or t
  misc_feature (160)..(160): n is a, c, g, or t
  misc_feature (207)..(253): n is a, c, g, or t
  misc_feature (301)..(363): n is a, c, g, or t
  misc_feature (385)..(438): n is a, c, g, or t
  misc_feature (666)..(666): n is a, c, g, or t
  misc_feature (931)..(931): n is a, c, g, or t
  misc_feature (1252)..(1299): n is a, c, g, or t
cgggatgtcggggggagccgggcggcagagaaggagggagcgggtacggcctcctagccgagaccggtaagccgaagcccttgnnnnnnnnnnnnnnnnnnnnnnnnnnnnnnnnnnnnnnnngagggacaaggacaagcgccgagcagcgcctgcccancccccggaacgcgcacccgccccaacgcccagacacggaccgtgcgnnnnnnnnnnnnnnnnnnnnnnnnnnnnnnnnnnnnnnnnnnnnnnntggacgcctccgcacctctggccggctccggctcagtcccggtagctnnnnnnnnnnnnnnnnnnnnnnnnnnnnnnnnnnnnnnnnnnnnnnnnnnnnnnnnnnnnnnnccccggccccactccgcccgcnnnnnnnnnnnnnnnnnnnnnnnnnnnnnnnnnnnnnnnnnnnnnnnnnnnnnnaccaacctccgttccggccccgtacccggaggcccagccgtgggcacgatgctgcccagctccatccagatttcgggggagccgctgtccggcgccgaggtgcgggacatctgccgcggccttcgcgacaacgccgtgcgcctgctctcactgcgcggctgccgcctctgcgaccgcgactttggccgcatctgccgggccctggccggggccacgtccctggcgcantcaaccttaacctgggcgtcgtgtccagccccagccgcatcaagcagctggctgaggctctgcggaccaaccgctccatccagtccctcttcctgcatgggagcccccctgacagatgcggggctggccttgctgaacccagccctggccctccaccctgccctcgtggctctggacctgggggactgcatgctgggtgatgaagccatcaacctcatctgtggcctcctgcccccagatggggccaaatctggcttgaagggantaacgctgagtgccaaccctggcatcacccctaagggctggagccgccttgccattgccgtggcccacagctcccaggtccgcgtcctcaatctggattacaaccccctgggtgaccatgtggcaggaatgctggctgtagctgtggcctctagtcgtaccctagaggtcctagacttggagggcacagggctcaccaaccagtcagctcagaccctgctggacatggtagaaaattaccccacagctttgcggagcctggtgttggctgagaacagcattagcccagagctgcagcaacagatctgtgacctcctctctnnnnnnnnnnnnnnnnnnnnnnnnnnnnnnnnnnnnnnnnnnnnnnnngaatgggagagagggcgggagcctgctgcccaccagagaggcagcagctcctggatgtgccccagcgatcccagctctcagatggtgctaatgacgtcaggactaggggacagtctgttggctgagaccgagatgtgactctccactgggcctctgcacaccatttcacttatctatgtcccgagcaccttgccccagatatcagggtcaggccctgggacttgggagggaactggggtcaggggctgcatgggggctctggcagctcctggcagtgtggtgggaaggaagctctggaagctgtgactgagcaacagccttggggggcacttgaacccaaggcaatgcctttgaactttggagctctggctgcataccgctggctcggaaaagattttatgaactccaaaaaaaa

SEQ ID NO: 357867 - DNA, 688 bp, Homo Sapiens
  misc_feature (69)..(105): n is a, c, g, or t
cggacggacaagcgcgggcccagtggagtactagcacacttgggaacgtgagcgctacgggggcggcgnnnnnnnnnnnnnnnnnnnnnnnnnnnnnnnnnnnnnatcaggccaaatcggccgagctcgaattcgtcgagagcggctctggagctggagccggagctgcctgccagccgcccgcctcaggctctctctgccatgccgtgcggccaggcccgcggggtggtcggggggagccgggcggcagagaaggagggagcgggtacggcctcctagccgagaccggtaagccgaagcccttgagccgctcgctgccgctgccgcctgcctgcctgccgctgacctgcgatgggacaaggacaatgcgccgatgcatgcgcctgcccaacccccggaactggcgcacccggccccaacggcccagacacggaccgtgcgggcctgccacacgccgcaggccggacccagcgtttcaagcacccagagacaccggaggacacgcattggaaacagaccagtaccagtcaagagcagtacttgagccagtgcatcactgagacatccaagaatcacagaggtaaggctcacttcatccggtgccaaaaatccaggaaatcacatcactcacgcagcaacacacagcagagaacatacacgacgaaaaaagaagagacaggacatagaa

SEQ ID NO: 357868 - DNA, 934 bp, Homo Sapiens
  misc_feature (2)..(2): n is a, c, g, or t
  misc_feature (5)..(5): n is a, c, g, or t
  misc_feature (14)..(14): n is a, c, g, or t
  misc_feature (16)..(17): n is a, c, g, or t
  misc_feature (31)..(32): n is a, c, g, or t
  misc_feature (34)..(34): n is a, c, g, or t
  misc_feature (38)..(38): n is a, c, g, or t
  misc_feature (45)..(45): n is a, c, g, or t
  misc_feature (49)..(49): n is a, c, g, or t
  misc_feature (59)..(59): n is a, c, g, or t
  misc_feature (65)..(65): n is a, c, g, or t
  misc_feature (82)..(82): n is a, c, g, or t
  misc_feature (451)..(451): n is a, c, g, or t
  misc_feature (475)..(475): n is a, c, g, or t
  misc_feature (480)..(480): n is a, c, g, or t
  misc_feature (486)..(495): n is a, c, g, or t
  misc_feature (501)..(501): n is a, c, g, or t
gncanttaaaaagngnntttttttaattttnngnaggnattaaantttncataatttangcatangcattactttttttaancactttttaaaatataaggaccgaatgcaaggaaaccaaagtttattaataatttttatataactaaaataaaatagatgtggagggatctgtgatcatataaaaagggagggttactgaaagaattttagcaatatattgattcaggaaaaggagctgttttataaatgatcattcactgttcctatggttctatgtatctttcaaaccgatacctttactatttaaagagcgtaaatagtgaaagtaagatggtcatacttactgactttatctatttaagtttgatggagataaactatatcttggctagtggctactgtgtctgtgaatgtaaccagtacttctttaagctctattcagtagggnaccagccactgcttttttgaaaanaaaancactgnnnnnnnnnncttgtnaccttataaaacaggtaataaccaatcattttgtgtttgtatttccattcctttttatttctgcctttgtgtagactgatgattaagtaggcaaactacttctactttcaaagagccccaagggcttaatgaccccatttgtaactgagaaatgattcttgttttagtaatcattctataaatgatactgctggattgattgccgtgggttgatagctggaggaattgttttggacaatactaacatgtgaatttatgtcttagttttatttgcagtcttgctaagtaaaatgagtctttgtatctacttttttattaaagtgaaatttagcaatagttaatattaggtgacataaataaaacatcccagactagtgagttaagtacaagatctctctaaaaataaacagatgaaaatctatccccattatcg

SEQ ID NO: 357869 - DNA, 1832 bp, Homo Sapiens
  misc_feature (1822)..(1822): n is a, c, g, or t
gcggccgccgcggtcgccgccgccgcctcctcctgccgtccgctcggctcaggcgcgggccctggccccactggggcggccccggtctccgcccctgcccccgggccgggcccggcaggtaagggaggcggcggcggaggcagccccgggcccacggcgggcccggagcccctgagcctgccggggatcctgcactttatccagcacgagtgggcgcgcttcgaagccgagaaagcccgctgggaggccgagcgcgccgagttacaggctcaggtggccttccttcagggagagaggaaagggcaggagaatctaaagacggacctggtgcggcggatcaagatgctagagtatgcgctgaagcaggaaagggccaaatatcataaactgaagtttgggacagacctgaaccagggggagaagaaagcagatgtgtcagaacaagtctccaatggccccgtggaatcggtcaccctggagaacagcccgttggtgtggaaggaggggcggcagcttctccgacagtacctggaagaggtgggctacacagacaccatcctcgacatgcggtccaagcgcgtccgttccctgctgggccgctcgctggagctcaacggggcagtggagccgagtgaaggggcccccagggctccaccaggccctgcagggctcagtggtggggagtcgctgctggtgaaacagatcgaggagcagataaagaggaacgcggcaggcaaagatggcaaagagcgcttgggcggctcagtgctggggcagatccccttcctgcagaactgcgaggacgaagacagcgacgaggacgatgagctggacagcgtgcagcacaagaagcagcgtgtgaagctcccatccaaggctctggtgcccgaaatggaagacgaggatgaggaagacgactctgaggatgctatcaatgagtttgatttcctgggctcaggagaggatggggaaggggctccagaccctcggcggtgcactgtggatgggagcccccatgagctggaaagccgtcgggtcaaactccaaggcattctggctgacctgcgggatgtggatgggctgcccccaaaagtgactggcccgcctcctggcacaccccagccccggccacatgaagacgtcttcatcatggacactatcgggggcggggaggtgagcctgggggacttggcagatctcaccgtcaccaacgacaacgacctcagctgcgatctgtctgacagcaaagatgcttttaagaagacgtggaaccccaagttcaccctgcgctcgcactacgacggcattcgttccctggccttccaccacagccagtcggctctgctcaccgcctccgaggacggcacgctcaagctctggaacctgcagaaggcggtcacggccaagaagaatgcggcgctagatgtggaacctatacatgctttccgggctcacaggggcccagtgttggctgtggctatgggcagcaacagtgaatactgctacagtgggcggggcagatgcctgcatccataggttggaagattccagacctcagcatgggattccctatgatggctacgacccaagcgtgctgagccacgtcctggagggccacggggacgccgtgtggggcctggccttcagtcccacctcccagcgcctggcctcctgttctgctgatggcaccgtccgcatctgggaccccagcagcagcagcccggcctgcctctgcaccttccccacagccagcgagcacggggtccccacctcagtggccttcaccagcaccgagcctgcccacatcgtggccttcttccgntcttgcgaca

SEQ ID NO: 357870 - DNA, 1737 bp, Homo Sapiens
  misc_feature (1239)..(1239): n is a, c, g, or t
  misc_feature (1377)..(1377): n is a, c, g, or t
  misc_feature (1397)..(1397): n is a, c, g, or t
  misc_feature (1418)..(1418): n is a, c, g, or t
  misc_feature (1515)..(1515): n is a, c, g, or t
  misc_feature (1558)..(1582): n is a, c, g, or t
  misc_feature (1653)..(1653): n is a, c, g, or t
  misc_feature (1677)..(1677): n is a, c, g, or t
  misc_feature (1694)..(1696): n is a, c, g, or t
  misc_feature (1705)..(1707): n is a, c, g, or t
  misc_feature (1709)..(1709): n is a, c, g, or t
  misc_feature (1715)..(1715): n is a, c, g, or t
  misc_feature (1720)..(1720): n is a, c, g, or t
taggtagcgaggcctgggtggcgggccttgcggcctgcgggggaggctgcccggaggaggcagcggcggcggcagcgcgtcctcggtccccaggaccacggcttctttcctgccagatctatccatctggccatccatccgtgggggtctgcaatggccacctttagccgccaggaatttttccagcagctactgcaaggctgtctcctgcctactgcccagcagggccttgaccagatctggctgctccttgccatctgcctcgcctgccgcctcctctggaggctcgctgcacatggtttgggtcgtgctgctcagcctcctgtgctacctcgtgctgttcctctgccgacattcctcccatcgaggcgtcttcctatccgtcaccatcctcatctacctactcatgggtgagatgcacatggtagacaccgtgacatggcacaagatgcgaggggcacagatgattgtggccatgaaggcagtgtctctgggcttcgacctggaccggggcgaggtgggtacggtgccctcgccagtggagttcatgggctacctctacttcgtgggcatcatcgtcttcgggccctggatatccttccacagctacctacaagctgtccaaggccgcccactgagctgccggtggctgcagaaggtggcccggagcctggcactggccctgctgtgccttgtgctgtccacttgcgtgggcccctacctcttcccgtacttcatccccctcaacggtgaccgcctccttcgcaagtggctgcgagcctacgagagtgctgtctccttccacttcagcaactattttgtgggctttctttccgaggccacggccacgttggcgggggctggctttaccgaggagaaggatcacctggaatgggacctgacggtgtccaagccactgaatgtggagctgcctcggtcaatggtggaagttgtcacaagctggaacctgcccatgtcttattggctaaataactatgttttcaagaatgctctccgcctggggaccttctcggctgtgctggtcacctatgcagccagcgccctcctacatggcttcagtttccacctggctgcggtcctgctgtccctggcttttatcacttacgtggagcatgtcctccggaagcgcctggctcggatcctcagtgcctgtgtcttgtcaaagcggtgcccgccagactgttcgcaccagcatcgcttggggcctgggggtgcganctttaaacttgctctttggagttctggccatcttccacctggcctacctgggctccctgtttgatgtcgatgtggatgacaccacagaggagcagggctacggcatggcatacactgtccacaagtggtcagagttcngctgggccagtcactgggtnacttttggatgctggatcttntaccgtctcataggctgaggcacatctgtggaccctcataaccctcttaagacccctctcagggtgccactgatgggggatgagggaaggccctctntctactccttgaccccctccatccttgacccccaacacctcannnnnnnnnnnnnnnnnnnnnnnnnaaatcacaccattttcatgcctgtcaatccccaccccaccacaaggcaggaagggggtggtgcctgctggngcctagagggggatgcttgggganacagagaaggggtgatnnnaggcctccnnncnttcttnttcgnttttatatacaatttgt

SEQ ID NO: 357871 - DNA, 885 bp, Homo Sapiens
gtggaccggtccggaattcccgggatctctgggagccgctgctggtcccggccttgcggcctgcgggggaggctgcccggaggaggcagcggcggcggcagcgcgtcctcggtccccaggaccacggcttctttcctgccagatctatccatctggccatccatccgtgggggtctgcaatggccacctttagccgccaggaatttttccagcagctactgcaaggctgtctcctgcctactgcccagcagggccttgaccagatctggctgctccttgccatctgcctcgcctgccgcctcctctggaggctcgggttgccatcctacctgaagcatgcaagcaccgtggcaggcgggttcttcagcctctaccacttcttccagctgcacatggtttgggtcgtgctgctcagcctcctgtgctacctcgtgctgttcctctgccgacattcctcccatcgaggcgtcttcctatccgtcaccatcctcatctacctactcatgggtgagatgcacatggtagacaccgtgacatggcacaagatgcgaggggcacagatgattgtggccatgaaggcagtgtctctgggcttcgacctggaccggggcgaggtgggtacggtgccctcgccagtggagttcatgggctacctctacttcgtgggcaccatcgtcttcgggccctggatatccttccacagctacctacaagctgtccaaggccgcccactgagctgccggtggctgcagaaggtggcccggagcctggcactgggcctgctgtgccttgtgctgtccacttgcgtgggcccctacctcttcccgtacttcatccccctcaacgggtgaccgccttccttcgcaagtgggctgcgaagcctaa

SEQ ID NO: 357872 - DNA, 979 bp, Homo Sapiens
agcgaggcctgggtggcgggccttgcggcctgcgggggaggctgcccggaggaggcagcggcggcggcagcgcgtcctcggtccccaggaccacggcttctttcctgccagatctatccatctggccatccatccgtgggggtctgcaatggccacctttagccgccaggaatttttccagcagctactgcaaggctgtctcctgcctactgcccagcagggccttgaccagatctggctgctccttgccatctgcctcgcctgccgcctcctctggaggctcgctgcacatggtttgggtcgtgctgctcagcctcctgtgctacctcgtgctgttcctctgccgacattcctcccatcgaggcgtcttcctatccgtcaccatcctcatctacctactcatgggtgagatgcacatggtagacaccgtgacatggcacaagatgcgaggggcacagatgattgtggccatgaaggcagtgtctctgggcttcgacctggaccggggcgaggtgggtacgcgcgccctcgccagtggagttcatgccccacctccacttcgcgggcatcatcgtcttcgggccctggatatccttccacagctacctacaagctgtccaaggccgcccactgagctgccggtggctgcagaaagtggccccgagcctggcactggccctgctgtgccttgtgctgtccactttgcgtgggcccctacctccttcccgtacttcatcccccctcaaccggtgacccgcctcccttcgccaagtgggctggcaaaccctaacaaaaagtggcttgttctcctttccactttcagcaaaattattttttgggggggccttttcttttccccaagggccacgggcccacgttttgggccggggggccttgggcttttacccccgagggaaaaaagggatcccccctggaaaaagggggaaccctggaacgggggggcccaaagcccccactt

SEQ ID NO: 357873 - DNA, 1235 bp, Homo Sapiens
  misc_feature (45)..(45): n is a, c, g, or t
  misc_feature (229)..(302): n is a, c, g, or t
  misc_feature (404)..(444): n is a, c, g, or t
gattcagtagatctagggtgggcccacaaagttgcattcctaccnaagtggcccagctgatgccaagtgtggcccaggaataccctgtccgaaaatatttttataggagaagcttcttacatatgtaatttccttctgggattgtaacagaactgacatttgttgagtgtctaatatgttctattcagtatattaggtactttggctataatattttctttagattttnnnnnnnnnnnnnnnnnnnnnnnnnnnnnnnnnnnnnnnnnnnnnnnnnnnnnnnnnnnnnnnnnnnnnnnnnnatttgccagatatccagtatgtaccataaaggatgtggggcattatccaatttaaaactttttgaattctaaatgattagtactcctagtttaggagtggtnnnnnnnnnnnnnnnnnnnnnnnnnnnnnnnnnnnnnnnnngatgagtaaagatagtaaaaatgagtctgaaagagattaagtatcttaaggaaggtcaaagccccaggaaacatgcatgctggattcaaaatcacgtgttgggttctaaaggctgaaaagccatactgcagctagtacctgtctgtttgccaaaagctactaatgtagattccaaaagcatgttttctttcatgcttgaagcatgtacttcctacctccttgcctttgctcatgctgctccttctgcttaaaattcccttctccctcttcttcacctgagtaactcccattcatcctccaagcaaaatgttgtctcagccatgcaaacttctgtaacatcccctccttgcctcaactagagcaggaataaggactactttgtaagcgtcccaacatactttatattatcaaattccttcacagaccccaaagtcctctagtgaaatatccttggttacagaaacaaaaaaatccaaaatttttcattttaaccataaaagccatcccccatcttgactaaaagttgcctttaaaacaaaaccttgaaaactcccctaattttgtccaaactaaaacaaaaccggcggaaaaactttccccaacccaaggggataatgttccccctttccccctcgcaaacctttttaattaaggggtgcttgctgttcaacaaaaaaatgggccccctctccctggaaaccttaaaacactggtcttggaaagatgggcctttttccaaaccaagccccacaaacttaaaaaccccctgggggggcataaaggcgcccctt

SEQ ID NO: 357874 - DNA, 2774 bp, Homo Sapiens
  misc_feature (115)..(149): n is a, c, g, or t
  misc_feature (232)..(232): n is a, c, g, or t
  misc_feature (2287)..(2287): n is a, c, g, or t
  misc_feature (2667)..(2693): n is a, c, g, or t
agcgaagttggatcaaggaggagtgattcaagattttattaatgccttagatcagctctctaatcctgaactgctctttaaggattggagcaatgatgtaagagctgaactagcnnnnnnnnnnnnnnnnnnnnnnnnnnnnnnnnnnntgtatgaaagaatgtatgcagccttgggtgacccaaaggctccaggcctgggggcctttagaaggaagtttattcagactttntggaaaagaatttgataaacattttgggaaaggaggttctaaactactgagaatgaagctcagtgacttcaacgacattaccaacatgctacttttaaaaatgaacaaagactcaaagccccctgggaatctgaaagaatgttcaccctggatgagcgacttcaaagtggagttcctgagaaatgagctggagattcccggtcagtatgacggtaggggaaagccattgccagagtaccacgtgcgaatcgccgggtttgatgagcgggtgacagtcatggcgtctctgcgaaggcccaagcgcatcatcatccgtggccatgacgagagggaacaccctttcctggtgaagggtggcgaggacctgcggcaggaccagcgcgtggagcagctcttccaggtcatgaatgggatcctggcccaagactccgcctgcagccagagggccctgcagctgaggacctatagcgttgtgcccatgacctccaggttaggattaattgagtggcttgaaaatactgttaccttgaaggaccttcttttgaacaccatgtcccaagaggagaaggcggcttacctgagtgatcccagggcaccgccgtgtgaatataaagattggctgacaaaaatgtcaggaaaacatgatgttggagcttacatgctaatgtataagggcgctaatcgtactgaaacagtcacgtcttttagaaaacgagaaagtaaagtgcctgctgatctcttaaagcgggccttcgtgaggatgagtacaagccctgaggctttcctggcgctccgctcccacttcgccagctctcacgctctgatatgcatcagccactggatcctcgggattggagacagacatctgaacaactttatggtggccatggagactggcggcgtgatcgggatcgactttgggcatgcgtttggatccgctacacagtttctgccagtccctgagttgatgccttttcggctaactcgccagtttatcaatctgatgttaccaatgaaagaaacgggccttatgtacagcatcatggtacacgcactccgggccttccgctcagaccctggcctgctcaccaacaccatggatgtgtttgtcaaggagccctcctttgattggaaaaattttgaacagaaaatgctgaaaaaaggagggtcatggattcaagaaataaatgttgctgaaaaaaattggtacccccgacagaaaatatgttacgctaagagaaagttagcaggtgccaatccagcagtcattacttgtgatgagctactcctgggtcatgagaaggcccctgccttcagagactatgtggctgtggcacgaggaagcaaagatcacaacattcgtgcccaagaaccagagagtgggctttcagaagagactcaagtgaagtgcctgatggaccaggcaacagaccccaacatccttggcagaacctgggaaggatgggagccctggatgtgaggtctgtgggagtctgcagatagaaagcattacattgtttaaagaatctactatactttggttggcagcattccatgagctgattttcctgaaacactaaagagaaatgtcttttgtgctacagtttcgtagcatgagtttaaatcaagattatgatgagtaaatgtgtatgggttaaatcaaagataaggttatagtaacatcaaagattaggtgaggtttatagaaagatagatatccaggcttaccaaagtattaagtcaagaatataatatgtgatcagctttcaaagcatttacaagtgctgcaagttagtgaaacagctgtctccgtaaatggaggaaatgtggggaagccttggaatgcccttctggttctggcacattggaaagcacactcagaaggcttcatcaccaagattttgggagagtaaagctaagtatagttgatgtaacattgtagaagcagcataggaacaataagaacaataggtaaagctataattatggcttatatttagaaatgactgcatttggatattttaggatatttttctagggtttttcctttcattntattctcttctagttttgacattttatgatagatttgctctctagaaggaaacgtctttatttaggagggcaaaaattttggtcatagcattcacttttgctattccaatctacaactggaagatacataaaagtgctttgcattgaatttgggataacttcaaaaatcccatggttgttgttagggatagtactaagcatttcagttccaggagaataaaagaaattcctatttgaaatgaattcctcatttggaggaaaaaaagcatgcattctagcacaacaagatgaaattatggaatacaaaagtggctccatcccatgtgcagtccctgtccccccccgccagtcctccacacccaaactgtttctgattggcnnnnnnnnnnnnnnnnnnnnnnnnnnnccttctaacacttgtatttggaggctcttctgtgattttgagaagtatactcttgagtgtttaataaagtttttttccgaa

SEQ ID NO: 357875 - DNA, 875 bp, Homo Sapiens
ttgaaagctttaaaattaaattccaatgaagccagattgaagtttcctagattacttcagattatagaacggtatccagaggagactttgagcctcatgacaaaagagatctcttccgttccctgctggcagttcatcagctggatcagccacatggtggccttactggacaaagaccaagccgttgctgttcagcactctgtggaagaaatcactgataactacccgcaggctattgtttatcccttcatcataagcagcgaaagctattccttcaaggatacttctactggtcataagaataaggagtttgtggcaaggattaaaagtaagttggatcaaggaggagtgattcaagattttattaatgccttagatcagctctctaatcctgaactgctctttaaggattggagcaatgatgtaagagctgaactagcaaaaacccctgtaaataagaaaaacattgaaaaaatgtatgaaagaatgtatgcagccttgggtgacccaaaggctccaggcctgggggcctttagaaggaagtttattcagacttttggaaaagaatttgataaacattttgggaaaggaggttctaaactactgagaatgaagctcagtgacttcaacgacattaccaacatgctacttttaaaaatgaacaaagactcaaagccccctgggaatctgaaagaatgttcaccctggatgagcgacttcaaagtggagttcctgagaaatgagctggagattcccggtcagtatgacggtaggggaaagccattgccagagtaccacgtgcgaatcgccgggtttgatgagcgggtgacagtcatggcgtctctgcgaaggcgtaacgtgtgggtaccgagctc

SEQ ID NO: 357876 - DNA, 1570 bp, Homo Sapiens
  misc_feature (83)..(96): n is a, c, g, or t
  misc_feature (458)..(458): n is a, c, g, or t
cttgtgtagggcgtagaggggtgatagggtgggcggtaccggggggagacgaggggcgggtctataacaactatggtccgccnnnnnnnnnnnnnnctcatctagtaataacggagtgggcggcggtctaattatgtagagatctgtgtattcggggcgacggggcgcaatgagcggtgggagaggggtggggatttggtggagtcgctggtggggcaagggagggagaggagagactggtgagagttaggggggcgaagatgttacttagcgctttgtttctttgtcgactagaaggtcccgcatttttgaccaaagcgtgtaagggggaaggttgaataggttgccttccgcgtggtttttttggtaatgggtttaaacccggcagggtgtgccgtatactgcaagattgcctttgcaaacctttaggtactggggatactcatgcgcattctttnccacaaacagcatgaatgttgaccaactccagcgcaatgagtaacagtatcaggctgagcacaggggacagtagtctgatactactccacatacgcaggtagttctgccgctggcgagaccgcagcgtcctttccacccactgcctgtgtctcagctctgaggcaacggtgacctggctggacacacggcggcactgttcgctgatgcttcggagcacaaccagcacttccagcacaatcctggggcagaacagggtgggaacaggtgtgctgcagagctcacggagaagctggggccacgtctcagtaggaagacgatccaagtcctttaacacacaacgattctcaggcatatggtgatacagctcatccgtcatttttgtaatcaaagagtggcaggcatttgtttcagaattatcttctaatctgacggcttgccgagtgagttcttcggggaaaggcagcagagcccaaaccctgatgctctcctcacagctcagcacctgttttttaagctgaaaaaccggatgacagcgagaactatagccttctgcaagactaatcaacaattctacggctgatttttcctagtgcagagaaaacagtggttactatcatgtttgggtgggcttttagctttcttctattgaactgtaggccacttagagtccccatttctcattatctttcttcaaataattctatgcagctagaaaagcaagtgcttcattaaaataggcttgacatggcaggcaaatgacagccaataaaatgattttaaatggaggccattaacaataatagatcacaaatgccacacccaccctctgtgcacaaaactggagatgaataagaaaaaaaagattccaaacaattggaaatgtaactaggaaatagttacttaaacactaaaaatgaatacaactaaaaaaaggatcgcataaacatttaattgccaagcatatacatattttaaaaagcataaaaattacattatttgcagctgatataaccacataacttaaaaatctaagtcagccaactaaaacctatgagaaacaaagtcagtgaattgatagctgacaaattaaaaaatctgtaactacctacaa

SEQ ID NO: 357877 - DNA, 838 bp, Homo Sapiens
  misc_feature (680)..(680): n is a, c, g, or t
  misc_feature (747)..(792): n is a, c, g, or t
agcggggtcggaccgctgggaaaaaggggtggaggagctcccctaccttgaacagcacaaagagccagagcagaggcaggaggcggcgggcgccgtgtatccccgtgggcaggtgccccatcgctgcgcagacggggactcgggggcacggctgcgctagcggactcccccggcggcggctcacaatggcgaactggggctgcagcctcagaccctgggcgccgaggttgctcctggcgagcgcatgctgcctttccagtccccctgcgcctgctccctttcctcctctgcgcccggggtcctccaagaacgtgccaggcgctgctgttctttaatgactaaggatggagagggtggggattggagtgggcgaggctctgccgccgccaccaccgcggctgccagaggaggcgcggggtatgtgtggtgagcgagaggcggggaccccgcgcccagcccgccgtagtcctctggcagcagggacactctcactctggctgccgacccataaaatgacagcagcctcccaaccctccaccaggatcggcccgctgcttgctactgctggacatgccccattgcagactccgcctcaaaccctccctcaatctctgggtctcaggagttctgaggggttccctgacctctcttgagcaatccaggcgccagatccccagttncctctcaatcttcctacattctgtactcaattgcacgttataccgggatccataacagttgggtagnnnnnnnnnnnnnnnnnnnnnnnnnnnnnnnnnnnnnnnnnnnnnnaccggcacggtatttggctccttccccatggttccttttttcctcc

SEQ ID NO: 357878 - DNA, 1883 bp, Homo Sapiens
  misc_feature (249)..(273): n is a, c, g, or t
ggggggtcacggcggagctggctctcacgtggaggcggggaaatttcgcccaccggaatgatcaccaagacacacaaagtagaccttgggctcccagagaagaaaaagaagaagaaagtggtcaaagaaccagagactcgatactcagttttaaacaatgatgattactttgctgatgtttctcctttaagagctacatccccctctaagagtgtggcccatgggcaggcacctgagatgcctctagtnnnnnnnnnnnnnnnnnnnnnnnnnggtgtcagcaccctttgcgaggagcatgtagaacctgagaccacgctgcctgctagacggacagagaagtcacccagcctcaggaagcaggtgtttggccacttggagttcctcagtggggaaaagaaaaataagaagtcacctctagccatgtcccatgcctctggggtgaaaacctccccagaccctagacagggtgaggaggaaaccagagttggcaagaagctcaaaaaacacaagaaggaaaaaaagggggcccaggaccccacagccttctcggtccaggacccttggttctgtgaggccagggaggccagggatgttggggacacttgctcagtggggaagaaggatgaggaacaggcagccttggggcagaaacggaagcggaagagccccagagaacacaatgggaaggtgaagaagaacaaaaaaatccaccaggagggagatgccctcccaggccactccaagccctccaggtccatggagagcagccctaggaaaggaagtaaaaagaagccagtcaaagttgaggctccggaatacatccccataagtgatgaccctaaggcctccgcaaagaaaaagatgaagtccaaaaagaaggtagagcagccagtcatcgaggagccagctctgaaaaggaagaaaaagaagaagaggaaagagagtggggtagcaggagacccttggaaggaggaaacagacacggacttagaggtggtgttggaaaaaaaaggcaacatggatgaggcgcacatagaccaggtgaggcgaaaggccttgcaagaagagatcgatcgcgagtcaggcaaaacggaagcttctgaaaccaggaagtggacgggaacccagtttggccagtgggatactgctggttttgagaacgaggaccaaaaactgaaatttctcagacttatgggtggcttcaaaaacctgtccccttcgttcagccgccccgccagcacgattgcaaggcccaacatggccctcggcaagaaggcggctgacagcctgcagcagaatctgcagcgggactacgaccgggccatgagctggaagtacacccggggagccgggcctcggcttctccaccgcccccaacaagatcttttacattgacaggaacgcttccaagtcagtcaagctggaagattaaactctagagttttgtccccccaaaactgccacaattgctttgattattccatttatgctggagattacaaattttttttgtgaaaaaatcagatcttggtgaggacctcgagcagtaagatataaataacttcccataagcttagcgttccagtaatggaacactaggcataaatgggtttattcagttgtgcaaatgaaagccatctgacagttggctcacattgaacacctgtggagattaaggacgaggacaactatattgatgggcttggatgaactggggcagggcagctcatatttcgggagccaggagaacgagtgagtgctaaaacctcctgttttctgtgttaaacattccgtccctgtttgagacatcagtatgtacagttaacttttgttgagtgtttagcaggtactagggacatactagtgttttccttaatgta

SEQ ID NO: 357879 - DNA, 1502 bp, Homo Sapiens
  misc_feature (28)..(28): n is a, c, g, or t
  misc_feature (88)..(88): n is a, c, g, or t
  misc_feature (91)..(91): n is a, c, g, or t
  misc_feature (285)..(285): n is a, c, g, or t
  misc_feature (1337)..(1339): n is a, c, g, or t
  misc_feature (1341)..(1342): n is a, c, g, or t
  misc_feature (1345)..(1353): n is a, c, g, or t
ctgcaggccgccgccagcgccctgggcncgcggtgcgtctgcacctcgagctgggccagccggccgccgccgccgccctctgcctcgngcnggccgccgccctgcgcgacctgggccagccggccgccgccgccggtcacttccagcgcgccgcccagctccagctgccccagctgcccctggccgcgctgcaggcgcttggcgaggccgcctcctgccagctgctggcgcgcgactacaccggcgccctggcggtcttcacgcgcatgcagcgcctggcgcggngagcacggcagccacccggtgcagtcactgccgccgcccccgccgccggcaccccagcccgggcccggggcgacgcccgccctaccggccgcgctgcttcctccgaactccggctcggcggcgccctctcccgccgccctgggcgccttctcggacgtgctggtccgctgcgaggtgtcccgcgtgctgctgctgctcctcctgcaaccaccgcccgccaagctgctgccggagcacgcccagaccctggagaagtactcctgggaggcttttgacagccacgggcaggagagcagcggccagcttcccgaggagctctttctgctgctccagtctttggtcatggctacccacgaaaaggacacggaagccatcaagtcgctgcaggtggagatgtggccactgttgactgctgagcagaaccacctccttcacctcgttctgcaagaaaccatctccccctcaggacagggagtctgatccatcccattcacccagtgacttctttttgcccaggcctggactttttgcatcagtcacgttaaccagatgactttgcctgttaccaaacctcatgcatccacgtttgcgtctggggaggaataaaaagacatcgttcccgcttctgcgttttgttattcctactgccgccataggaattatttcgttggctgaacgttaccagcaccccgagaacacattttgatagaatcagagtagaggacatggctgtcttctaaaaagccacgacatgaaaatgacaatccctttcgtctccttcctccgctgcttccacctaacgcagcctcctgcctccgcctttgtttcatagtgaggattttattttgcacggcgccctccctctaaatacctaccctagatgatttcatcctgcccctcacttcttaacatattcctgtgtctttgtaatggccaaatttctccttccactcgtccgcacggtacgtcttcatgggagtcattttattccttacagcttccttgtaaccacagccctaaatccatgataaagctactcttgtactcctaannnanngannnnnnnnnaactccagggatctatggcgggtggcggaaaaaaaggaaatgaaatgggacatggggcatagctggttccctgacccaccttttcttggacaagggggaagatctggcgggcttccctataggggggcggaattaatttcgataagccc

SEQ ID NO: 357880 - DNA, 959 bp, Homo Sapiens
  misc_feature (3)..(3): n is a, c, g, or t
  misc_feature (8)..(8): n is a, c, g, or t
  misc_feature (90)..(90): n is a, c, g, or t
  misc_feature (197)..(259): n is a, c, g, or t
ccngtggntgtcaaaagcctcccaggagtacttctccagggtctggggcgtgctccgccagcagcttcgcgggcggtggttgcaggaggnagcagcagcagcacgcgggacacctcgcagcggaccagcacgtccgagaaggcgcccagggcggcgggagagggcgccgccgagccggagttcggaggaagcagcgnnnnnnnnnnnnnnnnnnnnnnnnnnnnnnnnnnnnnnnnnnnnnnnnnnnnnnnnnnnnnnntgactgcaccgggtggctgccgtgctcccgcgccaggcgctgcatgcgcgtgaagaccgccagggcgccggtgtatgttgcgcgccagcagctggcaggaggcggcctcgccaagcgcctgcagcacggccagggccacctggggcagctggagctggacggcgcagctggaagtgaaccggcggcggcggcacggctggcccaggtcgcgcagggcagcgtgccagctcgaggcagagggcggcggcggcggccggctggcccagctcgaggtgcagacgcaccgcggcgcccagggcgctggcggcggcctgcaagcggctccccgtaggcggcggggcagaccaggcgctggcgcgcgtcgcgctcctgccgcaggaagaggcgggcggcctcggtgagggccagcgcctccccgggcccgtggaagagcgcctgctggcagcgcgccaccgccagctggcaccaggccgcgtagggcagacactcctgggcgcgcagctcccggcccagctgtccgaactgctcgccggcctccgccacgttcggcttccgcaggaaccgcttcttcagcttgttcgataccagccggtagcgggccaggaagtccccggcctcgggtcccgggccggcgccgccgccgcccaggcctgcagccgctgccgccatgctcgcctcgtgccgaattcgccacccaggc

SEQ ID NO: 357881 - DNA, 1200 bp, Homo Sapiens
  misc_feature (184)..(353): n is a, c, g, or t
  misc_feature (368)..(378): n is a, c, g, or t
gaagagacgaatcctagagtattcttctaggcataatgaatcaaaccagaaatccagtaccctaagataatagtaaaatccttgcaagacacagtgggtcaggtccgtaatcccagcacggaagcctgaggtgcacagatcgcttgaggtcaggagttcaagaccaagcttggcaacccagttnnnnnnnnnnnnnnnnnnnnnnnnnnnnnnnnnnnnnnnnnnnnnnnnnnnnnnnnnnnnnnnnnnnnnnnnnnnnnnnnnnnnnnnnnnnnnnnnnnnnnnnnnnnnnnnnnnnnnnnnnnnnnnnnnnnnnnnnnnnnnnnnnnnnnnnnnnnnnnnnnnnnnnnnnncctctctcaaaaggnnnnnnnnnnngtaaaatatctaaactactggaaattcaataacatacttctcagtaatgtatgggtaaaagaagaagtctcaaaagaaaaaaatacataggactgaatgaaaatgaaaatacagcatatcaaaatatgtgaggcatagccttaaagaagtgctgagagagaaatttatagcacttaattcttacattagaaaacaggaaagccttcaaataaactaatcacagacttaaatgtaaaacataatataaaacttccaggaaaaatagtagaaaatctttgggatatctagggataagtaaagaatttttagacttgacaccaaaagcacaattcataaaagaaaaaattaataaaccataaaaattagaaatttttgcttttcaaagaccttgttaagaggttgaacaaaacaaaatacagactgggagataatctctgcaagccacatatttgacgaaggacttgtatctggaatacataaaaagctctcaaaattcaacagtgaaaaacaatctaggtagaaaatgggcaaaagacatgaatggatatttcactgaagaggatatacggatggcaaacaagcacataaaaaatgtctaattagagaaatgcaaactaaaaccacaagagatgttactacacaactcaacaatcacaagagatgaaaacaccaagtgctgtcgagagtgtggaggaactggatcagtcatacatttctagcaggaatgcaaaatggtatggccactttgcaaaatgagtctaacagtttcctacagaactaaatatgcacttatcgtaacagcccaaaaacatcccgggaatt

SEQ ID NO: 357882 - DNA, 924 bp, Homo Sapiens
  misc_feature (321)..(383): n is a, c, g, or t
  misc_feature (537)..(537): n is a, c, g, or t
gtaaagccaagggagattatccagacccccaggagcgaacagcaagcagcaaccgaagcgcaagtgccaggattacagcctaggctgctccaactatgagcccttcctcggaccctgggactcggctacttggggtttgggggtcttccacaccacagaggcacaaagctgactttaatcactttttttcctttaaacttgattctgccgcagtggagccagcacagcggatgttttcacacccagcaagacaaaggccgtcgtctccgccatgacactgttccgttccaagcagaggccgggattctggactcctcgaannnnnnnnnnnnnnnnnnnnnnnnnnnnnnnnnnnnnnnnnnnnnnnnnnnnnnnnnnnnnnncaccaaaatcgtttgcccgtttgcccgtgccaggggtgatctgggcatctgttgcagcagaaggcgcttgtgtggggctaatttttcttttggtgggggggacaagctgttggcttgtttgctatttcaacttcgtttataattaacttaaaanaaaccccaccattcagcctagtcaacaacaaacaaagaaaaagcagacatcggaagagaaatgccataggaagcggcatgaatacatgccacagccggtgccacttgccactcggaaaacctcagggaaagatgccaattctacagctgcgaagaaggcagagaaaggaggataaaggtctacaactagaaatcataaggaaagaatactgcttgtataatcctggattgcaattgcacacagcctctgctgggagaagagagggaatatttaaatggagatatagatgggtataaattaaaagataggcacctatcgattgcgtataaacacatgtgtaaggttgtatgtgtatataaatatgcatattttcagacaaacgtttag

SEQ ID NO: 357883 - DNA, 1101 bp, Homo Sapiens
  misc_feature (851)..(988): n is a, c, g, or t
  misc_feature (995)..(995): n is a, c, g, or t
  misc_feature (997)..(999): n is a, c, g, or t
  misc_feature (1012)..(1012): n is a, c, g, or t
  misc_feature (1027)..(1027): n is a, c, g, or t
  misc_feature (1030)..(1030): n is a, c, g, or t
  misc_feature (1038)..(1038): n is a, c, g, or t
  misc_feature (1041)..(1041): n is a, c, g, or t
  misc_feature (1046)..(1046): n is a, c, g, or t
  misc_feature (1048)..(1048): n is a, c, g, or t
  misc_feature (1051)..(1051): n is a, c, g, or t
  misc_feature (1055)..(1056): n is a, c, g, or t
  misc_feature (1062)..(1062): n is a, c, g, or t
  misc_feature (1067)..(1067): n is a, c, g, or t
  misc_feature (1069)..(1069): n is a, c, g, or t
  misc_feature (1076)..(1077): n is a, c, g, or t
  misc_feature (1079)..(1080): n is a, c, g, or t
  misc_feature (1083)..(1083): n is a, c, g, or t
  misc_feature (1097)..(1097): n is a, c, g, or t
  misc_feature (1101)..(1101): n is a, c, g, or t
agttcttgtaccaggactaaattttgataaaatgacttttgctgttcctttcatatctaagattcttgaggagaattaaatatagtagtctagagtttcaacctttgaacataacgaccgtgggcgtataccttgtaaaggggtaacactggtgagccataaactaatccaaaaattcacaccttttcttttgttcttacaggtaggtaatccataatttcattgtcggtggtggtatgttcaattaagtactgtttgctaatatttaccttctaagtgcactagtaagggttgctaaaaattactttgaaaaagccaacattgacatattactagtttactgaagaccaaaagtcagtattttcactagaagtctgcactctagacactacatatataacctatcactctctacataatagattatttgcaattatttagttattttatctaattctaattataaccctatggaatttttatgttactgttactacattttacagaggagaagacagaggtagcagaaaactaagctaatttcccaaggtaactcaactagcagaagatagaaccacatgtggagatcaggctccagagaaatccttttaacatctacactatatttcatcttagcacctgtagagttgtcgagcttgagcggcacgtgagaaggcaggtataagtgggctgtggttgaacaaaaaatgtcagagataaatgatcatcagtctagaggtgaagacaatgtgggattagagtgaggaagaaggtacctgcttggcatgagagatgtagttgctttgagtgactggagtctggatggcgtagtagcaacaaggagagagagnnnnnnnnnnnnnnnnnnnnnnnnnnnnnnnnnnnnnnnnnnnnnnnnnnnnnnnnnnnnnnnnnnnnnnnnnnnnnnnnnnnnnnnnnnnnnnnnnnnnnnnnnnnnnnnnnnnnnnnnnnnnnnnnnnnnnnnnnntggtggngnnncctgtatccagcncttggggggtgaggnganactgcttnatntgggngnagngttnngtgacnggatncncactgcnncnnccnggggaaacgagatntgtn

SEQ ID NO: 357884 - DNA, 1970 bp, Homo Sapiens
  misc_feature (434)..(434): n is a, c, g, or t
  misc_feature (439)..(440): n is a, c, g, or t
  misc_feature (447)..(447): n is a, c, g, or t
  misc_feature (453)..(453): n is a, c, g, or t
  misc_feature (462)..(462): n is a, c, g, or t
  misc_feature (465)..(465): n is a, c, g, or t
  misc_feature (467)..(467): n is a, c, g, or t
  misc_feature (471)..(471): n is a, c, g, or t
  misc_feature (475)..(475): n is a, c, g, or t
  misc_feature (477)..(477): n is a, c, g, or t
  misc_feature (481)..(481): n is a, c, g, or t
  misc_feature (483)..(483): n is a, c, g, or t
  misc_feature (502)..(502): n is a, c, g, or t
ccggagcccgggctgagagggacctggggagctgcggcctggccggggcggcgcactcaggtggcctcgcttccctgcgggtcaccgcccgccactcgcacagctaggtcggcctgttgggatcgggagaggtgggcgcacgagttttagtgcgggagtccggggtgcgggcggagtcctattgtccccgtgcacccgggcggcagcacctccgggtccctctttaaaccgagcgtccggcgacctttctttgtgcttagggagtcgaaagcggcatcttctccgagagaagtcgcctactggggggtggcgctggggaggtaacaatgggcgcccattgtcctccgagggtccaacggtgaccccccccgctgcgcacgcgcccggccaccggttggccccgggccagggcacaggtaccgcggccgggaggngtcgnncccgctncccgcnccctccatnccncnccantaantncccncnccgccggccccgccccgcnccgccccgccctccgcagttcagtcctcgcgtccggccgccccgcgctcagtcgcgcgcaccttctctcgcggccgggggaccgcagcgcggggctagcccggagacccggccaccggcctggggcgccttcacgccgtctcggagcggataatgcggtgagcaggcaccacgccggcagactcggctggatctgcgcacagcggcagggattgcgtgcgcccgcgggaggcccggggcagcggctgggatcctcagcggcggccggtttgtcctggttgtggtcaagactggatgatgtaactggctctctaggaagcctcacttggccgtaacctcaggaaggttctctttgaccccatctcatttcgaagccacttctgaagccacttgagaaaaatgatgtgacagttcctatcaaaaaggattcagaaacatataccatctgtgaagaaagtggccctttctcccgcttgcaaaatagacattctcaaattccaaaatgccagccaagaccccaatttacctgaaagcagccaataacaagaaaggaaagaaatttaaactgagggacattctgtctcctgatatgatcagtcccccgcttggagactttcgccacaccatccacattggcaaagagggccagcacgatgtctttggagatatttcctttcttcaagggaactacgagcttttacctggaaaccaggagaaagcacacctgggccagttccctgggcataatgagttcttccgggccaacagcacctcggactctgtgttcacagaaacgccctccccggtgctcaaaaatgccatctccctcccgaccattggaggatcccaagctctcatgttgcccttattgtcaccagtgacatttaattccaaacaggagtccttcgggccagcaaagctgcccaggcttagctgcgagcccgtcatggaggaaaaagctcaggagaaaagcagtctgttggagaatgggacagtccaccagggagacacctcgtggggctccagcggttctgcatctcagtccagccaaggcagagacagccactcctccagcctgtccgaacagtaccccgactggccagccgaggacatgtttgaccatcccaccccatgcgagctcatcaagggaaagactaagtcagaggagtccctctctgaccttacaggttccctcctctccctgcagcttgatcttgggccctcacttttggatgaggtgctgaatgtaatggataaaaataagtaacaagatgccaacttttttcctttggggtaaaaggtacaaaaacaaactaaccacagttgaagagaagggcttccggagctgtatttgcagttttgtgttgggttttctaaaataatattcttacaaagtatttttttacctgttatgccctgttttgcaaaaacaatttagaaaaaaacaacaaagcaaaacctatcttggc

SEQ ID NO: 357885 - DNA, 1098 bp, Homo Sapiens
  misc_feature (36)..(36): n is a, c, g, or t
  misc_feature (42)..(42): n is a, c, g, or t
  misc_feature (51)..(51): n is a, c, g, or t
  misc_feature (54)..(54): n is a, c, g, or t
  misc_feature (62)..(62): n is a, c, g, or t
  misc_feature (65)..(65): n is a, c, g, or t
  misc_feature (73)..(75): n is a, c, g, or t
  misc_feature (124)..(125): n is a, c, g, or t
  misc_feature (155)..(155): n is a, c, g, or t
  misc_feature (447)..(447): n is a, c, g, or t
  misc_feature (456)..(456): n is a, c, g, or t
  misc_feature (474)..(490): n is a, c, g, or t
  misc_feature (1078)..(1078): n is a, c, g, or t
tctacacagatgtgcacttatcccatggatccatgnaagcgngtatggcgngtntggaaagngantcatactnnntttttttcttcatctgtatcatacttttaacagcacccaataacggatnntaaagtgtaaaggcacaggttactcatgancttctgcagagactgtgggctacaccacatatgttatttggaaatataggtattttagtacagtacatacttgcattacataggtacttcaagcaacacaataaaaagtaaatgataaagtgaacttgcttgtttatagtaataaacaagaccataagagaataagtatagctagagaaattgcttctctgaaatgtacatgagcccttaaggtaagagatgatttccatctactctcattttgattacttccttatggtttgagaggctagaaactgaaccaccccacttntggaaaaangaacatgtgaggtcagannnnnnnnnnnnnnnnnaagtcagcactgatgccaccctctcagtggtcatttctgagcatcttcctgacttgaacaccttctacagcaaactcttgcaagtccagtttcatccctgtaaggcaaatgtcttttcacgcagaaagtgccatatagacgagataaaggcagctaaaacgagggcagtagagagcacttacccgaccccaaggtgccagagatgcccctgaggatggtggttaaggaaacaggagcaggaaatgtacacacagattcctgtccctttgcccaactactccttccccatcaaagaaaaacacttgcacacagtaactaccagctccttctctcaaacttgtatttctcctggaaatgtatctcagaaatgacctcctctcccaaccacttcaacgattctttctttgggtttggggttcttgcagttctatcatctaaaataacctttggactgcaggtaaaatgcaattaggacaactaaccaagtagacgaaacaagttcccctaggcaggggtgtccaatattttagcttccctggaccgcattggaagaattttcttgggccacatgtaaaacacactaacacntaaccatagttgatgagctt

SEQ ID NO: 357886 - DNA, 1468 bp, Homo Sapiens
  misc_feature (265)..(317): n is a, c, g, or t
  misc_feature (642)..(669): n is a, c, g, or t
  misc_feature (892)..(892): n is a, c, g, or t
  misc_feature (1299)..(1317): n is a, c, g, or t
ggcagaggagtccctctctgaccttacaggttccctcctctccctgcagcttgatcttgggccctcacttttggatgaggtgctgaatgtaatggataaaaataagtaacaagatgccaacttttttcctttggggtaaaaggtacaaaaacaaactaaccacagttgaagagaagggcttccggagctgtatttgcagttttgtgttgggttttctaaaataatattcttacaaagtatttttttacctgttatgccctgtttnnnnnnnnnnnnnnnnnnnnnnnnnnnnnnnnnnnnnnnnnnnnnnnnnnnnnggaagtgagtcagagcccattttcaggaggcattggtgatgttcggctcacatattgtttgcagacacacaagaaatctggcttggccaggattggcactagctatgaagggctgagcgagtcacattaaggaacttcacggaactttatagcactccgacattttctgagcaagaggaagtcaaaatttatttaacacctaagcctttttgtagactcttttctatatattgcttaggctcaccatagcgaattctccagtgttaaaacttttctgttttcacatttgaactttatgggttttggggattttcttgtagttctnnnnnnnnnnnnnnnnnnnnnnnnnnnntgcaaaattttgactgtcagctacatgttggtaagacacaggcaaagtattactgtaactaagttatttttaaagttaaaatatatttttaacgtgcctttggctttttattgcagagtctacattttatagattctacatcagatgttgtcacttatttccattgggattccattgtaagctgtgtatgtgcgtgtttggaaaagtgtattcatacttagtntttttttcttcatctgttatcatacttttaacagcaaccaataatggattgtaaagtgtaaaggcacaggttactcatgatgcttctgcagagactgtgggctacaccacatatgttatttggaaatataggtattttagtacagtacatacttgcattacataggtacttcaagcaacacaataaaaagtaaatgataaagtgaacttgcttgtttatagtaataaacaaggaccataagagaataagtatagctaagagaaattgctttctctgaaatgtacatgagcccttaaggtaaggagatgaatttccatctactctcattttgattacttccttatggtttgagaggctagaaactgagcctctctacttttggaaaaatgaccatgtgaggtcaagannnnnnnnnnnnnnnnnnnaattcaacccctggtggccaccctcctcaaggggtcatttctgaaccatcttccctgaactttaacaacctttttaacaaaaaaaccctttgccaagtcccaggttttccctcccccggtaaagaggcaaaatgttcttttttttcccccc

SEQ ID NO: 357887 - DNA, 1320 bp, Homo Sapiens
  misc_feature (461)..(461): n is a, c, g, or t
  misc_feature (478)..(478): n is a, c, g, or t
  misc_feature (485)..(486): n is a, c, g, or t
  misc_feature (516)..(516): n is a, c, g, or t
  misc_feature (545)..(545): n is a, c, g, or t
  misc_feature (577)..(585): n is a, c, g, or t
  misc_feature (601)..(829): n is a, c, g, or t
  misc_feature (846)..(846): n is a, c, g, or t
  misc_feature (849)..(849): n is a, c, g, or t
  misc_feature (851)..(851): n is a, c, g, or t
  misc_feature (855)..(929): n is a, c, g, or t
  misc_feature (955)..(955): n is a, c, g, or t
  misc_feature (957)..(957): n is a, c, g, or t
  misc_feature (971)..(1122): n is a, c, g, or t
  misc_feature (1145)..(1145): n is a, c, g, or t
  misc_feature (1175)..(1176): n is a, c, g, or t
  misc_feature (1193)..(1194): n is a, c, g, or t
  misc_feature (1221)..(1221): n is a, c, g, or t
  misc_feature (1249)..(1249): n is a, c, g, or t
  misc_feature (1257)..(1257): n is a, c, g, or t
  misc_feature (1260)..(1260): n is a, c, g, or t
  misc_feature (1266)..(1266): n is a, c, g, or t
  misc_feature (1273)..(1273): n is a, c, g, or t
  misc_feature (1277)..(1278): n is a, c, g, or t
  misc_feature (1295)..(1296): n is a, c, g, or t
  misc_feature (1301)..(1301): n is a, c, g, or t
aatcttcgtgcctcttccccacaacactaagtatagtcacacaatctagacatttgccacaatgtaatcttttttttctctaaagactttctaattcaataaaagccaatgttggggtcagaaaatgataccccaaattacggcacttcggcgtgctgagtactttgaactataggagattggaaggcctcagaagcagcctcagaaggaaagtctctctttgacttcctcatgccttgatggcttccactcacctttctcccacaaagcaggccacagaaattagaattcctcttctcaaagatgagttatggacactagaatccctcttcctcaaaaccagccataaaacctactgagacaccagacaggacagctaaaggagtacttgcattaacactcccccaaccccaggaagcacagcttgcagctccaaaaaaaaccgcttccttctgctagangagattagaggaaagantaaaaannactttgtcttgcatcttggatatcagttgncccacagtagaatagggcactggtcaggntcatgaggtccccattgtggatgtaactaacnnnnnnnnnaattttataggttgannnnnnnnnnnnnnnnnnnnnnnnnnnnnnnnnnnnnnnnnnnnnnnnnnnnnnnnnnnnnnnnnnnnnnnnnnnnnnnnnnnnnnnnnnnnnnnnnnnnnnnnnnnnnnnnnnnnnnnnnnnnnnnnnnnnnnnnnnnnnnnnnnnnnnnnnnnnnnnnnnnnnnnnnnnnnnnnnnnnnnnnnnnnnnnnnnnnnnnnnnnnnnnnnnnnnnnnnnnnnnnnnnnnntaatcgccatgtgtccnacnantttnnnnnnnnnnnnnnnnnnnnnnnnnnnnnnnnnnnnnnnnnnnnnnnnnnnnnnnnnnnnnnnnnnnnnnnnnnnctgtgcactcacttttctctcctgcnancttgtgaaaaaagnnnnnnnnnnnnnnnnnnnnnnnnnnnnnnnnnnnnnnnnnnnnnnnnnnnnnnnnnnnnnnnnnnnnnnnnnnnnnnnnnnnnnnnnnnnnnnnnnnnnnnnnnnnnnnnnnnnnnnnnnnnnnnnnnnnnnnnnnnnnnnnnnnnnnnnnggatccctgaaatattctgagtncctttggaggcaataatctcttcataccannatggtatactgatgaanntcatcctgatctcatgggctgagaaanatttatacataccctttatgtgcagcantctatgtncancttttnaccccanatgnnctttctgcccatctagnnattanattttctaaccaatcatat

SEQ ID NO: 357888 - DNA, 804 bp, Homo Sapiens
aactgcacaagagtctctgcaacactaagtcagttcagaagcttattgattcaccgcaggcaacgtagccataagaaaggtctccaaaaattcctgaccttctggaaatttttaaagtctccgcaggtgtccagaggtgactgtagctgtacagaaagtcactgcctggataactggcctgttaaagcaaatgaaaaatacgctaagcccactaaggatacccagaagccatggtattcaggtaatttttgtctttcttgcaggtgggagaatactgaggattatgccctcctatagccagtgaaggttactccagtgcctagatgtaccagtcaagagaggccatgggagagcagatggcagaagggcagccaggtcctttcactggggtttactgattgtcatgagctctgctgctgggcagcatgtgtgatttctgactcctgccatgtcctcaagaagccttgccccatcagccagctgtactacctcctgaaagctggtgtatgtttgttagcatggagatccagaacaagagtcactttagtatttatccatagagtcccaatgtgtgcacatgcttacctgcaggttgtttttcctattttctgaatgttaatccttgccttctggaactcaatattaccccctgtggccaaatatgggataattgtaaggggaaactgctgtttaggtcccaagtccacagggttagtattattatcaatattaaaattgttaattatggatattagtatcataataatcatcatcattcctgttaatactcatcaatatgtttcc

SEQ ID NO: 357889 - DNA, 608 bp, Homo Sapiens
  misc_feature (539)..(539): n is a, c, g, or t
  misc_feature (553)..(553): n is a, c, g, or t
ctgttacttaagtgtgggtatggtgtgacattccatttgtggactaactatctcactggatcttctttcctgcagtaagaggtgctttgggtcctgcggaagttcattgtctcagtttgtctggtgtttgcagaagagatgtctgcaaagtagtagaagatcaaattggtgccactaccaccacagctggcagtcttttggaagcaccacctcctggctgaaggcctactgacagtcctttacagcatctgagataatgagatgttgttaaatcaggtgtgtgtgacccggatacgtctatctggagtggcaggagagggtctatctgttcacaagagtctctgcaacattttctaagtcagttcagaagcttattgattcacctttgcaggcaacgtagccataagaaaggtctccaaaaattcctgaccttctggaaatttttaaagtctccgcaggtgtccagaggtgactgtagctgtacagaaagtcactgcctggataactggcctggggtagttgcaggtgtaggcctaaanccaggcgtgaaganccttgaactgggggtgtttctgtacctgtagagattgcagactgtcctgggactc

SEQ ID NO: 357890 - DNA, 994 bp, Homo Sapiens
aacgttcatactaaatttattctgttacttaagagtgtttatggatttacattccatttgtggactaattttctcactggatcttctttcctgcagtaagaggtgatttgggtcctgtggaaggtcattgtctcaatttgtctggtgtttgcagaagagatgtctgcaaagtagtagaagatcaaattggtgcctggggtagttgcaggagtaggcctaaatccaggtgtgaagatccttgaactgggggtgtttctgtacctgtagagattgcagactgttctgggactctgctccacttgccaacatttgagtggattcatttgtgttgtagtcaagattcccgttgtggcacaaggacacatgcactcgtgtccaactccaaatagtagcttcacatagtatgtcagcactctcccaccatcatctcttctagaaggtcttccgctggattggaaatggcctgctgcaggacactcagcagctttcagtagttcatccagacatccagttggaagtgggatttcctttagtatgaatttgtttatgtggttcaggggacaaaagattacgaagagattttccacactgtttgctgacatagggtttctttccactacgagttaacaaacactgagttattgtggaactgcgagcgcaatcttctccagaatcattacattcaaaaggatcctccagaatgagagagttctccattgtcatactggtggatgcgtcttttctgataataggatgcatggatatcatgtgtgttttcttaagggcactttccctgtctggattctggtcttgaagaaatactcttccttcccgccacagctcttttccttgctccagctgcaaaattatataggctttgcttatctggtacctagtgaatgcattgtcaggaactcagtttctctctgtcttcctctggatttccacttgcagacactttaggcactaagaaaagcttgcagttggttcctcc

SEQ ID NO: 357891 - DNA, 1083 bp, Homo Sapiens
  misc_feature (64)..(180): n is a, c, g, or t
cttgtggcagtacttttgaacttaatggctgaaagcatccacctccaaacttacgtattatatnnnnnnnnnnnnnnnnnnnnnnnnnnnnnnnnnnnnnnnnnnnnnnnnnnnnnnnnnnnnnnnnnnnnnnnnnnnnnnnnnnnnnnnnnnnnnnnnnnnnnnnnnnnnnnnnnnnnncccgtcctgggactctgctccacttgccaacatttgagtggattaatttgtgtggtagtcaagctacaggaaataaagggaccagtcagtcttccacacaatgacacagaggccaattatcacaagtccaaatctccatttgtcatccagctcacattcccgctgtggcacaaggtcacatgcactcgtgtccaactccaaatagtagcttcacatagtatgtcagcactctcccacccatcacttcttctagaaggtcttcctctggattggaaatggcctgctgcaggacactcagcagctttcagtagttcatccagacatccagctggaagtgggatttcctggaggaggaggaggtgaacctggagctcccgccggcctctgggcgctccttggtggaaggagagggacttggtcctgagcctgccccggatctacctacaccagaaccccggagtcccagtccctggatgggctcagtcccacccaggccagacgccccggagccccgtagcccgggtcctccagccctcgctgccgcctcttctcgcggagccggggccgccccccgcgccacctcagcctctgcggggctctgggagggcagcgccgaggatgctccgggcccagcgcgggtatccgagcccagagtgggtatccggcctcaggcggatactgacgccctgagggcgcggaatagggcggcctgcgcagggcccgccatctcgggccttgcaaaaagagcggcctctccaacgcccctaccggaacctccccggaggccccagccccaaagccagggcgatggcgcctccctgaccatgggtgaagaaaaactcaggtcctgcactgcgacgcgtggtcgacgatatcccgtattccgggccgtacagggcagct

SEQ ID NO: 357892 - DNA, 1238 bp, Homo Sapiens
ggcgtgcgcatcgtgcccgtggaacacctcacccccttcccatgtggcatctttcacaaggtccaggtgaacctgtgccggtggatccaccagcaaagcacagagggcgacgcggacatccgcctgtgggtgaatggctgcaagctggccaaccgtggggccgagctgctggtgctgctggtcaaccacggccagggcattgaggtccaggtccgcggcctggagacggagaagatcaagtgctgcctgctgctggactcggtgtgcagcaccattgagaacgtcatggccaccacgctgccagggctcctgaccgtgaagcattacctgagcccccagcagctgcgggaaaaccatgagcccgtcatgatctaccagccacgggacttcttccgggcacagactctgaaggaaacctcactgaccaacaccatgggggggtacaaggaaagcttcagcagcatcatgtgcttcgggtgtcacgacgtctactcacaggccagcctcggcatggacatccatgcatcagacctgaacctcctcactcggaggaaactgagtcgcctgctggacccgcccgaccccctggggaaggactggtgccttctcgccatgaacttaggcctccctgacctcgtggcaaagtacaacaccagtaacggggctcccaaggatttcctccccagccccctccacgccctgctgcgggaatggaccacctaccctgagagcacagtgggcaccctcatgtccaaactgagggagctgggtcgccgggatgccgcagactttttgctgaaggcatcctctgtgttcaaaatcaacctggatggcaatggccaggaggcctatgcctcgagctgcaacagcggcacctcttacaattcctttagctctgttttatcccggtgagggcagcctctggcttgggcagggtctgtttggactgcagaagcaagggggtgatgtagcccatccttccctttggagatgctgagggtgtttcttcctgcacccacagccagggggatgccactcctccctccggcttgacctgtttctctgccgctacctccctccccgtctcattccgttgtctgtggatggtcattgcagtttaagagcagaacagatcttttactttggccgcttgaaaagctagtgtacctcctctcagtgttttggactccatctctcatcctccagtacccttgcttcttagctgataatattgctgg

SEQ ID NO: 357893 - DNA, 1049 bp, Homo Sapiens
  misc_feature (46)..(330): n is a, c, g, or t
  misc_feature (428)..(711): n is a, c, g, or t
  misc_feature (969)..(969): n is a, c, g, or t
  misc_feature (983)..(983): n is a, c, g, or t
  misc_feature (997)..(997): n is a, c, g, or t
  misc_feature (1004)..(1004): n is a, c, g, or t
  misc_feature (1038)..(1038): n is a, c, g, or t
  misc_feature (1044)..(1044): n is a, c, g, or t
gatttttattattagaatgatgttatgattaaattttatttttgtnnnnnnnnnnnnnnnnnnnnnnnnnnnnnnnnnnnnnnnnnnnnnnnnnnnnnnnnnnnnnnnnnnnnnnnnnnnnnnnnnnnnnnnnnnnnnnnnnnnnnnnnnnnnnnnnnnnnnnnnnnnnnnnnnnnnnnnnnnnnnnnnnnnnnnnnnnnnnnnnnnnnnnnnnnnnnnnnnnnnnnnnnnnnnnnnnnnnnnnnnnnnnnnnnnnnnnnnnnnnnnnnnnnnnnnnnnnnnnnnnnnnnnnnnnnnnnnnnnnnnnnnnnnnnnnnnnnnnnnnnnnnngaaagaaagaacttctattttttaaatgttttttcctttcattgaactccatttatagcctttccattcagagcataaagattaaattttaaaacaannnnnnnnnnnnnnnnnnnnnnnnnnnnnnnnnnnnnnnnnnnnnnnnnnnnnnnnnnnnnnnnnnnnnnnnnnnnnnnnnnnnnnnnnnnnnnnnnnnnnnnnnnnnnnnnnnnnnnnnnnnnnnnnnnnnnnnnnnnnnnnnnnnnnnnnnnnnnnnnnnnnnnnnnnnnnnnnnnnnnnnnnnnnnnnnnnnnnnnnnnnnnnnnnnnnnnnnnnnnnnnnnnnnnnnnnnnnnnnnnnnnnnnnnnnnnnnnnnnnnnnnnnnnnnnnnnnnnnnnnnnnaaatgttttttttaaacaagaatctctcaggcatactgaaatgttgaagaggaaattatattaatatctgggacttgtttccaaatttggaattggggcagggtgtaaattgttggcaatatcaaagaaacgaggagttggaatgataattgtagaagctgcatgatagatacacattctttatacttctgtatatgttgaaattttttatcaaattataattgtgtataatgactaattatgctttcattgtctatnctgtgtggttatgntacttgctgaaatnaatacanaaagagtcatcaacttaaatgaataaacaagcanaaatantaaaa

SEQ ID NO: 357894 - DNA, 1084 bp, Homo Sapiens
tttttacttcccaaacaaccaccagccggggattatccccaaagggatatggcgaagaaaagatcatgacagggcagttttgagttcccagaggaagagtggagtcagatctcagagatggccaaagatgttgtgaggaagctcctgaaggtcaaaccggaggagagactcaccatcgagggagtgctggaccacccctggctcaattccaccgaggccctggataatgtgctgccttctgctcagctgatgatggacaaggcagtggttgcaggaatccagcaggctcacgcggaacagttggccaacatgagaatccaggatttgaaagtcagcctcaaacccctgcactcagtgaacaaccccattttggggaagaggaagttacttggcaccaagccaaaggacagtgtttatatccacgaccatgagaatggagccgaggattccaatgttgccttggaaaaattccgagatgtgattgctcagtgtattttcccccaggctggtaaaggagagaatgaagatgagaaactgaatgaagtaatgcaggaggcttggaagtataaccgggaatgcaaactcctaagagatactctgcagagcttcagctggaatggtcgtggattcacagataaagtagatcgactaaaactggcagaaattgtgaagcaggtgatagaagagcaaaccacgtcccacgaatcccaataatgacagcttcagactttgtttttttaacaatttgaaaaattattctttaatgtataaagtaattttatgtaaattaataaatcataatttcatttccacattgattaaagctgctgtatagatttagggtgcaggacttaataatagtatagttattgtttgtttttaagaaaagctcagttctagagacatactattactttaggactgtgtagttgtatatttgtaagatgacagatgatgctgtcaagcaatattgttttatttgtaataaaatatacaaaaatcacttgccagcagtagaaaaaaggaccgactataccgacctttctgattagtaaacagttgaatcaaggactctgaaaaaaaa

SEQ ID NO: 357895 - DNA, 494 bp, Homo Sapiens
gcggccgcgtggggcccagcacaaagacctgtccccaggggccgccgcctccgccgctgctgctgccgccagcctagagccgcccgccgaagcagagccggcgccggggtcctcatccccaccggtcccgaggggcggctgctgcccgtcgccacgaggcccaggggcccgagtgccgagccctttgctccctcggccgcgcggggacagggctgctgagcagcctccgcctctcccggctgtgggggccccactgagtatgtcggaggagagcgacatggacaaagccatcaaggccgccagcatttgcttccggatggtctacagaacttggagagttggaatttatccatccctcccgatttgtttgaaatcagccttctggaaatctgcagttggaaaaaggaagcattgagtttacttaggaaaagttaacagttcctgtgacttaactgcacttaaaccaaaagaaaagcaaatgtgtgttcgaaaat

SEQ ID NO: 357896 - DNA, 1343 bp, Homo Sapiens
  misc_feature (1175)..(1175): n is a, c, g, or t
  misc_feature (1191)..(1191): n is a, c, g, or t
agacctgtccccaggggccgccgcctccgccgctgctgctgccgccagcctagagccgcccgccgaagcagagccggcgccggggtcctcatccccaccggtcccgaggggcggctgctgcccgtcgccacgaggcccaggggcccgagtgccgagccctttgctccctcggccgcgcggggacagggctgctgagcagcctccgcctctcccggctgtgggggccccactgagtatgtcggaggagagcgacatggacaaagccatcaaggaaacttccattttagaagaatacagtatcaattggactcagaagctgggagctggaattagtggtccagttagagtctgtgtaaagaaatctactcaagaacggtttgcgctgaaaattcttcttgatcgtccaaaagctagaaatgaggtacgtctgcacatgatgtgtgccacacacccaaacatagttcagattattgaagtgtttgctaacagtgtccagtttccccatgagtccagccctagggcccgactcttaattgtaatggagatgatggaagggggagagctatttcacagaatcagccagcaccggcactttacagagaagcaagccagccaagtaacaaagcagatagctttggctctgcggcactgtcacttgttaaacattgcgcacagagacctcaagcctgaaaatctgctttttaaggataactctttggatgccccagtgaagttgtgtgactttggatttgccaagattgaccaaggtgacttgatgacaccccagttcaccccttattatgtagcaccccaggtactggaggcgcaaagaaggcatcagaaggagaaatctggcatcatacctacctcaccgacgccctacacttacaacaagagctgtgacttgtggtccctaggggtgattatctatgtgatgctgtgcggataccctcctttttactccaaacaccacagccggactatcccaaaggatatgcgaagaaagatcatgacaggcagttttgagttcccagaagaaagagtggagtcagatctcagagatggccaaagatgttgttgagaagctcctgaaaggtcaaaccgggagagagactccccatccagggagtgctggaaccccccctggctcaattccccgaggccctggataatgngctgccctctgctcanctgataagggacaaggccatggttgccaggaatccaccaggttcccgcggaaactttggcccacatggaaaatctcggatctgaaagttaagcctaaagcccttgcactccgggaaaaccccattttttggggaaaaaggaagatttctggg

SEQ ID NO: 357897 - DNA, 1542 bp, Homo Sapiens
  misc_feature (18)..(19): n is a, c, g, or t
  misc_feature (30)..(30): n is a, c, g, or t
  misc_feature (35)..(36): n is a, c, g, or t
  misc_feature (42)..(42): n is a, c, g, or t
  misc_feature (47)..(47): n is a, c, g, or t
  misc_feature (49)..(49): n is a, c, g, or t
  misc_feature (51)..(51): n is a, c, g, or t
  misc_feature (53)..(53): n is a, c, g, or t
  misc_feature (56)..(56): n is a, c, g, or t
  misc_feature (62)..(63): n is a, c, g, or t
  misc_feature (67)..(67): n is a, c, g, or t
  misc_feature (70)..(70): n is a, c, g, or t
  misc_feature (82)..(82): n is a, c, g, or t
  misc_feature (88)..(88): n is a, c, g, or t
  misc_feature (112)..(112): n is a, c, g, or t
  misc_feature (117)..(118): n is a, c, g, or t
  misc_feature (125)..(125): n is a, c, g, or t
  misc_feature (130)..(130): n is a, c, g, or t
  misc_feature (426)..(434): n is a, c, g, or t
  misc_feature (436)..(437): n is a, c, g, or t
  misc_feature (972)..(982): n is a, c, g, or t
  misc_feature (1528)..(1528): n is a, c, g, or t
aatttgtgaaaaaatatnntttgcgtttcncccannacctcnttaananananaanttatcnngcanaancttaacttcttntgatgngcaacagacacagccacctacatngctgnnaacaacngtatnttacacacactgattggaagaccatatcagaaaaaacagagtaaggcaccactcttgggaaattaaggtagcttgcagtaacaagtgttggagcaccataaataagtaggtgctcaataaataccatgaatgaatgatgaaagccataattagctctattcttttaattgccagcaattcttcaacctcaacaaaatacttatttaaaaaaagatttgtacctgaatacaacttcctgatctttttttcctgataccttttcatttcgttgtttctttagcatttaaatttcctcnnnnnnnnngnntttaaataaaaccataccttacatgcgcgttcagttacacatataagttttgaattactgacaaatatgaatagaatcatttattttaatttttaacagaggtaaaataaagcatacttatccaaagggataacacataatactggatattaacctaaaggtgaaaagaaagaaggaaaaaagtaacagttttattttttaatatttgctattttctttaatgccttagttctggagaaaggctaaaatctcatcatattgacattaacacatttttaaaaagtgtctctcaagtgtaatatttaataaaactaggtactgaaaaatgttctgaaatttttcaagtcaatgttgttttcaagtatattaaaatgctcagaagaaaaaattctccatggttataattctgatcaatctataaatgtactttttaaaagagagttccaacagaggtggataataggtaagttcctcagacacaggcatacagtctttttgaagaaatagaatgccttgttaccacaacctggttgannnnnnnnnnnaaacactgatttcaggcacaatggctgaatccacttctgggtcatctttctcctcctcttggttggtttacaagagtagtgaatacttcagttatggacagaaagaaagacacaaactctgaaacggagacttcacttttcactacaaagaaatcaaagtcactgagttctcattgttgtgtgtatctgctgcccctgtgcaaaaataggggattcaaacttaactttaggagcaagaactggataaaagattcatctactgattcaggtaacaagttttaagatggtattgctcacatcacatgaacaggttggtaaaaggtccactgtgtttctttaccactttggtcttgctgcagtattatggtgccctagtaggtacattcaggtttagctagtttcagtctgcgcaatcaggaagcaggtcactcagtgcaatgactccattctgggaggatttagggtaaacagagaagaacctcatttggtcaagttttagatagtatgtgtcactctgctggttgtgttgttggaattattttccanagtggtttatgata

SEQ ID NO: 357898 - DNA, 1110 bp, Homo Sapiens
  misc_feature (31)..(31): n is a, c, g, or t
  misc_feature (1022)..(1022): n is a, c, g, or t
  misc_feature (1031)..(1031): n is a, c, g, or t
  misc_feature (1038)..(1038): n is a, c, g, or t
  misc_feature (1072)..(1072): n is a, c, g, or t
  misc_feature (1077)..(1077): n is a, c, g, or t
agaaatcccaacccttcatgaacagggcctnaccccccaaacccacacccccggaaaagtaaacggggtcctaaggaggggccctgtccaatcacctgaagatgctgccctcacccctaaattcctatggggatggtgtgggcatggtgtaggggggaaaatgtgggctgaggggattcagacatcccagggtcaaacatgggatgtttgacaaatttttaaacaaatagaaaggggtttgatcacatagttgcgtgttctgaaatgatacaggaacattttctatcagatttcagaactacctgtgcttctgataagcaagactgttaactttggggtgtggaattgttgtgtttcttctttgcattgactgctaggaagctctattctgttcaccatagaaagtttgtaggaattcctgacataaatagtgaagactatccttacatctggtttccaccttattttcctgccctcgttttaacatcacccagatttcttcagttataaatatgccatacacctttgtaagtcacctcaaatcttcttcaaaagaagcagaacagtgaaaaaaacagatgagtaagttaagagttggtcatctggaaagaagaaaactcagtaggcaccttcttttgttttttcttgtggtgtccggatcagcatcctgcatgtgagattcatccacgttgtcctgtctagcagtagttcagttctcttcatggttatgtctggtttcattctatgattatatcacaatttatctattctacacttgggtggcagctgcttcagattttttacttttaaaaaatatacttaaaagtgaactacaggcagggcatgatggctcatgcctgtaatgccagcactttgccaaggtggccaaatcacctaagatcaggagttcaagatcaacctagcctaaataacaaaaccctgtctctactaaaaaatacaaaaattaacttgttttgtttatgaacacatataatcccagctacttgggatgttaaaataanaacaactcnttaaacntaaaaaataaaattacattaagttaaaatttacnactanactatagcctaatgacaaaacaacatccatctc

SEQ ID NO: 357899 - DNA, 825 bp, Homo Sapiens
gaatgggtgaactctgctctttccttttcccaataactttgcaaccctcattccacaaacccacagattaatgtgggtacatcaccttattcgtgttttattctctttcaggatattgttcttccctacgtgatagtgtggataatatttctatcattgtggtagtatttcctattcctatttgcacagccattgctctagtgttgatgggaagagtagaaaaactgtggtcaaagcaaaagagcagaagatgagaagagaccacagctgagctctaaattttgtctgttcttggtttccattggagaagaaactttaaaggagacaagcctcacagccttgcctaaaatgagtaaaactagaatgttaaacagaaactggctgcgcttactcactttgccctagggtctaatccagaaaccgttacaagaaaatgtaactgcagtagaccacatcccagtgagcctgggatgtaaatagagagaggcttaatatggtcatttcatgtgcattccatctattggataagaaagggtaaaaacaacaaaatggacattaaatagttgaaattcttctgtctccccacagagtgtcacccttgctccatgcatttccatggcttgctcaagtcaaaatctctggctcacagattttgtacatgatacttgaagagaatttatctcagattcttcattgctcaagggacccactttggtcttctttggagacttggaacaaggaccgagtctccctgatcacttccattctcatgcccgggcctggatttaaccctgacagctcttgcctggtgggtcagaacctaag

SEQ ID NO: 357900 - DNA, 942 bp, Homo Sapiens
  misc_feature (5)..(5): n is a, c, g, or t
  misc_feature (9)..(9): n is a, c, g, or t
  misc_feature (20)..(20): n is a, c, g, or t
  misc_feature (58)..(58): n is a, c, g, or t
  misc_feature (91)..(91): n is a, c, g, or t
  misc_feature (111)..(112): n is a, c, g, or t
  misc_feature (114)..(114): n is a, c, g, or t
  misc_feature (150)..(150): n is a, c, g, or t
  misc_feature (378)..(378): n is a, c, g, or t
  misc_feature (513)..(573): n is a, c, g, or t
caccntttntcgtcaaactncaccacctccacccccctccccacacaccccaacaggntatacaaatgacaacaaaacatattctttggancccacacgggaaggggaacnncnaggggagtttcttccttccctcagctttcgcctggnagcctagaactggcttccagccctagcccctcagtgggcagactggggtcagcggcttcacagagaagtagaggtgggcaggagaggcccaaagcccagctccggaggcccccgaggccctcttcttcccccaggctgaggggcagggagaactgtgcccaccatgcccggactcccggcggcattctagacaggccaccgcccactctgggcaccaacctccttaanggagggagaccagcctggatggcggggaaccctccagaagcccacaaaaccgcaaatggcccaggggagcaagcatgattcctggagtggggcatccaggagcaaagggaggcattgggttctgtttgctttacnnnnnnnnnnnnnnnnnnnnnnnnnnnnnnnnnnnnnnnnnnnnnnnnnnnnnnnnnnnnntggctccaacccacaagggaaaacgaaccactcaataaatacacagccagtgagggaatgcggcaggggagggccccaggtcctagtgctggcggtagcagtaaacaccgtacaagcggctctgcgggtcggggaagccaaagcttcggaccccaggctctgggggcccacagttaggatgcgggtgaaccacagggtagcggacgctaccatctgccagccagccagcgtcgcagcggtccaggccatggaacttccaggcggcaaagagctgtcccaccttggcgatcgtggcatcatcttcctggcagcctcccttgcctctgtcagcgtcacttctcagggtgctccaggtagtacaccgccctt

SEQ ID NO: 357901 - DNA, 1387 bp, Homo Sapiens
  misc_feature (1213)..(1213): n is a, c, g, or t
  misc_feature (1259)..(1259): n is a, c, g, or t
ggggtttggctgaggggagcgagcggcgctttgggggaggggtcgcgtaggcgcctcacctgaccctgcggccgtgcggttgctgctccggggcaggtctccttccaggccaggggcccggaatcatgtacataaagcaggtgattatccagggttttcgaagttacagagatcaaacaattgtagatcccttcagttcaaaacataatgtgattgtgggcagaaatggatctggaaaaagtaactttttttatgcaattcagtttgttctcagtgatgagtttagtcatcttcgtccagaacagcggttggctttattgcatgaaggtactggtcctcgtgttatttctgcttttgtggagattatttttgataattcagacaaccggttaccaatcgataaagaggaagtttcacttcgaagagttattggtgccaaaaaggatcagtatttcttagacaagaagatggtcacgaaaaatgatgtgatgaacctccttgaaagcgctggtttttctcgaagcaatccttattatattgttaaacaaggaaagatcaaccagatggcaacagcaccagattctcagagattaaagctattaagagaagtagctggtactagagtgtatgacgaacgaaaggaagaaagcatctccttaatgaaagaaacagagggcaaacgggaaaaaatcaatgagttgttaaaatacattgaagagagattacatactctagaggaagaaaaggaagaactagctcagtatcagaagtgggataaaatgagacgagccctggaatataccatttacaatcaggaacttaacgagactcgtgccaaacttgatgagctttctgctaagcgagagactagtggagaaaaatccagacaattaagagatgctcagcaggatgcaagagataaaatggaggatatcgaacgccaagttagagaattgaaaacaaaaatttcagctatgaaagaagaaaaagaacagcttagtgctgaaagacaagagcagattaagcagaggactaagttggagcttaaagccaaggatttacaagatgaactagcaggcaatagtgaacaaaggaaacgtttattaaaagagaggcagaagctgcttgaaaaaatagaagaaaagcagaaagaactggcagaaacagaacccaaattcaacagtgtgaaagagaaagaagaacgaggaattgntagattggctcaagctacccaggaaagaacggatctttatgcaaancagggtcgaggaagccagtttacatcaaaagaagaaagggataagtggattaaaaaggaactcaagtctttagatcaggctattaatgacaagaaaagacagattgctgctatacataaggatttgga

SEQ ID NO: 357902 - DNA, 901 bp, Homo Sapiens
  misc_feature (19)..(19): n is a, c, g, or t
  misc_feature (54)..(54): n is a, c, g, or t
  misc_feature (77)..(77): n is a, c, g, or t
  misc_feature (83)..(83): n is a, c, g, or t
  misc_feature (131)..(131): n is a, c, g, or t
  misc_feature (196)..(196): n is a, c, g, or t
cggaattcccgggatcgcncggctccggctcggcacgcctcgggacgcctcggngtcgggctccggctgccgctgcngctgcngcgcccgcgctccggtgcgctccgcctcctgtgcccgccgcggaccangtctgcgcgcccgccgtgcgccctcagctccttttcctgagcccgccgcgatgggagctgcgcgnggatccccggccagaccccgccggttgcctctgctcagcgtcctgctgctgccgctgctgggcggtacccagacagccattgtcttcatcaagcagccgtcctcccaggatgcactgcaggggcgccgggcgctgcttcgctgtgaggttgaggctccgggcccggtacatgtgtactggctgctcgatggggcccctgtccaggacacggagcggcgtttcgcccagggcagcagcctgagctttgcagctgtggaccggctgcaggactctggcaccttccagtgtgtggctcgggatgatgtcactggagaagaagcccgcagtgccaacgcctccttcaacatcaaatgtgagagccaggggggctgtgcccagtccccctgtcagaccctcaatgactgaggcctgggggatccctcccttacctcagcttctcccatttccagttaaacgggccaggcagaatgcatttatcatcagctttttttgctcatgtggataagaggaaattaaaagttatattttttccaaaattttttccttcaagtctgggacccatttatctgctgcatgcttgtgcaaatggaaagggcggccgagcccttggccaagtgtcagacttgacctgccagggaccaggcaggcacttagtatctggtaactgtagccccagcctcagcctccagggcttccttgtgtctg

SEQ ID NO: 357903 - DNA, 988 bp, Homo Sapiens
gaattcccgggatccagaatcaaaagacttggggtcccagacccctcaagccttaacatttaatgatgggatgagtgaagtgaaagatgaacagacaccaggctggacaacagccgccagtgacatgaagtttgagtatttgctttatggtcaccatcgggagcagattgcctgccaggcgtgtgggaagacgttttctgatgaaggcagattgaggaagcatgagaaactccacacggcggacaggccatttgtttgtgaaatgtgcacaaaaggtttcaccacacaggcccacctgaaagaacacctaaaaatccacacaggatataagccctatagctgtgaggtgtgtggaaaatcatttatccgtgccccagacttaaagaagcatgagagagttcacactaatgaaagaccgtttgcgtgccacatgtgtgacaaagccttcaaacacaagtctcacctcaaggatcatgaaagaagacacagaggggaaaagccttttgtgtgtggctcctgcaccaaggcatttgccaaggcatctgatctgaaaaggcacgagaacaatatgcacagtgaaaggaagcaggttacccccagtgccatccagagcgagacagaacagttgcaggcggcagcgatggctgcggaagcagaacagcagctggagacgatagcctgtagctagaggcggtgggacagggacactttgcctggaaagtggagactgagatgacgtggatcataatgagtgaatgccagttacaatatttttgtggaaacgtatggaacattgtactcactggacttaaggcagtgcttggttagctatttttaagacttttcaaggaaatggtgttcctcagttctgaccaaaccgtttcactgtcttgtctggtgtctagtattaatgttgccagtaagcacctctctcccttttttttattattttaattgagacacctgtgaaagtaggtaccgagctcga

SEQ ID NO: 357904 - DNA, 935 bp, Homo Sapiens
  misc_feature (19)..(19): n is a, c, g, or t
tggcagtaaccccgagtantaggtagcgaggcctgggtggcgaattcggcacgagggcgcggtggacggtctgaaagggagtgttcgggtttcgctggggcctcgcggctccagagcccagcatggcttcctcgcgagcctcttccacggcaaccaaaactaaagcacccgacgacttagttgctccggtcgtgaagaaaccacacatctattatggaagtttggaagagaaggagagggagcgtctggccaaaggagagtctgggattttggggaaagacggacttaaagcagggatcgaagctggaaatattaatataacctctggagaagtgtttgaaattgaagagcatatcagcgagcgacaggcagaagtattggctgagtttgagagaaggaagcgagcccggcagatcaatgtttccacagatgactcagaggtcaaagcttgccttagagccttgggggaacccatcacactttttggagagggtcctgctgaaagaagagaaaggttaagaaatatcctctcagttgtcggtactgatgccttgaaaaagaccaaaaaggatgatgagaagtctaaaaagtccaaagaagagtatcagcaaacctggtatcatgaaggaccaaatagcttgaaggtggcaagactatggattgctaattattcgttgcccagggcaatgaaacgcttgggaagaggcccgactcccataaggagattcctgagacaacaaggacctcccagatgcaagagctgcacaacgtctctccggtctttgaataatttttgcagtcagattggggatgatcggcctatctcctactgtcactttagtcccaattccaagatgctggccacagcttgtttggagtgggctttgcaagctctggtctgttcctgattgcaacctccttcacactcttcgagg

SEQ ID NO: 357905 - DNA, 2144 bp, Homo Sapiens
atcaggccaaatcggccgagctcgaattcgtcgagagcggagtgcggccgtcatggcgtcgcccttcagcggggcgctgcagctgacggacctggatgacttcatcgggccgtctcaggagtgcatcaagcctgtcaaagtggaaaaaagggcgggaagtggcgtggccaagattcgcattgaagatgacgggagctacttccaaattaaccaagacggcgggacccggaggctggagaaggccaaggtctcgctaaacgactgcctggcgtgcagcggctgcatcacctccgcagagaccgtgcttatcacccagcagagccacgaggagctgaagaaggttctagatgctaacaagatggcggcacccagtcagcagaggctggttgtagtttcggtctcaccacagtctagagcatcgctggctgcacggtttcagctgaatcctacagatactgccaggaaattaacctcattctttaaaaaaataggggtgcacttcgtcttcgacaccgccttctcaaggcacttcagcctcctggagagccagcgagagtttgtgcggcgattccgaggacaggccgactgcagacaggcgctgcccctgctggcctctgcctgcccaggctggatctgctatgccgagaagactcacggcagcttcatcctcccccacatcagcaccgcccggtccccgcagcaggtcatgggctccctggtcaaggacttcttcgcccagcagcagcacttgacccctgacaagatctaccacgtcacagtgatgccctgctatgacaaaaagctggaagcctccagacccgactttttcaaccaggagcaccagacacgggatgtggactgtgtcctcacaacaggagaagttttcaggttgctggaggaagagggcgtctccctccccgacctggaaccagcccctctggacagcctgtgcagcggtgcctctgcagaggagcccaccagccatcggggagggggctcggggggctacctggagcacgtgttccggcacgcggcccgagagctctttggaatccatgtggctgaggttacctacaaacccctgaggaacaaagacttccaggaggtgacactggagaaggagggccaggtgctgctgcacttcgcaatggcgtacggcttccgcaacatccagaacctggtgcagaggctcaaacgagggcgctgcccctaccactacgtggaggtcatggcctgcccctcaggctgcctgaacggcgggggccagctccaggccccagacaggcccagcagagagctcctccagcacgtggagagactgtacggcatggtccgggctgaggcgcccgaggacgcgcctggggttcaggagctgtacacacactggctgcagggcacggactcggagtgtgcaggtcgcttgctgcatacgcagtaccacgccgtggagaaggccagcactggcctgggcatccggtggtaggggctgcaggaccaggactcccaggaggccgtgtccaatgtgtaacagaagaaccacatgccccaagaccccagggcttcccccaaaattctgagtgagctgcagggtgtgctgggacccgagtaggagctaggactagccaggacccgcagccgcctcgtcacctccagttgggtgcctctgggttcccactggctctgcccaggtggggtggggtggcccaggcagcagaaggttccctgaggtcccagagcctgttccgttggccctgggccgaggcccacaggtgctgcccttgctgctgctggtcgggcacccaagtgcgtgaggggcttcagcctgtcccggggttgcctgaggcagagcaagacgggttctcacccctgacttctggaggcttcccttgaagctctgtgcaaaaggtgggagacagagctggacctgcaggggtggtcccgccacaaccctgcgtgtggaccctggcaggggggggtgccaggcccctggaaagcaggggttaccgttacgaggctgtggtccggggcaagccaagtacgaagcagcagccatcgcgggctgcatcatcccccagccaggtccccaccaggcctgtctcccagcgtttgtctaataaacgcacccctcctaaaacacgcctacg

SEQ ID NO: 357906 - DNA, 1096 bp, Homo Sapiens
  misc_feature (438)..(447): n is a, c, g, or t
  misc_feature (937)..(937): n is a, c, g, or t
ctttgcctaactggttagagcttcccgtcctgctgtacatttcataatatttaatgagcacacttgtgcaacataagatgtaacatatgctgataccttcaacaaggaagaaataatgcttttgccgagctcagtaggacttttttgttgcctgtttattggatcattcatgtctttatgagtgtgcttgtcttaatatctttccagttattctgtaaaccaaatttagaaattatgtcaaagggacagtcagatggccagggcaatgaaatggcatgacacagccagttattgaaaataccttcaaattcttaagtttcaaagcttaagatgaacctatatatgtaaaaatctaataagaaattcagacagtaatacattagtttcatcatccaaaacaccaagaaagccataatttaggggtaattttgtttgccnnnnnnnnnnaaattcgccacattttgaaagaactaaaggcattagtgtcataaaagaaaagtaatagatcagatgagctacttgaaaccacctatatttggaagattgaaataaaactttctaaattttaattagtatatttccaattcatgcattactaattaggaacaattacaaagagttgacaagaaaacagcctaattcttcactatgagtagagagatagtgggttaatttttgaaaagaaagatgaagtaccatatgtaatttaatattacttcccacaatccaagatctgcagctctatggttgagctccacttgtgtttcctccctggctccatccccacctccctgaacaataaggtagctgaacctcatccctacccctagcccatctccaattcttctccactggaaatttggcatgctctattagccctggatcgggggggaaaaagtgtaggatctcagtcaaaattttggcacgagggaacaanaaaaataggggagtataggaaaacaactcattctaaaccaggaagtctagtatcaaacatttcaatatggaggaaaaaaaactagcactttggggggaaagctttttgggggaaaagcgatgatgaggcacaaaagaaaaagaaggaagacagaaaagg

SEQ ID NO: 357907 - DNA, 1364 bp, Homo Sapiens
  misc_feature (18)..(18): n is a, c, g, or t
  misc_feature (26)..(26): n is a, c, g, or t
  misc_feature (30)..(30): n is a, c, g, or t
  misc_feature (39)..(39): n is a, c, g, or t
  misc_feature (47)..(48): n is a, c, g, or t
  misc_feature (57)..(58): n is a, c, g, or t
  misc_feature (66)..(66): n is a, c, g, or t
  misc_feature (80)..(81): n is a, c, g, or t
  misc_feature (99)..(99): n is a, c, g, or t
  misc_feature (111)..(111): n is a, c, g, or t
  misc_feature (113)..(113): n is a, c, g, or t
  misc_feature (115)..(116): n is a, c, g, or t
  misc_feature (137)..(137): n is a, c, g, or t
  misc_feature (170)..(170): n is a, c, g, or t
  misc_feature (176)..(176): n is a, c, g, or t
  misc_feature (192)..(192): n is a, c, g, or t
  misc_feature (486)..(495): n is a, c, g, or t
aacagtaggggggggagncatcaagnttgnttcccgccncttctttnntaacttacnntttgaganttgcgaggcagganngcgcctggccctggtaantatgttttcttntnanngccaaccaaccattctagccncacgaatagttaggaaatgccaaagtgggattntaaccncatcaaaggagatggnccctgcaacacaagcacctttgggtcagtgtgttaattagggctgagagcctgggtgaaaggcaagaagaggggcaaaagaggctgaggtggtaattcctcttgtcagtgtcatgggagaaaagaaacaaggaacgtttactgtctaaactgagctgggcagagggcagggaaactatgaaagcaaaatatctgtaaatgtgctcacctccccaacaaaaggaagactgtccccaactccatcctcccagccctacttcctacttccgtttctaccaacccaaaaggcacattnnnnnnnnnnttgtcagagggggctaagtactaggaaggcaaatggactgactgcctggaacaaggtacccagggaaacccaggaatccccccagacaatcaccaaatctcactgcttccagacaataaagctgttgaatcccctccttctcctctgtggggtctacctgtttctctgtgtaaaacagcaaaagtacatgagggagactgttaaagatgagcatccctcagaagcccccagctgactgctgcccattagctcaaaaatcccaatactgggggcactacatactgcaaattacttaacattttgtcccagcaaaaaatgttttaacattttatagttcataacttcaaaaaatacataagtttggtaaaatatacatgcttagtcagttttgcatctagcagaaaacaaatattttattttttgttttcattttataacctttagagtttcttaattcaactagggcaaacatatttacacaaagccaccagaacgaggatcacttaaagagctggatgtaaaaaatattattgcagtatactacaaatatggaaccttttttatatgagctacaaaaagcagcatttacgtttatagagttcagtgcaattttttacattaaaaaaatcctataaattaagaaggaaacatcaacacaacagaagaaaatatacccttcactttagacacatgagctcctctctgggccatacagcttttattcatgataggatcttcttttctgggatatggagatgcctcttctgggatgagggataccaagataacagtgccaaatgtgtggctccgttgaggtgagaactggatggaattgcagcctgagttatatcaggttccaggtgcttttt

SEQ ID NO: 357908 - DNA, 871 bp, Homo Sapiens
  misc_feature (283)..(283): n is a, c, g, or t
  misc_feature (350)..(350): n is a, c, g, or t
  misc_feature (376)..(376): n is a, c, g, or t
  misc_feature (461)..(461): n is a, c, g, or t
  misc_feature (490)..(490): n is a, c, g, or t
  misc_feature (494)..(494): n is a, c, g, or t
  misc_feature (497)..(497): n is a, c, g, or t
aatgtgccttttgggttggtagaaacggaagtagaagtaggctggaggatgagttgggacagtcttccttttgttgggaggtgagcacatttacagatattttgcttcatagtttccatgccctctgcccagctcagtttagacagtaaacgttccttgtttcttttctcccatgacactgacaagaggaattaccacctcagcctcttttgcccctcttcttgcctttcacccaggctctccgccctcattcacacactgacccacaggtgcttgtgttgcnggtcccatctcctttgatgaggttaacaattcccactttggcattttcctaactattcgtgtggctngaattggttggttggtcacttgacangaaaaaccatacttacctgggccaaggctctgttcctgccttcgcaaattctcaaaagagtaaagtttatgaaaagaaagtggcnggcaaacaccactcttgactgcccccccncccnccnccctgttcagtactcatctgattcagaagcatcacttcttggataactagcactggaaaaatgaaatcatctgtgtaagtgaagggactcatttttcctttgctttcagcccatgtaaataaataatacagtattaacattttcgtgctgcttcccattagcttgtagattgagccatactctggctgcctctttgccttcctaggggcattttctttaacttccagaatagtgattttaaaagtaaaaataaaaataaaccttacttacaagcataacagattgtatttaactttatcacatatgatagagatatatatgctgtaaaatgagggaaaggaactttctaataaaccaatgatttgtggaaactt

SEQ ID NO: 357909 - DNA, 1170 bp, Homo Sapiens
  misc_feature (9)..(9): n is a, c, g, or t
  misc_feature (13)..(13): n is a, c, g, or t
  misc_feature (18)..(18): n is a, c, g, or t
  misc_feature (33)..(34): n is a, c, g, or t
  misc_feature (54)..(54): n is a, c, g, or t
  misc_feature (83)..(83): n is a, c, g, or t
taccaagtntttnctacntccagaaaaggaatnngtcaataactgtgctccttntaacaggtccattgtgagtgagtcgaggntctttccaaactacacgattcaccccagacttgttcattacactcccaccaagtccttcgattcgttctctttccttgggaagttctggcttatggtcctgtgtcacctccacagctctgacaaagtctatcttcgggtcatcctgaattccaagaaccacccctgagtcacctacgtgagctacatacatcttcatgccccgaatgatgaccacactggcagttgtccctgatgtgctaggaagacccgtcatagtctttggccattccgccagtttcttccacatggcaaggtgacaagcgagaaagcctttgcggatggcagcgcaaaacttagccggctcggacgaggtgaaacccttcctgcattcttgatgaaacccacacacagtgctacccgggcaaactgtgccgcctcccgccacgcacgtgcccgtcgcacacggcgaaaaaggccacggaggaacggcggcggcagcaacggctaggtgccggcgaggccccggcgtccgggagaggatcgcgagccatctcgggctgtccaccgactgggcctttccccacgagacttacgccgccagggaagggacggcctgagcggacggaaccagcggaggcaacggctgagacagcgaccgccgcaggcgagggcttttcttcagccgtcggttcgggctccacaacgatttgagtaacgtcctccatgtacttcctcccgcactggtcggagaagacgctcactcccaagcgagtacagccccgccatggccggctggccgggatcccgccggtcccacgcagcccgccgaatccggcggcgggagacacactaggcgctcgccggccaactattgtttatcttcgacgacgccgagaagggggagggggcggacccggagaagggggggcgcgcgatgtctggacttgtccgcgagagctgggccgtagcgccggagcgagcagagccaggcagttgcgcctgcgcactagcgcttccccccgctctcgacgaattcgacgctcgaccgatttggcctgatccacaacttctgataatagtatggtaaacgcagggatcttgcctaca

SEQ ID NO: 357910 - DNA, 1573 bp, Homo Sapiens
ggggttctgcctatacgtgtatatctgcaagttacaataaggttattctcctttgcaaaaacaatgacaaacctcaaaccatgtgttttatatatgctctcattttagagtcttggccttttccttatcctccattacttctgtcacagttaagattgatggagttcatttaggccaggctgttcatgtgtctggtcccattttcgtactgaagtggaatcctagaaactacagtagtgggacacataacatagaagtaatcgtccaggattctgctggaagaagtaagagtgttcaccacatattttctgttcaagagaataatcatctcagttttgatcccctggcatcatttattctccgtactgatcactacatcatggcccgggtcctttttgtgctgattgtgctgagccagctcaccattctcattatttttagatatcgaagatacccagagcttaaagaaccttcagggtttataaatctgacctcattttctcttcatgtcttgagcaaaaaaaacatcttctactattctgtgttgttgttgaccctgtatacagtgctgggtccctggttttttggtgaaatcattgatggcaaatttggttgctgctttccctttgggatatttgttaatggacatttcctacaaggcagcataacatttataattggaattctccagctggcgttttttaacatccccttgatggcttacatgtgttggagcttgctgcagcggtgctttggtcacaacttcaggtctcatctccatcaaagaaaatacttgaaaattatgcctgttcacctacttatgctactgctgtacatctggcaggtttattcctgctactttctttatgcaacatacggcaccctagcttttttattctcccctttgcggacctggttgacactgctgacacctgttctcattcgttatgtgtggacactgaactccaccaagtttggaatcttcatggtgcagttaaaaagccacctgagctcctgaaggccatgtctcaccactggcagctgggcagaagcccagcctctgtgtctgtagcccaggcctctaccccagtagcaggtggagggccaggattggtgggtgagctttagggagcagctgctcgtttgaagccctggacgttggagggattacccactactgatacctgcagaatggactgcagaaaagtctcaaaaataatgcctttaatccttccctccctaaggaggcaaagagttgatttacctttgtgaagagaaaacccttatctaggacatccacagggtagaggttgggtgtgtgtacgggagtgtctgaggcccagtgtgttttttagggttaccccatgtaaagcacttaccgctgtgcttggaattcagcagctgtcaaaggtgcaatttcaggggcagggaacctttgaggatctgggcccgaccctcactacccctgagatattagttcccaggcctgttttcccacaggattgtgggctctctgcttccttagtcggaagtgttttcaactaatcaaataaatgaatgaatgatgaataag

SEQ ID NO: 357911 - DNA, 969 bp, Homo Sapiens
  misc_feature (567)..(567): n is a, c, g, or t
  misc_feature (667)..(667): n is a, c, g, or t
  misc_feature (807)..(807): n is a, c, g, or t
  misc_feature (864)..(864): n is a, c, g, or t
  misc_feature (870)..(870): n is a, c, g, or t
  misc_feature (890)..(890): n is a, c, g, or t
  misc_feature (943)..(943): n is a, c, g, or t
cttccccactctcaggctgttcttgaaacaccatgaggcttctgcgtgtagtccctgccccaaacttagcaagcacaggggcctccacagcccaggtggccccagaaaatgttccagagcccagcttggtacatagtgagatgctgctggggttggcctgaggtgggggccacttcctccaccccagtgggtatgtctgaggtcagccatggggatatctgggttgagattcaggttttggtgaatatggggcaggcgtccagatgtgtttgtgtcacctgctgcaacgctgtagccaatgaagattccagcgggatggcctgaccagcggggccggcactttggagccgtgggtgcagccaggtaccccgtgcagggcctgggaggctctccaggccacagtcctcagagcgtgttgggtcccatgttgtgtgtgggttccatgccctccacacagcaggagagggcttccctgaccacacctgccccctcagtcctgcttctccccagtaagcctgcactgtggggtctccataggaggagctggggaagctggggccctcccangggtcctgatcgaccctgggggctcttggcctggtttcgtaagatggagcactgcaaaagggcatgctcaaaaagcaaacgcaaggcaaggtgggcctcnaaccggggctggaggggtctccaaccttgctggcctgaaagatggccacatttcctacttgtgaccgccctgctcctcctggccgcccccccaagtggctgaacaaggtgattttgttgtggtgaagggccaagatgtgnctggtgtgcaacctcaactccctgggttaaggctcaaaagtaacctgtgttcaagangcaaancccaacccctcccaaccaanagccctccaaaacaaggactcctccctcaactgggaacaagaacctggggcanacccaaggttggggaaaaggtaagaa

SEQ ID NO: 357912 - DNA, 1138 bp, Homo Sapiens
cataaaagctttgtcagcttccagcatcaggggagtcatttaatagcctttttccttatttgctagtatggttaaatgagaaaatagtaaaatagatacaaagtcatctatatagtgtgagaacgtgggtgactttttcaaagtttataatttaaaaagctccaaataactggctttttcaagagacttatactcatgctcttggctatactgtgaattactgaaatgttgaacaaacctgtgaaagacatacattagccctttaagatggccaggagctaagcttgagtctcctttactgaatttcgttcttagtgcaggttacttgtagattctagtcttcacaggctccctggggctcttaactagtcacactgggagtcatgaatgtctttccaataattcagggaattctagagatcctcaaactgtaaggtctattcatactcaacacaaggaaaaaacctcattaaaattaatgactaatcaggaggcaacgtaaccaaaagcacagtgaatgaaagttttcatggtaggttcaacatgggtttattgctagaaagatccaggggatagctttaggtttaacttcggctcaccaacgtaactttctaatcatttatttcagtaatagctagaagtgggtctgaatgttttcccagagtctgatacgtgttgtttttttgccagaagagaggtcttcaggagacttcatttaaattctgattattaaactgaggctttaattgatgttaatgccttatgtcaaatgtaaagttagaatttgctagggctgggatagggagtgatatttctaggacttagacattgaaaactaattcagcctgtagtaacctggatggttttcaatggcatggttagtcaaattcatggttttaaacttagaagcagctttcgggggagagggtaggttggagcatttattacatattttactgtttaatgtcttaaccgtgggccttttaatttgtaaacactgaaatgattgttgggctgtggaaaacatttacctatttaccttggaagttttaaaagacagtccactttttagcatgtgtgttgtgtccagcctgtggtcgtcttaactaataaatgtgatttatcaccccaaaaaaaa

SEQ ID NO: 357913 - DNA, 1370 bp, Homo Sapiens
  misc_feature (8)..(8): n is a, c, g, or t
  misc_feature (14)..(15): n is a, c, g, or t
  misc_feature (19)..(19): n is a, c, g, or t
  misc_feature (23)..(23): n is a, c, g, or t
  misc_feature (27)..(27): n is a, c, g, or t
  misc_feature (30)..(30): n is a, c, g, or t
  misc_feature (32)..(32): n is a, c, g, or t
  misc_feature (35)..(35): n is a, c, g, or t
  misc_feature (39)..(39): n is a, c, g, or t
  misc_feature (52)..(52): n is a, c, g, or t
  misc_feature (66)..(67): n is a, c, g, or t
  misc_feature (92)..(92): n is a, c, g, or t
  misc_feature (119)..(119): n is a, c, g, or t
ggggcccntcccannggcncagnctgnctncncanttantctcccacctggncctccaggcagcanntctccagtcctgcaagatgagccanattcctttttcactgataaatatattnttcattgccaaagagctgtacccatcctgaaggcacatttgtggttccccatcagccaggccttggtgctaacctggctgaatttcacacaggctcttacacacacacgctcctaggagacatctgcctacacggcaaccatatttcctctgaatgagaaggaattgaaccaaaagtccaagaaagaactgattgcttgttccataggagcttaggaaacaagaaaccctggattgcccagggggtctgagaagttggttggtgactttttttgcggttaaatgaagggtgatggggagatcagcccgaattgccgcctgcctcttgctaaataggagcagaggacttggcctgcagctccttgggagcccttgattgggaagagagtttcaagggaggcagctggattcaatctagcaggtggtcagcttcagctttctccatcgaaatcccattctcctgtccagaggcccagtgggtcatctcccaaggtgggtgtggaccctggcctcagaggccttgctggtgctgtcacctcccacctgttccattccgaggcctcacccagaagtgggaccctccccttcctcaccagagccaccgtgactgtttctgatgacctggagagtcaacaacaaccagaaaggtttctgcccagagcaggcttcttaaggcctttacgaagttttgtgccttccaagtgctgaagaagacctggtcagcctaaatcttcccagtcccgctgtggagctgtcagtcaccggagtaatgagctcctggttcctcgggagtccttcgtgctgtgtggcagggttcctctctagacaagtacacaggccctgccaccctgacatcaaactgttgtactatgatcacagtccctgtgccatccttttccaagactggggctcacaccatgtttttgaatgagaatccctgctggttgagacttttgcttccacttgtttccttggagatgtttttccaagagcataatgtacattaaagtcttcgagttgagcctattaaaataaccgggaccgagaggctctaaatcttgtcgggcgcgcctacggcccctcgaaggaaccttttcctaaacccatttcgttttgggccgccgccgggtccctctgtaaggataaagttggcaacactgggcgcccataaggtttgcctctcccctaggagacaacacccgtgggccccatgaaacccaaacggggtctgagacattccctcccgcccaat

SEQ ID NO: 357914 - DNA, 1141 bp, Homo Sapiens
  misc_feature (15)..(16): n is a, c, g, or t
  misc_feature (22)..(22): n is a, c, g, or t
  misc_feature (28)..(28): n is a, c, g, or t
  misc_feature (30)..(30): n is a, c, g, or t
  misc_feature (41)..(42): n is a, c, g, or t
  misc_feature (44)..(44): n is a, c, g, or t
  misc_feature (47)..(47): n is a, c, g, or t
  misc_feature (49)..(49): n is a, c, g, or t
  misc_feature (53)..(55): n is a, c, g, or t
  misc_feature (57)..(58): n is a, c, g, or t
  misc_feature (60)..(61): n is a, c, g, or t
  misc_feature (82)..(84): n is a, c, g, or t
  misc_feature (91)..(91): n is a, c, g, or t
  misc_feature (112)..(112): n is a, c, g, or t
agaacaatatgtttnntatttngggtancnaacaccacaanncnaantnatgnnnannanntaaatagggaagaagcccccnnntgaattncatagagaaaagctgatatgnggaatcattagctcttgttttgacgaggaaaaacaaaaacttccggaattattgaagcacttcataggtattatcagaatgctgccacagatgtgagacgggtgtggctttcttcagtggtggatcactttcattcatctttaggcgacaaaggttggggttgtggttacagaaatttccaaatgctactttcatcattattacaaaatgatgcttacaacgattgcttaaaaggtatgttgattccttgcattccaaaaattcaatctatgattgaagatgcatggaaggaaggttttgatcctcagggggcctctcaacttaataacaggttacagggaacaaaggcctggattggagcatgtgaagtatatatactcctgacctccctaagggtaaagtgtcatattgttgattttcacaaatcaactggtcctttgggtacacaccctcgcttatttgaatggatattgaactattattcttcagagggagaagggagtccaaaggtagtgtgtacatctaaacctcctatctatcttcagcatcaaggtcacagtcgaactgttattggaattgaagagaaaaaaaaccgaacattatgcttactaatacttgatcctggatgtccttctcgagaaatgcagaaattattaaagcaagacatagaggctagcagtctcaagcaacttcggaaatctatgggaaatttaaaacataagcaataccagatattggcagtagagggtgctctttctctagaggagaaacttgccaggagacaagcttctcaagtctttacagccgagaagattccttgaagaatcaagcatttaagcatttcagtgattgagaacaatactttgttttctaaatgtagatattgaactccttaatacaattatgaatctgtgaattctcttaagtcttaacatataatttaatttctaaaatgcctgtgttaattgaattatacctatcatacttcattgtttggtaaattatttcaataaaatgtcttgtttttgc

SEQ ID NO: 357915 - DNA, 1564 bp, Homo Sapiens
  misc_feature (1070)..(1070): n is a, c, g, or t
cccgggatctgtgttgcatcaacattcttcccccacgtcttgacgctgggttccggcctagggttctggctttcctcctgggctagtgaacgcggcgaagtcctcctctttctaatctccagagccgcagttccatcctctgggtcagcggcttaccctgactgggctgcggtatctgccttccttcccccaacaaggcgacaggtagtcggggctggggccggaactgactgagtgggccgcaactgactgagtgggccgcggctcccgcctgaggaggctaggaaggactgaacagcagccgacttcccaggctctaaaaatcgtgcctctgagttagagctaccttcaaaagcaagaccaagcatgagaaatggagtcttttggccagtattggggtgttcggaattcaagcgtatgagagagtggacggtagcgttgagaattttcatttgaagatctcgtcttaaccaccccaagtgtagtcagaggcggcgttttccctgcgagagtgccctggaacaaagcaaggatagcgtgggttagacatacctgaaatgaaagcgtcttactttatctaggtacatatttgcgtcagtaaggcgcaacgccatttctctcttggaattcagaagtgaaatatggtgactgggacgcctgtacattgctttgacttaaaaattgaagtccattattctgaccgaaagttaatctgatgattaattggttaaacatactatcgttgctaattagcataattattatttacaataaagtgagctaaatagctacaactaaaatatatttaaattactgtgatattgtgatgctaaagatgtgttgaaattaatatcttgaatttttcaaccctgcctaaatgcctctgagagtaattagtataattaaaagtcactagagaaagtgaatgactctaataacaggataacaaattcttttcaagtcagatggtttccagttctttgctttcaacaaaattaatggtggccccatgaattgtcagctgatgaaggaacactatttggtttttggcatgcaactcggaaagaaanccaaacgattgattgacatgcttacaacaaaactactagcattctcacctatttatgtaaaaccatttctcagcacttgtatctgtgaaaacaacagaattgaaaatgaaccctgttaatctaccagtaggaactattcatccagataaatgaattaattggtgggtcagccccatctatctcactaagagatgtgttcccaatagaatttcaccttttataactgtgtgttatcaatatttgcaatcgtgtcattttgatccattatatactaaagatgattgtgatgattactcacttcagaagaattccagcgtagagccataaagttacacgaaattttttaaggtttactacatatgtcatatttttattgcgaagaagtgatcaagaaaaggttgttcaaacatcaaagtactatatttgaataacattttttgttagagtacaatctaaatatgttagagataataaaagaacaatgttgaagagct

SEQ ID NO: 357916 - DNA, 1034 bp, Homo Sapiens
  misc_feature (17)..(17): n is a, c, g, or t
  misc_feature (19)..(19): n is a, c, g, or t
  misc_feature (21)..(21): n is a, c, g, or t
  misc_feature (882)..(882): n is a, c, g, or t
  misc_feature (914)..(914): n is a, c, g, or t
  misc_feature (924)..(924): n is a, c, g, or t
  misc_feature (930)..(930): n is a, c, g, or t
  misc_feature (941)..(941): n is a, c, g, or t
  misc_feature (947)..(947): n is a, c, g, or t
  misc_feature (955)..(955): n is a, c, g, or t
  misc_feature (968)..(968): n is a, c, g, or t
  misc_feature (975)..(975): n is a, c, g, or t
  misc_feature (982)..(982): n is a, c, g, or t
  misc_feature (988)..(988): n is a, c, g, or t
  misc_feature (998)..(998): n is a, c, g, or t
  misc_feature (1006)..(1006): n is a, c, g, or t
  misc_feature (1008)..(1008): n is a, c, g, or t
  misc_feature (1012)..(1012): n is a, c, g, or t
  misc_feature (1028)..(1028): n is a, c, g, or t
ctccctcctcgcggcangngnagcccgagcccgagcccgagcccgagccagggcgagccgagcctgctccgggcgggcggcggcggcgtgcgccgtctccagccattgtcagcgcgcgcgagcctgggcccaccatgagccatggccatgtccgtgagcgccgaggacgacgactatgaatctggagccggaccagaaccgggctgtgggtcggcccaaggtggaagctgggcccggcctccgcggtgaagttggccgccaaccggacaacggcaggagctcggcggcgccggacgcgatgccgcaagtgcgaggcctgcctgcggaccgagtgcggagagtgccacttctgcaaggacatgaagaagttcgggggccccgggcgcatgaagcagagctgcatcatgcggcagtgcatcgcgccagtgctgccccacaccgccgtgtgccttgtgtgtggcgaggcggggaaggaagacacggtggaagaggaggaaggcaagtttaacctcatgctcatggagtgctccatctgcaatgaaatcatccaccctggatgccttaagattaaggagtcagagggtgtggtcaacgacgagcttccaaactgctgggagtgtccgaagtgtaaccacgccggcaagaccgggaaacaaaagcgtggccctggctttaagtacgcctccaacctgcccggctccctgctcaaggagcagaagatgaaccgggacaacaagggaagggcaggaacctgccaagcggaggagtgagtgtgacggaggcgcccggcgcaggtcggatgagcactcgaagaaggtgccgccggacggccttctgcgcagaaagtctgacgacgtgcacctgaggaagaagcggaaatanagacgcccaggagctgagtgacgcaaccgggntcgggacttngtgctntaggctgctantgatgnggtctcgncctttgagctcanattttcnctgctcngacctngatttcagtnggtgaggncnaagnttccaaattcggattnctttcc

SEQ ID NO: 357917 - DNA, 1197 bp, Homo Sapiens
  misc_feature (27)..(27): n is a, c, g, or t
  misc_feature (34)..(34): n is a, c, g, or t
  misc_feature (54)..(54): n is a, c, g, or t
  misc_feature (64)..(65): n is a, c, g, or t
  misc_feature (84)..(84): n is a, c, g, or t
  misc_feature (91)..(91): n is a, c, g, or t
  misc_feature (119)..(119): n is a, c, g, or t
  misc_feature (160)..(160): n is a, c, g, or t
  misc_feature (175)..(175): n is a, c, g, or t
  misc_feature (223)..(223): n is a, c, g, or t
  misc_feature (232)..(232): n is a, c, g, or t
  misc_feature (263)..(263): n is a, c, g, or t
tatcctcagctgagatatggatgggcntggggtnaggatggtgtagagactgcnagatctgtcnncagctggtgagcggagatnctgggcngagatagtgtagacaaaagtgcatagtnaaagatcactacagtaaatgtgtgaaatggtggtgaaggcntttctctcccctccnctgagtgcatatgatagacagcaaataggactcggcccacaggaagangtgatgccnaatgaaagggaaaaggagagagagctgtacntacaaaaccatatatcatagacccaagtatctgtacaggcaagagcaacatggctgggacatcgcagaagaaatggtcaatagccctagacctgcagtagggaatatgaagggcaaagactgtgtgtgccaaggagttgatggaccccagtgtccaagagcctccaatcatcttcacacacatcattttactcatgcggataggataatagagagagtggcagatggccaaataacggtcgtaggccatggaggtcaggagtaagccttcagaacacgccatggtcaggaagaagaagctttgcacaccacatcccaggaaggagatgcctttctggccggacaggaagttgtacgccatcttggggacggtggtggagatgtacatcaggtccataagggagagctggctgagaagaaagtacatcggtgtgtggagacgaggatccacgtggatgaggtgaatcatggccgagttacccaccgaggccagaaagaatatgaggatgataaggcacaagagaaatattccagtttgatttgggggaagcagacccaacaaaatgaaatcatttgaagtgtgattccatttctccatgaaaactttctgctgtaactgggcttggagtgagaggtcatgttttgtgtgtgctcttctgtctgaggcagacactgatgtctcatcctgcccagcatattgatttggttagtcatcttgggttactgatttttcaacttttgctcggtctggaaggcgtgcccagctgcccttccgcaggagacaccagtgtgtagagcagagcccttcctttcgagagggtcttcacgctctcatcgtggtcggcggtcgcgggagaggggccctcctggacccgcaagcacgcccaccactgccaaagacgccgcggctggtctcgcagcagcgcgtcctccgg

SEQ ID NO: 357918 - DNA, 1884 bp, Homo Sapiens
  misc_feature (1816)..(1816): n is a, c, g, or t
  misc_feature (1850)..(1850): n is a, c, g, or t
  misc_feature (1863)..(1863): n is a, c, g, or t
gggctggtaccggtccggaagtttttgggatatcgtcgacccacgcgtgcgggatgtgcaccacggtcaaggaacacagttcaccttcgagcaggaccccagtgtcctctatttctccatccaccgctacgagcagggtaggttctggccccacctgaaggcctctaactggtccaccacaggtttcggccaaggccaaggatataccatcaatgtgccttgagaaccaggtggggatgcgggatgctgactacattgctgctttcctgcacgtcctgctgccagtcgccctcgagttccagcctcagctggtcctggtggctgctggatttgatgccctgcaaggggaccccaagggtgagatggccgccactccggcagggttcgcccagctaacccacctgctcatgggtctggcaggaggcaagctgatcctgtctctggagggtggctacaacctccgcgccctggctgaaggcgtcagtgcttcgctccacacccttctgggagacccttgccccatgctggagtcacctggtgccccctgccggagtgcccaggcttcagtttcctgtgctctggaagccctggagcccttctgggaggttcttgtgagatcaactgagaccgtggagaagggacaacatggaggaggacaatgtagaaggagagcgaggaggaaggaccctgggagccccctgtgctcccaatcctgacatggccagtgctacagtctcgcacagggctggtctatgaccaaaatatgatgaatcacttgcaacttgtgggacagccaccaccctgaggtaccccagcgcatcttgcggatcatgtgccgtctggaggagctgggccttgccgggcgctgcctcaccctgacaccgcgccctgccacagaggctgagctgctcacctgtcacagtgctgagtacgtgggtcatctccgggccacagagaaaatgaaaacccgggagctgcaccgtgagagttccaactttgactccatctatatctgccccagtaccttcgcctgtgcacagcttgccactggcgctgcctgccgcctggtggaggctgtgctctcaggagaggttctgaatggtgctgctgtggtgcgtcccccaggacaccacgcagagcaggatgcagcttgcggtttttgctttttcaactctgtggctgtggctgctcgccatgcccagactatcagtgggcatgccctacggatcctgattgtggattgggatgtccaccacggtaatggaactcagcacatgtttgaggatgaccccagtgtgctatatgtgtccctgcaccgctatgatcatggcaccttcttccccatgggggatgagggtgccagcagccagatcggccgggctgcgggcacaggcttcaccgtcaacgtggcatggaacgggccccgcatgggtgatgctgactacctagctgcctggcatcgctggtgcttcccattgcctacgagtttaacccagaactggtgctggtctcagctggctttgatgctgcacggggggatccgctggggggctgccaggtgtcacctgagggttatgcccacctcacccacctgctgatgggccttgccagtggccgcattatccttatcctagagggtggctataacctgacatccatctcagagtccatggctgcctgcactcgctccctccttggagacccaccacccctgctgaccctgccacggccccccatatcaggggccctggcatcaatcactgagaacatccaaatccattcgcagataattgggcgcatttaacggggttcatgnaaggtagaaggacagagaaggaaccttccagttnttaagttggtcancaaggaagggaacccaaccag

SEQ ID NO: 357919 - DNA, 904 bp, Homo Sapiens
  misc_feature (19)..(19): n is a, c, g, or t
  misc_feature (899)..(899): n is a, c, g, or t
cattgggtattacagagangcagttgtaggggattaatgaacaggctgtttggttaaaataagtagactatagctaattatttgatctatgtaatgttagttggtggttcatgaggaccctggttaaaaagcacgcttcaaactcttcgtattatcctcctggtagtcaaaatagtagtctccctgctgcattgtattctcaaaagttagaaatgttttcatgcaatcacctgtagaatataaaattgtctctcactaactggaatgacagaaactcaaagacatatgtaactatgatgaaaccataacctaggaatgacataagaacaaagaccctaaataatggaaacagtggtactaaggccctgagttttggttacactgtgcactgttgaaaattttttgaacaaaattattagaggccatcattctggactgagcttgtgcactagggccaaacagacaaaatcaaactgaaaatttaaggaaataggtagattctgtaggttttgtttttcttctgtaaacagcagatcttaacacaaggggtttccctctactcaaacctttaaaaataataataaaataataacctgaatttcttgattccactttacaaaacccatagttctgctatttcacagtggaatctgagactaagtacatttttgatggtgacagtgttatcaatgtctaaagttttggtctatcaaaatttagaagatgaccaaaaaaggagaaattgtttaattataccctaaatctaccccctttcatgtttaagtttggtcaataagttttcttgttgttttgttttgtttacatagtaaactgaaacctaactgaatgtgtaaatagactgtactcatttttgtaccaacaactgtgttttggaccanaaaag

SEQ ID NO: 357920 - DNA, 538 bp, Homo Sapiens
  misc_feature (110)..(133): n is a, c, g, or t
taaacatggtttgaacatttgacatccttttattggccaaaacacagttgttggtacaaaaatgagtacagtctatttacacattcagttaggtttcagtttactatgtnnnnnnnnnnnnnnnnnnnnnnnncttattgaccaaacttaaacatgaaagggggtagatttagggtataattaaacaatttctccttttttggtcatcttctaaattttgatagaccaaaactttagacattgataacactgtcaccatcaaaaatgtacttagtctcagattccactgtgaaatagcagaactatgggttttgtaaagtggaatcaagaaattcaggttattattttattattatttttaaaggtttgagtagagggaaaccccttgtgttaagatctgctgtttacagaagaaaaacaaaacctacagaatctacctatttccttaaattttcagtttgattttgtctgtttggacctagtgcacaagctcagtccagaatgatggcctctaataatttggtccaaaaatttccac

SEQ ID NO: 357921 - DNA, 1573 bp, Homo Sapiens
  misc_feature (6)..(6): n is a, c, g, or t
  misc_feature (11)..(11): n is a, c, g, or t
  misc_feature (16)..(16): n is a, c, g, or t
  misc_feature (55)..(55): n is a, c, g, or t
  misc_feature (117)..(236): n is a, c, g, or t
  misc_feature (240)..(240): n is a, c, g, or t
  misc_feature (338)..(338): n is a, c, g, or t
  misc_feature (343)..(343): n is a, c, g, or t
  misc_feature (348)..(356): n is a, c, g, or t
  misc_feature (367)..(367): n is a, c, g, or t
  misc_feature (416)..(416): n is a, c, g, or t
  misc_feature (429)..(429): n is a, c, g, or t
  misc_feature (942)..(942): n is a, c, g, or t
  misc_feature (957)..(957): n is a, c, g, or t
  misc_feature (970)..(970): n is a, c, g, or t
  misc_feature (973)..(973): n is a, c, g, or t
  misc_feature (980)..(981): n is a, c, g, or t
  misc_feature (986)..(986): n is a, c, g, or t
  misc_feature (994)..(994): n is a, c, g, or t
  misc_feature (998)..(998): n is a, c, g, or t
  misc_feature (1011)..(1011): n is a, c, g, or t
  misc_feature (1025)..(1025): n is a, c, g, or t
  misc_feature (1068)..(1068): n is a, c, g, or t
  misc_feature (1079)..(1079): n is a, c, g, or t
  misc_feature (1128)..(1128): n is a, c, g, or t
  misc_feature (1134)..(1134): n is a, c, g, or t
  misc_feature (1180)..(1180): n is a, c, g, or t
  misc_feature (1182)..(1182): n is a, c, g, or t
  misc_feature (1187)..(1187): n is a, c, g, or t
  misc_feature (1192)..(1192): n is a, c, g, or t
  misc_feature (1259)..(1259): n is a, c, g, or t
  misc_feature (1273)..(1273): n is a, c, g, or t
  misc_feature (1276)..(1276): n is a, c, g, or t
  misc_feature (1317)..(1317): n is a, c, g, or t
  misc_feature (1408)..(1408): n is a, c, g, or t
caagcnggagngcagngggacgatctcatctcactgcagccattgcctccagggntcaagtgatcctcccacctcagcctgttgagtagctgggaccacaggcacgtgccaccatgnnnnnnnnnnnnnnnnnnnnnnnnnnnnnnnnnnnnnnnnnnnnnnnnnnnnnnnnnnnnnnnnnnnnnnnnnnnnnnnnnnnnnnnnnnnnnnnnnnnnnnnnnnnnnnnnnnnnnnnngggngagccatcgcacctggctagaccccatgttctaatgacaggaagggccaatacatgtatagatgtataagttagaaagtacagtagaaggggataagngttcnctagnnnnnnnnnggaagaaaggngggcgtacagtatcaggggggagacaggggttgcagttgtacatagggngtttttgggaagncccccctgggaaggggacatttgatcaacaacctgaagggaaagaacaagagaaccatacttcactcctgcaggaagagtgtgtaagactgagggaacggcacgtgcaaaggtcctgaggcaggagtgtgctgaagggtttggggcatccaaggaggccagggtggctggagtggagggaatgagcaaggaaggaggaggcggaaagagggtcagggaggtgacagggcagattgtgcagggcttggtgggccactttgcctataactctgggtgagaattggtgccactggaaggttcctagcagaggagtggcgtgatccttctggcagctgcattgaggagagtttgcagggtgtcagggtggaagtgggagaacagttgggatgccatggccgtaaaccaggtgagaactggcagagcttggaccgtgatggtaggaatgggcagtgtgatacatggcttgataaactgcctagaccctcacataaatggtaaatgtatttttcatctnacctccgtctccccnaatcacagaagtnganaatggtnnctgtngaaaattngctngctacgaacaaancccaaaagaaaatnacagcctctccaaagtggaccacccaatgttagagttatcgangcaattatatnttaatcattttcttttaataattacatttgaaagtactgtgttaaaatngcttanactggcagaagcggacttttaggtcatatgcacagtggggtgcagncnctgcnttttnagattcagtggagtgtttgactgttctgctgtacactggaggggaaagagaagggtaagaagatgangcctttactttgcntcncgtagcttgcagagaaggatgggggcaggtgagcagagacngctattcccagattaccgccaaatacatattttgaaaatgatgaatggaatttcagggaatggggccctgtaagttccctgaggtcaggtnccgtgtcttattctttactgttttcctaacatgtgatttagtgcctggcacatagtaggtgcccagcaaaaatatttgttgagtacatatgtgaattaataagtaggtaatgcatggaatgaaacatgtctttttggaaagatcaagaagcctccctgtcctgtg

SEQ ID NO: 357922 - DNA, 1296 bp, Homo Sapiens
  misc_feature (1192)..(1192): n is a, c, g, or t
  misc_feature (1258)..(1258): n is a, c, g, or t
  misc_feature (1280)..(1280): n is a, c, g, or t
  misc_feature (1285)..(1285): n is a, c, g, or t
  misc_feature (1288)..(1288): n is a, c, g, or t
acgcaccagccggctgagccgtgtcccagcaccactataagctggtaccggtccggaattcttgcgatgctcgggtcatcccggcgcctatggtcaccttcccacgggctggcacctgggcgcgggcgctgccccggagccggccggcgggacctggcgcccaatcctgggggacccggtgccgtggcccaggggccgggccgaggtcccgggggcggtgccttgcgggcccgtcccggggcggtgcctggtgggctggccccgcggttcctcccctctctgcgggcccagtcgccctttggccgggcgagctaatcgtcggctcaatgacgacgaggcccgacccttcccgtccaggacctacagagacaaccgaaggagagcccaaggcggcttctttgctgtcgccgcccccactgaagcaagagctccccggctccactgaaacaccagctcatttaagctttccccaacgaccggccctccgggacgatacctaacaacgaccggcgcccgcatctggaataggctggcgagatacttagtatccgagggctcgggacttggcgccatcgaggtcatggggacccaggatccagggaacatgggaaccggcgtcccagcctcggagcagataagctgtgccaaagaggatccacaagtttattgccctgaagagactggcggcaccaaggatgtgcaggttacagactgtaagagtcccgaagacagccgacccccaaaagagacggactgctgcaatccggaggactctgggcagctgatggtttcctatgagggtaaagctatgggctaccaggtgcctccctttggctggcgcatctgtctggctcatgagtttacagagaagaggaaaccctttcaagctaacaacgtctccctaagcaacatgataaagcatataggcatgggcttgaggtacctgcagtggtggtaccggaagacccatgtggaaaagaagacacctttcatcgacatgatcaattctgtacccctaagacagatttatggttgtcccttgggtggcatcgggggaggcactattacccgtggctggagaaggcagttctgtcgttggcagcttaaccctggaatgtatcagcaccggacagtcatcgctgaccaagacagcaacctgcctgtaggaatctttgtgggggaagtggaaaangaaggggacgaagctctagatgtgtccatcatgttctccatgcggaatggactgggtggtggagangatgccccagggggtttgtggnatganccntctgtctg

SEQ ID NO: 357923 - DNA, 3038 bp, Homo Sapiens
cagcggtacgcccgagtatgggatatcgtcgaccaggcgtcgactggcggcagcgaaggatgtgcaggttacagactgtaagagtcccgaagacagccgacccccaaaagagacggactgctgcaatccggaggactctgggcagctgatggtttcctatgagggtaaagctatgggctaccaggtgcctccctttggctggcgcatctgtctggctcatgagtttacagagaagaggaaaccctttcaagctaacaacgtctccctaagcaacatgataaagcatataggcatgggcttgaggtacctgcagtggtggtaccggaagacccatgtggaaaagaagacacctttcatcgacatgatcaattctgtacccctaagacagatttatggttgtcccttgggtggcatcgggggaggcactattacccgtggctggagaggccagttctgtcgttggcagcttaaccctggaatgtatcagcaccggacagtcatcgctgaccaattcacagtgtgcctgcgtcgggaagggcagactgtgtaccagcaagtcctgtccctggagcgcccaagtgtcctccgcagctggaactggggcctgtgtgggtactttgctttctaccatgccctctatccccgagcctggactgtctatcagcttcctggccagaatgtcaccctcacctgccgtcagatcacacccatcttgccccatgactaccaggacagcagcctgcctgtaggagtctttgtgtgggatgtggaaaatgaaggggacgaagctctagatgtgtccatcatgttctccatgcggaatggactgggtggtggagacgatgccccagggggtttgtggaatgagcccttctgtctggagcgtagcggggaaactgtccgggggctgctcctgcatcatccaacccttccaaacccctacacgatggctgtggctgcacgagtcacggcagctaccacggtaacccacatcacagcctttgaccctgacagcacggggcagcaggtgtggcaggatctacttcaggatggacagctggactctcccactggccaaagcacccctacgcagaaaggagtaggcattgctggagctgtgtgtgtttccagcaagttgcgacctcgaggccagtgccgcctggagttttcactggcttgggacatgcccaggatcatgtttggagctaaaggccaagtccactacaggcggtatacaaggttctttggccaggatggagatgcagcacctgccctcagccactatgcactgtgccgatacgcagagtgggaagagaggatctcagcttggcagagcccggtattggatgacagatcactgcctgcctggtacaaatctgcgctgttcaatgaactatacttcctggctgatggaggcacagtgtggctggaagttcttgaggactccctaccagaggagctgggcagaaacatgtgtcacctccgccccaccctacgggactacggtcgatttggctaccttgagggccaggagtaccgcatgtacaacacatatgatgtccacttttatgcttcctttgccctcatcatgctctggcccaaacttgagctcagcctacagtatgacatggctctggccactctcagggaggacctgacacggcgacggtacctgatgagtggggtgatggcacctgtgaaaaggaggaacgtcatcccccatgatattggggacccagatgatgaaccatggctccgcgtcaatgcatatttaatccatgatactgctgattggaaggacctgaacctgaagtttgtgctgcaggtttatcgggactattacctcacgggtgatcaaaacttcctgaaggacatgtggcctgtgtgtctagctgtgatggaatctgaaatgaagtttgacaaggaccatgatggactcattgaaaatggaggctatgcagaccagacctatgatggatgggtgaccacaggccccagtgcttactgtggagggctgtggctggcagctgtggctgtgatggtccagatggctgctctgtgtggggcacaggacatccaggataagttttcttctatcctcagccggggccaagaagcctatgagagactgctgtggaatggccgctattacaactatgacagcagctctcggcctcagtctcgtagtgttatgtctgaccagtgtgctggacagtggttcctgaaggcctgtggcctaggagaaggagacactgaggtgtttcctacccaacatgtggtccgtgctctccaaactatctttgagctgaacgtccaggcctttgcaggaggggccatgggggctgtgaatgggatgcagccccatggtgtccctgataaatccagtgtgcagtctgatgaagtctgggtgggtgtggtctacgggctggcagctaccatgatccaagagggcctgacttgggagggcttccagacagctgaaggctgctaccgtaccgtgtgggagcgcctgggtctggccttccagaccccagaggcatactgccagcagcgagtgttccgctcactggcctacatgcggccactgagcatatgggccatgcagctagccctgcaacagcagcagcacaaaaaggcctcctggccaaaagtcaaacagggcacaggactaaggacagggcctatgtttggaccaaaggaagccatggcaaacctgagcccagagtgagccgtctgaactgtgggagggaagtgctaacagcccagcctccagcctggcctttcctccttcccctctgaacctcctgcaaccctgagccatcaggacaatcataccccttcccttctctccacccaattgtgccagtaaatgggggttgagggtgacctaggcagcattagaatcacttatttatttctttcctcacctgttccctgactgcgtgaaatgttcagggaggtcagttgatttccccaggtacattcatggtgtgacagacacatgggtacaaataaaagacccagaaagccaaaaaaaa

SEQ ID NO: 357924 - DNA, 654 bp, Homo Sapiens
atgacatggctctggccactctcatggaggacctgacacggcgacggtacctgatgagtggggtgatggcacctgtgaaaaggaggaacgtcatcccccatgatattggggacccagatgatgaaccatggctccgcgtcaatgcatatttaatccatgatactgctgattggaaggacctgaacctgaagtttgtgctgcaggtttatcgggactattacctcacgggtgatcaaaacttcctgaaggacatgtggcctgtgtgtctagtaagggatgcacatgcagtggccagtgtgccaggggtatggttggtgtctgggaagagcctagctggttgttgcctttcctcggtacctaggtcttcaacatcttggtccctctctaggctgtgatggaatctgaaatgaagtttgacaaggaccatgatggactcattgaaaatggaggctatgcaaaccaaacctatgatggatgggtgaccacaggccccaggttagcgggtaggggtttccaggaggcctgaggtgaaaaactgggcaacaagggattgtagggctcaaaaaagaatgactcattgtctattacacggcatgggagcagctggagctgccagtctgacccccaaacccatgtccctgatcagtgcttact

SEQ ID NO: 357925 - DNA, 713 bp, Homo Sapiens
tgccgtcagatcacacccatcttgccccatgactaccaggacagcagcctgcctgtaggagtctttgtgtgggatgtggaaaatgaaggggacgaagctctagatgtgtccatcatgttctccatgcggaatggactgggtggtggagacgatgccccagggggtttgtggaatgagcccttctgtctggagcgtagcggggaaagtgtccgggggctgctcctgcatcatccaacccttccaaacccctacacgatggctgtggctgcacgagtcacggcagctaccacggtaacccacatcacagcctttgaccctgacagcacggggcagcaggtgtggcaggatctacttcaggatggacagctggactctcccactggtgatggggggtctgactgggagatggggggaagagaggttgtccctgtcttgggaccaggggtgggaggcctggtaataagtaggccttgtttccatgttagggatccctatccctggggctgacaggggctcctgtcctgaattctcttgtgattctctcaggccaaagcacccctacgcagacacggagtcggcattgctggagctgtgtgtgtttccagcaagttgcgacctcgaggccagtgccgcctggcagttttcactggcttgggacatgcccaggatcatgtctggagctcaccggccaagtccactacaggcggtataca

SEQ ID NO: 357926 - DNA, 173 bp, Homo Sapiens
ttggaatggtgagttcggggagctaagtagtcttaaggcagctgagaggacaccaggagccttatttttctcttcctcgactccaggccgctattacaactatgacagcagctctcggcctcagtctcgtagtgttatgtctgaccagtgtggacgagaggggtaccgagcct

SEQ ID NO: 357927 - DNA, 1524 bp, Homo Sapiens
  misc_feature (3)..(3): n is a, c, g, or t
tgngctccgccgctcgcgcctcgggctcggctcgggctccgggatgtccgcgctgtgcgaccctcccggggccccagggccacctgggcctgccccggccacccacggtcccgcgcctctcagtgctcaggagctgtcccaggaaatcaaggcttttctgactggcgtagaccccattctgggccaccaactctcagcccgggaacatgctcgctgtggtcttctcctgctccgttctttgccacctgctcgggctgctgtgcttgaccacttgagaggtgtctttgatgagagtgtccgggcccacctggctgccctggatgaaacccctgtggctggtccacctcacctccgtccacctccaccctctcatgtccctgctggtggacctgatctacaggatgtggttcaggaagtgcaacacgtgctgtctgagtttatccgggccaacccaaaggcctgggcacctgtgattagagcatggtccattgacctcatggggcaactgagcagcacgtactcaggccagcaccagcgtgttccccacgctactggcgctcttaatgaactgctacagctgtggatgggttgtagggccacgcgtacattaatggacatctatgtgcagtgcctctcggctctcattggtagctgcccagatgcgtgtgtggatgccttgctggatacctctgttcagcattctccacactttgactgggttgtggcacatattggctcctcttttcctggcaccatcatttcccgggttctctcctgtggccttaaggacttttgtgtccatggtggggctggaggtggagctggcagtagtggtggaagctcttctcagaccccctctacagaccccttccctggatctcctgccattcctgcggagaaacgggtgcccaagattgcctcagttgtaggcatcctaggtcacctggcctcccgccacggagatagcatccgacgggagctcctgcgaatgttccatgatagcctggcaagggggatctggaggccgcagtggggacccctcccttcaggccacggttccgttcctactgcagctggcagtcatgtcaccagctttgctgggcaactgtctctggagagcttgtggattgcctcaagcccccagctgtgctgagccagctgcagcaacaccttcaaggattcccccgagaggagctggacaacatgttgaacctggctgtgcacctggtgagccaggcctctggggcaggtgcctaccgcttgctgcagttcctggtggacacagctatgcctgcttcggtcattaccacccagggcctggctgtgcaaaacaccgtgcgtgaggcttgtgaccggctaatccagctgctgctgctgcacctgcaaaaactggttcatcacccgggaaggctccctggggggaaaggggtggttaaaggcccggccccaaccttccccggtttgggggcccccttttttagaggcgcttcaaaaaccattgttttgaaaaaaactttggttggg

SEQ ID NO: 357928 - DNA, 1721 bp, Homo Sapiens
  misc_feature (1328)..(1340): n is a, c, g, or t
agcgggggacgccccgctgccgctcgggaagaggcgggccctgcgcgccctgcgctcgccatggcggtttgggcggcgacgtgagcggctccgcggaccccgagcggggccccggccgcgacctgagccgccgccgagcgcccggggccatgcgaccgacgctgctgtggtcgctgctgctgctgctcggagtcttcgccgccgccgccgcggccccgccagaccctctttcccagctgcccgctcctcagcacccgaagattcgcctgtacaacgcagagcaggtcctgagttgggagccagtggccctgagcaatagcacgaggcctgttgtctaccaagtgcagtttaaatacaccgacagtaaatggttcacggccgacatcatgtccataggggtgaattgtacacagatcacagcaacagagtgtgacttcactgccgccagtccctcagcaggcttcccaatggatttcaatgtcactctacgccttcgagctgagctgggagcactccattctgcctgggtgacaatgccttggtttcaacactatcggaatgtgactgtcgggcctccagaaaacattgaggtgaccccaggagaaggctccctcatcatcaggttctcctctccctttgacatcgctgatacctccacggcctttttttgttattatgtccattactgggaaaaaggaggaatccaacaggtcaaaggccctttcagaagcaactccatttcattggataacttaaaaccctccagagtgtactgtttacaagtccaggcacaactgctttggaacaaaagtaacatctttagagtcgggcatttaagcaacatatcttgctacgaaacaatggcagatgcctccactgagcttcagcaagtcatcctgatctccgtgggaacattttcgttgctgtcggtgctggcaggagcctgtttcttcctggtcctgaaatatagaggcctgattaaatactggtttcacactccaccaagcatcccattacagatagaagagtatttaaaagacccaactcagcccatcttagaggccttggacaaggacagctcaccaaaggatgacgtctgggactctgtgtccattatctcgtttccggaaaaggagcaagaagatgttctccaaacgctttgaaccaaagcatgggcctagcccactggctccctggaagagatcaagccatcggagctgctagagttctgtctggactttccagagaccagtattcccttttgctgcctctaaaaggcctgtccctgcagacatgagagacagcaggtctcatgggggtgacaagcnnnnnnnnnnnnncttaaagaattttcaaaatcaaattccagaatgattttacggagatatcccaggaaaattaaggcttctcttaaacactaaaaaggcatgtaattgcttgttagcaaaatggatatgacacatctctgatacttttttcattattggttgggctgagcagtcagaagacctggtcgtcgtcttgactttggcaaatgagccggagccccttgggcaggtcacacaacctgtcccagcgagggacaccgagtggcccttcatgtacatccatggtgtgctggcttaaaatgtaattaatcttgtaaatatactcctagtaatttaagattttgtttttaaactggaaataaaagattgtatagtgcatgttttttaaagtct

SEQ ID NO: 357929 - DNA, 360 bp, Homo Sapiens
  misc_feature (65)..(65): n is a, c, g, or t
  misc_feature (149)..(149): n is a, c, g, or t
  misc_feature (177)..(177): n is a, c, g, or t
  misc_feature (184)..(184): n is a, c, g, or t
ggagatatccccccggaaaattaaggcctcctccttaaacacctaaaaaggccatgtaattgccntgttagccaaaatggatatgacacatcccctgaatacttttttccattattggttgggctgagccagtccagaagaccctggtncgtacgtccttgactttggcaaatgagnccggaancccttgggcaggtcacacaacctgtcccagcgagggacaccgagtggcccttcatgtacatccatggtgtgctggcttaaaatgtaattaatcttgtaaatatactcctagtaatttaagattttgtttttaaactggaaataaaagattgtatagtgcatgttttttaaaaaaaa

SEQ ID NO: 357930 - DNA, 1483 bp, Homo Sapiens
ggtccggaattcccgggatgccgcgcaggaggacggagccctaaccgcaacccgcgccgcgccgcgccgatttgatttgtatccactgtcaccagcactgctcacttaggactttctggatccggacccaggcagcgcacactggactcttgaggaagaaggagactctaattttggattccttggtggaggaaaataaaacactctggtcttgccgccaacgatgcaagtgtgactgctggcgtcttcatgagctccagaggtcacagcacgctaccaaggactctcatggcccctcggatgatttccgagggagacataggaggcattgctcaaatcacctcctctctattcctgggcagaggcagtgtggcctccaatcggcacctcctccaggctcgtggcatcacctgcattgttaatgctaccattgagatccctaatttcaactggccccaatttgagtatgttaaagtgcctctggctgacatgccgcatgcccccattggactgtactttgacaccgtggctgacaagatccacagtgtgagcaggaagcacggggccaccttggtgcactgtgctgcaggggtgagccgctcagccacgctgtgtatcgcgtacctgatgaaattccacaacgtgtgcctgctggaggcgtacaactgggtgaaagcccggcgacctgtcatcaggcccaacgtaggcttctggaggcaactgatagactacgagcgccagctctttgggaagtcgacagttaaaatggtacagacaccttatggcatagttcccgacgtctatgagaaggagtcccgacacctgatgccttactgggggatttagtgccactgaagcctgcgtcagcagcccgagcggggccggcatctgctccccgccgtctgctccctctccactctcttctcaaatggctgacttctggttctccctcaagtgttttttacactgggtgttcaaatttattttaagagatagggagggaggggacataaagggaatgcatacattgctagtcacatttttaaaattaacattttggaatagtgtttatggaaatctttagcttttaatcatttttaccaatttgaacagtttaataaactggttctgctctcttctgaatctcatgcctttggcaccttggtaggtgcaggaggagctcagtgcaaaaatcactttggggcctcattaaccctttagagacaagctttgccccaggctgcggaccagacagatgcttagggaaggttgataccagcttcagtctctactggattagccctactctttcctttcccctccattatttagtgactctgtaagtaagttaaatacacccttattatttagctgttaagtaactataatgaaatctgctgcaaaatctctcttggaatccatgtgcccaggattatattagcattatttttaataaatctatatgcttaacatattaaaaaaa

SEQ ID NO: 357931 - DNA, 467 bp, Homo Sapiens
  misc_feature (441)..(441): n is a, c, g, or t
cgcgcaggaggacggagccctaaccgcaacccgcgccggccggccgaatttgatttgtatccactgtcaccagcactgctcacttaggactttctggatccagacccaggcagcgacactggactcttgaggaagaaggagactctaattttggattccttggtggaggaaaataaaacactctggtcttgccgccaacgatgcaagtgtgactgctggcgtcttcatgagctccagaggtcacagcacgctaccaaggactctcatggcccctcggatgatttccgagggagacataggaggcattgcttcaaatcacctcctctctattcctggggcagaggcagtgtgggcctccaatccggcaccttcttccagggttcgtgggcattcaactggcattgtttaatggtaaccattgagatccctaattttcaaatnggccccatttggagtatgttaaagtg

SEQ ID NO: 357932 - DNA, 1789 bp, Homo Sapiens
  misc_feature (1259)..(1259): n is a, c, g, or t
tgttcatcctggacgaccatgattcagacctagacctttggccttggtggggagagcccatttaccggaatgggcagtatgttggcaagaccaccagcagtgcctacagctacagcctggagcgccacgtttgcctgggctttgtgcacaatttttctgaggacacgggggaagagcaagtggtgacagcagatttcatcaaccggggagagtatgagattgacatcgcgggataccgcttccaggccaaggccaagctctaccctgtcgcctccctcttcacccagaagcgccgaaaggatgacatggagctgagtgacttacatgggaagtgatgccaccagggcagcctcacctcctccccatcatcttgtcctagagtgggcgtcaccttggagcttctcttccttccgcctctgttcctcttctggagcctttgcctcccatctcttatctccttgatataattttgaacttgacctactttaaacttttttgctctgcagccttccttgcccttccacctcctcctcctaatattcactctgggctcttcttcccttcccacccctcactcagctgctcgtggtggcaggaggtatgtctgacaggacagaagcaagctccactgtggacatgagtgatggtgacagctgctttcaaattctgcatctcaaggcagggcaagccggggtggtgcaggtctcagggcatgagtccctctcccttgggttccattttcttggagcagcctattagttctggtggggttgccgtgtgtcggatgcagccctgaggggcagctcgtgcctgcagcccggcagctcgttctcctgttctgctgtgctgtgggctggcactcgatacctctggcaagaggatgatcatctacctcactgataagaggcatcgcatggacgttctctggtctgtagtggagacaagcagttaacctagcaccatcctcatcctccctgcagaagccattagcagacctttgggccagggcagcctccctataattttcttcatctcttgctaatctctataataaggttgctttttctttcttagttgagtaaacaagtaagccacagtgtttgaaagggaaaaaccatgttgccttgtgtgttgcttttcccagtcaaaagggtctgaccttagaaagtccccaccagtgatgctgagtgttctgctatggaaacaatgctgcttttctctcagctgtccaaagttcagccgttcctccttccccctcncccagtgcgtttgactttgtcaggtcagcctcacttgtccctttcacagttggcccataaagtcatgtttctctccctttagaatagggaggggaagggatcatggtgtgttgtcctgggcctttcaaccttgcgggctgtgatgagttccagagagctgccggaatcccaggtttgactctccagcacagagcagagctacacagaggtgacccacgttagtccactgagagttctgagtccaaagggtgtacgttgcataaggctagagaacgcctttcctcctttccccacacgcgatttcttcccgctccacccacccttgccatatcctctggagcaggagacaatgtgggtgcgccagaagtgccctgcgctttcaggcagtgtctctgttttcccaaggtgaaacttagatatcatggactgttgtccagcctcaatgcctcattttccccttgcatatcaactgccctaatctgactttttttaagtgcaaataaactgctataagacattttggttagtaa

SEQ ID NO: 357933 - DNA, 1526 bp, Homo Sapiens
  misc_feature (1072)..(1072): n is a, c, g, or t
  misc_feature (1285)..(1285): n is a, c, g, or t
  misc_feature (1383)..(1384): n is a, c, g, or t
  misc_feature (1387)..(1388): n is a, c, g, or t
  misc_feature (1392)..(1392): n is a, c, g, or t
  misc_feature (1395)..(1395): n is a, c, g, or t
  misc_feature (1404)..(1404): n is a, c, g, or t
  misc_feature (1506)..(1506): n is a, c, g, or t
gaattcccgggatggaccccgtggccttggggcgtcaggaggcccaacccagatctgcgcgcccaggcagcgctcaggccgctagaatggaccccgtgcagcggcgaggaagcggaactctctgcggctccctctccgcagtgcgccggcaaggtccaggtcccagcctccccaccgccgcccgcgccctcctaggcctcggagcggcgcctttctgcggcctcgaaggtggggtgggaaagtttggggagtcccggctctcacagcctgtcgtgagaactgcccccggggaattcgtccgccgtacggaaaaactggccggagcagagtcgtccgcggttccgcggtcgcgggtggaaggtgacaggtcgagggaggtcaggctgcttctgcgtgtcctgacggctggcgtgttctcttgagatgggctcgggctacttggccagcttcaatttaagccacagtgtctccgaggccctgacctggtccggcccgccgacacttgagcccccagagcctcagagaaggcgagggggtggatctcccagtgccgaggcccgccgtcctggtccaagccggtcgcggcaccgtgtctgggcactggagctgcttccagccccgcgaacagctggagggtggcagtgggaccgctccggcggcttctcccgcgcagtgccccgcctggccccttgtgaagggagtgagcgtcccctttccagagctgtcccccgtgacatccagaaaacgcgaaacctcaggaacaaggtcgcagcttcagaccgcggcccaggaggccgatgccagcgacgtgccccaggacgggctgcttctgcacggccccttcgcacgcaagcccaagcggatccgcacggccttctcgccctcgcagctgctgcggctggagcgcgccttcgagaagacacctacgtggtgggcgccgagcggaagcagctggccggcagtctcagcctctccgagacgcaggtgaaggtgtggttccagaaccggaggacaaagtacaaacggcagaagctggaggaggaagggcctgagtccgagcagaagaagaagngctcccatcacatcaaccggtggcgcattgccacgaagcaggccaatggggaggacatcgatgtcacctccaatgactagggtgggcaaccacaaacccacgagggcagagtgctgcttgctgctggccaggcccctgcgtgggcccaagctggactctggccactccctggccaggctttggggaggcctggagtcatggccccacagggcntgaagcccggggccgccattgacagagggacaagcaatgggctggctgaggcctgggaccacttggccttctcctcggagagcctgcctgcctggcgnnccnncccnccnccgcagccncccagccgccctccgtgtccccaatctcccttttgttttgatgcatttctgttttaatttatttcccagccactactgtagtttagtgatccccagtgtccncccttccctatgggaataat

SEQ ID NO: 357934 - DNA, 1448 bp, Homo Sapiens
gaggactctccctgacctctggggagggggccatctgctgcgcccggccccactgacagatctgaagagcacagtaggaagggaggcggctcctctttgcttccttccctctctctcctcccacccccataggatcagtgtgtaccaggtacacattgttcctgttaacagcagcttcttgaaacatttgcatagaattcactggacgaattaagcctgcactcatatggcatagaattgtgagagaatgttttgaaaggccagagggtggcctttttccccaaacagtttggttccttttatgtttgagccagtgaagggaactacgctttgggggcttcagcctagagccctgccaggcagcccctggctccaggttccctgcctcctagcgctctcctcgccttcagctcttgctcccttcctcgttcatcaccctcagtcagtgcccaagagtggccaaaccgcttcacatctgcagtgcttccccagggttgacaaggggccgtcctttccacacaggccagaagaggtcttcaggcgaaccgaccttcccccttctggcatttcagattccccttgctctggttaaaaggtctttccctcgtggcctttgcacttgcggcagcaacgtgtactacactgcagaagggttcagtatgcaccttgtgttgagagagaggcaaccctgggggccagttcaggtggtccccaaccataagctaggtctgaaagttacacagccaagtttgagctcttaaaagttgatgaacagcctcatttccccagcttccctgatttcttccagatgggacgttttatttgtgtgctctcccttgactgtcagattgaagtaagagcagttctctccgttgcctctcgaggaggaggtgcgaagtcctggagtattgtttgggtctcggaatgggcgcataacctgcgctgaccagtttaggggcttagcagatgcctgccagctgacctcgttggcaggagggttgggtggagatgtttttagcagagcttccattagtgtagacctgtagccacctgtcagaaggtgggtggcatattggggacctgggaatgtgtgaaggaggagatcaaatttcagtggctttggacagaaaagaaggctctggatttaagcgggtggtcacctgtgagaccaggtctaccttgggactgttatttaactgaatcagttatttccttgaaatttcacagtagtgggtgggcctgttttaaggctctgacagataccacgaaacatgaagcacgtggaactacaagacccccggggtctttctgagtgcaaggctgaaatggacaagggctcctcacgggggtggagggagccggagcctgccttgtgttccttttttgacttgtgacatttttcaaacacataattaaaaggacttatgctctgctgtctcaggaaaaaa

SEQ ID NO: 357935 - DNA, 482 bp, Homo Sapiens
  misc_feature (28)..(28): n is a, c, g, or t
  misc_feature (36)..(36): n is a, c, g, or t
  misc_feature (56)..(56): n is a, c, g, or t
  misc_feature (94)..(94): n is a, c, g, or t
ccaactaacctctttggcaaaaaggttnggtggaanatgttttttaaccaaacctncccattaatgtaaaaccctgtaagcccaccctgtccanaaaggtgggtggccataattggggaccctgggaatgtgtgaaggaggagatcaaatttcagtggcctttggacagaaaagaaggcctctggatttaaaacgggtggtcacctgtgagacccaggtctaccttgggactgttatttaactgaatcagttatttccttgaaatttcacagcagtgggtgggcctgttttaaggctctgacagatacccacgaaacatgaagcacgtggaactacaagacccccggggtctttctgagtgcaaggctgaaatggacaagggctctcacgggggtggagggagccggagcctgccttgtgttccttttttgacttgtgacatttttcaaacacataattaaaaggacttatgctctgctgtc

SEQ ID NO: 357936 - DNA, 1099 bp, Homo Sapiens
  misc_feature (807)..(807): n is a, c, g, or t
  misc_feature (931)..(931): n is a, c, g, or t
  misc_feature (952)..(952): n is a, c, g, or t
  misc_feature (986)..(986): n is a, c, g, or t
  misc_feature (990)..(990): n is a, c, g, or t
  misc_feature (997)..(998): n is a, c, g, or t
  misc_feature (1006)..(1006): n is a, c, g, or t
  misc_feature (1029)..(1030): n is a, c, g, or t
  misc_feature (1032)..(1032): n is a, c, g, or t
  misc_feature (1040)..(1040): n is a, c, g, or t
  misc_feature (1048)..(1048): n is a, c, g, or t
  misc_feature (1050)..(1050): n is a, c, g, or t
  misc_feature (1058)..(1058): n is a, c, g, or t
  misc_feature (1060)..(1060): n is a, c, g, or t
  misc_feature (1065)..(1065): n is a, c, g, or t
  misc_feature (1067)..(1067): n is a, c, g, or t
  misc_feature (1076)..(1076): n is a, c, g, or t
  misc_feature (1080)..(1080): n is a, c, g, or t
  misc_feature (1091)..(1091): n is a, c, g, or t
  misc_feature (1093)..(1093): n is a, c, g, or t
  misc_feature (1095)..(1095): n is a, c, g, or t
tcaaaatgctgaactgctctttggaagtcgccggtgctgttgtagttggagatctgttcacgggcctgagcttcgaggccaggctcccgggtgtcgttaatgttcggggccgccgggcgccaaccgatcggagctccagcagccgggaacagctggcatttcagcagaaccatggaggagctggttcatgaccttgtctcagcattggaagagagctcagagcaagctcgaggtggatttagctgaaacaggagaccattctcgaagtatatcttgccctctgaaacgccaggcaaggaaaaggagagggagaaaacggaggatcgatataatgtgcatcacccgtgggagactggtcactgcttaagtgaaggctctgattctagtttagaagaaccaagcaaggactatagagagaatcacaataataataaaaaagatcacagtgactctgatgaccaaatgttagatagcaaagcgcaggccgtcatcaaacttaaataataatgttcgagggaaaagacctctatggcatgagtctgattttgctgtggacaatgttgggaatagaactctgcgcaggaggagaaaggtaaaacgcatggcagtagatctcccacaggacatctctaacaaacggacaatgacccagccacctgagggttgtagagatcaggacatggacagtgatagagcctaccagtatcaagaatttaccaagaacaaagtcaaaaaaagaaagttgaaaataatcagacaaggaccaaaaatccaagatgaaggagtagttttagaaagtgaggaaangaaccagaccaataaggacaaaatggaatgtgaagagcaaaaagtctcagatgagctcatgagtgaaagtgattccagcagtctcagcagcactgatgctggattgtttaccaatgatgagggnagacaaggtgatgatgaacanagtgactggttctacgaaaaggaatcaagtggancatntggtatnnttggagtngtgcctggtgggaaagggagatnntntgagctanacaaaatntncaaatctntnttttnantttttaacnggtntttcccctatntncnccca

SEQ ID NO: 357937 - DNA, 736 bp, Homo Sapiens
gtcctaaagaaaccaatcggtgactctcaagtgcctccagagtatgagctggtacagctgctaccaggggagcgagagctgactatccaagcctcggctaatgtatctacgccatgggatggagcttcacacgatttcctcctgcggcagcggcgaaaggtcctctactgctacaccgggcgtcaccagtggcccgtctgcctcaggaactcctccgagtgagggaggagggggctcctttcccaggatcaaggccacagggaggaagattgcacgggcactgttctgaggaggaagccccgttggcttacagaagtcatggtgttcataccagatgtgggtagccatcctgaatggtggcaattatatcacattgagacagaaattcagaaagggagccagccaccctggggcagtgaagtgccactggtttaccagacagctgagaaatccagccctgtgggaactggtgtcttataaccaagttggatacctgtgtatagcttcccaccttccatgagtgcagcacacaggtagtgctggaaaaacgcatcagtttctgattcttggccatatcctaacatgcaagggccaagcaaaggcttcaaggctctgagccccagggcagaggggaatggcaaaatgtaggtcctcgcaggagctcttcttcccactctgggggtttctatcactgtgacaacactaagataataaaccaaaacactacctgaattct

SEQ ID NO: 357938 - DNA, 3744 bp, Homo Sapiens
  misc_feature (43)..(79): n is a, c, g, or t
  misc_feature (3040)..(3146): n is a, c, g, or t
gccagcccgagaagatatatggccctggcgtacgcggggcggnnnnnnnnnnnnnnnnnnnnnnnnnnnnnnnnnnnnnatcaggccaaatcggccgagctcgaattcgtcgagagcgggttcaagggggtacggaaaagccggggaggggactcggtccggggccggagaccgacggcaacagcggctcaggacccacgctgcccccacccctcccgagcaggcgcccccatggcccgaccccgctgattccttcactcggccatgctcccgcggcccctgcggctgcttttggacacgagcccccccgggggagtcgtactgagcagcttccgaagccgggaccccgaagagggtgggggcccaggtggcctggtcgtgggcggggggcaggaggaagaagaggaggaagaagaagaggcccctgtgtccgtctgggatgaggaggaggatggtgccgtgtttaccgtcacaagccgccaatatcgacctcttgatcccttggtccctatgcctcccccacgttcctcccgacggctccgagctggcactctggaggccctggtcagacacctactggatacccggacatcagggactgatgtgagcttcatgtcagccttcctggctacccaccgggccttcacctccacgcctgccttgctagggcttatggctgacaggctggaagcccttgaatctcatcctaccgacgaactagagaggacaacagaggtagccatctctgtactgtcaacctggctggcctctcaccctgaggattttggctctgaggccaagggtcagcttgaccggcttgagagcttcttacttcagacagggtatgcagcagggaagggtgttggggggggcagcgctgacctcatccgcaatctccggtcccgggtggacccccaggcccccgaccttcctaagcccctggccctccccggcgatccccctgctgaccccacggatgtcctggtgttcctcgctgaccacttggccgaacagctgaccctgctagatgcggaactttttctcaatttgatcccctctcagtgcctgggaggcctgtggggtcacagagaccggccaggacattctcacctctgcccatctgtccgagctactgtcacacagtttaacaaggtggcaggggcagtggttagttctgtcctgggggctacttccactggagagggacctggggaggtgaccatacggccactccgtcccccacagagggcccggctcctggagaagtggatccgcgtggcagaggagtgccggctgctccgaaacttctcttcagtttatgccgtggtgtcagccctgcagtccagccccatccacaggcttcgggcagcctggggggaagcaaccagggacagcctcagagtcttttccagcctctgccagattttctccgaggaggataattattcccagagtcgggagctgctcgtgcaggaggtgaagctgcagtctcctctggagccacactccaagaaggccccgaggtctggctcccggggtgggggtgtggtcccataccttggcaccttcctgaaggaccttgtgatgctggatgcagcctccaaggatgagttggagaatggatacatcaattttgacaagcggaggaaggagtttgcagtcctttctgagttgcgacggctccagaatgaatgtcgtggctataacctccaacctgaccatgatatccagaggtggctacaggggctccggccactgacagaggctcagagccatcgtgtatcctgtgaggtggagccacctggttccagtgaccctcctgccccacgggtgcttcggccaacattggtcatctcgcagtggacagaggttttgggctctgttggggtccctaccccgcttgtgtcctgtgaccggcccagtactgggggagatgaggcgcctacaactcctgctcctctgctgactcggctggcccagcacatgaagtggccatctgtctcgtcactagactctgccttggaaagcagtccatccctgcacagtccagctgaccccagccacctctccccaccagcctcctcccctaggccttctcgaggtcaccgccgctcagcctcctgtggctccccgctgagtgggggtgcagaagaggcctccggggggactggatatgggggagagggatctgggccaggggcctctgattgccgtatcatccgagtccagatggagttgggggaagatggcagtgtctataagagcattttggtgacaagccaggacaaggctccaagtgtcatcagtcgtgtccttaagaaaaacaatcgtgactctgcagtggcttcagagtatgagctggtacagctgctaccaggggagcgagagctgactatcccagcctcggctaacgtattctacgccatggatggagcttcacacgatttcctcctgcggcagcggcgaaggtcctctactgctacacctggcgtcaccagtggcccgtctgcctcaggaactcctccgagtgagggaggagggggctcctttcccaggatcaaggccacagggaggaagattgcacgggcactgttctgaggaggaagccccgttggcttacagaagtcatggtgttcataccagatgtgggtagccatcctgaatggtggcaattatatcacattgagacagaaattcagaaagggagccagccaccctggggcagtgaagtgccactggtttaccagacagctgagaaatccagccctgtgggaactggtgtcttataaccaagttggatacctgtgtatagcttcccaccttccatgagtgcagcacacaggtagtgctggaaaaacgcatcagtttctgattcttggccatatcctaacatgcaagggccaagcaaaggcttcaaggctctgagccccagggcagaggggaatggcaaaatgtaggtcctcgcaggagctcttcttcccactctgggggtttctatcactgtgacaacactaagataataaaccaaaacactacctgnnnnnnnnnnnnnnnnnnnnnnnnnnnnnnnnnnnnnnnnnnnnnnnnnnnnnnnnnnnnnnnnnnnnnnnnnnnnnnnnnnnnnnnnnnnnnnnnnnnnnnnnnnngggggggggggcggcggcgaacaactctcctccccacggggcggcgcgcgacacccgacgccgacccagcacgcattgaggaagcagagacggagcgcaccccaccacaggggagcggagtctattattagaacggaaagagagagcgagagagacgcgcacgcgaggagcgcacagagaacagagcacaaaacgaaggagagcggaggcgcgtacgaacgcgcaagcgcacatgcgaggaagggagtgttgcggcgggagggagagaggagagagagcgcacacggagcgaccgcggaggggaggagcagagcgagcagagaagtcacagagggcgagcgacacaccgagaaacacccgccacacccgcgagcgcggcgcgggaaacgacaaacacagaggggtgagagggtgtgaggagaggggagggtagagtaaatggagaggagtatagaagtgggaggggaggagtatgagggtggaatgattatgattcgaagctggaggagtggtggattgaaagagatgtagagaggtggtgatggatttgagcaggtttggagggtaggactggtggcgggaggaagagggggaggat

SEQ ID NO: 357939 - DNA, 655 bp, Homo Sapiens
cactactggcccctatgccccctgaccccttactaacctctccttgactccagatcctttccttgcttccaccccttcctgatccagctcctagcctcctccacctaccattttgattctccccttttccctttggtcgttacccttcaaaccctgtgcccctctggttccttggccacctgagatcctcagatccctgatattggaaggctgacctcacttgactatgaactttaacctctgacctctaccctgcaggaactttttctcaatttgatcccctctcagtgcctgggaggcctgtggggtcacagagaccggccaggacattctcacctctgcccatctgtccgagctactgtcacacagtttaacaaggtggcaggggcagtggttagttctgtcctgggggctacttccactggagagggacctggggaggtgaccatacggccactccgtcccccacagagggcccggctcctggagaagtggatccgcgtggcagaggagtgccggctgctccgaaacttctcttcagtttatgccgtggtgtcagccctgcagtccagccccatccacaggcttcgggcagcctggggggaagcaaccagggacagcctcagagtcttttccagcctctgccagattttct

SEQ ID NO: 357940 - DNA, 896 bp, Homo Sapiens
ccggagaggacgaagcaggacctaggtggcggcggtggtaccggctgcaatggtgtccaatcccgtgcatggcttgccctttcttccgggcacgtcctttaaggactctacgaaaacagccttccacagaagtcagacgctgagctacaggaacggctatgcaattgttcgacgtccaacagttgggataggcggagaccggctccagttcaaccagctgtcccaggctgagctggatgagttggccagtaaggcaccagtcttaacttatggccaacctaaacaagccccacctgcggattttattcctgcgcatgtggcctttgacaaaaagctattgtaaaaggggttgagttcttgatttgattctcagcttggtcgctgttggtgtaaagaagagctactgatacgcatacattaatttcgtatccagaaacttcgctgaattcttttatcagttctaggagctttctggaggagtctttaggattttccaggacttcttctagtactgtgctgaagaggagtggagagagtgggcatccttatgtcgtcccagttctcagagggaatgctttcaacttttccccattcagcattatgtcggcctgtggggctctgtcatagatggcttaatcacattgaggtactgaaattgatgcctatttccaagaagatgtcctatgtcaactgaggaacagcataggatccgccaggtgaacatcactactatctacgaacgatgacagcacagcctgccacagaagcctgacgaacaacaccctggacaccctccaaggcaacgcactaaaacgccagcgggccaaccaagcacgaccggcgcgaccacacaccaagcaaacgaccacaacagacggacaaacatcacaaccagg

SEQ ID NO: 357941 - DNA, 1291 bp, Homo Sapiens
  misc_feature (1253)..(1253): n is a, c, g, or t
ggggcacgcgcaaacctcctgtgatgcctgcgcctcctggccccgccttccgctcgtgggagttccggatgtttagcgttaccatggatcctggaggtgcccgcgaacactgcttgtcgcctgggcaaccggagaggacgaagcaggacctaggtggcggcggtggtaccggctgcaatggtgtccaatcccgtgcatggcttgccctttcttccgggcacgtcctttaaggactctacgaaaacagccttccacagaagtcagacgctgagctacaggaacggctatgcaattgttcgacgtccaacagttgggataggcggagaccggctccagttcaaccagctgtcccaggctgagctggatgagttggccagtaaggcaccagtcttaacttatggccaacctaaacaagccccacctgcggattttattcctgcgcatgtggcctttgacaaaaaggtactgaaatttgatgcctatttccaagaagatgttcctatgtcaactgaggaacagtataggatccgtcaggtgaacatttactattatctaagaagatgacagcatgtctgtcatagaacctggtggagaaaattctggaatccttcaaggcaaggtaataaaacgccagcggctagccaagaatgaccggggtgaccattaccattggaaagacctaaatcgaggaataaacatcacaatttatggcaaaactttccgcgttgttgactgtgaccaattcacacaggtatttttagaaagccaaggaattgagttaaatccaccagagaagatggctcttgatccttacactgaactccgaaaacagcctcttcgtaagtatgtcaccccatcagactttgatcaactcaagcaatttctcacctttgacaaacaggtccttcgattctatgcaatctgggatgatacagacagcatgtatggtgaatgtcggacctacatcattcattactatcttatggatgatacggtggaaattcgagaggtccacgaacggaatgatgggagagatcctttcccactcctaatgaaccgccagcgtgtgcccaaagttttggtggaaaatgcaaagaacttccctcagtgtgtgctagaaatctctggaccaaggaagtgttgggaatgggtattactgcttaaagacttcattgttggggaagtcactcactattccttgggagaactttcttccatttatggattgtggatccctttttactcggacgggnatttaccaaaggggaaggtttgggattcactggatttt

SEQ ID NO: 357942 - DNA, 1336 bp, Homo Sapiens
  misc_feature (22)..(22): n is a, c, g, or t
  misc_feature (51)..(51): n is a, c, g, or t
  misc_feature (57)..(57): n is a, c, g, or t
  misc_feature (101)..(101): n is a, c, g, or t
  misc_feature (110)..(110): n is a, c, g, or t
  misc_feature (145)..(146): n is a, c, g, or t
  misc_feature (155)..(155): n is a, c, g, or t
  misc_feature (168)..(168): n is a, c, g, or t
  misc_feature (171)..(171): n is a, c, g, or t
  misc_feature (211)..(211): n is a, c, g, or t
  misc_feature (230)..(230): n is a, c, g, or t
  misc_feature (1271)..(1271): n is a, c, g, or t
gtgggatcggtgaatcttcaantaaataaataaatgtacagccccccaagntgcagnatttcccatccctagtttaacagtcacggttcactttgttttangtgcgtttngcagatgagtggtgctctcatcagcagacacaagnnttctttggnctctgcttttttnttntttcttctaataaggggactacactctagataaacaaaanagacaggcgaatgtgatcnagggttttggtggtttttctgagtctagaaggactaaaaattagccttgataggcagaaagagcatcccaacctgtctgtcaaaaactctggccatttctaggacacctttgccgaactcattttttacacttgcatctgcccctttgtcaagaagtaactgaactaactcttcatgattatttaacacagccaccataaggggcgtctttccatttctgtccttcacattcacattggccccagcatcaattagaagagaggccaccctctgatttcccgacaccgcagagactctcatgagtggggtccatcctgaaccagtgtccacgacgtctacctcacagccatcctttatcatccactcaatcacactgcagtggcctccatctgcagcccagtgcagagctgtacagcctcccaggtctctagcctgccaagaagcgccatgtcttcggagatatttcacaacatctaggtgtcccgcatagcacgccagcattagactgtccttgccacttccattcttcagattcacgtctgtgccattagaaactaggattttcacaagcctggtgtatcctttctgggcagcaaccatcagagcggtaaagccaaacttattgggaacatcaaccttaacacggcctccttgaagtattcggaccagcaaatcttcatcattcacactgacagcccggtgcaagtgctcactacttatgggctctctggttgtagacactgagacgagtgggctgtactcacactccccagaggggctggtgaccttcaggcgaaatctgtacagcgtccttggttccagaccttcaacaacatgcttcgttgcatatcccgtataaatgataccataagtgtgcattttggggtcttcttcttcaatcgagaacctgaaccactgctcttgaggtccttggcgtttggctttcttttccagatcccagtataattcaatgctgtgatgagtcactttgcccacgacaggtggatgaggctttgagggtggcatgattttctggggctnccatggtcggctgctccccggcctccgcgggcgaacccgccggactcctaacgcctctcagccag

SEQ ID NO: 357943 - DNA, 1318 bp, Homo Sapiens
gcccgctctagagtatcccccgaacgccaaatatcctcctcaaaatgtcttattgtagtcagaattgttgtggtaaactaaatccttagtaggaagtcatatcccttcaaaaatctaagatgaagaactataaaaagacgtgtgaaaacacctcagaaaactagcttattttaaaaacaatgcaatcaaaacttattttcctgttatctttacatttcttggttttcataagttaaatatacagtattcacagaaattaagctggtggttatgaatcaccaggcagcaacagacagtatacataattatttgacgagtgcatccaacatattttaaactaaaaattgcagtacaaaaataaaactaacactgttagcatcatcttctgagtctgtagagtcaatcttgagtcaagttgattacgaggtttttttctataatgtccttcaaaaagagctgctctgtagtcacattgtgatacgcgttcttattcatcaaagacatggtggcattcccatagtagtgcaaaggactcttgaggtcagaaaagttgtatttaaaaccagctaggtgaacttcgtgacatatgtaaaacgccaatgtgatggcaataattcctgttgttgggtgtttaggtttctgatttttgggaaacacttttggaaaatgaagcagttcataagctgctgttctgataatgaaaggatctaatattcggatttgataaggtttataaatcaggtttaaggctggtttcttccaaaaaccattagtgtttattttgtcacccatcaacaattccaacagccaccttaaatcatgtggcttaaaagcagtgagaatcactgtcgtattagggtcattgtgaataggatctgaaaaaacagattctggataaaaaagtcggaaggttgtccttctcccaacttcttcttcatgtcctaaaacaggaccattattcattcttattattacatcataggagtcgattttttctcctaatgtcttattcttcaaaactcctccattaccaaccaccacacactttttacagggcatgctgatgttctcatcccatagggcaaatcaaacttatcgctaccatacaaggaagcaatctttctaaaatcagccgcacacagaaaagggtgaaactgatgaaacctttcgggcggggcggacaccagccgcgcgccctcgccgggcgccgggacccgaaaatcaccgcgaagggagggacgaggaaaggcggcgggtggcttcaggacaaggtaggaggatcgatttccacagccaagaagacactcccatcccgccc

SEQ ID NO: 357944 - DNA, 488 bp, Homo Sapiens
  misc_feature (19)..(19): n is a, c, g, or t
  misc_feature (46)..(47): n is a, c, g, or t
  misc_feature (71)..(71): n is a, c, g, or t
  misc_feature (77)..(77): n is a, c, g, or t
  misc_feature (93)..(93): n is a, c, g, or t
aagtgtgtggtggtgggtnaaggggggagttttgaagaataggacnntgggggaaaaatcgaccccctagntgtaanaataagaatgaataanggtccctgttttaggacatgaaagaagaagttggggagaaggacaaccttcccgacttttttatcccagaatctgttttttcagatcctattcacaatgaccctaatacgacagtgattctcactgcttttaagccacatgatttaaggtggctgttggaattgttgatgggtgacaaaataaacactaatggtttttggaagaaaccagccttaaacctgatttataaaccttatcaaatccgaatattagatcctttcattatcagaacagcagcttatgaactgcttcattttccaaaagtgtttcccaaaaatcagaaacctaaacacccaacaacaggaattattgccatttttacataacctctatgattttaataaaaaaaattatgt

SEQ ID NO: 357945 - DNA, 1156 bp, Homo Sapiens
  misc_feature (8)..(9): n is a, c, g, or t
  misc_feature (15)..(15): n is a, c, g, or t
  misc_feature (26)..(26): n is a, c, g, or t
  misc_feature (33)..(33): n is a, c, g, or t
  misc_feature (48)..(48): n is a, c, g, or t
  misc_feature (71)..(71): n is a, c, g, or t
  misc_feature (76)..(76): n is a, c, g, or t
  misc_feature (85)..(86): n is a, c, g, or t
  misc_feature (92)..(92): n is a, c, g, or t
  misc_feature (125)..(125): n is a, c, g, or t
  misc_feature (166)..(166): n is a, c, g, or t
  misc_feature (170)..(288): n is a, c, g, or t
  misc_feature (451)..(466): n is a, c, g, or t
acatactnnacaatntatttcgttcnaatcttntcagtcactactctnttaacaaataccacaaatgtagnaccanaacaacacnncttatnttcatagatctgtggtcaagagcctggtgcagnttgctggtcctctacttggatctcaggagctgcaatcaaanattnnnnnnnnnnnnnnnnnnnnnnnnnnnnnnnnnnnnnnnnnnnnnnnnnnnnnnnnnnnnnnnnnnnnnnnnnnnnnnnnnnnnnnnnnnnnnnnnnnnnnnnnnnnnnnnnnnnnnnngctgttggctggaagctgccctttgttctgtaccatgtggtctctccacagcggggctcggagcatggcagctaagttagtgagggaaggtgagatggaggttttggtcttattgggtgtgaggaagcaacgtgtgtgtgtgcgcacgcccttttgtgcagtnnnnnnnnnnnnnnnnttgcacacatgtgtctctgtagtcatgtggccaggtgggactatgtaggtaacagattgctcgtgtctgatttggtacaagcaagtttgttttcctctgtgttcgtgtgagtgtttactcaacaaatgtttattggacacactcagagagaaggagtgtgcacacctgcgtgtgtgttgctatccagcacgtggaccgggctcccagaagagctggcattgtgtctgagcagagctgggtccccccaaaacatgggctggcccagggcccaccagcagctgatgttgcctcctctcctgtcctggcagtagcttctgggttctgaaggtgccggagagagtgaggctgggcaggggtctgcggccctttctcagggacacaccctgatagcacaatctccttggggccctgcccacctccaggcctctcccacctcaaggccctgcccgaccctggggagagagggcatctgcaataggaggggacccgagcctgtcctggctgctggcccatcctgcctgggcatccctggtgctggggactgtgccaggccatgcttgctgtgactccgcccctgccccctctccccccgcatgtgggtgcccccactcccccatcgtggggtctgtgtagccttcgctctagacatagtcttcctgcaataaaaaagtggatcctgcattccccacc

SEQ ID NO: 357946 - DNA, 1841 bp, Homo Sapiens
  misc_feature (230)..(245): n is a, c, g, or t
  misc_feature (1709)..(1722): n is a, c, g, or t
tgggacccatctgtcaaccaagccagtcttctggacccggccacctgctggagagcacacaacgcacgggtgcaaaccccccttctctgaggggccacataaacacttggtggagtaacactcaccgacacagaggaaacaacatgcgtggtaccaaatccagacacgagcaatctgtgaccgacagtagtcccaccgcccacatgactacagagacacatgtgtgcaannnnnnnnnnnnnnnnactgcacaaaaagggcgtgcgcacacacacacgttgcttcctcacacccaataagaccaaaacctccatctcaccttccctcactaacttagctgccatgctccgagccccgctgtggagagacccacatggtacagaacaaagggcagcttccagccaacagccagcgaggaactgaggccttcagtcttgcaacagcaaggaactgaatgctgcaacaaccacatgagcttctaagaagcaaatccttccccgatcaggccttcagatgagacctctgcctggcgaatgctttgattgcagcctcctgagatcccaagtagaggacccagccaacctgcacccaggctcttgacccacagaatctatgagataataagcatgtgttgtttctggttgctacatttgtggtcatttgttacacagcagtagctgactgatacagatttggaaccgaaagtcacattgctagagtcatgttgctatagagtggaacacagatcgtgtccctcaatcaggacaaacatatttacagataaatgctctcagataaaccatatcacccactccccaaaatatagtcatgctcatacaggcacaaagattcacacagacacctcacacatatccagtcttgctgacaaccacacacaggtatctacaactacccacctctctgtataccctacaccactatatacacacacagactgccacaaaaacatatcatcccagacagacacacacaggtatacacgcagatgcacttagatacaagtcacccatccgcgcaccccaggttgcacaaatacaccattccatagccacttccgtgtatgttggacacaaccctgtggggtcacacgagtgtggtgtcactcagactctctcaaaaaacacccagaacctcatggctgcaggtacactcgactccaggacgccaccttcccgggcaggccctgctctctggggcacaggtggtggggaggaagtgggtggggcagacctctgtccggggcgccctcggatcctgctggtgctggctcccatcggctgtccccccacgggggtgtaattgatgtatctctggccggggccccgggtaccccctcctgagcaccccaggtccccacccgccatgcgttgctaacgtctctgtcttggtggaagaggcgggtcccgggtgggcggtgtccgggaagcccctccacgcccatggtgcctctccagcggggcagttgtgctgtggatgtggctggtcccgggggtgggattcggggctggcaggggcactgctgcaggccctgtggttattgcctggtggcctgaggcccatcacacgggccccacaccccactgtgaagacagaggagagaggtgcgtctggaaccggaggagtgggcacagatcagaggtcacgacgggccgggtgggcttgggtgtatgttaacaccaaataggagnnnnnnnnnnnnnntatctgaggccgatgtgcattttcaactcccccctcccccagaaggtcacagtgatcaaatgtgagggacaggacgcgcaggtctggctggggacaccccagggttaaggctcccgggg

SEQ ID NO: 357947 - DNA, 1031 bp, Homo Sapiens
  misc_feature (76)..(94): n is a, c, g, or t
ttaggtacgaggcccggtgttaatcggcacgaggctcggatctaggagctactcgcccggccctgggcggtgggannnnnnnnnnnnnnnnnnnctcgcgcacctcggaggagccaggagccggaaccagggccgagcccgcgggccggggctagccagccggtcggagatgtccgcccagaggttaatttctaacagaacctcccagcaatcggcatctaattctgattacacctgggaatatgaatattatgagattggaccagtttcctttgaaggactgaaggctcataaatattccattgtgattggatttagggttggtcttgcagtcttcgtgatttttatgttttttgtgctgaccttgctgaccaagacaggagccccacaccaagacaatgcagagtcctcagagaagagattcagaatgaacagctttgtgtcagactttggaagacctctggagccagataaagtattttctcgccaaggcaacgaggagtccaggtctctctttcactgctacatcaatgaggtggaacgcttggacagagccaaagcttgtcaccagaccacagcccttgacagtgacgtccaactccaggaagccatcagaagcagtgggcagccagaggaggagctgaacaggctcatgaagtttgacatccccaactttgtgaacacagaccagaactactttggggaggatgatcttctgatttctgaaccacctattgttttggaaactaagccactttcccagacctcacacaaagacctggattgagaaaccatgctctgtaaagggtcctccctgaagaattgtgggattcccactccttaatggtagccaaggaaatctaaattccacccaaaatggggtgtgtccggcggcgcaaagccacagacccctggacgatttgagcacagcgaagcgagatgaagaaacaccccctttataaaaagacactgcaaccgactatagcgggacagtgtgtacacagacacacggcacagatcacgcagacaca

SEQ ID NO: 357948 - DNA, 465 bp, Homo Sapiens
  misc_feature (410)..(411): n is a, c, g, or t
  misc_feature (418)..(418): n is a, c, g, or t
  misc_feature (422)..(422): n is a, c, g, or t
  misc_feature (440)..(441): n is a, c, g, or t
  misc_feature (445)..(445): n is a, c, g, or t
  misc_feature (447)..(447): n is a, c, g, or t
  misc_feature (451)..(452): n is a, c, g, or t
  misc_feature (457)..(457): n is a, c, g, or t
  misc_feature (459)..(459): n is a, c, g, or t
ataaaaagtaaaaataaaattgtaatgaacattcaagaaattgaaatatacgggtacaaagatgatatagtatcagaaaaaatgattttttttaaattttacagccacttgaattaagtacctaaaaatgcttttgatgctgttgagcttggctatgataacaacagtatgtaaatatcccacttttgttaaaatatgtataaacaggtatgtgtacagagcagtgtatgaaagggtggcccccagaatattgatagtgtttgacgtggaatttgggctaggaaaaataattaccaatgaggagatacaagatagcagcagttagggagaggccgcccatgcagctgcctatttaaatcactgtccatgttaacagataagaactggaaatgtcaaagaacaatcccccnncccagtncccncccgccactaaagaccannccancngggnncgatngnccacac

SEQ ID NO: 357949 - DNA, 1580 bp, Homo Sapiens
  misc_feature (682)..(682): n is a, c, g, or t
  misc_feature (1194)..(1194): n is a, c, g, or t
  misc_feature (1207)..(1207): n is a, c, g, or t
  misc_feature (1266)..(1266): n is a, c, g, or t
  misc_feature (1275)..(1275): n is a, c, g, or t
  misc_feature (1300)..(1300): n is a, c, g, or t
  misc_feature (1316)..(1316): n is a, c, g, or t
  misc_feature (1320)..(1320): n is a, c, g, or t
  misc_feature (1322)..(1322): n is a, c, g, or t
  misc_feature (1343)..(1343): n is a, c, g, or t
  misc_feature (1353)..(1353): n is a, c, g, or t
  misc_feature (1411)..(1411): n is a, c, g, or t
  misc_feature (1434)..(1434): n is a, c, g, or t
  misc_feature (1542)..(1542): n is a, c, g, or t
  misc_feature (1564)..(1564): n is a, c, g, or t
tcggcgcggaacaaacggttaaagattttgggcagcgcctcgcggggggaggagccaggggcccaatccgcaattaaagatgaactttgggtgaactaattgtctgaccaagcggaggaagttcctgcagatgaagcgcaggaaatacggcttcatctacaagacgcatctgttcgggcggcccaccgtacgggtgatgggcgcggacaatgtgcggcgcatcttgctcggagagaccggctggtgtcggtccactggccagcgtcggtgcgcaccattctgggatctggctgcctctctaacctgcacgactcctcgcacaagcagcgcaagaaggtgattatgcgggccttcagccgcgaggactcgaatgctacgtgccggtgatcaccgaggaagtgggcagcagcctggagcagtggctgagctgcggcgagcgcggcctcctggtctaccccgaggtgaagcgcctcatgttccgaatcgccatgcgcatcctactgggctgcgaaccccaactggcgggcgacggggactccgagcagcagcttgtggaggccttcgaggaaatgacccgcaatctcttctcgctgcccatcgacgtgcccttcagcgggctgtaccggggcatgaaggcgcggaacctcattcacgcgcgcatcgagcagaacattcgcgccanagatctgcgggctgcgggcatccgaggcgggccagggctgcaaagacgcgctgcagctgttgatcgagcactcgtgggagaggggagagcggctggacatgcaggcactaaagcaatcttcaaccgaactcctctttggaggacacgaaaccacggccagtgcagccacatctctgatcacttacctggggctctacccacatgttctccagaaagtgcgagaagagctgaagagtaagggtttactttgcaagagcaatcaagacaacaagttggacatggaaattttggaacaacttaaatacatcgggtgtgttattaaggagacccttcgactgaatcccccagttccaggagggtttcgggttgctctgaagacttttgaattaaatggataccagattcccaagggctggaatgttatctacagtatctgtgatactcatgatgtggcagagatcttcaccaacaaggaagaatttaaccctgaccgattcatgctgcctcacccngaggacgcacccnggctcagccccatcccatttggaggaggccttaggagctgtgtaggcaaagaattcgcnaaaattccncccaaaatatttacagtggagctgnccaggcattgtgactngccncntctaaatggacctcctacaangaaaaccagncccaccgtgtatcctgtggacaatctccctgcaagattcacccattcccatggggaantctgatgagcttgaatgttcaancctgagacttattggaagtgtacatatgagtttttaaggagtgttgtgttgactttatatttaatttctaaatgtatattataatatttatgtgttttgactatactnccacaatctttaaatattaaantaatgaatttgtatca

SEQ ID NO: 357950 - DNA, 1239 bp, Homo Sapiens
ggcctgggtggcgatctcaagacgaggctggctcgggagatggacggccgccgtgttttgggccggttctggagtggctggcggcggggcctgggtgtccgcccagtgcccgaggacgcaggctttggcaccgaagcccggcatcagaggcaaccccgcggctcctgccaacggtcggggcccctcggggaccagcccttcgcggggctgctgccaaaaaacctcagtcgggaggagctggttgatgcgctgcgggcagccgtggtggaccggaaaggacctctagtgacgttgaacaagccacagggtctaccagtgacaggaaaaccaggagagctgacgttgttctcagtgctgccagagctgagccagtccctagggctcagggagcaggagcttcaggttgtccgagcatctgggaaagaaagctctgggcttgtactcctctccagctgtccccagacagctagtcgcctccagaagtacttcacccatgcacggagagcccaaaggcccacagccacctactgtgctgtcactgatgggatcccagctgcttctgaggggaagatccaggctgccctgaaactggaacacattgatggggtcaatctcacagttccagtgaaggccccatcccgaaaggacatcctggaaggtgtcaagaagactctcagtcactttcgtgtggtagccacaggctctggctgtgccctggtccagctgcagccactgacagtgttctccagtcaactacaggtgcacatggtactacagctctgccctgtgcttggggaccacatgtactctgcccgtgtgggcactgtcctgggccagcgatttctgctgccagctgagaacaacaagccccaaagacaggtcctggatgaagccctcctcagacgcctccacctgaccccctcccaggctgcccagctgcccttgcacctccacctacatcggctccttctcccaggcaccagggccagggacacccctgttgagctcctggcaccactgcccccttatttctccaggaccctacagtgcctggggctccgcttacaatagtcctccctctgttcctgaccccctcacacacactggaaagtgagggtgggggctctgcagtcagacaaacctaagatcacatcctggacaggccacttgcttgctgtgtggcattgggcaagtaactttacctctctggacttgtgataataaaagttcctacctcaa

SEQ ID NO: 357951 - DNA, 1233 bp, Homo Sapiens
  misc_feature (50)..(82): n is a, c, g, or t
  misc_feature (748)..(846): n is a, c, g, or t
  misc_feature (899)..(1000): n is a, c, g, or t
  misc_feature (1003)..(1023): n is a, c, g, or t
  misc_feature (1097)..(1150): n is a, c, g, or t
  misc_feature (1172)..(1192): n is a, c, g, or t
tgtgtcgatcactatagggcgcctcggggttcacgcggtggcggcgcatnnnnnnnnnnnnnnnnnnnnnnnnnnnnnnnnnatcaggccaaatcggccgagctcgaattcgtcgagagcgggtcctggctcgggagatggacggccgccgtgttttgggccggttctggagtggctggcggcggggcctgggtgtccgcccagtgcccgaggacgcaggctttggcaccgaagcccggcatcagaggcaaccccgcggctcctgccaacggtcggggcccctcggggaccagcccttcgcggggctgctgccaaaaaacctcagtcgggaggagctggttgatgcgctgcgggcagccgtggtggaccggaaaggacctctagtgacgttgaacaagccacagggtctaccagtgacaggaaaaccaggagagctgacgttgttctcagtgctgccagagctgagccagtccctagggctcagggagcaggagcttcaggttgtccgagcatctgggaagtaagtggtaggggtgacaggaagctaggagtacaggcatccatctgtggtggggaaacagctgcttggggataagctgagacattttccatgggaaggtttgagatcatagaggtggatacaagtactgtgaagaagaggaagccgatggctctgggttcaaatcctcaagtacaaatggtgtgataccaggcaaagcatgacacctccctgacgctgggcacagtnnnnnnnnnnnnnnnnnnnnnnnnnnnnnnnnnnnnnnnnnnnnnnnnnnnnnnnnnnnnnnnnnnnnnnnnnnnnnnnnnnnnnnnnnnnnnnnnnnntggaaaaacaacaacaaaactttccgcgtggtggctcatgcctataatcaatnnnnnnnnnnnnnnnnnnnnnnnnnnnnnnnnnnnnnnnnnnnnnnnnnnnnnnnnnnnnnnnnnnnnnnnnnnnnnnnnnnnnnnnnnnnnnnnnnnnnnnaannnnnnnnnnnnnnnnnnnnnaaaacctagctgggcagagcagcacatgcctgtagtgctcgggtggctgagatgggagaatcacctgagctcannnnnnnnnnnnnnnnnnnnnnnnnnnnnnnnnnnnnnnnnnnnnnnnnnnnnnacctgagtgagaccctgtctcnnnnnnnnnnnnnnnnnnnnntaccctccctgagcttcagttcccctaatggtaaaatagag

SEQ ID NO: 357952 - DNA, 819 bp, Homo Sapiens
gcggccttgttggttctcagctggcagccagaaatcgctggcccaggacagtgcccacacgggcagagtacatgtggtccccaagcaccaggcagagctgtagtaccatgtgcacctgtagttgactggaaaacactgtcagtggctgcagctggaccagggcacagccagagcctgtggctaccacacgaaagtgactgagagtcttcttgacaccgtccaggatgtcctgtcgggagggggccttcactggaactgtgagattgaccccatcaatgtgttccagtttcagggcagcctggatcttcccctcagaagcagctgggatcccatcagtgacagcacagtaggtggctgtgggcctttgggctctccgtgcatgggtgaagtacttctggaggcgactagctgtctggggacagctggagaggagtacaagcccagagctttctttcccagatgctcggacaacctgaagctcctgctccctgagccctagggactggctcagctctggcagcactgagaacaacgtcagctctcctggttttcctttccggtccaccacggctgcccgcagcgcatcaaccagctcctcccgactgaggttttttggcagcagccccgcgaagggctggtccccgaggggccccgaccgttggcaggagccgcggggttgcctctgatgccgggcttcggtgccaaagcctgcgtcctcgggcactgggcggacacccaggccccgccgccagccactccagaaccggcccaaaacacggcggccgtccatctcccctcgtgccgaattcgccacccagc

SEQ ID NO: 357953 - DNA, 360 bp, Homo Sapiens
ggctataaaggcgagtcgggtaggccacagtattagcagtggtcacttgcctgttttaggggacaggagagccagccatcccaaatccatacccctgactcctctctgtaggggtactatatctagaagcacccctcctcttcccagacccggactcacgagattgaccccagcaattccaaggcttccacggcagcttcccggctggtgggacagcagctttcgtaagattccccgttcagtggttcctctggggaggagctgcagcacggagccccctgaggctgcgcacacccctggctggtggaggggtcttcttggggcagcccaggctgagcctctccccctgcgacctgctcc

SEQ ID NO: 357954 - DNA, 1925 bp, Homo Sapiens
taaacacttctagatcacctgagttttttttacattcctttggtatttgcaaaataaataaaaaactacgaaacaaatatactgagatcctcctatctccatcccaacccggatgccccagcatcaagggtcgaacgggacctccattcagcccctattccaggccctgaatctccagggagtccctgcagggatctcactacctctcagctgtgttgcttcactatttgagaatcaagttctttcccaggcgaatgagaatcccaattggcctaaactgtttccagatcccccgaggctcctgggtctccacgcagcttgggtgcgacttccctggatcccgtcacttgcccacacagaagtcctggaagatgatgtccaggatctcctcggtaccccctccacctgtgagccgggtcaggtgaccccgggccacccgcagcgcctctgccgccagggccaggtcttttgactgcttgtagtggccgagggcatccaggcaaccctggaggtggtgctggtgccttgctcgggtcagcagcgggggatctgtggacgggtccccagcacactgacagctagactccttcctcagcgcctccatggagagccgtccagcccctctcccgtcagacaggacagcagcaggtgcgcggggcaggtcaggaccgggacctgggccctccggggacagcaggtccgacttgttcagcaccaggaggaggcgctggctgctgtcactggggctctgggctcccaacagaggctacgacggtggccaggaagttgcaactggagggagaggccaggtcagaagcatccagcatggccagaatgaggtcagcctgctctagcctctcccgggcgcgccgcacgccctcctgctccacgggccccacgccctcccgcaacccagccgtgtcgctcagcagcacaggaaatccggccaggtcgactggggtctccagcacgtcacgggtggtccctggctccggggacacgatggacacaggcttccgactgagcaggttcactaggctgctcttgcccgcattggggggtccagtgaccactacgtgcacccctgagcggagcctctgcccgcgcctggcatctcgtagatgtgcacccagggccacctgcagtgcccgtacttcgatgtcggcttgctccaggaccccctcctccaggttgtcatcctcgccgaaatcgatataggcctccacgtgggccagagctttggtgagggtctcggcccagccacggcagaggtggcccagctctccgtccagctgcctgagggcctgccgccgctgcgcctctgtttccgcgtggataaggtccgccagcccctccacttcggtcaggttcagcttcccattggcgaacgcccgtctggtgaactcgcctgcctccgccggtcgaagccctggcacgctgcccaaggcctgcaggacgccgctcaccactgccgggcctccatgcacgtggaactccacgcagtcctcaccggtgaaactctggggacctgggaaccagagcaccagtgcgcggtccagaggctccccggagcggggatcgctgagcaggcgcaggctggcgtggcgagcaaggggcaggtctcggggtgctgtgagaattcggagggcgtggccgctggcggggccgctggtccggatcactgcgatgccgcagcggccttggccagagcttagcgcgaagatggtggcgccggagccgggggctggtgcgccgctgctccggcgcgtgcacaatctgcgaggcccacgtgccgcttgggccgcacagggtccaaagcaccccgccacatggatttacaacctgcgacccgcctgcccgacctgcccctcgtgccgaattaaccacccagccttcgtacctaccgtattgttctttttctttgt

SEQ ID NO: 357955 - DNA, 917 bp, Homo Sapiens
  misc_feature (107)..(107): n is a, c, g, or t
  misc_feature (138)..(138): n is a, c, g, or t
  misc_feature (144)..(144): n is a, c, g, or t
cactgttccttcctctttagtgtctggcttaaattccacatcagagccaccaatgtcactctcagaatctgatatgaccccttcgtttttttatttggcggctactncgcctagatccttgtgtcttaggctgtactncctctncactctcaatttcattatcttcttcactcttatctgttacgtaagttgtgcctacctccatctcttcttcctcttctggctctgagggctcatcacaaactgccaattcaagcctcttaatcttgtctttatttaaggcttcatctgcacgttgcattgctctcagtatttcaggctttgcactgtaaaaatgacctcccttctgggcttcctttgattttgaacctgtatatggctttaaaagccttttgctaacccagccccttgttgggctgtcatcaaaaaactgtacatgaacacggactgatttccctttctcgcggatgaatgttccatcaaaggggtggttgtaaaccagacaaggccaccaggggtaaccctccatcttggcccaaaccaaatctcctggtgagaagtcacaactggtgggggcagcaggcgctaccgatctccgcagccctccgttgaggttcttcgccttgggcggtgacgcggagcgcgccaagggcctgggcccaggcccagcctcgctccaggccgcatccccgcctggggaaggagaggccccgggggcagcggcggcacggccgccttcgcgtgaggccctggccgaggccttgttggcatcactcagcgccggagacttggggaagaagctgtacagggtgctctgtcgcgacataccgacagccggcaaggcccaaccgttctgtcggacggagctcctaaaagcaccgcatctaccgcgcggctcctgctggcgggaaatctgg

SEQ ID NO: 357956 - DNA, 1889 bp, Homo Sapiens
cttctaagaggaataccgctccagcgccaacgcaatctcctcctccctcgcctttacctaatcccttgcctgccctgtttccccgctgagctcctcaaacacttcgcatctctccccgttatgccagtctacctggtgaaaaggttatttgaggaccttgtctacgctgcccctacctgatcccgctcccggcgccacaggctgggccccaacaggagctcctcaatctaagtgtctaggagaaacccagggagtctccacgaaggaggcactttacccactacagactaaaactggcctcggaatcgccttcctggagattcggcccagcggctctcaggagtcggtaggggcaagaacgtttccccggtgcagtggaagaagactgcgggccagccagggactcgggatccggggacagggcctcggcaggcgcccgcctggaagcccgcagcccagacgcggacgacccactgctcagcgggacacacctcgggccttgccccggaacgccgcttggacaacaacctttccgcgcgagtgcaggccgagcgcttttgggcgcagcacgcaggaaccggaagtcaatggaggaagactggacctactgattcaacttggagatgagcgggtctgtcctcttcacggcgggagagaggtggagatgctttctgaccccgtcgaggtcatccctgtactgggccttacataatttctgctgtcggaaaaaatccactacacctaagaaaattactcccaatgttactttttgtgatgaaaatgcaaaggagcccgaaaatgcacttgacaagctcttctcttcagaacagcaggcttccatcttgcatgtgttgaatacagcatctactaaagaacttgaagctttccgattgcttcgtggaagaaggtccatcaatatcgtagagcacagagaaaactttgggccatttcagaatttagagagtttaatgaatgtgcccttgtttaagtataaaagtacagttcaagtttgtaactccatactttgtccaaagactggacgggaaaaaagaaagtcaccggaaaaccggttcctgagaaagctcctcaaaccagacatagaaagagaaagacttaaggcaggtaatagtatcatatctatcgcttttggtactcgaagaattgcctgggctcaccttgatccgtaagttgacagtgctggactggcagcaaagtgacccgtggaagttaatgagaggaatatactcatcatcagtctatttagaagagatttcctcgatcatttcaaagatgcctaaagcagatttctatgttctggaaaaaacaggactttccattcagaactcatctctgtttccaatactgttacattttcatatcatggaagccatgctgtatgccttattaaataaaacttttgcccaggatgggcagcatcaggtgctgagcatgaatcgaaatgcagtggggaagcattttgaactgatgattggtgactcccggactagtggaaaagagctagtgaagcagtttctcttcgattctatactgaaggcggatcctcgggtgttcttcccatcagataaaatagttcactacagacagatgtttttatctactgaactacaaagagtagaagagctttatgattcattattacaagctattgccttctatgaattagcagtgtttgactctcagccttagaattctgaggttaacgtgctaaagtataattattagctctaacgtaacaccaactgttgtgaacatccatgttattggaaaagaacacattttcagtgtattttagatgtttaaattctgacttttggctattaaatggtttacacaataagccaagaccaaatcaataaacattttatgag

SEQ ID NO: 357957 - DNA, 1052 bp, Homo Sapiens
  misc_feature (135)..(169): n is a, c, g, or t
  misc_feature (715)..(715): n is a, c, g, or t
  misc_feature (892)..(892): n is a, c, g, or t
  misc_feature (941)..(941): n is a, c, g, or t
  misc_feature (964)..(964): n is a, c, g, or t
  misc_feature (976)..(976): n is a, c, g, or t
  misc_feature (985)..(985): n is a, c, g, or t
  misc_feature (1000)..(1000): n is a, c, g, or t
ggagaacagctatattgtcctttctataagcttgtcactgcaaaaagttgccttttgcttgtcaggtttggatagaatataattgattggtttgttacttggactaacaaggcagtagatttgcctgtgtggaannnnnnnnnnnnnnnnnnnnnnnnnnnnnnnnnnngcacttatcagaaatatttgatgtgtgcattgttgaaaaatactggatacatgtcttgtcagaattgtcgaaaaaagaaatgtctttccctcttgcttctttggcaaattgttgatacacagtgtttggacttactgaagagttactgaagcctgtgggacttaataaatacaatatgctactccctgttgtgattgaacaatacaaataacaaagcaagaaagacaaggcatcccattagtcggctattgctgtttccctcaacctcatacatagactcatatatgaagtactgcattgtaaaacaactatagactcatattaaatgttatttctatttataatattcagcaaaagtgaaagacttgtgaagcatatgacattctatttttgacttattagccctagtgtgaaagcattaatattattagcatgaaatttttacttcagattttaagctcatgaataaagatatatctgtgttgatctctagatatttttagtaatacccaaatatatacagtccttattgttataaaaaaagcnttctgtgatcagtataattaaattatacacaaccttaaatatgaacttaggaaataaggagggaagtacaaagattattgactatacaacctaccagctgaaagaaagatcttcatcaacatctgtatctttccagaggtatacagaattaaaatttgatcttcaagctttaatganccagttttaagtcaacggcagaagtatgttgaatatttcatcactcaancttgaactgatttagaagagacnctttgctgaaantgaattgcncttatacatgtaaantgtcaacatgtaatttggaattttctgattaataaatgtggttttggacatc

SEQ ID NO: 357958 - DNA, 836 bp, Homo Sapiens
  misc_feature (217)..(217): n is a, c, g, or t
  misc_feature (788)..(796): n is a, c, g, or t
cagcgcgccccgggctcggccgacccggcggggatctaggggtgggcgacttcgcgggaccgtggcgcatgtttcctgggagttactgatcatcttctttgaagaaacatgaagttacactatgttgctgtgcttactctagccatcctgatgttcctgacatggcttccagaatcactgagctgtaacaaagcactctgtgctagtgatgtgagcnaatgcctcattcaggagctctgccagtgccggccgggagaaggcaattgctcctgctgtaaggagtgcatgctgtgtcttggggccctttgggacgagtgctgtgactgtgttggtatgtgtaatcctcgaaattatagtgacacacctccaacttcaaagagcacagtggaggagctgcatgaaccgatcccttctctcttccgggcactcacagaaggagatactcagttgaattggaacatcgtttctttccctgttgcagaagaactttcacatcatgagaatctggtttcatttttagaaactgtgaaccagccacaccaccagaatgtgtctgtccccagcaataatgttcacgcgccttattccagtgacaaaggtaactgccaacagttgactttttccattccgccccctcatgtggtctgtccatgtaatctataaaacctatataagaccatctcttggagcagccttttgcttctgaatttgtatcatctcacataaattctagactcaataaccctgatcccatcatatctagaggcacatgccagaaggataagagnnnnnnnnntatctccaatccttgagtagataaaaaggcatgtcggctg

SEQ ID NO: 357959 - DNA, 1215 bp, Homo Sapiens
  misc_feature (86)..(122): n is a, c, g, or t
ccgcccgcgccctccccccccgccgcgcgcggctcgaaatgaacgactcactatagggcgacctggagctcaccgcggggcggcgnnnnnnnnnnnnnnnnnnnnnnnnnnnnnnnnnnnnnatcaggccaaatcggccgagctcgaattcgtcgagagcggggaggcgcggcctggcctcgcactcaaagccgccgcagcgcgccccgggctcggccgacccggcggggatctaggggtgggcgacttcgcgggaccgtggcgcatgtttcctgggagttactgatcatcttctttgaagaaacatgaagttacactatgttgctgtgcttactctagccatcctgatgttcctgacatggcttccagaatcactgagctgtaacaaagcactctgtgctagtgatgtgagcaaatgcctcattcaggagctctgccagtgccggccgggagaaggcaattgctcctgctgtaaggagtgcatgctgtgtcttggggccctttgggacgagtgctgtgactgtgttggtatgtgtaatcctcgaaattatagtgacacacctccaacttcaaagagcacagtggaggagctgcatgaaccgatcccttctctcttccgggcactcacagaaggagatactcagttgaattggaacatcgtttctttccctgttgcagaagaactttcacatcatgagaatctggtttcatttttagaaactgtgaaccagccacaccaccagaatgtgtctgtccccagcaataatgttcacgcgccttattccagtgacaaagaacacatgtgtactgtggtttattttgatgactgcatgtccatacatcagtgtaaaatatcctgtgagtccatgggagcatccaaatatcgctggtttcataatgcctgctgcgagtgcattggtccagaattgtattgactatggtagtaaaactgtcaaatgtatgaactgcatgttttaaagaagacaaatgcaaaccaaagcaacttagtaaaataataggtataaaaagttattctgtaaagtctgttggttgtatcttgtatcagaaatcccgttaagttaagttgtaaaagacttttggaataagttttcttttaaaaatatgacataacccagggaaggggtttaatttaaaaaactgtttcttactggatttattgcccccctaacaaataaccccctttccttttgataa

SEQ ID NO: 357960 - DNA, 734 bp, Homo Sapiens
  misc_feature (1)..(1): n is a, c, g, or t
  misc_feature (5)..(5): n is a, c, g, or t
  misc_feature (11)..(12): n is a, c, g, or t
  misc_feature (15)..(16): n is a, c, g, or t
  misc_feature (39)..(39): n is a, c, g, or t
  misc_feature (42)..(42): n is a, c, g, or t
  misc_feature (48)..(48): n is a, c, g, or t
  misc_feature (68)..(68): n is a, c, g, or t
  misc_feature (78)..(78): n is a, c, g, or t
  misc_feature (119)..(119): n is a, c, g, or t
  misc_feature (127)..(127): n is a, c, g, or t
  misc_feature (141)..(141): n is a, c, g, or t
  misc_feature (159)..(160): n is a, c, g, or t
  misc_feature (179)..(179): n is a, c, g, or t
  misc_feature (206)..(206): n is a, c, g, or t
  misc_feature (213)..(213): n is a, c, g, or t
  misc_feature (219)..(219): n is a, c, g, or t
  misc_feature (226)..(226): n is a, c, g, or t
  misc_feature (255)..(255): n is a, c, g, or t
  misc_feature (321)..(321): n is a, c, g, or t
  misc_feature (337)..(337): n is a, c, g, or t
  misc_feature (371)..(371): n is a, c, g, or t
  misc_feature (376)..(376): n is a, c, g, or t
ncacnaggcgnnccnncgccgcccggagccgcgggtacngcnggagcnggggaagggcaggagggcanaaagccacgnacacagagggcacgggcagggagcacccacaccccacgagnccaggganccgcggcgcagggngggaggcacacacagaanncccacaacgcgggaaaaanaaacctagggtcccaggacgctgttgncaccaanccacgnccacccntttcccccaattgtgttttccaaatgttnattcaaggttcttcctggttccgggccctcttcactggcctacctgggcaacttcagggcagaggngtggttcccgtggganaaaggccatgggaatgagcctgccccgcagactntttantttaaggcctctggggaccgttagctcccaaggtgttccctcatactcagggctaccctgtgccttcctaaaggcgtggagggacagctagatggggaatcaggcaggggacagcctctggattcctatccaggaggaatcgggggaggacagggcccaaggtgccagttggcctcctgagtcaggctgggacaggcaatgctccttgtcagagctggggagggggttcaggggaaaaccagcagtcacaccagagaacatgcaggaaacacaagcaaaagcatgcgagggctgggggacatgcaaggcgggggccagcagcatgagcagtaccccgcggggccttgtacggggtacc

SEQ ID NO: 357961 - DNA, 1314 bp, Homo Sapiens
  misc_feature (667)..(686): n is a, c, g, or t
  misc_feature (697)..(697): n is a, c, g, or t
  misc_feature (706)..(706): n is a, c, g, or t
  misc_feature (713)..(713): n is a, c, g, or t
  misc_feature (741)..(742): n is a, c, g, or t
  misc_feature (753)..(753): n is a, c, g, or t
  misc_feature (759)..(759): n is a, c, g, or t
  misc_feature (765)..(766): n is a, c, g, or t
  misc_feature (772)..(772): n is a, c, g, or t
  misc_feature (774)..(774): n is a, c, g, or t
  misc_feature (779)..(779): n is a, c, g, or t
  misc_feature (781)..(782): n is a, c, g, or t
  misc_feature (785)..(785): n is a, c, g, or t
  misc_feature (791)..(792): n is a, c, g, or t
  misc_feature (795)..(797): n is a, c, g, or t
  misc_feature (804)..(804): n is a, c, g, or t
  misc_feature (807)..(807): n is a, c, g, or t
  misc_feature (810)..(811): n is a, c, g, or t
  misc_feature (815)..(815): n is a, c, g, or t
  misc_feature (818)..(818): n is a, c, g, or t
  misc_feature (821)..(821): n is a, c, g, or t
  misc_feature (828)..(828): n is a, c, g, or t
  misc_feature (833)..(833): n is a, c, g, or t
  misc_feature (836)..(837): n is a, c, g, or t
  misc_feature (856)..(856): n is a, c, g, or t
  misc_feature (860)..(860): n is a, c, g, or t
  misc_feature (911)..(911): n is a, c, g, or t
  misc_feature (941)..(941): n is a, c, g, or t
  misc_feature (956)..(957): n is a, c, g, or t
  misc_feature (960)..(960): n is a, c, g, or t
  misc_feature (972)..(972): n is a, c, g, or t
  misc_feature (999)..(999): n is a, c, g, or t
  misc_feature (1012)..(1012): n is a, c, g, or t
agcccacaaaacacggggacaatcgagagcaccccaacgagcaatagcagagaatgccagaaggtaatcactcagatacacttgggaccaagagacagtgaaaaatagatgaactaagagaaaaagaatcggatggtctttgtaactgattctggacatatgcatcattgatgttgcagtgttgaaactacaagagctagaaaactgaagatgtcgtctgcttacggaagcgctgaaagactaggatgtgatttattaacgaccaacttctgttattgtgtgttaagtttttcatctgtgcatcaaatcacaaaaagaataaatagagctttttcctttatcagtcccttgggcacagcaggtcctgaacaccctgctctacaatgttgcatcaagagttcaaacaacaaaataaaaaatattaagaggaaatccccatcctgtgacttgagtcccttaagtctacaggggctggtgacctctttttgctaataggaaaatcacattactacaaaatggggagaaaactgtttgcctgtggtagacacctgcacgcataggattgaagacagtacaggctgctgtacagagaagcgcctctcacatctgaactgcatactgagcgggcaagtcggttgtaagttcagtaaaaccctctgatgacgcnnnnnnnnnnnnnnnnnnnngctcacaagcngtttgtacncaaaaanattttctcagtcccagatcctctgccannttaaagagagnaaaaanaagaannaaaagncnccaanannaanaatctnncannnccttatnacncannaaanacnccnaatgctnacctnccnnattgtctatgaacaaaccnactnttttagacattgataaagtcttcttcacgtgatattttatacaagaacacntcggatgtattagatgtgactgattttaanaaatcctattagatnngtntcaactaggggnatgttctattcatagtcttttgtgaancatgtgccttttngtttaaaaagtatggcctattttgagcctcgtgtataggtacagtcactgtttttgtgacaaaagaaaaagctttaaaattgtcccaaagagaaaaataatggctatcagaagtatgctttgttttagtgcgagttaccgttactgtatttgtgtattgtaaaggtggacattctaattacattaaaatgtaattagaaaaaagtgcttaatgaaaaaaaacagaacatagacaacaaaagaatattagaagtgatgcatgaagaaaacgagatatcaataaaaagatttttaaaaaccaag

SEQ ID NO: 357962 - DNA, 1115 bp, Homo Sapiens
  misc_feature (369)..(383): n is a, c, g, or t
  misc_feature (974)..(974): n is a, c, g, or t
  misc_feature (1024)..(1024): n is a, c, g, or t
  misc_feature (1053)..(1053): n is a, c, g, or t
  misc_feature (1055)..(1055): n is a, c, g, or t
  misc_feature (1062)..(1062): n is a, c, g, or t
  misc_feature (1086)..(1086): n is a, c, g, or t
tgtgcatcaaatcacaaagaataaatagaacttttccctttatcagtcccttgggcacagcaggtcctgaacaccctgctctataatgttgcatcaagagttcaaacaacaaaataaaaaatattaagaggaaatccccatcctgtgacttgagtcccttaagtctacaggggctggtgacctctttttgctaataggaaaatcacattactacaaaatggggagaaaactgtttgcctgtggtagacacctgcacgcataggattgaagacagtacaggctgctgtacagagaagcgcctctcacatctgaactgcatactgagcgggcaagtcggttgtaagttcagtaaaaccctctgatgatgcnnnnnnnnnnnnnnngtattaagtttcacaagctgtttgtactcaaatatattttctcagtttcagatcctctgctattttattgagtggaaagtcttgagctaaaagggttcaagaagaataatgttgcatttccttatgtctcaggaaacactttttatggtaacttgtcagattgtctatgaacaaacccacttttttagacattgataaagtcttcttttcttcacgtgatattttatacaagaacacttcagatgtattagatgtgactgattttaacaaatcctattagatttgtatcaactagttacatgttctattcatagtcttttgtgaatcattgcctttttgtttaaaaagatggcctattttgagcctttgtataggtacattcctgtttttgtgacaaaagaaaaactttaaaattgtcccaaacagaaaaataatggctatcagaagtatgttttgttttagtgtgagttaccgttactgtatttgtttattgtaaaggtggacatttagcgttcagtgcagttttcaataaaaagtaattaaaatttgttaagttctgaaattcaagtacatctcactaatgtaaatgtnctctacttgagatgtttaaggcaattgcattgtcaattagccaatttccngctcttgttactacagggttccataaccngnctcaagnccgctgacaattaattacctgtgntaacaaaaagtttaattgaaaaatcaaaa

SEQ ID NO: 357963 - DNA, 1035 bp, Homo Sapiens
  misc_feature (758)..(758): n is a, c, g, or t
  misc_feature (931)..(931): n is a, c, g, or t
  misc_feature (935)..(935): n is a, c, g, or t
  misc_feature (965)..(965): n is a, c, g, or t
  misc_feature (978)..(979): n is a, c, g, or t
  misc_feature (995)..(995): n is a, c, g, or t
  misc_feature (1007)..(1008): n is a, c, g, or t
  misc_feature (1011)..(1011): n is a, c, g, or t
  misc_feature (1013)..(1013): n is a, c, g, or t
  misc_feature (1015)..(1015): n is a, c, g, or t
  misc_feature (1019)..(1019): n is a, c, g, or t
agcgggcttggtttccgggtcggttctggcaggtctgagcgctccgacttccagaggagcgctgtgcacgtggagaagagcggggactcggcgaccctgccctcccgaccctcatgttcgaagagcctgagtgggccgaggcggccccagtagccgcgggccttgggcccgtaatctcacgacctccgcctgcggcctcctcgcaaaacaagggctccaagcgccgccagctcttggccacattacgggccctagaggcagcatctctttcccagcatccccccagcctatgtataagtgactctgaggaggaggaggaggaaaggaagaagaaatgccccaaaaaggcatcatttgccagtgcctctgctgaagtagggaagaaagggaagaagaaatgtcaaaaacagggcccaccttgcagtgactctgaggaagaagtagaaaggaagaagaaatgccacaaacaggctcttgttggcagtgactctgctgaagatgagaaaagaaacgaggaaatgccagaaacatgcccctataaattcagcccagcacctggacaatgttgaccaaacaggtcccaaagcctggaagggtagtactacaaatgatccaccaaagcaaagccctgggtccacttcccctaaaccccctcatacattaagccgcaagcagtggcggaaccggcaaaagaataagagaagatgtaagaacaagtttcagccacctcaggtgccagaccaggccccagctgaggnccccacagagaagacagaggtgtctcctgatcccaggacagacagccatgaggctcgggcaggcgctttgcgagcccgcatggcacagcggctggatgggggccgatttcgctacctcaatgaacagttgtactcagggcccagcagtgctgcacagcgtctcttccagggangacnctgagggttttcttctctacaccgcggttncagagcaagtgannagtggccatgcagcantggacgcatgcnnggntntngcancggtgatgggggtagg

SEQ ID NO: 357964 - DNA, 961 bp, Homo Sapiens
gtcggttctggcaggtctgagcgctccgacttccagaggagcgctgtgcacgtggacgaagagcggggactcggcgaccctgccctcccgaccctcatgttcgaagagcctgagtgggccgaggcggccccagtagccgcgggccttgggcccgtaatctcacgacctccgcctgcggcctcctcgcaaaacaaggcctcatccattctctttaggcccactgtcatcccctgttttcctccagggctccaagcgccgccagctcttggccacattacgggccctagaggcagcatctctttcccagcatccccccagcctatgtataagtgactctgaggaggaggaggaggaaaggaagaagaaatgccccaaaaaggcatcattggccagtgcctctgctgaagtagggaagaaagggaagaagaaatgtcaaaaacagggcccaccttgcagtgcactctgacggaagaagtagaaaggacagaagaaatgccacaaacaggctcttgtaggcagtgactctgctgaagatgagaaaagaaacgaggaaatgccagaaacatgcccctataaattcagcccagcacctggacaatgttgaccaaacaggtcccaaagcctggaagggtagtactacaaatgatccagcaaagcaaagccctgggtccacttcccctaaaacccctcatacattaagccgcaagcagtggcggaaccggcaaaagaataagagaagatgtaagaacaagtttcagccacctcaggtgccagaccaggccccagctgaggcccccacagagcaagacagaggtgtctcctgttcccaggacagacagccatgaggctcgggcaggcgcttcgcgagcccgcatggcacagcggctggactggggccgaattcgctacctcactgaccaggcgtactcagggccagcagtgctgcacagcgtctcttcca

SEQ ID NO: 357965 - DNA, 1624 bp, Homo Sapiens
  misc_feature (708)..(764): n is a, c, g, or t
  misc_feature (913)..(922): n is a, c, g, or t
  misc_feature (954)..(994): n is a, c, g, or t
  misc_feature (1443)..(1443): n is a, c, g, or t
  misc_feature (1448)..(1448): n is a, c, g, or t
  misc_feature (1451)..(1451): n is a, c, g, or t
  misc_feature (1470)..(1470): n is a, c, g, or t
  misc_feature (1488)..(1488): n is a, c, g, or t
  misc_feature (1506)..(1506): n is a, c, g, or t
  misc_feature (1510)..(1510): n is a, c, g, or t
  misc_feature (1522)..(1522): n is a, c, g, or t
  misc_feature (1528)..(1529): n is a, c, g, or t
  misc_feature (1538)..(1538): n is a, c, g, or t
  misc_feature (1551)..(1551): n is a, c, g, or t
  misc_feature (1560)..(1560): n is a, c, g, or t
  misc_feature (1565)..(1566): n is a, c, g, or t
  misc_feature (1569)..(1569): n is a, c, g, or t
  misc_feature (1592)..(1592): n is a, c, g, or t
  misc_feature (1599)..(1599): n is a, c, g, or t
  misc_feature (1607)..(1607): n is a, c, g, or t
  misc_feature (1612)..(1612): n is a, c, g, or t
  misc_feature (1617)..(1617): n is a, c, g, or t
cgagaaacaaatggaggtctgaatctgggattcaaacctcattctgtctaactcaagagtcaaattttcatgatactcttctctgtctaggtctctgatatgactgttctttatatattttttttaattctgaggctttctatgtaatttaactttcctaatgattttgagtatttcccattccagcatatggccagcatttcatgttcccattggcaatgacaccaacactaggagaagtgacccctgcaatgtacaaatttcaaaatgtttataaacacacttgaccagaagaatgttttatcttctgtgtaatgccagttatcaaaaattaaataatcacatgtgttctagaggaagtgaagattgaaaaagaatcgcaaatgaagacaatagaatgaaaagattatatggatctagatgtaaatgtgcaacttaagcaatccacatgacaggaacacttaatcctgtatcaggagagaaaatgagttaaatatgaatttaggaccataccctaatgaaattcaatgtcaagataaacctaatagtctgtcattggcatactttacatttgttctgtaaaaggcaaagcctgaaaaaaagcaagttgcttataatcccataaatagaacttgaacataaataagaaatttatttctatatgaagatttcagttgcttttaccataacttgcttcatgtcatttcnnnnnnnnnnnnnnnnnnnnnnnnnnnnnnnnnnnnnnnnnnnnnnnnnnnnnnnnntatacactagatttttacattttcatatgtgcatctgtattttacatctatatatattaaatatgtatatgttttacacacacacatacaccaaattttcatgactcattagggagaggtggctaacctactagaaagagcagtaaagnnnnnnnnnncccttttttttccaaaaatctgtctgtagatnnnnnnnnnnnnnnnnnnnnnnnnnnnnnnnnnnnnnnnnnaccccagacatttcttgcacaaatgtttcctcttgccttaggaaaatgtatgatttctctcttgatgacactccatcaagctccttcttaggtttgcatccttagatgctaagatgcattgtgagtgcagaagagtggaggaaagtagaggcactcaccagggagaaggggcgacaggagcacagagactgggctgttgccttcggaatagcatctaagggcttggcaaagggtccacttggtttacatatttctcaaagtacctggggaggagggatgttgtcaataaaaacacacggatgaaggacactgaagaggaacatggagagaatggaaaacagtcatttcctcttgcgcaactttgccccaatgtagaggagtcctgcctgagataacatagaactttccctactatattgcccaaggagacatagtgggttgacatgttncagtnatnccagtctggtagacttttnacttttctgaaagagatngtctgccctgatagtttnattnaatggtgatctnttcatnngcatgattnatctctcccagtnacacagtgntgggnnaanttgctttagaaacaactggttanaatgtgncaagggangattnaaacnacgtgat

SEQ ID NO: 357966 - DNA, 1771 bp, Homo Sapiens
  misc_feature (555)..(606): n is a, c, g, or t
  misc_feature (1173)..(1173): n is a, c, g, or t
  misc_feature (1197)..(1197): n is a, c, g, or t
  misc_feature (1213)..(1213): n is a, c, g, or t
  misc_feature (1231)..(1231): n is a, c, g, or t
  misc_feature (1335)..(1335): n is a, c, g, or t
  misc_feature (1362)..(1362): n is a, c, g, or t
  misc_feature (1379)..(1379): n is a, c, g, or t
  misc_feature (1386)..(1386): n is a, c, g, or t
  misc_feature (1388)..(1388): n is a, c, g, or t
  misc_feature (1401)..(1401): n is a, c, g, or t
  misc_feature (1405)..(1405): n is a, c, g, or t
  misc_feature (1411)..(1411): n is a, c, g, or t
  misc_feature (1442)..(1442): n is a, c, g, or t
  misc_feature (1509)..(1509): n is a, c, g, or t
  misc_feature (1654)..(1654): n is a, c, g, or t
  misc_feature (1686)..(1686): n is a, c, g, or t
gggaggagggcggaacccggaaggcacggcgctcagctcaggaccgcgcgccgtggtctgaggtccgcggcagggtcccgcatggcggcgcacaggaagcacgtgtttgtggagaaggtgctgcagagactttttcctcctgttccaagtggccaaggaaagagggaaccccagacgctggccgtccaaaatccaccaaagaaagtgacctctgagaaagtgagccagaaacatgctgagcctttgacagacactggctctgagaccccgactgcccgacggctctacactgccagcgggcctcctgagggctacgtcccctgttggccggagcccagcagctgtgggagccccgagaacgcctccagcggggatgacacagaagatcaggatcctcatgaccagccaaagagaagaagaattaggaagcataaatcaaagaaaaaatttaaaaatcccaataatgttcttatagaacaagcagaattagagaaacagcagagtctgttacaggagaaatctcagcgacagcacacagatggcaccacaataagnnnnnnnnnnnnnnnnnnnnnnnnnnnnnnnnnnnnnnnnnnnnnnnnnnnngcagccggcttggcagcaaaggctgctggtgtcagtttcatgtaccagcccgaggacagcagcaatgaaggggaaggcgtggaagaggcttgtgaggaggatggtgtggacaccagcgaggaagaccccgacactggccggggaggaagacgttaaagataccagggaggaagatggtgcggacgctagcgaggaagacctgacacgggccaggcaggaagagggtgcggacgccagtgaggaagatccgacaccggccggggaggaagacgttaaagacgccagggaggaggacggtgtggacacaattgaggaagacctgacacgggccggggaggaagacggtaaagacaccagggaggaggacggtgcggacgccagcgaggaagacccgacatgggctggggaggaagagggtgcagactccggggaggaggacggtgcagacgccagcgaggaagatgatacaattaccaatgaaaaggcacacagtattctaaattttttgaagtcaacacaggaaatgtatttttatgacggtgtctccagagatgcagcttcagctgncctcgcagatgccgctgaggagcncctggaccgcctcgcntcacacagcatgctgccntcagacgtgtccatcctgtaccacatgaaaacgctgctgctcctgcaagatactgagagattgaagcatgctctggaaatgttccaacgaacattgcacgactnccccctgcccatcccagagtaatctcngctctctttagttactngatcacncntaccccccctganaagngcagtnactaaaatggaatatctctttaagaacagcncctctttaacaaaaaaacttaaaagacaaatgtgagatgggcttagagttagttctctgggaacttnaaagacatttatgccatattatttattcacgtgtttgttcctggtgggcaagatgccatctgaggcttcagatgagaaattggggtaaaatggaaatttttcacttatttgcaattatatatatcttgaattactacataaaacntgattctgtttctctacttattgtaaaaattnaaaatggacattctgttaagttaaatgtatagtttgaatttcatatatttttatgaagttttgaatctccttgtatctgaaagtc

SEQ ID NO: 357967 - DNA, 1429 bp, Homo Sapiens
  misc_feature (47)..(47): n is a, c, g, or t
  misc_feature (49)..(49): n is a, c, g, or t
  misc_feature (1042)..(1042): n is a, c, g, or t
  misc_feature (1108)..(1116): n is a, c, g, or t
  misc_feature (1295)..(1304): n is a, c, g, or t
tagtagttgagatatttttacgatatggtgagaagagcagaaaaggncnaccaccggctggtaccggtccggaattcccgggatgggtcccgcatggcggcgcacaggaagcacgtgtttgtggagaaggtgctgcagagactttttcctcctgttccaagtggccaaggaaagagggaaccccagacgctggccgtccaaaatccaccaaagaaagtgacctctgagaaagtgagccagaaacatgctgagcctttgacagacactggctctgagaccccgactgcccgacggctctacactgccagcgggcctcctgagggctacgtcccctgttggccggagcccagcagctgtgggagccccgagaacgcctccagcggggatgacacagaagatcaggatcctcatgaccagccaaagagaagaagaattaggaagcataaatcaaagaaaaaatttaaaaatcccaataatgttcttatagaacaagcagaattagagaaacagcagagtctgttacaggagaaatctcagcgacagcacacagatggcaccacaataagcaaatataaaaaaatgaaactgaacaagagacagcatattaaaaggaagaaagcgtccgggcttggccaccaaaaggctgctgggtggtcagtttccatgtacccaaccccgcagggaccgcagccaatggaagggggaaaacgccgtggggaaacaagccttggtttaacgaacggattggttgtgggaccacccaatccgaaggaaaagaacccctgaacacctggggcccgggggggaaaggaaaaaaaccgctttgacaacgaattacccccactgggggaacgcggaaaaaaaattgggggttgggccgcggggaacgcagccctttatgcccccggcaaatggggaaaaaaagaaacaccccctctgaaaaaacacacacccggggggccccccccaagggggcctctgtgggggaaaaaaccaaaaaggggggtgttggtcccccggagaaaaaaccccccacccccangttttgtgcaaggggggagaaaagtaaaattttcccccgaagaggaccccctcgggtgtcccaccnnnnnnnnnaaaaagcggaaacaaaagaaaccctctttttataaaaaggggaacgtgcgccccacccggggggtaaacggggaaaagaggcaccccgcgggtgggttgtggggaaacaaccccccatacttttgggagcaggggaaaaggacaaccccgtcgggaacacaacgggcgggggccccccnnnnnnnnnnagtgaggagaaacaaaaaaccgggggttagaaaaataaaacccacccccacagcgcggaaaaaagcgacagggaaatcctggtgtgttgccggggaaaaccaccccctcacacgttacaagtggc

SEQ ID NO: 357968 - DNA, 794 bp, Homo Sapiens
ggtccggaattctccggatgtgcgctcccgcacccccggagcccagggtcccggcacccccgagcgcggccagggatgcgcggagcccggcgaggagcgcaacgcgcgacccccgagcacaggctgtccctggggtccccagcgctccggccccggcgggcggcacgacccccgctcgcccccgcccccaaccctgacgccctcggggcgtccccgcgggtccgacacaccgcgccctccccgcctcgacggctctcggagccccgcgcccggctcccggcagcccccggcggctcgcaccttcctcagcgcggacatcctcggacgctccgggctcagcagtgtttgtggagaaggtgctgcagagactttttcctcctgttccaagtggccaaggaaagagggaaccccagacgctggccgtccaaaatccaccaaagaaagtgacctctgagaaagtgagccagaaacatgctgagcctttgacagacactggctctgagaccccgactgcccgacggctctacactgccagcgggcctcctgagggctacgtcccctgttggccggagcccagcagctgtgggagccccgagaacgcctccagcggggatgacacagaagatcaggatcctcatgaccagccaaagagaagaagaattaggaagcataaatcaaagaaaaaatttaaaaatcccaataatgttcttatagaacaagcagaattagagaaacagcagagtctgttacaggagaaatctcagcgacagcacacagatggcaccacaataagc

SEQ ID NO: 357969 - DNA, 1056 bp, Homo Sapiens
  misc_feature (953)..(953): n is a, c, g, or t
  misc_feature (956)..(956): n is a, c, g, or t
  misc_feature (972)..(972): n is a, c, g, or t
  misc_feature (975)..(975): n is a, c, g, or t
  misc_feature (979)..(979): n is a, c, g, or t
  misc_feature (981)..(981): n is a, c, g, or t
  misc_feature (983)..(983): n is a, c, g, or t
  misc_feature (989)..(989): n is a, c, g, or t
  misc_feature (992)..(992): n is a, c, g, or t
  misc_feature (994)..(994): n is a, c, g, or t
  misc_feature (998)..(998): n is a, c, g, or t
  misc_feature (1009)..(1009): n is a, c, g, or t
  misc_feature (1012)..(1013): n is a, c, g, or t
  misc_feature (1024)..(1024): n is a, c, g, or t
  misc_feature (1029)..(1029): n is a, c, g, or t
  misc_feature (1034)..(1034): n is a, c, g, or t
  misc_feature (1037)..(1037): n is a, c, g, or t
  misc_feature (1044)..(1045): n is a, c, g, or t
  misc_feature (1050)..(1050): n is a, c, g, or t
ggccgcgcacgccattgctctcctgccacggaggggagcgcttggtggcagtccgcgggcccggacggaaggctgaggcgacgcctcgacgacagcggaccggagctgcagtgggcaacacattcagggcggggtgccccatttaggcctggctgaccggacacccaccctggagccatggtccacgccttcctcattcacaccttgagggccccgaatactgaggacacgggcctttgccgagtgctgtactcctgcgtcttcggtgctgagaagtcacctgatgacccacggccgcatggtgccgagagggacaggcttctccggaaggaacagattttagctgtggccaggcaggtagagtcaatgtgtcggctgcagcagcaggcatctggccggccccccatggacctgcagccgcaatcctcagatgagcaagtgccgctgcacgaggccccacgtggggctttccgcctggcagcagagaaccctttccaggagccacggacggtggtgtggctgggcgtgctctcgttaggctttgccctggtgctggatgcccatgagaacctgctactggctgagggcacgctccggctgctgacacgcctcctccttgaccacctccggctgctggcgcccagcaccagccttctgctgcgggctgaccgcattgagggcatcctcacccgcttcctgccacagggtcagcggcttttcctcaacgaccagtgtgtccaaggcctggagaaggaattcagtgccgcttggccccgctgattcctcgtttggaatggtgcttctaagagcaagcaaagagtagacacacagccagataaagcttgccatctccctcctacccaacacctctgatgtactactataccaaaacaagtgggtgacacaagcctgcagaaaggggggctgggcagagggtggaggaggtctgcctntcntcaggttagtggaacncancaantncntgagcntanantggngttttacttanacnntgccgtgcggnaccangcttnttnttaaacnncttcntcatcc

SEQ ID NO: 357970 - DNA, 1038 bp, Homo Sapiens
  misc_feature (876)..(876): n is a, c, g, or t
  misc_feature (968)..(968): n is a, c, g, or t
gagcgaggcctgggtggcgatccaagacgaggggagcgcttggtggcagtccgcgggcccggacggaaggctgaggcgacgcctcgaacgacagcggaccggagctgcaggggcaacacattcagggcggggtgccccatttaggcctggctgaccggagtaagaaactacaacccccgaagtgccttgcgcctcaaggttacggaggcagtgaccacccaccctggagccatggtccacgccttcctcattcacaccttgagggccccgaatactgaggacacgggcctttgccgagtgctgtactcctgcgtcttcggtgctgagaagtcacctgatgacccacggccgcatggtgccgagagggacaggcttctccggaaggaacagattttagctgtggccaggcaggtagagtcaatgtgtcggctgcagcagcaggcatctggccggccccccatggacctgcagccgcaatcctcagatgagcaagtgccgctgcacgaggccccacgtggggctttccgcctggcagcagagaaccctttccaggagccacggacggtggtgtggctgggcgtgctctcgttaggctttgccctggtgctggatgcccatgagaacctgctactggctgagggcacgctccggctgctgacacgcctcctccttgaccacctccggctgctggcgcccagcaccagccttctgctgcgggctgaccgcattgagggcatcctcacccgcttcctgccacatggtcagctgcttttcctcaacgaccagtttgtccaaggcctggagaaggaattcagtgccgcttggccccgctgattcctcgatgggatggtgcttctgaggccaggcagagggtanacacacagccagatgaagcttggcatctccctcctaccagcagctctgatgtgctgctataccaggacaaagtggttgacacaagcctgcanaaagggggctggccaaaaggggtgggaaggaaactcctggctgtggccttccaggttagtgggagaaccc

SEQ ID NO: 357971 - DNA, 1102 bp, Homo Sapiens
  misc_feature (15)..(15): n is a, c, g, or t
  misc_feature (40)..(40): n is a, c, g, or t
  misc_feature (53)..(53): n is a, c, g, or t
  misc_feature (154)..(154): n is a, c, g, or t
  misc_feature (156)..(157): n is a, c, g, or t
  misc_feature (159)..(159): n is a, c, g, or t
  misc_feature (177)..(178): n is a, c, g, or t
  misc_feature (184)..(184): n is a, c, g, or t
  misc_feature (191)..(191): n is a, c, g, or t
  misc_feature (195)..(195): n is a, c, g, or t
  misc_feature (911)..(911): n is a, c, g, or t
  misc_feature (959)..(960): n is a, c, g, or t
  misc_feature (975)..(975): n is a, c, g, or t
  misc_feature (995)..(995): n is a, c, g, or t
  misc_feature (998)..(998): n is a, c, g, or t
  misc_feature (1000)..(1000): n is a, c, g, or t
  misc_feature (1002)..(1002): n is a, c, g, or t
  misc_feature (1004)..(1004): n is a, c, g, or t
  misc_feature (1026)..(1026): n is a, c, g, or t
  misc_feature (1047)..(1047): n is a, c, g, or t
  misc_feature (1056)..(1056): n is a, c, g, or t
  misc_feature (1063)..(1063): n is a, c, g, or t
  misc_feature (1073)..(1074): n is a, c, g, or t
  misc_feature (1079)..(1079): n is a, c, g, or t
  misc_feature (1100)..(1100): n is a, c, g, or t
gccccccttcccganaccctcgcggcgagcggttcttgcngcatcctgcgcanccctgcctactttggtgcagaggcgtggggggcgggacgcgtctttcccgttcggatcgcggggaaagcagtggctccaagtgagccagaggagagctgangnnangagggggaggccgaaganntgggcnctgggcntctnaaggtctggcgtattctgacaggacacagtgagcgtctgtagaagagaggcttgaaataaaagagcaagaatattgcctggatttctggaggcctactttaaggctggccaattctgcaaaaaaggaaaagaggaggagactggctcacagctctggaggacccccttctgtcagctgtggggcttgacaccacttgaacaagaaaaggagggggaaactgcaccacatcagtgaagatccacctccagtggctgctctgctggtggtggagttgctgctgacaaccaccctcaacgggtctgcacccatccaggaaatatctgtcttcctttagcttggttgtacctgttctcactctatctgtattattgaattattgactgagactgtgtttgggaaggaggctgagtgactactggactggatattgactctaactcttattcccaagcttatatccttaatcacctaaagatcagagtgtgaagaaacaaacctgtgacagatctgtggttgaggtttagactacgggaggagtatattacctgactttctttgtaacttgtaccatgactggggcagagattgagcctagtgcccaggccaagcctgaaaagaaggctggggaagaggttatcgctgggcctgagagagagaatgatgtccctctggtggtcagacccaaggttaggaccaggcaactactggggcaagnccaaaactgagacaagtctgtgctgcggaaggccaaactgaggccaannatgtctggggcaagnccaaactgaggtcaagtatnggngngnanaccaaacggaggctcaagaatnaatgggcaggccaaaccgatncaggcagtngtgggtngtttaaaatnntcaangaatcttgagaagccaagatnag

SEQ ID NO: 357972 - DNA, 1404 bp, Homo Sapiens
  misc_feature (1)..(1): n is a, c, g, or t
  misc_feature (6)..(6): n is a, c, g, or t
  misc_feature (18)..(18): n is a, c, g, or t
  misc_feature (21)..(21): n is a, c, g, or t
  misc_feature (48)..(48): n is a, c, g, or t
  misc_feature (64)..(64): n is a, c, g, or t
  misc_feature (70)..(70): n is a, c, g, or t
  misc_feature (124)..(124): n is a, c, g, or t
  misc_feature (149)..(149): n is a, c, g, or t
  misc_feature (151)..(151): n is a, c, g, or t
  misc_feature (177)..(177): n is a, c, g, or t
  misc_feature (182)..(182): n is a, c, g, or t
  misc_feature (187)..(187): n is a, c, g, or t
  misc_feature (194)..(194): n is a, c, g, or t
  misc_feature (218)..(218): n is a, c, g, or t
  misc_feature (266)..(266): n is a, c, g, or t
  misc_feature (277)..(277): n is a, c, g, or t
  misc_feature (302)..(302): n is a, c, g, or t
  misc_feature (309)..(309): n is a, c, g, or t
  misc_feature (542)..(542): n is a, c, g, or t
  misc_feature (545)..(545): n is a, c, g, or t
  misc_feature (549)..(549): n is a, c, g, or t
  misc_feature (562)..(562): n is a, c, g, or t
  misc_feature (564)..(564): n is a, c, g, or t
  misc_feature (1316)..(1316): n is a, c, g, or t
nttatnctacatgaaganacnataataaatgtacatacagcttgacgnattctcacatagtgancctgtnttacaagtaatctattattaacttttaagatgatacagtgctatgatcgaaggnctaaaatgatcaacatcaccataanangcagagtcataaacaagaacaattangtgtnattanatcaggnggggggcacacttacaaaaatganacaatttttggttcacattttacaccacacaggtattctgtatctttngaacatgaganaatacatattctcagtctgataggnctctganttgggggtttcttttactgtactttttttctctctagtagctgaacattttaaagcaatcagcagaaaaaatataaaacttcagaaccaattagacttttaaaagcaacgttcttgccctttccagagatacattccttaatcctcctacaaatcatgacctcacacgataactttaagggtgaacatcaacttatctacattttggcgctttctttcccttaagtggcaganggnttcnattaacctaaaantnccgtcattgtcgggggacccctaattccatgtctagtcctagtgcccagaggctaccaaagacgatacgaatagcttctcaggcactctacccaccgtttaccttgttaatacaaatctttcccagacctgggtcccgaaattattttaccctgcagagcagaaatgttacggtgttcattcagtgaactcttccctagtttttaatctttgtattttctgcgtatacttcaagccaccagtaactttcccagttaccaagaaacagtgtaacacaggtcgctatttgttttgttcggaatttacgagcaatttaaccacacgtgattagcaacattaaggggggctcctccaggcaaagaatccacagaatgagaggcccttggtacccaaatgaagcaacaatgaaagatcggcgaagctcagcaaggttcctgagcgccacggacgcctgctctgatttcaggttgccggcgcgcgcccgcgggtctgcctttatggacgaggcgcaagagggatccaggaaagacggtgcccttagagactcggagattagcgtgggcaaccctgccaccagctgcccctgccaccagccgcccccacaacaaaaaggaggaaacgctccgcatcccgtcaccaggacaactctgtaacccgacaccgaggctcaagattccgcatcccgggcagcgaacacaggagaaaagcacatcgcggcccggccgcggggctccaaggcgtccgtgccgccgntgttcctggggtgccgagagcgacgcggggtccaccctctccgccggcccgaggtccgaagctcggcccgccaccgctcccggccggc

SEQ ID NO: 357973 - DNA, 2697 bp, Homo Sapiens
  misc_feature (39)..(39): n is a, c, g, or t
  misc_feature (43)..(43): n is a, c, g, or t
  misc_feature (56)..(56): n is a, c, g, or t
  misc_feature (77)..(77): n is a, c, g, or t
  misc_feature (79)..(79): n is a, c, g, or t
  misc_feature (91)..(102): n is a, c, g, or t
  misc_feature (126)..(126): n is a, c, g, or t
  misc_feature (128)..(128): n is a, c, g, or t
  misc_feature (135)..(135): n is a, c, g, or t
  misc_feature (140)..(140): n is a, c, g, or t
  misc_feature (180)..(180): n is a, c, g, or t
  misc_feature (212)..(212): n is a, c, g, or t
  misc_feature (215)..(215): n is a, c, g, or t
  misc_feature (232)..(232): n is a, c, g, or t
  misc_feature (255)..(358): n is a, c, g, or t
  misc_feature (372)..(372): n is a, c, g, or t
  misc_feature (399)..(416): n is a, c, g, or t
  misc_feature (425)..(625): n is a, c, g, or t
  misc_feature (635)..(635): n is a, c, g, or t
  misc_feature (653)..(653): n is a, c, g, or t
  misc_feature (659)..(659): n is a, c, g, or t
  misc_feature (666)..(666): n is a, c, g, or t
  misc_feature (783)..(783): n is a, c, g, or t
  misc_feature (791)..(791): n is a, c, g, or t
tatcacataattgcaatgcagagtatgcaagcctcagtngtgnacaggcatatggngggggggtggcgtggggcttnangaaaggcggaannnnnnnnnnnngagactggatctcactctgttgcncnggctggngtgcngtggtgcaatcatggctcactgcagccttgacctcctggngcttaggtggtcttcccacctcagcctccagngtngctgtgtgaccacaggngcacaccaccacactggactcannnnnnnnnnnnnnnnnnnnnnnnnnnnnnnnnnnnnnnnnnnnnnnnnnnnnnnnnnnnnnnnnnnnnnnnnnnnnnnnnnnnnnnnnnnnnnnnnnnnnnnntacaggcatgagtnactgtgccccgcccacgggaaatttcnnnnnnnnnnnnnnnnnngggtcagannnnnnnnnnnnnnnnnnnnnnnnnnnnnnnnnnnnnnnnnnnnnnnnnnnnnnnnnnnnnnnnnnnnnnnnnnnnnnnnnnnnnnnnnnnnnnnnnnnnnnnnnnnnnnnnnnnnnnnnnnnnnnnnnnnnnnnnnnnnnnnnnnnnnnnnnnnnnnnnnnnnnnnnnnnnnnnnnnnnnnnnnnnnnnnnnnnnnnnnnagtcttgaantcctgacctcaagtgatncacctncctcggnctcccaaagtcctagggattacagaagccaccgcgcctggccccaaggggaatcttttaaaaaagagaagttcccataaactgctttgaaaccataaagaccaaaggttagaagggnttgccgcnggcgtccgttgctaatgtttttgtgagggcttcttcagggcctcttgttagagtgtgacataaacgactttcatttgggtaccagcaagtgtcacagggggcagagaccagcagaaacctaaagatgacccctagaagaggcagaaggccagggaaacagagttagacgagccaagtgctaagcaggacgtcgctgcccggggagccctccagacacgcagaaatgccacagtcaggaccgtgggacgcagcggattcgcccaagggcaggagcagcctggccaggagagaatgaaggaggggccgggcgtgaggttcggctggggagaacccaggcagggagggcctcgggcggccacggacgccgctttgccattttgggcgtttctggggaggacaacgcgtgcaggaagcgcagtcatctcaagctgacctccaaggttaccgagttcgagggctgggagccgggtctgaaagccccgacccgcctatggcgcggggactgtgggtccagccggccgattggccgcctcgctcggcgccggtccaggcgcagcgctcgggccccggggaccgtgagatgcggcgcagccagcttagctcggggtagcagccaccccagccccgccgcagcccggccgggtccgcgacctcgggagggtccggtccttcccccggcccccgcgacgccgcgcccgggtgaggccctgggcttcttgccggtgaccacgcggccagcgtggccaccagcccaggacggcgaccaagggcagcccagccccatccccgcgccgcgggtcccggaaccgaagagctgggacgcgggcactccctgacaacatggcggccccgcccgggcgcctccccgggtcccgagtgtctgcgtctccccgcgaggccgtgggcaaagccggtgcagcccgacgacaggaggcgaaaggaacccaggaccagacccgcggggcgaacagtgctggaggaccatgcaccgaccacgcccgaagcagaaccaaggcccgccctgttgccgtggcgactgcgcgcggggtagacgcaggcgccgcaagccgtgagctctcagtgcaggcgcataggctgcggggttgaggcgcattgcgtgcgcgtgcgcgctgctcacacgcggacggttctgtgcgccgcaatggctgcccgcgagtatcggagaggcggagctctcagtcttttacaggaccgggtctcctgatgccgccggtggttcctcgaggcccccttccacgcatccgccgccgctgcttcatcaggacttcatttcggtgacgcagagctttggcgagagctacggcaacagcaagaactgccggcggctcttgtgctgcagggtgaggaccgctgccgggcggaccgaggcccggggtcgctgcgcccgccgccctcccagcctgcggctccgagcggggcctgggcgggcagactcgactccccccgacgccgccctctccacccttaccccgcaaaaaggggcaaatctgctttccgggccggggcagccgtggtcggcacgcctgcagcggtctcagcggcccaaattctgcggggcggtggtggtgggaggaagggttggagccccagcaggttgtctgggcttcgtttgattttcggcaaggtcctggcccaggccccagtccctcttggagcggaagcctctggacctgttgctcctaagaaagcaagcggcccctgacgcgttgctgtggcctggtttgaccctcgtagccagcccatgttctgtgaggcatgaagcgacacgcagacaccacgacaaagtgagatgaactaagacctcttcttgattctaagcagggaacgcacagctcaccctgtcacatgcagcgatcataagctgagaattaccctcttccttccc

SEQ ID NO: 357974 - DNA, 1335 bp, Homo Sapiens
  misc_feature (56)..(131): n is a, c, g, or t
  misc_feature (133)..(133): n is a, c, g, or t
  misc_feature (227)..(227): n is a, c, g, or t
ccagtagaagacgggggttttcaaccatgtttagccagggatggtctcggatttcnnnnnnnnnnnnnnnnnnnnnnnnnnnnnnnnnnnnnnnnnnnnnnnnnnnnnnnnnnnnnnnnnnnnnnnnnnnncnaagtccaaagtcttgaagtcaaattttattgagctttgtaacgatcagtactctcaccgcttggtcaaatgaactacagacgcagagacccctnttatctggactccaatccaaacttgaaatgggctgggtggacaacgtaacattctgcagaaggcttacagaacctgcgactcccatttctattccctcagaatctttctttgaccgctgaatagggtattcatacttccagaggtgaaggccgccggcgcctccagctgtcagaaagagctccctgttctgcggcaggtgtcggacctgccacacagtagatttatgagccttttctgaaacagaggcaaaacctttggttggatgctgtgttctcatgtcaaaaacatggaactttccttccagagatgtggctactaacttattcatacttatgtcttttctgtcaaactccaagctacacaccccatttttgatgtttgtctcccaccgtaatgccatatttctgagatcaaatagtttgatatccccattgtcatagccagcacaaacaacacgttcttcttgattataagcattgccaaatgccacagtccaacagtctctcttgttttctccttgtacaggttccatattagcaacaggatcatctttttgccttgggtcccacaccttcacagttccatctcggctgccagtcacaatttcaggtgctccttctccaattcctagtccacctatgccatctatggcatttataatttctttatggccctttacagaatatactggcatctctggagcttctaaattccatatatgaaggtttccaccaaaatctccagtagctaaatatctctgctgtaaagatgttgcaccaaatgttccacatttaataggtttggccttttcaatctcccgaagcagcttcaggtccccgtgctggatctcgtacagctgaatgacgccggtgccccgtgcgaagttgcccatggtcacaaatttggcgctgcagggcacccacttacagtcaaacaccgtgtagttgaagcccttctggatatgggcgatgatctgaggcttctcgaaggccgacatggtgcagccaatttcagctacggcaaccgccacacccagagcccccaaaaacggcaacctggaaaccagactccaaacattggcaatttgtccctcccgctttccgtccc

SEQ ID NO: 357975 - DNA, 622 bp, Homo Sapiens
agcccaaggaggtgggtgggaatgttgacacggggggacacaggcatttggggagatgtgaggctcctttctttggataagactggggctcactcattctttgttgagcctcccagacaatgaaggaggctcattgtggtatagtccattatgtctggtgccatgtgggtgtagagagagcagaagactggcctcaacctgctgcaggaacaagacaaggcaggaggaatttcaaaacgctcacctttcacaagccctgattccatcgattgtttgaatcttccatgaagtccacagagcatgggtgaggccagagtgtgggatacaattgcctgcatgtagactctttaggagtggctcagaagagtagactgcagagcctgaaagctcttgccttaatatatgggtgatttactcatcagatttttaaatagctgtacatgggagagtctggggtagggggcagatacttgaagggcagagaatctgggcttatttctccttttaagctaactggatgacctggggtagaccatttcccttctgaaccttggaagaattccttgatatctgtggaagcacagatatcagcgtagcattgttggacttggaaaaactatcc

SEQ ID NO: 357976 - DNA, 955 bp, Homo Sapiens
  misc_feature (4)..(4): n is a, c, g, or t
  misc_feature (42)..(42): n is a, c, g, or t
  misc_feature (45)..(45): n is a, c, g, or t
  misc_feature (51)..(51): n is a, c, g, or t
  misc_feature (119)..(119): n is a, c, g, or t
  misc_feature (121)..(121): n is a, c, g, or t
  misc_feature (180)..(181): n is a, c, g, or t
  misc_feature (183)..(183): n is a, c, g, or t
  misc_feature (188)..(188): n is a, c, g, or t
  misc_feature (246)..(246): n is a, c, g, or t
  misc_feature (275)..(275): n is a, c, g, or t
  misc_feature (278)..(278): n is a, c, g, or t
  misc_feature (314)..(359): n is a, c, g, or t
  misc_feature (474)..(474): n is a, c, g, or t
  misc_feature (535)..(536): n is a, c, g, or t
  misc_feature (541)..(541): n is a, c, g, or t
  misc_feature (543)..(546): n is a, c, g, or t
  misc_feature (550)..(550): n is a, c, g, or t
  misc_feature (563)..(563): n is a, c, g, or t
  misc_feature (566)..(566): n is a, c, g, or t
  misc_feature (572)..(572): n is a, c, g, or t
  misc_feature (578)..(578): n is a, c, g, or t
  misc_feature (583)..(583): n is a, c, g, or t
tctngatttgttccctctgaggggcaggaatgaactgtaganatnttttangacccagaaaccccatatgtctcattccatgactataggtgagagaattctttcctaagagggtttgntnccaataggggaaaatgtaaaatgttcagtctttatgacaacctggcataaaggagtcanntnttatnaaagagacacaagggccttatggccagggtttcttgggacaagactctcaccagcacntcacacacgttctccttggagagagagangcngtacatcccggttgagaggtcacaaagcattagttnnnnnnnnnnnnnnnnnnnnnnnnnnnnnnnnnnnnnnnnnnnnnngtaaaggggggaaggtgttatgcggctgctccctccgtcccagaggtggcagtgattccataatgtggagactagtaactagatcctaaggcaaagaggtgtttctccttctggntgattcatcccaaagccttcccacccaggtgttctctgaaagcttagccttaagagaacanncaganannnncccnagatatactcccnccnccaggngctggnacacncctttgcaaaatgctgtgggaagcaggagcctggggagcctgtgttaagtcaaagtagaaaccccccagtgtttggtgttgtgtagagaataggacatagggtaaagaggccaagctgcctgtagttagtagagaagaatggatgtggttcctcttgtgtatttatttgtatcataaacacttggaacaacaaagaccataagcatcatttagcagttgtagccattttctagttaactcatgtaaacaagtaagagtaacataacagtattaccctttcactgttctcacaggacatgtacctaattatggtacttatttatgtagtcactgtatttctggatttttaaattaataaaaaagttaattttg

SEQ ID NO: 357977 - DNA, 948 bp, Homo Sapiens
  misc_feature (42)..(42): n is a, c, g, or t
  misc_feature (206)..(206): n is a, c, g, or t
  misc_feature (228)..(228): n is a, c, g, or t
  misc_feature (330)..(330): n is a, c, g, or t
gcctgcgcttcaccacagtcatccgcagtgaccgttcatggngggacaccaggcactccagatgttccagaagcagccgtgtgttattccgttctgctttcagttctgatatctcttcctcccgctctagaagctgctcccgacacatgctcagctcccgggttaaggtggcaaattcctgggggagggcggagtttaaggtggcncttggagctggtcccgctcgtntatggcatcctggagccggctctgtgtggccgccaaggtctcctgactctcccgaagagactccagcaacttctcccgctcgtccagcatgttcaccatcanctgctcgaagttggcgtcagcatcggcgccatgagggggacccagggggtcccccgctcattgattgtgtggcatcacctcacacatggtgggggttggcagggccttctcagcgtcaggggacagggagggactcacagggttggcacctccaggggaacccagtgcatgggtctcagagtgggcagtgccaggcgagtggacaggtgggcaggggcttctcccatagcatcagttgcttttgctctgaaaggggcctggggtctggagtgcccctgtggaactgagccagaaggcctggcttaacttctcagggctggggctgggtgccctgtgtccccagacatgcagacagcagccgaatgtggccatgacaggcagggacagcagggctggaagatggcccttctcttagactgagtgccggaggctggcagagtcccagctggatctagcgacacccatcgtttctggagggcagtgtgtctgcctgcaaatgccgaaggccaggcggctaggctcggaagcagcagggagccgcccccgacccgtgcagcccgacacgtcctagagccgagccggcgccgaggtagctgcagcctccgccgcccaagcgcg

SEQ ID NO: 357978 - DNA, 892 bp, Homo Sapiens
  misc_feature (12)..(13): n is a, c, g, or t
  misc_feature (66)..(66): n is a, c, g, or t
  misc_feature (92)..(92): n is a, c, g, or t
  misc_feature (104)..(104): n is a, c, g, or t
  misc_feature (107)..(107): n is a, c, g, or t
  misc_feature (112)..(112): n is a, c, g, or t
  misc_feature (152)..(152): n is a, c, g, or t
  misc_feature (165)..(166): n is a, c, g, or t
  misc_feature (171)..(171): n is a, c, g, or t
  misc_feature (173)..(173): n is a, c, g, or t
  misc_feature (176)..(176): n is a, c, g, or t
  misc_feature (178)..(178): n is a, c, g, or t
  misc_feature (185)..(185): n is a, c, g, or t
  misc_feature (187)..(187): n is a, c, g, or t
  misc_feature (197)..(197): n is a, c, g, or t
ctccctctgggnnggcttcgagccaaagcagatgagcaggaggatgcttctgagccttcatccatngccactatgtccacactgccacccangcccttgggagnccntcacntgggcgggttccgggggcagcaacccatttgtccagcacnagaataggtatcnntgggnantgntnactgccnantggctccagnaggggggccctcatcatctgtcccccggctccactgcctgcatcgtcccccagcagcgctctgagaggacttccagggaagcaggtgggtcctccgtgaagtggggtgcaggggctccacccacaggcagccatcattctggtacagccacagctgaagaatatagcaccaacctgctcagagaggcctgcagtttggctgcaagaagcagggaagcccaggcactgaggggacaaccaggccacctacctggaagttacccttgtgggtggtgaagaggccttcaaactcgctctctgggctcgggatgccaggccagatcttctgcttcagagcccggcggtgggagagcagcgcgagcacggtcagcagcaccaggatgaccacgaggatgagggagagcgtcaggatgagggggtccaggtctaagaggcggggaggaggtcagggcggtgggcttgccccgtgattcgccctggctcctcctacacccccgcctggggcctcaccgctaggcgtcagcagcgacacaggctccgaccaggcgctccagaagccgccgaagctcggctcagccatacgcgcgcggacggcgaaggtgtagcgcgtccggccccgcaggttgctcagcacacactcggtgcggccctccaggatctccacctgggcctcgtgccgaattcgccacccaggcc

SEQ ID NO: 357979 - DNA, 881 bp, Homo Sapiens
ccgtccgcgcgcgtatggctgagccgagcttcggcggcttctggagcgcctggtcggagcctgtgtcgctgctgacgcctagcgacctggaccccctcatcctgacgctctccctcatcctcgtggtcatcctggtgctgctgaccgtgctcgcgctgctctcccaccgccgggctctgaagcagaagatctggcctggcatcccgagcccagagagcgagtttgaaggcctcttcaccacccacaagggtaacttccaggtaggtggcctggttgtcccctcagtgcctgggcttccctgcttcttgcagccaaactgcaggcctctctgagcaggttggtgctatttcttcagctgtggctgtaccagaatgatggctgcctgtggtggagcccctgcacccccttcacggaggacccacctgcttccctggaagtcctctcagagcgctgctgggggacgatgcaggcagtggagccggggacagatgatgagggccccctgctggagccagtgggcagtgagcatgcccaggatacctatctggtgctggacaaatggttgctgccccggaacccgcccagtgaggacctcccagggccctggtggcagtgtggacatagtggccatggatgaaggctcagaagcatcctcctgctcatctgctttggcctcgaagcccagccccagagggaagcctctgctgccagctttgagtacactattcctggacccccagctcccagcttctggcgtccatggacacctgtggccctgaaactggccccctacccccacccccacctaaaagttacccgggtaccctttgttgggtattctgaacatcttgggcattcttcaaaccggaacttaaaggtct

SEQ ID NO: 357980 - DNA, 2901 bp, Homo Sapiens
  misc_feature (2156)..(2311): n is a, c, g, or t
  misc_feature (2466)..(2492): n is a, c, g, or t
  misc_feature (2748)..(2748): n is a, c, g, or t
  misc_feature (2766)..(2766): n is a, c, g, or t
  misc_feature (2819)..(2819): n is a, c, g, or t
  misc_feature (2822)..(2822): n is a, c, g, or t
ggcatttgctgtgtttttcagcaaaacttcatcccaaatcagacatcttaaggcaccaataatttgcaaagttaaacctcctccacaaatttcacccagcaaatcgatgggcggagaattttgtgtggctgctatcttcggaacatccaggtcatggtttgcaaataatgcaggtctgaaaagagaaaaagatcagtccaaacaagttgtagttgagtccctgtacattatcagttgctatggcaccttagtggaacacatgatggagccgcgacccctcagcactgcacccaagattagtgacgacacaccactggaaatgatgacatcgcctcgagccagctggactctggttagaacccctcaatggaatgaattgcagccaccgtttaatgcaaaccaccctctgctcctcgctgcagatgcagtacagtattatcagttcctgcttgctggcctggttccccctggaagtcctgggcccattactcgacatgggtcttacgacagtttagcttctgaccatagtggacaggaagatgaagaatggctttcccaggttgaaattgtaacacacactggaccccatagacgtctgtggatgggtccacagttccagttcaaaaccatccatccctcaggccaaaccacagttatctcatccagttcatctgtgttgcagtctcatggtccgagtgacacgccacagcctcttttggattttgatacagatgatcttgatctcaacagtctcaggatccagccagtccgctctgaccccgtcagcatgccagggtcatcccgtccagtctctgatcgaaggggagtttccacagtgattgatgctgcctcagtggactcttccaccgcccttgagtggggaacatccaggccttcacactcacgctcagcccatcacccctctgtgcaaggtgcaaggtcctctgcccacctgaagcctcaaggcctgatggaaaccatccacagccactctaggatgagtcaacattgcatgcagccagccatggccactgggagaagagtcagacatgggccatggagctgcaggctcacctgcccccggctgagtcaggaccgagcacaggacttgacagaggaggcatcgcagcaaggtacctttgacaggagcgtgaccctgctggaggtgtgcgggagctggcctgagggcttcgggctgcggcacatgtcctccatggagcacacggaggagggcctccgggagcgacttgccgacgccatggccgagtcacctagccgggacgtcgtgggatccggaacagaacttcagcgagagggaagcatcgagactctgagtaacagctcaggctccaccagcggcagcataccaagaaactttgatggctaccgatctccgctgcccaccaatgagagccagcccctcagcctcttcccgactggcttcccgtaggtaccagcaacctgcttctgactggccagccccctcccctgctggaggaggggagaagccccgctccggtcccacccttcagtctctgctcttccttcatcaaccaccttccccaagcttagtgacagcagccgcccatcctacctggatggagaagagacccttctccaagcacctcagcgcacttgccctctgccacacctgtcggtggaggctgtggccaggagagactgtagaagctcggtccctgtgtatgtttgcatatgacatcctgcattggatccgcttttgtattttttaaccatacccacggtggggcgggtgccgggagcctggaacagtgaccagatctgggggcctgagtgggcacagagttgatcgtccacctggccattttgaccctgagtggacagtcacagcctcagctcatgtctggctgtgacacacactgcccccagcttcccttggtcagccccactccagcacggggtgaacggaggcccagagtactagggaaggaggaagggaggacatgcctcttcttcctcctttctttccccatctgttcctgggaagagtttgtctttcttatctttaagcccctttaccctggtcctgtactgatcagtgaaggaaaccgtggttactgaggccctgttgaaaagtgcacgtcttgtccaataaatcacgctgcagttggtgtccnnnnnnnnnnnnnnnnnnnnnnnnnnnnnnnnnnnnnnnnnnnnnnnnnnnnnnnnnnnnnnnnnnnnnnnnnnnnnnnnnnnnnnnnnnnnnnnnnnnnnnnnnnnnnnnnnnnnnnnnnnnnnnnnnnnnnnnnnnnnnnnnnnnnnnnnnnnnttttttggggggggcccccgccccctagaaaatttctttaaacaccttctgtggtgggccggccgccccccatgagaaaggggaaaatgggcccaatctcgtttttcaaaaagaaaacacccccggcccggaacaacggggggttcggcactctnnnnnnnnnnnnnnnnnnnnnnnnnnnggggggcgcatcccccacggccgctctcttcccaacacacacctcccccacaagcggcgcgcaccctctatcaggggcgccgccctctctaggccgcggggtctatcctcccacacaccagcggggaggttgccccacagcagacgggacgcgccctcctccaccacaccacccatattattgtccgcgctgcctcccccctcccggggtgaactccaatttgttcccccgcgaaaacacggcggggcggccgtantatctccgtctctttaanaggatctttcttccctccagcccgcaccgggcggggagagacacacactcttnatnacacaaacgcccacgtgatttcttataacgccccccctcacctaattcattcgcccccgcgcgcgcgtgtttttatcta

SEQ ID NO: 357981 - DNA, 524 bp, Homo Sapiens
  misc_feature (227)..(227): n is a, c, g, or t
  misc_feature (251)..(329): n is a, c, g, or t
  misc_feature (413)..(413): n is a, c, g, or t
  misc_feature (415)..(416): n is a, c, g, or t
  misc_feature (419)..(419): n is a, c, g, or t
  misc_feature (442)..(442): n is a, c, g, or t
  misc_feature (467)..(467): n is a, c, g, or t
  misc_feature (475)..(475): n is a, c, g, or t
gggatcactgtgatgcagagaggcaggacctcagcaaagaaagctcactggctcagaaaggtaggaggatttgcaccacagttctgtcctgaatggtcctgggctcagcctctctccacccactcccttggccatgcaattggggccataataatcctgatccacaatgaggctgttcagggactaaggaaggtaaggactgtgtgtgaaagggctttgaaaacagnacagcctgagcatcgtgtttcatnnnnnnnnnnnnnnnnnnnnnnnnnnnnnnnnnnnnnnnnnnnnnnnnnnnnnnnnnnnnnnnnnnnnnnnnnnnnnnntggtcgacgtgtttgtatttttctctacagaaaatactaaaaaaattggccaggcatggtgcacgcatgcctgtagcctcagcngnnggnggggaggctgacggcgggacgancgctcgcaccacacccaggcagcgnccgcacgngctgcagcgacccgtctccgcgccacttgctccagcctggtgaaagagt

SEQ ID NO: 357982 - DNA, 1481 bp, Homo Sapiens
aaagaactttgatatctcactatagggcgctagctctgtttccgagcgaacgaccgagcgcagcgagtcagtggcagcgaggaagcggccgcataacttcgtatagcatactattatatcgaaggtttcagtcgacggtacggacattgccgggatttcggcattacggcggggttctcgttgccccgccgcgggcgcgagatggattccgggtgctggttgttcggcggcgagttcgaggactcggtgttcgaggagaggccggagcggcggtcaggaccgcccgcgtcctactgcgccaagctctgcgagccgcagtggttttatgaagaaacagaaagcagtgatgatgttgaagtgctgactctcaagaaattcaaaggagacctggcctacagacgacaagagtatcagaaagcactgcaggagtattccagtatctctgaaaaattgtcatcaaccaattttgccatgaaaagggatgtccaggaaggtcaggctcggtgtctggctcacctgggtaggcatatggaggcgctggagattgctgcaaactgtggaaaataaagcaaccaacacagaccatttaaccacggtactctacctccagcttgctatttgttcaagtttgcagaacttggagaaaacaattttctggcctgcagaaactgatttctttgcatccttttaatccttggaactggggcaaattggcagaggcttacctgaatctggggccagctctttcagcagcacttgcgtcatctcagaaacagcacagtttcacctcaagtgacaaaactatcaaatccttctttccacactcaggaaaagactgtcttttgtgttttcctgaaaccttgcctgagagctctttattttctgtggaagcgaatagcagtaatagccagaaaaatgagaaagctctgacaaatatccaaaactgtatggcagaaaagagagaaacagtgttgatagagactcagctgaaagcatgtgcctcttttatacgaaccaggcttctgcttcagtttacccaacctcagcaaacatcgtttgctttggagaggaacttaaggactcagcaggaaattgaagataaaatgaaagggttcagcttcaaagaagacactttgctgttgatagctgaggttatgggagaagatatcccagaaaaaataaaagatgaagttcacccagaggtgaagtgtgttggctccgtagccctgactgccttggtgactgtatcctcagaagaatttgaagacaagtggttcagaaagatcaaagaccatttctgtccatttgaaaatcagttccatacagagatacaaatcttggcttagtgggttataaaaaacaaaaccacaaatatcttgtactgtattaattgtccttgtttacttcagacaggatccattgctaatcatggagtataaatgattatttatgttttataaaactggcttctgtctccaatg

SEQ ID NO: 357983 - DNA, 1039 bp, Homo Sapiens
  misc_feature (12)..(12): n is a, c, g, or t
  misc_feature (20)..(20): n is a, c, g, or t
  misc_feature (32)..(32): n is a, c, g, or t
  misc_feature (38)..(38): n is a, c, g, or t
  misc_feature (46)..(46): n is a, c, g, or t
  misc_feature (51)..(51): n is a, c, g, or t
  misc_feature (60)..(61): n is a, c, g, or t
  misc_feature (66)..(66): n is a, c, g, or t
  misc_feature (73)..(73): n is a, c, g, or t
  misc_feature (75)..(75): n is a, c, g, or t
  misc_feature (77)..(77): n is a, c, g, or t
  misc_feature (81)..(81): n is a, c, g, or t
  misc_feature (88)..(88): n is a, c, g, or t
  misc_feature (110)..(110): n is a, c, g, or t
  misc_feature (119)..(119): n is a, c, g, or t
  misc_feature (127)..(127): n is a, c, g, or t
  misc_feature (133)..(133): n is a, c, g, or t
  misc_feature (151)..(151): n is a, c, g, or t
  misc_feature (167)..(167): n is a, c, g, or t
  misc_feature (174)..(174): n is a, c, g, or t
  misc_feature (176)..(176): n is a, c, g, or t
  misc_feature (190)..(190): n is a, c, g, or t
  misc_feature (193)..(193): n is a, c, g, or t
  misc_feature (195)..(195): n is a, c, g, or t
  misc_feature (197)..(197): n is a, c, g, or t
  misc_feature (201)..(201): n is a, c, g, or t
  misc_feature (206)..(206): n is a, c, g, or t
  misc_feature (210)..(210): n is a, c, g, or t
  misc_feature (217)..(217): n is a, c, g, or t
  misc_feature (219)..(219): n is a, c, g, or t
  misc_feature (226)..(226): n is a, c, g, or t
  misc_feature (232)..(232): n is a, c, g, or t
  misc_feature (240)..(240): n is a, c, g, or t
  misc_feature (258)..(258): n is a, c, g, or t
  misc_feature (264)..(264): n is a, c, g, or t
  misc_feature (266)..(266): n is a, c, g, or t
  misc_feature (284)..(284): n is a, c, g, or t
  misc_feature (293)..(293): n is a, c, g, or t
  misc_feature (308)..(308): n is a, c, g, or t
  misc_feature (327)..(327): n is a, c, g, or t
  misc_feature (353)..(353): n is a, c, g, or t
  misc_feature (359)..(359): n is a, c, g, or t
  misc_feature (385)..(385): n is a, c, g, or t
  misc_feature (533)..(533): n is a, c, g, or t
  misc_feature (536)..(536): n is a, c, g, or t
tctccccagtcnagaacgancccggagtgtangcgtcnaaactcanctaanaaacagacnnccgcnccagccntntntcangtacttnacacatcttgaagccctcgttnatgagaaancgaacacncgtccntgccaaagtaaatgaagntccccaggaaaagggntacaatnanctccctggagtccnacncngntttnctctntggngacctgntngtccccnctgtgntctttgtngtcccactttgggaccgnttccantntggggtctagtctcgagnatcagggtnaggctcggggcaggnctgggttaggctccgggtnagtcttgccatgggtttgggagcagntttggnttacttgcgtttgaaggcagcagtgntctcaggaggaagaaacgggggcgggagagagtggtgatctgtggtcagtgggtcagtgacctgcacggtgattctcccacctccaaaaggtaggggtgggactggaggcgtccctaggtcaggccgttgagttcgagctccgatggnccnccttgaatccaggactgaccgcccgtgtgtgcacagtttgttcttggacgaggactcgtgaggatcgagggctggggaccccggtgtgagcaggatggggccctgccctcccgtgggagttgtggactcgagcccaggggctgcccgtcacagcggtgtcccaggtccctgccatccgattttacctgggatgtcttctctggagtttggaattgcttgaggaaccctgcgtgtgcttggagaggccagagggcttgctgagaaccccatggacagtggagagcgggattcgaaccaagggctggactcccacacctctggcctgcgtcgcccagttctttgtggctctgaagaattggccgctgtggaaaagagcaaatgtccgagacccccaacaggaagagtctaaaaatccagtttgcaaccacttctgacctacaaaaaaatggaaatttagtgtttttcagcctaagacattaaatttcatatcagaacaaaaaaaa

SEQ ID NO: 357984 - DNA, 402 bp, Homo Sapiens
  misc_feature (17)..(17): n is a, c, g, or t
  misc_feature (39)..(39): n is a, c, g, or t
  misc_feature (46)..(46): n is a, c, g, or t
aagttgttggaactccnaaacccaggggctgccccgtanacagcgntgtcccccaggtcccctgcccatcccgattttacccgggatgtccttcctctggagtttggaattgccttgaggaaccctgcgtgtgccttggagaggccagagggcttgcctgagaaccccatggacagtggagagcgggattcgaaccaagggctggactccccacacctctggcctgcgtcgcccagttctttgtggctctgaagaattggccgctgtggaaaagagcaaatgtccgagacccccaacaggaagagtctaaaaatccagtttgcaaccacttctgacctacaaaaaaatggaaatttagtgtttttcagcctaagacattaaatttcatatcagaacaaaaaa

SEQ ID NO: 357985 - DNA, 1694 bp, Homo Sapiens
  misc_feature (230)..(493): n is a, c, g, or t
  misc_feature (705)..(705): n is a, c, g, or t
ttttaaatattcagtatttaatattgttgagtacttaaagtataccaggagctttcttctccattggctcatgtaggtggcacaactccgccacattgtatagagattgaaaaagagattcagacaaaagtcctccacaagttcacaccctcagttgatgtgggacgtagaactcgggacactctcctgaagagcacaagactactgccactacatcaagaaacttaaannnnnnnnnnnnnnnnnnnnnnnnnnnnnnnnnnnnnnnnnnnnnnnnnnnnnnnnnnnnnnnnnnnnnnnnnnnnnnnnnnnnnnnnnnnnnnnnnnnnnnnnnnnnnnnnnnnnnnnnnnnnnnnnnnnnnnnnnnnnnnnnnnnnnnnnnnnnnnnnnnnnnnnnnnnnnnnnnnnnnnnnnnnnnnnnnnnnnnnnnnnnnnnnnnnnnnnnnnnnnnnnnnnnnnnnnnnnnnnnnnnnnnnnnnnnnnnnnnnnnnnncaaggaggccatgctatggtgattttctggcatcatgttccactgcagggctctctgactgagtgtgagacttttccatttcttctgagtgtagtctacagataggtcctcatatgccacagtatcctggggcctgaccatccgaagtacagttgcccctgcttggtctcctgagttccccacttgaggaagggtaggaactggagaagtanattgaccgaagtccccactggggaagtggtgttgtccctgggtcaataaaggaggctccaggtgggctccaggggctgagcccccactgaggggtgaggtaggaggagattcctttgttgtacccagagctgttgtctcctcaaaatgcatttcctgtttctgtgctggggctgaaacctcctctgatccactgaggtgtctctggaaatcctccaccacagccacagcctcctcaccactctcagggtgatgcagctgcacccaggtccggagctccccagggaggatgctcaggaactgctcaagcaccagcagctccaggatctgctccttggtgtgcacctctggcatgagccaccagcggcagagctcccgaagccggctcaatgcttcctgcggcccagacatctcgtggtaacacaattgcctgaagtgtagccggaagatttcgcagacaggaggatagttcttctggagactgctgccctgcccccaggtctggtttgctggctcctgcttcacagtcaggcgcccctcttgcttctggaaagcagtgctcctggggatgaggcctaaatttcccctgcctgcagtggtcattgtgaccccaaagagaagcttgttacagctgcagttggtccgattaaaatgatggtcaatagttcaggtctcaggaactgtttttcagggttggagaaaggggtgatggtagtgtggcctggccacgtctgccctgttcatcgctgtacccgcagatacccggctccgtgccacgcacgaatggtcaggggtatgagacaaagaagcggctctacatcgggcggcttctgagagtcacggggaccgcgccgcctgccgccgggaagaagcgcggtcctggccagcgtcggcgacccgagctccggccgcgcctccctccgcgtctcggcccactcgcggtggcactcggcaccgaagccggacactctactgcccgttagaccaaaaa

SEQ ID NO: 357986 - DNA, 733 bp, Homo Sapiens
  misc_feature (87)..(87): n is a, c, g, or t
  misc_feature (165)..(165): n is a, c, g, or t
  misc_feature (187)..(187): n is a, c, g, or t
  misc_feature (313)..(313): n is a, c, g, or t
  misc_feature (352)..(352): n is a, c, g, or t
  misc_feature (356)..(356): n is a, c, g, or t
  misc_feature (361)..(361): n is a, c, g, or t
  misc_feature (365)..(365): n is a, c, g, or t
  misc_feature (369)..(370): n is a, c, g, or t
  misc_feature (390)..(390): n is a, c, g, or t
  misc_feature (405)..(405): n is a, c, g, or t
  misc_feature (416)..(418): n is a, c, g, or t
  misc_feature (434)..(435): n is a, c, g, or t
  misc_feature (438)..(439): n is a, c, g, or t
  misc_feature (444)..(444): n is a, c, g, or t
  misc_feature (448)..(448): n is a, c, g, or t
  misc_feature (451)..(451): n is a, c, g, or t
cagacatatcaaatttgacaggtattgtataccctttggatctttaggaattaacttttgcctctgtcactcagctttgtatattcngaaatggagataagtatagggaggtcttggaaggaaaattgccagaattcccaaaccatgtaacactcattgagaatnccagacccattatatctaaagngcaagtgaaggaaacagtattgtgaactgggtataaccccttggttcttaactagtacattcttaatctgtgagacccaaaggttgataaacaataatttaagattgtacagtactctaaacgtcngcaaaggtctagatgttatcagtatcactagtttttatncctnccagnagcncccnnttaggttacattgttgtccnctttccagtgtggcntctgtcattgnnnttccactatggcaagnncannaaaangctngcnccattgttatccttcaagtaatgccccataaggagatggaagatatctgagacaattaaggctttagcttctaggcaagagaaataacgttgcattaaatttcaagtttctttctgctagacttgaatgtgtctagccactctaatttatgggggcttttggttttttcctattgtactttgtatgtagaattgttttgaaatatcaagcatatttactttgaatttgaactctttcttaattttgtatttatcctttgaataaaatgtaaatccaaaaaaa

SEQ ID NO: 357987 - DNA, 1093 bp, Homo Sapiens
  misc_feature (905)..(905): n is a, c, g, or t
  misc_feature (958)..(958): n is a, c, g, or t
  misc_feature (1040)..(1040): n is a, c, g, or t
gctccttctcgcctgatccttctgtctctcccaaccccggacacccggcttcgactggttatatcttcggtgttcttttcctctcttcttctttcgcggttcagcatgcaggaaaaagacgcctcctcacaaggtttcctgccacacttccaacatttcgccacgcaggcgatccatgtgggccaggatccagagcaatggacctccagggctgtagtgccccccatctcactgtccaccacgttcaagcaaggggcgcctggccagcactcgggttttgaatatagccgttctggaaatcccactaggaattgccttgaaaaagcagtggcagcactggatggggctaagtactgtttggcctttgcttcaggtttagcagccactgtaactattacccatcttttaaaagcaggagaccaaattatttgtatggatgatgtgtatggaggtacaaacaggtacttcaggcaagtggcatctgaatttggattaaagatttcttttgttgattgttccaaaatcaaattactagaggcagcaattacaccagaaaccaagcttgtttggatcgaaaccccacaaacccacccagaaggtgattgacattgaaggctgtgcacatattgtccataagcatggagacattattgtggtcgtggataacacttttatgtcaccatatttccagcgccctttggctctgggagctgatatttctatgtattctgcaacaaaatacatgaatggccacagtgatgttgtaatgggcctggtgtctgttaattgtgaaagccttcataatagacttcgtttcttgcaaaactctcttggagcaggtccatctcctattgattgttacctctgcaatcgaggtctgaagactctacatgtccgaatggaanagcatttcaaaaacggaatggcagttgcccagttcctggaatctaatccttgngtagaaaaggttatttatcctgggctgccctctcatccacagcatgagttggtgaagcgtcagtgtacaggttgtacagggnatggtcaccttttatatttaagggcactcttcagcatggctgagatttttcct

SEQ ID NO: 357988 - DNA, 412 bp, Homo Sapiens
  misc_feature (22)..(22): n is a, c, g, or t
catgaaagtgtaatttcagttntcttgaagaaggcaaaattactctgacacaggcagttctaggcatctggagacagctgggtgaggacagataccagcatgggaagatggtaaagaaagaaaggggatatgggaaggcaccaaaggtggtttggtctcattcatggttttgcttaggtctggtcccaagtgattcagtccctggggctgccatcaccctcacctcatcaggaaccatgatcagagggtacttgtcctcagacaggaagttgaagaggcaccagaggcggaaggcatcctgattggagagcatactgttcccgttgctatctgcccgatagttcttcttggccgtcagcgtccagcacagctcatcaaagtgctctttaacaaaagccccctcctccaacag

SEQ ID NO: 357989 - DNA, 1082 bp, Homo Sapiens
ggggggaaaaccaaatatggcatcttccatgaggagcttgttttctgaccacgggaaatatgttgaatctttccggaggtttctcaaccattccacggaacaccagtgcatgcaggaattcatggacaagaagctgccaggcataataggaaggattggagacacaaaatcagaaattaagattctaagcataggcggaggtgcaggtgaaattgatcttcaaattctctccaaagttcaggctcaatacccaggagtttgtatcaacaatgaagttgttgagccaagtgctgaacaaattgccaaatacaaagagcttgtagccaagacatcgaacctcgagaacgtaaagtttgcttggcataaggagacatcatctgaataccaaagtagaatgttggagaaaaaggagcttcaaaagtgggactttattcatatgattcaaatgctgtattatgtaaaagacatcccagctaccctgaaattcttccatagtctcttaggtaccaatgctaagatgctcattattgttgtgtcaggaagcagtggctgggacaagctgtggaaaaagtacggatcacgctttccccaggatgacctctgccagtatatcacatcagatgacctcactcagatgctggacaacctagggcttaagtatgagtgctatgaccttttgtccaccatggatatatctgactgctttattgatggtaatgaaaatggagacctgctttgggattttttgactgaaacctgcaactttaatgccacagcaccacctgatctcagagcagagcttgggaaagatctacaagagcctgaatttagtgctaagaaagaggggaaggttctttttaataatactctgagtttcatagtgattgaggccataactatcaatcacaaaagtatattcaaaaattatatttttgaacaactcgaatcactcattttatttccatattaaaatcacaaactcatccatttatggtagataaacactggtttggaatgagatgtaccaaattccaataccttattggaacttccatttggaatcatatggggaaactcctggg

SEQ ID NO: 357990 - DNA, 950 bp, Homo Sapiens
  misc_feature (10)..(10): n is a, c, g, or t
  misc_feature (24)..(24): n is a, c, g, or t
  misc_feature (52)..(52): n is a, c, g, or t
tttactcccnacagacccatgatnatatacaaaagccagtcacgatgcacanacttttattatatccagaagttcaccattccatacatatttcatataaggctcactacagatcccaaataccccgcttcccccttgtgtaattaatcctttcatctttcaaagatgtcaaagctctcttggcgatttctgggtcatttcggactttaacatctccaggggcattcgcaagacagtgagattatattgaagtgagtgggacaaatcatagctgtaactaaagtaaaaattgctagataggtccacattttgaaatattcgtagatacctagcttcatcaggatgagtaacccgtacagaatcattgggtatatagatcatatttgtatcttcgaccttatagattgcatgacctccaatatccgccatcttcctccttttagttattaacacaatataatagccttctaagaacctgacaaaacccacaacaccaaaagctgaaaccgctcgaaataagcccgaggatcctttctgtcccatctttgttctatttccaagatccaagcggccaagaagttcccttacttcttgttgagtatagacatgcctgtcatcaattatgaccaaatcttttggttctgttctatcaatcttcaagacacgatatttcgtttctgcattattgctcccaactagaaagtatctagctctagtctcatacagaaccagcttctggaccgagctgatgatgggggcggcggccgtgggcatggcggcggcaaatgggggccccacaacagggcacgagcctccggaccgccccaggagactcggcgagaaaacccctcaggccctggacatcaagtccagccaggaacaacacccattaggcactaaacctatagatgatcaggtgtttccggatccctgcgccccgcctccccgct

SEQ ID NO: 357991 - DNA, 1147 bp, Homo Sapiens
  misc_feature (10)..(10): n is a, c, g, or t
  misc_feature (13)..(13): n is a, c, g, or t
  misc_feature (21)..(21): n is a, c, g, or t
  misc_feature (23)..(23): n is a, c, g, or t
  misc_feature (28)..(29): n is a, c, g, or t
  misc_feature (31)..(31): n is a, c, g, or t
  misc_feature (35)..(35): n is a, c, g, or t
  misc_feature (45)..(45): n is a, c, g, or t
  misc_feature (47)..(48): n is a, c, g, or t
  misc_feature (53)..(53): n is a, c, g, or t
  misc_feature (63)..(63): n is a, c, g, or t
  misc_feature (74)..(74): n is a, c, g, or t
  misc_feature (78)..(78): n is a, c, g, or t
ggtgtggggnagnaacccccngnacagnngncctntggcctcccngnngttgnggggtgcagntaacagggtgngtgnccggcccccgaggatgcaggcagcaagcagctgtttatgacagcctacttcttggtcagtgccctcgacagaaagtgccagatagcgcagtcagtcatctgctgggcacttgctgcaaactccagatcattcccacactgtgccacttgcttcgtgctctgtctgatgatggagtatctgatcttgaagacccaaccttgactcccctgaaagatacagaaaggtttgggattgtgcagcgcttgtttgcctcagccgacattagtctggagagactgaagtcatctgtgaaagctgtcattctgaaggactctaaagtcttcccactgcttctttgtataagcactggaatggactccatgatggctttaggtcagagaacattcgatgatgtaatatgtgaactagaagtacgtgttactggccaaggctatttttcagaactgttaaaggtcatattgcacgttaaaagttgactcaatgaaatgaatttacagaacagtcttaagaagtggtgacaattttgcatgatgaatgacctgacttttagccacacaggtactctttaaacagttttccttatcagaggccctcctgtgctggtgacccagcatctgagttaggttccagcatgtaaagagctgggagggcggagaattcttagcatacattcagacgttttttctgcacaataataagtccatctgtcacttgcattccactttttgttacatagaaagagtctgaccctttaatccaaaaggtctttttacattgtgaatgctgtgggaaggcaatttctctgcacacaagaggctacgttttggaagtgatgtatgttatttgatgactgaaaatgaactgtaaatgctcctagagtatattcctctgctgaacaaaattaaacttcaaaaaaatctaacagtaacacacccctgcttgggaccctagctatatgcattttatgtgaccttgccatgcttcagtgaacatactaattctatgtctagcacatgttgatttcctatgtattctgggtattctattaaaggaaactttgaactatgaa

SEQ ID NO: 357992 - DNA, 281 bp, Homo Sapiens
  misc_feature (32)..(32): n is a, c, g, or t
ccaagtctgatactatcagttggtaggctaanaaattcttgcactaatttctatgaagcaagctgacttaatcatctatctatactagctcatctgcctgagatgctaagaatagtgaacatttactggaacatactatatatcagacacctataggctccccgtaataatttcctgttcattcaaccttctcaaaatacccatggggcagatactattatccatatttcacaattgagaacaccaatgaggctcaaagaagcgaagttgctcaaggataa

SEQ ID NO: 357993 - DNA, 818 bp, Homo Sapiens
  misc_feature (1)..(1): n is a, c, g, or t
  misc_feature (5)..(5): n is a, c, g, or t
  misc_feature (30)..(30): n is a, c, g, or t
  misc_feature (43)..(43): n is a, c, g, or t
  misc_feature (49)..(49): n is a, c, g, or t
  misc_feature (51)..(51): n is a, c, g, or t
  misc_feature (55)..(55): n is a, c, g, or t
  misc_feature (68)..(68): n is a, c, g, or t
  misc_feature (75)..(75): n is a, c, g, or t
  misc_feature (77)..(77): n is a, c, g, or t
  misc_feature (87)..(87): n is a, c, g, or t
  misc_feature (90)..(90): n is a, c, g, or t
  misc_feature (97)..(97): n is a, c, g, or t
  misc_feature (107)..(107): n is a, c, g, or t
  misc_feature (112)..(112): n is a, c, g, or t
  misc_feature (132)..(132): n is a, c, g, or t
  misc_feature (136)..(136): n is a, c, g, or t
  misc_feature (139)..(139): n is a, c, g, or t
  misc_feature (141)..(141): n is a, c, g, or t
  misc_feature (145)..(147): n is a, c, g, or t
  misc_feature (156)..(156): n is a, c, g, or t
  misc_feature (186)..(186): n is a, c, g, or t
  misc_feature (188)..(188): n is a, c, g, or t
  misc_feature (195)..(195): n is a, c, g, or t
  misc_feature (272)..(272): n is a, c, g, or t
  misc_feature (293)..(293): n is a, c, g, or t
  misc_feature (297)..(297): n is a, c, g, or t
  misc_feature (317)..(317): n is a, c, g, or t
  misc_feature (346)..(346): n is a, c, g, or t
  misc_feature (349)..(385): n is a, c, g, or t
  misc_feature (414)..(422): n is a, c, g, or t
  misc_feature (632)..(661): n is a, c, g, or t
  misc_feature (785)..(785): n is a, c, g, or t
nttgnttattgaattttcagagcataaacnaagtttaaatctnaaactngnaacngtattgaaaatcntgtgtanangtaaaatgtnaantacagantacaaaaatntattnacgcaaccccttttgggggngtgnaantngtgnnntgcccagtnttgtggccgatttagctctgacccccacgngnaaattgnggaagcatttttttacccagtcggtttaaattgtttttagaattattgctttttgttctatttttccccacccattnttctcccttgtatatggcacncccngcacttgtgcctgtgggccntattagatgttcattgtcagagctcaagntgnnnnnnnnnnnnnnnnnnnnnnnnnnnnnnnnnnnnncacacacacaaatgtctgtgcaagtaagnnnnnnnnngcatattctttgtgccttgtattttggggaaactctaaaactggtaatattttgtatgatgaaaaccctaatgagaaaaaacaagatatatagatggaaaaattatggggtttaaatgtttttttgttccaactctttttcagattttttgaatgtatataggactatgttgaaatgtagatatatgccacagagtctgtgtattgtatnnnnnnnnnnnnnnnnnnnnnnnnnnnnnngatggctctagaaaactcatatttcggtacttgaccggaagaagacaaatacttgcacattattgcgattgttttattttttcgtaccaaagacaaatgcaactgatatggcaaactgccagtntaagtaaagttttcacgagttacatgatactgt

SEQ ID NO: 357994 - DNA, 1111 bp, Homo Sapiens
  misc_feature (934)..(934): n is a, c, g, or t
  misc_feature (959)..(959): n is a, c, g, or t
  misc_feature (982)..(982): n is a, c, g, or t
  misc_feature (991)..(991): n is a, c, g, or t
  misc_feature (1003)..(1003): n is a, c, g, or t
  misc_feature (1006)..(1006): n is a, c, g, or t
  misc_feature (1008)..(1008): n is a, c, g, or t
  misc_feature (1020)..(1020): n is a, c, g, or t
  misc_feature (1043)..(1043): n is a, c, g, or t
  misc_feature (1050)..(1050): n is a, c, g, or t
  misc_feature (1072)..(1072): n is a, c, g, or t
  misc_feature (1075)..(1075): n is a, c, g, or t
  misc_feature (1083)..(1083): n is a, c, g, or t
  misc_feature (1089)..(1090): n is a, c, g, or t
  misc_feature (1106)..(1106): n is a, c, g, or t
tttttttggcctaaaatgagacttggagtttaattaaaaacagaacagggatacattaaacaaacaaacaaaaattacttttctgattatcaattttttttgagactcaaagcatccccaaaacattggagatccagcttattcctgagacatcaaccatcacaaaaggttttcactctgaactattcacatttttgtggcagaaaacagaacaaagttctgcagacatccttcctctctttctaaaatatattcacaaacagggtcttttcatagttcaaaagaaaaacaaacaggtttctttcttggccaaatggcctgttactctcaccctgggatctgatttcttaataaaaaagttcagggcaccaaatccaaccagaaattcccaggacaccagtggctacttaactatgaggggatggatgcttttgtccttctatgaggggaatcattctcccgggattattatgctgctcaacaagcccaagacaggtaggtgggaaaggagggtgaatgcaaaagcgaaagggtcacaagaaaagaatgaggcttcctgaacaacccatagcaaggcaaaatggtccaattttacaaaccaaccactacaaactccaaacatgcacacccaaaactagaggggaaagggaagagctcctgggggactaagggagacaaaagatggtgacgatagaacagcagacttgcctatgaacgtttctcaacttcctaacactggaagatgtttaattaaaaagttgctgttcaaaattgtactgaaaacatatctaaaaataggtctgtagtcatcttaaaaataaaaggtcacttctcagataagaggagtgacagatattctcagataccaacacttcaggtatctttgatgtaaatttgaaaaatggcctggtagagaaaaaggaaggaaaggaangagagaggaagacagtgagggaggnagggagagaattcagagtacacnggagaaggnagaaaactgggnggnanacatttttaaanccatgcttatctatccagcagcnaacaaanagatccccaaggaaaaaatgcngtntttctagnaattcnnaatcacctcaaatcanaaata

SEQ ID NO: 357995 - DNA, 469 bp, Homo Sapiens
  misc_feature (51)..(51): n is a, c, g, or t
  misc_feature (94)..(94): n is a, c, g, or t
  misc_feature (139)..(139): n is a, c, g, or t
  misc_feature (192)..(192): n is a, c, g, or t
accctacctgcccccggggcctgttgaagccaggccataaataaacccccngggagaaatgaattccccccctccataagaaaagaacaaaaanccatccccatcccccctccatagttaaagtaagccccactggtgncccccgggaaatttcctggttggaatttggtgcccctgaacttttttaattanagaaatccagatcccccgggtgaagagtaaccaggccatttggcccaagaaagaaacctgtttgtttttcttttgaactatgaaaagaccctgtttgtgaatatattttagaaagagaggaaggatgtctgcagaactttgttctgttttctgccacaaaaatgtgaatagttcagagtgaaaaccttttgtgatggttgatgtctcaggaataagctggatctccaatgttttggggatgctttgagtctcaaaaaaaattgataatcagaaaagt

SEQ ID NO: 357996 - DNA, 919 bp, Homo Sapiens
  misc_feature (4)..(4): n is a, c, g, or t
  misc_feature (9)..(9): n is a, c, g, or t
  misc_feature (14)..(14): n is a, c, g, or t
  misc_feature (23)..(23): n is a, c, g, or t
  misc_feature (53)..(53): n is a, c, g, or t
  misc_feature (57)..(57): n is a, c, g, or t
  misc_feature (60)..(60): n is a, c, g, or t
  misc_feature (67)..(67): n is a, c, g, or t
  misc_feature (70)..(70): n is a, c, g, or t
  misc_feature (77)..(77): n is a, c, g, or t
  misc_feature (80)..(80): n is a, c, g, or t
  misc_feature (95)..(95): n is a, c, g, or t
  misc_feature (111)..(111): n is a, c, g, or t
  misc_feature (139)..(139): n is a, c, g, or t
  misc_feature (144)..(144): n is a, c, g, or t
  misc_feature (148)..(148): n is a, c, g, or t
  misc_feature (171)..(171): n is a, c, g, or t
  misc_feature (255)..(255): n is a, c, g, or t
  misc_feature (262)..(262): n is a, c, g, or t
  misc_feature (267)..(268): n is a, c, g, or t
  misc_feature (272)..(272): n is a, c, g, or t
  misc_feature (280)..(280): n is a, c, g, or t
  misc_feature (285)..(285): n is a, c, g, or t
  misc_feature (288)..(288): n is a, c, g, or t
  misc_feature (297)..(297): n is a, c, g, or t
  misc_feature (300)..(300): n is a, c, g, or t
  misc_feature (304)..(304): n is a, c, g, or t
  misc_feature (310)..(310): n is a, c, g, or t
  misc_feature (312)..(312): n is a, c, g, or t
  misc_feature (314)..(314): n is a, c, g, or t
  misc_feature (323)..(324): n is a, c, g, or t
  misc_feature (326)..(326): n is a, c, g, or t
  misc_feature (328)..(328): n is a, c, g, or t
  misc_feature (332)..(332): n is a, c, g, or t
  misc_feature (350)..(350): n is a, c, g, or t
  misc_feature (352)..(353): n is a, c, g, or t
  misc_feature (358)..(359): n is a, c, g, or t
  misc_feature (364)..(365): n is a, c, g, or t
  misc_feature (368)..(368): n is a, c, g, or t
  misc_feature (374)..(374): n is a, c, g, or t
  misc_feature (382)..(382): n is a, c, g, or t
  misc_feature (384)..(387): n is a, c, g, or t
  misc_feature (389)..(389): n is a, c, g, or t
  misc_feature (406)..(407): n is a, c, g, or t
  misc_feature (412)..(412): n is a, c, g, or t
  misc_feature (420)..(421): n is a, c, g, or t
  misc_feature (441)..(442): n is a, c, g, or t
  misc_feature (445)..(445): n is a, c, g, or t
  misc_feature (539)..(539): n is a, c, g, or t
  misc_feature (557)..(557): n is a, c, g, or t
  misc_feature (608)..(608): n is a, c, g, or t
  misc_feature (634)..(634): n is a, c, g, or t
  misc_feature (639)..(639): n is a, c, g, or t
  misc_feature (641)..(641): n is a, c, g, or t
  misc_feature (652)..(653): n is a, c, g, or t
  misc_feature (655)..(655): n is a, c, g, or t
cganaaagnggganctgggtaanaaaatggttgcgggaaatgcatagcaatgncatnctntgattangcncacgccngcngaggagaatgtgatngtgaaaagaactaatnaaatgtggaagttagtgtagagggcagnacccntctnagagagaagtacagaaaaccacnttttgaaattgaatttaaaaaagaaaggaaaattgtgtaactcggctgtttctattttcataattaaaaacttttgagagtccnccccagncccgnnacanagagaccnacaancancaacgaaanccncgcnaaccancncngacccccannancnccancccaccccccatcccccncnngccanncaggnngancccaangggaaaangnnnngngaacaaacacccacccnnacccnatgtgtcnnccccgccccatagtcaaaannccnagtcacaaagcccccaatcacaccccaatcggtaccagcaaaagaccaaaaggagaggcaacgaaagccaccaacccccgtcccctaatgagtnaaagtaatgccacccatnacatagattgataacaggcctgtagtcaaaactaactgtgccaatggaccnatttaaattttttaaaaattcaaacngtggncntgaaccccaanncncagcttattaattatagattatttaattgtattagggatatgtcatgttaaatttacttttggaaaaaacttgcataagaagcataataacccagtaagttttaaaaacaatgttaatttttccttgtttagaagtaaagcaccttatcaagatataaagttaaaaaatcttgttttataactttgtaacttgagagtaatggatgctgtagtgatgtctttcacatatgtgaagatgaacaataaaattgtttatttacaagt

SEQ ID NO: 357997 - DNA, 1174 bp, Homo Sapiens
  misc_feature (803)..(803): n is a, c, g, or t
  misc_feature (880)..(880): n is a, c, g, or t
  misc_feature (1000)..(1000): n is a, c, g, or t
  misc_feature (1158)..(1158): n is a, c, g, or t
aaatcaaaaagtgaccttgctgtgtctaatatttctccaccatcaccggactccaaatcattgccaaggtcagtagagcatccaaagtggaactggaggactaaaccacaaagccgtgattttgatgaattgaatcacatccttcaggagagcaagaagctggggaaagcccttgagaatctctctcgaagtattgcaatttcagatgaactcgataaggaaacagtgacatttaattcttctcttctgaggccccgtgtgattggagaatggattggtagagaagaaaatgatgctgatcccctagctgctgaaatgctacagcctccaattccaagaagcaaaaatgaccaatgggaaagtgaagatagtggctctagtcctgcaggaagcttaaagatggagcctaagaacaaaggattaaaacagcagcaacagcaacataagaaactcctggccgcaatgctctctcaagattcttttgagtccatccacagccctaccccatctgtaacagaagaagatattgataatgaagatgatgcaatggaattgctgggcttcaaggagacaacctggaagaaaggacagaagagtcactaccaatactccattctccagatgaaaaaatcccagattcattcgattccttgcctgggactgaagaagcactaatggaggagggtgacgaatttgagaaagcatctaaactaacaggacctggagaagcctccagtggagtaggacactcactgaaaaactacatggaagaagatgaatccttaaagcaattgcaggtagtncatcaaccatggatcttgccaagtgacacagaaagtgaaggagtggaagcagaacaagagaaacgttccgctgatcntcttctttgcgttccatgctcttcttgtcctacgctggtctactctggtttgtgaaacagagagaagaagttgcaagtggtccttaaagaaatgcagttattcaaatccttatgtatagntctaattttatttactatgtgtaatcatttagagaatggttatttttataatctcaataataaacaagtactatcgtagccagggggtgcccaagtatgtaatcagagaacactaatcctggcaaaggattgtggggtggtcaggaggccggctgccntttgacatggttagag

SEQ ID NO: 357998 - DNA, 1860 bp, Homo Sapiens
  misc_feature (4)..(4): n is a, c, g, or t
  misc_feature (18)..(19): n is a, c, g, or t
  misc_feature (23)..(23): n is a, c, g, or t
  misc_feature (26)..(26): n is a, c, g, or t
  misc_feature (34)..(34): n is a, c, g, or t
  misc_feature (40)..(40): n is a, c, g, or t
  misc_feature (46)..(46): n is a, c, g, or t
  misc_feature (51)..(51): n is a, c, g, or t
  misc_feature (53)..(53): n is a, c, g, or t
  misc_feature (56)..(56): n is a, c, g, or t
  misc_feature (65)..(65): n is a, c, g, or t
  misc_feature (69)..(69): n is a, c, g, or t
  misc_feature (72)..(72): n is a, c, g, or t
  misc_feature (75)..(76): n is a, c, g, or t
  misc_feature (79)..(79): n is a, c, g, or t
  misc_feature (81)..(81): n is a, c, g, or t
  misc_feature (93)..(93): n is a, c, g, or t
  misc_feature (95)..(95): n is a, c, g, or t
  misc_feature (104)..(104): n is a, c, g, or t
  misc_feature (110)..(110): n is a, c, g, or t
  misc_feature (113)..(113): n is a, c, g, or t
  misc_feature (129)..(129): n is a, c, g, or t
  misc_feature (132)..(132): n is a, c, g, or t
  misc_feature (134)..(134): n is a, c, g, or t
  misc_feature (150)..(151): n is a, c, g, or t
  misc_feature (154)..(154): n is a, c, g, or t
  misc_feature (164)..(164): n is a, c, g, or t
  misc_feature (174)..(174): n is a, c, g, or t
  misc_feature (180)..(180): n is a, c, g, or t
  misc_feature (187)..(187): n is a, c, g, or t
  misc_feature (200)..(200): n is a, c, g, or t
  misc_feature (257)..(257): n is a, c, g, or t
  misc_feature (274)..(274): n is a, c, g, or t
  misc_feature (538)..(538): n is a, c, g, or t
  misc_feature (566)..(566): n is a, c, g, or t
  misc_feature (576)..(576): n is a, c, g, or t
  misc_feature (579)..(579): n is a, c, g, or t
  misc_feature (1020)..(1029): n is a, c, g, or t
  misc_feature (1034)..(1034): n is a, c, g, or t
  misc_feature (1624)..(1684): n is a, c, g, or t
tttnttttcccccccaanngganatngggtaagntagcgngggacngcccncnacncccctggtnctcnccngcnnccncnccttggtgcggnangtggtggangcttanatnttcttctaatctctgnacntntctgaaccccccccgnnggngaaagatttncaaaggtggnggggcntatattnaacactgaagaanactggaactcgggaaaaatgaagttgcccaagttttgtgaaaggaagaatcatcagntaccaaacctacgagantaattcggaagagaacagcacccgaggacttcctagggaaaggacccaccaaaaaaattctgatgggaaatgaggagttaacaaggctttggaatctttgccctgataatatggaagcctgtaaatcagagacaagggaacacatgcccactttggaggaattctttgaagaagccattgaacaggcagaccctgaaaatatggtggaaaatgaatataaggctgtgaacaattcaaattacggttggagagccccgagactantagcacggagaagcccccacttctcccngccacaccanccngcagtttaaaagtttaccagaatatcttgaaaatatggtaataaagctagccaaggaattaccgcctccttctgaagaaataaaaacaggtgaggatgaagatgaggaagataatgatgctctactgaaggaaaatgaaagtcctgatgttcggcgagacaaacctgtaacaggagaacaaatagaggtatttgccaacaagctgggtgaacaatggaagattctggctccctacttggaaatgaaagactcagaaattaggcagattgagtgtgacagtgaagacatgaagatgagagctaagcagctcctggttgcctggcaagatcaagagggagttcatgcaacacctgagaatctgattaatgcactgaataagtctggattaagtgaccttgcagaaagtctaactaatgacaatgagacaaatagttagcttcnnnnnnnnnnctttntattaaaactgtgatagattttgttaccaagcagcatttgataagaggtccactggttttggtaaacaataaacatttttataacaacttgttgtacagtcggctggtgctctgagaacaatagaacacatattggctcaaaccagagtttggggaggttgggttgagataatgacctaaacgaagtgacctcaagatcacaaaatatatttttttgttaagtagatgtatttataatgaagttaaataagcactatttagggatatgtcgtttcttataccaaattagtttcctgtgtgttgtttgttagtagttttacaaaaatttatcctggaaatcccagaataacactttctggaaaccctatggactggctctgttctcacttattcgtgctttcaagcagaggatcatcaaatgatggtttgttctgcctgccacgagtcttgatcattaaaattgtactggcacccagctgtgctcactcataactaactaactaactgtctatggctccagctacactatagcaacagcaaagctaaggagctgcagcactttatagcctgcaaagcctgaaataatttannnnnnnnnnnnnnnnnnnnnnnnnnnnnnnnnnnnnnnnnnnnnnnnnnnnnnnnnnnnngtccattacagaaaatgtttgtttgccaactttaaaagaaatgaagtctaaaacctcacttttccttctagccttacaaaaattgcctgacctctcaagacttttaatcacttcagggattcttgtgacattcaactgagatatatgtgaacacacctcgtgccaattcctgcagc

SEQ ID NO: 357999 - DNA, 1052 bp, Homo Sapiens
  misc_feature (43)..(43): n is a, c, g, or t
aatgcggcagataggtttatttagcggtttcagtgtgcataangggggggtacgtacaacgtacgggggatttgaatatttaaaggggtttttgaaaaagtttagaaaaaggcgccctttttggggggtcgaagaattttttgcggattttgttgggcgccaaaggggttttcctaatattttgggaggcccaaagaagggaaccccaaatttttctcaacaaaaactttccaagggtttgtggcccccccctggggaagccctattataagtgggcgccttcaaggaggggttttcaaggtccccaggcttgcctttagttggaaggattttagtggacagagaggaaaagcgatgttatggaaaaatggaagttgagatacgggcaacaggcgggattagttacagttcagcgtttgccttatttggatatggtttgaacagttcgctgttctttggttggctgaaacttagtgatgccacaagagtagggtaccgtctgtttacacgtccagtgaggctacagttctatgtacggagaaacctgtgaagctgaacttgagatatgtaaagagactgtaggcgtaaacgttaacaagtatatataggatatatacccttctacttcacatgcactgaatatgcattttattgctttactcttcattctgtggcacctacccacaggggaagtaagaagtttgttttggtatttcggaaactaaagtccttatgggatggggtctagaattgattctcctttcctgagttttactccacggagtcttaggtacctggtaaaaagttgtcttctaaattaagggtcattgctttgttgtctagctgctaatgtcttacttttgtttcttttgctttttaatcagttcttaataggatatagttttatgttttccaagttataacttggagttaatggtcactagattatcagttatgagcagtgttaaaatctcctattaatgtgtaatgtacctgtcagtgcctcctttattaaggggttctttgagaataaaagagaaaagacctacttt

SEQ ID NO: 358000 - DNA, 1251 bp, Homo Sapiens
  misc_feature (50)..(327): n is a, c, g, or t
  misc_feature (331)..(339): n is a, c, g, or t
  misc_feature (516)..(516): n is a, c, g, or t
  misc_feature (522)..(522): n is a, c, g, or t
  misc_feature (526)..(526): n is a, c, g, or t
  misc_feature (530)..(530): n is a, c, g, or t
  misc_feature (539)..(540): n is a, c, g, or t
  misc_feature (542)..(542): n is a, c, g, or t
  misc_feature (550)..(550): n is a, c, g, or t
  misc_feature (556)..(556): n is a, c, g, or t
  misc_feature (566)..(566): n is a, c, g, or t
  misc_feature (569)..(569): n is a, c, g, or t
  misc_feature (572)..(572): n is a, c, g, or t
  misc_feature (577)..(577): n is a, c, g, or t
  misc_feature (580)..(580): n is a, c, g, or t
  misc_feature (582)..(582): n is a, c, g, or t
  misc_feature (586)..(586): n is a, c, g, or t
  misc_feature (588)..(588): n is a, c, g, or t
  misc_feature (624)..(641): n is a, c, g, or t
  misc_feature (646)..(646): n is a, c, g, or t
  misc_feature (655)..(655): n is a, c, g, or t
  misc_feature (678)..(678): n is a, c, g, or t
  misc_feature (682)..(682): n is a, c, g, or t
  misc_feature (689)..(689): n is a, c, g, or t
  misc_feature (695)..(695): n is a, c, g, or t
  misc_feature (699)..(699): n is a, c, g, or t
  misc_feature (702)..(702): n is a, c, g, or t
  misc_feature (704)..(705): n is a, c, g, or t
  misc_feature (713)..(714): n is a, c, g, or t
  misc_feature (716)..(775): n is a, c, g, or t
  misc_feature (777)..(777): n is a, c, g, or t
  misc_feature (794)..(808): n is a, c, g, or t
  misc_feature (831)..(831): n is a, c, g, or t
  misc_feature (844)..(844): n is a, c, g, or t
  misc_feature (849)..(849): n is a, c, g, or t
  misc_feature (861)..(861): n is a, c, g, or t
  misc_feature (863)..(863): n is a, c, g, or t
  misc_feature (884)..(887): n is a, c, g, or t
  misc_feature (896)..(896): n is a, c, g, or t
  misc_feature (899)..(899): n is a, c, g, or t
  misc_feature (915)..(915): n is a, c, g, or t
  misc_feature (923)..(923): n is a, c, g, or t
  misc_feature (930)..(930): n is a, c, g, or t
  misc_feature (940)..(940): n is a, c, g, or t
  misc_feature (981)..(981): n is a, c, g, or t
  misc_feature (1241)..(1241): n is a, c, g, or t
  misc_feature (1246)..(1247): n is a, c, g, or t
agtcgacggtaccggacatatgcccgggaattcggccattatggccgggnnnnnnnnnnnnnnnnnnnnnnnnnnnnnnnnnnnnnnnnnnnnnnnnnnnnnnnnnnnnnnnnnnnnnnnnnnnnnnnnnnnnnnnnnnnnnnnnnnnnnnnnnnnnnnnnnnnnnnnnnnnnnnnnnnnnnnnnnnnnnnnnnnnnnnnnnnnnnnnnnnnnnnnnnnnnnnnnnnnnnnnnnnnnnnnnnnnnnnnnnnnnnnnnnnnnnnnnnnnnnnnnnnnnnnnnnnnnnnnnnnnnnnnnnnnnnnnnnnnnnnnnnnnnnnnnnnnnnnctcnnnnnnnnntcacctaacatacacattatgaatgagtattttctagaaattcaacttgctaagcctgtaatacttaagggtagtttatctagatacagtactttcttccctgataagtagtatcattggagcccttaggtataggagaagaggaagaagtttaaaaagtgtaagtgggccgggcgnggtggntcangccngtaatcccnncnctttgggnggccgnggggggcggntcncgnggtcnggngntccngnctttcctggctttcttggtgtttccccgtctcttcnnnnnnnnnnnnnnnnnnctttngcccggcgnggtggcgggcgcttgtcgtcccngctnctcgggnggctgnggtnggngnntggcttgnncnnnnnnnnnnnnnnnnnnnnnnnnnnnnnnnnnnnnnnnnnnnnnnnnnnnnnnnnnnnngngctttgtctccgtctcnnnnnnnnnnnnnnnaaagtgtatgtggtttttttgtngattcttggtctngttcnttattttttttntngggctttccctggctgctggnnnncttaggccngtnagcatctctttgtttnaagtcctncaagacnatttgaaatnattcattgttcatgccaaaattctaattactgtttttcttngcaagtgtaacataatcaggaacaatgggtacaagtaaaatcattctttggatgatattcaaagccttattagcactgcacctgaataataggtcattttgcctcactctatttgccaaagtagccatttctaagttaaggaagtttttagataggctcatagccttgtatttcgttttagattgtaagctcaatggcagggatactatattggtaattatgttttcatatagcaaccaccacagtatattcttggtgcntaatnnatgt

SEQ ID NO: 358001 - DNA, 458 bp, Homo Sapiens
aaagtgtaagtggattaaaagagaaacttggtctagttcataatatttttaatagggctttccctggctgctggaaaacttaggccagtaagcatctctttgtttaaagtcctacaagacaatttgaaataattcattgttcatgccaaaattctaagtactgtttttcttagcaagtgtaacataatcaggaacaatgggtacaagtaaaacattctttggatgatattcaaagccttattagcactgcacctgaataataggtcattttgcctcactcatttgccaaagtagccatttctaagttaaggaagtttttagataggctcatagccttgtatttcgttttagattgtaagctcaatggcagggatactatattggtaattatgttttcatatagcaaccaccacagtatattcttggtgcttaataaatgtttataattgttaacaata

SEQ ID NO: 358002 - DNA, 1029 bp, Homo Sapiens
  misc_feature (9)..(9): n is a, c, g, or t
  misc_feature (16)..(16): n is a, c, g, or t
  misc_feature (19)..(20): n is a, c, g, or t
  misc_feature (25)..(25): n is a, c, g, or t
  misc_feature (31)..(31): n is a, c, g, or t
  misc_feature (49)..(49): n is a, c, g, or t
  misc_feature (68)..(68): n is a, c, g, or t
  misc_feature (79)..(79): n is a, c, g, or t
  misc_feature (87)..(87): n is a, c, g, or t
  misc_feature (101)..(101): n is a, c, g, or t
  misc_feature (105)..(105): n is a, c, g, or t
  misc_feature (112)..(112): n is a, c, g, or t
  misc_feature (115)..(115): n is a, c, g, or t
  misc_feature (168)..(168): n is a, c, g, or t
  misc_feature (193)..(193): n is a, c, g, or t
  misc_feature (201)..(201): n is a, c, g, or t
  misc_feature (324)..(324): n is a, c, g, or t
  misc_feature (359)..(359): n is a, c, g, or t
  misc_feature (395)..(395): n is a, c, g, or t
  misc_feature (405)..(405): n is a, c, g, or t
  misc_feature (409)..(409): n is a, c, g, or t
  misc_feature (421)..(421): n is a, c, g, or t
  misc_feature (430)..(430): n is a, c, g, or t
  misc_feature (442)..(442): n is a, c, g, or t
  misc_feature (449)..(449): n is a, c, g, or t
  misc_feature (461)..(461): n is a, c, g, or t
  misc_feature (464)..(464): n is a, c, g, or t
  misc_feature (472)..(472): n is a, c, g, or t
  misc_feature (477)..(477): n is a, c, g, or t
  misc_feature (484)..(484): n is a, c, g, or t
  misc_feature (489)..(489): n is a, c, g, or t
  misc_feature (548)..(548): n is a, c, g, or t
  misc_feature (551)..(552): n is a, c, g, or t
  misc_feature (559)..(559): n is a, c, g, or t
  misc_feature (566)..(566): n is a, c, g, or t
  misc_feature (571)..(571): n is a, c, g, or t
  misc_feature (601)..(601): n is a, c, g, or t
  misc_feature (614)..(614): n is a, c, g, or t
  misc_feature (622)..(622): n is a, c, g, or t
  misc_feature (631)..(631): n is a, c, g, or t
aaacctatngctgatnccnnccccnatgggnaatttggaaataggaaangttcttaaacggaaaaatngcaattctggngtaaatcnaaaaacagtatatncaanactgtgnccngaaatgatatttcttcagaatgtaaggaattcagattatttctaggagtctangaatgttttctatactgcctgtcanactttgtntactgaagtattttgtatggtcatttaaattaaccctctcagttaattgtcccctgtaaacgatgtgtgcagtgtaaattgtgtaattatgcatatatatatttataccaccatggactcacnctcacactcggaaatttgtggtgtttccccccagnggaagccccttaaccgccgaaaattacccggccgcnaattgccctngggnaattaccacacngttgtaacnaaagggctggcnagtgacnaaatgtccattnccntttggttngcgtngctaccnccgtngccgggccgccctaacattgagagttgagttgtggacctagccactgagtgaatgttgnacnnccccccntgaatcngcgtnagagtcaaatgggggtttaatgtgaatgcnaaatgaatatgcnacatagtntcaaatggnacatagaaatttcacttttgaaaataataaacccacaacctaattgcatggttttgggctgaccgccctgtcccattcatgattttaccccctgcccagcttgcagatacatgcatttgaattttagtagtctgtcatatttaaaatcccacatatgtgagttaaatatgcaataaagaatacgccttgctgattagccacacccaggcaatttaatatccatggtcttctataatgtttataccacattgtaaatattcagagaacttgttttaaagtttatgctttctgattctgtgattttcaaaagaggaatttttttggaaattaaggactatcgtttgataattatatatgtaattaagatttagccaagcattaaattaatttttaaatat

SEQ ID NO: 358003 - DNA, 892 bp, Homo Sapiens
ggggatgtttccccaaacaatggttcatgaatctgaaaggagaaaggactatttctcagttagagagtgtttgccgataccttgtacacttagcggatacaatttatagaaatagtatcgggtgttctgatgtggaaaaaagaaatgcaagggaaaacataaaacagatagtaaaactccttgcaagtgttcgagctttggatcatgctatgtctgttgcaagtgaccacaatgtgaaagaatttaagtctttgatcgaaggaaaatagatctatgagactgaaaaacctatttgcttgattaccattcccaatgtgtaaattttgtatatatgtaaagtttcttaaactgtaaaatagcaattcttgttttaatacaaaaaacattatattcaatactgtgtccttaaatgatatttcttcagaatgaaaggaattcagattatttctaggagtctatgaatgttttctttactgcctgtcatactttgtttactgaagtattttgtatggtcatttaaattaaccctctcagttaattgtcccctgtaaacgatgtgtgcagtgtaaattgtgtaattatgcatatatatatttataccaccatggaccttactttcacactgggaaatttgtggtggtttttccacagaaggaagccttttaacaggcagaaaaattatccggtaggcaaattgtcttagggagaaattactacactgttgttaacaaaagggctggcaagtgactgaaatgttcattacctttaggttagcgttgctatcactgtagctgtgctggccttaacattgagagttgagttgtggacttagtcattgagttgatggttgaactttttttccttgaatcagggttagaagtcaacatgtggg

SEQ ID NO: 358004 - DNA, 2049 bp, Homo Sapiens
  misc_feature (1388)..(1430): n is a, c, g, or t
gaagaatcaaggatcccagaccaggatacgataccttgccaagggatagaggtcaggaagactatatcccacctgcctatacagctgtggtgtgttgaaagacccctggacttaaagtattcatccagtggtttaaaaacccaacgaaatacatcaataaatatgcaactgccttcaagagagacaaacccctattttaatagcttggagcaaaaggacctggtgggctattcatccacaagggccagttctgtgcccatcatcccttcagtgggtttagaggaaacctgcctgcaaatgccagggatttctgaagtcaaaagcatcaaatggtgcaaaaactcctattcagctgacgttgtcaatgtgagtattccagtcagcgattgtcttatagcagaacaacaagaagtgaaaatattgctagaaactgtccaggagcagatccgaattctgactgatgccagacggtcagaagactacgaactggccagcgtagaaaccgaggacagtgcaagcgaaaacacagcctttctccccctgagtcccacagccaaatcagaacgagaggcgcaatttgtcttaagaaatgaaatacaaagagactctgcattgaccaagtgacttgagatgtaggaatctgtgcattctatgctttgctcaacaggaaagagaggaaatcaaatacaaattatttatatgcattaatttaagagcatctacttagaagaaaccaaatagtctatcgccctcatatcatagtgttttttaacaaaatatttttttaagggaaagaaatgtttcaggagggataaagcttaccattaaagcttttggggtaggaattctggaatccaatttcgtttagtcccaacactgtcctctttgggctcttaggaagatgtgggggcaattcaggacccttgggccccacagtgccagtgtctcattaaaaaacactggcagttacctggtttcaaaaagaggagagctgcatcccgcaggtggatgcaccagtgagcaggtggctcttgccatttggcttgccagtcccaagccctaaatttctattcacccaatagcctcatcacaggttatgtcatgtcgacacatgtagtgttttctatttgatttttggagaatgccacaaaagactctgcaatgggaaggaggacaggagatagaaggagaaaccgggggcaatcttaactactcttgtgtgccaccttcctctgagatttgaatgcacagatctcagatggaggtatgaaattattacagaaaaagagacaaaaaaatccttatatcgtgtcactaaaatcatgctaatagaaatgtttttccttgagattgtttagaggctctggaggagcgtttctcagtttttnnnnnnnnnnnnnnnnnnnnnnnnnnnnnnnnnnnnnnnnnnngactcgctcacgcgggcacatatgctgtaagcacatgtgttcattgtgcgtatgtgtgtgcatgtgtgcgcgtattacgcttgctaaaatttgttctgaaacatcagggaatctactattcagaaaaattattccccccttagatcttttcactttaaatttttccattaagtataaagttcagttagttcttaaatcaaggtcacttgcatggtggggtcgtataaaacccttgacactgtctagaccattttctgatgtgaatacttttgagaggatcaactattggctcattaatgatatcagtatcataaggtgagttcatcaaggatgtgtgtttattttgaatcatgcctacttaaattattaatacaagacaattaacaaattgacagttaccatttgctttctcatcattctcattaccatttattttatagcaagtctgctatgtgtggaccagggcttcggcttctgtggttagtatgggaagaataaattgttgaaataaaaatacccagactattcagttcacaagaagccccccaaaagaacagtaaattgtgttgtatgttcatttggaataaagcaatatttttaccactgctaaggtgaactg

SEQ ID NO: 358005 - DNA, 528 bp, Homo Sapiens
  misc_feature (13)..(13): n is a, c, g, or t
  misc_feature (42)..(42): n is a, c, g, or t
  misc_feature (70)..(70): n is a, c, g, or t
  misc_feature (104)..(104): n is a, c, g, or t
  misc_feature (138)..(138): n is a, c, g, or t
cggaaaaaatatncccccccaggacctttccacttaaaattncccccataagtataaggttccggttagnccctaaaaccagggtccacttgccagggtggggnccgtataaaacccctggacactgtccaagacccnatttccggatgtgaaatacctttgaagaggatccaactattggcctcattaatgatatccagtatccataaggtgagttccatccaaggatgtgtgtttattttgaatcatgccctacttaaattattaatacaagacaattaacaaattgacagttacccatttgctttcctcatcattcctcattaccatttattttatagcaagtctgctatgtgtggaccagggcttcggcttctgtggttagtatgggaagaataaattgttgaaataaaaatacccagactattcagttcacaagaagccccccaaaagaacagtaaattgtgttgtatgttcatttggaataaagcaatatttttaccactgctaaggtgaactgaaaaaaaa

SEQ ID NO: 358006 - DNA, 1059 bp, Homo Sapiens
  misc_feature (3)..(3): n is a, c, g, or t
  misc_feature (5)..(5): n is a, c, g, or t
  misc_feature (10)..(10): n is a, c, g, or t
  misc_feature (15)..(15): n is a, c, g, or t
  misc_feature (19)..(19): n is a, c, g, or t
  misc_feature (31)..(31): n is a, c, g, or t
  misc_feature (34)..(35): n is a, c, g, or t
  misc_feature (39)..(39): n is a, c, g, or t
  misc_feature (41)..(41): n is a, c, g, or t
  misc_feature (43)..(43): n is a, c, g, or t
  misc_feature (45)..(45): n is a, c, g, or t
  misc_feature (49)..(49): n is a, c, g, or t
  misc_feature (52)..(52): n is a, c, g, or t
  misc_feature (55)..(55): n is a, c, g, or t
  misc_feature (59)..(59): n is a, c, g, or t
  misc_feature (62)..(64): n is a, c, g, or t
  misc_feature (94)..(94): n is a, c, g, or t
  misc_feature (119)..(119): n is a, c, g, or t
  misc_feature (127)..(127): n is a, c, g, or t
  misc_feature (143)..(143): n is a, c, g, or t
  misc_feature (188)..(188): n is a, c, g, or t
  misc_feature (263)..(263): n is a, c, g, or t
  misc_feature (272)..(272): n is a, c, g, or t
  misc_feature (277)..(277): n is a, c, g, or t
  misc_feature (279)..(280): n is a, c, g, or t
  misc_feature (282)..(282): n is a, c, g, or t
ccntngacanccctnattnagcagaaggagnccnnggantngngntgcnttnccngctnccnnncctgaaaaggccccccaaaagtgtggcccnagttttctctattttgggccatctntgtacccntcccaagggcacttgntgtgtcccctagtgtgtgactccctggcctcataaggacgagttntctgaaatcccagcgttaggtctggggagatggagaagctgaaactggggagctgcaccacaaacgtctagctantcgcagagntgggngnnangcctggccgcccaccccaacctggggctgccttcccactccgtgagatgcttctgtctcctgttcactttgtgtggtagtttcttattttcaaaatgcatctcatttgatcattactgtgaccttgggaagcagcaggacagggatttctttttagaggtgcaaactgctcagaggggacacacctcagcctctcactgtgggtacacgtggcgtgccatgagtggggaagagcaacaggcgagatgcctcattctactggaacatcactgtgggtgaacagagatttccaggttttccctcttaaaatatttgtcccacaccgacaagagtccagtcaccaggcctcaaaggaacttctgcttgtagcagccgcctcccctgtgccccagcctccttaatgtgtgcactctcagagggcacagctcgcgaggctgggtttgggggccaagtggcttgttcattccagcatctaacatcataaaggtgggcccagatttcttgattcgaccacagtgctgttcctaccacacaaatatccattcctgttttgttgaagcagccactggtcctcttgtttcccctgcagacggagggacctggcagtgcccattcattcagccccctcatgcatacttttattaggcgatagactagttaagaaaattgtttctatgtactgtatattttgtacctgtttacacttctaatattgatataactgatattttgaaaaataagagaaaacatcctgttaaaataaaacctaaccagcacc

SEQ ID NO: 358007 - DNA, 818 bp, Homo Sapiens
cttgcctgtgtgtctgtattttgggtaaggaggggaggtctgaaaaagactttggggctttttcttctgtttttcatgacaatgtaatttgtgtaactgttgaatctggaaattgatcagcattaaagggcacatgaagcagtgtctgcaggcgttcagtgctgcggagcctgttaaaggtcactcagatgtgcaggtgttaatcttctctaaaagcctggtgatacagctctggctttctgagcacactacggatctggaaaatactggaaaatgtgatacttagaatactttggctgctaaggaaacttcctctccattgcagaatagctgagccaagtgagtgagtttgcagaaagcaggtggtgagctcctgcctgctgaaggttgccatggaggcccaattcctgcccggaaacagcaccgtcctgcagggagccacttggcagaagggtgcagggctgctggtgtcagagcaagagggctacagggaaagggccctttctcaggggatgtagcttttttaaaagatttgggaacacttggaggatttgctaaaatgagcctcagaaggaaaattggttttctaacctgtgactttttgaaatgaattattcctttcagtctttatttttcaaagaaacaatgtgtattgaagtacctagatttgtttgataatcaacaaatctttcctttttcaatgaacatattctgaatgtggtttctgtcttagaccaggaggacagagtttgctttcatattttccctgtaagtaagagggcttatttattttaaataaagagtaattattaaatttt

SEQ ID NO: 358008 - DNA, 1170 bp, Homo Sapiens
  misc_feature (15)..(15): n is a, c, g, or t
  misc_feature (20)..(20): n is a, c, g, or t
  misc_feature (30)..(30): n is a, c, g, or t
  misc_feature (42)..(42): n is a, c, g, or t
  misc_feature (45)..(45): n is a, c, g, or t
  misc_feature (52)..(52): n is a, c, g, or t
  misc_feature (61)..(61): n is a, c, g, or t
  misc_feature (63)..(64): n is a, c, g, or t
  misc_feature (82)..(82): n is a, c, g, or t
  misc_feature (85)..(86): n is a, c, g, or t
  misc_feature (101)..(101): n is a, c, g, or t
  misc_feature (105)..(105): n is a, c, g, or t
  misc_feature (112)..(295): n is a, c, g, or t
  misc_feature (308)..(340): n is a, c, g, or t
  misc_feature (511)..(512): n is a, c, g, or t
  misc_feature (522)..(522): n is a, c, g, or t
  misc_feature (530)..(530): n is a, c, g, or t
  misc_feature (579)..(579): n is a, c, g, or t
  misc_feature (605)..(605): n is a, c, g, or t
  misc_feature (610)..(611): n is a, c, g, or t
  misc_feature (626)..(626): n is a, c, g, or t
gaaccctgtgcttgnacatncccttattcnggccgggctggngcnccccccntatcccccncnnatgggtggccatggcggnggnncatgggttccggggntcgngaccatnnnnnnnnnnnnnnnnnnnnnnnnnnnnnnnnnnnnnnnnnnnnnnnnnnnnnnnnnnnnnnnnnnnnnnnnnnnnnnnnnnnnnnnnnnnnnnnnnnnnnnnnnnnnnnnnnnnnnnnnnnnnnnnnnnnnnnnnnnnnnnnnnnnnnnnnnnnnnnnnnnnnnnnnnnnnnnnnnnnnnnnnagagtctgtctcnnnnnnnnnnnnnnnnnnnnnnnnnnnnnnnnntctcattatttcaaaatgatagacatataccaaaaacaagtctataatgtgagtagttactaaaatttacacatcttaaaagtgtgtaaatgcttaaatttcagaattaccactccgcacctcaattgacatccctttgaataggctaataagtgacaaataagattaatnngatttctcanaatcgccnggactggtgaatataaatgatgattgaactggaataatattggggaccnaatcaaatgaatgattaaattatgangcccnnacccttttgaaggtngttgcaaagagacatttcaaaactgccctaggccattgcagcatccttagatgggacgcataatcattaccttaaagcatcaccactcattttgaccatatagattttattatgttagtttaaaaggtcaatcagcctcatgactttatagttatgtcttgtatttaaaaacattttttatacatttggttatgttgataaaccaaaaacatttgattaataaaatatctatttgaataaattatgagctatcctttcaaacagctattggcaagttttaaacccaaaatatatacacatagttctgtaataaaactgtgtgacttctcaagtaacatgacttccttatttctgaacagtactggttactttcaaaatgaatttttattgagattttccattaactatttttttcaaagactcaaattttgtaccaagtaaatccaggctttatgtacaaacatgttgtttgttttatttggggctgggggaggtatatgatgagcagacttctcggaattcataataaattttctaaaagcct

SEQ ID NO: 358009 - DNA, 1061 bp, Homo Sapiens
  misc_feature (9)..(9): n is a, c, g, or t
  misc_feature (14)..(14): n is a, c, g, or t
  misc_feature (16)..(16): n is a, c, g, or t
  misc_feature (23)..(23): n is a, c, g, or t
  misc_feature (30)..(30): n is a, c, g, or t
  misc_feature (53)..(53): n is a, c, g, or t
  misc_feature (55)..(55): n is a, c, g, or t
  misc_feature (62)..(62): n is a, c, g, or t
  misc_feature (64)..(64): n is a, c, g, or t
  misc_feature (72)..(72): n is a, c, g, or t
  misc_feature (74)..(74): n is a, c, g, or t
  misc_feature (86)..(86): n is a, c, g, or t
  misc_feature (112)..(112): n is a, c, g, or t
  misc_feature (127)..(127): n is a, c, g, or t
  misc_feature (136)..(137): n is a, c, g, or t
atgaatacnctgantntttggtncctttcnatacaactgggtttgaatttgcngntcacacnantatgtgtnantggcgctgtgtntcttttataaaacctcttgcttgtgncaaaagttcctaaanggaacacanntatgcctatccattactagcatgctatgctgcatgctttactgccattgctgtatgctttactgtctttgtaaaaatccccctctccccttttctggtaactggaaaagcatgctaaaaatagtcttatattttcaccccataagtgcagaatcagtaattccttggcttaaagctcttatataatcaatattattggtggtaaataccaagtttggtatctcatagctatctttttttaaagaaattaagttcttgaaaatttagccaaatcccgttttatgggaatgctctttagaattcattttgttcagcccctttgttctatggttgagaaatctgaggccttacgaaggttaagagaactttccccgtgtctcacaggtaggtagaggcagagctggaactagatatctggtctgttgactctagctcagtgtcttctggtaactgttgaaaattgtcttagtttgagagatggctgaaataatgaacataaaatgctatttataataacaagtatatgtgaaatttcttattgtaagactactaccggcttactgttgaatagtttggttatagtgtttaggctagaaatgcctcccacattggtaataaacattacaaaatacaatgtatttttaggtaggcattttataaaatgcattatgccatggttgcttttgagatagattgtagtctgggtagcatctttaaaatgtatgtgggcttaactgttgttcatatcaggagatgctctgattgtataggtgagactctgtttctgttatttttaattgctgtatgaaatgtgatcagattattttactaccaacagttatagtttgaaagtccaactgtattaattgactgataatatgataatatagagattaaattgtttgtcttcattccttaaaaaaaa

SEQ ID NO: 358010 - DNA, 1615 bp, Homo Sapiens
ggcccagagaacagcagagtcagttacacctgcagctcttgtctaaagtgattagatggccaccctcaccactgtccagtccagcagcagcctggctgccttgtcatggcctcctgggggcagaaggcgatgtggaccacgggatttgtagccagccagctcccaggccaacgcccaaagccctgatgacctggttcttctgaggccctcaacctggcatcttagggtatggtcaggcaacagggtgaccagctgtcctggtttcccaggacatggaactttcaatgctaaaactgggacagtacccagcaagtggggatggttggtcccctaccaggagagggcctggggctctttgcttcccgagaacgcctgtggcttgaagaaccttgactgcttggtcctcaggtatctacctcccaccttctcctcatctgtggagcaagccaactcagtgccccagaccccacctgatctgcatctttgtttgcatctccagagacacctgaggccccagagcttgaggcaaagccaggccgtccaaatcctgtgtgccgtggacgagtggccactttactactcctaaggctaagatgttgagagctcagaccactgctcagagcagtaatccctgctcagaatgctcccagttccctcgtccctgcccaggtctcttgtctcttgggaaggaactgataggtcgggccattgttgggccatcactgagcgctcagtatctcaagagactctgttcattctgctcgtatcccaaggcctggttggtcaaactctgggcaaagggttttcaggatgaggaggtcaagacaggatgtccagagctaccgagttcatctgtgggtgttgggggcaagtgggggctgaagtcctgtgcaggctgcgctggccccacctgccttgtgccctggagtggggtttctccttgttgaagaagaggcatccttctctgatgttgcacaaacacaatgtattgaccagagcctttgcaactcaaagtgtggtctgtggaccagcagcggcagtgacacctgggagcttgttaggaatgcagagtctaggccccaccctatacctcccgactcagaccctgcattttagcaagacccccagctgattcctataagcactttagagtttgagaagcaaggacctaggctggggatgtcccccgagcagagggtgaagtttctctcagttctctccctgccacttccagggatctgagcctgtgttcagcctcctccctaacccaccctgggagacacttggcctgttagattgttccagagtctgcatggcactcctgaagaagggagtgtgacctgcagtcaccaggagatgagggttaggtgtgcccagccctccagacccggcctttctggttaacccctgcatgccaagctgcctgctgccccaggtcctcacctcaggcctttgaaggggcagcttctggaagttgttttctcctctgcttggagagtttgcccttgtctgtcttggaaagtgtgggcagccacagatgcccccaaatcagagctcacagtgagtgagcccctaagcttcagtctgcaataaagaatgcattggtttcatctgc

SEQ ID NO: 358011 - DNA, 462 bp, Homo Sapiens
  misc_feature (13)..(13): n is a, c, g, or t
  misc_feature (31)..(31): n is a, c, g, or t
  misc_feature (37)..(37): n is a, c, g, or t
  misc_feature (46)..(46): n is a, c, g, or t
  misc_feature (60)..(60): n is a, c, g, or t
  misc_feature (75)..(75): n is a, c, g, or t
  misc_feature (89)..(89): n is a, c, g, or t
  misc_feature (118)..(118): n is a, c, g, or t
  misc_feature (168)..(168): n is a, c, g, or t
ctaagctggggangtcctccgaacaaaaggntgaaanttcctcctnagttctctccctgncaacttcccaggganctgagcctgtgttnagcctcctccctaacccaccctgggaganacttggcctgttagattgttcccagagtcctgaatggaactccctgaaanaagggagtgtgacctgaaagtcacccaggaaatgagggttaggtgtccccaaccctcccagacccggcctttctggttaacccctgcatgccaagctgcctgctgccccaggtcctcacctcaggcctttgaaggggcagcttctggaagttgttttctcctctgcttggagagtttgcccttgtctgtcttggaaagtgtgggcagccacagatgcccccaaatcagagctcacagtgagtgagcccctaagcttcagtctgcaataaagaatgccattggtttcaaaaaaaa

SEQ ID NO: 358012 - DNA, 1157 bp, Homo Sapiens
  misc_feature (2)..(2): n is a, c, g, or t
  misc_feature (5)..(5): n is a, c, g, or t
  misc_feature (14)..(14): n is a, c, g, or t
  misc_feature (17)..(18): n is a, c, g, or t
  misc_feature (20)..(20): n is a, c, g, or t
  misc_feature (23)..(23): n is a, c, g, or t
  misc_feature (26)..(26): n is a, c, g, or t
  misc_feature (29)..(29): n is a, c, g, or t
  misc_feature (35)..(35): n is a, c, g, or t
  misc_feature (41)..(43): n is a, c, g, or t
  misc_feature (53)..(53): n is a, c, g, or t
  misc_feature (69)..(70): n is a, c, g, or t
  misc_feature (89)..(89): n is a, c, g, or t
  misc_feature (93)..(93): n is a, c, g, or t
  misc_feature (123)..(123): n is a, c, g, or t
  misc_feature (1037)..(1112): n is a, c, g, or t
  misc_feature (1146)..(1146): n is a, c, g, or t
tnccntagctgggnagnngnaanaanagnaagaancagggnnnccccccacanaatgggacccaagggnntaattggaggcacgagggncccncccccagggccttttcctcctctgcgtctnccatctactgaaatgggagaggggttggggagcttctgttctggtgaagggacccgggcaggccccctagcaccaccatgctgactcgcgagaaccccagatctctggggcccagccacgcagagtgtgggggcaactgtgccaatctacctcacaggcccaccccctgccgggcatgccgtgggatcatggacagggaaggctctggggatcggagacaccgcggcctagcacccccagccagaacaccctgagggtctcggggctctggagagagtggggcgggaggaagaattggcaccttcctagggaaggagacgagcgcttcgccttgattctccgagaagcctccgagaagtgctttaagtgtgtttgcatgcgccaggcggtgggcagcgggggcctgtccagccctctcccgccatccttccccaagtgacgtccactgccttgtcaccagcgacctgcctgtcatgcccaccccctgaggaagcatggggaccctaacaccctggtgccctgcaccagacaggccgtggtcaggcccaggccaccggccgggttctgccacagcttcccacgtgcttgctgacatgcgtgtgcctgtgtgtggtgtctgttgctgtgtcgtgaaactgtgaccatcactcagtccaaacaagtgagtggccctcgaggccacagttatgcaactttcagtgtgtgtcataacgacgtcactgctttttaaactcgataactctttattttagtaaaatgcccaggagtcctggaagctacgcggacttgcagaggttttattttttggccttagaatctgcagaaattaggaggcaccgagcccagcgcaacagcctcggacccggattgcgtttgccttagcggatatgtttatacagatgaatataaaatgnnnnnnnnnnnnnnnnnnnnnnnnnnnnnnnnnnnnnnnnnnnnnnnnnnnnnnnnnnnnnnnnnnnnnnnnnnnnaaagctacttcttcattccgtggtacgattattnttttaattaaa

SEQ ID NO: 358013 - DNA, 1620 bp, Homo Sapiens
  misc_feature (331)..(373): n is a, c, g, or t
ggggtcctttttcatttgtctgcttctcgctcccttccgtgttctgttccctcttcctccctcttccctgggcctgtttctcgctgtccctgtcttttatccttctcatctgcctcttttttgctcaccctgtttctcactgccctcccctccgcctttctcacccctctgtccttttgagctcttttttgctctgtctcttcatttgccttttgcactctcaaactctttcatcttcccattcgctgtctgtatttctccataactatatctttcttcctctgtctccgcccacccacatttttctctttccctttctctctttggggannnnnnnnnnnnnnnnnnnnnnnnnnnnnnnnnnnnnnnnnnngtcttctcatccctccattcccatctttccccagcaattaccagctctggctgggtcgccacaacttgtttgacgacgaaaacacagcccagtttgttcatgtcagtgagagcttcccacaccctggcttcaacatgagcctcctggagaaccacacccgccaagcagacgaggactacagccacgacctcatgctgctccgcctgacagagcctgctgataccatcacagacgctgtgaaggtcgtggagttgcccacccaggaacccgaagtggggagcacctgtttggcttccggctggggcagcatcgaaccagagaatttctcatttccagatgatctccagtgtgtggacctcaaaatcctgcctaatgatgagtgcaaaaaagcccacgtccagaaggtgacagacttcatgctgtgtgtcggacacctggaaggtggcaaagacacctgtgtgggtgattcagggggcccgctgatgtgtgatggtgtgctccaaggtgtcacatcatggggctacgtcccttgtggcacccccaataagccttctgtcgccgtcagagtgctgtcttatgtgaagtggatcgaggacaccatagcggagaactcctgaacgcccagccctgtcccctaccccccaaaaaagctacttcttcattccgtggtacgattattttttttaactaaaggaagataaaattctagccaaatattacacatcacaaaaacataagtccaatatgccagcacttgagtaaagaataaaaagtacgacaatcaaagctggttatataattaattctctatctcgtccgcccccctagccccctccaagatttggatgaaattcttttgggcccctgagccctctaggttaaatatacggtgcccgaccctttgccaggaaatcccggcccacatttgggattggacttccccccctttaaaacggccgggagggattccgtcgctttccaagaatcccagtgggttttccggaggactgtgggggccttttcccccggagaacctccacccaatgcctgattaaaaataaccccccgggtgtcccccttttccggcaaaatccgtttttatatgttaatagcttttctagggaagatggagatcctttacaaacggggtgggtagaatacctttaatttgcccttgcggatttatagagcctttttgcccccttggcaaattaaaactttcctcagtcggggaaacacgcggcggt

SEQ ID NO: 358014 - DNA, 1240 bp, Homo Sapiens
aaatatgtagaatttcatttaaataagtcagtcaacaattttttataaagtatttaacacttcattgtagaaacataggcaaaatgactatattataaccaaaatgaaaaatactgttcaatttaaaaaatgtacttaaacaagaacctgaaaaagtttatgatatgcataacattgttcaagcaaaattgcactagtattacataaatcaatagtttataaaggcctcaatatggcaaagtttagaaataggtagtatgcatgcacatagtacaacaaaaagtcttcttataaaacagcagtttttttaatgcttgtacaaagggataaagagcaaccacatatttaacatatttcatctgttaggttaatacattatgacagctaaaagtcagtcatgtctatcagaggaacaaaaagccctccaaaacttgtgaataaatcttttgtgcctttaaagatatttgtataaaaatgctatccttttatttttatataccacttaaataaatcgcactcgtttccactccaatttggaggttaaccaaccaaacgtgaatggggtccatgcgttctgtaaaacccagagaaacctgaataccagagcaactggcacagcatttcgactctccacttttgattatgggaagatcattgttcttctacaacttggaaggcccttgaatatattttggatagggcaaataatgggttgctcatattaaatcttgaaaaatatttgccaatcactctgtatactaaaatgtctgctttgccctttgtttttggacctagcaaagaggatgcgttcacgtaattgaaattctgtcaccaatttgtgtgcttatatgttattctttagtgttcagtgtagtgtaaggggttgggttaatcttccacaaaatggatgtgactgggaagaaatacctaagatgcaagtacccaatgccctgttgtgctctaggctggctatttatctcgagactgagggagaataaaaggtcttattccatagcaagtgcagtcggccaactttcggttatatttttgctatgttctaccacctaaatataactattgcttacaaggtgtatacatttagtacatcacatagagtccactaagttttggaaaatgtagtcatctgtgttcatgcaaattattaattttacatatttttaatttttttcctcaaaattctcatctattggttggcaatctaaggctaatttcaaagcag

SEQ ID NO: 358015 - DNA, 1394 bp, Homo Sapiens
  misc_feature (824)..(850): n is a, c, g, or t
gagctttctgtgaagagggctgcagatacggtggaacgtgtgtggctcccaacaaatgtgtctgtccatctggattcacaggaagccactgcgagaaagacattgatgaatgtgccttaagaactcacacctgttggaacgattctgcctgcatcaacctggcagggggctttgactgtctctgcccctctgggccctcctgctctggtgactgtcctcatgaaggggggctgaagcacaatggccaggtgtggaccttgaaagaagacaggtgttctgtctgctcctgcaaggatggcaagatattctgccgacggacagcttgtgattgccagaatccaagtgctgacctattctgttgcccagaatgtgacaccagagtcacaagtcaatgtttagaccaaaatggtcacaagctgtatcgaagtggagacaattgggacccatagctgtcagcagtgtcggtgtctggaaggagaggtagattgctggccactcacttggccccaacttgagctgtgagtatacagctatctgagaaggggaatgttgcccccgctgtgccagcgacccccgcccagccgataacaccacctaggacatcagaaaaactggcctggacagcaatggtgtttcacggcttagtggcccagtgtggacgatggctggacccccccgcacaaccgggaaaggcaagaatggaagagtctgttgttctggggattttgagtgcccccaaaaaaattgaagtattaacaggggacacaacgcagaagaatggacgaaaagaccacccaacgtgattaaggataggaatcggtagnnnnnnnnnnnnnnnnnnnnnnnnnnnttaaccacagataattgccaaagttcccacctgaggacggtgtttggaggttgccttttggacctaccactttgctcattcttgctaacctagtctaggtgacctacagtgccgtgcatttaagtcaatggttgttaaaagaagtttcccgtgttgtaaatcatgtttcccttatcagatcatttgcaaatacatttaaatgatctcatggtaaatgttgatgtattttttggtttattttgtgtactaacataatagagagagactcagctccttttatttattttgttgatttatggatcaaattctaaaataaagttgcctgttgtgacttttgtcccatctactgcatacttagtgctgagatccctgtaaaatgttttgatgaaaatatgtatgtagagtccagtcgcattatacatacatttcatagtgctgaaccttcttaaatgcctactcattcagcttaaaacaggctgaagccaagtatgacaaagaggggaagggccaaaaacataatcaaagaataattttaaagagaatt

SEQ ID NO: 358016 - DNA, 727 bp, Homo Sapiens
  misc_feature (282)..(282): n is a, c, g, or t
  misc_feature (588)..(678): n is a, c, g, or t
aaaacaagatctgggtgctagacatactgatctgctgctgaaatataattgcttctaggccctctcagttgacatagcaaaaagatatatgtgtatataatacccatacatatataaagtatttatggaaatataaatatttctgtatataaccatctgtatttatataaggctaaacataaatttatactagtgtctccaactacagtctattactgcatggatcattctagcctccccttgcttatttgtaaccttctactccaactgtgagaaacctgnctcctactatctgccatccattttactaattgtttattaattatataaatatatagtggcttcaaaattgtaaacctgtgcccctgtggaaaacaactttatcaactggagtagagtgctatgtacagttccttttgcctttggtcttacagactccactcatttccaaatttacctatgtcagtaccttattcccccatccctttcagtgagattgtttcatacatttgtgatacattaaaattcttttctcacattctgcatttggggactgctattgtaaatggtacttttacatttcaagtnnnnnnnnnnnnnnnnnnnnnnnnnnnnnnnnnnnnnnnnnnnnnnnnnnnnnnnnnnnnnnnnnnnnnnnnnnnnnnnnnnnnnnnnnnnctttggcagccatgtcaactgcagataaagacagtttatttcttccttt

SEQ ID NO: 358017 - DNA, 602 bp, Homo Sapiens
  misc_feature (4)..(4): n is a, c, g, or t
  misc_feature (33)..(33): n is a, c, g, or t
  misc_feature (47)..(47): n is a, c, g, or t
  misc_feature (92)..(92): n is a, c, g, or t
tgcnccgtggctggcggcgagcccccggtcacnttcctccgcacggnagaggggccggacgccaccttccccaggaccattcccctgatccnacagttgctaaacgccacggagctcaagaaggacccggccgcctaatcccagctggtggccgtgttggtctacaccgccgagcgggccaagttcgccaccggggtagagcggcaggactggatggagctgttcattgacacctttaagctggtgcacagggacatcgtgggggaccccgagaccgcgctggccctctgctaaagcccgggcacccgcccagccgggctgggccctccctgccacactagcttcccagggctgcccccgacaggctggctctcagtggaggccagagatctggaatccgggtcagcggggctacagtccttccaggggctctggggcagctcccagcctcttcccacgctggtggccaccgtgtcccttgctgcggctgcatcttccagtctctcctccgtcttcctgtggccgctctctttataagaaccctggtcattgaatttaaggcccaccccaagtccagaatgacctcgcaagacccttaactc

SEQ ID NO: 358018 - DNA, 873 bp, Homo Sapiens
aattcggcacgaggcggcacgagggtctgcctagccctgttggcgggctgaccctcgacctcccagacaccacaattgtgccttctgtgggccaggcctgccatgactgcgtctcggctctggccatgagctctgcccaggcccacaagcccctcccctgggctctcccaggcagggagaatggggagagggacctccttgtgtctggcagagacctgtggacctggcctccccactcccagctctcttgcactgcaggccctggggccagcccgcacacaccatgcctcctgtctcaacactgacagctgtgcctagccccggatgccagcacctgccaggtgccgccccggggcaagggccccagcagccctatggtgaccgccacactgtgccttaatgtctgccgggggcccaggctgtgctgtccctgcagcacgcctccttgcagggatctgagccaccctccccgcacagccctgcaccccgcccctagggttggcagcctcagttggcccctggcagaggaacaaggacacagacattccctcagtgtggggggcaggggacacagggagaggatggttgtccctggggagggccctctggccccaggcaaccttagcccctcagaacagggagtcccaggacccagggagagtgtggggacaggacagcctgtctcttgtagcttcctggggtgggaggcacaggggcaaagcaataccccagggaaagtgggaggtggtgctggtgctctctccaggcccaccatgctgggagaggcggccagagcctggggcctccagcctgggactgctgtgatggggtatcacggtgatggtcccattaaacttcccctttgccaacctt

SEQ ID NO: 358019 - DNA, 1272 bp, Homo Sapiens
agcgggcgggcccgggcgccccgccccaaccttccttccctagaccctcttctctcccttcggcttctctctttcggccggcgccgccagttcctggggcacacccagaggtccccttctcgccgccgcctgcaactgcgagggtagcccggggccgcttggagtcgcccggacctgagaggctgctgcactgggcctcagccagccctccggatgctggtgctgccatccccctgccctcagcctctggcattttcctccgttgagaccatggagggccctccccgtcggacttgccgctccccagaacctggaccttcctcctccatcggatctccccaggcttcatctcctccaaggcccaaccactacctgcttattgacactcagggtgtcccctacacagtgctggtggacgaggagtcacagagggagccaggggccagtggggctccaggccagaaaaagtgctacagctgccccgtgtgctcaagggtcttcgagtacatgtcctaccttcagcgacacagcatcacccactcggaggtaaagcccttcgagtgtgacatctgtgggaaggcattcaagcgcgccagccacttggcacggcaccattccattcacctggcgggtggtgggcggccccacggctgcccgctctgccctcgccgcttccgggatgcgggtgagctggcccagcacagccgggtgcactctggggaacgcccgtttcagtgtccacactgccctcgccgctttatggagcagaacacactgcagaaacacacgcggtggaagcatccatgagccgggctgccgggtgccccaggtaccacaggactttgcagggagcctggactcctgtccagacacctggtgagagcctgaggctggtgttcagggccctggacacagacacagagcagccgcatctcaaaggcagagccctgcctgaaggaggaatccgtgagtaatcttcaggtcctccgtgttctggagctgagatgggaatgagcccctacacagaatggagtcctctagcctaaagatatcagctgttccatggcagagccttgactggatggaggtggggagtgtggtgtgtaaagtctctggcctcataaaaggtggctgtgggtcgtcaggaatctgcgccatcttcctggggcttctgcgctgttgttggggaagggaccccagtcctgccttccaccccccaaccaggcctgagactgatcaaacaataaacacgtttcccactctgaaaaacaa

SEQ ID NO: 358020 - DNA, 1371 bp, Homo Sapiens
  misc_feature (242)..(242): n is a, c, g, or t
  misc_feature (250)..(250): n is a, c, g, or t
  misc_feature (265)..(265): n is a, c, g, or t
  misc_feature (428)..(428): n is a, c, g, or t
  misc_feature (435)..(435): n is a, c, g, or t
  misc_feature (438)..(438): n is a, c, g, or t
  misc_feature (455)..(456): n is a, c, g, or t
  misc_feature (479)..(479): n is a, c, g, or t
  misc_feature (493)..(493): n is a, c, g, or t
  misc_feature (500)..(500): n is a, c, g, or t
  misc_feature (525)..(525): n is a, c, g, or t
  misc_feature (535)..(535): n is a, c, g, or t
  misc_feature (553)..(553): n is a, c, g, or t
  misc_feature (560)..(561): n is a, c, g, or t
  misc_feature (575)..(575): n is a, c, g, or t
  misc_feature (581)..(584): n is a, c, g, or t
  misc_feature (591)..(591): n is a, c, g, or t
  misc_feature (600)..(601): n is a, c, g, or t
  misc_feature (606)..(606): n is a, c, g, or t
  misc_feature (609)..(610): n is a, c, g, or t
  misc_feature (614)..(615): n is a, c, g, or t
  misc_feature (621)..(632): n is a, c, g, or t
  misc_feature (643)..(647): n is a, c, g, or t
  misc_feature (650)..(650): n is a, c, g, or t
  misc_feature (654)..(654): n is a, c, g, or t
  misc_feature (658)..(658): n is a, c, g, or t
  misc_feature (661)..(662): n is a, c, g, or t
  misc_feature (668)..(668): n is a, c, g, or t
  misc_feature (671)..(675): n is a, c, g, or t
  misc_feature (678)..(678): n is a, c, g, or t
  misc_feature (682)..(682): n is a, c, g, or t
  misc_feature (684)..(684): n is a, c, g, or t
  misc_feature (687)..(687): n is a, c, g, or t
  misc_feature (708)..(708): n is a, c, g, or t
actttccctgtggcctagcttgcctatttccagtgggcgagctagctagatcctcctcccttaaataagccagtgtttttaagacagaatactacttgcatagtggacaataatatcttaaagaactgagcaggatgaaaagaatttgatagaaagcaggtttgaggagcacattggaggttggcaggtttcgaggctgcttgagaggacttgggccgatctgggctgggcttggacgtgancctggcanccaggcaggtggatnccagctggggcttccattcacgactttctggtccctggcaggacagagcgggatgccaccagcttgtccaaagggaagttccaggagctcctggtgggcatcgttgtggagaatgacgctggccgcggcgagatcaacgagttgaagcaggtggaaggggagncttcgtncancacccgcaaaggaaggnngattttcttctatgagtggaacntcaaactgggctgnaaaggcntccttaaagaatctggagtgaagcncaagggattnattcaaatacccaatctntctgagnnaaatgaagtagatnacactnnnnatttacnacggcaatnnttttnccnnccanncctatnnnnnnnnnnnnattcactctcnnnnnaancctnagtnccnntacccnccnnnnncancccncntcnccagtggcactgggtgtaagnattcccactgtggctcttcacatgatggaactgtttgacacaactgtagagcagctgtatagcatcttcactgtaaaggagttaacaaataagaagatcatcatgaaatggagatgtgggaactggccagaagaacactatgccatggttgcactgaattttgtgcctactctagggcaaacagaattacaattgaaggagttcctatctatctgtaaagaagagaacatgaaattctgttggcagaagcagcattttgaagaaataaaaggttcactgcagctgacccccctaaatggttgaattaaaatttattataaggcattactttttgtaagcggaaaaagtgtcacatttacctcttccctatcttttgtttaaaaggactgtctttattttatattggatgaaatctatgaacatatatacaatgtaaagcattgtttgactctttattataactagacactgcattgatttaaaagtagcaaacaacctgaaattaagtattaacctgaccttccatcgatattcctctggaaataggtaagtcctgagtgcagatagttgatgtttcccaagctgaagcttgtcctatagcaagcttgcttgcagctgtacttttagttcaagatgacaaaaaataaatggcatgttgacact

SEQ ID NO: 358021 - DNA, 896 bp, Homo Sapiens
  misc_feature (82)..(82): n is a, c, g, or t
gttcttcagagggtgccgcgaaggggcggccccagacaatgtttacctggttggaggcgtggcaagcgctggaagcgggccnggccagtgggtatatgacgcctgcataggattgtcatgccaattataaaaataaaggccggtccttttaaccaaaaggataggggaggaggtgaatgtggacgctttttccgccttacaaaaaagtaatgcccttataataaattttaattcacccatttaggggggtcagctgcagtgaaccttttatttcttcaaaatgctgcttctcccaacagaatttcatgttctcttctttacagatagataggaactccttcaattgtaattctgtttgcccttgtggccagttcccacatctccatttcatgatgatcttcttatttgttaaagaaaataaaacacaagctctctcttcctcctttacagtgaagatgctatacagctgctctacagttgtgtcaaacagttccatcatgtgaagagccacagtgggaatccttacacccagtgccactggagatgaggcctgaacctgcagggtattcccactcagttttcttttgacagtcaattcctgggttgccatagctttcgttggtaaaatcattcccgttgtaaattctcagtgtcatctacttcagtttcctcagaaagattgggtatttcaatcaatcccttgtgcttcactccagattctttaacgatgcctttccagcccagtttgatgttccactcatagaagaaaatcagcttccctttgcggctgctgcacgaagcctccccttccacctgcttctactcttgatctcccgcggccagcgtcattctccaccacgatgccccaccacgactcctggtggcatcgataaaca

SEQ ID NO: 358022 - DNA, 1083 bp, Homo Sapiens
  misc_feature (8)..(9): n is a, c, g, or t
  misc_feature (17)..(18): n is a, c, g, or t
  misc_feature (33)..(33): n is a, c, g, or t
  misc_feature (36)..(36): n is a, c, g, or t
  misc_feature (54)..(54): n is a, c, g, or t
  misc_feature (61)..(61): n is a, c, g, or t
  misc_feature (63)..(63): n is a, c, g, or t
  misc_feature (65)..(65): n is a, c, g, or t
  misc_feature (71)..(71): n is a, c, g, or t
  misc_feature (291)..(291): n is a, c, g, or t
  misc_feature (311)..(313): n is a, c, g, or t
  misc_feature (315)..(315): n is a, c, g, or t
  misc_feature (323)..(323): n is a, c, g, or t
ttaatctnnggggtttnntggggcttaggtcantgngtagcgggtctttcactngcttganangntatatnaaggctgaaggaaaaccatatctggataaagtttaatgttcactgagcatgacctaagactactgggagaaagttaatttccagcactcattttaccaaacctatgtaaccctgatcagggatccctgagttagctccagagctggaacagacagggcaaagggactgagcctccaaccctgagcagtggccaggcactcgacatgacaagctggaagancctgaagaacgagctctcannngngatttttnggaaagatcctccacgactcctccagacgctcagtccagggccgccagggtcagccaccctccccgctgtctctatctgggccctgccaccagtcactcaacccgactttttggtctagagtaagagcagcagctgtaccccaatggcacagcaaagcaaatccccctacaggcaccatgcaaggccagcacaggcagctcagtgaaggcaacagactccagtgcaggtccacaagggccccctgcgggagcgcctgtctgcaggatgcggggcagagggaactgaattggaagccaaaggaagagggcagctgggagcaggagcccctagcccttttcagaatagggcaaaggtactcagaacttctgactctgaggaagaggtacaagacctcctttcactgcagaagtatcccaggacttaagccatgggaagaattcacaaccttgaagtcagaagtgaaataaactgtgtggtgtccaatgaaggaggatgcctccagagcagaaggaaatggaggggtgggggtgtgggcaggaatgcagaacaggagaaaaaaaaaagccacctccacttccacccccaccctcttgctgctgtaacttggaggataatgaaaggctgtgcataagaggatggagaaacctaaaaagctctgcaccagagcttgcatccatcccaggcccagtccgaagcctgggggatggggcaggccccagaactcaccaggtgctgcatgcgcacagcctccagagcgct

SEQ ID NO: 358023 - DNA, 936 bp, Homo Sapiens
  misc_feature (7)..(7): n is a, c, g, or t
  misc_feature (45)..(45): n is a, c, g, or t
  misc_feature (121)..(121): n is a, c, g, or t
  misc_feature (125)..(126): n is a, c, g, or t
  misc_feature (334)..(334): n is a, c, g, or t
  misc_feature (346)..(346): n is a, c, g, or t
  misc_feature (395)..(395): n is a, c, g, or t
  misc_feature (507)..(514): n is a, c, g, or t
  misc_feature (516)..(516): n is a, c, g, or t
  misc_feature (670)..(672): n is a, c, g, or t
ctctctnaaaactatgcttcctttataaaatatggagctgatttnctaaaaataaaatgacaaaatattgtgttaaataaataacaacaattgcattatttttgcaaaaaatcacatattncccnnggggaagcagtctgttccctgcaattctgaatgtttggtaattctaagcaccctagaggaaggtaacattcttcccttggtgtcagtgctaagctctgagattgttatttgtcaaataaagcacaaatgtgttgcctctagttacgagaagaccttgtgtggaatgccttactgtttggagaaaatcttggtttggctcttgggctcnctggtgatcatnttaaaatgctcatcatgggaggtgacgggaagaatggccagcaagatgntctagcctgcagaaaagtcactttagcattaccctgctttgactatggcacacggacatttggaaattcttattctggttttggcaacacaaaaagctttcctttttcccgnnnnnnnntngctgactaagctcatcttaatgccactaaattaccaatgccttatttggcaagctgcctggtaaatcaaatgaatgacgacaatactggagatcttgtgtggtcactttctaaaggcgttttgtgcctcctttatactcttgtctccttctccnnntttggcgggtcccactcagttatttggcccctgtttgggaaggctctgggaaaaatgcccatttatctatcttttcaacttgaggggacatgctttcttcacagatttcctttgggatggaaagttctttctttaacctgattactgtttctaggcgctgtaaattgctgatcattctcagtaaatcaccagcattctgttctttctcagtcttgacaaagttgccattgtgcatatgtgtatttgtgtgtgtgtgacagggaa

SEQ ID NO: 358024 - DNA, 870 bp, Homo Sapiens
aggagggggaggtcggctttgcattcccagatgtgaccgcccagctgctgctcgccgctggctggattccaatttcctccccttctgacaaaggatggtgatgacaccaagtctcactaacaccctcacccgcccggaccaacggccgtgggggccgaggtgccggggacagccagagagcaatcaccggctgggcggcgggcgccggcgaggggcgagccccgctccggctcaagcgcgcacacccctcacggcccgcactccggccttccacacccgtgcacactctcgcccgcgggcggcggcagccgtgcccaggctgctgcagcgccacccgcccgccgcggaccctccgcgccctccgcctagtcacccggcccggccgcgggccgccggggctcgcagagtgtcagccatcccgggcaggagtcgcgtctccccacaccgacctccactcgcgccgggagctgagcggcagtgtaggtagtgaagactccctggggctcccagccttccctctccgcgctctccccccatcacttttatgaattcgactccactttctaaaggaattatgagtcttgtggcaaacacaaaccggagtggccgggagggggaaaaggggggaaaagaacacctttaacacattacccacccaataataaaaccgaaacaaaacgacacaaaaacaggggcggccggctctagaagtattccctcgaggggcccaagccttaccgcgtacccagtttcctggtccacacgggggtccctatagtgagtcgaataataacgctaggcactgggcccgtcgtttaaaaacgtcgtgaattggggaaacaggctacctggggaacttgggtgaaggac

SEQ ID NO: 358025 - DNA, 986 bp, Homo Sapiens
  misc_feature (12)..(12): n is a, c, g, or t
  misc_feature (14)..(14): n is a, c, g, or t
  misc_feature (19)..(19): n is a, c, g, or t
  misc_feature (24)..(24): n is a, c, g, or t
  misc_feature (28)..(28): n is a, c, g, or t
  misc_feature (251)..(251): n is a, c, g, or t
  misc_feature (345)..(345): n is a, c, g, or t
  misc_feature (413)..(413): n is a, c, g, or t
  misc_feature (468)..(468): n is a, c, g, or t
  misc_feature (472)..(472): n is a, c, g, or t
  misc_feature (479)..(479): n is a, c, g, or t
  misc_feature (491)..(491): n is a, c, g, or t
  misc_feature (501)..(501): n is a, c, g, or t
  misc_feature (567)..(567): n is a, c, g, or t
  misc_feature (590)..(590): n is a, c, g, or t
  misc_feature (592)..(593): n is a, c, g, or t
  misc_feature (596)..(597): n is a, c, g, or t
  misc_feature (617)..(617): n is a, c, g, or t
  misc_feature (619)..(619): n is a, c, g, or t
  misc_feature (623)..(623): n is a, c, g, or t
  misc_feature (627)..(627): n is a, c, g, or t
  misc_feature (631)..(631): n is a, c, g, or t
  misc_feature (638)..(638): n is a, c, g, or t
  misc_feature (640)..(640): n is a, c, g, or t
  misc_feature (648)..(648): n is a, c, g, or t
  misc_feature (652)..(652): n is a, c, g, or t
  misc_feature (654)..(654): n is a, c, g, or t
  misc_feature (664)..(664): n is a, c, g, or t
  misc_feature (670)..(670): n is a, c, g, or t
  misc_feature (681)..(681): n is a, c, g, or t
ccctgccctctntnccatnttctntaanccagtggtcagccttccatgcaggccagagaaaagcggcccaggctgcagtgagagcgggcagggaccagcctaccagatgggttggaaacatggctcagaaggaccaactaccccttccctttgaggagcaagtctctgccgatcagcaaggcaaggccaggagccctcctggcgaaaggcaggccacaaatctgttctccccccaggagaagtagcagtgnccagggctttgcgtttctggtaacttccacccaaaccacaccagagagaaacaccgtagtggagaagggaagtgggagcgcttatttctgtgtnccaggagagtagaaaggcccaggtctgtgccaccacccctccccaaagttcagtgcacccagagtttnacagggaccaacacggtgcctcggtcctgcttccatccatgcaagtgtcctccgnttancagggtnttttgaggcagntcaagtgctntcccccaagcagcacgcagtcaccgctgccagtgatgaacacacgcacgggctaggcaaatggagnccaagcacactgccacctcgganannggnnccggcccagcgaatgccttntngtgnggcngtcnttatttncnacaggaanacanantttgagggantttttncttaaggcttngctgactcaagggtagaattgagatttggacctaataggctccagaactgtgctttgagctacagggtggctgcaggatgagacggatgcagttcaaagtgcaggatgtgctgcctttattacctgctttcccgctgagcaaatccctgtcttgagtgggaagtggcatctattcccccagccatctgaaaatgctgtgttcataaccaaataggtgatgtagcttcctagccatcccgctcttacccgcccctctgcaatgtaaaaggcgtccactgttgtgtaaatacacagttgctttccag

SEQ ID NO: 358026 - DNA, 1700 bp, Homo Sapiens
  misc_feature (1026)..(1026): n is a, c, g, or t
  misc_feature (1034)..(1034): n is a, c, g, or t
  misc_feature (1086)..(1086): n is a, c, g, or t
  misc_feature (1103)..(1103): n is a, c, g, or t
  misc_feature (1135)..(1135): n is a, c, g, or t
  misc_feature (1151)..(1151): n is a, c, g, or t
  misc_feature (1165)..(1165): n is a, c, g, or t
  misc_feature (1174)..(1174): n is a, c, g, or t
  misc_feature (1180)..(1180): n is a, c, g, or t
  misc_feature (1184)..(1184): n is a, c, g, or t
  misc_feature (1189)..(1189): n is a, c, g, or t
  misc_feature (1202)..(1203): n is a, c, g, or t
  misc_feature (1213)..(1213): n is a, c, g, or t
  misc_feature (1219)..(1220): n is a, c, g, or t
  misc_feature (1222)..(1222): n is a, c, g, or t
  misc_feature (1226)..(1226): n is a, c, g, or t
  misc_feature (1229)..(1229): n is a, c, g, or t
  misc_feature (1234)..(1236): n is a, c, g, or t
  misc_feature (1251)..(1251): n is a, c, g, or t
  misc_feature (1256)..(1257): n is a, c, g, or t
  misc_feature (1259)..(1264): n is a, c, g, or t
  misc_feature (1268)..(1268): n is a, c, g, or t
  misc_feature (1271)..(1272): n is a, c, g, or t
  misc_feature (1285)..(1285): n is a, c, g, or t
  misc_feature (1287)..(1287): n is a, c, g, or t
  misc_feature (1290)..(1290): n is a, c, g, or t
  misc_feature (1300)..(1300): n is a, c, g, or t
  misc_feature (1306)..(1307): n is a, c, g, or t
  misc_feature (1309)..(1309): n is a, c, g, or t
  misc_feature (1322)..(1322): n is a, c, g, or t
  misc_feature (1331)..(1331): n is a, c, g, or t
  misc_feature (1461)..(1461): n is a, c, g, or t
ctcgaatgaatgcgaattctctgcttgcaagccctactggacttagtccttatctccgatttggttgtttgtcatgtcgactgttttacttcaaactaacagatctctacaaaaaggtaaagaagaacagttcccctcccctttccctttatgggcaatctgttgatggcgagaatttttctatacagcagcaacaaataatccacgctttgataaaatggaaggaaaccctatctgtgttcagattccttgggataaaaatcctgaggctttagcaaaatgggcggaaggccggacaggctttccatgggattgatgccatcataacacagcttcgtcaggaagggttggattcatcatctagccaggcatgcagttgcttgcttcctgacacgaggggacctgtggattagttgggaagaaggaatgaaggtatttgaagaattattgcttgatgcagattggagcataaatgctggaagttggatgtggctgtcttgtagttccctttttcaacagttttttcactgctattgccctgtgggtttaggtaggagaacagatcccaatggagactatatcaggcgttatttgcctgtcctaagaggcttccctgcaaaatatatctatgatccctggaatgcaccagaaggtatccaaaaggtagccaaatgtttgataggagttaattatcctaaaccaatggtgaaccatgctgaggcaagccgtttgaatatcgaaaggatgaaacagatctatcagcagctttcacgatatagaggactaggtcttctggcatcagtaccttctaatcctaatgggaatggaggcttcatgggatattctgcagaaaatatcccaggttgtagcagcagtggaagttgctctcaagggagtggtattttacactatgctcatggcgacagtcagcaaactcacctgttgaagcaaggaagaagctccatgggcactggtctcagtggtgggaaacgtcctagtcaggaagaggacacacagagtattggncctaaagnccagagacagagcactaattagaaaacattcaggaggaatactgttgcagcngaaattggtggggagcncaatacttctcaattaagttattcaaaaatantccccattgatggaangcagtcacatattnaaatatgcngtcccnaatnacacnactgcgccccccnnccccccaacnaacccnncngagnacnaaccnnnacacgaatataaagnacccnncnnnnnnaccngcnnaagggaaagatananagnggggattagnataggnncntcgatatattttngataatttntcatgtatggtaaagttaaaatgacaaattgatattctgatataaaactcaaagttttgaagtcagtgggaaaaaaggaggtttttagactttcttaaaagacgttaaaattttaggacagaattttccntgatgttgtttgatctaactttgcactctttgataataatgttttagataatgtgcgtaatccaaattggtattgtagcctctgttaacacagacagtatatgttttaaactttgatgtaaacctttttagacccaaacttgtggaagtatcatgtgttaagttctctgtctctgtttctttgttcatttattactaaaatgaacttgttattaaagtatatgcaaatatgaaaaaaaa

SEQ ID NO: 358027 - DNA, 834 bp, Homo Sapiens
ggagatcttcagcctccaggctctccagtttttcgtcgagagattcactatggaatcggatgccggaccagatctctgtctcggagttcatcgccgagaccaccgaggactacaactcgcccaccacgtccagcttcaccacgcggctgcacaactgcaggaacaccgtcacgctgctggaggaggctctagaccaagatagaacatgcccttcagaaagtgaagaagtctgtaaaagcaatatataattctggtcaagatcatgtacaaaatgaagaaaactatgcacaagttcttgataagttggggagtaattttttaagtcgagacaaccccgaccttggcaccgcgtttgtcaagttttctactcttacaaatggaactgtccacactgctgaaaaatctgctccagggtttgagccacaatgtgatcttcaccttggattctgtgttaaaaggagacctaaagggagtcaaaggagatctcaagaagccatttgacaaagcctggaaagaatatgagacaaagtttacaaaaattgagaaaaagaaaagagagcacgcaaaacaaaaatgggatgatccgcacagagataaaaggaagctgagattgcgcgaagaaatggagaaggaaaggcgcctctttcagctccaaattgtgtgaatatctcattaaagttaactgaaatcaagaccaaaaagggtgtggatctgctgcagacatcttataaaggtattaccatggcacagtgcaacttcttttaacgatggcttggcaaaccgctgctcacgtcgaaacagtacattgaacacaccggctgctgatttctatac

SEQ ID NO: 358028 - DNA, 1146 bp, Homo Sapiens
  misc_feature (7)..(7): n is a, c, g, or t
  misc_feature (25)..(26): n is a, c, g, or t
  misc_feature (28)..(28): n is a, c, g, or t
  misc_feature (56)..(56): n is a, c, g, or t
  misc_feature (74)..(74): n is a, c, g, or t
  misc_feature (81)..(81): n is a, c, g, or t
  misc_feature (84)..(85): n is a, c, g, or t
  misc_feature (97)..(97): n is a, c, g, or t
  misc_feature (106)..(106): n is a, c, g, or t
  misc_feature (123)..(123): n is a, c, g, or t
  misc_feature (129)..(129): n is a, c, g, or t
  misc_feature (139)..(139): n is a, c, g, or t
  misc_feature (347)..(347): n is a, c, g, or t
  misc_feature (627)..(627): n is a, c, g, or t
cgcgcgngcgccttagagcctgccnncntgacccaggtgccctcggagaaaaggcnactccggatgcccggctntctaggnctnnacttaccgcggnagcgcccancgcgtcggggtgtgggncgacgngcccggggtncgtggcgattccgagggtgaagtgaccagctcgctgagcgccaccttcagcggccccaagatcgccttctatgtgggtctcaagagccccccacgaaggctatgaggtgctgaagttcgatgacgtggtcaccaacctcagcaatcactatgaccccaccacgggcaagttcagctgccaggtacgcggcatctacttcttcacctanccacatcctcatgcgcggcggcgacggcaccagcatgtgggcggacctctgcaagaacgggcaggtccgggccagcgccattgcacaggacgccgaccagaactacgactacgccagtaacagcgtggtgctgcacttggattcaggggacgaagtgtatgtgaagctggatggcgggaaggctcacggaggcaataataacaagtacagcacgttctcgagctatcttctgtacccggattaggggcgcggggggtgcgaggcggggatggcagcaggnccgcccggtctccgcccgggcgcagcaccttagcaaaggccactctcgattcataacacttcctgacatctcctttggaaaagacaaatccctgcgtcctccctgccccgctcctggcctcagtgcgtctgcgacccaccacgctcagggctgtgctcctggtctccatccccatcccggcaagggaggaagggacgcccgagcccttgaggcggcggcacagactttgcaaacctgattagactggacaggcagggccgggagcctgccctcctcagacagcctcctcccagtgcctagaagcggagggctccgggccctggccagggaggtaggccagagggagcgcgggcttcctggggcgtccttctttgtgacccgaaatacttgtgcagatttccctgtccatcagccaaaaccccacccacagcagaattccagcaaacagaaaattcacctctccacaccacattccctcctgactcagactcaccgcgatgcattaaattatgtttttac

SEQ ID NO: 358029 - DNA, 1562 bp, Homo Sapiens
  misc_feature (26)..(26): n is a, c, g, or t
  misc_feature (154)..(154): n is a, c, g, or t
  misc_feature (176)..(176): n is a, c, g, or t
  misc_feature (218)..(218): n is a, c, g, or t
gaaatggcgcgaactcggacttcctnctgtttccccgcgtgactgtgtcaaagatgccgtggagcagaagtgtttgatcacgtctggacaaatatggtagaacttttggaagagctgattagaaaacactgggaaactacactcacagaagggnaaaaacagagagaaacattganagtggctggaaacagatttccgcacgtcctcgttccacgcgntcacgccgatggagccagtggccccccgtccggacacgccgaggctcacggcatctccctggcttctcgtctgaacccgccccagattcatcacttctccagcagtttttatagtgacatgaatggtgtcatggacaatttcaagcaaaaccgcttcagcggagacctgcctattttgctgacagaacgcagaatgagaaggaggacaaagcatcgggtggaggggcaggtgctctctcctccgcaccgcacagactgggacgggcctcagacactcatggattatcaccttctgcaaagaaaacaccagtgccctggaggctgccttctcttgcttcagattcacagagactaaaaactcccaacatctatagtgacgaagttcttcggggaacaaaactgccgactggcgtggaccacatggcttccccactggttcaaacgtcacggagcaggttccccccgctagtcacggagaccagggggcagaatacagcagttcctggatgccgccttgtttcttacagaggaaggcatctacaaaaccgtgtgttgagtgccatgcctgacggtacagaacgatcgcgtcttcgagaaagaacagccaccctggaacggttgtcaaggcccagcacaacccacacgttccggcagtcggatacgcctcgaaaaagttcattgacacaaatggaatttgctgctcacacatggacaggtcaaagtattttgacaggttcacaatatgtgcctaaatcttttcagaggacaactttgactttcaagaggagattccaagtgacatcttgaaaccacctcaccagaaccattggagcacctgtggcctcggcacactgcttatcacttgaaaaatggaggaacaagtgttatatttatctgtgtgtctgacagtgtgagatgttagaccgagagaaaagcaaacaaataaatcacttaatcttgaacactttgcactgtaaagagagtgaaagtcaaacccaccaagctgccttgctgaaagcatctccaaggttctgtaggctttgttcagaagcccctgatgtgtgtttgcagtccgtcattttatcaatgatacgcaaacataattagcatgtgtatgtactcacacactaattacatgtaagaatatattatctaggaatatgtcatttgtaactttgtactctgacgtattttctagtctcaccctattagtaattctgtcaaaatcctagacgctagtagatattagtatttgagaacatatgtcagagtcttgataagactcagcttgttctagtcatgctgaagtttctcatatattttttaaaaagtgctttccgccat

SEQ ID NO: 358030 - DNA, 812 bp, Homo Sapiens
  misc_feature (8)..(10): n is a, c, g, or t
  misc_feature (53)..(53): n is a, c, g, or t
  misc_feature (67)..(67): n is a, c, g, or t
  misc_feature (75)..(75): n is a, c, g, or t
  misc_feature (81)..(81): n is a, c, g, or t
  misc_feature (99)..(99): n is a, c, g, or t
  misc_feature (102)..(102): n is a, c, g, or t
  misc_feature (104)..(105): n is a, c, g, or t
  misc_feature (107)..(107): n is a, c, g, or t
  misc_feature (114)..(114): n is a, c, g, or t
  misc_feature (230)..(230): n is a, c, g, or t
tgcacacnnntgacctaaactcactggacagactccaggtggacaccaactcntcaacagccccatnacttcagntccacntggggcacccagcacccnacnannanaaaagangccctaagaccctgaaaaaggggcgggcagtagggaaggtggaggcacactcctcttctgttggacaggtgagctctgagggcaagccctgggcccagccacgcagagaccctggntgccctggctcttgtttgtttaggcccaggttctgcccagaccggggcccagcagagctctcaggaggctgagaaacctccagggcagacagaaagttggggccagagctaggttttagagatcctacaggatcccacatgggacggctacctaggtggggcacggcccctacccgagaacaggagggccccccagagaatgtgccatgatcagggatatgagcagggcctgcccagagcctgggcacctttgggagagggaaaagtgaggtgggacttggaaaggctttgaacgccaggctgatggttgagggatggtgggcagggagggagggcaaaaaggctccctctggcatttgggagccggtgggtggagggaggagcccttggaggtggctgcagtcccttaatgggggaccttgctctgggcatgtggggctcttcctccatccagagctggcccaagacccttagaaccctgagtgctggcaaatctcactgctcctgacccagcctgtgtattcaaaacgaaaacagtaaaaccaacatcaggatgtccgtcagaaatctaattttccttcc

SEQ ID NO: 358031 - DNA, 828 bp, Homo Sapiens
  misc_feature (27)..(27): n is a, c, g, or t
  misc_feature (56)..(56): n is a, c, g, or t
  misc_feature (76)..(76): n is a, c, g, or t
  misc_feature (80)..(80): n is a, c, g, or t
  misc_feature (103)..(103): n is a, c, g, or t
  misc_feature (132)..(132): n is a, c, g, or t
  misc_feature (134)..(134): n is a, c, g, or t
  misc_feature (136)..(136): n is a, c, g, or t
  misc_feature (157)..(157): n is a, c, g, or t
  misc_feature (191)..(191): n is a, c, g, or t
  misc_feature (211)..(211): n is a, c, g, or t
  misc_feature (228)..(228): n is a, c, g, or t
  misc_feature (248)..(249): n is a, c, g, or t
  misc_feature (268)..(268): n is a, c, g, or t
  misc_feature (283)..(284): n is a, c, g, or t
  misc_feature (290)..(290): n is a, c, g, or t
  misc_feature (296)..(296): n is a, c, g, or t
  misc_feature (298)..(298): n is a, c, g, or t
  misc_feature (302)..(302): n is a, c, g, or t
  misc_feature (305)..(306): n is a, c, g, or t
  misc_feature (310)..(310): n is a, c, g, or t
  misc_feature (316)..(316): n is a, c, g, or t
  misc_feature (337)..(337): n is a, c, g, or t
  misc_feature (339)..(342): n is a, c, g, or t
  misc_feature (453)..(453): n is a, c, g, or t
  misc_feature (462)..(462): n is a, c, g, or t
  misc_feature (468)..(468): n is a, c, g, or t
  misc_feature (478)..(479): n is a, c, g, or t
  misc_feature (481)..(481): n is a, c, g, or t
  misc_feature (483)..(487): n is a, c, g, or t
  misc_feature (527)..(527): n is a, c, g, or t
  misc_feature (533)..(533): n is a, c, g, or t
  misc_feature (535)..(535): n is a, c, g, or t
  misc_feature (544)..(544): n is a, c, g, or t
  misc_feature (550)..(580): n is a, c, g, or t
  misc_feature (583)..(583): n is a, c, g, or t
  misc_feature (588)..(590): n is a, c, g, or t
  misc_feature (594)..(595): n is a, c, g, or t
  misc_feature (665)..(665): n is a, c, g, or t
  misc_feature (704)..(704): n is a, c, g, or t
  misc_feature (718)..(718): n is a, c, g, or t
  misc_feature (725)..(725): n is a, c, g, or t
  misc_feature (728)..(728): n is a, c, g, or t
  misc_feature (742)..(742): n is a, c, g, or t
  misc_feature (744)..(746): n is a, c, g, or t
  misc_feature (756)..(756): n is a, c, g, or t
  misc_feature (767)..(767): n is a, c, g, or t
  misc_feature (772)..(772): n is a, c, g, or t
  misc_feature (777)..(777): n is a, c, g, or t
  misc_feature (793)..(793): n is a, c, g, or t
  misc_feature (816)..(816): n is a, c, g, or t
  misc_feature (828)..(828): n is a, c, g, or t
gatggaaagaggccagaaaccccagcntgagagactgctgtgcaccccacagtctnactgcacagagccgcctctnttgncaggaggcactgaggctcccctncctgtgtattgagaagcagtgtttgccantntnttttgctttcaattccaagangagctctgggaaaacctgtggataaaaccaaatnccaaatgttggacgttgttnccttttccttttctctntctgattgttttaattgaanngtggtggttttaatggatntgagaccctggagcnncagctncctttntnattnccnnctgntttttntgaataatttaaaaagaaaangnnnnagaaactttacattttggagacaaacctgtgtgagttttttattggtacaaacgttgtatttaacactaggggttttgtacagttttttgccttttctactagaaaacaantttacagtnatttcncaatgtcaanncnannnnnaattgccactatgaccaaacgcacagtctgttctccaccnacaacngnacccaatcnacccannnnnnnnnnnnnnnnnnnnnnnnnnnnnnnttntcttnnntgcnnttttcctttctttcctgttttgatttgcaaaagaaaatgtcttttttgtgtgaacttgtgttgtactctntagaaaattatggattttactttaatggtttaaaaaaangcaaggagaccccntctcccntcncttacctaatcacncnnnttttttaatnaatttaaaaanaaaanaaaanttttataattttagancaagggagtatttttttcaaagnaatctccctccn

SEQ ID NO: 358032 - DNA, 2362 bp, Homo Sapiens
  misc_feature (157)..(179): n is a, c, g, or t
  misc_feature (289)..(344): n is a, c, g, or t
  misc_feature (1817)..(1828): n is a, c, g, or t
  misc_feature (2246)..(2259): n is a, c, g, or t
ggctcctgagcacatttgctgatacagtctgtggggcttgaggagaccgcatgtatcgttctttcttttgtttttcttctgagttctcaactgcggagagcacctgaaccccctttcctttttgaccgcaggctgcactttgggccccagccagccnnnnnnnnnnnnnnnnnnnnnnngtggttcttccctggagcgactctggggagtcctggatatcccgcctgccccttcccctcagccccatgcttgttccaacagtctccacagcaaaatgtgatgctttgannnnnnnnnnnnnnnnnnnnnnnnnnnnnnnnnnnnnnnnnnnnnnnnnnnnnnnncctttcctactaagattatgcccagaaaaaagttttgcatgtttcctgctgtttcttcacaccttcgtatatatcaccttcacctctctgttttctatagtttgtgcaaaaactgatcgatttaaaagggtttcaaagaagctgttttaaattgttgtagggttgattatttttttcaagattgtattgtttaattttgaagtggcaactttctcctctattgcccttagagcgtttgcctgtgcacttagactgtcacttcgtgtggcctccaggtcttaccggggcttccgggaggctggctgctttgctcagagagggtgggaagggggcctggagagacacgagaagcagaggtagagcctagaaggtggcagcaggtgggtaagaggcttatttagcacattaggggcagtgagcacctggaggaaggagggcgctcccaatcacccgtaggaggccatctgcacaccaagcggcaattcacctgctggcgcttttcctaagtgacaagcacaatactacagtcttcacactgtttacagccctgggcaccagccacccggcactggctcttcatcacagctctgctcttgcttagctagtggggtgggggaaagggcagggatttgtttttttaattgggtggagagccaaacagctactgtccctgggtgccaagcaagccagttttttggttccctgagggaaactgaccctcctctcttgtggcaccatccagcctcagggtcttggagacttgagtaagaatgtgagtggagggggagaggtgaggagaggagcacagggtggatctgtggagggaagaggttacagggggaggagctgatgatagatcccacccagacttaagctgctggtgggtgggtgagctgggaagtaggactgtccagggaagggtggagagatgtagctaggggctggggagggggaggtggaagcgctattgagcatcctccacaccaaggttgatgaaggaagggatcccagcagggtttctgctctggggctggcaggttgcctggtattatgcccaaggccgctctgcctgggggaaagggcagccaggcagaggcccagtgtctggtaggctgctgaatttcctggaaggggtgattggatggaaagaggccagaaaccccagcctgagagactgctgtgcaccccacagtctgactgcacagagccgcctctgttggcaggaggcactgaggctccccttcctgtgtattgagaagcagtgtttgccaatatattttgctttcaattccaagaggagctctgggaaaacctgtggataaaaccaaatgccaaatgttggacgttgtttccttttccttttctctctctgattgttttaattgttctgtggtggttttaatggatttgagaccctggagcggcagctgcctttctgatttccagctgctttttgtgaataatccaccccgnnnnnnnnnnnngaaactttacattttggagacaaacctgtgtgagttttttattggtacaaacgttgtatttaacactagggggtttgcacagcctttttgccttttctactaaaaaacaatgaaaagtgatttcacaatgtgaagagaaaaaaaattgccactatgaccaaacgcacagtctgttctgcagcaacaacgggattcaatcaactcagtcgtgattcagccgtagaaatgcttttcctttatcttgtttgagcttttcctttctttcctgttttgatttgcaaaagaaaatgtcttttttgtgtgaacttgtgttgtactctgtagaaaattatggattttactttaatggtttaaaaaaaggcaaggagagcccttgtcgcttttcttacctaatcacagagtttgtgtagtgaatttnnnnnnnnnnnnnnttgttataagtgttgggagcaagggagtatgtgtttcaaaggatctccttccttttttgtgtgtttttcctttgtcccaatggtagacagactggccgagctc

SEQ ID NO: 358033 - DNA, 1111 bp, Homo Sapiens
tggacgttggcacagtgctgggatgactatggagacccaaatgtctcagaatgtatgtcccagaaacctgtggctgcttcaaccattgacagttttgctgctgctggcttctgcagacagtcaagctgctcccccaaaggctgtgctgaaacttgagcccccgtggatcaacgtgctccaggaggactctgtgactctgacatgccagggggctcgcagccctgagagcgactccattcagtggttccacaatgggaatctcattcccacccacacgcagcccagctacaggttcaaggccaacaacaatgacagcggggagtacacgtgccagactggccagaccagcctcagcgaccctgtgcatctgactgtgctttccgaatggctggtgctccagacccctcacctggagttccaggagggagaaaccatcatgctgaggtgccacagctggaaggacaagcctctggtcaaggtcacattcttccagaatggaaaatcccagaaattctcccgtttggatcccaccttctccatcccacaagcaaaccacagtcacagtggtgattaccactgcacaggaaacataggctacacgctgttctcatccaagcctgtgaccatcactgtccaagtgcccagcatgggcagctcttcaccaatggggatcattgtggctgtggtcattgcgactgctgtagcagccattgttgctgctggagtgggcttgatctactgcagggaaaagcgggatttcagccaattccactgatcctgtggaggctgcccaatttgagccaccctggacgtccaatgaatgccatcaaaaagagaaaactttgaaggaacccacaatgactatggaaaccgctgaccggcggctacatgacctctgaaccccacgggcaccctactggacgatgataaaaaaccttctacctggactctttcctccccaaggaccatgttcaaccgtcaataaacctaaagagtaacgcgttttgcccttggggggccccacttcttaccctttggctgaggggggatggacaaaagaaaggggggatttgtttaagggggaaatttttaaatggggacacttgggaaa

SEQ ID NO: 358034 - DNA, 937 bp, Homo Sapiens
  misc_feature (782)..(794): n is a, c, g, or t
  misc_feature (803)..(852): n is a, c, g, or t
cacaagcaaaccacagtcacagtggtgattaccactgcacaggaaacataggctacacgctgttctcatccaagcctgtgaccatcactgtccaagccaattccactgatcctgtgaaggctgcccaatttgagccacctggacgtcaaatgattgccatcagaaagagacaacttgaagaaaccaacaatgactatgaaacagctgacggcggctacatgactctgaaccctagggcacctactgacgatgataaaaacatctacctgactcttcctccccacgaccatgtcaacagtaataactaaagagtaacgttatgccatgtggtcatactctcagcttgctgagtggatgacaaaaagaggggaattgttaaaggaaaacttaaatggagactggaaaaatcctgagcaaacaaaaccacctggcccttagaaatagctttaactttgcttaaactacaaacacaagcaaaacttcacggggtcatactacatacaagcataagcaaaacttaacttggatcatttctggtaaatgcttatgttagaaataagacaaccccagccaatcacaagcagcctactaacatataattaggtgactagggactttctaagaagatacctacccccaaaaaacaattatgtaattgaaaaccaaccgattgcctttattttgcttccacattttcccaataaatacttgcctgtgacattttgccactggaacactaaactttcatggaattgcgcctcaggatttttcctttaacatcnnnnnnnnnnnnngacagagtnnnnnnnnnnnnnnnnnnnnnnnnnnnnnnnnnnnnnnnnnnnnnnnnnnggcaaacccgcctcccagggttttaaggcgatttctcatggcctcagccttcccagtaggctggggatttaggagggcatgtggc

SEQ ID NO: 358035 - DNA, 1015 bp, Homo Sapiens
  misc_feature (39)..(39): n is a, c, g, or t
  misc_feature (99)..(99): n is a, c, g, or t
  misc_feature (784)..(786): n is a, c, g, or t
  misc_feature (879)..(879): n is a, c, g, or t
  misc_feature (935)..(935): n is a, c, g, or t
  misc_feature (967)..(967): n is a, c, g, or t
aacgatggagatggtttggtttgtcctgctgtgctctcnccccattcccggatccaaggtcctgcctctgtcctgtcccctgagcccacctcagggaangcagggtcccccacctggtcaagtgcccagtgctgtgttgtcatttgcaagttcttcctgtgactgaactccaaatggcactgggactgctgactccacccactggacaacccgtgttcttgcttttggggtttctgaaacagccccaagactctgggcatcttgattttgctcccattgcttctcaggacaccctgctcctgtggtttgcagccccggccttcgcttcgaggacgcctctgctcttctgcctcacactcggattgggaccttcttcagcacagccagtggccgaggcttcctccctggggctcagtggagcaggacagatgctgcatccaaactcttccattgggttccagtctgttccagtcatgcccttgagcctctaaagctcctaggtgagagacgtagcagctgacagcacttcccacttgatttgggtggactccagcctccccagcaacaataagagatcaaaagcatcgttgaggaagcagcttgctgaaacgctgagtgcccgccactctcaggtcaggtgggaccggcaggccagcatgagttcctgaacacttggttctcaatactggccacagccacactgtaaggggaaacaagagggcgctgtatgcaaacatctcttgaactctggagtctgctcaccttcctgcctcaagcccctctnnnacgtggtccagtcaccattctccacagagactaccctaaaacccagcaaaactcgtgtgcctgcagaatggcacagcccgttctcatagcagnactcctgtttaatcagagggatgttaacgaccaagtcatatttgctcgatttgtgntcaatatatttcatttgtaccgataaaacttnaaaatatccccacacatgcattgcctattaaagagtatcttccaggta

SEQ ID NO: 358036 - DNA, 994 bp, Homo Sapiens
  misc_feature (12)..(12): n is a, c, g, or t
  misc_feature (15)..(15): n is a, c, g, or t
  misc_feature (20)..(21): n is a, c, g, or t
  misc_feature (26)..(27): n is a, c, g, or t
  misc_feature (30)..(30): n is a, c, g, or t
  misc_feature (38)..(38): n is a, c, g, or t
  misc_feature (45)..(45): n is a, c, g, or t
  misc_feature (47)..(47): n is a, c, g, or t
  misc_feature (49)..(49): n is a, c, g, or t
  misc_feature (54)..(54): n is a, c, g, or t
  misc_feature (56)..(56): n is a, c, g, or t
  misc_feature (58)..(58): n is a, c, g, or t
  misc_feature (61)..(61): n is a, c, g, or t
  misc_feature (73)..(73): n is a, c, g, or t
aaagccggcccngtngacannccggnnttntttttttnaccagancntntggcntntnttnacaagccagatntgatccccccgctcataaagccaggttgttgaaagcttgggcttcctcctcctctgtgcgcagcccctcagcaaacggtcacagcctgtgctgtctgctgtacaccgacttggtatcatcccatgaactgtccccctttcgtgctctgtgcttagggccctctgatgccccatctgcctgtgcttcctgcaactgtttagcaagcacctattatctatagggtgctggggtgctgggcgaggccaatcgctcctattactttctgccctggggacgtcctgttttcccacctacccctgtaacgcctctgctctgccttcccatctgcgggctaacgccatcccacaagggctgggctgtccgttcagaagagaaactgggaaggggccttaaggacctgtgtccaggcagggtggacaagggctttgtgcagggagctcctctcccatctttgtgtcctgacagccgtgaccgtgacccctcaaagcagagccagtagtgatcagtatcctgctgcttcaagcctgcacggtcctcttctcctctccgcacatctgcatgcctgtcaaacccagaatagtttggggcctggtaaacagagggaagttggctggaggaggccagtcaggagtgcaagaaccccgcgtactctgtcccacgtggataaagtctctaattccagtctgaggtgaattcttagagagtgctttcatttaatgtttgctttatgcatttcccctgcagctgtgactaattgtggaacagcatacattttgttttgagactctcttgagatttttctggcagtgtaaggtctacaccattttcctctcagcatcagagaaggcagaaagcaagagaaaggaatgcaatgtgagcaaggccaggcacacttgtgctactgcagttggcaagaatgga

SEQ ID NO: 358037 - DNA, 1110 bp, Homo Sapiens
gccgggggttaatcggcacgaggcttaggtcttcaagctatgcgtggactttaaagcatgatttaaagtcgggcctcatcacttcctttgctgtggacatccaccaagtgctggctctgcattggtacaagcagtggtaccatggcttgttgggacatgaggttccagctgccaatgttcaagtcactatatatcattccagggctcgaatcagacgcctctcaatgcaccctctgtatcagtcctgggtgattgcagctgttcagggcaacaacgaagtgtccatgtgggacatggagactggtgacagaagatttactctctgggccagcagtgcaccaccactttctgaattacagccttctcctcatagcgtccatggtatctactgtagtcctgcagatggaaatcctatcctactaacagctggctcagatatgaaaataaggttttgggacttggcttacccagaaaggtcctatgttgttgcaggaagtactagttccccatctgtgtcctactacaggaaaataattgaaggcactgaagttgtccaggaaattcagaataagcagaaagtaggaccaagtgatgacacccctcgaaggggcccagagtccctgcccgtgggacatcatgacatcatcactgatgtcgccacattccagaccacacagggcttcatcgtaactgcttctagagatgggattgtgaaggtgtggaaataaaacctactgatttgtataaattttaatagttataaatataatactataactcgagaaaaggcatttctagagaacagattcatttgcttaattttcaaaattatgtctccatattactgtttcatgactgactgactaaatgacacccaaaatggttaagatgtacttgactagtttacttatgcatctctttgcaagaatcagccagccaacaatgtctgggatttttattgtatatgttatagaggtgagaaatgtaaaatatgaaaatgaatatgtttattttgtattgaaaaagatggttgaaaagatggttgtaagctattatagtataaacacatttttgctattaaaaatgctattcaaagcagttaaactgtaa

SEQ ID NO: 358038 - DNA, 1062 bp, Homo Sapiens
  misc_feature (962)..(962): n is a, c, g, or t
  misc_feature (1021)..(1021): n is a, c, g, or t
  misc_feature (1025)..(1025): n is a, c, g, or t
  misc_feature (1041)..(1041): n is a, c, g, or t
catctcttctcccaggcctgagctgaagcctgtggacaaggaatcaggaggtcgtaatgaagttccctgatgggtttgagaagttctcgccgccaattctgcagctagatgaggtggatttctactacgatctgaagcacgtcatcttcagtcgcctctctgtgtctgctgatctcgagtctcgcatctgtgtggttggagagaatggggctgggaagtctaccatgctgaagctgcttttgggggacctggcacctgttcggggcatcagacacgctcacaggaatctgaagattggctatttcagccagcaccatgtggagcagctggacctaaacgtcagtgctgtggaactgctggcacgcaagtttcctgggcggcctgaggaggagtaccgtcaccagctgggtcggtatggcatctccggagaactggccatgcgtcctcttgccagcctgtctgggggccagaagagccgagtggcctttgctcagatgactatgccctgccccaacttctacattctggatgaacccacaaaccacctggacatggagaccattgaggctctgggccgtgccctcaacaatttcaggggtggtgtgattctggtgtcccacgatgagcgctttatcaggctggtgtgccgggagttgtgggtatgcgaaggaggcggcgtcacccgtgtggaaggaggatttgaccagtaccgcgccctcctccaggaacagttccgccgcgaaggcttcctctagggccaccaggctgaggactcgcccaggacatggactggtctctcagacccctgggccaccatgtaggccaccactccaggccgtggacttcccccaacttggggacagccttattcccaaatgtctctatccttttgactggagcatcttctgcacaaccttgggagcccatccaagggttggtgaggactggtctcccgggggtgngggtctggggggtaccctctggggttatagattcccccactgccccagctctgactggncccnaagtggctgctatgtnaattaaatctctccccccgtg

SEQ ID NO: 358039 - DNA, 566 bp, Homo Sapiens
  misc_feature (13)..(13): n is a, c, g, or t
  misc_feature (24)..(24): n is a, c, g, or t
  misc_feature (36)..(36): n is a, c, g, or t
  misc_feature (68)..(115): n is a, c, g, or t
ttggttggagagnacatggtttanttaaaggcaaanctgattttcagcagctgcaggtcttgcacagnnnnnnnnnnnnnnnnnnnnnnnnnnnnnnnnnnnnnnnnnnnnnnnngaaagtttactacacaaaaccagtttctgataaagattctcctccccctcattactccacagtgaggatgataaggcgaggaatcccgccccaagagtcagaaaacattccaaacaccaaattctcatgcagaatggggctttagataggagctgggtattactgggagtgagatggtaaacctggttagcttgtctagggcgcaagaatcagtgacagttcaaacactggaatgttgcagctgcctgaatgcagagctcaaacacacaaactgggtaaaggtagtaggaaaaaggcttgggaagaggagagaaaggtggacacagggaaggggctgaagagaagcacaaaaggtttcatattgccattgggtagggggcttcaccttttcagaccctttcaacaaaaacaaaacccaatacaccatagtcaacactaaagagagcaataa

SEQ ID NO: 358040 - DNA, 758 bp, Homo Sapiens
  misc_feature (65)..(65): n is a, c, g, or t
tgcccagcccctagagatacttctatagagatattgactctaaaggattgacctatggcttttgntatttagtatctctcactactccccgccagctaagtaaggatttaaggaatttaggactccctggagttaacagatgaagagatgggggcataattacttcacccaaagtctagaagccttggcttctctcttggccaagatggaggattgaggagggacatggaccttcaggactaaccctctatggattggccctcccagaagcgtttgggctggtagacccaccccttcctacctgctgagtgatgtcatttcctgccaggatgggtagccctttgtacgggtccttggatggtagtaggtcatataggggcatctgagcccctgctgctaagtgagatcacattatttatcgtccataccattacttcttgtgaacagtaacatgtcactcctcctggcaggaaagtttctcattgtcagatgtttgtgcttcttttcaggtcttactttttaaatagagtgttctcattttatcctaggggatctcacttcctctgtggctccatccctgcatccctgtctgggccagcactcctgactgctttgagggagagaagctttcaggggcctccatttatttctctcaagtctgtttggtcaccctgcatggtcgctgtcttccctgtcctgtgttgccctatcctggatccattggggggaccgagtgaatcgtatctggctacggcacc

SEQ ID NO: 358041 - DNA, 2204 bp, Homo Sapiens
  misc_feature (15)..(15): n is a, c, g, or t
  misc_feature (17)..(17): n is a, c, g, or t
  misc_feature (24)..(24): n is a, c, g, or t
  misc_feature (36)..(36): n is a, c, g, or t
  misc_feature (40)..(40): n is a, c, g, or t
  misc_feature (52)..(53): n is a, c, g, or t
  misc_feature (67)..(67): n is a, c, g, or t
  misc_feature (70)..(70): n is a, c, g, or t
  misc_feature (73)..(73): n is a, c, g, or t
  misc_feature (82)..(82): n is a, c, g, or t
  misc_feature (96)..(96): n is a, c, g, or t
  misc_feature (134)..(134): n is a, c, g, or t
  misc_feature (145)..(145): n is a, c, g, or t
  misc_feature (156)..(156): n is a, c, g, or t
  misc_feature (160)..(160): n is a, c, g, or t
  misc_feature (162)..(162): n is a, c, g, or t
  misc_feature (164)..(164): n is a, c, g, or t
  misc_feature (179)..(179): n is a, c, g, or t
  misc_feature (456)..(456): n is a, c, g, or t
  misc_feature (850)..(858): n is a, c, g, or t
  misc_feature (2126)..(2162): n is a, c, g, or t
ttccccctttaaacncncatctgngttgattttatnacantatttagttganngaggctggagtttnaancanaaacccctntttattttacatgngaataaggaatttcattcacttcagccactaagaaaantttagaatcangaaagcttaantgcngngntttaaagtacagttntctaaagatcagacatggcactgtctcctctcaagcctggttgtagttcagatgagtcttttcaacatggtcttcaacatggtctagagcttaccagtgatcttctgatcttcaagaagactaagtttgagacttgaccagcatacaagtatagagacctaggaggtggtcttgtggtggtacatttggttaacccattgctggcagtgggagctgatttaggcagggtaaacaggaaagcattaaaagttaaaattcactacaggttttttgttanttttaaagggaatatggataagcatagtaacaaaacccaccagaatctaagcagctctcaccccctcagaaaccactgtcattagtttacaaagttagcactttgaagtaaaactaaatgaggaaggaagtaatgttacctatccttgataccatgaccatttattagatgttttgctatataaattaccgagagaatagtttgtcatccacttagtgtgttagctggtggggtacaatataacctctcatctcaggctattttaaaaaaacaatatttgcttctataacaaaaggaaacaaatctaagaatcattcctgtactacagaagggttaaggcaaaggtagccttttgggctttttaatgaatatgacccctatagaaaagtcaagnnnnnnnnncccttgtataaattattttatttattattgtaattagatcttcacaaagttgtcttttcactgtgttttgtcaacgtgaaattaaattgtagttataagcaaaagttggttgcctagggaacaattgtatattcagtttaacagaaataaaagaatatttgtcttaagatgcaagatttgtttttacatagccttttgccatacaattataaaaatttcatttcaaaagtgaaatttttttgtgctgttttagctttaagggttggaatgtttaggtgcaacatcagctccttaaagaaaaagcaaagtgatctaggatatgtctcccttgcaagagggaattaacatttacaattaacatgaaaatcatgtatcagacttctgcaggagattcttcagcataccttatccaaaaattactcactgtcctaatgtatcattttgaagagtcctggtaagtacttctccttggcagcctcaccttcccacatcatggaagtacaggtttgcacatatacacaacatgatgatagaaaatatgatatagtaaattagctttctaaatttcggttctaagtctccttgtcgataccagtagataagtatgcaggcagtaatactactcaaagagatgcagacagcaaagaatatattcaacggttttggaggtagttgagggaaaacaaaagcacttatcagcgttactagaatcaataaggatgttaagctgccaacaactaaattgatgattcgatccttggcggacgtctccccaaacagaggtctgttgtccaggccactggtgccgtaggtcctggtagcaaagtcctccattttggggtttcttcactttccccaagccacttaaaagcaagacagcatgacctcccgaggtctcaggtccacgactgcaagcctcctcctcacggctcccgcatagccgaacccgagtggtcggggaagcgctggcgccagggatgggtgggggctcacacgcggggaacgcgactgctccgccccggccccgcgcacctcctcatcttgagcagctcggcatcccctaggcgctcgcacgctggggggccctggccgcgccggggagagtgggcctgggtccacacccccgccgggatccggtgccgaggcccaggaacgcgggccagatgcgtgggagaggaatcgcgcggtcccgtcgcagcgctgcggatcacctcccggctccttcccccgctctcgacgaattcgagctcggccgatttggcctgatnnnnnnnnnnnnnnnnnnnnnnnnnnnnnnnnnnnnncggccgccaccgcgtgacgcccaggtccccatatagtcatca

SEQ ID NO: 358042 - DNA, 497 bp, Homo Sapiens
cctgagatgagaggttatattgtaccccaccagctaacacactaagtggatgacaaactattctctcggtaatttatatagcaaaacatctaataaatggtcatggtatcaaggataggtaacattacttccttcctcatttagttttacttcaaagtgctaactttgtaaactaatgacagtggtttctgagggggtgaaaactgcttagattctggtgggttgtgttactatgcttatccatattccctttaaaagtaacaaaaaacctgtagtgaattttaacttttaatgctttcctgtttaccctgcctaaatcagctcccactgccaggcaatggggttaaccaaatgtaccaccacaaggaccacctcctagggtctcttatacttgtatgctggtcaagtctcaaacttagtcttcttgaagatcagaagatcactggtaagctctagaccatgttgaagaccatgttgaaaagactcatctgaactcc

SEQ ID NO: 358043 - DNA, 2111 bp, Homo Sapiens
  misc_feature (23)..(23): n is a, c, g, or t
  misc_feature (908)..(960): n is a, c, g, or t
  misc_feature (1600)..(1600): n is a, c, g, or t
  misc_feature (1622)..(1623): n is a, c, g, or t
tggcacgaggttcagggattgtnttggtccttctcattatttctattttagtacaagtgaaacagcctcgaaaaaaggtcatggcttgcaaaaccgcttttaataaaaccgggttccaagaagtgtttgatcctcctcattatgaactgttttcactaagggacaaagagatttctgcagacctggcagacttgtcggaagaattggacaactaccagaagatgcggcgctcctccaccgcctcccgctgcatccacgaccaccactgtgggtcgcaggcctccagcgtcaaacaaagcaggaccaacctcagttccatggaacttcctttccgaaatgactttgcacaaccacagccaatgaaaacatttaatagcaccttcaagaaaagtagttacactttcaaacagggacatgagtgccctgagcaggccctggaagaccgagtaatggaggagattccctgtgaaatttatgtcagggggcgagaagattctgcacaagcatccatatccattgacttctaatcttctgctaatggtgatgtgaattcttagggtgtgtacgtacgcagcctccagggcaccatactgtttccagcagccaacccttttctcccatcacaactacgaagaccttgatttaccgttaacctattgtatggtgatgtttttattctctcaggcagtctatatatgttaaaccaatcaaggaacttactctattcagtggaaacaataatcatctctattgcttggtgtcatttataggaagcactgccagttaaagagcattagaagaggtggttggatggagccaggctcaggctgcctcttcgttttagcaacaagaagactgctcttgactgataacagctctgtcaatattttgatgccacaataaacttnnnnnnnnnnnnnnnnnnnnnnnnnnnnnnnnnnnnnnnnnnnnnnnnnnnnnataagcctatcgttttaccatttcattttcttacataagtacaagtggttaatgtaccacatacttcagtataggcatttgttcttgagtgtgtcaaaatacagctagttactgtgccaattaagacccagttgtatttcacccatctgtttcttcttggctaatctctgtacttctgccttttaattactgggcccttattccttattttctgtgagaaataatagatgatatgatttattacctttcaattatatttttctcagttatactagaaaatatcataatcctgggatatatgtaccattgtcagctatgactaaaaatttgaaaaagataaaaatttctagcaagcctttgaagtttaccaagtatagtcacattcagtgacagcccattcattccagtaaagaatcatttcattcactttgggagaggcctataattacatttatttgcaatgtttctcttcgctagattgttacatagctcccattctgttggttttgcttacagcatatggtaaccaaggttagatgccagttaaaattccttagaaattggatgagccttgagattgcttcttaactgggacatgacatttttctagctcttatcaagaataacaacttccactttnttttaaactgcacttttgactnnttttatggtataaaaacaataatttataaacataaaagctcattgtgttttttagacttttgatattatttgatactgtacaaactttattaaatcaagatgaaagacctacaggacagattcctttcagtgttcacatcagtggctttgtatgcaaatatgctgtgttggacctggacgctataacttattgtaaagaccttggaaatgtggacataagctctttctttccttttgttactgtatttagtttgtgataaatttttcactgtgtgatatttatgctctaaatcactacacaaatcccatattaaaatatacattgtacctgaccctttaatcatgttatttatgccaccaaggttgtggatcttaaggtatgtatggaaaggaactcatttatcaaattgtaagtaatacagacatgccatttaaaagaggtaaattcttgttttctatattttgttagtaaattctcaatgaaataa

SEQ ID NO: 358044 - DNA, 533 bp, Homo Sapiens
  misc_feature (12)..(12): n is a, c, g, or t
  misc_feature (47)..(47): n is a, c, g, or t
  misc_feature (54)..(54): n is a, c, g, or t
  misc_feature (89)..(89): n is a, c, g, or t
ctccgtacgtanaaaaccctaaaaaaatcaacatcaccaataacaanaaaatanaaaatccaaaggaaaaggaagccttgtgcaaaaanccttcctcgccccccctgaacaataaaatttcaacagggaaatctccctcccattaactcggtccttcccagggccctgctcagggcactcatgtccctgtttgaaagtgtaactacttttcttgaaggtgctattaaatgttttcattggctgtggttgtgcaaagtcatttcggaaaggaagttccatggaactgaggttggtcctgctttgtttgacgctggaggcctgcgacccacagtggtggtcgtggatgcagcgggaggcggtggaggagcgccgcatcttctggtagttgtccaattcttccgacaagtctgccaggtctgcagaaatctctttgtcccttagtgaaaacagttcataatgaggaggatcaaacacttcttggaacccggttttattaaaagcggttttgcaagccatgaccttttttcgaggct

SEQ ID NO: 358045 - DNA, 1067 bp, Homo Sapiens
  misc_feature (758)..(905): n is a, c, g, or t
  misc_feature (948)..(1003): n is a, c, g, or t
ggatgtaaaagaccaaagtaatttttctgaacttctgcaattctgagaactctccaaggaattaacagtgattttagtgcttgtcagcatttttccatgaggactttcatacatttgactctttagttcacaggttcccattgattgtgagcaagatatttatctctttagcccttggggatccagctgagagcaatctcttgcatttttttacccgtgtatgtacagatatcatttcttgtgtatgccatgacttgaaaaagtttgggaagctctttagcaatatcagctaaaaggatatgaaatcacaggtgatagcagttgtcattcagtaatttcctacaagcagcaccccaaaggaaatatagtcctaatctttactatccacttctaaatttaatgtgaatttcatacatgttattagttgttttctttataattttataaaaattattcatcgggagtttaacttccacttccatgctatcggatgtgttgggctccatgcaagaacttggaagaaaaacaggcaggaatgcatttgcataatgacccagatcatcattttctgcaactgagaattatatttcatcattgcttctagaagtctgcaattctttacttttctttggtgcattattatctaggtgccatcactggataatgtggagtgactagagaagtcatatatcactgtaaggtacagttagggtaacactttagaggtttattatttttaaaaaacttttcttgaactnnnnnnnnnnnnnnnnnnnnnnnnnnnnnnnnnnnnnnnnnnnnnnnnnnnnnnnnnnnnnnnnnnnnnnnnnnnnnnnnnnnnnnnnnnnnnnnnnnnnnnnnnnnnnnnnnnnnnnnnnnnnnnnnnnnnnnnnnnnnnnnnnnnncgtgctactactgcctgggtggcaagggtgagactccatctcnnnnnnnnnnnnnnnnnnnnnnnnnnnnnnnnnnnnnnnnnnnnnnnnnnnnnnnnccagaccatagtttgactggtggcatggaatttgtgtatcaaataaatgcatttgcttatttga

SEQ ID NO: 358046 - DNA, 824 bp, Homo Sapiens
  misc_feature (64)..(211): n is a, c, g, or t
  misc_feature (254)..(310): n is a, c, g, or t
  misc_feature (787)..(787): n is a, c, g, or t
tgtaaggtacagttagggtaacactttagaggtttattatttttaaaaaacttttcttgaactnnnnnnnnnnnnnnnnnnnnnnnnnnnnnnnnnnnnnnnnnnnnnnnnnnnnnnnnnnnnnnnnnnnnnnnnnnnnnnnnnnnnnnnnnnnnnnnnnnnnnnnnnnnnnnnnnnnnnnnnnnnnnnnnnnnnnnnnnnnnnnnnnnnncgtgctactactgcctgggtggcaagggtgagactccatctcnnnnnnnnnnnnnnnnnnnnnnnnnnnnnnnnnnnnnnnnnnnnnnnnnnnnnnnnncagaccatagtttgactggtggcatggaatttgtgtatcaaataaatgcatttgcttatttgacaaaccatcagtgtccactatttgttaccagagttgggccactatcttttaaaattgctggtgaaaacttgccactagatggcagtgcctgtatagatggggaaaaaattgccaccattcttggtataatacagtgtagcttagatgaggtggtgaaataggggtatcagccgaatattcctaatatagtttctcttgaattaataaactgaagatttgtaggaaaatgagtgagcaaaatttgtttactgttgtgaatttttcctacagcactgtttttaatcttggtgttttccaactttctgtactaatagatacatttctgtgcataagattataaagcatatactcacagttcagtagttttcgttaaggatttactgtgtgagtaccttactgtgaggatcagaaccnctttcccctctactcttgtctaaaagttctggtgctc

SEQ ID NO: 358047 - DNA, 1036 bp, Homo Sapiens
attcccgggatcgatagtgaagctctggaaagctttcactgtagttcagcccacgttcagaatcacctacatggcctaccattactttcgaagcaagggctgggtgcccaaagtgggactcaagtacgggacagatttactgctatatcggaaaggccctccatgttaccatgcaagttattctgtcatagatcgagcctagttggatgaccatgtttgaaggctctctccgcaggcctctcagttggaagtccctggctgccttgagcagagtcttccgttaatgtctctaaggaacattatgctgtgctatttgattaaaccctctactatgactgacaaggaaatggagtcaccagaatgtatgaaaaggattaaagttcaggaggtgattctgagtcgatgggtttcttcacgagagaggagtgaccaagacgatctttaacaattcaacctcaaatttctaatttcaccaacaactatttattgagggctaggtaaaaagttctttttgttgtaatcgtccattaattcataagttttaaagggcatggtgctcccagcaccagaaaactatcagtgtttttaaagataaattacacaagggaggagaaagatccctgtgctaggactgcagattctatacttgcgttggcctctaactctccaatccagagcctcctgcctctggcgtcagtcttttccctcatccactcactggggagattggactagaggagtcctgagaggacacttccaacaagagacatttattctctgattttacctgaaaatggtagtagtttacatttatacagtacagtttatgaagcactttcatacgcaggcatctcttgttacctacatctaagctgttcccgaaagagtgttacagaacacaacagtattgtacaatattcgataagcatatcttcactgcacttgttataaaaatgagtggggaaataatgttaggagacaataatgaaagcgcattaacatttggcaaaatataataaagcctttttgtaattgg

SEQ ID NO: 358048 - DNA, 1023 bp, Homo Sapiens
  misc_feature (12)..(12): n is a, c, g, or t
  misc_feature (18)..(18): n is a, c, g, or t
  misc_feature (23)..(23): n is a, c, g, or t
  misc_feature (52)..(52): n is a, c, g, or t
  misc_feature (54)..(54): n is a, c, g, or t
  misc_feature (112)..(112): n is a, c, g, or t
  misc_feature (531)..(601): n is a, c, g, or t
  misc_feature (989)..(989): n is a, c, g, or t
agaaacacccantggaanccccnagcccagcctgtttgcgccccctgcgctntnagaggcggtgagacctgagcgaggtgtggccgccatccccatgtcagatccccaggtntgcacctgcagggaggcagccaggacggccggttgccccgcaccatccctctccccagctgcaaactgagtgtgccggaccctgaggagaggctggactcggggcatgtgtggaagctgcagtgggccaagcagtcctggtacctgagcgcctcctccgcagagctgcagcagcagtggctggaaaccctaagcactgctgcccatggggacacggcccaggacagcccgggggccctgcagcttcaggtccctatgggcgcagctgctccgtgagctgagtctcccactgccctgcacaccaccacattggacctgtgctgtcctgggaggtggtgttggaggccccatgaagagcgccctggactgctgagggtgggccaacagcccagagctcaggacacttggctttggggggannnnnnnnnnnnnnnnnnnnnnnnnnnnnnnnnnnnnnnnnnnnnnnnnnnnnnnnnnnnnnnnnnnnnnncctccagccccagcagtgtggcccagagcaggggccgactgccaaagtaaccatcatccatatgggccgtgtggtgatgctggcccggaaggcagaaagaggcagcatgggcactgccagggaaagccacatcctgctggtctgcagcgtggtccaccccgcctctgcccagcctgtctacaccgtgtgagctgaatcgtgacttgcttcccacctcctttctctgtcctctcctgaggttctgcctgcagcccccaggaggtgggcctgccccatcctagctggactcatggttcctaaataaccacgctcagaagctctgctaggacttaccccacccactgagtggcaggcgcatgagatttgtggctgttcctgatgctagtgnacacagtgcttatctgcataaataaacactggcc

SEQ ID NO: 358049 - DNA, 707 bp, Homo Sapiens
  misc_feature (10)..(10): n is a, c, g, or t
  misc_feature (12)..(12): n is a, c, g, or t
  misc_feature (40)..(40): n is a, c, g, or t
  misc_feature (145)..(145): n is a, c, g, or t
  misc_feature (171)..(171): n is a, c, g, or t
  misc_feature (194)..(194): n is a, c, g, or t
ggtctatccntnttgttatattcactcaggtatttttttnttaatcttattccagaatcagtggtttatattgggttactgtttaacaccaaatggaattggcattctgcagatttaattaattatgaaaccagggtctcatttnccttgctgatacttgttgaaaatganattcacattctagtctttatttncctcctgttttgtccctgtgcttgtacatcttccttttatttgtgtgttatagttctattccatttgagaaggcagttggtaagaactagattgcatgtacaaagacaggtttactaagtgctgtacagtggtcctgaggttacagttgaattagaaaaacgaaatgtacttacaggaaataagaaagcaaacctttcaaatgagagtgatgatttctttaaaaaaaatcagtttttttctctcaaataatgttctttatttcacgaaatcatcaatcttaagcatgagcagggataaacaactcctagaaggaactcaattcattcttcctggattttctctgttgttaaatcacaaaaatgatagtccccaatcgtttctttataggaggttattacatttcattacagtcactgcattttgactgttgtgtttagaatttgaatgtacatccaaaatgatgagtttcaatttaagagccttaataaaatgtgtgagtgtgtctcaattga

SEQ ID NO: 358050 - DNA, 919 bp, Homo Sapiens
  misc_feature (4)..(4): n is a, c, g, or t
  misc_feature (15)..(15): n is a, c, g, or t
  misc_feature (22)..(22): n is a, c, g, or t
  misc_feature (83)..(87): n is a, c, g, or t
  misc_feature (92)..(96): n is a, c, g, or t
  misc_feature (99)..(99): n is a, c, g, or t
  misc_feature (101)..(101): n is a, c, g, or t
  misc_feature (106)..(106): n is a, c, g, or t
  misc_feature (111)..(121): n is a, c, g, or t
  misc_feature (123)..(123): n is a, c, g, or t
  misc_feature (153)..(153): n is a, c, g, or t
  misc_feature (155)..(155): n is a, c, g, or t
  misc_feature (175)..(175): n is a, c, g, or t
  misc_feature (179)..(179): n is a, c, g, or t
  misc_feature (196)..(196): n is a, c, g, or t
  misc_feature (200)..(200): n is a, c, g, or t
  misc_feature (211)..(211): n is a, c, g, or t
  misc_feature (213)..(213): n is a, c, g, or t
  misc_feature (216)..(219): n is a, c, g, or t
  misc_feature (221)..(221): n is a, c, g, or t
  misc_feature (232)..(232): n is a, c, g, or t
  misc_feature (241)..(241): n is a, c, g, or t
  misc_feature (245)..(245): n is a, c, g, or t
  misc_feature (252)..(252): n is a, c, g, or t
  misc_feature (271)..(271): n is a, c, g, or t
  misc_feature (286)..(286): n is a, c, g, or t
  misc_feature (299)..(301): n is a, c, g, or t
  misc_feature (313)..(313): n is a, c, g, or t
  misc_feature (315)..(315): n is a, c, g, or t
  misc_feature (607)..(607): n is a, c, g, or t
  misc_feature (627)..(627): n is a, c, g, or t
  misc_feature (630)..(631): n is a, c, g, or t
  misc_feature (727)..(727): n is a, c, g, or t
  misc_feature (729)..(729): n is a, c, g, or t
  misc_feature (731)..(731): n is a, c, g, or t
  misc_feature (828)..(828): n is a, c, g, or t
  misc_feature (835)..(835): n is a, c, g, or t
  misc_feature (849)..(849): n is a, c, g, or t
  misc_feature (861)..(861): n is a, c, g, or t
  misc_feature (865)..(865): n is a, c, g, or t
  misc_feature (875)..(875): n is a, c, g, or t
  misc_feature (901)..(901): n is a, c, g, or t
  misc_feature (907)..(907): n is a, c, g, or t
  misc_feature (912)..(912): n is a, c, g, or t
tccncccccggcccngccagcngccgcacggacgcactcccgggcgggcgggcgagcccagggggacccggccttgccgcggnnnnnggtgnnnnnggngnccggnccccnnnnnnnnnnncncaggccgcccgcaggctccgggcacctgtngnccccgaggacccgcgtcgcntggncgctgccgaccccaggngggnacccttggtgngnacnnnngngttggtttggntttcgttgntcgngttggtntcggggggccggccctganacccgcgcgggattnggggccctgcttnnngctccagctccngntggagagtctccaccaacttctgctcggccgctcctctcagccccttcccttggcccagggcgacctcggcagcccagagggcgtggaccctccggagtgcccagaaagcccccggggtggccctgcgcctcctggctctttctggatggaggcgcctccggaaggagccggctgcacgccgtggccttcacctcgcagcctctgctgaccacacctccctagcgcagaggctgcccgggagcaggaaatgttctattagcatagctgactctcaggaatcggggtctgatngctaggatggaagtggggcnagnnattgagaccttcgtgctggaacttcgatgtcttgaggatgggggcccagggcctgacaccctctcaggtgagggcctcggggggatcccttgacanancntcatgcctgcctgctgtggcagaaagaggctcaagggtggcgggcagcctgcacagactcacaccagccaacctcagctgcattgagtaacaccagnagctctnccttgagattttcnaaggtggctgtntcangcaggctgangccaggctggtgaggggtacccgctncccacntgggnggtgact

SEQ ID NO: 358051 - DNA, 1206 bp, Homo Sapiens
  misc_feature (63)..(63): n is a, c, g, or t
  misc_feature (82)..(82): n is a, c, g, or t
  misc_feature (105)..(105): n is a, c, g, or t
  misc_feature (392)..(416): n is a, c, g, or t
  misc_feature (469)..(469): n is a, c, g, or t
  misc_feature (474)..(474): n is a, c, g, or t
  misc_feature (491)..(491): n is a, c, g, or t
  misc_feature (501)..(501): n is a, c, g, or t
  misc_feature (518)..(518): n is a, c, g, or t
  misc_feature (540)..(540): n is a, c, g, or t
  misc_feature (543)..(543): n is a, c, g, or t
  misc_feature (546)..(546): n is a, c, g, or t
  misc_feature (548)..(548): n is a, c, g, or t
  misc_feature (559)..(559): n is a, c, g, or t
  misc_feature (566)..(566): n is a, c, g, or t
  misc_feature (574)..(574): n is a, c, g, or t
  misc_feature (583)..(583): n is a, c, g, or t
  misc_feature (591)..(591): n is a, c, g, or t
  misc_feature (595)..(595): n is a, c, g, or t
  misc_feature (604)..(604): n is a, c, g, or t
  misc_feature (633)..(633): n is a, c, g, or t
  misc_feature (635)..(637): n is a, c, g, or t
gtcatgcaggtgacttcagacctgattaatgagaatatagacagacctgccgacattgacatntcatgcctgggtgcagctnctctagctggccttgctgttggntttggactgacaaggaggaactaaagaaactgagacaaagtgaagtggttttcaagccacagaagaaatgtcaagaatatgaaatgagtctggaaaactgggccaaagcagtgaaacgctccatgaattggtataacaagacataacactaaatgaaatgatcaaaaccataggtagctggtttatgtgacgtgcagatgagatgaagctcagggataacccatatgacaatgactaagaggagaaaattttaaataagcttcataacttaagaagcattgcttttnnnnnnnnnnnnnnnnnnnnnnnnntcttatttttttcccctaaaccatggtaaggcagcaatacctcaaaactttanatctnctattttgtagcaaatnccaaaggacnttagtcattcccaaccncattttgacagttatgggcccnctnccntnttatactgggncagtggnacataggnacataatgntttgccanccangctaatagntctggccccagtcccatgcacatattgtncnnnaattatgtgaaacgtatttctttaattctttaagtgggctatttgaagtacatatagctaaaaagaaagaataactgagaaaatgtggaattttgaaacattaatattttatgtttaaagccataatttcctaatattatatccaaatatgagcttaatatgtccctctcagataagcttatgagatagttaatgctttcctttactggtcttaaagacactgccttaatttttccttgttcaaccaaaatctgagcattctttctatgttgaaaacactgaaaaactaattttagttaatgaactagaaagaatattgatttttaagaaacagaaaaatactacttattttccttctcaaataacgtttctttcaaaaacttctggctgaagtataacatgctggtagttaacataaatcttgtctttctcttgttctttatctttctttgttatttagatgcttgtataaatgtcttttgtttttattaagtgcctaattgacagagcttaatttgaagaagtgccctaatttattgaccacttaagaattgcctttattggggtaa

SEQ ID NO: 358052 - DNA, 1065 bp, Homo Sapiens
  misc_feature (41)..(54): n is a, c, g, or t
  misc_feature (860)..(869): n is a, c, g, or t
cactgcactccagcttggtgacaaaacaagactccatctcnnnnnnnnnnnnnncagcaccaatgaagcctagttctccacgggagtggcgtcgagcaggagcactgcacatcgccccagtggaccctctggtctttgtctgcagtggcattccaaggctgggccctggcaagggcacccgtggctgtctcttcatttgcagaccctgatcagaagtctctgcaaacaaatttgctccttgaattaagggggagatggcataataggaggtctgatgggtgcaggatgtgctggacttacattgcaaatagaagccttgttgagggtgacatcctaaccaagtgtcccgatttggaggtggcatttctgacatggctcttggtgtaagcctgccttgccttggctggtgagtcccataaatagtatgcactcagcctccggcacaaacacaaggcctcggggagggctagactgtctgcaaaggttttctgcatctgtaaagaaaacaaggtgatcgaaaactgtggccatgtggaacccggtcttgtgggggactgtgtctccatcttgactcagacagttcctgggaaacaccggggctctgtttttattttctttgatgtttttcttctttagtagcttgggctgcagcctccactctctagtcactggggaggagtattttttgttatgtttggtttcatttgctggcagagctggggctttttgtgtgatccctcttggtgtgagttttctgacccaaccagcctctggttagcatcatttgtacatttaaacctgtaaatagttgttacaaagcaaagagattatttatttccatccaaagctcttttgaacannnnnnnnnntttaatccctcgttcaggacgatgagcttgctttccttcaacctgtttgttttcttatttaagactatttattaatggttggaccaatgtactcacagctgttgcgtcgagcagtccttagtgaaaattctgtataaatagacaaaatgaaaagggtttgaccttgcaataaaaggagacgtttggttctggctca

SEQ ID NO: 358053 - DNA, 865 bp, Homo Sapiens
  misc_feature (82)..(91): n is a, c, g, or t
  misc_feature (680)..(711): n is a, c, g, or t
gtgggttatttttgtacttttttcattttaattaaaaagtaatcatttcattttattaacaacacaagagttccaaagaggnnnnnnnnnnccactatataacacaaacaggtcagaacataaaatgctgccatttggggaccttgaattttgaaaccattgtttgcttaaccactggcagggactcagctgaagtcgctgctctccctcacccctgctagaggacctcaagactgtgatccacagggctctactgagcacaaaccctggggagagggcagcttcctggggctccatttagaaccacagccagaaaccctccttctaacaatttcactctggtacaaaagtcgcgaacagccacccatctcgagaacatgtccagctaccagaagtctgacatcaaagtggtccctacctcctgctgctcaggaaacagaataagagtctagacaaaaacaagagcctggggttttgagccaaaagcccaaaacaaatcactgaagaaacgggtgttcacggccagagtctcagaaccaacttcatggaagtgctgctggagagggggatgctgacagaactggttaacagggaagagtggtggggcccagattcacagtttgtggtaactgctgctgactggagctgttcagtccattggagatcttccaatgaaatgnnnnnnnnnnnnnnnnnnnnnnnnnnnnnnnnaaccttggctcagagagaaaaattcttttttctgtggctgccatggccattcctcaacaatccagagtggctgatttatgaatcctcaagcagacccccaacatatgggcgacgcgtgggtcgacgatatcccgactgccgggccgtaccagcc

SEQ ID NO: 358054 - DNA, 866 bp, Homo Sapiens
  misc_feature (9)..(9): n is a, c, g, or t
  misc_feature (12)..(12): n is a, c, g, or t
  misc_feature (16)..(16): n is a, c, g, or t
  misc_feature (20)..(20): n is a, c, g, or t
  misc_feature (35)..(35): n is a, c, g, or t
  misc_feature (37)..(37): n is a, c, g, or t
  misc_feature (46)..(46): n is a, c, g, or t
  misc_feature (58)..(58): n is a, c, g, or t
  misc_feature (64)..(64): n is a, c, g, or t
  misc_feature (74)..(74): n is a, c, g, or t
  misc_feature (110)..(110): n is a, c, g, or t
  misc_feature (112)..(112): n is a, c, g, or t
  misc_feature (115)..(115): n is a, c, g, or t
  misc_feature (144)..(144): n is a, c, g, or t
  misc_feature (185)..(185): n is a, c, g, or t
  misc_feature (432)..(445): n is a, c, g, or t
gataaacanagngctnagtnagcaacgccacttantnagcgtctgnaaaaatgaaagnaatcgngtgcactctntcccagcagtaaatccagctctgatcaggcaactgntngtnactggagagcattgtttcataggcttttntctgtcctgtctgggagcgctgcttcttcccctgccttctnagagacgaagaccgtggcgagcttggcgtttaggggctcccgtgccatggctcaccccaggagccccagcagccaccaggtgcctctgtctgcagacccctggcccgggctggcgccgacgctcagaacctgcaggtacttcataagcacacaggggcctcgagggagctctgtgtctgaccgcacagcagcctctgaatgccgctggaagtgatgatcaaagtaaagattcagttgggacttgagnnnnnnnnnnnnnnccatgtgtcttgctgaagattaaggggaaatgttacagtgttgggacttcctttcatggcagaatctacaatttgagcgacttcagtagtatctcttagtctacgcttttcatacacaaaacactgtggaaccacaagccattaccaagcaaaactctttcactggaaacaagggggcagtctagaagtaaaagtgaccttaagaagactctttacaggcaacaaatgaagcttttctaagggatttttgcatcagttcagtcataagaatacttttttccagggtaattaggcaatagcttcactgaaaatgacagcttttcattgcattatttaatccttatatttggaattgaagtcgttaacttcttttaaagaatgtactattagaaaaattaaaaatgaaatgttgagagacttc

SEQ ID NO: 358055 - DNA, 1093 bp, Homo Sapiens
  misc_feature (405)..(405): n is a, c, g, or t
  misc_feature (407)..(407): n is a, c, g, or t
  misc_feature (410)..(410): n is a, c, g, or t
  misc_feature (412)..(412): n is a, c, g, or t
  misc_feature (435)..(435): n is a, c, g, or t
  misc_feature (561)..(561): n is a, c, g, or t
  misc_feature (587)..(587): n is a, c, g, or t
  misc_feature (629)..(629): n is a, c, g, or t
aatctctagtgtaaagaaaatgtagttcagataccattcattgtcttgggtcatgcttagtgcccccaagaagacaaacatatttattcttgggattctgataggcttcaatatgcaaaggacaatggaaaagtttagacactctattttcaaaattttataaacttgttttattggggaaaatgtccaaattgctagacacattctaagttctgccttggagaatcctactttgtctgagattgaggcagaggaattgttatcctgggcattactcagctcaggaacatggagcctgtggttcatgccagtgtgtgtcttcacgcagtctctccacaagagcaacagtaagaacatttctgttttaaatttaattttaaaatattttattatctgcaattcacnantgntntgggaaagaaaaaggaaagttcntgttgtgtgtgaagagcgctgcttaggctataaggcttgcgcgcagcgcatagtgcagctatagctattcagagagcagcaggttcttcgcagtctttgttgcctgggagcctgatgttttgagcnactcaggtcactgataaagtggaagnactaagacagctgtggtgcagcagatcgcgcagcaagcatcnactcacactcaatcgcatgtggtggtccacattctgctactcttatccacccatgtggtcattgagagcctttcttcagagactcttctgtgtgtttgattgtgccccaggtggccccagggcttagctggctctaacaactagcatgacagcctccaatcagaaaggcaggtaaggggacagggtgaggagaatgggcagatactgacagaaattaaagtaaagggattgtgaaagtaaagagctcttcctgattctcatcttctcttttttctattacaaggcattgaacttggcacttcctgtattctttgtgatcactattgagtgcattagttaacacccaaggggatggcttgattgggaatgtagtgaaaggagctgatctactgtattgtaatgtaaaacagctacagccagttattttgtaagattataagttgttcattaaaaaatcagcacac

SEQ ID NO: 358056 - DNA, 1648 bp, Homo Sapiens
  misc_feature (45)..(45): n is a, c, g, or t
  misc_feature (802)..(802): n is a, c, g, or t
  misc_feature (862)..(862): n is a, c, g, or t
ggaattcccgggatttttggtactaaatccttattggaaccaagnacaaaggaagcaaaattggtctctttagagaccaatttgcctgaattttaaaatcttcctacacacatctagactttcaagtttgcaaatcagtttttagcaagaaaacatttttgctatacaaacattttgctaagtctgcccaaagcccccccaatgcattccttcaacaaaatacaatctctgtactttaaagttattttagtcatgaaattttatatgcagagagaaaaagttaccgagacagaaaacaaatctaagggaaaggaatattatgggattaagctgagcaagcaattctggtggaaagtcaaacctgtcagtgctccacaccagggctgtggtcctcccagacatgcataggaatggccacaggtttacactgccttcccagcaattataagcacaccagattcagggagactgaccaccaagggatagtgtaaaaggacattttctcagttgggtccatcagcagtttttcttcctgcatttattgttgaaaactattgtttcatttcttcttttataggccttattactgcttaatccaaatgtgtaccattggtgagacacatacaatgctctgaatacactacgaatttgtattaaacacatcagaatatttccaaatacaacatagtatagtcctgaatatgtacttttaacacaagagagactattcaataaaaactcactgggtctttcatgtctttaagctaagtaagtgttcagaaagttctttttttatattgtnccaccacctccatcattttcaataaaagatagggcttttgctcccttgttcttggagggnccattattacatctctgaactacctttgtatccaacatgttttaaatccttaaatgaattgctttctcccaaaaaaagcacaatataaagaaacacaagatttaattatttttctacttggggggaaaaaaagtcctcatgtagaagcacccacttttgcaatgttgttctaagctatctatctatctctcagcccatgataaagttccttaagctggtgattcctaatcaaggacaagccaccctagtgtctcatgtttgtatttggtcccagttgggtacattttaaaatcctgattttggagacttaaaaccaggttaatggctaagaatgggtaacatgactcttgttggattgttattttttgtttgcaatggggaatttataagaagcatcaagtctctttcttaccaaagtcttgttaggtggtttatagttcttttggctaacaaatcattttggaaataaagattttttactacaaaaatgaaatttgtttggacttccacttgagacagtaaagagagtattagacacccagtaaaaactgccatataaagaagttgtaattgtttgttgtgtatgtatttttttcaatgccaaaccagctgtgatccaatttacatccacattttaggtccaacagcaagaagttcagagagagatttcccaaccagacattgggtcactcactggtcaccttgccagtgcattttattagaagggaatctgttgtagcaaatgggaataaacctgggtttctatagacccagaactgaaaaaat

SEQ ID NO: 358057 - DNA, 600 bp, Homo Sapiens
  misc_feature (37)..(37): n is a, c, g, or t
  misc_feature (52)..(52): n is a, c, g, or t
  misc_feature (101)..(101): n is a, c, g, or t
gaaactggtgtgccctaaaaaatgccggggaaggcantgtaaaacctgtggncccatccccaagccatgtctggggaggacccacagcccccggtgtgganccactgaacaggtttggactttcccacccaaaattgccttgcctcagccttaaacccccataaaattccctttccccttagatttgttttcctgtctcggtaactttttctcccctgccatataaaatttcatgactaaaataactttaaagtacagagattgtattttgttgaaggaatgcattgggggggctttgggcagacttagcaaaatgtttgtatagcaaaaatgttttcttgctaaaaactgatttgcaaacttgaaagtctagatgtgtgtaggaagattttaaaattcaggcaaattggtctctaaagagaccaattttgcttcctttgtcttggttccaataaggatttagtaccaaaaagttcagaaggctggcttcccagaagaattgtacatactcctctgaacccccaaaagcaagggaaaaatacactctaagcttattatttatctcaggtgtaaaaactagctaccttatatttaaataaa

SEQ ID NO: 358058 - DNA, 1029 bp, Homo Sapiens
  misc_feature (80)..(171): n is a, c, g, or t
atctgggatacaagcgtgaccacacgttcacttttaatttagtattataaaaattgaccagggtcttgctaatgtgcttnnnnnnnnnnnnnnnnnnnnnnnnnnnnnnnnnnnnnnnnnnnnnnnnnnnnnnnnnnnnnnnnnnnnnnnnnnnnnnnnnnnnnnnnnnnntggcagagcttttccatatgttactcctcatgctggttggaatcatggctgcaggcttccacttggtctgatcagactggtattcattcctgcctatgtccccgtgaaggattcggtaagagtgctatttcctcctccctttagaagacaggctgtcttctttcatcaacttagagcagataatccccatgtgtgcctctctccttccttagatggggaacaggatccctttttgggacaatcaagaaaaaaactcatgtaaacagtaatcttattacttgtatttgtgactaactccagggaaaagggtagaatatttaggccacttcaggcactaccatggagtgaactgaattcatacggatggcttgggctgacacagtttcttcccagtggaccaataaatcagactcacccgaacccctggggttttggtagaattggacctactctaggactgtggggaactaaaggagcatttggctcactgtagctcttctatcatgagccttgaccgtcaggccgcaatcagaccttactgatgggatctctgcagtttattacgtaggcctcccgttaccctggtacccaaatacgtcccccacctctagctccctagcctcacattgaatgtctcttcaacagcagattgtggtggaagttatagccgtgtgcctctatttattctctgaattgtactgtagaaaaaggtgtttataaagaataaagaaatcaccagaactgcctatacctagttttcctgactttctggccctgcgtcttcatgaatatcaacccatttgctgtttgtaaaagttaatcgggttagcccttggaactgaccctgcacactttcgc

SEQ ID NO: 358059 - DNA, 1274 bp, Homo Sapiens
  misc_feature (13)..(13): n is a, c, g, or t
  misc_feature (16)..(16): n is a, c, g, or t
  misc_feature (19)..(19): n is a, c, g, or t
  misc_feature (34)..(34): n is a, c, g, or t
  misc_feature (41)..(41): n is a, c, g, or t
  misc_feature (43)..(43): n is a, c, g, or t
  misc_feature (46)..(46): n is a, c, g, or t
  misc_feature (77)..(77): n is a, c, g, or t
  misc_feature (95)..(95): n is a, c, g, or t
  misc_feature (1075)..(1225): n is a, c, g, or t
acacccttggtanaantgngggtttctggggatngactctngnggnttcttttttatataactatacagaagcattngtatttctctctctaggnataagttactagttggaatgcccatcagacctttaataaatgagttaaaaatttttcttatgagacacacctatttaagtacagattttggctttattgcccaaaaccctcctgaaagggtacggagagtcccctctgtgggctggcagtgtgaatgagatctgtttagtctcgtgcatatagttgctgttttttaaatgaacacagttgagtatttgaagtgaatttgaaaaagaaatgttacttaatctttccctaagcccatgggttacagaatgctagggaggcaatttggttacctgcaaaggctgcttttgcaagcgaggccaccatcaattggtcatcttggtatttgtgtgtgaatctcactttcctcaatgtaaaaaggaatcaagtatggatttcagaggtgctcttagattccccatacacccaagggtaataaacgtgtacaagtacagtgttcatgatacgtgccttggtgggagtccgtggtgccacagggaaggggctcccactgcttctggtctccagggacagtgctgctggaaaggctagtgatgagcttcaccctggagctcctcccgggaccttgcaagcctctccatccagcatcttctctatcttagttgaatgccttctttctgaacatttgttttaagaattattttataaagtcaacaatactttgcttgaattctttcttaatttacgattttttattataaaaatgtatagtgatacaatgggacatgtgaagaatacagaaaagtaaccactttaatgcaataactgttatcataatattgtatttcgtggtagtcctttcctgtagatatttttaatgccatttaatgccattgtcaccttggatttatgagtgaaaagtgtttctaaaaatatagaaataatgtcagatcagagtctgatcttctatgtttgtatttaaatggattaaaagatccccggtggttccatgnnnnnnnnnnnnnnnnnnnnnnnnnnnnnnnnnnnnnnnnnnnnnnnnnnnnnnnnnnnnnnnnnnnnnnnnnnnnnnnnnnnnnnnnnnnnnnnnnnnnnnnnnnnnnnnnnnnnnnnnnnnnnnnnnnnnnnnnnnnnnnnnnnnnnnntttgggggccccccctccccccccaaaaaaattttttaaaacctttttt

SEQ ID NO: 358060 - DNA, 1054 bp, Homo Sapiens
  misc_feature (9)..(9): n is a, c, g, or t
  misc_feature (19)..(19): n is a, c, g, or t
  misc_feature (21)..(21): n is a, c, g, or t
  misc_feature (25)..(25): n is a, c, g, or t
  misc_feature (28)..(28): n is a, c, g, or t
  misc_feature (30)..(30): n is a, c, g, or t
  misc_feature (50)..(50): n is a, c, g, or t
  misc_feature (55)..(55): n is a, c, g, or t
  misc_feature (65)..(65): n is a, c, g, or t
  misc_feature (68)..(68): n is a, c, g, or t
  misc_feature (1001)..(1001): n is a, c, g, or t
aaacctaanataaaaaaangnaaanacngngttttatttctctgtctttntaccncctctgtttntangaatttaagcaccaacttcacacctagctaatttttttcatcataaagtggatgaaatgagcaagtacctaaaaatttgatttcagataaaagtcaggagttactgctaaaaaacagacatgtaggagacattcaacaggagtatgaaatgagagttagaccatatgggctgacaacaccataaataacaagaaaagggagtgctgaaataggagagaacagagcaaatgttagctcaaagtatagacttagaaatatcaaagtaagagctatctggataaatatatagatattgagtgcttggaatcctagcctactatgtgaaaattaagtctaatgtcagaataacttacagaaaaatagaaaatgcacagctttaaaatgggcagagttaaaatctattcccagctttatcacttatttagccatgctagcctaggcctctatttccttgtctccaaaatgagaataataaaatttaggtcaggattactatataaactaagataatacagtgattctcaaagttgttcagactgtatagtaaggagaaagtctggttgcactttgaagagcttgaagatttgaaagattcccaaaaaagcattttaaagtttacatttaagggaccttggacctcaaccctctcaagtttacaagtctgaaactttagacatcaaaagtttgagcagtttttccaaggcaacattgatagttagattcagggccaggctgtaagtctagaatttagatatcctgatcccccagataccgctcttctggttatacacagaccagctataatttgctaaacataaaatattgcagtgtattagccgagctgtggctccgagagtctgtgccctttaccaccgtgcccaactgtttcacatgctgtgtttggtagtttttcctagtactctccttaataantggtggtgtttagcaaattgtattacataaataaatatttatttcatggattg

SEQ ID NO: 358061 - DNA, 1049 bp, Homo Sapiens
  misc_feature (17)..(17): n is a, c, g, or t
  misc_feature (21)..(21): n is a, c, g, or t
  misc_feature (27)..(27): n is a, c, g, or t
  misc_feature (36)..(36): n is a, c, g, or t
  misc_feature (39)..(39): n is a, c, g, or t
  misc_feature (45)..(45): n is a, c, g, or t
  misc_feature (47)..(47): n is a, c, g, or t
  misc_feature (51)..(51): n is a, c, g, or t
  misc_feature (56)..(56): n is a, c, g, or t
  misc_feature (73)..(73): n is a, c, g, or t
  misc_feature (95)..(95): n is a, c, g, or t
  misc_feature (125)..(125): n is a, c, g, or t
ttgaacagtggtcaggncacncgtggngaatcacantgntgaccngngtcnttganatatgcaggtgtctagntgtttgccacaagatcattcanttaccccgattccgatgctcctcatcagtntgcacgcagtcatcgagttcgatcacatggctcccaatgaaccagaccaaattggagaagtaaggaacagcaagtgttatctcggatgtagtgcagcatggcctggttatccaatgacacttgtatagacattcaaaagttatggttcttacagcaattctaaccatgctttcagggtggttgaaaaacttgatggcttctgtgtacagggcaaagtcattggtgtgctcattataaaagaaatggacagtgtggttgttgagttttaacgaaagtgttttcaggaacgatatataataggccataatctcctcatcagaaaagtcaaatttatgaacgatgatagaatttacgtagttatttgagagcaaataataaagtgaggtctcgtgactgatgttctcaaagaggatgttcaaggtctgcagcagctgaacgcacacgtaacggcccgacttttgccgcaagatgttcaagaagaaaacaaacatattcttctccaggaagaagtcaaatacagagctgtcattttgatctccccagatcaggatctcagtgatggaacggatggtctccactagcaggttccggttctgttctgtgactgtggtgtttttggtcaaaacgtggtacagatacttgaggtggtccaaggagtggatgttgcgggaagtcttgccatggcccccgcccacccagctccgcgagcggccaaacatgtcggcggccccgacccgtctctcgtctcacggtctcatgccggaccagcagagcggcccagcgcccgcggcggtagcacaagcggaggatgcggcggcggaggcggtggaggaaccgcgagccgccttcctccccggcccacagcccagcactgacattcagccggaaccggccgttcgatcccgggaattccggaccggtcca

SEQ ID NO: 358062 - DNA, 1147 bp, Homo Sapiens
  misc_feature (8)..(8): n is a, c, g, or t
  misc_feature (17)..(17): n is a, c, g, or t
  misc_feature (40)..(40): n is a, c, g, or t
  misc_feature (80)..(81): n is a, c, g, or t
  misc_feature (93)..(93): n is a, c, g, or t
  misc_feature (145)..(145): n is a, c, g, or t
  misc_feature (162)..(162): n is a, c, g, or t
gggaaagnctgccaaanagaggaaaagggaaccagacacnggccccggggagccatgagagactggaagagcgcagagtnnacgacagtcccncacccagaaaagagcgactggcaaacaaggaccggccagccttgcagctgtntatccaggagctcgctnccgagcgcgagagtgtggcggaaacaggaggatctgcaaggcagaaggttcggggactggtcctgagaagagggaagaggcagagtgagtcactgcacgcacctggcctccatggacgagcaagggcatcccagaaacgtgtaaatgaccccgagtgtgactgggaaggagaacttattccttaccaggaaactggaagctaaaaatacagagggtgacgtagaaacacgcagaaaccattctaaagaaagtagtgatcttgtattaaattgagcagaattctcacagattttaccattcctgttataaactagtatttgttgtttagccaaaacagaaaatgatttccactggacagtagaaaaatatgtgtaaaatagggaagaaagttagtattggatcagtgtgagtcctgaagcactttcagtgctgtgagaacgacatccactttgggtttcattcgtttgtaagcagaggagctgtcagtcactcgtgcttctcggtggcctctgagccatggtgtcgagtgaagagtagttcttgtttgttacaacctttgtgagtcagccatgcccgcaaagcgtgctgtgttttagtcctggtaggaatatttatcagagttcacactatataaaacccaacagcttcaactattgccctttcaacagttttgccactgaccggatagaaacggtttcagtctctggatggatgtgtttgtggtttgtaaccattacggtttaaaccatggtttaagaatttgcccaaataacagaaattttgttcgggaagggataaactagatatagcatacagagcctgtttttgagttttagatactttatttgtaaataacttaaaatagctttctgaaaccgtgcattctgtagtttcttcctttcagtgaaattgctaaatgtcaatgtatttttggcactgcgattttaaccatttattaaataaaaattttgttaaagaagtactg

SEQ ID NO: 358063 - DNA, 949 bp, Homo Sapiens
  misc_feature (15)..(15): n is a, c, g, or t
  misc_feature (19)..(19): n is a, c, g, or t
  misc_feature (22)..(22): n is a, c, g, or t
  misc_feature (25)..(25): n is a, c, g, or t
  misc_feature (27)..(27): n is a, c, g, or t
  misc_feature (29)..(29): n is a, c, g, or t
  misc_feature (33)..(33): n is a, c, g, or t
  misc_feature (38)..(39): n is a, c, g, or t
  misc_feature (41)..(41): n is a, c, g, or t
  misc_feature (44)..(44): n is a, c, g, or t
  misc_feature (46)..(47): n is a, c, g, or t
  misc_feature (51)..(51): n is a, c, g, or t
  misc_feature (56)..(57): n is a, c, g, or t
  misc_feature (59)..(59): n is a, c, g, or t
  misc_feature (63)..(63): n is a, c, g, or t
  misc_feature (66)..(67): n is a, c, g, or t
  misc_feature (70)..(70): n is a, c, g, or t
  misc_feature (73)..(75): n is a, c, g, or t
  misc_feature (78)..(78): n is a, c, g, or t
  misc_feature (81)..(81): n is a, c, g, or t
  misc_feature (83)..(83): n is a, c, g, or t
  misc_feature (85)..(85): n is a, c, g, or t
  misc_feature (88)..(88): n is a, c, g, or t
  misc_feature (95)..(95): n is a, c, g, or t
  misc_feature (97)..(97): n is a, c, g, or t
  misc_feature (105)..(105): n is a, c, g, or t
  misc_feature (110)..(110): n is a, c, g, or t
  misc_feature (117)..(117): n is a, c, g, or t
  misc_feature (121)..(121): n is a, c, g, or t
  misc_feature (127)..(127): n is a, c, g, or t
  misc_feature (136)..(137): n is a, c, g, or t
  misc_feature (140)..(140): n is a, c, g, or t
  misc_feature (159)..(159): n is a, c, g, or t
  misc_feature (173)..(173): n is a, c, g, or t
  misc_feature (188)..(188): n is a, c, g, or t
  misc_feature (191)..(191): n is a, c, g, or t
  misc_feature (198)..(198): n is a, c, g, or t
  misc_feature (206)..(206): n is a, c, g, or t
  misc_feature (212)..(212): n is a, c, g, or t
  misc_feature (214)..(215): n is a, c, g, or t
  misc_feature (217)..(217): n is a, c, g, or t
  misc_feature (225)..(225): n is a, c, g, or t
  misc_feature (229)..(229): n is a, c, g, or t
  misc_feature (240)..(240): n is a, c, g, or t
  misc_feature (254)..(254): n is a, c, g, or t
  misc_feature (280)..(280): n is a, c, g, or t
  misc_feature (289)..(289): n is a, c, g, or t
  misc_feature (299)..(299): n is a, c, g, or t
  misc_feature (305)..(306): n is a, c, g, or t
  misc_feature (324)..(324): n is a, c, g, or t
  misc_feature (331)..(331): n is a, c, g, or t
  misc_feature (333)..(333): n is a, c, g, or t
  misc_feature (335)..(335): n is a, c, g, or t
  misc_feature (345)..(345): n is a, c, g, or t
  misc_feature (355)..(355): n is a, c, g, or t
  misc_feature (372)..(372): n is a, c, g, or t
  misc_feature (399)..(399): n is a, c, g, or t
  misc_feature (402)..(402): n is a, c, g, or t
ttggcattttccaangtgnggnacngncngggntaaanncnccnanntttnccagnnanaaancannagnaannnatntanancnccnagacccncncaccctcntgttnactgctncatncccccngggggcacnnaanggggggaatggtgggggcncccatcttgagtcnagaggcaccaaaagnagnggcagtnaccttggnggagantnntntcccgatncagntggtgcagagntggcttgccccccngaggaacacgcccgggccaccgtggngcgggatcnccgcattggnccgggnnttccgcgaacagcccctngtttttngngnttgttaaagntggtagcagntgcacccccagccctgngctactgttccgtgctgcttcgggggntgntggccgccctcttgggccattgggaagcctctcgccaccctgacacgacccactccccctggcacctggaggcatcctgcaccttagtggctgtcatggctgagggaagcctcctgcctccggccctgggtaatatgcatgaagtatttagccaactggcacctttcgaggtgcgtctgctgctgctcagtgtctggggttttctccgggagcatgggcccttgcctcagaagttcatcttccaatcagagcggggtcgcttcattcgggacttctccagggagggtggaggtgagggtggaccccatctggctgtgctgcacagtgtcctccaccgcaacatcgaccgcctaggtcttttctctggccgtttccaggcaccttcaccgtccactctccttcgacaggggacgtagccttttcttgctctggaagcccagggaggttgagcagtgagagagggaagggactaacgtgctccggaagggtggaggtttctcttctaagtccttggtctaaagagcgctgtcacttttttctctcccac

SEQ ID NO: 358064 - DNA, 1053 bp, Homo Sapiens
  misc_feature (809)..(870): n is a, c, g, or t
  misc_feature (901)..(930): n is a, c, g, or t
taagcgccttggcgaatgcacaacaaaatccacacggcatcctcgtcagtgaacaggggcccctataactgagcttccagggggtgtagagccccgaagctccaaaatgcgcggaagaaaccctctcgggcccaaaacaatacaaaaggaaaaggaataaccagagacccttgccacttcctctttccccttccagagaagaaggtgattgaagacaggagcagagttgaggagacacagggccaccacactgcccaatcccagggaccccactcccactgaatagatgtgaatgatgggcccttcaagttgtgcaatcacagctgcccacctgtaagctgcagccctgagaggggttcccaggagtagctcctaacagaaaaggaaattcgacttccatgctccaccagttgccctgactattgagggtgttgtggcacattacaagggggtctgtcagaggagctgggctttaagacgcaagcctatgtgtttgcccgtgccctgaggtggatcacaggtagtgaatgagctgcctgggcttgaccccatttcatctattcagccaggaagctcagcaggaataaaggatatggcctgggcagggagcatcatagggcctggaggctctagccagttagcctcgggcaggctgcagtgagacctggccaacatatgatggctaaaatccaagtgtaaaagcttaggataggtcaggcagtacttcccgggggctcacactgtactgtcccactggaaaaggtaagcagtggagaaccttggtaagtagggaggctggccagtgtggnnnnnnnnnnnnnnnnnnnnnnnnnnnnnnnnnnnnnnnnnnnnnnnnnnnnnnnnnnnnnnccagaggcttgcccccctagtgtggatacgnnnnnnnnnnnnnnnnnnnnnnnnnnnnnngaggcttgcacccctagaacctagagaagccacagctaggagaactcccttggtacccagcataggggcaagaggtggtgctgaaagagagaaactatatgtgtctctacttgagaacttatg

SEQ ID NO: 358065 - DNA, 1470 bp, Homo Sapiens
  misc_feature (259)..(270): n is a, c, g, or t
  misc_feature (366)..(366): n is a, c, g, or t
  misc_feature (376)..(377): n is a, c, g, or t
  misc_feature (380)..(380): n is a, c, g, or t
  misc_feature (410)..(410): n is a, c, g, or t
  misc_feature (414)..(415): n is a, c, g, or t
  misc_feature (467)..(467): n is a, c, g, or t
  misc_feature (474)..(474): n is a, c, g, or t
  misc_feature (514)..(514): n is a, c, g, or t
  misc_feature (518)..(518): n is a, c, g, or t
actgattacaaaagctttttgtaaaatcacacaaatatttcaagaataaatgcattccagagatacaaatcagggccaaaagaaacaaaaatcaatgaaattagcattacacttgtaaaaggccaaatggacacaagccctcgagggtctattgtgaagtgcttgggggcaagtggcctcaaagaaacttgggagtgagaggtttgcactgagcttgggaagggagcccttgggaaaacaccacacttgtgaaatcagnnnnnnnnnnnngcaagtgatggtgcttacagcccaggacgacttcctgctggtttaggtcagaaaaaaacctgagagagattcctaaaacaatgagggctgtaaggngactggtggnnaanatccagtggaaatattttctcaggaaaggnaggnncaaagtcatggtaagttaaaatgtggtaccctaatgtagtagtaaatttaangcctgtngaggaaattttaacacttccaacaggtgactatatcaggnaggngaaaaccaagtgcttcctgcttcaccttctgctgcttttgggacttttctagagctagtagctaaggacaagaccctgaacccattttttcactgggagaggaaaaccaccaggcttctcagctatggcttggcaactctggagttcctaaggcttccatcagggctccaggccctgataagtggcctcaggcaggaggagatcgggcagcggatgggagagctagtcaggaaggtggaatagggaccatccccaaacacgttggcgtatgatgatttgaggaactggacgtagttctgcatgctgcggttggtgctctcggactgctccaggcgatctttcaggtcttgcagccggctctggtagcggcggtccgcatcatcacggctccgccgcagctggctcaattccgttttggttctgctcagctgggtctcaaggtccaggattttgttctgggctgctcgctccttggagagtgcgtgctccttggtttgttccacctgcctcctcgcatcttcaatggcactctccaactgccttgccagggtcccacattcccgtgttttctcgctccagccgcagctgggactggtggattgcctcctccctcttggctaatcacctgtaggaactcgatattctgggcactggtcgcctccagtttcctaggtgaaagcactcaatcagatcctgggcataccccaacctgtcatgttccaccccgccagggggctgccagcctctcctggactggggatctcatcatgccaagaatctccaaggagccacaggagtaagccaaagaatatctgcagatcagcaaggcgaccaaagaactgtgcagctggagcaactggttagagaacagagtgaagggtgggaacgcagagactgaccgtgggctttgttaagtgtggatagcatcacatggaacacagcaacttgcagc

SEQ ID NO: 358066 - DNA, 1078 bp, Homo Sapiens
  misc_feature (24)..(24): n is a, c, g, or t
  misc_feature (30)..(30): n is a, c, g, or t
  misc_feature (34)..(34): n is a, c, g, or t
  misc_feature (40)..(40): n is a, c, g, or t
  misc_feature (51)..(51): n is a, c, g, or t
  misc_feature (59)..(59): n is a, c, g, or t
  misc_feature (63)..(63): n is a, c, g, or t
  misc_feature (68)..(68): n is a, c, g, or t
  misc_feature (72)..(72): n is a, c, g, or t
  misc_feature (80)..(80): n is a, c, g, or t
  misc_feature (84)..(84): n is a, c, g, or t
  misc_feature (88)..(89): n is a, c, g, or t
  misc_feature (95)..(95): n is a, c, g, or t
  misc_feature (103)..(103): n is a, c, g, or t
  misc_feature (122)..(122): n is a, c, g, or t
  misc_feature (124)..(125): n is a, c, g, or t
  misc_feature (131)..(131): n is a, c, g, or t
  misc_feature (133)..(133): n is a, c, g, or t
  misc_feature (135)..(135): n is a, c, g, or t
  misc_feature (138)..(138): n is a, c, g, or t
  misc_feature (140)..(140): n is a, c, g, or t
  misc_feature (145)..(145): n is a, c, g, or t
  misc_feature (151)..(151): n is a, c, g, or t
  misc_feature (163)..(163): n is a, c, g, or t
  misc_feature (166)..(166): n is a, c, g, or t
  misc_feature (169)..(169): n is a, c, g, or t
  misc_feature (175)..(175): n is a, c, g, or t
  misc_feature (188)..(188): n is a, c, g, or t
  misc_feature (192)..(192): n is a, c, g, or t
  misc_feature (208)..(208): n is a, c, g, or t
  misc_feature (218)..(218): n is a, c, g, or t
  misc_feature (222)..(223): n is a, c, g, or t
  misc_feature (233)..(233): n is a, c, g, or t
  misc_feature (237)..(237): n is a, c, g, or t
  misc_feature (240)..(240): n is a, c, g, or t
  misc_feature (266)..(266): n is a, c, g, or t
  misc_feature (286)..(286): n is a, c, g, or t
  misc_feature (291)..(291): n is a, c, g, or t
  misc_feature (294)..(294): n is a, c, g, or t
  misc_feature (299)..(299): n is a, c, g, or t
  misc_feature (302)..(302): n is a, c, g, or t
  misc_feature (344)..(344): n is a, c, g, or t
  misc_feature (350)..(350): n is a, c, g, or t
  misc_feature (363)..(363): n is a, c, g, or t
  misc_feature (379)..(379): n is a, c, g, or t
  misc_feature (381)..(381): n is a, c, g, or t
  misc_feature (384)..(384): n is a, c, g, or t
  misc_feature (391)..(392): n is a, c, g, or t
  misc_feature (394)..(394): n is a, c, g, or t
  misc_feature (396)..(396): n is a, c, g, or t
  misc_feature (402)..(402): n is a, c, g, or t
  misc_feature (405)..(405): n is a, c, g, or t
  misc_feature (407)..(408): n is a, c, g, or t
  misc_feature (412)..(412): n is a, c, g, or t
  misc_feature (414)..(414): n is a, c, g, or t
  misc_feature (417)..(417): n is a, c, g, or t
  misc_feature (421)..(422): n is a, c, g, or t
  misc_feature (425)..(425): n is a, c, g, or t
  misc_feature (428)..(429): n is a, c, g, or t
  misc_feature (431)..(432): n is a, c, g, or t
  misc_feature (438)..(438): n is a, c, g, or t
  misc_feature (440)..(440): n is a, c, g, or t
  misc_feature (444)..(444): n is a, c, g, or t
  misc_feature (447)..(447): n is a, c, g, or t
  misc_feature (449)..(449): n is a, c, g, or t
  misc_feature (451)..(451): n is a, c, g, or t
  misc_feature (454)..(454): n is a, c, g, or t
  misc_feature (456)..(458): n is a, c, g, or t
  misc_feature (460)..(460): n is a, c, g, or t
  misc_feature (464)..(466): n is a, c, g, or t
  misc_feature (470)..(470): n is a, c, g, or t
  misc_feature (472)..(474): n is a, c, g, or t
  misc_feature (484)..(484): n is a, c, g, or t
  misc_feature (491)..(491): n is a, c, g, or t
  misc_feature (496)..(496): n is a, c, g, or t
  misc_feature (498)..(498): n is a, c, g, or t
  misc_feature (503)..(503): n is a, c, g, or t
  misc_feature (505)..(505): n is a, c, g, or t
  misc_feature (515)..(515): n is a, c, g, or t
  misc_feature (530)..(530): n is a, c, g, or t
  misc_feature (537)..(537): n is a, c, g, or t
  misc_feature (543)..(543): n is a, c, g, or t
  misc_feature (554)..(556): n is a, c, g, or t
  misc_feature (561)..(561): n is a, c, g, or t
  misc_feature (630)..(630): n is a, c, g, or t
  misc_feature (675)..(675): n is a, c, g, or t
cccccacttgttgacaatgaaatnatgtanatgngaccanattcccctctntctccctncccnaccanattnatatgccntaanattnntgcccnctcctgantcctgcctcactctccatnannaacctnananctncnctcanaccctnctgcaacttccnaanctncccctncccctatctcttntctncaacccagccctctcntgagctctangctnnattacacccncttnatntacactcaccccatctgctcccactncagcaccatcaactcaacangtcanaanccaantgnatcatctgtgtccccttcccccacaatccctcctttttctantaaaanaccctttatcccntcatccacccattctnanatnccgacgnnancntcgacnaancnncccngnccngccnngcnaanncnncccacnancacnaancncnacncnnntncacnnntacnannncatcaacagncacaccncccananaaccncngtgcacacanacacgaggacccganccaaccngaacangcacagcgatnnncctcncccgttgcacacaaacctttaaaagttccccggcccgtgaacaaatgtacaattctctattctgacatnacagaccaccggataaggccccattcttcctttacaccctccccnggtcagcctaggagagttgtttttcctggaaagggtgcctgcgttttactgtctctgtgcctttggtcttgctatccccagcccctggaaagccacccttttcttcccttcaaagcccatgcggaaaccacgtccttcatgaagccctccctgatgtaccaaccactgggatctctccctctgctgaaccaccgtagcactttatttgtacctttctcatggcacttaccatattcagccatgtaatatagttatttgtgcacttgtcctttgactgttcttagactgtaagcttgccaagggcagggactgtgttttattcatctgtatccatcacagcactaggcgtggtgcatagcacacagcagttgctcaataaatgtttgttggattaaatccttaa

SEQ ID NO: 358067 - DNA, 420 bp, Homo Sapiens
  misc_feature (11)..(11): n is a, c, g, or t
cgcttttgagnatgtttcgaaacctttctgcgggctgtgaccaagctaggcttcaagattgtctccaaggacctgaccaacagccatttcttcttgtttgatttccaaaagactgggccccctctggtagggcccaaggctcagctttcaggcctgcagcttcagccatgtctctacaagcgcaggtgacctctggatcttccttgaaaggggaggcagatctcaaactccaggctcagaactgtgaagactgtttccagcctggctgtgagccaagacctggttcctggtggaccctgaggacaaagtgtgataaaacctctggctcagacttgctctactgaaggcttcttggttataagatgcataaagtcactggggctagctaaacaataaagagtttattgtgagaacatgggg

SEQ ID NO: 358068 - DNA, 908 bp, Homo Sapiens
  misc_feature (509)..(509): n is a, c, g, or t
  misc_feature (512)..(514): n is a, c, g, or t
  misc_feature (532)..(534): n is a, c, g, or t
  misc_feature (540)..(540): n is a, c, g, or t
  misc_feature (544)..(545): n is a, c, g, or t
gtcttcaaattccagtaaggcatagcacttttaagaaattagaatttttctatcatctatgcaaatgatatttatgttaatattaaatatcttatgttacactgggagtaatttgaggtgcaattatttttattactactttgaatagaggaccattatccttctttcttcagaaaactaagaagtaagtgtaacttttaaagtaagtatatatcagtgagagtaggcttgttttacaactatttctagccagtgagttgtgttttcatgtctcatcaaaagacaataccacattgcatcattttacaaaatatgttgtcattttcatttcagttgtaacataggaaaatagatatttcctagatgatttctgagtttcttactgcaaagaacagttataaattggtatacatgtgtctctgtaatagggataatattgatatatctgttgctacatatttaagaatcattctatcttatggttgtcttgaggccaagatttaccacanttnnncagtgtatttaattggtnnnagaagnaagnnccatgtcccatttgtagatctttaagattttatctttgataactttaatagaatgtggctcagttctggtccttcaagcctgtatggtttggattttcagtaggggacagttgatgtggagtcaatctctttggtacacaggaagctttataaaatttcattcacgaatctcttattttgggaagctgttttgcatatgagaagaacactgttgaaataaggaactaaagctttatatattgatcaaggtgattctgaaagttttaatttttaatgttgtaatgttatgttattgttaattgtactttattatgtattcaatagaaaatcatgatttattaataaaagcttaaattctcatct

SEQ ID NO: 358069 - DNA, 1668 bp, Homo Sapiens
  misc_feature (846)..(846): n is a, c, g, or t
  misc_feature (849)..(849): n is a, c, g, or t
  misc_feature (851)..(851): n is a, c, g, or t
  misc_feature (854)..(854): n is a, c, g, or t
  misc_feature (859)..(859): n is a, c, g, or t
  misc_feature (861)..(861): n is a, c, g, or t
  misc_feature (867)..(867): n is a, c, g, or t
  misc_feature (881)..(881): n is a, c, g, or t
  misc_feature (903)..(903): n is a, c, g, or t
  misc_feature (906)..(906): n is a, c, g, or t
  misc_feature (909)..(909): n is a, c, g, or t
  misc_feature (911)..(911): n is a, c, g, or t
  misc_feature (933)..(933): n is a, c, g, or t
ggctgggtaccggtccgggaattcccggggatgtcaccatcaccaacacaggcgggcagcagcagctgacagtgcagaatgttgtctgggaacaacctgaccatcagtgggctgagccccacccagatccagctgcaaatggaacaagccctggccggagagacccagcccggggagaagcggcgccgcatggcctgcacgtgtcccaactgcaaggatggggagaagaggtctggagagcagggcaagaagaagcacgtgtgccacatccccgactgtggcaagacgttccgtaagacgtccttgctgcgtgcccatgtgcgcctgcacactggcgagcggccctttgtctgcaactggttcttctgtgggaagaggttcacacggagtaacgagctccaacggcatgcttcgcacccacacaggggacaaacgctttcgagttgcgcccagtgttcagaagcgcttcatgaggagtgaccacctcaccaagcattacaagacccacctggtcacgaagaacttgtaaggccaactgcggcgggaggccctgaagatgcagtcccccacctgtgtcctccctgggcccctggtggaaaggagccctgtggctgccttgggcctgccctcagccccactcctgttctgcaactgtccccacaggaaggggctctgttcccagtattgtcctccttctgaagccccttggctctgccttggcccttcccctcaccacgagctcccggcctgcccagactgtggacactggccgtgcccaatgagacgttctaaaccaggacgcgtgggaacccttatttccaaaggaaaaacatgcatttcactccntcnangancaaantnagcccntaccccccaccccnatccccgctcccaacactgccngantcncntcatgccatgccccctctcctncacctccctggccctgccggccactgtggacgccctggggcttggcacccacctctggagaaactcggggccacctccactccatgtgcccagccccgccacaacctctcctccagcacattccagctctatttaaaaagtaaagacacccaccgacaccggatccccctcattatctatggagaacgttgccttatactctctacttcagatgatgaacactgtgtactgtgtgtgctttaaagaagttttatttaattgctcccttcttcctttccttgttattcacctccctgatgcctgctttcagttgagggttgggggcaatgatgagcatatgaattttttctcactctagcaattcccttttctaaatgacacagcatttaaactcaaatctggattcagataacagcacctgcacatcctgcacctcctccctctcccttcacctcacccctgcccggcccaagctctacttgtgtacagtgtatattgtataatagacaattgtgtctactacatgtttaaaaacacattgcttgttatttttgaggcttttaaattaaacaaaaatccaactttatttttagttgtaactgcttgaggtatgttttatgaattaagtgacagatttgttatcctttattaacgtactttgttggtcagcactgggctgacaaaaattttttcttgctaataaatttagttgcctgaggcaaaatcttcaacttg

SEQ ID NO: 358070 - DNA, 619 bp, Homo Sapiens
  misc_feature (65)..(66): n is a, c, g, or t
  misc_feature (69)..(69): n is a, c, g, or t
  misc_feature (73)..(73): n is a, c, g, or t
  misc_feature (82)..(82): n is a, c, g, or t
  misc_feature (84)..(84): n is a, c, g, or t
  misc_feature (137)..(137): n is a, c, g, or t
ggtcttgttttcccttacccctttctttgaagaaagggtgtcaaaagacattacctgcctctaannccngatntcccccgcngncctcttaaagtggacataatcctagagctttcattctgtttagaagttcatgntcatcttagcccatttggaacttcttccattctctatcttttctccacggtggctgggcttgtctgcaaatcattgtgtcaaaatcaaactattttcaaaacagccctttgcttctgagcccctcccctaagtcctctgtgggggtcccatgattctgcagaggtatgggacagaatcttcagattttaccccttgagtctcttcctagtcatatcctggttccctcattctaatattgacaaaggatgactcattaagtgcaactggttatgtaactttcaaatactttcattgtgtatgtcaggatctgaggaacaaaatgatgtcatttaatcggaatctaaatgtgacacaaacaacgtgccagcaatacctgcttgtgaaataatgttctgagcccacagtgttcctgggtatgtgagtttatatcaagtgaaaaggctgcttaattgacattaaagttttggaatgtaaagcttcc

SEQ ID NO: 358071 - DNA, 728 bp, Homo Sapiens
  misc_feature (588)..(588): n is a, c, g, or t
cagggctactacggttgatcttgcaactctgtaaatatgtatgtagacacttttaaaagcacgtatttatgtccctgactgtaaatgctccatttttaaagttttataacttgtgttatttaatgagtcagtcaatcggctgcagtacgggatctgataaggatctaggagaagggtctcatgcggaccctcacatgggcagaaaaatggtggtcattggccgacatcacagttttcctgtttcccacccagctaaaaaccgttgtttgctttaaattttcataaactggaatcctttcacccgctcctacagctaaccctcacaagcatgaagtgctgtggctgttccttatcctaatgatgccgcttttgtccccgtaaatgttaaaactcatgaagcataccccggcctctcagttcttgagggcctccccaccgcagcagcaaggaaagctcacgaaccccaaacctggcaagtcacctgcagcccatggtgagctctgggaaatgtggttgaggccttggggtcactccttttttgcatgtgcaaatgtgctggtcacccttcaacgctcccagacggtcagngaaaactgttccaatcatgaaaaggggggatgattttgtaaaagtggcatttcctggtcagtggtggtcttcaagacgacagctctgtatctgccatgtgaagagaattaacaataaaagtgtgaagagcgattgtgggg

SEQ ID NO: 358072 - DNA, 1036 bp, Homo Sapiens
  misc_feature (9)..(9): n is a, c, g, or t
  misc_feature (13)..(13): n is a, c, g, or t
  misc_feature (25)..(25): n is a, c, g, or t
  misc_feature (33)..(33): n is a, c, g, or t
  misc_feature (47)..(47): n is a, c, g, or t
  misc_feature (49)..(49): n is a, c, g, or t
  misc_feature (116)..(116): n is a, c, g, or t
  misc_feature (199)..(199): n is a, c, g, or t
  misc_feature (234)..(234): n is a, c, g, or t
  misc_feature (274)..(274): n is a, c, g, or t
  misc_feature (304)..(304): n is a, c, g, or t
  misc_feature (665)..(665): n is a, c, g, or t
cccgaagcncganccccggcccggnggccccangttccaccaccagntnccgggtctcctgcacgatgggagctgtgcccccactccgcctgcgaggagagccctggtgccctggnccagcccccccacgccgctggcccctcagcagactggcactgggccggcgctatggctgccttacgtgtgcgtgtggacctcntcgcctgccccagccccaccagctaccccagcccntgctggaccccaggccccatcctgatcccgaagcaggccntcgccttcgcccccttctccccacccaacncctacggctggtggtcagccacggctccatcgacctggatgtcggcggtgaagagctgtgacaggccggacggggaggcccagcagggagagagggtctctctcctagctgctacccaagacctccagaaagagcccttagacctctgggagggaaataacccttaactccaacatagctctaaccctaaaatggggttggtttgaacacccccaaaaatctaagccctaaccctttgtaactgctaacccctgagccacccccactcccacagggagccccggccatttgctgccctccccacccctgcccaaacataaaaactaaaggaaccatccacccccctaaaccccttcctccncaggaaaaaaaaccataaggagcaggggccaccccacggcatctcccaaaaagtacaggcctcaggaggaggtggaactaatgtagggggtggcactccccagaaactgccctcacgaggggactgggttcgctctcagctctgcagctgtctgcggtggggggaaggttggggggtgtctggaggcatgttcccctcaccaccccccgtgggtctcagggaggccgggtgtgacctcatctttctcatggtgctatcctggtgctattggggtggggagctccctcccctcccccacaccagaaaggggtatgttgggggattggaagcacttgaactttttattttattaaaaccttgttataagcagc

SEQ ID NO: 358073 - DNA, 1031 bp, Homo Sapiens
  misc_feature (35)..(35): n is a, c, g, or t
  misc_feature (120)..(120): n is a, c, g, or t
  misc_feature (124)..(125): n is a, c, g, or t
  misc_feature (161)..(161): n is a, c, g, or t
  misc_feature (167)..(167): n is a, c, g, or t
  misc_feature (726)..(738): n is a, c, g, or t
  misc_feature (761)..(783): n is a, c, g, or t
  misc_feature (805)..(856): n is a, c, g, or t
  misc_feature (878)..(879): n is a, c, g, or t
  misc_feature (881)..(881): n is a, c, g, or t
  misc_feature (891)..(891): n is a, c, g, or t
  misc_feature (902)..(902): n is a, c, g, or t
  misc_feature (904)..(904): n is a, c, g, or t
  misc_feature (910)..(910): n is a, c, g, or t
  misc_feature (913)..(913): n is a, c, g, or t
  misc_feature (925)..(925): n is a, c, g, or t
  misc_feature (935)..(935): n is a, c, g, or t
  misc_feature (937)..(937): n is a, c, g, or t
  misc_feature (943)..(943): n is a, c, g, or t
  misc_feature (945)..(945): n is a, c, g, or t
  misc_feature (956)..(956): n is a, c, g, or t
  misc_feature (959)..(959): n is a, c, g, or t
  misc_feature (964)..(964): n is a, c, g, or t
  misc_feature (970)..(970): n is a, c, g, or t
  misc_feature (974)..(974): n is a, c, g, or t
  misc_feature (987)..(988): n is a, c, g, or t
  misc_feature (992)..(992): n is a, c, g, or t
  misc_feature (1001)..(1001): n is a, c, g, or t
  misc_feature (1016)..(1016): n is a, c, g, or t
ccatgggcccatgacggaatggacctctggctgcntcagtcacccttccaggaggcactattggccacatacactgccatactgcaaggacaggtcacctggagcttgctgtgcacgccnccannagtgtccctgatgccagcaacccttgcacggcccgncccagngggaggcacccccggaattgctctgccttgtgtcccacttctacccttctgggggcctggaggtggagtgggaactccggggtggcccagggggccgctctcagaaggccgaggggcagaggtggctctcggccctgcgccaccattccgatggctctgtcagcctctctgggcacttgcagccgcccccagtcaccactgagcagcatggggcacgctatgcctgtcgaattcaccatcccagcctgcctgcctcggggcgcagcgctgaggtcaccctggaggtagcaggtctttcagggccctcccttgaggacagcgtaggccttttcctgtctgcctttcttctgcttgggctcttcaaggcactgggctgggctgctgtctacctgtccacctgcaaggattcaaagaagaaagcagagtgagggcactcactgccatcctgtggaagccaccatcatctctggcccaagcttctgtagtagctccctaaaataataccctatcatctgctcctaatccctccaatctctctacactgagtggctggaatgcnnnnnnnnnnnnnctttcacttatataagggataannnnnnnnnnnnnnnnnnnnnnngagacggagctcacctcttccnnnnnnnnnnnnnnnnnnnnnnnnnnnnnnnnnnnnnnnnnnnnnnnnnnnntgggttcaagcaattctgtggnntnagcctcccgngtagctgggantncaggcncanccaccacaccantgaatttttntntttttngnagagacggggnttnacaanttggcnaggnggtcttgaattcnngacncaggagatntgcccacctcagctnccaaagtgtggggat

SEQ ID NO: 358074 - DNA, 591 bp, Homo Sapiens
gtatctatatatatatacacatatgtatgtaagtttttctaccatgatttctacaaacaccctttaagtcccatcttcccctgggcataggccatagggatagaagttaaagttcttgagcttattcagaagctggatctgcaatctgaatgctactcataacataacaaaatagtatgttaaacagctcttaaatcttactggcttaccacattaaatgatttctctctcctaactcagctcaaatgggcagccatccatgggatgagtcagagggtcagactcttccagtctgtagctctaccttctcttagggtacttagatggatcccctgttctacaaactgcccagtcagcaagggaagaaaaagggcagcaatgaccctcaatgggccatttgagggatctggcctggaaatgggcttcctctcttcttctcacacctcactggctggaaacagtcacatgaccccagtcacatgaaaggccaggaaacttagtttagctgtacacccaggaagggcaaagctgtttaagggccactagctagtctctgccactaataataataaaagtaattttgaatcagga

SEQ ID NO: 358075 - DNA, 1148 bp, Homo Sapiens
  misc_feature (10)..(11): n is a, c, g, or t
  misc_feature (18)..(19): n is a, c, g, or t
  misc_feature (34)..(34): n is a, c, g, or t
  misc_feature (43)..(43): n is a, c, g, or t
  misc_feature (61)..(62): n is a, c, g, or t
  misc_feature (70)..(70): n is a, c, g, or t
  misc_feature (79)..(79): n is a, c, g, or t
  misc_feature (86)..(86): n is a, c, g, or t
  misc_feature (88)..(88): n is a, c, g, or t
  misc_feature (91)..(91): n is a, c, g, or t
  misc_feature (97)..(97): n is a, c, g, or t
  misc_feature (123)..(123): n is a, c, g, or t
  misc_feature (127)..(127): n is a, c, g, or t
  misc_feature (130)..(130): n is a, c, g, or t
  misc_feature (140)..(140): n is a, c, g, or t
  misc_feature (146)..(146): n is a, c, g, or t
  misc_feature (148)..(148): n is a, c, g, or t
  misc_feature (172)..(172): n is a, c, g, or t
  misc_feature (190)..(190): n is a, c, g, or t
  misc_feature (324)..(324): n is a, c, g, or t
  misc_feature (370)..(370): n is a, c, g, or t
  misc_feature (376)..(376): n is a, c, g, or t
  misc_feature (414)..(414): n is a, c, g, or t
  misc_feature (440)..(440): n is a, c, g, or t
  misc_feature (459)..(459): n is a, c, g, or t
  misc_feature (461)..(462): n is a, c, g, or t
  misc_feature (466)..(466): n is a, c, g, or t
aaaaaaaccnnctgccanntggtaaccccgtctnacaaaaaanaaaacagccaggatgtgnncagcctgnatcccagcncccaggngntgngcaggngaacgctgaatccaggagcggaggtnccanganccgaaaccancccccncncccagcctggcaacagagcgagcnccatctcaaaaatttttnggggaaaagaaaagaaaatatgccctctaccttctgagcccgaggagaaaagaaagaaaatatgctctgttgttctccccctcagatttattttcgtgtttttgtaggatcagagaaaggtgaaaatgaagcantggaatcctgtaagtaagaagttttgtgatacttaagtagcctgcntgcatncctaaaatttagattctaaatcttctgtgttcgttttngtgcctgaggaatactgctgtgccangtggctcctcaaggcgatngnngggntgcaaccttgctgttggcacggcctcttcaccagtgtctacactctttttccccagctggtaagcgggcccctcagtgctaccccagttccgtcaactctgccaggactgtgatgctgttcaaccttggcagcgcttactgcctgaggagcgaatatgacaaagcccgaaagtgtctccaccaggcggcttcaatgacccatcctaaagaggtgccccctgaggccatcttgctggcagtctaccttgaactgcagaatggtaatactcagctgcccttacagatcatcaaaaggaatcagctgccccctgcagtgaaaacacactctgaagtgacaaagaacccagcccctcagcctgtccacccgatccagcccatccaaatgccggctttcaccactgtgcagagaaagtgatacttcacttttggaaaactgttacctgagacccaggggagaatttaactggccattttagttgtatcacagcagaatgaataaaagatggtgaaggctgttaattttgagtcaattctacccctgacttttggccaaaagcttacttaaaattaaggatttactaagtcatcatcagctgtttttcttaatttcagccagactattaattttgagccattatgtaatatatgccataggcaattaaaacataattttatcagaaaa

SEQ ID NO: 358076 - DNA, 1112 bp, Homo Sapiens
  misc_feature (6)..(6): n is a, c, g, or t
  misc_feature (9)..(9): n is a, c, g, or t
  misc_feature (11)..(12): n is a, c, g, or t
  misc_feature (14)..(14): n is a, c, g, or t
  misc_feature (20)..(20): n is a, c, g, or t
  misc_feature (45)..(45): n is a, c, g, or t
  misc_feature (49)..(49): n is a, c, g, or t
  misc_feature (51)..(52): n is a, c, g, or t
  misc_feature (57)..(57): n is a, c, g, or t
  misc_feature (61)..(61): n is a, c, g, or t
  misc_feature (65)..(65): n is a, c, g, or t
  misc_feature (68)..(68): n is a, c, g, or t
  misc_feature (79)..(80): n is a, c, g, or t
  misc_feature (85)..(85): n is a, c, g, or t
  misc_feature (94)..(94): n is a, c, g, or t
  misc_feature (505)..(683): n is a, c, g, or t
  misc_feature (716)..(716): n is a, c, g, or t
  misc_feature (727)..(728): n is a, c, g, or t
  misc_feature (733)..(733): n is a, c, g, or t
  misc_feature (737)..(737): n is a, c, g, or t
ttaaanaangnnangggttnaggttgaagaggacttgtaggaagnaatnannccttnaagncttnttntttttcaggtnngatgngccattccnaatttgttgagagtttggtttataattgtctcttttgtcttgttagtaaacattcatttgcaacagttttgaaggtgctgagtggaaaaccgaaacacatggttattgcgtattggacctagaatgaaataattgcctcaatatttaacaacaagccattcttatctcaaagatttaaattcccgaatgtcccattcgcaaatcatatgcaattgaagtgagcagcatgagcatctgggtcatgagggccttcatttacgtaaatttgtcactaaaacccagtagtagctctacaaaatcttaaactgctgcagtgctcaaggagatggaatatctttgtcattggtgctgaggagagcatttcggtagaagacagttgcgcctgaagattgagtgtaaatcattcaaacnnnnnnnnnnnnnnnnnnnnnnnnnnnnnnnnnnnnnnnnnnnnnnnnnnnnnnnnnnnnnnnnnnnnnnnnnnnnnnnnnnnnnnnnnnnnnnnnnnnnnnnnnnnnnnnnnnnnnnnnnnnnnnnnnnnnnnnnnnnnnnnnnnnnnnnnnnnnnnnnnnnnnnnnnnnnnnnnnnnttgtaaaattcaccttgagttttctcatctgcnaaatagaaaannaaaancctngctccctcccttcactacctcacaaggatattgagggtaaaggagaaaataatgggaaagtgcttgtgccgtggatgaaaagtgctattaaaagtcaaaggagtgttctgtttcaattcatagtatgatcagggaaagtgtaactgagtatactttgttgacttgggaaacctggagcactttctttggttggttaacgaagcatgcagatgtggaagcagacgttactattatccctactatggtcttctgtcatactgagacaggctgttttaattacctggttttacataggaaagaagaaatattaaggcttaaagtttgtaatgatcaatggctcataattcattaaatcttttcatacaaggaaaaaaa

SEQ ID NO: 358077 - DNA, 1041 bp, Homo Sapiens
  misc_feature (7)..(7): n is a, c, g, or t
  misc_feature (13)..(13): n is a, c, g, or t
  misc_feature (49)..(49): n is a, c, g, or t
  misc_feature (56)..(56): n is a, c, g, or t
  misc_feature (77)..(77): n is a, c, g, or t
  misc_feature (443)..(443): n is a, c, g, or t
  misc_feature (529)..(529): n is a, c, g, or t
cagcccngcgccnccatgcagctgagatggagctgaaggaggaggaggntccccgncagcgcagcgcatcaaggagntggaggagatgcagcagcggttgcagaggccctgcaactagaggtgaaagctcggcgagatgaagaatctgtgcgaatcgctcagaccagactgctggaagaggaggaagagaagctgaagcagttgatgcagctgaaggaggagcaggagcgctacatcgaacgggcgcagcaggagaaggaagagctgcagcaggagatggcacagcagagccgctccctgcagcaggcccagcagcagctggaggaggtgcggcagaaccggcagagggctgacgaggatgtggaggctgcccagagaaaactgcgccaggccagcaccaacgtgaaacactggaatgtccagatgaaccggctgatgcatcnaattgagcctggagataagcgtccggtcaccagcagctccttctcaggcttccagccccctctgcttgcccaccgtgactcctccntaaagcgcctgacccgctggggatcccagggcaacaggaccccctcgcccaacagcaatgagcagcagaagtccctcaatggtggggatgaggctcctgccccggcttccacccctcaggaagataaactggatccagcaccagaaaattagcctctcttagccccttgttcttcccaatgtcatatccaccaggacctggccacagctggcctgtgggtgatcccagctcttactaggagagggagctgaggtcctggtgccaggggcccaggccctccaaccataaacagtccaggatggaacctggttcacccttcataccagctccaagccccagaccatgggagctgtctgggatgttgatccttgagaacttggccctgtgctttagacccaaggacccgattcctgggctaggaaagagagaacaagcaagccggggctacctgcccccaggtggccaccaagttgtggaagcacatttctaaataaaaactgctcttagaaaga

SEQ ID NO: 358078 - DNA, 927 bp, Homo Sapiens
  misc_feature (16)..(16): n is a, c, g, or t
  misc_feature (18)..(18): n is a, c, g, or t
  misc_feature (25)..(26): n is a, c, g, or t
  misc_feature (29)..(30): n is a, c, g, or t
  misc_feature (32)..(33): n is a, c, g, or t
  misc_feature (36)..(36): n is a, c, g, or t
  misc_feature (44)..(44): n is a, c, g, or t
  misc_feature (46)..(46): n is a, c, g, or t
  misc_feature (50)..(50): n is a, c, g, or t
  misc_feature (55)..(55): n is a, c, g, or t
  misc_feature (57)..(57): n is a, c, g, or t
  misc_feature (79)..(80): n is a, c, g, or t
  misc_feature (93)..(93): n is a, c, g, or t
  misc_feature (125)..(125): n is a, c, g, or t
  misc_feature (128)..(128): n is a, c, g, or t
  misc_feature (130)..(130): n is a, c, g, or t
  misc_feature (132)..(132): n is a, c, g, or t
  misc_feature (161)..(161): n is a, c, g, or t
  misc_feature (170)..(170): n is a, c, g, or t
  misc_feature (175)..(175): n is a, c, g, or t
  misc_feature (193)..(193): n is a, c, g, or t
  misc_feature (195)..(195): n is a, c, g, or t
  misc_feature (200)..(200): n is a, c, g, or t
  misc_feature (223)..(223): n is a, c, g, or t
  misc_feature (277)..(277): n is a, c, g, or t
  misc_feature (281)..(281): n is a, c, g, or t
  misc_feature (283)..(283): n is a, c, g, or t
  misc_feature (300)..(300): n is a, c, g, or t
  misc_feature (304)..(304): n is a, c, g, or t
  misc_feature (334)..(334): n is a, c, g, or t
  misc_feature (351)..(351): n is a, c, g, or t
tcgaagaagaaatggngngacgtcnncgnngnnttnaagagatnanaacncattngnttcacggtaaaggaattgcagnncggtgagaggacnagagggactcccatttctaaccacaattcctngcnangntctaggctagggtctctaagcacatttcncctttcatnccccnggaaaacagagtgacctntnagtanatgttctttgctccttgacaganttgaagaggctgagacttggcccactgctaagcggcagaggcatggccagccancgtntngcaatcccgtgctgggnctgncctttctttttccagtccagttacggactncccggccgccactgggncctgccggtcaccaggccactgtgcagtgggcgcagagcatggtcaggagtggcctgcccgtactcctccacccagatgagggccctccagagcctgcaggcatctgtggggaatcccagcctgcaggttcttggagaagcaggtgaacctaaggatgaaagcaaaggagggccttgaggaagcagcccccaggcctggcagccacgcagcggctgagctcatgaacttggttcgcagcctgccttgcccctggaggccacgccaggcgctcacccctgagcccacagcccctgcttgggctgcctggcaccctcagggtggcccggcctcctcctgccactctgagcacatgtccgggggttgccaccagagacggctttgttctcccagctaaggccgtggagctgctgtgtgactgtgtcaggcctggacaaggaagacccttagggatgacgtccccgctgcatatttattcaaggtgactcttgtacttggcaagggaagtccactgtgtgattgtctgtattcttaatataatttgttaaataaacgtttgttttaacctcttaaaaaaa

SEQ ID NO: 358079 - DNA, 837 bp, Homo Sapiens
gcacgaggtgatgtgacagggagtgaagacacttgataccagactctgggagatactctgcaagttgacctggcctctcccccacaggaacaaaacactgcctccagagtctttaaattctcagttatcaacgccaaggtttaaggtctagatagggtttgctatagggtttgctctgacaatttttaaagcttttggattgttctaacatagcttaagctattggttcctaaaaatcccaaatcaagatctatgtagaatataaaggaagcctgaaccaatccttccacatactgttaagatgtagacttggaacaaagctgttgggacccagagcaatgaatttttgaactgaagctactggtactccccagcaccacctcatactaagaattcctcactctgacatgacagtattttttctgaccaggagctgaaagaccctgacattcatgatccaaagatataagaaattttgatatgtctgcatgcagcacagaactttgaacctaggaggcagtcaataaatacatgagaaattcagctgtcattcagttactcttaattctttataaaactctaaatgataccacatatttgtttgtttaaaatggctttcccaaaatcaaagtagactaaagcagccatctttaaaatccaggatcatcaatgctattaacagtatcacgtaaaaagtacaccttaaaatatcttaatcaggcagagttctatggatagagaatagaacagaaaggtagtaaatatttgacatacttcaatataggaacctatctctgtttagtacagcaacctgtctttcagatgataaagtatcta

SEQ ID NO: 358080 - DNA, 756 bp, Homo Sapiens
agcggagtcgcgagccgtggctgccacgggcggtgggcgggcggaggagagcaccggaccaccagtgcaggctgccgagtcggggcggccgcccacggggaagctgcgaggcgcgggagcacctgggggaccgcttgcagcggggacgcgaggacccgggctgggctttcctcacccgggtaccttgttatcccataactttggtatcctgaaatctgaggattccaccaagataatatgataagaactttcagtgatttggggccatatcctacttagactaatgtggaatttccagatttcctgagagcttggtacagcagcacacactgcttgctaatcagcacaggcaataatgccatctctgcctcaagaacggagttattcagggacccttctccccttggatttgacatacagaattacccttatcatgaagcacaatgaggcacgcgaaagtcagaacagaaggacacaacgaagggaacccattacatgcaaaatgcttgcccgggacaacacgtttgacaattgttccgtctactacttacactgacctgggactccacttgacaactccagattgaggcatgaccaccaaggtaatcttatattggtgtgctttcttgcctgttccagcaggaggaaacatttccaggagctgccaaacattatcagagggactcaacccattttcccaggaatgggcgcgagatcttgtaggaagggcttcctttacccagaaaatattgacca

SEQ ID NO: 358081 - DNA, 666 bp, Homo Sapiens
ggcaaatacagaaaagaaagtctcttcctctcaaaaatcggacccaaagttctcattaaatatttcaaatttataaccaaaaaacccttttggcttcttactctccaatgggataaatgttcctatgacgaaatcaccaataacaagaactacgatcaccaaaagaacaatctaaacttttacttcccactccattccagctactgagatacctaaaagaatcaccactgtaatggctccaataattcaaatatcattgatttcatctatcataaatatggaatgctccttaagcaactccaccacagtttctacaaatccaaccacatacatagcaactgcaacagcattggcaaaggcgaacattacaccaattgcaccaccaaattctggccctaaacttctacatattaaataatatactcctcctcctcttacaaatccattaattgctattgctaaactagacaatcctatgatacttatcacaacagtggccatcattattacaaggactgatagacctattccaacttgacccacaatccatgacaatctaatgacatcacaccccaaatgtttaacatacaacgtacttacacccttgatccagcccttcacgactcctttactttctgcagtatacgtgaccacagctctctggtt

SEQ ID NO: 358082 - DNA, 677 bp, Homo Sapiens
ggttgagagttatagaacttttaaatttctttagccaaacaggtctctatttttttaagttatcctaaactccaataaccatacttactgaaaagggagtcctgatacatctaatattggtaacatgtaacattatttgacaaagaataaataaacaatattcttggaagtcaatgttatatatttcaccaaactattattttatatatatataccattttctccctgcaaagcagctcaacaagagaaaaagctctagttatagggcttaaattgatttctatttcaaataatttcctaagagattctagagtagaactgaagagtattctattggaaaagtgaaaggaaagaaatgtaattttctttgaacatgaaaaagaaaacaactttgagagtagtcatttagcagtagatgtgcattattatgagaaaacagttctataagtccagggttaattatattaattggaatgtcagtctttaatgtcgagcttattgtagggtagaaaagagctttctactcagctaacgattactcattgatccaaaacttaaatacatctataatttcctggggctattgtgagtactgtgtatgtatttagcaaatatttaagacctagtaagtgctcaataaattgtagctgttattgctgttgttgtttgtaaaaaaa

SEQ ID NO: 358083 - DNA, 1440 bp, Homo Sapiens
aattaacaaaatttcacttattccaggacacgctggcatttggactcaatgaaaagggcacctaaagaaaataaggctgactgaatgttttccataattttcacacaataacagtccctttctatccagcttgccttccatttatctctagggttagcttttcaggcaacatccttggtcattgcccagaaagtacctgagctatcagtgattggaatggtcacaggaaaccgaatcacatgggtgccctccccttggttttcaagtatcttggagttgtgcacaaaaattaggtcatgcacttcagatgtctcgtgcgttaaacctaccctttgacaatcaggtgctaatgattgtatactattaaaaccagcacataagtattgtaaatgtgtgttcctcctaggttggaagaaatgtctttccttctatctgggtcctgttaaagcgggtgtcagttgtgtcttttcacctcgatttgtgaattaatagaattgaggggagaggaaatgatgatgtcaattaagtttcaggtttggcatgatcatcattctcgatgatattctcactttgtcgcaaatctgcccttatcgtaagaacaagtttcagaattttccctccactatacgactccagtattatgtttacaatccattggatgagtgcagcattataagaccttggtgcccagaaaaatctgtcctttttggtaccaaacctgaggtcttttggaagataatgtagaaaaccactacctattgaaggcctgttttggctaatctgtgcaaactctgatgatacctgcttatgtggattcttttccacactgctttcatttttaagtataaagacttagaaaactagaataatgcttttacaaataattaaaagtatgtgatgttctgggttttttccttctttttagaaccctgtatttaaacaagccttctttttaagtcttgtttgaaatttaagtctcagatcttctggataccaaatcaaaaacccaacgcgtaaaacagggcagtatttgtgttcctaattttaaaaagctttatgtatactctataaatatagatgcataaacaacacttccccttgagtagcacatcaacatacagcattgtaccttaccaatgaaaaatgttgcaacttaaggggtattttatattataaataccctctcttaccctttgttaacctttattacctggtaaattaaaaaagttcgctttttggcccccgcacgcgaaatgagtataagaaaaagcatccctttgtctgtcgcgcctcccggccccttagaaaaaagccttctttgtgaaccccattcccttttgtgcgcccgcggagcccccattcgggaaaacgtgaaaccatttggctccaaaaaccggttttctccagaggggaaaacccgggcgagactatgaaataaag

SEQ ID NO: 358084 - DNA, 857 bp, Homo Sapiens
cagcataagacacggagaaaaacctgttaggtatctggccctcatgcctgaaatctattgaaccaaccactccccacagcaataagagttctcaagatgagaagaattttctcactccatatagaaaatcatatttgggaagccagtcccaaaagaccgaatattgtagaattccatttatatgaaatgaccagaataagcaaatctacagagagagaaatagattagtggttgccaggggctcggggatggggtgggcactgggagaaaatgagaggtgactgctcaagggtacagggtttctttttggggtaacgaaatgttctaaaattgactgtggtcacggttacacaactttgtgaatacactaaaaaccactaaattgtacccttaaaataagtgaattgtaaggtatgtgaattatatctcaataatgttacaaacatattaagaaacgaagacataccccaaagagaaggaaacaagaggctcttccaaaccaaatcgtaccagaagaaaacagtagccaagtctgatggaaggagcttgtttcttgcatgctattttatcatcatcactttaacccgatttcacatttttaattcatttctaaattattttaggttatcggcagatttctaactttgttctcattagagagcagagtcagtgttccgcagacagactgggctggcgtaacaaaccaaaactaaacaacaataaaaacccaatgaaaaataatctcatgctttggggctatgtgttaccagtcagaagagaagagctgatgtccatttctaaaggaaaataaaatgcctacaagtacaatggcatcttatgactcatgcctaaagcac

SEQ ID NO: 358085 - DNA, 698 bp, Homo Sapiens
cagcccaagtaaccgtgtattaaagtagccaatagagaaagtaatgcaacaccaagataatcgttcgagatgatggatagcccagttacccttatatgatcatcacacatgtacaggtatcataatagcacatgtagccccaaatatgtacaactattatatatctattatagatttaaaataaaagtgatcactatgtctacgaacattttttggtgctcacaatcggggagagggtgtgattctggcatctagtggtagagcccctgggtgctgctaaacagatcctcataataaagaattatttgacctaaacctgttacaggaaaaaccttagacaaactaaatttaacagagtttaaccaagcaaagaactattcatgagtcaggcagcctgcgaactagaatagattcagagaggcttccggtgcaaccaagtggtagcagaagattcatgaacagaaaaagccaagtgacatacagaaaatggaagtgaggtacagaaacaaccagattggttacagcttattgccttatttaaagctgatttcaacagttggctgcctgtgattggctgaaactcaatgattggcacaaatgtaggttacagtctgtttacatatccagttaggttacagttcactatgtacagaaaaacctttaggccacacttaaaatatgtaaggagacagctttct

SEQ ID NO: 358086 - DNA, 699 bp, Homo Sapiens
aaaggtctaatactcctacgtattaagataggaaggaatacttaactagactacattctgtgtatgatgtgcatgtatattggtgtgtgtgtgtatgcaagctcacagctgtctgctgcatgtagcatcgtggaatatatctgcaagataagagaggtgctgttaaaatgttctcatattctacaggtgaaaaacaagggctgcattatttttaaactcatcaaccattcacccccctcgccctagcaggctcgggaaaaaatcaaacccaagatttatttcaatgagaaaaaaaacacaaaacactattatgccaaaccactgctaatttagaggaccaaaaggacatgactagatgaaatacatgccgaaaatttttgagcagtgctgaagggcgttctcgtaacatatacctactttgcatggttgtaggcttcaatctcttccagtaatacgctgtcgttcaaagagaaaggactggtctttgccagaactttaagtaccatgccagcttcagagccaacaaagatgactgtgtagttctggtagggtccggctgaatggtccactgagatggccgtcagtctgtacctgacccgagtctttgtgaaccagggctcatcagcaatgggtggaacggcagagtccatcaggggatgagatttgatgaatgacagagtttcatccgggaaatcgatg

SEQ ID NO: 358087 - DNA, 710 bp, Homo Sapiens
  misc_feature (218)..(218): n is a, c, g, or t
cccagaaagccttcaaatgtttaaaaggaagtcccatatgatagagaaatatcttttcaagggtagaatgatatttccttataaaagtgacaatcaaaaaagactcatttgtatacttgccaaagtttaaaagttttttacattccttaccctaaacccactgccccatccacccagaattcagaaagggtttggcatagatccagggctccagggcncaggtcattttgttattagtctagggcttttgtcctccacagtctaggcagggcatctttgtatgtgtgttgctggttggggccagggacgggggcaggcgggagttgtccaggtttaagattgtttgttttccatcagatcctttttaactttctactgtaattatttcagttccccgaagttgtatctcaaatgttggggaaatgctgccttgactattttactttggaaggttttactagatatcagtttagtagattaatgacgttgttaatctgtctgctcaaaagacaccagcaagggggtatactttgctgaactgataaattattctattaaggactaacccagtacttggcaaaattaggaataacttttcccctccttctttactaataaattttccaagttgcatactgttgttgcaagtttctgtaatttttttctgtatacctttctattgtctgaatttaaataaaaatgtttctaat

SEQ ID NO: 358088 - DNA, 300 bp, Homo Sapiens
gagctttggatatgttttatttaatgtggtggcaattcatccaaggggtgatgttctcccagcatttggacacacagggagaattcagtgcagatcattccctccaaaagtgaaaggccaagagaggactacaaggactgcctgggctggatggggttggactcaggctcctgggagtgagacgtttgaccaagcaattccacttctgggaatctatcaaacttcctcttctggggagactcagctccttctggagccctcttcctcgaaccgaattcctgcagcccgagggatccacta

SEQ ID NO: 358089 - DNA, 1043 bp, Homo Sapiens
attggcgtgagccgccacagtcccggaccaatcaacttaatcttttattagcttggctcagccagggccaattaaagcaaagcccttgagttccctttaacagggactggagttatgatgcatgtgttacgacttttggcccactgtccatgcaactctaagtgcaggttgatttgctttccagaaatcccaaaggggctgctcttggatcaccgaagagccttacctatatcaaatcaaaaagacattctgggtcagattagactatgctcctggccctacagattgcacataaactatcataaatacagctttttcagggaactagttctaaaactcttacctactgagaataagtcttaacactaagatgactgtattatatcaatttattattagaatcagacttatacctagcacaattaactattgtgtgggcaaagaacatttaaagggcatagtagaggtaaggagagacacatactcagctagagataaaaatactaagttgcactgattacttaaaatactagtcacaccataaaagtgccctgtagtttcaaaaacacgtaagcaatgaaatgttagccattatgtgttaaactacttaatctcatttctgtgatgtgaatatttttaaccccctttttgtagatgagggaactgacaagtgacttgtccaaggccatatagctgtgagaaaacccatgcattctcttttcagagttcatgctatcactcaactttaaagtaggccaagattaatgttggtaagggtttgtaatctgtaagaatgctaaaaacgtaagtatatataccattttagatttgacattttgtatctggccagtttttaggagaacttttcattttgttaagtatgcatgaatatagttgagtatatgagtaactggttcttatgctgctgttttgtatttttaccagcaggaagattgcaaaagttgatgtatgtaaatcttgaaatatttctaagttttatgtataacaaaatatgtattttaataaactccttttgatatttt

SEQ ID NO: 358090 - DNA, 1130 bp, Homo Sapiens
ctctccagtcctgccgcccggtaacaaaaccggggttcccgccacacgcacccggtagggctcaggacgctttatcggcgacaatggctggctgaatgggaggcctgaggtcctgaaggaaccgggggtgctggcgaccgggacctcgaggccgctgctggggaggacgctggccagcgtgcagggggcggaggcggggctgtgccgggaggctcccatctcccgcccctgcacaaccctgggcagggccgccgctccgccgccgcgcgcagatccggctctcaccctcggctcccgatggcccctgcggcgcctccttctgcggactctgcgggaccctccccggcaggcgctgtgccctggagaaggcacaggtggctcaggcatggcctgcggggacggcggcgcggaaggcagcgccggtgctggaggcccccccgcagcaggagcagctctctcatacaaagctttctgcagaagacacatggaacctgcagcaggagaggatgtacaagatgcaccggggccacgattccatgcacgtggaaatgatcttgatcttcctctgcgttctggtcattgcccagatagtgctggttcagtggagacagaggcatggccgatcctacaatctggtgaccttgttgcagatgtgggttgtccccttatatttcacgataaaattatactggtggcggtttctgtctatgtgggggatgttctccgttattaccagttacatcctcttcagagctacccgaaaacccctctcaggaaggacaccacgattggtctacaaatggtttcttttgatctacaaactcagctatgcatttggtgttgtgggttacttggcgatcatgtttacaatgtgtggattcaatctgtttttcaaaatcaaagctagagattccatggattttggcattgtgtctttgttctacggcctctactatggagtaatggggagagactttgccgagatctgctcagactacatggcttccactatagggttctacagtgtcagccggttgcctacaaggagcttatcggacaatatctgtgcagtctgtgggcagaagatcattgtggagcttgatgaagaagggctcattgaaaacacctac

SEQ ID NO: 358091 - DNA, 1154 bp, Homo Sapiens
ccggctctcaccctcggctcccgaggcccgcggcgcctccttctgcggactctgcgggaccctccccggcaggcgctgtgccctggagaaggcacagtggctcaggcatggccgcggggacggcggcgcggaaggcagcgccggtgctggaggcccccccgcagcaggagcagctctctcatacaaagctttctgcagaagacacatggaactggtgaccttgttgcagatgtgggttgtccccttatatttcacgataaaattatactggtggcggtttctgtctatgtgggggatgttctccgttattaccagttacatcctcttcagagctacccgaaaacccctctcaggaaggacaccacgattggtctacaaatggtttcttttgatctacaaactcagctatgcatttggtgttgtgggttacttggcgatcgtgtttacaatgtgtggattcaatctgtttttcaaaatcaaagctagagattccatggattttggcattgtgtctttgttctacggcctctactatggagtaatggggagagactttgccgagatctgctcagactacatggcttccactatagggttctacagtgtcagccggttgcctacaaggagcttatcggacaatatctgtgcagtctgtgggcagaagatcattgtggagcttgatgaagaagggctcattgaaaacacctaccagctttcctgtaatcatgtctttcatgaattctgcatccgaggtgggtgtatcgttgggaaaaagcagacttgcccttactgcaaagagaaagttgatttgaagaggatgatcagtaatccctgggagcgcacacattttctgtatggacaaatcctggattggcttcgttatttggtggcctggcaacctgtggtgataggaatagttcaaggcattaactattcactagggctggaataggacagcagaccccagaagcaacatactgcatggttgaaatccttggtccaacatttaatattaatttttttaattttagagatgatcccaagtgtttagaaaactaagtaaactttgttgtcaagcaatttgtccatgtggaaagaatttaaagagaagctgaacaatggaataaacaaataaagcatgttttttcatcttt

SEQ ID NO: 358092 - DNA, 442 bp, Homo Sapiens
  misc_feature (401)..(401): n is a, c, g, or t
  misc_feature (407)..(407): n is a, c, g, or t
  misc_feature (412)..(412): n is a, c, g, or t
  misc_feature (425)..(425): n is a, c, g, or t
aatggtttcttttgatctacaaactcagctatgcatttggtgttgtgggttacttggcgatcgtgtttacaatgtgtggattcaatctgtttttcaaaatcaaagctagagattccatggattttggcattgtgtctttgttctacggcctctactatggagtaatggggagagactttgccgagatctgctcagactacatgggcttccactatagggttctacagtgtcagccggttgcctacaagggagcttatcgggacaatatctgtgcagtctgtggggcagaagatcattgtgggagcttggatgaaggaaggggctcattggaaaacacctacccagctttccctgttaatccatgtttttaaatggcccaggaaaacatttcccactctttnatgttnctatnatttttcccaccnttaaggggctgttaggt

SEQ ID NO: 358093 - DNA, 581 bp, Homo Sapiens
cagggaaagcacacctaatctactcaggctgtcagatgccatcagggtagtgaacacatgggctatacagcgttaaaggaccccgcaccaggctcatgtcaagcaaatgtggtatgagataaatcccttgcctctctcccagtgcttgtagccttcccagggtagccttggcctcaggcacacagttcctgtaaagctaggcctatcctactctggaaaaaaatgttatccctatttccttctgggagatgcaagcttttcttctgcagagggagggcatagttgtttggtgagtgacagtcctgaaatggctcctgaacattattttcttcctgggagaggctgatggagaactgtcctctcctcttgagtgataactttctccaagccacatagttcaagaggtaactacactgtgcagcagtagcctggagcaggagcatcaggatgaccccagggatacctagatgagttcttgggctgttgcttatgctcatcctaagagttacctgagttaccgttccacaactttttattacataaacagggacttaatgtaccagcagcatgggcattatagg

SEQ ID NO: 358094 - DNA, 1468 bp, Homo Sapiens
  misc_feature (50)..(86): n is a, c, g, or t
  misc_feature (125)..(133): n is a, c, g, or t
tctgtatagactcactatagggcgaatggagctctacgcggtggcggcgnnnnnnnnnnnnnnnnnnnnnnnnnnnnnnnnnnnnnatcaggccaaatcggccgagctcgaattcgtcgagagcnnnnnnnnnagctgcgggccaggcggcggccccctagcgtcgcgcagggtcggggactgcgcggcggtgccaggccgggcgtgggcgagagcacgaacgggctgcctgcgggctgagagcgtcgagctgtcaccatgggtgatcacgcttggagcttcctaaaggacttcctggccgggggcgtcgccgctgccgtctccaagaccgcggtcgcccccatcgagagggtcaaactgctgctgcaggtccagcatgccagcaaacagatcagtgctgagaagcagtacaaagggatcattgattgtgtggtgagaatccctaaggagcagggcttcctctccttctggaggggtaacctggccaacgtgatccgttacttccccacccaagctctcaacttcgccttcaaggacaagtacaagcagctcttcttagggggtgtggatcggcataagcagttctggcgctactttgctggtaacctggcgtccggtggggccgctggggccacctccctttgctttgtctacccgctggactttgctaggaccaggttggctgctgatgtgggcaagggcgccgcccagcgtgagttccatggtctgggcgactgtatcatcaagatcttcaagtctgatggcctgagggggctctaccagggtttcaacgtctctgtccaaggcatcattatctatagagctgcctacttcggagtctatgatactgccaaggggatgctgcctgaccccaagaacgtgcacatttttgtgagctggatgattgcccagagtgtgacggcagtcgcagggctggtgtcctacccctttgacactgttcgtcgtagaatgatgatgcagtccggccggaaaggggccgatattatgtacacggggacagttgactgctggaggaagattgcaaaagacgaaggagccaaggccttcttcaaaggtgcctggtccaatgtgctgagaggcatgggcggtgcttttgtattggtgttgtatgatgagatcaaaaaatatgtctaatgtaattaaaacacaagttcacagatttacagtgaacttgatctacaagttcacagatccattgtgtggtttaatagactattcctaggggaagtaaaaagatctgggataaaaccagactgaaaggaatacctcagaagagatgcttcattgagtgttcattaaaccacacatgtattttgtatttattttacatttaaattcccacagcaaatagaaaataatttatcatacttgtacaattaactgaagaattgataataactgaatgtgaaacatcaataaagaccacttaatgcacgctttctatttt

SEQ ID NO: 358095 - DNA, 288 bp, Homo Sapiens
  misc_feature (263)..(263): n is a, c, g, or t
cattactcatgattttttttaatttaacatatatagtacatgtaaacaactggcataaaattcataaaaatacaatactcctatgcaatatcactttattcctgatacatactttcattttctcattaatatcactggcctattttaacactatattttttttgccaagcatttttagaggcttatctttttaaaggaaatacagccccaactttgttttcggaaaatgttgtaggcaataggctattttgatcggcttcttngcccatccttactttcctcatacta

SEQ ID NO: 358096 - DNA, 1605 bp, Homo Sapiens
  misc_feature (98)..(131): n is a, c, g, or t
  misc_feature (889)..(928): n is a, c, g, or t
  misc_feature (1382)..(1426): n is a, c, g, or t
cctgtctttaataagacaaagccttaagccttatgttataattttggttctaaaaaccatcatttcagtataaggaataagtatatttcgtcctcctnnnnnnnnnnnnnnnnnnnnnnnnnnnnnnnnnngaaaaatttctacaccttctttgaattccttgtatgaatttttgtttcttagaagttaatttgtgtgaaatgagattcttcaaaacgatgaaacctcatagctctgagaaaaggttttagggttttaaattctaagcaaagcgtgactatggctgacagactacacatttaattatacagcttctctttcttaaccacaggcagattaacctcattgtggattgtccttcagaccttagtcctcaggcatggtttctggtgcccactcctggaagccgctgttccctttctaccttcttaccagagcccaagggcaggcctggtcccggggaagcagcagcttgctgacataagtcagctgcaaaggctgaggagtgtgccctcagagaagcaccgccccccagtcttgtgccagcgcctagagccgcagctcccagggatgctccttccctggaggcagcccaggagagggactctggcagcgttcttcagatttgtggccactgtttctcatttgctggttgactgtttttatttcttaggcttttgctagttttagaaaatagggaagcagcccttgatttgtggattaaaagcaacatttgagcgatgatgcacaacagtccaggaaaatgggcggtggacacttgaggctgaggatgggagttgacatgagcagggagagggaggtgcgcgctgcttatctgtgattgatgctcacctgagtgtggctgattgtgtacatccagcagttacannnnnnnnnnnnnnnnnnnnnnnnnnnnnnnnnnnnnnnnctcacccccagtaatttccttccaaagaagttcacatgtaataagtagaaattctgtataggaaaaaagcattaaaaatactattataactgcttcatttgctgggaaccattaaaagtaatataaattagctttttccagaaggatccttttgtagcagtgtttatgaatgtaacccccagcaaaatatggctatatattaggggagccagtttggagcagaggcctgaaggtccctgctatgcagccgtggccacagctcgcagcccaagcactgtggagcatccacacctttgatggcaatgcagattggtagcaggttccataggcgtacaaaacagtattaaagctcagtgttttgcatattgttagcatttacaaatatttttgctttagtatgaggaaagtaaggatgggcaaagaagcgatcaaaatagctattgctacaacattnnnnnnnnnnnnnnnnnnnnnnnnnnnnnnnnnnnnnnnnnnnnnctaaaaatgcttggcaaaaaaaatatagtgttaaaataggccagtgatattaatgagaaaatgaaagtatgtatcaggaataaagtgatattgcataggagtattgtatttttatgaattttatgccagttgtttacatgtactatatatgttaaattaaaaaaaatcatgagtaatga

SEQ ID NO: 358097 - DNA, 872 bp, Homo Sapiens
  misc_feature (47)..(48): n is a, c, g, or t
  misc_feature (58)..(58): n is a, c, g, or t
  misc_feature (73)..(73): n is a, c, g, or t
  misc_feature (147)..(147): n is a, c, g, or t
aggagtggaaaagtcatgcatgtgccagcgtgggagttcacatcatnnggaaatctgncagacacattcttgntagctcttaccaaagagctgcatgccgaccacagcaaaaatgaagacgatgatggccaataccaaggtgaggtntcctagagcccccacagaattgccaatgatcttaattagcatatttagagttggccaagattttgccaacttgaaaactcggagcagccggaatgatcggagaactgacaatccttccacatttgccaaaccaagttccattaaactaaggctcacaataaaaccatcaaaaatattccagccttcttgaaagtaataatatggatccatggcaattatcttgagaaacatttctgctgtgaagatccctgtgaagaccaggtttccaacagacagtacactgctgaactgctccgtcatgggatagtgctccatagccatgaagagtgtatttaagacaatgcagatggtgatggccaggtcaacaaatgggtccattacaaccaggttgacaaggtgtttcacctttaaccatggtttacaacagtcccaaatcaaacacatattagcaaatttataccagcatggtgggcatttctgtctggattcttcaagttcttccatggtgttggtcaaaatactggctatactcattgctctttgccttgatgtaggatcttccaataaatccatggaaacatgataagaactggaccgtctctttcttatttctgtttcagtagttgtgccctctggtaggagctgcccagcagatgtgagggtagaagggcccccgaccaggagaccacaccattgcagtccacagcgctatgcatctcccatac

SEQ ID NO: 358098 - DNA, 1099 bp, Homo Sapiens
aattcggcactaggatgagacccgctcgagcagaggaccagcagccagcccgacgctgatggttcttacctcgtactaaaacctttgctttgacacagttttagagttgcttaatattcgagcaagcacctgacacgggtgactttctccttctttttttcctccggtccctcgggtaagatggaggtagaaaatgaagccagctgctccccgggcagcgcatcaggcgggtccagagagtacaaggtggtaatgctgggagcagggggagttggtaaaagcgcaatgacaatgcagtttattagtcatcagttccctgattatcatgaccctactatagaagatgcttataagacccaggtcaggattgacaatgagccagcttacttggacatcttggacactgctggccaggcagaattcacagccatgcgggagcagtacatgcgaggtggggaaggcttcatcatctgctactccgtcactgaccgtcaatcatttcaggaggctgccaagtttaaagagctcatttttcaggtccgccacacctatgaaattcccctggtgctggtgggtaacaaaattgatctggaacagttccgccaggtttctacagaagaaggcttgagtcttgcccaagaatataattgtggtttttttgagacctctgcagccctcagattctgtattgatgatgcttttcatggcttagtgagggaaattcgcaagaaggagtccatgccatccttgatggaaaagaaactgaagagaaaagacagcctgtggaagaagctcaaaggttctttgaagaagaagagagaaaatatgacatgatatctttgcttttgagttcctcacgctctctgaattttattagttggacaattccatatgtagcattctgcttcaatattatctctctatgtgtctctctctctttaaatatctgcctgtaggtaaaagcaagctctgcatatctgtacctcttgagatagttttgttttgcctttaacagttggatggattttgtcaatcagctggatatgctgtttagtttttacaacatagtactaaataaaattgacattccaattgcctc

SEQ ID NO: 358099 - DNA, 818 bp, Homo Sapiens
gtcctacctccccatgagtggtctcggaagtgttcctatgccactgcaacaagcaaggaccctctttgatgaagtgcagttcaaagaaaaagtgtttctgcggcaacaaggcagctacatcctgactgtggaggctggcaagcaactccttctctcggcggacagtggcgctgaggccgccttgcaggccgaactcgctgaaatccaagagaaatggaaatcagccagcatgcggctggaagaacagaagaaaaaactagccttcttgttgaaagactgggaaaaatgtgagaaaggaatagcagattccctggagaaactacgaactttcaaaaagaagctttcgcagtctctcccggatcaccatgaagagctccatgcagaacaaatgcgttgcaaggaattagaaaatgcagttgggagctggacagatgacttgacccagttgagcctgctgaaggacaccctctctgcctatatcagtgctgatgatatctccattcttaatgaacgcgtagagcttctgcaaaggcagtgggaagaactatgccaccagctctccttaaggcggcagcaaataggtgaaagattgaatgaatgggcagtcttcagtgaaaagaacaaggaactctgtgagtggttgactcaaatggaaagcaaagtttctcagaatggagacattctcattgaagaaatgatagagaagctcaagaaggattatcaagaggaaattgctattgctcaagagaacaaaatacagctccaacaaatgggagaacgacttgctaaagccagccgcagaaaggggtctcgagctc

SEQ ID NO: 358100 - DNA, 878 bp, Homo Sapiens
  misc_feature (71)..(225): n is a, c, g, or t
aaggagccgagggctaatggtaaaaaatgactgatttacaaatttaacgcgaatttacagaatattacgcnnnnnnnnnnnnnnnnnnnnnnnnnnnnnnnnnnnnnnnnnnnnnnnnnnnnnnnnnnnnnnnnnnnnnnnnnnnnnnnnnnnnnnnnnnnnnnnnnnnnnnnnnnnnnnnnnnnnnnnnnnnnnnnnnnnnnnnnnnnnnnnnnnnnnnnnnnngtattttatgtttggaaattctttacagaaattttattggagatctcaagtccttataaaaagtgcattacatcaagattgcaaaagacacttttaaaatgagagacttctatctactcatccattttaccctatgattcatttcctaccctaacagaaatgatgaaacagtttttctttcttccttttcttcctcctgctttgaaagggggcaactgtcatgagggatatcttaacagaatgtgccaattaatccttgccaggagagcagtagcttcctactggctaaatttagagagcccttggcattccttttggtgtggctcaaagattattacaagctgaatctaaaagattgcaacctactacttgcaatctgtctccctgggctcctcttttactcacaaactccactctaaaacaaccttaaattttaagcactcaataattgctttagaaatgaagggatctaaagttaattaccttacccttgcaactattttctgtataagaatctcaaagttaataaaaattacacagatgaagaatgacctaatactaagaaggggatgaattctgagagcaaatacattttacaacccttgtctcaaaataagatcaatcctacaaaatacaaaatgttaagaataccc

SEQ ID NO: 358101 - DNA, 842 bp, Homo Sapiens
ggctggtacggtccggaggttctcgggatatcgtcgacccacgcgtcgcacttccagtgtcggggagacggaactgcggcgaccatgtatttctggtttatcaaaccgctaacacccagtctaagggcaggttctgtcccattgttatcactatcgaagcagccgatggaggaggggaggtctgagcagagggcggggtgcaggcggaatggccctcgtgccctatgaggagaccacggaatttgggttgcagaaattccacaagcctcttgcaactttttcctttgcaaaccacacgatccagatccggcaggactggagacacctgggagtcgcagcggtggtttgggatgcggccatcgttctttccacatacctggagatgggagctgtggagctcaagggccgctctgccgtggagctgggtgctggcacggggctggtgggcatagtggctgccctgctgggtgctcatgtgactatcacggatcgaaaagtagcattacaatttcttaaatcaaacattcaagccaacttacctcctcatatccaaactaaaactgttgttaaggagctgacttggggacaaaattggggagtttttctcctggagaattgacctgatacttggtgctgatatcatatatttagaagaaacattcacagatcttcttcaaacacctggaacatctctgtagcaatcactctgtgattcttttagcatgccgaattcgtatgaacgggataacaattcttagcaatgctggagaggcaatttattgtgagaaaggttcatacgatcctgaaaaagatgtacttatttacgaaggccagaagagaaa

SEQ ID NO: 358102 - DNA, 856 bp, Homo Sapiens
  misc_feature (154)..(179): n is a, c, g, or t
atttataaggcccttcaaatttgtggcttcctttctcatacttctcaagtataatgaaagggggagaaaaaccccaccatcaacacaaaagaaggctataaagactgtgcaccttttaacaagtcaatttgtcatcagtccctgggcctagtcnnnnnnnnnnnnnnnnnnnnnnnnnnaattttaaaactacctgaggtttaaaattccttcaaccctagctacttttattctactttttatttaaacaaaaagagggggaggatcttaaggaaactaattttctatacaaaggctttaaagtccatggactatacttatcccatttatcatcccaagtggtgctttaaccctaccataccctggctattaaaataaaaagatttttggacattaaaattattaatatatcactaataatccaccacacatttaaatatttacacacattaccataatttgtgcaacatcttataaacaatatcatttccatagtaatctaaggcttcaccagcctggcccactgtatctagactttaggttcattttaataattatgctttccttctctgtatcatttgggaagttgataaatatcacttccttagataccttcattcagtgatatatctggcttttacaattaaattggaaaaggtaagtttctctttggtgggttgagagttggaccatcaattctaatctacaaaaggaaattcatgatttcactctgacgcctaggatctagccaaggctggtctgcagtatcagatgtccaaactcatctactattagccatattttgtgagtcgtttgtctaaactttgtcaaaaatgcctttgccatgattttgttg

SEQ ID NO: 358103 - DNA, 1394 bp, Homo Sapiens
  misc_feature (627)..(845): n is a, c, g, or t
  misc_feature (856)..(877): n is a, c, g, or t
  misc_feature (897)..(1054): n is a, c, g, or t
  misc_feature (1100)..(1169): n is a, c, g, or t
gttaagatgagacagactgttttgagctcagttatttcttgttcagatccttcagatagaatataatagatgatgtccttacggtaagagaacattggcagggcaccttgcaactaaaggatcattttgaacccggcttgaagagaagcagatcaattccatcagacctcatcctagaaagcaagccagaatatgactcaagtaatttagttatagttctatctgatattcttctaagatttctcatacaaggttcaaaatcatttagcttttctaggttctgacctagagaattgaattagaaagttcttaaataaatcttcctacttccatgttctttcatagtatgggtcacttaggagaactctcagccatatatgtcagaagccatgattttcatctcccttaggccctgagcaacttcatgaggagtcagaattattctagaaatgagatagctctgtatcaatttcccccagttgattttgaagataatactcatctttctactgtgaagaaggaaggaccaggcataggatttactttcattcacttttttactcattcattcatttactcatttcttaagtgtactttggcaggggctgacaaaatatagagctgtgnnnnnnnnnnnnnnnnnnnnnnnnnnnnnnnnnnnnnnnnnnnnnnnnnnnnnnnnnnnnnnnnnnnnnnnnnnnnnnnnnnnnnnnnnnnnnnnnnnnnnnnnnnnnnnnnnnnnnnnnnnnnnnnnnnnnnnnnnnnnnnnnnnnnnnnnnnnnnnnnnnnnnnnnnnnnnnnnnnnnnnnnnnnnnnnnnnnnnnnnnnnnnnnnnnnnnnnnnnnctatgacttannnnnnnnnnnnnnnnnnnnnnctgagacagagtctgtctcnnnnnnnnnnnnnnnnnnnnnnnnnnnnnnnnnnnnnnnnnnnnnnnnnnnnnnnnnnnnnnnnnnnnnnnnnnnnnnnnnnnnnnnnnnnnnnnnnnnnnnnnnnnnnnnnnnnnnnnnnnnnnnnnnnnnnnnnnnnnnnnnnnnnnnnnnnnnnnggagtttcaccgtgttaacaaggatggtctcgatcttccgacgtcnnnnnnnnnnnnnnnnnnnnnnnnnnnnnnnnnnnnnnnnnnnnnnnnnnnnnnnnnnnnnnnnnnnnnnttttctttacattttaaatggggcctgttaaaaaatctttaattaagtggctggtgttacactggtgactcatattatggctggttttcaaaaagccactggactagagtggggaaccccccgtccctcaaatttgcttaaaaaccttaacccagggaaacacaagtggaaaaccccctgtaataaaaaccctgtttgaaaaagggaagccttgcctggtttccc

SEQ ID NO: 358104 - DNA, 1181 bp, Homo Sapiens
ttaggtactgcttaggatgaatatgatttggagaaattccatttcttgtctaaggctaggaaaggtgccacacagataccaaagtggttaccacccagtggcccctctgggatcaaggattttaactgacccagccaaagtttttgaacacaacatgtgttaagtatgagagagaagctagtaaatactgggacacattttacaagattcataagaataagtttttcaaggatcgtaattggctgatgagggaatttcctgaaattcttccagttgatcaaaaacctgaagagaaggcgagagaatcatcatgggatcatgtaaaaactagtgctacaaatcgtttctcaagaatgcactgtcctactgtgcctgatgaaaaaaatcattatgagaaaagttctggttcttcagaaggtcaaagcaaaacagaatctgatttttccaacctagactctgaaaaacacaaggacctatggagactggattgtttcctggtagcaatgccactttcaggatactagaggaactctccggagtcctttctgtattgatgtgattttgcttctggagctgtggagctcgtaaagtcacactcggcctacagagcaacccagtgttttgcctttgttcatgatgtatgtgatgatggcttaccttacccttttccagatgggatcctggatgtcattctccttgtctttgtgctctcttctattcatcctgacaggatgcaaggtgttgtaaaccgactgtccaagttactgaaacctgggggaatgctgttatttcgagactatggaagatatgataagactcagcttcgttttaaaaagggacattgtttatctgaaaatttttatgttcgaggagatggtaccagagcatatttctttacaaaaggggaagtccacagtatgttctgcaaagccagtttagatgaaaagcaaaatctggttgatcgccgcttacaagttaataggaaaaaacaagtgaaaatgcaccgagtgtggattcaaggcaaattccagaaaccattgcaccagactcagaatagctccaatatggtatctacactcctttcacaagactgaactttgtaacatgttaaggtacaaagccagaggactgtgctattcaaggactactgtaagtctattgtttctcaaaagacaatgaga

SEQ ID NO: 358105 - DNA, 967 bp, Homo Sapiens
  misc_feature (878)..(896): n is a, c, g, or t
cgcggccttgctgcgcatgctcgcgctgtgaccccggcttgaggtaacaccgcgagctgaggctggggcccttggcgcggaggctgagggacccgccgcggcgctgtcgccggagagggagggcaccgctgtcgtcggccagaagccaaggagtcctcagtgacggtgggatccacaacatctccacatcgctgtccccacccagccaggcagcgccagcactagctcagacgcaaggacggaaccgctggactccaggttccttgcctgggagtaggagaaatccacctgctgggggctgagtgtggcctgagggacaggccctgggtcccgggatgcccctgcccgagcccagcgagcaggagggtgagagtgtgaaggccagccaggagccatcccccaagccaggcacagaagtcatcccggcagcccccaggaagcccagaaagttctccaaactggtcctgctcacagcctccaaagacagcaccaaggtggcgggggccaagcgcaagggtgtgcactgtgtcatgtccctgggggtgcccggccccgccacccttgccaaggccctcctccagacccaccccgaggcccagcgggccattgaggcagcccctcaggagcctgagcagaaacggagcaggcaggacccaggcacagacagaacagaagacagtggattaacagcggggcctcctgaggctgctggggagaactttgccccctgctctgtggcgcccggcaagtccctgtaaccttgacaacaggcgcatcctcccaggccaccaacccagccataggcttttttctgtccgcagggcttttggggccaaatgggtgaatctttgcttttaacattgtgtgatttcttttcnnnnnnnnnnnnnnnnnnnagatcaagtataagttacttttgtaagcagaaaaatactttcaaacaagaataaaagaagctgttcgctag

SEQ ID NO: 358106 - DNA, 1258 bp, Homo Sapiens
  misc_feature (625)..(625): n is a, c, g, or t
  misc_feature (628)..(628): n is a, c, g, or t
  misc_feature (688)..(688): n is a, c, g, or t
  misc_feature (895)..(895): n is a, c, g, or t
  misc_feature (1107)..(1107): n is a, c, g, or t
  misc_feature (1145)..(1145): n is a, c, g, or t
  misc_feature (1160)..(1160): n is a, c, g, or t
  misc_feature (1246)..(1246): n is a, c, g, or t
gggtccggaattcccgggatcggggctcgctcccgaggggcaggtcggggctgggagctggtgccggggtcggggtggcggcggcggcctgggccgcgaggtcgacgctcgctgctgcagcggcagaggttaaaggatccgccgcggcgctgtcgccggagagggagggccccgctgccgtcggtgaaaccagcccagagaagttacgggatttgcccccggggctcctgcccagcaagccagcgccgtgacccaggtgtgggggatgatggtgacgcttctcactcacatgtgaaggacggaaccactgcactccaggttccttgctgggtgctgagcgtggcctgagggacaggccctgggtcccgggatgcccctgcccgagcccagcgagcaggagggcgagagtgtgaaggccggccaggagccatcccccaagccaggcacggacgtcatcccggcagcccccaggaagcccagggagttctccaaactggtgctgctcacagcctccgaccaagatgaggatgggggtgggatccaagccccaggaagtgcactgcgtcctgtccctggagatggctggccccgccaccctcgccagcaccctgccaatccttgccgntgngggacccggggagggtggtccccgccgcccctttagctgccttgagctgacgtgcagcanagttggatcgcatcaccccccctcattcccctgggagttcttgaggaaacccatttcgggggccgccctcctgggggccgggaattctttgctgtaacaatccgcgaaaaggcttcgggggcaaaagggtgtatttggtaagggccccgctcacctggatgtacttcggcttgctgggggccggtaaaattcacctgatggatttcntgtctcttaaggaaagagaagaaacattgtaaattggaacttttgagaaaattgcttctaaaggcgccgggattgatgggggaatatttctggctgaagcccgtgttccgtgaaaggagggaccttggaagagattgacaaagtgggctggtgctttgacctcaattgtacacttgcgaggctcggtgccttgacgcgggttgagggaatcntacatccccatgtgctactgcttgtcggtgccggctgngcgctcccgctcctntcgacatatatacgcgtaatccgctgttaaggagttttgcaccgcgatacgacatggtgcagctgatagcatactgttgtcttcantgactctcataa

SEQ ID NO: 358107 - DNA, 696 bp, Homo Sapiens
cgtaatcccactcaacacagtgtcgtgttaaccgtttggtagatagtattccagatatgttctatgtatacatatttaaaatattcaaccttccaaatgcatgtctatactatccatactttattttacattccaagcttttctcttaataatgtatcatgaaaatctttcatcatgccatcattttgatggatgcatggtactccttttatagagatatgccatgttgtattttgattcctttgttgatttctgatttaaaaggtggtggacacattcctttatttgtgatatagtctcaaggagaaggaaatagcttgaaatcggcaataacatccatttattataggtcaatttgagaaagggagtttattaatctattacgaaagctctaagcatttccctttgcaagtgcaaagaaagggtaaagtaatatattttatgggagaaaagtttcaaccatactgattcaaatttctggagtttataatacaactaatgacagtgttgccactatatgtgacatggttataaactaaaccagacattaaagaactgatgagtcagtggtccattggcatgttatctgtctttgtagaattcctcagagtttccattccaaatttcagtgtggaattgtgccaggcatatccctctactataagataaattggtctatgaagaggtctggtgccg

SEQ ID NO: 358108 - DNA, 1155 bp, Homo Sapiens
atctcgctgagccttcttgtaagagaaggtgaacacactatttgataatgtgattgtgtggcggttgaaggggggttgataggagtaaattgggctgagtaggaagctcactacttccagcaggaagccaatccagtacatcagggataaaggaaggctccatctggaatcaaggcggaggccaaactctttgctcaggatgtaattaaggttatcatagctttggtgaggcgtgtcatctgagatgtaatagaattgacctcggacacttggggccttcttggggtcccgcagagccctcaaggccagaatgtgggcccaggccacgttgccaacatagactgggttgactgtagagaactttccaacacttgacaggatcccattgttgttcagggcctcatttatactggcagaaaggaatgggcctccttccccatagatatatgtgggtcttaacgcacaagtgtacaaggtatcaccattttttagattccacccattagccgccagcacagccttctcagcaagctttttgctgtacgggtatggagtgggccatgtgttttccagaggctcttcttcgtggccgttctggatgatttccttgtaggagttgggcccggctacctctatgctactggtgtagatgaagactggcacactggcttggacacaggcctccaacagtagctgggtacctttcacattgacattcatgatggactctctgtgagtgacaccaaagacatcaatgatacaggcggtgtggatgacgaccgagacgtcctggcaggctcttttcaggaatggctcatccagaatgtctccttcaagtacagtcagcttggtcctgttctggagcttagaaaattcctctctcaattctggtctgaaggccttgtccaaggccctgatctccttcagttccttctcttccaccaacaggcggacgatcctctgacccagaagccctcctgctcctgtcacaaggcagctccagcccatcgtggccaatccaaagtagcaggaaacacttgccaggaaacagaagatgctggagagcagatctgattctagcgtgacccagaagagggcgtaacttagattgttaaaagctggacagaggagtccaagtccttactgcctcatccc

SEQ ID NO: 358109 - DNA, 269 bp, Homo Sapiens
gtccaaagcatgatacacaaacctaaattcgtaactaaaataatcatagtcgaaccacagaacatatcagactcagggaagatcctaacagcaacactaagagattaaaatgtctctccaaagagcaattggacagagaactggtttcacaactggaacaacaaaagtccgaagatagagcatggcttcaaattactgagagaagtgcagtctagaattctgagcccacctcatctgtaaaaggtaggacaagccgggcatggtggctc

SEQ ID NO: 358110 - DNA, 1503 bp, Homo Sapiens
ggaccggtccggaattctcgggatgcccctgcctggtgccccgagcgagccgggagtagctgcggcggtgcccgccccctctctccgcccctccagcggagctggtctccggccgggcaccgtcgcgggcccccctggcccggccacctgggaccgtgctggggagtctgccacttccctccctcccctggcccgcaaagttttggcggagccatcgctggggctgagcgcgcccccggggggagatcggggagcgcccgatgccgggcggccggagccattgacccgggacgccgccgtccgctgagcagccgaccaccccgccgcctccggtgcatggggactggctgaggagccagcatgggcaactgcgtggggagacagcgccgggagaggccggcagccccgggacacccccgcaagcgagccaggacccaatgagcccctgaagaaagagcggcttaagtggaagagcgactaccccatctactgcctgtcaccgccggtgaacctgctgctggagcacacggaggaggagagcctggagccccccgagcctccacccagcgtgcgccgtgagttcccgctgaaggtgcgcctgtccacgggcaaggacgtgaggctcagcgccagcctgcccgacacagtggggcagctcaagaggcagctgcacgcccaggagggcatcgagccatcgtggcagcggtgggtcttctccgggaagctgctcacagaccgcacacggctccaggagaccaaaatccagaaagattttgtcatccagggcatcatcaaccaacccccaacaccccaggactgatgggcccacggaacccctgggaagaggccccgcctggagcactaggcccccaccctgctgctgccttccagtgctgtcattttcttcaggggccctcccctcggtgtggctggtgggtgagccgtgaagggaccctgcctttcagggcactacgcgccaccagttcccggtacccagggagcaggcagccacacacgggccttgcaaccttgtcagagaaaaggcgaacagggccctcaccctgcctgtctcccgaagcaggttcgagccacaagggccaaccatggaggcccctggagcccagatctgtcatctggtgctgccagctgtgctcactctgggttttctgctcagggtctgaagcagctgctgtctccctcctctgcccccatcccctggctctcccctgggcacagtgccactcccttggaagggagggaaccacccgtgagccccagggcttgggaagcctgaggcgggcctctgcctctccctgcccccagcacaattggcagagatgaggcgggtggtggacggctgggctgtcgtggcagggtctgcacagggccatgtcctggctgtaacccaggcagtgggaggtctgcagcctggtcatggcctccacagcaggtccctgtggacagacatatctgcatatttatcaataaagccttttgctcctt

SEQ ID NO: 358111 - DNA, 1242 bp, Homo Sapiens
ctgagcgctctctttttctcctttttcgggcaagtgtctacagccctctgttgtgccgctcgccctccgctgctatcccggtactgcgtgggccctgtatgcccccttgaagtgcagggtccccttctcgggttcaccacctctatgctaatccctattggggaaggccccccttgagtgatattatcatcaacttggataggcgcacactgccacggctgtgggcctattagtgcctcccagcgggccctttttccaggggttcctgggcgccaatcagtcctggggtggtcgggcctggctgatgatgacctggatgacaaaatctttctggatcttggtctcctggagccgtgtgcggtctgtgagcagcttcccggagaagaaccaccgctgccacgatggctcgatgccctcctgggcgtgcagctgcctcttgagctgccccactgtgtcgggcaggctggcgctgagcctcacgtccttgcccgtggacaggcgcaccttcagcgggaactcacggcgcacgctgggtggaggctcggggggctccaggctctcctcctccgtgtgctccagcagcaggttcaccggcggtgacaggcagtagatgggcagctggtagcgattgcccagctcatcgtagcattcacagagggtgccatgaggcagggtgatgctggctccatccaggatggcctgggccagctcgtggtcgttggcttcagcagcataggcggcagccttgagggcatcccagatctccttgcggccctcgaaggcaggcgctgtgtcccagaactcatcccgtttgctccgcagctgcccgtcagtcatggggtagtcgctcttccacttaagccgctctttcttcaggggctcattgcgtcctgctcgcttgcgggggtgtcccggggctgccggcctctcccggcgctgtctccccacgcagttgcccatgctggctcctcagccagtccccatgcaccggaggcggcggggtggtcggctgctcagcggacggcggcgtcccgggtcaatggctccggccgcccggcatcgggcgctccccgatctccccccgggggcgcgctcagccccagcgatggctccgccaaaactttgcgggccaggggagagagggaagtggcagactccccagcacggtcccaggtggccgggccaggggggcccgcgacggtgcccggccggagaccagctccgctggaggggacggagaga

SEQ ID NO: 358112 - DNA, 1113 bp, Homo Sapiens
caaggaacccaaaataccaggaccaaaaacataggatacctcatgagacataattaatttcttctcaaagtttagctgaacaactaactatccagtaatacaaaaacctgtttgttttatacaaaagaatataccctaacacagtagagtctcataatgccttggcgaacaccaatttgatgctttaagattttaatgtattgttaacaaattttcaaactcaggcaagtttagaaatgtcttcatattgaattccttcaactctgcgtccttttaaagggccagtttcaatgacgatagtagctgaaaaagtcttctcattgatggattctagggtaccttcatttcctctgtagcctccatttaaaactagaattctttttcctggtgctggaattactgtctctaaatgagtctggtcaagtttcagcttgtctccagaatcaatcatcttcacaacagctgtatatttgtcaattacttccttaacaatagcctttttcttatgatatttctctcccagtttcttggttataattttcacaataatttcaggctgtagccagtagtctgttcgggcagttcttttcttttcctcttcaatctccatgatttcatccagtgcagatttctttttcttcttttctttagactgagttgagctctgggaagattcttttcgtttcactgatgctgaacttcctatcgtcttcagtgcactcggtccccagagtacttgacttggaagatgttgctccgggatgagctacatgctcctttactcaaattaaaacgtgactttctcttcatcattttctctgcttaattccgtaaaagtaggggacctcctgttccttcccttccagccctcttctcacttgctcttcaataaatttggcagttttttcttcatcatcaaggtcctgctttttctttttctccagttccagttgccggcggatagtttctgggtccctgtctatgtactgaatataccagccttttggtgtctcgtccactttgcacaagccttctctgcccagccacttagtaaaatcagtcagagtttcccactgagtggcattcatgtggatgtgctctcggtggctgacc

SEQ ID NO: 358113 - DNA, 733 bp, Homo Sapiens
  misc_feature (470)..(470): n is a, c, g, or t
tcccccgggctgcacgaattcggctcgaggcggactcgggactgctgctaaagtggggttcctgccgttccacttggctgcgggtccgcaaggcccggccccagctcatcctcagccgccggccccgccgccggctcgggagcctgcgctggtgcggtcggcggcgcctacggcggcggttactgcaagcccaggcggccggcgtggactggagggagggagcccgccaggtgtcgcgcgcggcggcggcccggagacccaacaccgcgacccccagcccgatccctagcccgaccccggcctccgaacccgagtccgaacccgaactcgaatccgcctcgagttgccaccggcctctcctcatcccaccggtgcggcccgtgggccccggccgcgcgttgctgctgctgccggtcgaacagatgacaggcgttggtcgatgcaaaatttttctcctcagtgttccattngtgttgctagaacatctgaaaactgccactggaaacttcataaccagctatccggggtcatcctacatttttgtgcaaaaagtagaacccgttgtcaatcagaggtttactaattacttgcaccaaaaccagtgatttcaaatgactatggaatatgttagccttggaagaacagttgatctatctagagctctcaatcctacagaatgtaatacctgtatacggcctatattatgtgtatcctgatgttctccctccctgct

SEQ ID NO: 358114 - DNA, 1088 bp, Homo Sapiens
gcagggctggagcatggtgttaataaaaacccaaaaagcacttaaccaactacgatataaaatggtggctcaggtatgaaactaaggaggggaggatgaacatttttcacgatacacctttctataatagtttccgtatacacgtattacattctgtaggactgagagcactagatagaccaactgttcttccaagacaacatactacatagtcatttgaaatcactgttttggtgcaagtaattagcaaaactctgaatgaaaacgggttctacctcttgcacaaaaatgtaggatgaacccggatagctggttatgaagtttacagtggcagttttcagatgttctagcaacacaatggaacactgaggagaaaaattctgcatcgaccaacgcctgtcatcaaggttaagatgagatttgagcaaattccgggcttcccctgttcagttccttcttgcttttctcaggctgtgagtagtgaagtgcatggatactcaagcaagagtgggtatacacagagaagatgtcttgggcaggctggccttggctgatggtaaaaccaaatacctgcacctggccatagaggcaagtcacacgacagatcccactaaaagtaaaaccctgctcgaccggcagcagcagcaacgcgcggccggggcccacgggccgcaccggtgggatgagaagaggccggtggcaactcgaggcggattcgagttcgggttcggactcgggttcggaggccggggtcgggctagggatcgggctgggggtcgcggtgttgggtctccgggccgccgccgcgcgcgacacctggcgggctccctccctccagtccacgccggccgcctgggcttgcagtaaccgccgccgtaggcgccgccgaccgcaccagcgcaggctcccgagccggcggcggggccggcggctgaggatgagctggggccgggccttgcggacccgcagccaagtggaacggcaggaaccccactttagcagcagtcccgagtccgtaatgctgggtcctcagccatcgtgccgattaacaccccagccacgtacctagccatagtttgtggccctgg

SEQ ID NO: 358115 - DNA, 1758 bp, Homo Sapiens
  misc_feature (1284)..(1296): n is a, c, g, or t
cgctatatgcttaccgctggacttactgcctttgcagcttggccatttctcactcggctgtggactcgagcaaagatgacctcactgagttggactttcttctctttgctcctggcagtgttcccactgatgccggttgtaggtcgaaagccagacatctctctagtgatgggtgcaggcttgctggttcttctgttatccccgtgtgttgtaacatctctcatgaaaagaaaagatagctttataaaggaagagctattggtacatctgttacaggtgctgagcacagtgctctccatgtatgttgtgtatagcactcagagtagtctactcaggaagcaaggactgcctctcatgaatcaaattattagctgggcaacattagcctcttccttggttgtgccactactgagttctccagttctctttcagcgattgttcagcatacttctttcattgatgtcaacctacctacttctaagcacagggtatgaagctctctttccactagtgttgtcttgtttgatgtttgtctggataaacatagaacaagaaactctacaacaatctggtgtttgctgtaaacaaaagctcaccagtatccagttctcttataatactgatataactcagtttcgacagctatatctggatgacatccgtagggcctttttccttgttttcttcttagtgacagcattttttggaactggaaatatagcttctattaacagctttgatcttgcctctgtctattgctttctgactgtgttcagtccttttatgatgggagccctgatgatgtggaagattttaatcccctttgttcttggtatgtgtgccttttgaagcagttcagttgactactcagttatcgtcaaaaagcctttttctcattgttctcgtcatatcagacattatggctttgcattttttcttcttggtcaaggattatggcagctggcttgatattgggacaagcatcagccactatgtgattgtcatgtccatgaccatcttgttggtgttcctcaatggcctggcccagctgctcacaacgaagaaactcagactatgtggcaaacccaaaagtcacttcatgtgaggttgctgaagcaccattcagcatctggatcctgattctccttttaagccaaaatctcatcaaggcttcaataacaagatggatatggatatacagtatattctactcctgtaaggaaaatggtattttggaatttcccgaattgaccaaggttatcctggaaccaaaagaagcttccnnnnnnnnnnnnnccagttttcctcccacggccattgactatcattggattactattcctgccggcaaaaaacccattagtggatagggccacttttcctcccctttcctacaactattcttcccttccccttttttggcccctgtggcaaaaccttccttttcctccacgccgcatttgttctcgcacgaaacccaccctcttgcctcattctatatcttggcgggtccccaccacaggttaattcaacctaactttgtcttccaccctgttattcccccttgaaatgtaaagcaacgccactatttgcgcccctgtttgggcgcgagatcaaggctccgcccctaaattggtaccattccccactaaaagttccctctttctccatcgcccccaggcttagtacaacactctcgccacaggggcaaaaattctcactccactcggcggtatttcaccaccccaggttttaata

SEQ ID NO: 358116 - DNA, 1455 bp, Homo Sapiens
  misc_feature (1104)..(1126): n is a, c, g, or t
cagacaagaatttccttgggaggccagtagaggtgcttctcaatgatgacctcattgtcagtacaggatttggcagtggcttggctacagtacatgtaacaactgtagttcacaaaaccagtacctctgaggaagtttgcagcttttatttgaaaatcgatactcaggatattgaagcatcccactacagaggctacggaaactctgattacaaacgcatagtagcatgtgccagctacaagcccagcagggaagaatcatcatctggatcctctcatgcggtgatggacatctccttgcctactggaatcagtgcaaatgaagaagacttaaaagcccttgtggaaggggtggatcaactattcactgattaccaaatcaaagatggacatgttattctgcaactgaattcgattccctccagtgatttcctttgtgtacgattccggatatttgaactctttgaagttgggtttctcagtcctgccactttcacagtgtacgaataccacagaccagataaacagtgtaccatgttttatagcacttccaatatcaaaattcagaaagtctgtgaaggagccgcgtgcaagtgtgtagaagctgattgtgggcaaatgcaggaagaattggatctgacaatctctgcagagacaagaaaacaaacagcatgtaaaccagagattgcatatgcttataaagttagcatcacatccatcactgtagaaaatggtttttgtcaagtacaaggcaaccccttctggatatctacaaaactggggaagctgttgctgataaagactctgagattaccttcattaaaaaggtaacctgtactaacgctgagctggtaaaaggaatacagtacttaattatgggtaaagaagccctccagataaaatacaatttcagtttcaggtacatctaccctttagattccttgacctggattgaatactggcctagagacacaacatgttcatcgtgtcaagcatttttagctaatttagatgaatttgccgaagatatctttttaaatggatgctttcctgaagttcagctgcatacagtttgcacttatggactcctgatgatgaagttcgnnnnnnnnnnnnnnnnnnnnnnnaaacattcatagctggtcttatttgtaaagctcactttacttagaattagtggcactagcttttattagagaatgatttcaaatgctggaactttctgaaataacatggccttggagggcatgaagacagatactcctccaaggttattggacaccggaaacaataaaatggaacacctcctcaaacctaccactcaggaatgtttgctggggccgaaagaacagtccattgaaagggagtattacaaaaacatggcctttgcttgaaagaaaataccaaggaacaggaaactgatcattaaagcctgagtttgctttcaaactgtgct

SEQ ID NO: 358117 - DNA, 666 bp, Homo Sapiens
  misc_feature (21)..(21): n is a, c, g, or t
  misc_feature (42)..(42): n is a, c, g, or t
  misc_feature (70)..(70): n is a, c, g, or t
ccagtccagcgagctgaccanaatggccaccttgttcctccncaggcagagcgagtgcagggagatgagncgcgggaagtgggcgaagttcaccttgaccaagtcgttgtgctcgaggtgcagctcggtgagcttaaacaagccggcgaaagagttgcgcgccagactcttgagctgattgtatccgatgtcgagaaacttgaggctgcggcagtcctggaagatgcgcacgggcacaaactggatggcgttggcccgcatatgcagcgtggtgagcttccgcagcccgtggaagaggtcgggcgcgagcgcctgcagcttgttgtacgagaggtccacgctgcgcaggttgggcatgggccggaaggtggtgttgggcagttgggtgatctggttggaactcagcgtgagttccttaactcggcgcagtttctgaaaggcgtccccctgcacggagcagatgtgattgtgatccagatagagccacgtgagctgcattaaccccgcgaactggccggcgcgcagctccgagaggctgttgtagcgcatggacaagcccagcaagccggacaggccgtggggcgtcctcgtgaggtcgatcgccccgcattacagcagccgcccctcttaaccgcactgtcgcgggcacccgctggtggcggcggg

SEQ ID NO: 358118 - DNA, 1691 bp, Homo Sapiens
  misc_feature (46)..(56): n is a, c, g, or t
  misc_feature (244)..(267): n is a, c, g, or t
  misc_feature (288)..(288): n is a, c, g, or t
  misc_feature (307)..(318): n is a, c, g, or t
cccctaagacctttaatcctccgtaaggaggttgtcccaattatgnnnnnnnnnnngaagttaagttccttccccaaagggttcccaaaggctagccgtttcccagtccagcgaggttgtaaaacgacggcccagtgctaggctaataatagcgactccattataggggccactttgtaccaaagaagctgggtacgggtaagccttgggcccctcgaggggattcttaggaggcggccgcccnnnnnnnnnnnnnnnnnnnnnnnnaactgtaaatgctattttatnttaaacattttagtttacnnnnnnnnnnnntccaatgattgtaccttttttacactctcagattcctgaatatggacagatcttcaaagggaggaaggagttctcatatgaaatttaagatagactgtcctgaaggttgtggggtggggttttttgttgtgttttaattcgcttttgtttttaagacacaataaagctaaaatgtcaagtctctgggagagatccccttaaagtttcagtcaaggagcatatcagagcgcagacaaggagaccccagcctggtgcccgccggcccgtcccggctgcccaggcgtatttggtagcgcatgggttgagagccactgggacaatcacacctcgcattccctcgcgggctgctggtggcaggtacacgagccatactcgttgatgatcaccagggctccctcaatgtggttcggtttgtaatcaacgtagtattcctgggcagacatggcagccatctgatgcatggtctgtttctgctgttgctgtcctgcgcttgcgtgacaaagcactgttctgacctgcctgaggctggcttgggaaacacttccaggacacgtagagcaccaggaccacgatgaggaaggagaagatgagggccatggtgcccgtgaccaccttgtggatctgcacggcgttctcggcgtgctcgccgcctggaagagccacggtggcaggctcgaatgtgccgtcgtgctgcccctccccgccgtccgcgagcgtggtggccgagctggcagggggccccagatcactgcggttggtgacggccgagagcaggtggccgctggtgggctcggccccatcctcgcacaggtggaaggcgtacacggcgtccaggacgtcctcgccctgtgcgtactccgggctggcgcactgcaagttgccatcgtagcgcccctggaagttgttgagccacgaggctagggcacacacgttgcgcccgcaatcccacaggttcccggccagggtgatgcttgtcagggacttccaagagttgaggatccggggctcgatgtaggtgaggcggttggagtccagctgcagggactgcaggtgcggcacggtctcgaacacatggggctccatgtactcgatctcgttgcccgacaagtccattttctccaggttccaaacccagtccagcgagctgaccacaatggccaccttgttcctccgcaggcagagcgagtgcagggagatgaggcgcgggaagtgggcgaagttcaccttgaccaagtcgttgtgctcgaggtgcagctcggtgagcttaaacaagccggcgaaagagttgcgcgccagactcttgagctgatcctcgtgccgaattcgccacccaggcctcgctaccattacgccggtatagttactggccgtcc

SEQ ID NO: 358119 - DNA, 632 bp, Homo Sapiens
  misc_feature (103)..(103): n is a, c, g, or t
  misc_feature (109)..(109): n is a, c, g, or t
  misc_feature (171)..(171): n is a, c, g, or t
  misc_feature (183)..(183): n is a, c, g, or t
aagagccctagatgcctggtggcaagggctagatccctgtcagatctgtccctgcccaggcccatatatggcagccgccctctcgcatgaggccaaagcccanattccntgttctgacattcaaggcctcagtagagctggaccataattgctctcacaggcccaccagcnccgccttaagcnccacctagtaggtcattaatatttactgaatgaatggaaagtgaattaacaaattgttcgcttgatgaatcaatgcgtgaatgaatgagcacaaacctccagctggctgtcccctgagcccctgagactcaagacatctgaaccacgaagtctccgtcttccctatcccccaagctgaccctgtaacctgagagtcgtcaccaactttaatcttctcccactcagtctattccctcctaattggttcctgaatctgcccgcatggtcccctccccagggcaactttcctaagccagcccactttcttctctttcttgagtgtaagagggatgaggaagggagacgcatctcccacaactattctgtgcccatagttgcggtgatcttcctcaaatgtacacccaggcgcatcccagtctgctaaaagcatctcactgcccataccccat

SEQ ID NO: 358120 - DNA, 408 bp, Homo Sapiens
cagcgccgtccgcaacgaccagttcggcctctcgcacttcaactggccggtgcagggcgccaactaccacgtcctgcgcaccggctgcttccccttcatcaagtaccactgctccaaggctccctggcaggacctggcccggcagaaccgcttcttcacggcgctcaaggtcgtcaacctcggtattccaactttattatatggacttggctcctggttatttgccagagtcacagagactgtgcataccagttatggacccataacagtttattttctcaataaagaagatgaaggtgccatgtattgaaagtgtgcgtcaaagaacataaatatcagtggattttctctgtgtatatgtgcagtatttatttttgatccttaaaaataaaacttttgcaaataaaa

SEQ ID NO: 358121 - DNA, 922 bp, Homo Sapiens
  misc_feature (309)..(309): n is a, c, g, or t
gggataacatagagcccttcacacatctgcttttctcatccccttcaactgtctgttcttgttttaagagtgagagattaaaatgttgatttgtagccaagcaagtggctgtggcttatcaacattgagcctcactgagggtaatcttattggaatatttcactggggaaccccaaatatcagtatttttaggtctttcctcttgaggtgatcaaattccctagaggagattgttccaaactcttggctgccatatcctgggagcttagtgggtgaatggaaggaaatcatagagatggatctttgttntgctaataaacgtgtgtttatttagtcctaatgtggttaggatgattctcacttgttatttaacctcaccctgattttaccacaggcttatattgacataattttaacttagtgcttctcaaaggagattggggtggagtcaggatgtttggaattaccttttggattgtaacagactattggccaggcaagctaaaagttttgcagtactgatgagctgtagggggaagaattgcttcagccaaaatgccactagctccccttttgaaaacagtacaagtttaacttaaactaaatcttaatgacagtgaaagttaattcccagttattatctttgattttcctgctcttccctaattcatgcttgacagtggtgtttctgattttaatgatatttgaaattggaattctaaagatttgttttacatagataggcggagtggaagcaagaagactagttaggaagtcattgcagaagtctaggcaagagttattggtggcttggattagaatggtagtagtagagagggccaggcatggtggctcacgcgtgtaatcccagcactttggaggccaaggtgggcagatcaccaagaccaacctgtccaacatg

SEQ ID NO: 358122 - DNA, 1076 bp, Homo Sapiens
  misc_feature (155)..(178): n is a, c, g, or t
ggaggtactgggcagtttctcaaggatctctcatttttaaataacagaagaaaggtgaaagatgttgctatttcaaatctgtcatgggtccaattgactctatgacatttgcctcttgctgcctccctcattctatttcttcttctccaccttcnnnnnnnnnnnnnnnnnnnnnnnnactatacctcctttataaaagttatgtatttcttttcatctattctatcaatcgtctttatctctccacagcaatatatcatctatttatcattaatcaataatgtattcttttattccaataacatttgggttttgggattttaattttcaaacacagcagaatgacattttttctgtcactattattattgttggtatgtgaagctatttggagatccaattcaggaagcaacacattggagaatggctactttctatcaagaaataaagagaaccacagtcaacccacacaatcatctttagaagacagtgtgactcctaccaaagctgtcaaaaccacaggggttctttccagcccttgacctcctaattggatatatatgagaagagctgttatctattcagcatgtcactaaattcctgggatggaagtaaaagacaatgctggcaactgggctctaatctcctaaagatagacagctcaaatgaattgagtctcactctgttgcccaagctagagtgcagtgaagccgcgacatcccaggctcaagtgatcctcccacctcagcttcctgagtagggatttatagtaaaacaagtgtcttcccaacctgataattcattttggataggcctttctcggccccagactgaggtaccatggctctgggaggatggatcaacattctcttctaacttatttcagatcagaaccacagctacccaagaaaacccatctccaaattgtgtatggattcacgtgtcagtcatttatgaccaactgtgtagtgtgccctcatatagtatttgtgagaagaagttttcaatgtaaggggaaaggttgagaaggagagagacatatgtgatgtagtaaggaagacagcagcagggagtct

SEQ ID NO: 358123 - DNA, 702 bp, Homo Sapiens
  misc_feature (249)..(249): n is a, c, g, or t
tctttcatgaaaggaagagtcaggcaatgcaacaaacttcattgttgtcttattttaagaaattctcacagccaccccaaccatcagcaaccaccagttgctaatcagccagcaacatcgaggcaagaccctccatcagcaaaaaattacaacttactgcaggctcagatgatcattagcacttttgaacaataaagtatttttaaattaaaggtatgtacatttttgagataatgcttttgcacgccntaatacactataatacagtgtaaacataactttgcactgggaaaccaaaaaaattggtgtgactcattttattgcagtattcactttattgcaatggtctggaaccaagtgcacactatctccgaggtatgcctgtacatgcaaacctgtggaagatgaagtaatcttgcagtcttggatatttatttgttttgtttatttggagagaggaggaggagtagcaataaaaactggtaaacattcagttcaggcaaattgtcttagtgttttctaaagatgaagaatcatttgatggaatataactcagtactgctttttatttcaactaatatttgaattaaacacagcaaaggaggaactctaaaggctctaatgatgctctctttaaagctttaccttgctctaaggtaaaacttgttaagtttctctcactttcattccattgctgttaat

SEQ ID NO: 358124 - DNA, 727 bp, Homo Sapiens
ttctggattgtgggctccctcaaccacctgtattcagggcgctctgtgctgtgggcacatgagcggttggtgagcctgctctgcggaggtgctaggccacgggaagtccttctagaatctgacttgatgggcttgatgagtctttgcttctgtgatggggagcagaactccactgtaacctttccttttccccctttttccccactcccatgtcttcctctctctccctcctgttcagtatgggatgtagacacagggaagtgcctgaagacgtttagacacaaagaccccatcttggccaccaggatcaatgatacctacattgtgagcagctgtgagcgagggctggtgaaagtgtggcacattgccatggcccagttggtaaagactctcagtggccacgagggagctgtgaaatgcctgttctttgaccagtggcatctcctctcaggaagcactgatggcctggtcatggcctggagcatggtggggaagtacgagcgctgcctgatggccttcaagcatcccaagtaggtgcctgtgaagcccggagcgatgaacctggtgtccttcccttccccgtcatagcctagactgcaatcattggcagaccttctgctccctgtagacatcgtgttctctgcacctcaccctctctgcttccctcctcttccacctgggacccatttttccccaccatcttctctgtctgactgttagcctctga

SEQ ID NO: 358125 - DNA, 543 bp, Homo Sapiens
  misc_feature (27)..(27): n is a, c, g, or t
  misc_feature (36)..(36): n is a, c, g, or t
  misc_feature (438)..(453): n is a, c, g, or t
cttatttttatagctagataaatatgntagtcttangacaatagcctcacattttttgagaagcatgccctccctgtcccatttgtcttataacatgacccagcccctattttacgtcattctaaattcagcctcatataatgaaaatacattatgaaaacagatgtttaggagatttcctgtatagcagtcagccaattcatatgctttgtctctgctggcttctttttccatgcgttaacttttcccaatagcagaggaggcaaatatgagcatacaatccctttgttctaaagatattgttccagctagtggaatgatgttgaatctttaataaccataattagttgctttttcagtatcttctgctttgtctgtgtctatccagtggcctaggaattaaagtgtaagttgttttcgctgttaaattggatattnnnnnnnnnnnnnnnngcaagattttcatgtgttatttaattctgtattgtttcttatatttgtagtaaaatattgaacaattaaaagtgttgactccaaaaaaaa

SEQ ID NO: 358126 - DNA, 422 bp, Homo Sapiens
  misc_feature (402)..(402): n is a, c, g, or t
  misc_feature (411)..(411): n is a, c, g, or t
ccaaagagtaaatattttaattttttcttcaagagtattcttattttcatattatttaaatagtcacattaacaaggtacatttccacaaaaatatttgtacagcatcagtattcttattcacatccataattgccataattaggaaaaattaggaaacttagcaaagacagtcaatacacatgttcttttacttgtggtgagataaattcaatgtctaaaataagtcaggatggatcaacataaaagctgaactagacacccctaccaaatttctcaatgaaaaagcaaatagccctgggtgaccagcaagttatacaaacaatgcaagacaaatccaactagaaatcggaagctgccatttcgtatacacaaaatacaagtgaaacagcggaggtaaacntattttttngaggggaggtg

SEQ ID NO: 358127 - DNA, 787 bp, Homo Sapiens
  misc_feature (555)..(571): n is a, c, g, or t
  misc_feature (590)..(647): n is a, c, g, or t
  misc_feature (744)..(744): n is a, c, g, or t
  misc_feature (764)..(764): n is a, c, g, or t
  misc_feature (776)..(776): n is a, c, g, or t
ccccttacaaattcaaaggactagaataatgatagtcatctggaaaaagtaaatcatgaatggctataattttgaaactgatgcttaatgatggcagtgatttttaagtgtggtaacaaacgttttgggagcatgtatcctctgtcaagatggtactagtaacagattcaaagtagtaccatatcgtatcagactgatgtgggggtttttatgtttgacatcagttggtgagcctgttgttccttagtaaattgatgccataagctaaagttaacatattcatattttccctgccaatagtccttcataaatacctggtcataaactgaaaaaaaagtaatatctgcaatataaatgtgttgtctattagagacggggctagatgtcttaaggatttctaagtacatcttaaaatttataatatagtcgttcataccaagaatcatctggggaattttaacaaaatatgtatatgttctaaacctcatcactaccccataaatgcagcttaggtctgtaagtctgaaggagtatgtgtatctatctgggtgttgnnnnnnnnnnnnnnnnngagacggagtttcgctctnnnnnnnnnnnnnnnnnnnnnnnnnnnnnnnnnnnnnnnnnnnnnnnnnnnnnnnnnnagtctgatacgatatgggtactactttgaatctgttactagtaccatcttgacagagggtacatgctcccaaaacgtttgttaccacacttaaaaantcactgccatcattaaggcncagttttcaaantataggccttt

SEQ ID NO: 358128 - DNA, 560 bp, Homo Sapiens
  misc_feature (92)..(140): n is a, c, g, or t
aaccgggtgaccggtgcagtaaaatctcagaccactactgtagaattcatctatatgaccaaaagccagtaccccaaaagccattgaaattnnnnnnnnnnnnnnnnnnnnnnnnnnnnnnnnnnnnnnnnnnnnnnnnnttataagaagttaatattgactgacctggaacgaaaaaaccaagacagtatttagtcattaacagctatttcatcaatgtaaataattaatttaaatggagaggagtgttcattgtaatcataggagtacatacatgtttagctactaaagaaaaagtaatcagaagcaaattcaatggacttatcagttattattattagacttatcaaagacttatcagactgatttttaaagtcctggtataataggtgctttttgcaccaacaataacaggaaaaatggaggataaggtttacaatcataagtggcaaatgtggccttcccaatgatactaagagttcatgatcattataaaggtcaatatgagaatttcacatggttagtggtcaaagaggaaaaatgcagagagaaactgtggt

SEQ ID NO: 358129 - DNA, 522 bp, Homo Sapiens
aagatgggttaattgtggtgcttataatgaaatctacaaatgaatgagtcaagtgtgcttagcagttgtccactgtaactgctaaaatagtctggaaaagcaaatgatacactggatagagcaagtgattttatttttacatgcttcattttcctagaaattaaaatgtatttcttttatcttccccattgtggaagtctaaacgcccgagagcagtacctgtaaagcaaattgcagggagctgagtcttcctgaggctgctgagctgcatggctacaaagtcaggaagtaagactcactgcctccagacgcactctccacacagctccccacaccaggacgccctgcatgcctctcagatcagcttccccgagggtggggtgccttttccagcactctaaggtaccatgtctgcatttattatttttctaattctgtgcagatgtcttccccaccaattttgctgaaaagctcaaacccagtgatgaggcatcctgcacggacctctgtctctcctcgtgc

SEQ ID NO: 358130 - DNA, 862 bp, Homo Sapiens
gcttcaagaacaaatggatgagctgttacagcaatgcttcttacatgccttgaagtgccgagtcaaaaaggctgacctccctttactcaccagcactttccttggcagccacatgttctcctgctgccccgaaggacgacaactggacataaagaagtcaagctacaaaaaggaaggggagctttctggagggcagtgaggtccgaacgatcgtcattaactacgccaagaaaaatgacctggttgatgcagacaacaaaaatcttgtgagattggatcccatcctatgtgactgcatcttagagaaaaatgaacagcatacagtcatgaagcttccatgggacagtcttctgaccaggtgtttggaaaaattacagcctgcctatcaagtgacccttcccggacaagagcccattgtgaagaaagggagaatctgtccaattgacatcaccctagcacaaagagcgtctaataaaaaggtgaccgtggtccggaacttggaggcctatggtctggacccatactcagtggctgccatccttcagcagcgatgccaggctagcaccaccgtcaatcctgcccctggggccaaggacagccttcaggtgcagatccagggaaaccaggtccaccacctcggctggctattgcttgaagagtatcagctccctcgaaaacacatccaaggtctagaaaaggccctcaaacctggcaagaagaagtgacagactcttttgtctcacgtggtggatccggtggaaatccaagctctgggctggtaatttttatgagcattttcagcttttgcaaatacaaaatataattctttacaaaaataaatttttattctaatctaaatctg

SEQ ID NO: 358131 - DNA, 1212 bp, Homo Sapiens
  misc_feature (791)..(791): n is a, c, g, or t
  misc_feature (872)..(872): n is a, c, g, or t
tggaccggtccggaattcccgggatcacggctgagggcctggcagctgctgcgccctcgctttcttgacattccctggcttctgtgctctcttccccaggccaccccagcagacatgtttgccaaggcctttcgggtcaagtccaacacggccatcaaggggtcggacaggagaaagcttcgagctgatgtgacaactgctttccccacccttggaactgatcaagtctctgagttagtacctggaaaggaggagctcaacattgtgaagttgtatgctcacaaaggggatgcagtgactgtgtacgtgagtggtggtaaccccatcctctttgaactggagaaaaatctgtatccaacagtgtacacgctgtggtcctatcctgatcttctgccaacctttacaacatggcctctggtgctcgagaaactggtagggggagcagatttgatgctgcctggactggtgatgccccctgctggtctgcctcaggtacagaagggcgacctctgtgccatttctttggtggggaacagagcccctgtagccattggagttgcagccatgtccacagctgagatgctcacgtcaggcctgaagggaaggggcttctctgtgctccacacttaccaggaccacttgtggcggtctggaaacaagtcctctccaccttccattgctccactggccctggattcagcagatctcagtgaagagaaggggtctgtccagatggactccaccctgcagggagacatgaggcacatgaccctgggaggggaaagaggagnaatggggaggttcaccaggcacgtgaagacaagtctctctcagaagccccagaagacaccagcaccaggggccctgaaacnaagactccacagatagcaaaaacgccttcaagaccaaatgggatgaagctgtttacagccaatgctttctttacatggcccttgaaagtggcccaagtccaaaaagggctgaaccttcccttttacctcaccagccaccttttccttgggaagccaacatggtttctccctgcctgccccccaaagggaacgaacaactgggaacattaaaggaaattccagccctaccaaaaaaggcttcttcctaaggtttccctggccagcaaaatggccgccccggggagcccaaaattttttcccgggggggaaagagggaaaccttaaacccaaaagggggggg

SEQ ID NO: 358132 - DNA, 578 bp, Homo Sapiens
gcacgagtgggtgacaacgtggatcgctttctagtgtaaggtcccggggaatggcaaaactcaaatgtagcctcactgatgagctcaaggaactctgcttgaagttgtcacccctacgactgacctcagacccaggacccaagggcggggccctcttgcatctggaatccagcctcggccttgacccctttcgcttgttcggagtgctttcgcccagcttctggcgaaggttcacgcagggaggggactcaggtggaaaaggctggcccctttgatctctttgcaggaacttagtagacaggggccccgggctggagatttgcttcgagtaggctagaggcgcccttggcgcaccgaagctggctgccttgctggaacctgccgcgggggtgaaggttgaaaggactctgagctcttcttccccaagccgaactccctcctacaggagcgtggaaaccaactctcccacaccgtctatcccactcttcccccctaaacctctagcgcagctttttaaaggcatcctgtgcagcctccaactttggggaaagagaatgcccaactcccgctctccaact

SEQ ID NO: 358133 - DNA, 681 bp, Homo Sapiens
  misc_feature (424)..(631): n is a, c, g, or t
gagcaaacaggctagccctgagcagggcccccaagcctgaggcccaggagtggacagacctttgtgacacccattctctcttccttttccatctgtccggaactctggacactgcctggaggaatcaggcctgccgtaggcccaggaaggcggaaacaaagacgacgctcagagacaggaagcaacttgcctaaagatacacagcacaaatgagaaaattggtgcccaatgtttctgaagaccagcaactgctaagacagagacttcgagggaacccgaccttgcctgaaggaccaacagcgccccctgcaggacacttccctccattgagagaagccacaggcgccggcctgaggcattctgagtgcgtggaatcctctattaccacctcctggcaaagaacggagctgcaacccagctatannnnnnnnnnnnnnnnnnnnnnnnnnnnnnnnnnnnnnnnnnnnnnnnnnnnnnnnnnnnnnnnnnnnnnnnnnnnnnnnnnnnnnnnnnnnnnnnnnnnnnnnnnnnnnnnnnnnnnnnnnnnnnnnnnnnnnnnnnnnnnnnnnnnnnnnnnnnnnnnnnnnnnnnnnnnnnnnnnnnnnnnnnnnnnnnnnnnnnnnnnnnnnnnactgctctgaactgatcgccctttccaacaagtgcgcaggcttgtggcgt

SEQ ID NO: 358134 - DNA, 1115 bp, Homo Sapiens
aatatatccaaaaaaccagattatattccaaaagatataatagataaaactagtttcgcaatattaagctaaatatttatataataggaccatatgaattggaaactaaaaggaatactatcaattatcatcccagccattcctttcacacatagcaaaactgagacataaagcagctaatttttttacccaaaatcatgattgagaaatccatagtctcaaactaagttctctaattcccgaggacatgttattctcatcataccacagttcaatgaaaagaaagcacattatttgaaaatatatcagcatgtagagggatactaagtttatatatctgttgaatgtttgtatacttgaatatatttgtcgatttctagcactgataatttttaaggtttgaactcttagaatgctgtaatcatgtatgagtacttaactgctcatatatttaaccttactctcaacttatctgagcatttctttttagaaaggatgaacaatgagattaaaactcaacatggtaataatttaatacaattagttcttaagggaaagcttagaaaaaacttcatgtagatgagccaataaatttctcatgaggaaataacactgtgttacactttgcaacaaaggaatctttacaaacctctctaattagagacagcatcagggtaggtagcatccaccacctctaccaaggttcctgaaagaagtttatgaaatgattatttttaatgctctgcaccaggacttcatgggacactgcagagtttagttagggatctctcttcttgcaccttctccttcccatacaaatcttcccagaattgtcctgctacaaaaattactttttcctctaagtcaaacctccagctatctccaaagctgctgtttattaatttcacactaaggtgtgagttactggtaggattaagtctggaggggtaatgaagagctatttacattttaaaagtgagattctttttcctcaaaattttgctaattgatgtaaagagtgagtatgatccttccttatataggttacactgtgccccaaccttctctgggggccaccaaggattcctgaccccctacattccagcctcgtgcca

SEQ ID NO: 358135 - DNA, 1070 bp, Homo Sapiens
  misc_feature (450)..(474): n is a, c, g, or t
  misc_feature (545)..(647): n is a, c, g, or t
  misc_feature (654)..(668): n is a, c, g, or t
  misc_feature (737)..(888): n is a, c, g, or t
  misc_feature (902)..(915): n is a, c, g, or t
  misc_feature (938)..(947): n is a, c, g, or t
  misc_feature (998)..(998): n is a, c, g, or t
  misc_feature (1002)..(1010): n is a, c, g, or t
tctctctttctttctttgtgtattttattcaagatgagttggacccattgccagtgagtctgaatgtcactgacagccctgtgttgtgctcaggactcactctgctgctggtggaaactcatggcttctctctctctttgatcccataaagctacgagggggacgggagagggcagtgcaatgggaagtaaagagatattttccagtaggaaaagcaatgctttcttgtctttagactcaaatgcttagggaacgtttcatttctcattcatggggaaaggcagcctccttaaatgttttctgaagagcggtaaaatctagaagcttaagaatttacagttccttcaataaccatgatgacctgaagttcacctatcccattttagcatctacttgtttttcccatctcttcctttccaattttgcttatactgctgtaatatttttgtnnnnnnnnnnnnnnnnnnnnnnnnngaccagctaaaattttcgacttgactttttaacttaactcatgaattaattaaagcaaatgaaaaaattannnnnnnnnnnnnnnnnnnnnnnnnnnnnnnnnnnnnnnnnnnnnnnnnnnnnnnnnnnnnnnnnnnnnnnnnnnnnnnnnnnnnnnnnnnnnnnnnnnnnnntttgggnnnnnnnnnnnnnnnaaaaaattttttaaaaactttttttggggcgcgggcccccaaaggaaaagaaacggggccaaagttttnnnnnnnnnnnnnnnnnnnnnnnnnnnnnnnnnnnnnnnnnnnnnnnnnnnnnnnnnnnnnnnnnnnnnnnnnnnnnnnnnnnnnnnnnnnnnnnnnnnnnnnnnnnnnnnnnnnnnnnnnnnnnnnnnnnnnnnnnnnnnnnnnnnnnnnnaaataaaaaaatannnnnnnnnnnnnnggggaatttttattagaaagaannnnnnnnnnaaaattcctaaaaaccccttttccccccccaatggggaaaaccccctccanaaannnnnnnnntaaaaacacccgaaataccccccccggggggaacaaaaccccttttggcccccttggtgg

SEQ ID NO: 358136 - DNA, 534 bp, Homo Sapiens
ttccccgggctgcacgaattcggctctagcctgattcttattatttcccattacaattaagaacccctgacagagagaatcaaatatgactagtgtatgttccacaccctctgctactgtgttacattctgattgtcttgtatggaccagaagagagctttgggacattttttctgaacattctaagcattctagtgaaagttcccatgttccaacagaacttaaaagcaatgtttgccttatatataaaagggacacaataattgaggtccaccttctaggaaatcctaggactcgtttatttgggacatggtgggaataaaggtcacatattggaaaatggaaaggctgatgaaactatcagatactaaaacattcttaaaatagaggaatatagttagagacatcaggtttaagccagtatttgttcctgttttacaatgcttctgtcttaagctgtgtcttaacttttaacacccatcttttctttctaaagctttcctgacagctgtgaaaatccaaaaaatattctta

SEQ ID NO: 358137 - DNA, 1102 bp, Homo Sapiens
ggggtagctgatcggcccggaagtgctcacacgtgtgctccctgccctgctcctggccccttggccggccgggctgtttctggccatgggtcgctcccgccggacaggcgcgcaccgagcgcactctctagcccggcagatgaaggcgaagcggcggcggccggacttggatgagattcaccgcgagctgcggcctcagggatccgcacgaccccagcccgacccaaacgccgagttcgaccccgacctgccagggggcggtctgcaccgctgtctggcctgcgcgaggtacttcatcgattccaccaacctgaagacccacttccgatccaaagaccacaagaaaaggctgaagcagctgagcgtcgagccctacagtcaggaagaggcggagagggcagcgggtatgggatcctatgtgccccccaggcggctggcagtgcccacggaagtgtccactgaggtccctgagatggatacctctacctgacatggcctgaagatgcagggcagaggaattgcccatggacagtgacgcaaggactaggctgggagggagcgtgccaaccccttttgcctctgggtttggggagcggagggcctcttcttggtgccctgcccccaataaaggaactggacaaagagaacttgcctccaactctaacttccaggccgctgtctcaaactcctgccctggaagggcttctctactactttctgtacaccaggccctagggtgtctactccccacttggtctatctctgccttccctctgaggtcctagcatctgaactggagcacccagatggaggcctgatgcaatgtggggtggcgggaagtgggatcagaatactctggccctgcttctgacagaaactgatccccagaaaagaaggcttctgaagatgcagccccctccccgagtcactacccccagcatccaagtgaaagtctctccttcttccttacggggcccccgggaacccgccgctgtccccaccaatcttccaaaggggatatgcagggaccaccccaggccgaaggaacgcttagcactgtaacccacaaattccggccagaagaaattccggggttttgccc

SEQ ID NO: 358138 - DNA, 2264 bp, Homo Sapiens
  misc_feature (130)..(255): n is a, c, g, or t
  misc_feature (1883)..(1885): n is a, c, g, or t
  misc_feature (2091)..(2091): n is a, c, g, or t
  misc_feature (2103)..(2103): n is a, c, g, or t
  misc_feature (2112)..(2112): n is a, c, g, or t
  misc_feature (2130)..(2130): n is a, c, g, or t
  misc_feature (2148)..(2148): n is a, c, g, or t
  misc_feature (2178)..(2178): n is a, c, g, or t
  misc_feature (2185)..(2185): n is a, c, g, or t
  misc_feature (2197)..(2197): n is a, c, g, or t
  misc_feature (2206)..(2206): n is a, c, g, or t
  misc_feature (2223)..(2223): n is a, c, g, or t
  misc_feature (2241)..(2241): n is a, c, g, or t
  misc_feature (2250)..(2250): n is a, c, g, or t
tggaccggtccggaattcccgggatccgtccctcctcttttttttcccggcagatctttgttgtgtgggagggcagcagggatggacttgagcttgcggatcccctgctagagcagccgcgctcggagannnnnnnnnnnnnnnnnnnnnnnnnnnnnnnnnnnnnnnnnnnnnnnnnnnnnnnnnnnnnnnnnnnnnnnnnnnnnnnnnnnnnnnnnnnnnnnnnnnnnnnnnnnnnnnnnnnnnnnnnnnnnntcgcggcagcagatgtgtgtggggtcagcccacggcggggactatggtgaaattcccggcgctcacgcactactggcccctgatccggttcttggtgcccctgggcatcaccaacatagccatcgacttcggggagcaggccttgaaccggggcattgctgctgtcaaggaggatgcagtcgagatgctggccagctacgggctggcgtactccctcatgaagttcttcacgggtcccatgagtgacttcaaaaatgtgggcctggtgtttgtgaacagcaagagagacaggaccaaagccgtcctgtgtatggtggtggcaggggccatcgctgccgtctttcacacactgatagcttatagtgatttaggatactacattatcaataaactgcaccatgtggacgagtcggtggggagcaagacgagaagggccttcctgtacctcgccgcctttcctttcatggacgcaatggcatggacccatgctggcattctcttaaaacacaaatacagtttcctggtgggatgtgcctcaatctcagatgtcatagctcaggttgttttagtagccatttggcttcacagtcacctggaatgccgggagcccctgctcatcccgatcctctccttgtacatgggcgcacttgtgcgctgcaccaccctgtgcctgggctactacaagaacattcacgacatcatccctgacagaagtggcccggagctgggggggagatgcaacaataagaaagatgctgagcttctggtggcctttggctctaattctggccacacagagaatcagtcggcctattgtcaacctctttgtttcccgggaccttggtggcagttctgcagccacagaggcagtggcgattttaacagccacataccctgtgggtcacatgccatacggctggttgacggaaatccgtgctgtgtatcctgctttcgacaagaataaccccagcaacaaactggtgagcacgagcaacacagtcacggcagcccacatcaagaagttcaccttcgtctgcatggctctgtcactcacgctctgtttcgtgatgttttggacacccaacgtgtctgagaaaatcttgatagacatcatcggagtggactttgcctttgcagaactctgtgttgttcctttgcggatcttctccttcttcccagttccagtcacagtgagggcgcatctcaccgggtggctgatgacactgaagaaaaccttcgtccttgcccccagctctgtgctgcggatcatcgtcctcatcgccagcctcgtggtcctaccctacctgggggtgcacggtgcgaccctgggcgtgggctccctcctggcgggctttgtgggagaatccaccatggtcgccatcgctgcgtgctatgtctaccggaagcagaaaaagaagatggcagaatgagtcggccacggacgggggaagactctgccatgacagacatgcctccgacagaggaggtgacagacatcgtggaaatgagagaggagaatgaataaggcacgggacgccatgggcactgcagggacagtcagtcaggatgacacttcggcatcatctcttccctctcccatcgtattttgttccctttttttgtttgtnnnttggtaatgaaagaggccttgatttaaaggtttcgtgtcaattctctagcatactgggtatgctcacactgacggggggacctagtgaatggtctttactgttgctatgtaaaaacaaacgaaacaactgacttcatacccctgcctcacggaaaacccaaaaggacacagctggcctcacggtttgacgttgtgtcctcctcccnggggacattctnctcttgggnaaccaaagggactgcagntgttgccatcggggcctngggtcaccctggcacagcgggcccacagantttttcntgttcccccttnattcgtttntttaggggtttcaacanggttaaaattttggtttncctttggantttgttttcccagg

SEQ ID NO: 358139 - DNA, 1448 bp, Homo Sapiens
  misc_feature (152)..(169): n is a, c, g, or t
tctcatatactgaggaggtgacagtacatcgtgtgaaatgagagaggagaatgaattaaagcacgggacgcctatggcgcactgcagggactggtcagccaggatgacacttcggcatcatctcttccctctcccatcgtattttgttcccnnnnnnnnnnnnnnnnnnggtaatgaaagaggccttgatttaaaggtttcgtgtcaattctctagcatactgggtatgctcacactgacggggggacctagtgaatggtctttactgttgctatgtaaaaacaaacgaaacaactgacttcatacccctgcctcacgaaaacccaaaagacacagctgcctcacggttgacgttgtgtcctcctcccctggacaatctcctcttggaaccaaaggactgcagctgtgccatcgcgcctcggtcaccctgcacagcaggccacagactctcctgtcccccttcatcgctcttaagaatcaacaggttaaaactcggcttcctttgatttgcttcccagtcacatggccgtacaaagagatggagccccggtggcctcttaaatttcccttccgccacggagttcgaaaccatctactccacacatgcaggaggcgggtggcacgctgcagcccggagtccccgttcacactgaggaacggagacctgtgaccacagcaggctgacagatgggacagaatctcccgtagaaaggtttggtttgaaatgccccgggggcagcaaactgacatggttgaatgatagcatttcactctgcgttctcctagatctgagcaagctgtcagttctcacccccaccgtgtatatacatgagctaacttttttaaattgtcacaaagcgcatctccagattccagaccctgccgcatgacttttcctgaaggcttgcttttccctcgcctttcctgaaggtcgcattagagcgagtcacatggagcatcctaactttgcattttagtttttacagtgaactgaagctttaagtctcatccagcattctaatgccaggttgctgtagggtaacttttgaagtagatatattacctggttctgctatccttagtcataactctgcggtacaggtaattgagaatgtactacggtacttccctcccacaccatacgataaagcaagacattttataacgataccagagtcactatgtggtcctccctgaaataacgcattcgaaatccatgcagtgcagtatatttttctaagttttggaaagcaggttttttcctttaaaaaaattatagacacggttcactaaattgatttagtcagaattcctagactgaaagaacctaaacaaaaaaatattttaaagatataaatatatgctgtatatgttatgtaatttattttaggctataatacatttcctattttcgcattttcaataaaatgtctctaatacaaaaaaaa

SEQ ID NO: 358140 - DNA, 706 bp, Homo Sapiens
  misc_feature (426)..(426): n is a, c, g, or t
  misc_feature (586)..(586): n is a, c, g, or t
gtccgggcggccaactccaaggtcgccttctcggcggtgcggagcaccaaccacgagccatccgagatgagcaacaagacgcgcatcatttacttcgatcagatcctggtgaatgtgggtaattttttcacattggagtctgtctttgtagcaccaagaaaaggaatttacagtttcagttttcacgtgattaaagtctaccagagccaaactatccaggttaacttgatgttaaatggaaaaccagtaatatctgcctttgcgggggacaaagatgttactcgtgaagctgccacgaatggtgtcctgctctacctagataaagaggataaggtttacctaaaactggagaaaggtaatttggttggaggctggcagtattccacgttttctggctttctggtgttccccctataggattcaatntctccatgatgttcatccaggtgagggatgacccactcctgagttattggaagatcattttttcatcattggattgatgtcttttatgggtttctcatgggtggatatggattctaaggattctagcctgtctgaaccatacttcacagattatttgggngtgtctgtttcagtatatttggaatgggactttaagagataatcctatgcttaaatgtacagtcgctgtttgaagaatattctgaattcattcctgggataccggatagttcagtgggtt

SEQ ID NO: 358141 - DNA, 523 bp, Homo Sapiens
ggaccgaggagtgtctatgcccaacatgttggaaccaaagatatttccatatgaaatgctcatggtgaccaacagagggcgaaacaaaatcctcagagaggtggacagaaccaggctggagcgccacttagcccctgaagtgtttcgggaaatctttggaatgtccatacaggagtttgacaggttacctctttggagacgcaacgacatgaagaaaaaagcaaaactcttctaagtcccactcgtgaatggcaattagagaaaggactgacagtggcggtgccccataggatgtcatattgaggcccaaacttgattggagaatttgcaaactaccgtcgctcagcaacaccaaaaagagaaagtctggttcaccatgagtctgtcgggccagccaacagtaacacttgccaagaagcatggcgtagaaatttctatgttccgaaacacagagtagtgtccacatgtgagcttttcacattaccttatgtatacaacaggagcctcatgtgagggcgggcag

SEQ ID NO: 358142 - DNA, 2107 bp, Homo Sapiens
  misc_feature (65)..(73): n is a, c, g, or t
  misc_feature (104)..(117): n is a, c, g, or t
  misc_feature (833)..(834): n is a, c, g, or t
  misc_feature (1353)..(1388): n is a, c, g, or t
actatttaagaaaaaattttatttgcaagaaatggaaatacaaaagcataacaatttcaatttannnnnnnnncccaaactaagtacaagtgtcctacaaagcnnnnnnnnnnnnnnggtatttacttagctatgataaagaataaaaagtcatttaaaaaacgcgataggacagataacagactcacaacgtatttagatttaaacactgctggtctacgtaacctgttacaaaagagagcaaaacctaactgtcagcatagacattaaagctcaccgttgattatagctcagggcctgctcagcattgtttaaaaagggtcactcacagttttgtcaaagagtgctggtgttctctatgaactcataaactgttttatctgaaaaggtgattttctaagtagtgtaagccatgggtacatggtgcaaaaagttcatgttctcactcagctggtgagcgaaggatgggagcagagaacagagctaaaacccctggttttcctttccccagatgtaaagcctgctagctggaactcacagaagattggaacaaaaagataggagatggacacctgggggactgctccagcacgaagggaagcgatgagcatcacacagcagggccattgcaggggacaggtgctgtaattcctgcccagagaacttgaaagcttacagtgtgctcacaggaaggaatcggctcagctagtccagaaattgctgcattcccatattacttagttctttattcatcctgtggtaaagagtcacccttgttttccgtatctataaaactgaaagacttaaaatttacttagcacagcacgcaacannccctagtaaatgctcaagaaattattatttcccttccttctagaaaccaaggctaaataaaacattcctgaattttatgttgtccaaaataacaaaacaaaacaacacctagttttttcctgtgttaagtgctgaccgtttgaccacaaaggcatggaacattaatcttcaaatgagccaggttcctttgccctgagaaatgttccgctatgaggatttataatacctttaatcctggctggttgtttttttgatgtgattgcactcctgcaaactgggattttcctaatggacgtaaccctatttcttttctcctgatgtgcaaatctgatagtggctcacttttaggaaaccacttttgagccttcagaaaaaaatttttccccacacccaactcaatctaataataaaagaatatatacaaaatctcccagtgacgagggattcctcagtcatcctggatttacctataaggcacatttaaggcacaaatgagcatgtaagggaggaatgtgcacnnnnnnnnnnnnnnnnnnnnnnnnnnnnnnnnnnnncagagagagaagaagggagagagaactataagcatttgggtcttttgaataaccattattaatgtttcctcaatcccttctattccccaatattccctagggcctcaggcaacactattccttatgaaactgaaaagtcttaggagtaactgaatgagtgagtgaatgaacgaaacatctaagtcttgtctctggatccttcacagccctcacgtcaccaccacctactctctcctgtaactgccctcccagcggggcctatcctagcatgtgtctatggatagtctcacctgaaggtggccaaataaaatgactctcaagagggcactacctgcccatggcttcacaggtccagccagcccagcaagcagaagtgctggtgtctttaacccaggtttcttaaagactggcttcaatagaaccaactgtagtgacttggggcagaggaaggggaggatgaaggtcttctagtgcatctctgccctctccgtgttggcaaggttggcatgaatgggccattattcaactgggggtgggatgtctccatttctggactgtgctcaaattcacaccttgtatgacatgtgggcagaggagctggcctggagaggcctctaattctgcctctacgcttttgctgggtctgaggacatgggagggaggagccataaaatgctggagaacattttaaaacacttatgaagaaatgctgacacttt

SEQ ID NO: 358143 - DNA, 1170 bp, Homo Sapiens
  misc_feature (55)..(95): n is a, c, g, or t
  misc_feature (574)..(602): n is a, c, g, or t
gtttcttcatctacaagttgggaaaaacattttcctcttaaaattgtgaagaggnnnnnnnnnnnnnnnnnnnnnnnnnnnnnnnnnnnnnnnnntaaattgcttagagtttctagcacatagcaaataataaatattagttattagtataaacataaggcttaaagtcttggatttgatgcatatgacttaatttgtatttgtgctagtagctgtaatgtcagtgacaggataacaagcaaatgattagaaatctaatagtaatgcttgttcctttgctatctatgctaacaagtacatagatagcctaagataaattatacttaggatgaagctaaaatgcataactgagacaccttaaaattgtactaccttgtgctgttcactgccatcagggaggtagcataaaatgaaagataaagtctgaagactggatccaggcaaattcatgttctttctttgtaactcactttcttcgtcaacatttctgtgactcaatggatagcatatttccatcaagtagcacgtataacgtgatgctttcatgtttctgccttaaataaaataaccctcnnnnnnnnnnnnnnnnnnnnnnnnnnnnnctcgaggaaaagcaccgaaacccaattcaccctatactgaagggggtgccaattccctgagttgccctataccgcgtcgtgtttcaataacctgtcgccgttttacagtgactcgactggcaaaaccttgccgttacccaacttgacgtaattgcaataaatccccttttggccaactctcctaatagcaaataggccctgaccgataaggccttcaagcaatcgcctatcctgaatgtgcattgccaaattggcagctgtaatactgcgtacaaattcacccataaagcttgatcaataaaatcccttataaaccataggtcttaatcgagataagcccttatgaataacacgattgacccgatagcgatatccgagatcccgatttgaactgaaaccctaaaaacgaccttgattcaaaggccaaggcaaaaccctattctaagaaatgctctcttcgggaacctaccctcataaatttttccgttaaagggcccccaattcataaactgaacctataaggggccacctattaggactccccggttaaaacctaaggcggtgaccc

SEQ ID NO: 358144 - DNA, 845 bp, Homo Sapiens
  misc_feature (542)..(550): n is a, c, g, or t
tacaagaatgtgaatggcataaagtatcacgctaagaatggtcacagaacacagattcgtgtccgcaaaccattcaagtgtcgctgtgggaagagttacaagacagctcagggcctgcggcaccacacaatcaatttccatcccccggagtcggctgagattatcaggaagatgcagcaataacatgctggtcataactgtgccaagaaatcctcaccagcagttgctgattttgaaaacagccaccttttttcaggggaagcattcagcaaccctttaaagaaaaagaattaaatgcatgctttaaattttttctgtaattttggaatgatgtatctttgtagagttaatgattttgtacatttgcacatgtaatcatcatacccattttcattactttgatataaggtgctaaacaaaaaaagctctaggttcttcagcacatttcccccaaaacaaaataaaattgagggcatgttgcatattgttgaattgtattgccgaggtatcaacctggggggaggaggggctggcactgagannnnnnnnncaggattgtcatgtgattgaagttttcaacacattaacttacatatggtcaaaacctcaattaataccttcattatcaaacttgttaaccatgccttacataatgggagttagtatttgtgaagataaaggactttaggtaattgaaaattcactaagaaagtaatgtttaaccatatatggttaaaaatattttcataatttaaataacaaacttcaaaggtgtgccttccggggtttaaattaacctgcaacctttggccctttagttggctttgccatgtgcttacttggct

SEQ ID NO: 358145 - DNA, 1030 bp, Homo Sapiens
cagcccaagtgccccccaaaatgggttaaaaaatatttatcgcccgggtaaatcacaatttttaataccaattggacgttcctttaaaatcccattttaaaaaaggttaatttttacaccaaatttcgcaacacaccattttttaaaggcaattacttacggtttttttaaaccatttaattcacattgttttaaaccttacctttaagggcaaaccaatggggattccatttcgttcaagttaattaaaacctttcaccttggttgaaacttacgaaagggaaaggcacggtacccccaaaaggtacccaaaattccaacgagtcttgtggacattaatgaaggcttttacagtggttaacaagcttgtccatcaagtataaaaggactgcagtactgtttttcaacatgccttagctcattaccaggaccaaatgatgccactgtccaccaatgataagctctccacatcgaaagcgagcacagcatgggagaatttcataaaatgaggactcttcactaaaatcatcaacataattttggaggagttcctctttggtggaaacaatcagagatcggtcttttgctgatagaactattgcaaggcacacgtaatgttgctcagaagaatttgctcggcgcacaacagtaagaagtctgacagggtggttatttggaggagaactaaaatgttcaatacaaaaccagctagagtaacttaagccggagggaggagggaagaatctttcaccagaaccaatgccactgaccacagccccatcaataagacctgttgtaacggtattatttgtaggagcattatgaggggccaaactgggcaaaaaaagacatccaaacccttcaagtgatgtgtcaaattcaacaaaagctggagtaactgatgacccatgaagtgctgatgtcatgtggaggttgtcatggagacctagacactttcaccctggtcaggggtacagtacttccatgccgcagatattaccaggctcttgcttatcccacggggtatcct

SEQ ID NO: 358146 - DNA, 600 bp, Homo Sapiens
tagtttcaaaaagaaattttcagtagtactacgtttgctgaagggccagaataatctttcattaggtgagcaaacgcggacttttgtctccaggagaaatcgaacaggctcctgtacttctgttattaccaaatctacagctgtggtcataaacaggactttatctttaggagtttcttcatttacaacttgaaaatgtggggattttggattccagctccccgtaataacatacgactttccatctgaacttttgcccatagattccaaatctaataagtgcatgtcactatttcgtacatcttttcctggactaaggagaagaccaaaacacctttcaatggcaagttctttattagttgtttgctgcacatagatgacaatcttcttatcaattccttggcgtagtttaaagcactgtctgtccttatctttgggaactgcactaaaataacctttaccatcatcttcttttatttctaaagacacagagaaggtaaagatgtcactgtcaagagtctggggtgcagcagtggcttgaaagtggggtctgcttggcagacgggggaagggaggtggcaaactggtaagtatacggct

SEQ ID NO: 358147 - DNA, 587 bp, Homo Sapiens
  misc_feature (130)..(203): n is a, c, g, or t
gagagagagaagcctgggccagcagagggctgctgtctctgctgcgctttcagcaagctcatctcaggcatgacattcaggatgcagagttgctctttatttttttatgtagtttgctaagagaaaatannnnnnnnnnnnnnnnnnnnnnnnnnnnnnnnnnnnnnnnnnnnnnnnnnnnnnnnnnnnnnnnnnnnnnnnnntgaaggcaactaattacacctgccttagcatatgaggcgtgaatacgagaatgcttgacaatacttggcatagagttagccctcgataaatttcagctgttaatgttattatagcaccttcacatgttgttgtgtttatattgtaaatcgttggttgatatttctattgtcatgatagctccatactttcaagatgcgtctttgtagtatttcgtatccatttagtcattcattcactgagtctgtatctatcagacacctacttatggaccaggaactgttgattattatctttctgttcaggtcatgatgagctgttcatttcttagtgcttgccactataatattcagagctacagttcgctgagcacctgtctcaataga

SEQ ID NO: 358148 - DNA, 858 bp, Homo Sapiens
  misc_feature (794)..(794): n is a, c, g, or t
  misc_feature (811)..(811): n is a, c, g, or t
  misc_feature (823)..(823): n is a, c, g, or t
  misc_feature (837)..(837): n is a, c, g, or t
cacagaaaaactgttataactgtacttactttcagaaagaatatttgttctgcagtttgtaaggaaatttgtttacaaatataaattaatctgcattaatatcttccatatatcccatggcatatagtcacttaacagagtgactgtttttttatcctttaaattttatcctttaaataaagcctgcaatttgggagtgtaaatgtatagtctgattaaaaagttaaaacatactaaatatgtaaagtatataacaatttaattgctactgatccactgatatttattttctgtttcttctttttggactctttgttcttctcggtgattagctgcagcccaaaatgttatttttttgagtacttgttgcagaagtttaggaggtaataaagatatctgactttctaacatgatagaatttttaccaatgcagtcaaggcatgacctgagtagtgaataaggctgtgtttgaaagatcaataaatcattacagtgacctgtatccaaggcaagtaagtcatctttgctcccaccaaataccattatttcattttcttttcccaaacaggctgtgtgccataacctaggtcttgttttaggtaaatgtgtaagttgtttccaacaatttgttgtgacattatgaatccaaccatcacttaatggggatattatctgcacttagtccaccacatagggaaaagtttatcatcaggctatagggtgttaaagtatgccatgaccgatgttttggggctttctccattaatagtaatccttccagaccaagtccgggngtccagggttaggtagnggcaatctttcncccagtttgcagancacgtccgccaaggtataacc

SEQ ID NO: 358149 - DNA, 1286 bp, Homo Sapiens
  misc_feature (1037)..(1037): n is a, c, g, or t
  misc_feature (1040)..(1040): n is a, c, g, or t
  misc_feature (1042)..(1043): n is a, c, g, or t
  misc_feature (1045)..(1046): n is a, c, g, or t
  misc_feature (1048)..(1048): n is a, c, g, or t
  misc_feature (1055)..(1056): n is a, c, g, or t
gccgcacagaggctgcaagacaccagcagctatgccaaaatcctgacctgccccaaaaccaaattaaaaatatcctataaggatgccataaatcgctccatggtagaagatatcactgggctgcgccttctggaagccgcctccgtgtcgtccagggcttacccagcccttacaacatgtcttcggctccgggctcccgctccggctcccgctcgggatctcgctccggatctcgctccgggtcccgcagtgggtcccggagaggaagctttgacgccacagggaattcttcctactcttattcctactcatttagcagtagttctattgggcactagtagtcagttgggagtggttgctataccttgacttcatttatatgaatttccactttattaaataatagaaaagaaaatcccggtgcttgcagtagagtgataggacattctatgcttacagaaaatatagccatgattgaaatcaaatagtaaaggctgttctggctttttatcttcttagctcatcttaaataagtagtacacttggatgcagtgcgtctgaagtgctaatcagttgtaacaatagcacaaatcgaacttaggatttgtttcttctcttctgtgtttcgatttttgatcaattctttaattttggaagcctataatacagttttctattcttggagataaaaattaaatggatcactgatattttagtcattctgcttctcatctaaatatttccatattctgtattaggagaaaattaccctcccagcaccagcccccctctcaaacccccaacccaaaaccaagcattttggaatgagtctcctttagtttcagagtgtggattgtataacccatatactcttcgatgtacttgtttggtttggtattaatttgactgtgcatgacagcggcaatcttttctttggtcaaagttttctgtttattttgcttgtcatattcgatgtactttaaggtgtctttatgaagtttgctattctggcaataaacttttaggacttttggtancancnnanncnaaaagannagaagaaattggcggcccgccttcgggccctcaaaaaagctttctaaaaccattccgtttgggggcggcggggccccacgaaagggaaagtgaacactggggtcaaatgctggttttccctaggagagatcccggcggccccgaacaaagggggcttgggagatccctcacgccaaattaagtatatggcccccgggggcggggagccccggagagggatttttcgagaa

SEQ ID NO: 358150 - DNA, 879 bp, Homo Sapiens
  misc_feature (669)..(670): n is a, c, g, or t
  misc_feature (678)..(679): n is a, c, g, or t
  misc_feature (729)..(729): n is a, c, g, or t
  misc_feature (788)..(788): n is a, c, g, or t
  misc_feature (793)..(793): n is a, c, g, or t
  misc_feature (811)..(811): n is a, c, g, or t
  misc_feature (818)..(818): n is a, c, g, or t
  misc_feature (826)..(826): n is a, c, g, or t
  misc_feature (845)..(845): n is a, c, g, or t
  misc_feature (849)..(849): n is a, c, g, or t
agtggatcccccgggctgcagggaaaaagttaacactcctatacaaacataaaaattcttcatgaaatattatattaaaaaacaacaaagtaacccagtcatctcaaaattgacatctatgaattccagaaaagttaagagtgatgttaaaactagagcagtgaggggaagctgaagtagaaccattcccagggaaaagaaacagagttaggccttcataatgagggacatgaaggagaatcaaactccatctgcagaagacgggaagctagacgccaggctccaaagaagagccaaggttcatacatgactgtccacagtgatgtcataagacatttatcaaccagtttataaagaagactaggactttccttaagggttcagaagtgaataaccttcttccttactgaatataaaacagaaaccaagaggcagcatgggatcacaggaggagaaatctgccaagaaaggagccaaaacccaagaaagcagacgcaaagaataaagagtcccgctaacatttctgagccaccacatcaagccagaggatactgaattctcctctcctactctcccttctgctgatgccaaagtttgagaactgacttaaaaatactgcttagatcagagtgaatattataatccacttatgccagagctattcatgtnngatgattnntttccctttatgctgatcttcacttgcttttgctacctaccataagcttncacgttaaaaaatctttgcacatgtatatctctgcaagcagccttctaaaataacattnaagtntacatgcatatgtggtcntttacantaatggtnatttgctgtttaatacagngccnctcggtctattatgacacttgctatagcct

SEQ ID NO: 358151 - DNA, 881 bp, Homo Sapiens
  misc_feature (759)..(803): n is a, c, g, or t
cccagacaacccctgcaaagtgactctgagaaggacgacaagccctgctgcagtcacacccagaagctgactcatctatgcacagccaaagcatgaggaaactcatcgtgggacttattctccttaaaatttggacttatgtaataaggacttccactgattttccccacatggaggactgttcccaatgtattcatcaggtcactgagtagggcaaaaagttaaaacagtttctgtttaatagttataattgttgcgggacaatcaaagatgggagagaccaaaaaaagtgagttcaggaaaggtctttattaaaagatgatcacttggctcagtaggattagtgtacaggaaagtctgagccctggacaaagaaagcagccaccttttaagcagtcagtggctgggagctacgtgatgcaggaagcacacttagagaagcaagaacaaaggcagttgatcagtcttttacatttatctatactacatgttccaaatccttgggaaaccatgtttctgtataaaccttgtaactttgcagctgcacgagggaggtgaagcagaaactcgctgagcctcaaggaatgtgaaactagcaagtacagataaggctcaaatgtattacatgaatcattatccatctgtcttgcaggaagacctaagtagtgaaaatgagaatgagaactcccactaataagtgagattctcacaggggggaataaggaaggagaccacctctcttattgtctcatacctcannnnnnnnnnnnnnnnnnnnnnnnnnnnnnnnnnnnnnnnnnnnntcaatagtcagacagcccagcgccacaccccagcctggtctggtagttaaaaagcactcctaccgagtccgctgcatt

SEQ ID NO: 358152 - DNA, 609 bp, Homo Sapiens
  misc_feature (459)..(560): n is a, c, g, or t
ggcgcgctgggagccccatggaggttctagggtcctgagaatacaggcattgagacgggctgaggaggaactccagcatccggctgcccgtgcccaccttcagtttcaccctaccctgctcccacaaggatctgagcagggagggggcctgatttccttctcccgctgagaccacagtcctctggaggctaggatctggtgatggggcaccctagctaggagcctgagcctctttataatttagtttccatagaagttatatgtgcatttaaaaaaattcaatgtaagtaaagacctacaatgaaaagcaaccgtcttgtctctgggggtgggatgggggatgcctttgcgtggggagctgttaggagacttgacagtcacctttgctgagagcctcctgcatgtcaggggctcttctatgcacattatatgtgtgctaattccttttttctttacttnnnnnnnnnnnnnnnnnnnnnnnnnnnnnnnnnnnnnnnnnnnnnnnnnnnnnnnnnnnnnnnnnnnnnnnnnnnnnnnnnnnnnnnnnnnnnnnnnnnnnngtgtgagccaccttttccagcctgttgactcctttttcagaggagtcgt

SEQ ID NO: 358153 - DNA, 520 bp, Homo Sapiens
agagaaacgaagttacaggaatggaactagagaaacctcacaaagggataaaggaggtaattaaaggttaaagccagatagcctcgagctcaaaggagaaatattggaggccagataggaaagtgccttcctactcagggggttatggatccagggtggctaaagaatagaagtagagttccacccagggccagagggaacaatctgggattcagacacagcagtggtgccaacgtgaatctacctcgtgctagagtctgagtagcctagtctatcacccaacacagataagactggacaggggctcccaggaaccaacatctaagaagggagtttggagaggggctaaaagaaagcaggttaagccccaaatgtaactgaatgatgaccagggataactatttactagtgcttttatgatttattgtaactctgtaactttcccagtatttgttaattttttaacttctgtttctcctgtacttacgagcagtaaaagttgttcaaaacataaaaaaaa

SEQ ID NO: 358154 - DNA, 440 bp, Homo Sapiens
ggaggcccagataggaaaagtgcccttccctaactcaagggggttaagggatcccagggtggcctaaaagaaataagcaagtaagagttcccacccagggcccagagggaacaatcctgggattccagacacagcagtggtgcccaacgtgaatcctaccctcgtgcctagagtctgagtagccctagtctatcacccaacacagataagactggaacaggggctccccaggaaccaacatctaagaagggagtttggagaggggctaaaagaaagcaggttaagccccaaatgtaactgaatgatgaccagggataactatttactagtgcttttatgatttattgtaactctgtaactttcccagtatttgttaattttttaacttctgtttctcctgtacttacgagcagtaaaagttgttcaaaacataaaaaaaa

SEQ ID NO: 358155 - DNA, 554 bp, Homo Sapiens
gtggagatgtatcccaccatgaaaagtcgcctgccaggggaggggtgccatctccccaacccagtcaacagagagataggaaacggcatttgagtgggtgtccagggccccgtagagagacatttaagatggtgtatgacagagcattggccttgaccaaatgttaaatcctctgtgtgtatttcataagttattacaggtataaaagtgatgacctatcatgaggaaatgaaagtggctgatttgctggtaggattttgtacagtttagagaagcgattatttattgtgaaactgttctccactccaactcctttatgtggatctgttcaaagtagtcactgtatatacgtatagagaggtagataggtaggtagattttaaattgcattctgaatacaaactcatactccttagagcttgaattacatttttaaaatgcatatgtgctgtttggcaccgtggcaagatggtatcagagagaaacccatcaattgctcaaatactcagaaagtactgtcaaaagcctaataaaaaacctaaagtttgctctga

SEQ ID NO: 358156 - DNA, 920 bp, Homo Sapiens
agtatttatgcttccattttattgtttttaagaattaaactgccacctcagtagtcttaagagcaatataatgaaacatacatacatttaatttagacttatgtccatcatagcttcaaaggcttccctgaaataaggctgggattcacatctttttccgtaagaaaagaaacactaacagtaattttgttatccttctacccacccaccctcattcaaacaattgatgaattcaagtctaacacgatttaaaacttttgtctgctacaacattcatctgatatgcctccctgcataacatagatttcttaaacctaattggaaaataaatcatttttttaaaaactctacaagggttctcttaattcaaaattttatcatgatactgattttctcgtccaatacataggctaagtggtttcttaccacattcaactctagtgactttcaataaaagcaggatagctcttcataaatagttgagaagctctaaagtgattttggctattttcttattacatggaacaaagaatggtttggatttttaacagtaatattttaatagctcctaaacagggggatgaaaaggaatcaagtttgcaccagtccaagtacctacagtaatatgatagaagcactcaccaccatttcacactatcactcccatgcttttaataacaagcatttctcactagaaatattgcattaacactggactttcaaactgctaaatgtagaaaatcacttgcctgacttaaaacaaaaaagtttattagttatttttggccagtcaaggttgaaacggccattttgttatttctaacttctgctctagggttcagaaatgattttgcatctgatcattcaagatgagaatttgtttcacctgtacctgacagaataaaatggtaaattagcat

SEQ ID NO: 358157 - DNA, 608 bp, Homo Sapiens
caagggatatagaggagatgaatggcacaggggaaggcaataggacatgtcatgctgggcattatagctcatatcaaggatagacttcatattagaagttatgagaggctactgagacattttaagcaagaggtaacatgatcagacttaaatattccaaaattctctccagctctattatgagtatgaattgcacagtatgcaagggaaatgtagggagatgagttagctattgcagtaattcaaggaattatgaaaatgaattatatctaatttattaacatttatcagtaattcaaggaagaagttatcagtaattcaaggaagaaatgatggtggcttgaacttaagaatacggcaatgcatagaaataagatgagtgaagatgtgtcaatgataattcaggacattggtctaaaaattggtcgaatggtggtaacatttatcaagaatgggaacacaggatgaggagcaatacggagcaattgcataataacggttactattatcaataataataatatgcaattgctgaactattactgtgatccataaactgagctaagtatattatatgtattatttatggtgtgattttatatataatt

SEQ ID NO: 358158 - DNA, 688 bp, Homo Sapiens
  misc_feature (112)..(317): n is a, c, g, or t
  misc_feature (361)..(628): n is a, c, g, or t
cccccgggctgcaggaattcggcattagaagagactgtatggaagacagatacagaggggaaggcacgcatgtgaagatgggtggagagaccaggagatgcatccacaagcnnnnnnnnnnnnnnnnnnnnnnnnnnnnnnnnnnnnnnnnnnnnnnnnnnnnnnnnnnnnnnnnnnnnnnnnnnnnnnnnnnnnnnnnnnnnnnnnnnnnnnnnnnnnnnnnnnnnnnnnnnnnnnnnnnnnnnnnnnnnnnnnnnnnnnnnnnnnnnnnnnnnnnnnnnnnnnnnnnnnnnnnnnnnnnnnnnnnnnnnnnnnnnttatatttggctaacacacataatagatctcacaacaagccaannnnnnnnnnnnnnnnnnnnnnnnnnnnnnnnnnnnnnnnnnnnnnnnnnnnnnnnnnnnnnnnnnnnnnnnnnnnnnnnnnnnnnnnnnnnnnnnnnnnnnnnnnnnnnnnnnnnnnnnnnnnnnnnnnnnnnnnnnnnnnnnnnnnnnnnnnnnnnnnnnnnnnnnnnnnnnnnnnnnnnnnnnnnnnnnnnnnnnnnnnnnnnnnnnnnnnnnnnnnnnnnnnnnnnnnnnnnnnnnnnnnnnnnnnnnnnnnnnnnnnnnnnnntccgaatgccccgaataaggttgagtgttgtccagattggcagagtccactatttgccgg

SEQ ID NO: 358159 - DNA, 819 bp, Homo Sapiens
tgacagagcgagaccctgtttcaaaaaaataagaaataaaaagtgagtcttcatattcaaattagtatatgaggttaggcaacaattcttatatgggaccaggtatatttaatttgcctttctttgcagtcatcctagtaaatccttgtaaagggttattttatatacaattttgtagtatattctaaatcccctttggcaaataaagctgaagttatctagtgtcagcatactgtgatttgtatatttatataagacaagattgcatcattctgattaagttgcagcattttagttttatctgataggcctgtattgagtaatcagtagctatgtgcaaatagtaagtcaacttaattaccagacccagaaggccagaggtaatcaaagagtactttcggaagatgaaatatttataatgagttatggaaacaatgttttagaaatgtttttcttggtgtaatttaatgcagatttttacctcaattttgttaaaaaacttgataatttgatccctccatctatttaatatttaatattttcagattctagagtatttaaaatttaaacacaattataaaattaattataattcctacttatgttagctatgatttagggccaaaactaccctggttttgtcttgcaacttgaaacattgtgtattttaaactatataatttgggaacattattttatagactgtggataaccaaatataagatttgtgatttttaatgcttcatttgtgtaaaaatcatttgtatattctatttatagtatgcattttctagctcattaaaagtacagaaaaacctc

SEQ ID NO: 358160 - DNA, 1641 bp, Homo Sapiens
cccggtatgcgtttctctgcccggcctgcggccctgcagcatccactcctcgcctctgctggcctctgccctcgctcgctgcgttcacccgagctcacccgagcccaccggagccgacagtggcgcgctaagggagaagctcggcaacgtggagtcggtttatgtcatcgaccctgaagatgtggcccttctctttaagtccgagggccccaacccagaacgattcctcatcccgccctgggtcgcctatcaccagtattaccagagacccataggagtcctgttgaagaagtcggcagcctggaagaaagaccgggtggccctgaaccaggaggtgatggctccagaggccaccaagaactttttgcccctgttggatgcagtgtctcgggacttcgtcagtgtcctgcacaggcgcatcaagaaggcgggctccggaaattactcgggggacatcagtgatgacctgttccgctttgcctttgagtccatcactaacgtcatttttggggagcgccaggggatgctggaggaagtagtgaaccccgaggcccagcgattcattgatgccatctaccagatgttccacaccagcgtccccatgctcaaccttcccccagacctgttccgtctgttcaggaccaagacctggaaggaccatgtggctgcatgggacgtgattttcagtaaagctgacatatacacccagaacttctactgggaattgagacagaaaggaagtgttcaccacgattaccgtggcatcctctacagactcctgggagacagcaagatgtccttcgaggacatcaaggccaacgtcacagagatgctggcaggaggggtggacacgacgtccatgaccctgcagtggcacttgtatgagatggcacgcaacctgaaggtgcaggatatgctgcgggcagaggtcttggctgcgcggcaccaggcccagggagacatggccacgatgctacagctggtccccctcctcaaagccagcatcaaggagacactaagacttcaccccatctccgtgaacctgcagagatatcttgttaaatgacttggttcttcgagattacatgattcctgccaagacactggtgcaagtggccatctatgctctgggccgagagcccaccttcttcttcgacccggaaaattttgacccaacccgatggctgagcaaagacaagaacatcacctacttccggaacttgggctttggctggggtgtgcggcagtgtctgggacggcggatcgctgagctagagatgaccatcttcctcatcaatatgctggagaacttcagagttgaaatccaacacctcagcgatgtgggcaccacaattcaacctcattctgatgcctgaaaagcccatctccttcaccttctggccctttaaccaggaagcaacccagcagtgatcagagaggatggcctgcagccacatgggaggaaggcccaggggtggggcccatggggtctctgcatcttcagtcgtctgtcccaagtcctgctcctttctgcccagcctgctcagcaggttgaatgggttctcagtggtcaccttcctcagctcagctgggccactcctcttcacccaccccatggagacaataaacagctgaaccatg

SEQ ID NO: 358161 - DNA, 1115 bp, Homo Sapiens
cggtccggaattcccgggatctgaagtggagcaggtacagtcacagctgtggggacagcatgctggccaagggtcttcccccacgctcagtcctggtcaaatggctgccagacctttctgagtgcccccagggaggggctggggcgtctcagggtgcccactggcgagggagctggcatctccacccgcagtcctcgccccttcaatgagatcccctctcctggtgacaatggctggctaaacctgtaccatttctggagggagacgggcacacacaaagtccaccttcaccatgtccagaatttccagaagtatggcccgatttacagggagaagctcggcaacgtggagtcggtttatgtcatcgaccctgaagatgtggcccttctctttaagtccgagggccccaacccagaacgattcctcatcccgccctgggtcgcctatcaccagtattaccagagacccataggagtcctgttgaagaagtcggcagcctggaagaaagaccgggtggccctgaaccaggaggtgatggctccagaggccaccaagaactttttgcccctgttggatgcagtgtctcgggacttcgtcagtgtcctgcacaggcgcatcaagaaggcgggctccggaaattactcgggggacatcagtgatgacctgttccgctttgcctttgagtccatcactaacgtcatttttggggagcgccaggggatgctggaggaagtagtgaaccccgaggcccagcgatcattgatgccatctaccagatgttccacaccagcgtccccatgctcaaccttcccccagacctgctccgtctgttcaggacccaagaactggaaggaccatgtgggctgcatgggacgtgattttcagtaaagctgacatatacaccccggaacttctactgggaaatggagaaccgaaaaggaaatgttccaccacgaattacccgggggaatccttctacagaattcctggggagaaagcaaagaaggtcccttccaggacaatcaaggccaaccgtcacaaaaatacttgggacaggagagggggggaaccccaccttcccatgaacccctgcaagggggacccctggtaattaa

SEQ ID NO: 358162 - DNA, 1119 bp, Homo Sapiens
ggtaccggtccggaattcccgggatcagggctacagtcatcctagcagtccccgctgaagtggagcaggtacagtcacagctgtggggacagcatgctggccaagggtcttcccccacgctcagtcctggtcaaaggctgccagacctttctgagtgcccccagggaggggctggggcgtctcagggtgcccactggcgagggagctggcatctccacccgcagtcctcgccccttcaatgagatcccctctcctggtgacaatggctggctaaacctgtaccatttctggagggagacgggcacacacaaagtccaccttcaccatgtccagaatttccagaagtatggcccgatttacagggagaagctcggcaacgtggagtcggtttatgtcatcgaccctgaagatgtggcccttctctttaagtccgagggccccaacccagaacgattcctcatcccgccctgggtcgcctatcaccagtattaccagagacccataggagtcctgttgaagaagtcggcagcctggaagaaagaccgggtggccctgaaccaggaggtgatggctccagaggccaccaagaactttttgcccctgttggatgcagtgtctcgggacttcgtcagtgtcctgcacaggcgcatcaagaaggcgggctccggaaattactcgggggacatcagtgatgacctgttccgctttgcctttgagtccatcactaacgtcatttttggggagcgccaggggatgctggaggaagtagtgaaccccgaggcccagcgattcattgatgccatctaccagatgttccacaccagcgtccccatgctcaaccttcccccagacctgttccgtctgttcagggaccaagacctggaaggaccatgtggcctgcatgggacgtgattttcagtaaagctgacatattacacccagaaacttctactggggaattgaagaccgaaagggagtggtcaccaccgattaccgtggcaatcctctacagactcctgggaaaacagcaaaatgtccttccagggacatcaagcccaacgtcaccaaaaagcctgccaaggaggggtgggacacgaagtccatgaccctgcagggggc

SEQ ID NO: 358163 - DNA, 407 bp, Homo Sapiens
tttaggctggaattactagattttatttttccccagaactcttaaacttcagcttcaccaagtaacaggctgacttttggaataacaactctttcccaggctgttgttaactctttccaagagacagaatttattaaaaaacatggttccaggatatttccaccccagaattctaaatcagtcacagaatcataccttcttaggtcttgattagaatgaaacaatctatagacacacgtaacagaatcaaaatattatgtaatgttttttgccttctcttgctcaatacacttccctcttttcccccaaagagtttgttactcaaagatagatagatatgtaagtaagtacagtcagccctccatatccatgggttctgcatccatggcttcaaccaactgccaatc

SEQ ID NO: 358164 - DNA, 1431 bp, Homo Sapiens
  misc_feature (166)..(222): n is a, c, g, or t
ggtccggaattccgggatcagacacatggatgccatctacttctaggttgctggtgggtattaaatatgcacaatattccatagctcactgaggattttaaaattataagcataggattttatattttggggtgaaagaattatctggcacattaggtattggagnnnnnnnnnnnnnnnnnnnnnnnnnnnnnnnnnnnnnnnnnnnnnnnnnnnnnnnnnggcgcttcatgtccagtgtgtggcccttctgaaacttatggtcatctctcccactgaaaccaaggtcttttcaaatgtggctaaatggggatgaggagacacgggtaggactttcttggtgtgtgtgcattctttaaagagccaagttgcttcggggaaacagccaggaaaatggtcaagattatttttagaggttattttattggggattttaagaactaataacatcttgagttatttttaattcagggggatgtggaaaggtttgcaattgtcaagtgttttgttgtagcttagtatccataagggaaacttagactatagacataactacaaagccagtgcagcttttgttttctgtatgttgttgggggatcaactttcacacatagcaagcacatggcctccctgatgtcaggatgcctttgttaggatctgtatttgcccttaattttgttgaaatcttttttccttcttcctcttgaaaagttccaaaatatagtttattgtatctttcatcactaaaaatttgttcctttttcactatgggcagttcacacaaggcaaaaactattgaacagttggttttagtgtggtgtataactttgctgtatatcaaactaattttgacaagttttcatcctaagcctcaaatcatgtaattaataatttgcctgtttatttatgacctaattgtgattcttttattaataaaagctaatgggaaaaggatccctgattaagctgatgactagacctacaattaattttcctgcagtatatgaagtattgtaccagagtattaaaagatatgtaatattttattgataaatctatcctttaaaaggaatacgttttaggatgtcatcattttgatgtgaatcatgtaaatgttgataatatgctgtttattatacatttagtgtttcaagagattcacttaattgcctttttgcccacgtatattatgtagtctatttgcaactgttcttaaaaaaatgacattaaaagaatagtttatgtagagaaacattagtggatgttaattgtctccccacctatatttatgggtgttagcgcaactgctttgctagttgcaaagctgtattatcagagtaaaagtgtatttgtaaactgtatgggaactaaaaattaggaataaaaccattttcttatatgatttgaaagaactgtaatttgcgcttgtca

SEQ ID NO: 358165 - DNA, 957 bp, Homo Sapiens
  misc_feature (703)..(711): n is a, c, g, or t
tcagacgggcgataaaaagggaaccccagacatatttcaggggggggcggaaaggtctccccacttaaacctttttattttggggaaactttttcaaacgatggagggacaggaaaaacacagggtttttcaaaccaaaaatttaagggcgcaaatattcccaggattccttaagcaaaaggggcattccctggattatcaaggggggaggcccaaggtgccttggcttaatgttttgcaaaggtgtgattcccccccaccccagctttcctgataaaccaaaaaaggctggcacctgggctttggttagtttaaggtcttataggtcaaaagttttcccactaagggttaactaaagttaccaaccaaaacacctggccaaatggcaaaccttttccacatcccccctgaattaaaaataactcaagatgttattatttcttaaaatccccaataaaataacctctaaaaataatcttgaccattttcctggctgtttcccccgaagcaacttggctctttaaagaatgcacacacaccaagaaagtcctacccgtgtctcctcatccccatttagccacatttgaaaagaccttggtttcagtgggagagatgaccataagtttcagaagggccacacactggacatgaagcgccttttagttttttttaaaaaaagttattaagactgtgaaatttggcnnnnnnnnnaaactccaatacctaatgtgccagataattctttcaccccaaaatataaaatcctatgcttataattttaaaatcctcagtgagctatggaatattgtgcatatttaatacccaccagcaacctagaagtagatggcatccatgtgtctgtcacaccgactttccaaacaacctcattcacccattactgactgctctggccctgggcgctctgacttcctcagaaaccacctctttggaactttc

SEQ ID NO: 358166 - DNA, 782 bp, Homo Sapiens
  misc_feature (50)..(104): n is a, c, g, or t
gcaggaattcggcactaggtttcactatgttgcccagaatggtcttgaannnnnnnnnnnnnnnnnnnnnnnnnnnnnnnnnnnnnnnnnnnnnnnnnnnnnnnatgagccactgtgcctggctgccaaacttttgatgtgggtccaagctgtgcttttttgtgacctatatgttttgtctggtgggagttctacacttaagttttcttggtttgcactttaatcataacaataagaacaactggcgtaaaagagttttggaacaagcagaagtgacccttggtaagcagactgctcagctggtaggggcaaaagtgttgggggaggattagaaaaaggcctccacattgtgggctttccgggtgccctggatgtgggtcagcaaatgttttagaggaagtagttaacctggagggagattcaaaggaggctggataagagaatgtctatttttctccttccctatcaccttacatgtacctattctccccaaagagaaggaagaccttaggctttcaatgtggtgttctttcttaagtttaagtaactggctgccaatgaaaaccttcccttcgagccgcaggcatgtggacagaatccaccaccctccttagacactcctcagactactacaggctatccccagctggtggctctcaaattcatgagggtccagaagttgttcctctggattcaggttgttaaagggactaatgaggtctgcttccattactattattgaaacctcaataaccacaaataaaagaacaaaaagttaaaaa

SEQ ID NO: 358167 - DNA, 751 bp, Homo Sapiens
  misc_feature (11)..(11): n is a, c, g, or t
cgtggatccancgggctgcaggaattcggcacgagtttgaagaagaaaatgagctttgtcaattattctatcacccagtgataactggtcataaccttttaattagtctttagttatatatctttcaagttcttactatgtatgtatatattgttttataaatagctatttttttactggtcaacgtatcataaaagttgtatctattgcaatagactttactaccattttttaaactgcataataatgcactgtatgtactacaatgcaaaccccaccccgtcctagccacagtgatgtatatttaaggcatgtctattaaacagggctgtgacaaacatccttacaaatacatctctgcaaggttgtatgatgatcccctcaggataagtggaatttcagagtcaaatggtatgcacattgacggttttgaagcacgttaccagattgctattcagaaaaatgtattattttatgttcccattaaactggggtttgagggtgtgcccatccctgcttgcttaccagctctggatattgccagtcactttaatgctttccaagcctaatgagtgaaaagtaatctcatgggatatgcatatccttacttcttcttccccttccctttcacctgccttatgaatagttcatgaacttggtcattttccttttaaagtattcatcccttccagattgattttcaagctctcttgttagatatattaccttgtgtatacattttcttcctccc

SEQ ID NO: 358168 - DNA, 770 bp, Homo Sapiens
  misc_feature (14)..(14): n is a, c, g, or t
gggcaagaagactngtgacaagcctccaatggggcgttctcacaagggcccaccattccttggcttgcaggtagaagatgcggttttcttcaggataagtaactttactgaggggcatcttgtagatgttggaattttttgtggtcatgatgaggaacaatagcgtggccaaacagaagggccaggtacaagctggcaatccaacctcagccataaagtttgccatgccgactccaagataggccgtgaacagggcacagccaagagccaggaggtgggtttgccaggtgagcgccatgaacattcctcccattgcaatgcaggccagagagctgttgaaaccccagagtccaaagtagatgtcctcaaatggggctgaaagactgagtcccgctgctatgcccagcaatgatcctatggcagcatgcaggcacatgagtggggaggagagtaggatggctcccaggaaaatgccccctgtccatggattatcacagccatagatctgaccaactcccactggtatagatttcaacaactccagggcactgaggtcagaccaggagatatttggagctgtagttataggtatgaccagtttggctggaaagaatggattgtaatgtcctgtggctgaaaggtacattgacaacgccatgttgaaagggagggtgaagacgggcaggtcccatttgctgagcatggaattcaatgcacttgagaaaattgggcaagcctgcagcccgggggatccactagggctagatcgc

SEQ ID NO: 358169 - DNA, 1231 bp, Homo Sapiens
  misc_feature (34)..(34): n is a, c, g, or t
  misc_feature (583)..(591): n is a, c, g, or t
  misc_feature (1137)..(1137): n is a, c, g, or t
gttcctcatcatgaccacaaaaaattccaacatnctacaagatgcccctcagtaaagttacttatcctgaagaaaaccgcatcttctacctgcaagccaagaaaagaatggtggaaagccctttgtgagaacaagccccatttgcagccatggtcacgagtcatttctgcctgactgctccagctaacttccagggtctcagcaaactgctgtttttcacgagtatcaactttcatactgacgcgtctgtaatctgttcttatgctcattttgtattttcctttcaactccaggaatatccttgagcatatgagagtcacatccaggtgatgtgctctggtatggaatttgaaaccccaatggggccttggcactaagactggaatgtatataaagtcaaagtgctccaacagaaggaggaagtgaaaacaaactattagtatttattgatattcttggtgtttagctggctcgatgatgttaacagtattaaaaattaaaccccataaaccaactaagccttatggaattcacagtcacaaaatcgaagttaatccagaattctgtgataagcagcttggcnnnnnnnnnaaatcaatgcaagttacacattatagccagaatctgtatcacagaggtgcaagctgacagcagagctcagtccccacttcctgcaaacaatggcctgcaccctatcccttgtgtgtgtgacattctctcatgggacaatggttggggtttttcagactgacagggactgcaagagggagaaaggaattttgtcaatcaaaattattctgtattgcaacttttctcagagattgcaaaggattttttaggtagagattatttttccttatgaaaaatgatctgttttaaatgagataaaataggagaagttcctggcttaacctgttcttacatattaaagaaaagttacttactgtatttatgaaatactcgagcttaggcatttttactttaacccctaaattgattttgtaaatgccacaaatgcatagaattgttaccaacctccaaagggctctttaaaatcatattttttattcatttgaggatgtcttataaagactgaaggcaaaggtcagattgcttacgggtgttattttttatagntggttgaatcccttaatttaaaaaagctcatttattttttggcacactcacaatattctcctctcagaaaatcaatgggcattttgaaccaccc

SEQ ID NO: 358170 - DNA, 1677 bp, Homo Sapiens
  misc_feature (849)..(1027): n is a, c, g, or t
  misc_feature (1029)..(1029): n is a, c, g, or t
  misc_feature (1032)..(1032): n is a, c, g, or t
  misc_feature (1045)..(1060): n is a, c, g, or t
  misc_feature (1069)..(1069): n is a, c, g, or t
  misc_feature (1081)..(1097): n is a, c, g, or t
  misc_feature (1172)..(1181): n is a, c, g, or t
  misc_feature (1195)..(1208): n is a, c, g, or t
  misc_feature (1262)..(1287): n is a, c, g, or t
  misc_feature (1316)..(1326): n is a, c, g, or t
  misc_feature (1477)..(1477): n is a, c, g, or t
  misc_feature (1480)..(1480): n is a, c, g, or t
  misc_feature (1525)..(1525): n is a, c, g, or t
gctactgagcctccacaaagagcatgtggtgccctgcctttgggagggtattttgctctcgttagttttgtgggcagcctcagattccctgttgagttgctgttaagaaatggagatttctggctctcattgggtaaggttttctgagttttatatcttattagatcacatccctttacccagaactgcttcactgtcttctgattggcagtactcctgtggctttgtgccttgactcattttgttgtcttcagccttgaaggccccttcccacatggactgacatccactcatgtgcctgatccctgaagcctcccagcacccattcagttgcatccccagggcacaggactttgatctcttctgatgccctcgctaggttctccctggtgggttagtgctttgtatctgtctctctgcccctcactaattctacacccatgtgaattagacattattctccttaaatatataaggaccatataatctgtatctttttggtgtgtgtatatggtatctggcacgtggatctctgattaccagcctgacatcaacaaatcccctcagttacaacgtataggttaaacaaagcttttaaaagctcatgtggtatgacctcaaggttgctaacctggtcactcatggtaattagaaactctgattggcagctttgtatttcttgactaaaaacctaaataaactgattaggttttaggcgttctttcaaagaggttcttgagaagattgagaactatcctatttggtgcttagtgaaaagattttgaattactgtacgtaccagttgttgccatttctttattaaattcagaagtttttttgccaaataannnnnnnnnnnnnnnnnnnnnnnnnnnnnnnnnnnnnnnnnnnnnnnnnnnnnnnnnnnnnnnnnnnnnnnnnnnnnnnnnnnnnnnnnnnnnnnnnnnnnnnnnnnnnnnnnnnnnnnnnnnnnnnnnnnnnnnnnnnnnnnnnnnnnnnnnnnnnnnnnnnnnnnnnnnnnnnnnnngnggngagaaggggccgnnnnnnnnnnnnnnnnaaaagaatnctccaaacaccnnnnnnnnnnnnnnnnnccccccccacggagaagaaagaaaggcgacacacgacgggcgccccaaggaaaacgcccggcgcgggcaaagacnnnnnnnnnnctactcccccaccnnnnnnnnnnnnnncggcggaccggggcacaaccaaagagggggcgtccgaagaacaagcctctgaannnnnnnnnnnnnnnnnnnnnnnnnnctctccgtggtggcggcccctccaccccnnnnnnnnnnnacggcgacccgaagcggcccgcggatgaacaataatatcgcgcgccgcccccgccgcgccgaccgctccgagaaggaggacgcgggtggggctcgatccaccaatagaacgcctccctgccccgggggagatgcgcggcgcgccccccagnggngcgggggatcgggatagcgtctgggggggtcccgcccgcggcggngagacccgcaaggcgctgggtggcgccctgctaaacaaagaaaaactattcggccccgccgcgccgccgaaaaaagcgggagggaggcgcagcacagacgggagcctgcctcactgcgggggtggccccctcgttatcaataacaacaagag

SEQ ID NO: 358171 - DNA, 887 bp, Homo Sapiens
ctctggagaaccaggtgcatcagcgcattgcggagctgaggaaagcaggtctgtggtcccagaggcgtctgccaaagctgcaggaggccccacgacccaagtcccactgggactatctgctggaggagatgcagtggatggccacagactttgcccaggagaggtggaaggtggcctctgtgaagaagatggtcagagctgtggcccggcagctgcaggacaggacgcgcagggaggccggggccaggagggaggagccgagcaggctgaggcagacgtcacctggactaccagagaaatcgagcgtccctggtctaggactggcgcagtgtaaagattccagcatcttggaagcaagggcttccactggaaaataaaagccacgtggagcacttgattagactccagaaacagaaactgcagctgctcccaccacccccaccaccacaggccctgcccggggcacagccaaccacacaagtgcaagtgcagccgtcacccgcctaccacagcagagcccccagctcaccacagtcacggcccccagacccagagccctgttgatgggcaccaccatggccaacctccagactcgagtttccacctcccacctgcaaggcccaagactgacgtcagcgctgacgtaccagaatggcccaggttgctgtgtgccacgccccctgtggtgactgacctggcagttgtggtgctgtcagccagggtcacagtgcttccatcaacgcaacgggatcagtgttgtgataaggcagctgcaaaaagcggcagtgggcaacagatttgagcagacactccaccaaagaagctctctaggtggcaaataagcactgtcctctgggaaatgcaaataaaaatcacaatgagaaact

SEQ ID NO: 358172 - DNA, 2049 bp, Homo Sapiens
  misc_feature (1284)..(1284): n is a, c, g, or t
gcattcaagctgaagtggaggcacagctggcccgacagaaggaggaggaatcccaacagcaagcagttctggagcaggagcgcagggaccgggagctggccctgaggattgcccagagtgaagccgagctcatcagtgatgaggcccaggccgacctggcgctgcggagaggtcctgctgtactagccaccaaagcagctgctggtactaagaaatatgatcttagtaaatggaaatatgcagaactacgtgataccatcaatacttcttgtgatattgagctcctggcagcttgcagagaagaatttcataggagactaaaagtgtatcatgcttggaaatctaagaacaagaagagaaatactgaaacagagcaacgtgctccaaagtctgttactgattatgctcagcaaaacccagcagctcagattcctgccaggcagcgggagattgaaatgaaccgacagcaacgcttcttccgcatcccattcatccgccctgccgaccagtacaaagaccctcagagtaagaaaaaaggctggtggtatgcccattttgatggaccatggattgcccggcaaatggaactccatcctgacaagccacccatcctacttgtggctggtaaggacgacatggagatgtgtgagctgaatcttgaggagactggcctgactcggaagcgtggtgctgagatcttgccaagacagtttgaagaaatctgggaacgctgtggaggcatccagtaccttcagaatgcgattgagagcagacaggctcggcccacctatgcaacagccatgctgcagagtctgttaaagtagatgttgcacactagccttacagctgggagcctttgccatggtacttaggtagggtgtgtgcccccagatttaaccattccataatcatgttagagttacttctataaagtgaacagattttattaatcacggcttttggtgaatttgtttaaggttaattatggtagcaaattttggacctaaacattatttttctgtatcccgctgtaattcccaaaactctcattattctctaactattacacatgggcatattctgatgtttctcatcctttgccagaagactaccttacatccatcgtaattgttctctaggaaaagagaacttttttcaaaattcaaaatacttcttaaggatggcacagtaccatataactggagtaataaaacatgagcttacattcttacaataactaaaccacttaaaatgatcaaggcactaatgttttggtctgaaaangctgtggtactttataggacattttcagacatttttgggaaatttccattaaaggtggaaaatctatttttttcctcctttgcagtgtcttagtttgaatgaaacacttcgaagttctagaattctagaaagagccttaatgtatttgatgtattctgtgataagaggtactaatagtatccagcacagatttgcttttctttgctagcacaatgtgtgttgctgtcagaatattctttttatattctgtggaaaaataaaggaaattcagattgtttaaatgcctaaaagttttgagataagttttgtttcaattagaaaaggaaataggttttaggtggcatagtggcttaactggactgaattcaaatattctttcaacttcatctcaatagtgatttttgtatcagaatcttgtccaagttgtttcattgatttagtaagtgttctgcttccaacatctttctttttaagaaattcctagtgtcttttttggcctttgaggttttggtaattgtagacctgtttcataagctttgtaattcagaaatccttgtatttagtaagtgcttgttttacataactgataattttaaaatgttttctttgtgtgctgttagtattgattcaaatgtcagcagctttaagcctaatatttatgactttcacatttggaatttaaagacaaaaatacatcaaggagttatgctgacataattctaaggagttttgttgtattttagaataaaattataaagtaaaatg

SEQ ID NO: 358173 - DNA, 521 bp, Homo Sapiens
  misc_feature (17)..(17): n is a, c, g, or t
  misc_feature (24)..(24): n is a, c, g, or t
  misc_feature (73)..(73): n is a, c, g, or t
ggggaaaaattaagggnaattccngatggttaaaagccctaaaagttttggagataagtttggtttccaattngaaagggaaataggttttaggtggccatagtggcttaactggactggaattccaaatattctttccaacttcatctccaatagtgatttttgtatccagaatcttgtccaagttgtttcattgatttagtaagtgttctgcttccaacatctttctttttaagaaattcctagtgtcttttttggcctttgaggttttggtaattgtagacctgtttcataagctttgtaattcagaaatccttgtatttagtaagtgcttgttttacataactgataattttaaaatgttttctttgtgtgctgttagtattgattcaaatgtcagcagctttaagcctaatatttatgactttcacatttggaatttaaagacaaaaatacatcaaggagttatgctgacataattctaaggagttttgttgtattttagaataaaattataaagt

SEQ ID NO: 358174 - DNA, 418 bp, Homo Sapiens
aaaggatggacaggctcgctgtgaagacaggttaatgccaaacccccctgcggagtgtgtatgtgggagcgatatctcgctgtatcacacggactgagatacgattacgcggttgcgactcagtacggacctccgcctcccgaattcggatagccctcgtacctcgaactccgcggatgactaaagttgcgaacgcacgccgccgcatccaactagtttatatgttttgatgcgagcaaaattttgctgtattaaccgaaaaactctcaggctcctagcctctgatagtcctccgacctcgacccctgggatactgaagttgtgaacgtacaccaccgtacccgactcgttcgtaggttctcgttaatctctgtaacgaacgatttctaataccaggttcctgacgacccaaaaagtc

SEQ ID NO: 358175 - DNA, 2083 bp, Homo Sapiens
  misc_feature (857)..(857): n is a, c, g, or t
  misc_feature (2065)..(2065): n is a, c, g, or t
ggagcttcgcttcatggtctaatgctgctgcctgccgccgtgactgcgttttagttctctaaattatccaagccgatgttgctctgtccttcctcacaccagattgttcccaggggcctgcccaccccagtgccatccagtggcacggccgggtcttgtcacttgtgcatgcttctcaggggcagaacccgctcgtgccatctgtcgattcagaggcacgcacacatgctctgcaggatgtggccatcctgtcaccaggtagtttttccctgccagagatggcaggggaaagccagcggttcctgggaacgctcttgttgcttggtgcaacagaagcacaaaaatcaataaacactgtgattgcactcccagcccagatcagcatttttagccatctcaaccgcacctctgaagtgctgcttgaatctggccgttctgacactgggtgttgaggtcatgtggcagtcctcacgattgaaattattgccctttgaattacctaaaatattggttaccaaaaagattctgtgtttacatgttcttttcttctggggattgctaggaaattactcaatccaatttcctagggtttagctaccacccttctttatcaacagctaaccaatttgagattcatgattaattatgtacacaaaaatattttccttgtagaaaatagttttccagacacttagccttctgaagtgctcatctcttgcttaaatgatagtctatttagtagtttaaaataaaaataatcactccctatgatctagttaatgtaattatccagtcactgtaactaatctcttgaagggacttttgtgataaagagccaagttcagaagcatagcgtngtaccgaaaatgaagactctcctatctactgctacagatcctgttgaagaaagagcttacccctttcccccggaaaacttgcaatcctgtagttcccatatgtgtggcatatgtcagttatgaaattattataattcagccttcaaactactactgatcaactaaaggaaagctaataaggtatttcttttaaacaagtattctggaaaagtaataactatggcacaaatgttcaggagtgtatataaaaatatgtgggctctcgatttatttgagcaaacattgcaatgagggtgttcattatgcttctaagtaagctttaactagaccactttcttcttatgtcagattgtgctggttctagctcataataatgaaaaaaatagaattatattttgtatgaattgtttctaacaaaccttgatctgtatatacttgtgaggggttgtttggttgcctaattgttgattggttggttagttgggcaaaatcatttattacatgcaaaaatagaaaattatttgttaaattcagagaaaatatgtgaagtttacaaaggaaccaaaatgataatgggagaatttagtcttaaaagtttaggttgtcagagtttatctgatatacaaaaaagtaggatcaaagtctaggaacaaacattggttatttcactgaaacagatttttaaagagcatattaaggaaattaagaccattagatcatctctttcataatgatatgatgttatttccattgacggcaaatctatactgttccttggttttagagttgggtattctttcaaaagtgaatttaggcacatgcatgtacattgtatttataaagattatatatgtagtttccaaggaagaaacaaagacctatacagtttagactttatttgtttggtgaacgtgctgttgtgtttggcatagctagagaaatgtaaggtaaaaggctcactttgttttccagtgggtccagagtcttctctatacccaacatatgtttactttatgaacttaaatggaaattaatttattgtagactacatctctatttgggaatgatgaggtaaatgtataccttaggcattttctttaacaaaaatgttctgtgtgtcagggaagagggtgtgagagccgtaggcagcctgcccgcaaacacacggatggcttcccaccgccacgaaggtttgaggaccaaggccngggggccccagaggggcc

SEQ ID NO: 358176 - DNA, 548 bp, Homo Sapiens
cctggatgccctagatcaggtgccaggccatttggttcctggtgggtatgggctgtcttcctggccgtccctgcgatggcggggttaggtggttctggtgtctctctttttataagagcaccagacccattggattaggacccccattttaacctcatttaacctttattatctcctccaggccctgtctccaaatacagacacactggggggttaggggttcaacacaggactttgaggaaacacaaatgtttatttagtgcataacaaaaaaggctattaggaatgtttgctttatgcgctactggcagatactacaagatctcctaagcatcccagactactgagaaacaagaaattgtttgaccctgatatccatatcagtgataagaaatcaaggttcacttttggatttgagtctaggactgattctcatcttcttaataataataatgcaattttcacatggaacttactaagtgcttttcatactgggatctcagaagtatgttaaataatttaaatggaatttatctctcttcctgtct

SEQ ID NO: 358177 - DNA, 679 bp, Homo Sapiens
  misc_feature (648)..(648): n is a, c, g, or t
  misc_feature (653)..(653): n is a, c, g, or t
  misc_feature (664)..(664): n is a, c, g, or t
tggtagaaaagggggtctcgctatgtggcccaggttagtctcaacctcctagcctcgaaatcctggcctcaggtgatcctcctaccttggcttcctaaggtgctaggattacaggcataagccactgcgcctggccctgatttctatgaaaagctggaaaaatatatttttatgtaaaatctccagattttaaaatttgacttgcatttcaaatgatgtgggccgaaccaacacatatgaatataaatgtggcccttggtttgccagtttgaaactcccaggcaagctgcaggcctcctgctccctgggatgccctgtccactgagaaggatgagcagagacagacgagagcaggggttttcttctctctgtcaattcccagaacagggaattccaatggggagcctgggctatatagcttcatggggcaggcattcagggccagttgtaccaaggcccaggtggggtcagggcaggtaggcaccagagggaccagagtcccagcaaggtctgatgaagggcaacctcaggtggggactggtttctagaggaagcaacgggtcagggagtagaagtgggggttggacctggtttttcccggttctcctccccctatgtctaagagtgattttagcccagcattgcggntcatngcctgtatccnagcacttttgggggc

SEQ ID NO: 358178 - DNA, 417 bp, Homo Sapiens
  misc_feature (118)..(132): n is a, c, g, or t
agaagttgcttatttaagatagcaattgtttatagtaaatatagtttataatgttaataatgctttttggctaatttaaaaaaatttgtcgtccagagtcccaacctttggaatatannnnnnnnnnnnnnnatcatgtttgtatcaagatgtagttaaactcatggcacattttaaacatctgtaagtcagaaggatcacttttggaagaggccaattactggcaaaagtgattcattatcaagacaaaaagtaaatgtactttggaagtgtaaaaatcttaaaaaatccttaaagaaccctttataaaagcaaagcaaagtatttactatacatctgaataatatgcacttcataattgtgcctcaccccacctcctaaaatcttatatcgatctgtgttttgggtttgagagcc

SEQ ID NO: 358179 - DNA, 660 bp, Homo Sapiens
acaggagtgagccactgcgcctggctgatcccagcacttttcaaatgatgccgctcaaagccgtgacttggcctactttgaacagcaaacttgttgctgctgttgtcaacctgaaggcctctcaaatgccagcttcaagcagggtgtgaattggccagtgtcagatctcaggagtcctgtgttgagagtgtggctttcagctgcggggagctgcacttggtggggaaagccaggcaggtcaccctcacagccagataatgtggaggtcagaacccaaggaagggagtgagacctccactcccagtgggggacctggccacccatccttggggacctgagaaagcgtacttcaccttggggtgaaggctgggtggggccagagggaccagtgccctcctcagtgcttaggggcagagccacctgcagcaatggtatctgcatattagcccctctccaccttctttctcccgctgaatcatttccctcaaagcccaagagctgtcactgcttctttctccctgggaagaatgcgtggactctgcctggtgatagactgaagccagaacagtgccacaccctcgccttaattccttgctaggtgttctcagatttatgagacttcttagtcaaatatgagggaggttggatgtggtggcttgt

SEQ ID NO: 358180 - DNA, 786 bp, Homo Sapiens
ttttttttggaggttgtataaaaatacaaatttaaaaaatgaacttttattaatcataaatacaaaataattgagtggtatttgggctcccaggggctcaaaggcctgaaaacagaaaggaaaataggagtctccacctgtgattcaatgaaaaagatgaaactcctaattttgctaatgctgcgagcataccatttgatggatacataatttaaccagatattaacaggggaaacatataagccatctcactattgtctcagtaatagactgagcttaccccaccaacccctcagaacggctttctataagcaataaaactgctccttttctcttcccatccttctaacctgggttctctctgctttatgcttaccagaagtaaatgtgccagcaagttcagtatctcggtatgtttttagtattactgaatttaatttgtattcactttttatgttcaagacaagaaaactcaactaaaggagtatattaaacctttcttttctccctctgaacactcatggcccattcatttatactttcaatttgcccgacttcctccattagggctcatcccaattttatttccattcctccattccccctttcacattcacaacccttgtgcaacattccttttctctcaagtcagaccagaccacatgtttcagtgcatatctatccttcatgtgctaacttgtataaaaggtcagttaactcctgaacatcagtcctccttcaggacacccatattgggtgagctaatgccgaattcatacagaacgg

SEQ ID NO: 358181 - DNA, 521 bp, Homo Sapiens
cttaagtccctggcacttctcataccacatcactgaacctgttcagtaacaatcagtttggccgtcccccatgatggtaggaaatatagagagcaagttcttctgccagggtcacactgtggtctctgaactgaccagtatatccctaactcctctttgatagagaaagagtctcaaatggacaactgtcctgtgttgctttccctaggccttcagcagcctattggctctccctgcctctgagctctggactctgtttgaatattccaagtagtatatggacagtccagggcttatgcccagcagcccactggaggcattcttcaggctcctttaaggcaggtgcattgatagttccattagtgtgacccttgcattggcacccctccagcctggaggccaggcttccagcaacttccttctgccctagagcaagccatgagccccagagcagtagcaggagacttgagaagtagagtgacaaaaacaagcacttaattaaattataaaatttaacttta

SEQ ID NO: 358182 - DNA, 916 bp, Homo Sapiens
ggcagtactctcacggtataggtagcgaggactgggtggcgaattcggcacgaggcaaggcggcttctggctcttccgcaggctcagttatgggttcctgtgtgcttagtcatcgggtccgacacaggctggactgatctggggagccgcgaagggcctgccttcacaaagggacgtaacgcaagtactgcgggcagtgtttgaatatggccctgaacaatgtgtccctgtcctccggtgatcagaggagcagggtggcctaccgctcttcccatggcgacctcagaccgcgggcgtcagcgttggcgatggtctccggagacggcttcctcgtttccaggcctgaagcgattcatctaggacctcggcaggcggtgcgaccaagcgttcgggccgagagccgtcgagtggatggtggcggccggagcccaagggaaccagatggccggggccggagccgccaagccagattctcaccttacccaatccctgccgttgaacccgatctcctaagaagtgtgctgcaacagcgtttgattgcattaggaggtgttatcgcagctcgaatttcagtttaaacgaacacctttcctctggccctcacttagcttgtgaacaggcctttttaaaatcctttcttggtgtagcagcaatcgtgctgttttatttttagatggatgtattttcatttaatacgtgggagttatatgaatatgtcctagcactaagggaagtgtaacagttgattgatttaggtggttttatgcagccagaacgattggatcaggaaaggtgtggaagggatattcttaggtcgtcacaaagctgagctgatgggagcaccctccccagaggccaaccatccatttcgttaactcaaaccacttaacctttaccctttacttcctgttggcgc

SEQ ID NO: 358183 - DNA, 662 bp, Homo Sapiens
ccggggatatgacataaacccacatcggtggtcttactacagctgtgtatgggccatttgcatcctatttcatagtgccaaaatgaatttttgtatcttgtcttgtctttgtccattataaactggaggatcacagttaagccttccatgaattcatagtttggaatcatttaccttaccattattttggatttttttcttattacagtgtcactacactgtattcatgtgggggaacaaacatgtaggtgcttgaacatgccccacagacacagttgtagccctagtatttgtgacggtcattattgacacagtgcagactttacagatggagcattatgctctcagaggactttaaaaatatgtatattaagcaattaactttctggagttggagttatcaaatcttgctgggaaattaacttccaagagctctgaattggatggaattccatctggcttcagagaacaatcagcctatatgaaacggagctttgaaatgtttttcttgtgcagaaatacgaactagaaagaaaagtgctgatctaatgctaagttttctctgtgtactgactcagttgccagaattataatgaaaactgtattttagtctaacaaatgtatagaattttttatgtaataaataaaattttataggaaag

SEQ ID NO: 358184 - DNA, 447 bp, Homo Sapiens
aaacaaaacctggtggggtccctggaaacatgccccccacagaacacagttgtagcccccagtatttgtgacggtccattattgaccacagtgccagactttaccagatggagcattatgcccctcagaggactttaaaaatatgtatattaagcaattaactttcctggagttggagttatcaaatccttgcctgggaaattaacttcccaagagctctgaattggatggaattcccatctggcttcagagaacaatcagcctatatgaaacggagctttgaaatgtttttcttgtgcagaaatacgaactagaaagaaaagtgctgatctaatgctaagttttctctgtgtactgactcagttgccagaattataatgaaaactgtattttagtctaacaaatgtatagaattttttatgtaataaataaaattttataggaaag

SEQ ID NO: 358185 - DNA, 474 bp, Homo Sapiens
  misc_feature (309)..(310): n is a, c, g, or t
gttttaaccggattgactctcttttagctgagagagccagacagactccatttttgtttcttcacttgcagccccccttatccccctcccttaaggacataactagtgcaagctgactccaagcacatccaggaatgcacttactgataagatattgaggcaagctgtaccagcagctcctggggacgtgctcagtggatggtacccaagcccctgcatttatctctttgtgatagtttaagcccctgcacctggaactgtgtatttttctgtaactatctctgtaaccattaatcttttaactttttnngcgtgttctgcttctgtaaaaattgcttcagctaggctccccctgccctatttagaccacggtataaaaagaaatctatccccttcttcggggctgagagaattttgagctctagccatctctgggtcactggcaataaaagaactcctgaattagtcaaaaaa

SEQ ID NO: 358186 - DNA, 537 bp, Homo Sapiens
  misc_feature (309)..(329): n is a, c, g, or t
ccctatggcagccggtccggccatgtcaaagtgactgcgttcatcagttttgacactggggctgctacataatattttcatttgaacgaagaacttcaaaaagcacaggactagatgatctctgttccttttggctctaatatgctacaactgtaggccaattatcactttaccaattaagagttaggccagataagtgaaatttaacttaagggcacacagctaataagtaataggcctaaactggatttccttattccaaatcctgtcttttccccactattccattagaccccacaaatgttagtnnnnnnnnnnnnnnnnnnnnnttttaatcactgtaaccgggtgcatttttttaaggcaaaatttctcccttatctactgtgatgacttcagaagatacaatggtcccaggggccaagtagaaagcatttttaaagattaatctgaattaagctttatcagtgtactctttatctgtgttactagtgcctggtatgtagtaggtgctcaataaatgaatattgaataact

SEQ ID NO: 358187 - DNA, 845 bp, Homo Sapiens
tgtgtaagaaaacttcctgtggacccccttggaataattgagtttccaaagtcacttggatgaaacataaaggcaagaccaagttaccaggcaatcccctgtgactcggggcaagttttaaaacattccaataagcataaagctccaataaatccagagctttcctccaaggacgagaatattaagcctgacgtctcccaagagcttaataatttcatcagaattttcttcactaaatatttttgaggtgttgctatagttttttggcagtgtaggtagtttaggtaagagaagatttgattcaatcctcagcattataaaatgatgtgagaacactgctttctactgtcacttccatccaatgcatacaggaaactggagcctccacagaaaaagagtgtaagctctcaggtttttctacatcacacaaaacaattttcttggtatcagcaagagcaaaggccaaaagtttgccatctggtctccatgccagacacgtcacctcctttcctgtattttcatttggtggaaaactccaaactcgatgaaaacttgccagtcgatgaagtaaaacctcgccagctgtgttggccaaagcaatgagatcccgcttgggcgaccagaccaggaaaataatctcctgcgggagctgcttctctcccaccacccggaaggatgggaaacaggtcggaaaacgcaacatggggacggccctgcaagagtccccaccggcagactaacacggccccagtggcctctcccctccctctgccggccgcgcgccacagcctccaggccgccccgccccgccgctgtcgcgcgctccaggcacttcccgggggggg

SEQ ID NO: 358188 - DNA, 986 bp, Homo Sapiens
  misc_feature (740)..(740): n is a, c, g, or t
  misc_feature (750)..(751): n is a, c, g, or t
  misc_feature (828)..(828): n is a, c, g, or t
  misc_feature (832)..(832): n is a, c, g, or t
  misc_feature (843)..(843): n is a, c, g, or t
  misc_feature (847)..(847): n is a, c, g, or t
  misc_feature (853)..(853): n is a, c, g, or t
  misc_feature (858)..(875): n is a, c, g, or t
taatataaaaggacagagacagattaaaaacattggccaaaaaaacaaccaaattggagagtatttccaaatagaagactgggtaaaattacaggcttaaaacaacagaagagggttatcagcagcttatttaccatcagttttacttcacactgttgtcacatgaaataattttggccaacactaatgttaaatgaacacccatcactatatgctatgttgaggggaggcaagtctgatcttcgaataattgataaagtttaatatctttgtagccaaaatacaatttgcaaaccctaactccagatgtgtcgtatgaatcttgacaaccaggtcttgagatttgttttactgattgccaatcaggtatattatttgtgatgttcgtgggagcatgcaaattagaagacagtgttgtgggagttcctcagtattgaattacatgtgtgcactcaggcctgccagtcactgaattctgacttgtaaagggtttaacctgctgttccaatcattgaggaccaatttgctttttgataagattggaaaacatttatggagactttcccagttaaatctatgacagtgtccacttaaatagtgcaatttagtatattctcagataactgcaacacaaaattgaaatgtgccagtatgtcatctttctacctggaaagatactgtatattggaaagttatgcttctctcaataaatacatgttattaaataagccatatcacangttaagaaanntgatatacttatcatatgccctttcagaaaccaggtattttgcatatgaatgattttagaaagtatttgaagctggngttntgtcatgtaantaangatcanagttnnnnnnnnnnnnnnnnnngtgccggatttgcactttacaattgaatttctatacactattaaagtattgtttgcctgtggttataaattgtcagctcttatcggtcttttattaagaatatggtggcct

SEQ ID NO: 358189 - DNA, 503 bp, Homo Sapiens
  misc_feature (21)..(21): n is a, c, g, or t
  misc_feature (386)..(406): n is a, c, g, or t
ccgactgtaagggtttaaccngcggacccaaccatgggggcccaattgcctttttggataagaatggaaaacatttatggagactttccccagttaaacctatgacagtgtcccacttaaatagtgcaatttagtatattcctcagataactgcaacacaaaattgaaatgtgccagtatgtcatctttctaccctggaagatactgtatatttggaaagtttatgcttctctcaataaatacatgttattaaataagccatatcacagtttaagaaattgtatatactttatcatatgccctttcagaaaccaggtattttgcatatgattgattttagaaagattttgaagctggggtttgtccatgttaattaagagcaaagnnnnnnnnnnnnnnnnnnnnngtgctgtatttgcaactttcacattgtaatttcctatacacttattaaagtattgttttgccatgtggtttattaaataaaaatgtacagtctctta

SEQ ID NO: 358190 - DNA, 1568 bp, Homo Sapiens
gggaggacagactgaagaaacatccaaggtggtcttgaaggacactgggatcctgtaacacagccccggatatctgtgttaccagccttgtctcggccacctcaaggataatcactaaattctgccgaaaggactgaggaacggtgcctggaaaagggcaagaatatcacggcatgggcatgagtagcttgaaactgctgaagtatgtcctgtttttcttcaacttgctcttttggatctgtggctgctgcattttgggctttgggatctacctgctgatccacaacaacttcggagtgctcttccataacctcccctccctcacgctgggcaatgtgtttgtcatcgtgggctctattatcatggtagttgccttcctgggctgcatgggctctatcaaggaaaacaagtgtctgcttatgtcgttcttcatcctgctgctgattatcctccttgctgaggtgaccttggccatcctgctctttgtatatgaacagaagctgaatgagtatgtggctaagggtctgaccgacagcatccaccgttaccactcagacaatagcaccaaggcagcgtgggactccatccagtcatttctgcagtgttgtggtataaatggcacgagtgattggaccagtggcccaccagcatcttgcccctcagatcgaaaagtggagggttgctatgcgaaagcaagactgtgggtttcattccaatttcctgtatatcggaatcatcaccatctgtgtatgtgtgattgaggtgttggggatgtcctttgcactgaccctgaactgccagattgacaaaaccagccagaccatagggctatgatctgcagtagttctgtggtgaagagacttgtttcatctccggaaatgcaaaaccatttatagcatgaagccctacatgatcactgcaggatgatcctcctcccatcctttccctttttaggtccctgtcttatacaaccagagaagtgggtgttggccaggcacatcccatctcaggcagcaagacaatctttcactcactgacggcagcagccatgtctctcaaagtggtgaaactaatatctgagcatcttttagacaagagaggcaaagacaaactggatttaatggcccaacatcaaagggtgaacccaggatatgaatttttgcatcttcccattgtcgaattagtctccagcctctaaataatgcccagtcttctccccaaagtcaagcaagagactagttgaagggagttctggggccaggctcactggaccattgtcacaaccctctgtttctctttgactaagtgccctggctacaggaattacacagttctctttctccaaagggcaagatctcatttcaatttctttattagagggccttattgatgtgttctaagtctttccagaaaaaaactatccagtgatttatatcctgatttcaaccagtcacttagctgataatcacagtaagaagacttctggtattatctctctatcagataagattttgttaatgtactattttactcttcaataaataaaacagtttattatctcaatcaaa

SEQ ID NO: 358191 - DNA, 520 bp, Homo Sapiens
  misc_feature (476)..(476): n is a, c, g, or t
catatagtaatataaaaaaactctttcaagtgagaaatattatatcctaaaacctctaaaccacaaacattcaattgaaagagttctgttgaaggataatgacatactgactgcttacagaccaagttgcttgcattttgtatgtttagccctcctttgccactgcttttagagccttggaaggctaagtgtgatagtaatgctagctctaatgcatatttaaaggagactgcctcgcttttagaagacatctggtctgctctctgcatgaggcacagcagtaaagctctttgattcccagaatcaaggaactctccccttcagactattaccgaatgcaaggtgggttaattgaaggccacttaattgatgctcaaataggagggatattgactatattgggaacagatggagtctcttacttaccaaaagtctttgggggtatttgtttccttacatagggaaatgcctaaccntggaataggaaggtaccggtgccaggaccatccccggggaagta

SEQ ID NO: 358192 - DNA, 586 bp, Homo Sapiens
  misc_feature (505)..(527): n is a, c, g, or t
gagagattaaagagaaactgctcttctggtgattttaaccctagggatgtagctactgggacaggaggaagtgagggacccagtgctgcagggtccctgttgtcacatatgtcaatcctactttaaagtcaaataatggattctggctgataaagcctatcagaattatggtgttgatacgaaagtgtcacatagccaccaaaatgtgttctctactttcttgctttgctctgattagctaagtcttggtcacatggctttatagcactgggaaaaccaggatctggtcttttatagggtaggaagtgagccctatcttttgtgtagatttgtggcggggagtttcccaagcatgggaaatgggctcagatgatgtggttataaaatgtgaatgtccattaaaaggcagtcagtgttggctactctaagccttcaaattgttgcttttccccttcaacagggaccaaggggagatactggaaacctctgagcttcagctgttggnnnnnnnnnnnnnnnnnnnnnnnattgagatacagttcacttaactatacagtttacccatttaaggtatacagaccccatg

SEQ ID NO: 358193 - DNA, 435 bp, Homo Sapiens
gctgcaggatttttacacagtgaaccatgaatactgattttaattccaaaggctcacaaattaaagagcttccttgaaccctggccctcaggattctttcagtctcctggtttttctgtctgctttgtcatttctcagtggaatgactaaagccagaacctgctgggttagtgaatggaaataaagtattggtggatgtactcttcctgccctgcccgtccaagactagactgtgcggatggaatccatgtttcaatacccaaacactgcaccagctcacgactacaaaattagatgagacccaaaaaaatacaaagagtcaatattccaagaagatacttgcggttactgggtccaagatgtttgaattataggtagactctatctctgccagggactgaaatacggccagggcataaaaaatagcctgtttaa

SEQ ID NO: 358194 - DNA, 1427 bp, Homo Sapiens
  misc_feature (191)..(203): n is a, c, g, or t
  misc_feature (896)..(896): n is a, c, g, or t
  misc_feature (1103)..(1103): n is a, c, g, or t
  misc_feature (1327)..(1353): n is a, c, g, or t
agacatccaaacagtaaggagtaaaagccatgttatctatcatgcctacagcttcacaagactaaagggtaagaaacaaatcaattactcaaaaagatattgacagggttcaaataatgcacaataaatctttctcaggatctaagacacttaaaaatataatcaaatttgttgctctcttcctcctcccnnnnnnnnnnnnnttcaaagaataccaggtaaggtacctctgcagagtaaactgtaactgtatatcatataaatccaaatatatgtgatcactgttctgtcataatttgctattttatatacacctcatgaaacactatatatacgttacacaagtgtcatttacagttgatttgggcaaactctgtagtctggaatactcatagggttttctcaatctgattacttggaaaggtaagatgtgtgctatggctttcccacatgcagacactgacatctgaaggggaaagcttaagactgtggaatctgcacattcggtctcttttcaatctgagtttagagatgttaagtcaggtgtgtaacacactaaggttaagtctcctactgacattatcatggattgctttggattctctgtggtttggtaagggtcaagtcctaggtgaaggttttctaacctttaccccatgccctcagccagtgtgggtattctggtgtctggcgagggacaggcggtcattgaagagctgcccacagacgtcacatttgaagtacttctcatcagcttgattggcaccacctgtgctggtgctggcacgttcgatgtagcctgagcactccccaaaggcatttgcaggctcaaatatgatcatgctggcatgagttttcaggtgttcactgaatactgtgctggaagtgaaggtttnctgtgcattcatgacagtcatagtatggttcttcctacctgaatgctcttgatacttcaccttcttcctgggtgcttcaattcccacaccgtcagggctccgtcggcatctccctctggctcttcagcttttgccctctggctcttcagctctttcttctgggtcttcaatacctgcaccatctggctcatcagcatccccatttgnctgctcggcctctccatttggctgtccagcctctccaatgggctctgcagcctctccatctggcccttcagcctctccgtttggctcagcagcctccacttctggctcagcagcctccacttctggctcggcagcctccacttctggctcagcagcctctacgtttaagccctgaatcctcagaactacttgtggaacatggacattggcttcaacttcctggnnnnnnnnnnnnnnnnnnnnnnnnnnntcatcttcttcttcttcttccagatgaagctccttatgtttagtgaggactgtgctatgaataaaggacttacc

SEQ ID NO: 358195 - DNA, 461 bp, Homo Sapiens
cgtaactcatctataggagataacctagacaattgttctttatatattatgatatcataatatataaaacctcaccaaatgctttatgtacattatttcctttactccttgtaacaacctgaaacaggtaatgtattcccatttacagaggaagccaatgcacagagacattgagaaacaaaggtagaaatttggtggtagagttgtcttgggaccattagaactcaggtagttgtggtgataaacatgttggatctacagacacatacgaaggcaataaaaaagatgcaatcttgatagacattaaattcaaatcaaaacaattatatttccattttatgttttagtgaaaaaaagaggaaaatattaatagctatcaagactctggagaaaaaatctgtattgattatggcattcataagttagtgtagccagtcattaagaatttcactttgggaggc

SEQ ID NO: 358196 - DNA, 1057 bp, Homo Sapiens
  misc_feature (93)..(93): n is a, c, g, or t
  misc_feature (633)..(655): n is a, c, g, or t
  misc_feature (891)..(891): n is a, c, g, or t
ttcttaagcccatgtaaaagcttacatattaccacctttatgaactatgcgttactaggccccaaaaacaatttagaaactttaatgttttanaaaaattatagtggctaagttaattaaattttgctagccacagttcatccaagtaatgtcaagacatatttgccattcagttttggtgataaagagcgcaaaagagaatatgtttctgtattgttagtcaagtttaataatgtttcacctaagtaaaactcatcttgttttgtgtgtgaccatcactgaagtatgaacaacaggcatgcaacccacagttaatccacattttcatcatgatgcagcattcacaaatcttattagaaaagttgaatcgcaggactacatttatacagggggaaattcaaccattggtgtgtgaattaaatgcttcgttaataggataagcaggtgattcattgggaacttatgggatgcagcataaccaggtgaaatctaatggtgatttatttccaaagaccaccaggtttgttcaagtgcattgctagtctgtgtttgtgtttaacccatgcaacaatcctcatgacagtaacaaggattatgaccaataatgtggttctaaagaaaagttgtaaggcnnnnnnnnnnnnnnnnnnnnnnngctttcttcatgtatgatctctcctttaagtatatatagggactttaagtatatatatatagggactaggccaagtccccatgcccactgaatggccaaggctgcccagtaacctcctccctgaagaacagctgcactgagagaaaggctcgaaaaatgaagggagaaaaaccattcagggcccaaagaaatgcaaggcagcagagacaatgtttgaggataggcactttttctcncctgtgtcctcaaaatgcagtagacagtggcattcaggggaggtgataccaacctcccagggagggcatttgaacctgggggaatgctttttattcttggtgtttacaatgactgagaatgctactgacatttagtcagccaggggccatcccgagaattccggac

SEQ ID NO: 358197 - DNA, 687 bp, Homo Sapiens
  misc_feature (184)..(204): n is a, c, g, or t
ttatattcatatgtattgcattgcaattataattacatatgcagattgattgatagtcatgaataataacgtctgctcctcttacatagaaagaaaaacgatattaaaagaagatcttctctttatttgagactcagaattccttctagaagaaggaagtgctttttgttataggatcccttcnnnnnnnnnnnnnnnnnnnnngtaagatgtagatgcttattctttgctttagaaaacttctcacttaaaaagatggcatgcacctaggggaataaaaggtcacctcagacaccaggtgtcattcctggtgaggcctgcctcgtcggtggcctggggtctgccggcaggttctggctgcacctgaaggctgcgtgcaccttgtcccctggacaggtctcctttcctggccctgctccagcccagcccttcttctagtggtagctctggctttgcaggcccagctccaggccctgctcctcagagagactcttcgagagctggagctgggcacagccataagacaggactggaccagatgctcctgtaaacatcccaggggtgtgccaggcccaccctcacaactgcttgttcaggtatcgtgatgggccactcggtccaaaatcagccaggccatcttttccatcatctcacttcaaataaacataataattatatttgatcatt

SEQ ID NO: 358198 - DNA, 712 bp, Homo Sapiens
gggctgcagggtttgtgatgtggaattcacagtcaatacagtgtaatttaggggatagtccatttactcctgtaagaaactttataaaatgctggggccatggacagggcctgcaggcctaatctttcaccttctccaaagtttcccaatagactatttgcgaagatggaataaggcccacatcccaaatagaagggtcagggcacagccaggctggaagggagcacagaacaaaattttctgttttaaaccatggaatttgtcttctgagaattagccatttgggtcacaactgcaaagtgtgtcaggtgattaagtaatagatcaatgaaagctggagcagatctgagcaaggaacatgagtcttgaaatgaatgcctgggcagagtcggcacctggaacaggtgatttccgaaggcttgcactgttacttggcctgcctcctcttggcttgagatctaggaggagaatatataatagataggaatgcctgtcatagtcacaggccattaaaaattctctgggggaatacttttttctctgagtaatttggctgaatacgagcaaatacattcttagagatgacatttgatataaacttcctgtatgccaggcgctgttcgcactgtatctgaattaacaaccctgagaggtaggtattattccagttttacagttcaggagaatggcgtgcccgggatgcggagcttgc

SEQ ID NO: 358199 - DNA, 281 bp, Homo Sapiens
atcgagctcggacctacctcatgggtattatagacatgcacagtttccttcaaatcaaatgtttaataaggaaattcatataattccaagaaaacaggcaaaatttggaatacataagcctagctaagataaagaactaccagttaattcttaacatcactggagcttccagcaggttttttaattgaaggacaaaaagtgtccatacatttgtgttatctcttcagagcctgagggagaagagagtggctttgccctgtggaaagtaggtaccgagctcc

SEQ ID NO: 358200 - DNA, 832 bp, Homo Sapiens
  misc_feature (597)..(608): n is a, c, g, or t
  misc_feature (642)..(732): n is a, c, g, or t
cgggctgaaataagcccgaataaccaatggccaactcctgaatggatcaagaactcttggaaaatttggtaaaaaacgagccaaatgtgttatagccaaccttggacttaagccggatgtgactccactctccacttcttataagtacttaaggtcaactagactctttgtaccttgtttcccatctcaaatagcgtctctatagtgcctccctcacaagatgttgggaagataaatgagttaatgcacgtaaaatgctgggaacaatgtctagtacagagtaagcatgacatcagagttggccgagacaactcttggaagccatacctgatctctcaggtttgtttggtggatcaactgaaatggtgaaagtgaaaaaaaagagacaccgagttattagtgccaaaaaagaccttaaagatcatccaaataagctccctcaataagtaggaaatctagactcaaaaatggaaagtaactggcccagagtcacagttgatttaatgacagagtccgggtctcctgaatcccagtccaaagctttgctttttgcaatgcatcaaagaaagcaacatctttgtagagctgactcctttnnnnnnnnnnnngagagaaagagagacagagagacagggtcttacnnnnnnnnnnnnnnnnnnnnnnnnnnnnnnnnnnnnnnnnnnnnnnnnnnnnnnnnnnnnnnnnnnnnnnnnnnnnnnnnnnnnnnnnnnnagcagctttgcactttgtttttggaaaaaaaacaccacttctataaaaacacacaagaaacaaactcaagtttcaatgtagcctgcagcccgggggatcc

SEQ ID NO: 358201 - DNA, 1131 bp, Homo Sapiens
  misc_feature (1121)..(1121): n is a, c, g, or t
gggaaaagaaagacaggggaagaaaaaaggctacagaactgaaggaaagcatcgagaagaaacaagtgtggctgtaaagaggataatccagacactgaccgagagtagaaagaagaatagggtgcggatagagaaacgaatgaaagaagtggaagaaagtcaagaagtgagtgatcatgaggatgaaggagaggagtaggaggaggaggaagatgacattgatgggggtgaaagttctgatgaatcagattctgaatcagatgaaaaagccaattatcaagcagacttggcaaacattacttgtgaaattgcaattaagcaaaagctgattgatgaactagaaaacagccagaaaagactgcagactctgaaaaagcagtatgaagagaagctaatgatgctgcaacataaaattcgggatactcagcttgaaagagaccaggtgcttcaaaacttaggctcggtagaatcttactcagaagaaaaagcaaaaaaagttaggtctgaatatgaaaagaaactccaagccatgaacaaagaactgcagagacttcaagcagctcaaaaagaacatgcaaggttgcttaaaaatcagtctcagtatgaaaagcaattgaagaaattgcagcaggatgtgatggaaatgaaaaaaacaaaggttcgcctaatgaaacaaatgaaagaagaacaagagaaagccagactgactgagtctagaagaaacagagagattgctcagttgaaaaaggatcaacgtaaaagagatcatcaacttagacttctggaagcccaaaaaagaaaccaagaagtggttctacgtcgcaaaactgaagaggttacggctcttcgtcggcaagtaagacccatgtcagataaagtggctgggaaagttactcggaagctgagttcatctgatgcacctgctcaggacacaggttccagggcagctgctggccaaacagatgcatcaaggacaggagcccagcagaaaatgaagaattcctggggcgagagtccaggcccttaccaacgcccggcaacaaagggaaacagagaaaaatatccgaaggaaaggattgactggcccgaatgtttatttcccaagacagctcgcatgaagntggcaagctc

SEQ ID NO: 358202 - DNA, 987 bp, Homo Sapiens
aaaaagcattacggggctaggtacgaggctgggtggctgaatcggcacgaggcaaggagcagcggaagctggcacgacagaggagccgggcatggctgaaagagggcggtggggatgagcccctcaacttcctggatcccaaggtggcccaacgagtcctggccacgcagccaggccaggccggggcaggaagaaggaccacggcttcaaggtgagcgccgatggccggctgatcataagggaggaggcagacggcaacaagatggaggaagaggaaggtgccaaaggcgaagatgaagagatggctgacccaatggaagatgtgatcatcaggaataaaaagcaccagaagctcaagcaccagaaagaggctgaggaggaggagctggagataccccctcagtaccaagctggaggctctggcattcatcgccctggtggccaagaaggctatgcctggggctgaatacaaggccaagaaagcaaaaggtgatgtgaagaagaaaggccggccggatccctatgcctacatccccctcaacagaagcaagctcaaccgcagggaagaagatgaagctgcagtggacagttcaaaggcctgtgaaggctgcccagcgagggtcccaggttgggacacaaaaaccgcagaaaggatcgtcgaccctgaggcccagggcccctgtggctgccctgtggtccagtctgaggcctttcagccccccgggctgccttgccaccagctcccaggtgctcagattcttgcagaggctggactcggatgacttggaactagggcttgggtcctcagaagtcctgggttttggaaccccaatggaatccccttcggagaccatccttgctgtctgggattgggaattgggctcgtgccctagttgtgcctgaggccccttgcttcttgcccagagggctttgccccgaaagagttttcctttcccccagggccgttccgtgtcctccttgctggtg

SEQ ID NO: 358203 - DNA, 1092 bp, Homo Sapiens
  misc_feature (352)..(385): n is a, c, g, or t
aaggagcgaggcctgggtggcgaattcggcacgaggcctgcttctggcctcccgcacccgtgacgtggtcaagtctgcactgggcttcatcaaggtggcagtgactgtcatggacgtggcgcacctggccaaacatgtgcagctggtgatggaagccattgggaagctttcagatgacatgcggcggcacttccgcatgaagcttcggaacctgttcaccaagttcatccgcaagtttggatttgagctggtgaaaaggctgttgcccgaggagtaccacagagtcctggtcaacatccggaaagctgaggcccgggccaagaggcaccgagccctgagccaggctgccgtnnnnnnnnnnnnnnnnnnnnnnnnnnnnnnnnnncccgcccagggcaaaggtgacagcattgaggagattttagctgactcagaggacgaggaggacaatgaggaggaggaaagaagccgaggcaaggagcagcggaagctggcacgacagaggagccgggcatggctgaaagagggcggtggggacgagcccctcaacttcctggatcccaaggtggcccaacgagtcctggccacgcagccagggccaggccggggcaggaagaaggaccacagcttcaaggtgagcgccgatggccggctgatcataagggaggaggcagacggcaacaagatggaggaagaggaaggtgccaaaggcgaagatgaagagatggctgacccaatggaagatgtgatcatcaggaataaaaagcaccagaagctcaagcaccagaaagaggctgaggaggaggagctggagataccccctcagtaccaagctggaggctctggcattcatcgccctgtggccaagaaagctatgcctggggctgaaatacaggccaagaaagcaaaaaggtgatgtggaagaaaaaaggcgggccggatccctatggctacatccccctcaacagaagcaaggctcaaccgcaagaagaaaaataaactgcaggggaccgtttcaaagggctggttgaggcttgcccggccagtttccccagtggggaacccaaaaccccagaaaagaaccttccaacc

SEQ ID NO: 358204 - DNA, 640 bp, Homo Sapiens
gacagaagggctgggcagtggcttgctccctagaaactgagattccgaagcaggtgtttcctctcccctagactcagaggtacatttaatccatcttctccatttcctccttcaggaccagctatgagattcagtgcatttctagcccagcggatgttcattctccactaaacttcatctgttacgaagcaaagggggattattccagtgaggcagccaggagcaaggggccatgatattcatgactatgtctgctgggcatgtttcaaagtgtccttgaattcactcagcaaacaaagctttcgggagaatctctcaaaacttaggccctgctcccatttggccaaaaatgatggctgctccaaaactctgaacttcttaaaactccatctgctacattatttctggaggttaaacaagactttttctgtccttgaggatagatgtgtctgtttaattaaccaagcacaagtttgttaagccgaaagctccaagcttgattctatacctggggaatccttggtggcatctttattcttccaaagtggcaatcaccattggttaaagtgggcgattatttcaagcctgtgtccttagcctttaaacctttaaggactctttttcggctttttggggttgg

SEQ ID NO: 358205 - DNA, 1091 bp, Homo Sapiens
tgaccagccagtgtgctgttccatgtaaactctatgggtcatcttggattgtctttcaacctgacatcattatcagcgcaagccaaggttacctctggaacctccaagtgaaacttgagcccatagtaaatctcttaccagacaaaggaagactcatggactttctcctccagagaaaggaatgcaagatggtcatcctgtctgtctgttcacagatgttaagtgagtcagacagagcatcgctgcccgtgatagccactgtttttgataaactcaaccatgagtataaaaagtacctggatgccgagcagagttatgcgatggcggtggaagcagggcagagccgaagcagcccgctcctcaagaggccggtgcggacccaggcggtgctggaccagtcagatgtgtacacccatgtcctgtcagccttcgtggaaaagaaggagatgcctcataaatttgtgatagccgtgctgatggaatacattcgttctcttaaccagtttcagattgcagtacagcattacctacatgaacttgttatcaaaacccttgtccagcacaacctcttttatatgctgcatcagttcctgcagtaccacgtcctcagcgactccaaacctttggcttgtctgctgttatccctagagagtttctatcctcctgctcatcagctatctctggacatgctgaagcgactttcaacagcaaatgatgaaatagtagaagttctcctttccaaacaccaagtgttagctgccttaaggtttatccggggcattggtggccatgacaacatttctgcacgaaaatttttagatgctgcaaagcagactgaagacaacatgcttttctatacaatattccgcttttttgaacagcgaaaccagcgtttgcgagggagccccaatttcacaccaggggaacactgtgaagaacatgttgcttttttcaaacagatttttggagaccaagctctaatgaggcctacaacattctgaaatcacttgctgtttttttatataaaaatgtgtacaaagttaatttattgcattaataaagctctttaaactataaaatgttaaaaaaaa

SEQ ID NO: 358206 - DNA, 1227 bp, Homo Sapiens
agtcatcatgtgtgccaccatcgccatggtcttggtcaacatgtttggagttatgtggctctggggcatcagtctgaacgctgtatccttggtcaacctggtgatgagctgtggcatctccgtggagttctgcagcgacataaccagagcgttcacggtgagcatgaaaggcagccgcgtggagcgcgcggaagaggcacttgcccacatgggcagctccgtgttcagtggaatcacacttacaaaatttggagggattgtggtgttggcttttgccaaatctcaaattttccagatattctacttcaggatgtatttggccatggtcttactgggagccactcacggattaatatttctccctgtcttactcagttacatagggccatcagtaaataaagccaaaagttgtgccactgaagagcgatacaaaggaacagagcgcgaacggcttctaaatttctagccctctcgcagggcatcctgactgaactgtgtctaagggtcggtcggtttaccactggacgggtgctgcatcggcaaggccaagttgaacaccggatggtgccaaccatcggttgtttggcagcagctttgaacgtagcgcctgtgaactcaggaatgcacagtttgactttgggaagcagtattactagatctggaggcaaccacaggacactaaacttctcccagcctcttcaagaaagaaacctcattctttggcaagcaggaggtgacactagatggctgtgaatgtgatccgctcactgacactctgtaaaggccaatcaatgcactgtctgtctctccttttaggagtaagccatcccacaagttctataccatatttttagtgacagttgaggttgtagatacactttataacattttatagtttaaagagctttattaatgcaataaattaactttgtacacatttttatataaaaaaacagcaagtgatttcagaatgttgtaggcctcattagagcttggtctccaaaaatctgtttgaaaaaagcaacatgttcttcacagtgttcccctagaaaggaagagatttaattgccagttagatgtggcatgaaatgagggacaaagaaagcatctcgtaggtgtgtctactgggttttaacttatttttctttaataaaatacattgttttcctaagttttggggttaccctatctgctttgagagacaaatacaaaagctaaatggaagag

SEQ ID NO: 358207 - DNA, 571 bp, Homo Sapiens
  misc_feature (45)..(81): n is a, c, g, or t
  misc_feature (517)..(517): n is a, c, g, or t
  misc_feature (525)..(526): n is a, c, g, or t
  misc_feature (528)..(528): n is a, c, g, or t
gatgatacgatcactatagggaacgcgcttacgcggtggcggcgnnnnnnnnnnnnnnnnnnnnnnnnnnnnnnnnnnnnnatcaggccaaatcggccgagctcgaattcgtcgagagcggtgaacctgatgatttggaaacagaaattctacaagagccaagtggaacaaacaaagatgagagcttgccatgcactattactgatgtgtggattagtgaggaaaaagaaacaaaggaaactcagtcggcagataggatcaccattcaggaaaatgaagtttctgaagatggagtctcgagtactgtggaccaacttagtgacattcatatagagcctggaaccaatgattctcagcactctaaatgtgatgtagataagtctgtgcaaccagaaccatttttccataaggtggttcattctgaacacttgaacttagtccctcaagttcaatcagttcagtgttcaccagaagaatcctttgcatttcgatctcactcgcatttacccaccaaaanaattaaanncngaatttctttgctgattggactttcaacttgggctggttgatt

SEQ ID NO: 358208 - DNA, 1309 bp, Homo Sapiens
gaagtacccaaagtcatgtggcaaattaatggcaaaatcaggactagaatgcatgcctcccatttctctgaccagtgttcttctaggggaccacactacttccttgaagaaagggatcaaatctctcaccccgttccaagtatcgcctcatagcccattctgaatccggcgcccacgccagtagagaaaagtgccgcccagcatcatgaaaatcactaccaatcctgctatcactgtcaaagccattgtcagatgggttttgccgatcagcaccagtgtttgtcctaaacagtcttgaagctctggtcctttacacccctgggtgcagttctcatggcagggccgacattcattctgaacatctgggtacttgtagattgggcccttggcacctaggactccatgggggcagctgctcacacagtggggcccatctcgaaaatgggcacattgagcacaagtatcagagccctgagtggaagagagaaggtcaggaagaatcagatcccaaggtcaattccatacctcccagcaaagaccaacccagacattcaggatcttctatccgcaggccctagcattatctggcctctctgtgctatccttagccatatcattccccagatgctccaagtattgccccttctctgtctcccttggagatcctggtgccactagtataccgagccattgcatgtggcagtgccctccatgggttggcattccgggtggcaggagaagcattcggcctcatgggcaaattctcgaggctccccattcagaaagttgcagtgggtcacacagacacctcctcggctataatttcgacaggacaagcactgaccagggcctgggccccagcatcccccagaggagcacagtgggtcacacactttgccctctgccacgcagtctctgcgcggccgattatgcttgatgtctagtcgctcttccgtaggcccccgaagcaccttggtccagttcaaagagtggtggtagcagagctgcctattggcacttatatagatacgcccagcactaatttccttcagggatcggaagcccagagatgtgacattcaagttcttcatgatcaacaatgagaagccccggttgtagaggcttctgcctccaatggttgtcaaattggaaaaaacactgaagttgtgcatgtggggcggccaggactggatgttcaggtaacctgtgatctcccgtactgtccggaagacattgagcttctctgggtccagggcagggatcttgtgccaggtcatccattgagccggtgatcagagtccgaatcggg

SEQ ID NO: 358209 - DNA, 1252 bp, Homo Sapiens
  misc_feature (83)..(83): n is a, c, g, or t
  misc_feature (429)..(545): n is a, c, g, or t
  misc_feature (549)..(580): n is a, c, g, or t
  misc_feature (715)..(726): n is a, c, g, or t
gcacttttctcttccaacccaagggaaggtttccttttttgtgtcttcccagtccattctcagcttcttcacagcactctggnagatatgaaggatacttccatatcccttcctctcaggctcttgactcttgaaactagcctcttatgtgtgcctttgtttcccatcagactgtcaagaagaggaaagggaggaacctagcagaggaaagtgtaattttggtttatgactcttaaccccctagaaaaacagaaccttaaaacctgtgaagaaaaaggttaggagtagatattgattactatcataattcagcacttaactatgagccaggcatcatactaaacttcacctacattatctcacttagtcctttatcatccttaaaacaattctgtgacatacatattatctcattttacacaaagggannnnnnnnnnnnnnnnnnnnnnnnnnnnnnnnnnnnnnnnnnnnnnnnnnnnnnnnnnnnnnnnnnnnnnnnnnnnnnnnnnnnnnnnnnnnnnnnnnnnnnnnnnnnnnnnnnnnntttnnnnnnnnnnnnnnnnnnnnnnnnnnnnnnnnctttagaactgggtgcagtggctcatgcctgtaatcccagccagcactttgggaggctgagatgggaagatcacttgagcccagaattagagataagcctatggaaacatagcaagacactgtctctacaggggnnnnnnnnnnnngaaactgagccttaaagagatgaaataaattaagcagtagatccaggatgcaaaatcctcccaattcctgtgcatgtgctcttattgtaaggtgccaagaaaaactgatttaagttacagcccttgtttaaggggcactgtttcttgtttttgcactgaatcaagtctaaccccaacagccacatcctcctatacctagacatctcatctcaggaagtggtggtgggggtagtcagaaggaaaaataactggacatctttgtgtaaaccataatccacatgtgccgtaaatgatcttcactccttatccgagggcaaattcacaaggatccccaagatccacttttagaagccattctcatccagcagtgagaagcttccaggtaggacagaaaaaagatccagcttcagctgcacacctctgtccccttggatggggaactaagggaaaacgtctgttgtatcactgaagtttattgttatgttttcatacgtgtctgaataaaaaagccaaagttttttttcaa

SEQ ID NO: 358210 - DNA, 656 bp, Homo Sapiens
tccccgggctgtacgaattcggctttagaagaaatatagtggattcctcttccagtttcttgcctagcttaaagccatgtaattcttgccagctcacattgtgacttttctggctttcaacactttgattgggatttaccatttaattaaataagcttaggagctggagggtgggtgctgtccggggtcagttcagtcaacccctggttctctttgcacttcacagaatgtggattgtctctctgttcatgggctctgctgggctctctgagctcagaaccttcagatttgttgggtgggaccacaggtatgcaccaccacacctggataattgtggtttttttgtaaagatgggggtctcactttgttgcccaggctagtcttgaactcctggcctcccaaattgttggtattataggcgtgagttgacaggctccggcataggccattttcaaactcccagattctctcccttttgatgctttttgctgataattatagaaattttactttcctttttccctcctaaatggagcagtattctggtttggaggatggctgctattcaagtagtccttgtcagaagcaagcctatgttgttgtatctaaaggtaaattgcacatctctggcaattttccttgccaacgcgtaatac

SEQ ID NO: 358211 - DNA, 817 bp, Homo Sapiens
  misc_feature (35)..(35): n is a, c, g, or t
  misc_feature (160)..(160): n is a, c, g, or t
  misc_feature (195)..(195): n is a, c, g, or t
gcatatagcaggaataaatgtcttaagcgaccctncagtttgatttaaatgaaaagacatgtagaaactagcccaatagttgcagttcctttcatagcaacagaactctagatgtcgaccctttggcactcaagctccaaaggcccctcataatctgaanttctgaaaggttcaagtactcaagggtttcagagnaagactagaggcctagggtccagatctgcttaggctctcagggcctccaaaggtgactggtgactcggcatccacgtggtagtatgactttcccactggtgaccaccctattacagatggataataaatgtgtaggtcattggaacgattggtatggattaatatttaggggagaggaaaaagttggcacttgggttagtttcttggctgttttctatgttgctttgtccaagtagcctaaacctaacagctaggaatagaggaaaccggtgaggctgtgagtcttcccgtttgtccaaagagcttcccgcacactggatccttccttcccttgagtacttcaaatatcatcagtcccgtccaagctttctctctggatcccagcatagcaatgaagtagcctttaatgtgccctactgaacaagctctttacaaaagagtagcacaaggtcacagaaaaattaaaaaagaccagtgcctgtctgcccctcttcaccagtatctgtgtggaacctgaatttagccatacctttccttgccctaacctctggccaccatggacctgttctgttactgcagtcttgcctttttttggggggtgggctgggcttgtgagccatcc

SEQ ID NO: 358212 - DNA, 740 bp, Homo Sapiens
ccaagaaaaaagaaggcaaggccgacagaggccaccatttagtggcagtggcagtatatgaaaaagtaaagcccataaaccaacataccgaaaatacaaatgaacatataccaaacaaatggcctaaatgtttaaccaaaaatccagggtaaaggaatgacgagagtggtagcacatgattgcaatatgaatttcaatagtccccctttatcctcagcagctatattccaagacctccaatggatacctataactgcagatagtaccgaaccctatatatactgtattttcctatacatacatacttgtgatatttaatttataaatgaggccacaaaaagaaattaacaataacctaataataaaatagaacaattaaaacaatatgcccagcatcactgctttgtgcccattaaagtaaaacaggagttacatgaacacaagccactgtgatacccatcacagtgggtctgataacagagatggctactcaatgattaacaagcaggtggcatacacagcgtggatacaccgaacaaagggatgattcacatcccagatgggacagcacgaaatttcatcatgctactcagaacagcatgcaatttaaaacttatgaagtgtttctttctggaagtttccacttaatattttgagaccacagttaccatgggtaactaaaacctcagaaaggaaaaccatgaataaggctcgtaccgaatgcctgcagcccaagggat

SEQ ID NO: 358213 - DNA, 1084 bp, Homo Sapiens
  misc_feature (108)..(108): n is a, c, g, or t
ctttgccccaaaacaaaggccataatccaagtgaaatatggagccaaactgaacttaagaaggaaaagggaaacgacttggcaagtgtaaatctgcccagctggttgnagtcaagacgacacattgagaacgatctgttttggaatcatgtcctcccttcaacccttctcctacaatcatgcactgtctacctcgtcctatttacatggaccctctcctattgccacctctgggtaagaatgcatcactctaggctatgctactgctccatcaacagtattgacagttttgtcagtgatggaactatggaaacaaaagccatcaaataacatacactactatttttaggagtcaaagtaatgctctaaggatctggcaaggacatttggccccctgagcttccaatccccacagccaagacttttctattttctctcatgttagcctgagagacaaaaggagaaggaatgtgctgacactttaacactctaaacccaccgatgcttagtttatagaacacacatatcctaaatgtttcaatgccataaagcttacattcccttgaagcagagtacaggaaaccttagcaatatgctaccatccagtaggatataaatataaagaagctgtatcagcaagggatgctcagggaatgtgtttgcagcccgtttcacggtagccgcttgagaggggatattggaagtgagtgactttctttcatttggcaaagtttccttatctcagcacctactctttctgatggtatgtttttgaaggctgcacagtacgactctgggtaccgtgtgtacatacatatgtaaggaataacgtttatgttgctcagaataggcactttttgaaggcagtaaatctaaaagtaaagttaatagagcctatatttagtgctcatcttctcactttgctgatgtgtatgctgaacagaagatcacagatttgagtcagtctcgcaaagaggccggagtcggcaaatggctatattcagagctggggaagtcttgccaacttaactgtagctttaaaaaggcagacttggagaaggtgcaatcgtttttctcctgcagcc

SEQ ID NO: 358214 - DNA, 696 bp, Homo Sapiens
  misc_feature (55)..(189): n is a, c, g, or t
  misc_feature (254)..(322): n is a, c, g, or t
  misc_feature (335)..(356): n is a, c, g, or t
ttacatagcaatcttataaaagaaatgctagaatcagaaaaccatcattttaggnnnnnnnnnnnnnnnnnnnnnnnnnnnnnnnnnnnnnnnnnnnnnnnnnnnnnnnnnnnnnnnnnnnnnnnnnnnnnnnnnnnnnnnnnnnnnnnnnnnnnnnnnnnnnnnnnnnnnnnnnnnnnnnnnnnnnnncagagcacagtggcacctgcctgtaatcccagctactcaggagggtgaagcatgagaactgcttnnnnnnnnnnnnnnnnnnnnnnnnnnnnnnnnnnnnnnnnnnnnnnnnnnnnnnnnnnnnnnnnnnnnnagatttcgtctcnnnnnnnnnnnnnnnnnnnnnnccattattttgcaatagccaatgttataatctacacaggcacagactatcaatgctaaaaatcatttaaaagacatcttaggggtaattacagaaatttgaatatagaacacatatgtaataaaattcattttcttaggtatgattacaatattcttgttatacagaagaaaaaccttattcttgggagatgcaaactaaaacattatgggttgaactgtcatcatgtgtatggttttcagatgctcaacaaaagtgtgtgagaaaataaaactggcaaaatattagtaactggtaaatctaggtgaagcatattattatgaaattattatcgtatttac

SEQ ID NO: 358215 - DNA, 678 bp, Homo Sapiens
cacaagtaatgtccccttgaaatacagcttaaaaccctttacattagaaaaagctacagttttctcaaaaggcacggggtcattagaaaagccttgggaaatgttaatcacaagatctgaatttagaaggccttaccaagacctttacaacaccaatgcaaagattggcacagcttctttaaaaacaaaggggggcacaagtgaaagaccactacccagtagtggactgacaatttgaagtgctggcaagcacatggaacatctagaccctcacatgttgctactaagagtgttaaaatggtaaaaccaattgggaaaactggctcttcctaataaagttaaacgtatcccaactctatgtgatagcatatgtccctcgtgccgaattcggcacgagcaagaatgtaaggctcacatgcagtcgggcgtttgaaagacctggttcgcggttgccacggtgcaaatactggtttcctttctgtgccgtgctggggtctgcaaaggtccgaggccccagacacccctgggttttgcatagttaaacatttgggattcagcctttctcttttctctgaataccgtactctaacttgcactgttaccttgagacgtaatttgtgtcctagtctatgcggttagaaagttcactaaataaattgaaggtcaagaacaagttct

SEQ ID NO: 358216 - DNA, 175 bp, Homo Sapiens
ttgggctgcaggaattcggtacgagtacacttcatcaaaagtacaaagttctgttcatcaaatgatgctgttaagatagggaaaagacaagaaacaggactggaagaagatgtttgctctaaggtacacctgacaaaggaactctcatagaaaatataaagaatccctcaagttg

SEQ ID NO: 358217 - DNA, 1614 bp, Homo Sapiens
gggaatgctaacagggatatgtgtcctgtggtagagggtatggttgaagagtgtgctccatacctgggtaaggaagcacagactccaatttggagccgatggtctagtcagtggttttccaactttttttcagcagcaaccccttaatgcaaataaaatcttaccctgaaccccgatatgtaagacagctacaaggggagctgttctgtttgagggcaaattgcccagcctgctcagctccccacccccttcatctccccaaggactcctgaggcaacccctaggaaacttcagggctctgccaagcagtttgaaaaccactggcctagtttgtcctgagcaagtcagagaccccccaccccaacttcttgccacaagctggctctgagtttctggtgtcagcatactcacaacaagaccaagtggcacatgcagcctaccacctcccctagaaataccatgaaaaagtgcagccctctctcaaaagcagaagtctggactcaacacctgaggccaatttggtcccacgttctggcgagcacaactacgttgccacattctaggaccaagtgaaaatctccaagaagagtcaaccatggtctagctaagctgatcagtgctcaggaccacaggcagggttctagagcactgtgtcagaaagttagcattggagagcagcaatcttagcaccttggaaagtgcagcagtgaggtctggctcagggcatgcatctggagtgaataatttcttcctcaaaagaaaaagccataatctgaagctgttctagaggactgcgagttccaaagttaacatcctcagactctgaggtacagacaagtaacacccatgcaaacagtgtggcttcaaataaatcataaatgcttctaggtcatggtaggtactctagaacccatatgcctggcccctgataaagccgaaccaaagcccacaacacagcataggccagtcctggagtacccatcaccctcacacccatgggattcagatctgaaatggtcatctcaaggcatcaacagtctcactgagacacagtgtgggacccagactgtattctagatcagcacttatgcccacaacctcaaaaggaaaattagttagggccccaatttagagtttcagtttgggtacagaggtcccagagattggaaacactttaggcaccattgtgcctgagtgggagaggagggtggcaggcaggtccggctacctaagcctccacccatccagctcaacagccctgcccttctatcaaagcccaggaggcagcagcaagtgcataatgcacaaggaagggggatgatgaaggaacaaggccagctgcagaactgctcttctctccaaagccttgccaatcactttctggaaagaagcagcagagccctcggtctggatacaatgtttctctctaagccttgaggcatcaggacaagggcaggcgaaaggaggggttgggaggagggacagagaactgcccctagttcttgccattgcaagagggaatgttttctcccggacgcgtggttcgacgatatcccaggattccggaccggtacagcctgctttttatacaacgtttctattatcctaaggcgc

SEQ ID NO: 358218 - DNA, 601 bp, Homo Sapiens
  misc_feature (425)..(536): n is a, c, g, or t
ggaagatgtgagtggatggatctcaatgacctggcgaagactgaaaatacaactcccatcaccagcagagttgctaggctgctgctgtatgggtacagagaagggtttgacaaaattgacctgactgtggaagaacttccagcagtttacacaggactgttttataaactctatcataaggaactgccagagaattataaaactatgaaaggaattgattaaattcacatttatatgtttagaaacatgtagactaacgaatgacataagaaatagtggacattttggattgattaaacatctgactgtgattttctaatgtatatgatttccatgaagaaattttgtttctaaacatgcacattttaaaagcctcttttcgaataaagcaaatgcgtgtaagagaaaattattatactataacnnnnnnnnnnnnnnnnnnnnnnnnnnnnnnnnnnnnnnnnnnnnnnnnnnnnnnnnnnnnnnnnnnnnnnnnnnnnnnnnnnnnnnnnnnnnnnnnnnnnnnnnnnnnnnnncttctgttgttccactgccacttctcactcttttttaatattttttgtggctatcgtaatatata

SEQ ID NO: 358219 - DNA, 686 bp, Homo Sapiens
gcaaggcaaagtcttctcatctggttgactgtccacttcctggcctcttgttatcttggcacttcaactctagctacctccatttgccttctacttcactatggccacaccataggctgtattgcctctctacccatcagaatctcccactgattagatagatgggtggatgaaatcatccagaagcacttcatatcaaaaatcataaactcccaatattctgaccacagcctttcaaccttctgactaactatgcctatttttcagtctttttctcctccactagaccactctattttcttcccattgttatctaaggtatctcttaatccttagttctactgtgcctgcataggagagggcaatgctgacagattagggcattgctagaagaaattatacagttgctataggttagcatctacctgggtatagatgtgggtccatcaacattgcaggcaaactagtcctcacaagagctatttacaagagcttaccattctccctaccccaccacttcccagctacttaacagagaaaacagatgccatcagacaggaacttccttaacttcttgtgctctctccttgccacctgcaaacttatctgcatccttcctttccttccggcttcctgtctcaggggattgggcaggattcctttgcttcaagactagttcctcgtgc

SEQ ID NO: 358220 - DNA, 1001 bp, Homo Sapiens
  misc_feature (889)..(925): n is a, c, g, or t
ggaagccatcctcaccagtgggtcaaccggaaactcgccctgccaaaatgttggcataatgctggccgggctgcagtttgttgccccaggggaaaagtctattatgcaggcttcctcgacagctgtattcccactcagcttccgtggcagccgcttccctgcccaagtgcagtaggcaaccgcatcattccaggacacatggagaactggatgatccggcctgtgcagaatagtagagtcaggcccttctgggtgtctccagttagcgcctttcacaggtaaccaccagggagcagctgcaactgcctgttgaatattggtcttcacttgctcactcaacatgccttcaaagacaaaggagtcgccaaacttctcagcctctgtcaaatagccagttgagttcacaaacttctcaaattcagtattactgacttcataggcatccatgtaaaaggcatcaatagtaactctcctcgcaggtgcttccccatcctgctttatctgaggatcatctgtgcccattgtaaatactccagcagggatggggaccatctttgagtgcgcgagttgccgctctccgggtactgggcccggagcgttagcctcccgcgagtatcggtgagcggctgccgaattgccatgggcgccaggccgctggggcagtgccgcagccgcaagaacccgcaagggaccccgcgcccgcaccggtcccggcctcctggctccctgccgctccacacagcagcgagagcagcagcagcaagaggacgagacccagctcagggcaacgtccacacaccagccctagtgcgggcgcagccatgttgtcccgcgggccatgtgacccgccgctctcgacgaattcgagctcggccgatttggcctgatnnnnnnnnnnnnnnnnnnnnnnnnnnnnnnnnnnnnncgccgccacccgtcgggattaaaaacccccccggagggtcgtcccttaattaggtgagttcgtagtgacatttccg

SEQ ID NO: 358221 - DNA, 607 bp, Homo Sapiens
gcctccctccctcccccactgtctgaggaattcctgaacacaaaggacagacaggcagaagaggacagacagatggacactgaggctgctgcatctgaagcccccaaggatgtgacctacgcccggctgcacagctttaccctcagacagaaggcaactgagcctcctccatcccaggaaggggcctctccagctgagcccagtgtctatgccactctggccatccactaatccaggggggacccagaccccacaagccatggagactcaggaccccagaaggcatggaagctgcctccagtagacatcactgaaccccagccagcccagacccctgacacagaccactagaagattccgggaacgttgggagtcacctgattctgcaaagataaataatatccctgcattatcaaaataaagtagcagacctctcaattcacaatgagttaactgataaaacaaaacagaagtcagacaatgttttaaattgaatgatcatgtaaatattacacatcaaaccaatgacatgggaaaatgggagcttctaatgaggacaaacaaaaaatagagaaaaattaataaagtcaaaatgtttattcttgaa

SEQ ID NO: 358222 - DNA, 617 bp, Homo Sapiens
agcgttggaatgcatgtggatctcatgttacttataacatgggtctagtattagatccttctctagatacattacctttagctgggccccccattactgtgactctgttgggaaaagccatattgcggatcctcatagggatggtatttgtactaataatcagagatgtaatgaaaaagatcaccattcctttagcctgcaaaatcttcaatataccgtgtgatgatattcgaaaagcaagacagcacatggaagttgaacttccttatcggtatattacctatggaatggttggtttctacatcacattttttgttccttacatatttttctttattggtatctcttgatggagaagtattgtttatgataagaaaggagggtatcagttactgatacccaaaaatatattccaggtaaagccaggtcagaattaggcttttgcaggaatttaacttaaataattatttaagtaaattcataagagttagtgcattttatcattgcacatccagatactgttttaggtgagctgagctatttcgttactgagaaaatgataagtatccatttagaatgttcatgtaatgttggagagtttgtattatggattcaac

SEQ ID NO: 358223 - DNA, 900 bp, Homo Sapiens
  misc_feature (455)..(479): n is a, c, g, or t
cgaggctttgctagggaacactgttatcgccccgccccctcggagctttttctccagttaactgtcggagtagcgggggctccggcgccgggcgacatgccggtgcgcttcaaggggctgagtgaataccagaggaacttcctgtggaaaaagtcttatttgtcagagtcttgtaattcctccgtggggcgaaagtacccatgggctggacttagatcagatcaattaggcatcacgaaagagccaagttttatttcaaaaagaagagtcccttaccatgacccacagatttcaaaatctctggagtggaatggagctatctcaaagagcaatgtgggtgctatacaaaaacccgaagccctcgaaacaccttaatacaacaatttcccagaatatcgcaatgttttcgaagaaaaatcatcagacgcctgtaaggcttctttgcgccctctatnnnnnnnnnnnnnnnnnnnnnnnnntcacctatatatcgtgtacacatcactatatcacggcgctcgcctggtgtgctggcacacctttaggggacaaccaaccgcccaaccacccctttcactccttcagcccaccaccacctcaccccataccactatatatttaacacacaccacctcccccctctctcttattttatacactatacgaccccatcttactaacatctgtcttatcatgaccgcccagtatcccaccgttacttcagctagacctccccacccactaatatatgactctcatccgagcaactagaatcacagacttagtagatcagagtgcaaacaagataatagcgaacctcgcttctggccgctagacaagttcatatggataccagcaccgtataccaactcgccttgcatttcgtgcgaactctagcct

SEQ ID NO: 358224 - DNA, 609 bp, Homo Sapiens
  misc_feature (88)..(137): n is a, c, g, or t
aagaatggttatcttggtaggcaagtcagaatctttgcctcacaatgatcatttaaatacattcagaacccccaaactgctaatatgnnnnnnnnnnnnnnnnnnnnnnnnnnnnnnnnnnnnnnnnnnnnnnnnnnggcctgaatcttacacagagaatttatatatagatattagctacatatactttgaatatgctatacatcgatattagcacctcacgtactttgcaattaagcttctgtaatgtcatgtgatttgtttttggaaaggaatagtggacaggagagtacaatttataatagtagcataactctttgtcctggtggtggaggtgggacgaggtggtgatatttaacctagattaaagaccaggaagggaggaattgcatctgccaaagtttcctccaacagcgatcagtagccctaagtacaaagaagccagatttagccttctgttgtttggcaaaacctcactcagagctttactccctcagacctttctgagtttaaccacagacatgatctttgctgtgctgagaaacttgtgtctacctggcctgtagggagtgtaaactagattaatacagattaacagactctgaactt

SEQ ID NO: 358225 - DNA, 928 bp, Homo Sapiens
accctgagggtaataatcatctgccttgccttactgtctacttacaaaccatcaaataggaaattggtaaaggtggtgaaaaaggagcagctagtattctccgttgacctgcacaccatgtttcagcaggcggcaaggatttacagcagaaccaaactctgaatgagtattagtctaatgaggtggaaaagtccccatcaatacataaaaacaactcagtgagaaaagctttctttcctggttaatccaagccgcagcctggtgtttgccagctgtgtagagataaggtgatccgtctgattgttcagagacgctatcaatgaccttagtcatctctgtatctggatagtctgaatatattacaaaattgcccactgaaaaaatagcacatttctgtcatagttacaaaagatgaataaaaacagaaacagtttaaaaacaccattgggtttcagtatttacttgatacctcttttcctttccctcttactttgtctatttcagtcaggataaacgatctagcaaattctcatgctgcatactctttggttcaaatgatacagcaaatcacacctcattcctcacttggtatctggacacactcagggagccctgggaagccatctgctagggattcacctaaatcctcccacatggtctggtgagattcaacagaagtgtgtcgaaattaaggtaaaagctaggtgctactgcagcccccactatgtttgccattggacttaaaaatgattggcttttctctaaagcctccattttttacagaacccaccttacagaggtaagaaaaaaactgttctagcccaggggaaaccaatgccactggcattttgttttcagtaggaagaaaatgtggtatctggtttaaaccagccctggtcacacattactggaggggaccctctagaac

SEQ ID NO: 358226 - DNA, 1191 bp, Homo Sapiens
  misc_feature (1088)..(1101): n is a, c, g, or t
ggggcaggaagccggaagcagccgcggccccagttcgggagacatggcgggcgttaaagctctcgtggcattatccttcagtggggctattggactgacttttcttatgctgggatgtgccttagaggattatggcgtttactggcccttattcgtcctgattttccacgccatctcccccatcccccatttcattgccaaaagagtcacctatgactcagatgcaaccagtagtgcctgtcgggaactggcatatttcttcactactggaattgttgtttctgcctttggatttcctgttattcttgctcgtgtggctgtgatcaaatggggagcctgcggccttgtgttggcaggcaatgcagtcattttccttacaattcaagggtttttccttatatttggaagaggagatgattttagctgggagcagtggtagcactttattctgattacagtgcattgaatttcttagaactcatactatctgtatacatgtgcacatgcggcattttactatgaaatttaatatgctgggttttttaatacctttatatatcatgttcactttaagaaagacttcataagtaggagatgagttttattctcagcaaatagacctgtcaaatttagattatgttactcaaattatgttacttgttggctgttcatgtagtcacggtgctctcagaaaatatattaacgcagtcttgtaggcagctgccaccttatgcagtgcatcgaaaccttttgcttggggatgtgcttgggagaggcagataacgctaaagcaggcctctcatgacccaagaaggccggggtggatcccgtctttgtgttgtagtccatgctattaaaagtgtggcccacagaccaagagcctcaacatttcctagagccttattagaaatgcagaatctgaagccccactctggacccaggacattttgatgagatccaaaggagttgtatgcacatgaaagtttgagaagcatcatcatagagaagtaaacatcacacccaacttccttatctttccagtggctaaaccacttaacctctctgggtgttacctgctcatttgtttnnnnnnnnnnnnnngtctcacctgctttcatgctgaggacaagttcagatgttcaagcctataatatttaggcagttcctcaaatttatgaaaagtgttctcag

SEQ ID NO: 358227 - DNA, 2004 bp, Homo Sapiens
tataagaagaatgtggaatgatactgtgagaaaacaatcagaatcttcttttatctcaggtgacatcaatagcacttcaacacttaatcaaggaatgactggcaattacctactaacaaagccctcttcttcgaccccacggcactaacaacccctataacacattgctcgctgaaacagttgtatgtaatgccccttcagctcctgtatttaactcaccagctactcttaggccagagtagcctgagcagacagacatgatgacattcactgaacaatgccagggatacaagtgccatggatactctaccgctaaatggtaattttaacaacagctactcgctgcacaagggtgactataatgacagcgtgcaagttgtggactgtggactaagtctgaatgatactgcttttgagaaaatgatcatttcagaattagtgcacaacaacttacggggcagcagcaagactcacaacctcgagctcacgctaccagtcaaacctgtgattggaggtagcagcagtgaagatgatgctattgtggcagatgcttcatctttaatgcacagcgacaacccagggctggagctccatcacaaagaactcgaggcaccacttattcctcagcggactcactcccttctgtaccaaccccagaagaaagtgaagtccgagggaactgacagctatgtctcccaactgacagcagaggctgaagatcacctacagtcccccaacagagactctctttatacaagcatgcccaatcttagagactctccctatccggagagcagccctgacatggaagaagacctctctccctccaggaggagtgagaatgaggacatttactataaaagcatgccaaatcttggagctggccatcagcttcagatgtgctaccagatcagcaggggcaatagtgatggttatataatccccattaacaaagaagggtgtattccagaaggagatgttagagaaggacaaatgcagctggttacaagtctttaatcatacagctaaggaattccaagggccacatgcgagtattaataaataaagacaccattggcctgacgcagctccctcaaactctgcttgaagagatgactcttgacctgtggttctctggtgtaaaaaagatgactgaaccttgcagttctgtgaatttttataaaacatacaaaaactttgtatatacacagagtatactaaagtgaattatttgttacaaagaaaagagatgccagccaggtattttaagattctgctgctgtttagagaaattgtgaaacaagcaaaacaaaactttccagccattttactgcagcagtctgtgaactaaatttgtaaatatggctgcaccatttttgtaggcctgcattgtattatatacaagacgtaggctttaaaatcctgtgggacaaaatttactgaaccttacaattcctgaacaagacttggaaaagcaggagagatattctgcatcagtttgcagttcactgcaaatcttttacattaaggcaaagattgaaaacatgcttaaccactagcaatcaagccacaggccttatttcatatgtttcctcaactgtacaatgaactattctcatgaaaaatggctaaagaaattatattatggtcctatgctaggggtcaaattaattacatttggtgtccccactgaaaatattaattgtccttacaatcattttcaagagtgacaggaacattttgcggaaaagccctggggtggcacaggttattgaaatggtctttcttacaccttggtcaagaggaaggtctacactcaagtgtcacttactgtttcacaggggtatacaaggggtctgtgcatgaacaaagtatagtctttaaatactacacgtgaaagtcattaatgtgcagagaaaagcgagttatggagggggaacaaactacctgtagcacgaattatcagcctgccgaagagtatgaactctacaaatgggggtcccc

SEQ ID NO: 358228 - DNA, 1177 bp, Homo Sapiens
  misc_feature (171)..(171): n is a, c, g, or t
tcctggggtaaaggggaaagggggggaaggaaggaagttcaattaagggagagcgccggttcctttctttcagcattaagtggacaatggatggtccggattcggttttttgctggggacaaactccgggctgaagctttcaatgggggattcataccacaacagtgcttnttcaaattcttccattgccacgtagacattgcccagagtgaagtggttcacagcaaagtgtggtgcgatctctactgccatggtggctactatgacggggtcattccagagcttggcattgtgcaagatgttggccaggctaatcaggggcacatccttcatctggtgtggcgcatagtgcagagcctggcggaggcagtcgattgccttctttccttggcctttcaccctccagtagagggctgccatgctggagaggacccaggacgtctggttcttttccaaaactttggcaattcgggtgccaatctgttcaagcgactgttgtggatattggtctttgccgagattttgtaatacctctgttaactgactctcccctgtgtagtgcaggctggctcggttggaaaccccatgcaagtggtccagggtatgcatactcgtggggagattgccattgcaaagaggctccattgctggctgctgtataggggtggcaaaatctatgtgttctgtgatgtcaatgttttttgaagaaactgcaagccaggtactcacgatggcagtcagctctacccagcggagtttgaggcattcgtccgggctgggccatcccagacgctggtagtcacgtttttttcctggaaggaaagtatgccatgaatccacacaattgcaaaggaagagaacccaaagggccttatgccctggtgattacttcacctggattggtgtatttggaggtgctagtcattcctgtagtctttaacatttcccccatctatgatctaattaaaatctcgtcattatgcaatggaactaaagatcatctctgagtaaagataggtggagaagtaagaataaatgagtcctttgctagatttaagattgatcaacatgaaataaggggttaaggcattcttcaatgttaacattcttaccaaacttaatttttgcccctctgtattttgattttataaagacaacaccaactctcgtaccgaat

SEQ ID NO: 358229 - DNA, 1026 bp, Homo Sapiens
ttgggccaaaaaggcccaaattgatggttcaaattaggcttcttcccttttgaaggtaattgttaaaataaggacaggagtttttcctttcacctcgtttaatgcttggccctgatgaaccccttttcccaggtgatgatgcgtccttgggagctccatcatttagccacaaactcctttcaagctgagtccctgtcttcctggtattaagccggtaatttgcatgattgagccagttgtttatctttcgctccatcaaccaagtcacaattggggttgggagggaatttctcaacatgttctgaaagcgtgtcatgaacaccatgtcccatgggtagcccgagtcaaagattcggctgatcacccatccccctccggtggtgctgaggaacaccttttccgccaggtggctggcctccacagcaatgtctgtgccagaatttcccattccaatcacaaggactctcttgtccttaaatatatctggatgcttatattgccggctatgaaagtactggcctttaaaggcattaatacctggaaaggaatccagtggcaaataaggattagtaagaaagccagtgcagaccatgacagcatcaaagatggctgactcttgcttctcttcatgcatagtgaccacctcccattggccagagacagcagaatctgagcattttgttacactgcagactttggtcttgaattgaatgtgtttcagaaggtcaaagtggtttgcatacattttgagatattccaggaattgagaatttggcacatagtttggataatcttctgggaatggaaagtctgagtaacaagacatctccttgcagctgttggaaaccacagacttgtagagactggctctgccttcttcaacatgtccggtgaatctccacagccccccaaggtcatcgctcctctcaaagcaggtgggctccagtccttcttccagacagcacttgatggaggccaggccgctgaccccagctcccacaatgcaactcgcatcccgggaattcc

SEQ ID NO: 358230 - DNA, 697 bp, Homo Sapiens
  misc_feature (232)..(245): n is a, c, g, or t
ccgaaagataaccaaatgaatggctgagatggtgccccactttagaagaaaatcatttaattctgaagaggtcatcacttgcaaggcccaattaaaggtcatattcattcattcattcaactattcaatagtgaccatttattgagcagctctgtgtgtagagcactttatgagttaggtgccttgggaaatactgagatggatggcacagtcccagctcttgaggaacttnnnnnnnnnnnnnntcaatggggaaattacaatcttcaacagatgaataaacagtggcatggacagttaagggatttattttgaatgcttcatcatagaactaaatcacaaaatagtcatcaaaaagatgcaaaagcactgagctagaaggtagaatatcctagctccagtcctggttcagactcactggtcaagtccatcccctttcttgggttctaataccctttacaaaatgagtgggtagtcttcagagtgggttcttccagctctaggacgacataattctaacacttgtgaacagtaaggtttggtggtcagaactaaagaactcagtctcttgacaaagggaatgacgtttaatatgaattgttattgagagaatttaaagtcccacctaaaggaatatggaagctattccattccactggctattattgaatttgttcttagaagataatcaggccta

SEQ ID NO: 358231 - DNA, 427 bp, Homo Sapiens
agctgagctctatgtgtatttgatgacattgtcagctcttaccaaacgtcaagacctcttcctgcttgaccactcgcacatggctttaggcttctcctgctgagtcctggtcttggcctgtgaatgtgcctcgttcatccctggtgcttgagcccctcaagctccagtcaatgatccagtccttcccctttgaagttttctgctctactttccttggcagcagcctgtgaactactcaaaagagtccccttgggtttggaattatcagtggctttgccactagtaaatgtgtgatcttcggcaagtaacctaacctagggacatcagtttactcatctgcgaagtggggataataaaacctacctcagggttgcttcaaggattaaatgagaaaatatgtcaacaataaagacctgtctgtaccaat

SEQ ID NO: 358232 - DNA, 497 bp, Homo Sapiens
  misc_feature (73)..(105): n is a, c, g, or t
  misc_feature (324)..(372): n is a, c, g, or t
gttaagaataacgtgtcctgctttggcagagagaagaaaatagccactgcccgctttcaaggcaagatcgacnnnnnnnnnnnnnnnnnnnnnnnnnnnnnnnnncctggccatgaggacaaaaattactgagtggcccttaaagagggaagtttgttttcagctgttctcttttgcccgtaggtgggagggtggggattgctgcgtcctagctagaggaatggctttgcttgaatgtgtagtgcacacgcacgggtgtttctgtgtgctagttgcttcttgctgctgcttcctgcttgtctgggactcacatacataacgtgnnnnnnnnnnnnnnnnnnnnnnnnnnnnnnnnnnnnnnnnnnnnnnnnnaaatccttggagcttctggttcctatcagttcctgttgttaatcgtagaaccgttgtcccttcccccattcccgtatccatcatgttctttttcttttaaatatcaatataaaggtaaaagaagg

SEQ ID NO: 358233 - DNA, 745 bp, Homo Sapiens
  misc_feature (177)..(177): n is a, c, g, or t
aaaaagccaaattacgggatttacaaatatacgctcattgccatcgcatcagttgccactgtggaaggcaacggtcggcctttcgtatacgcaactgcaaaggggatgtctcaagcgattagtgggtacgcagggccagtcagacgtgtaaacgccggcaagtgtttttttattatntgtgtattgacattattttttaattatttagggtgtgctttggttattttttcaactgtcacactcagaactgaaaataaaatcttcattaatatgcctacttttattatttttaaaagctagtaataaaaaaatctaatgattaaacatccaattttaattaatcaggctaacctaattcatgtatttatttaataaagaacaattaagtgtcttgaatgatgaactattgctttaaataagtcattatggctcaggtggcttttctaagactttcatcttaaaatttccataacaataatatttactgtagtcattaaaaattaaagtcataaatagaccttcaacagatcctggaccacttgtctgtgtccaaaatagcatgccagatgtagaggtgtccagcccaagttagacttacttcttcctttgcaattaatgtcagcaatcacttcattcctcgccatggtctctaatagttgtcttacttcttcagcattgccatttctggcgtgatggagaagctgttgctccgcttctgtgttcatttctacgcggtcacccgggc

SEQ ID NO: 358234 - DNA, 842 bp, Homo Sapiens
aaaaaaaagaataatcaggagttccccattgctggagtacacaagcagaaacggaatgatctcctcacagggatgctacagagtgggggtctccatgaccttagtactggacctcactgtcagactcaaagatcctgtggccttttgacccaaagtgctggtgtatacatttttttgtgtggctttcttcggttgctggtcagatggttataacagagaaaacaatggtaactactcctccaaatacctcacttacaaacattgaacatagaatgattttcacctttcgtcctgtaaaggcagctcgatgaagcggcgtgtctcccatgtcattcaacacattcacttctgcaccagccttcaacagatcctggaccacttgtctgtgtccaaaatagcatgccagatgtagaggtgtccagcccaagttagacttacttcttcaaggtgcagatctggtgccaccttctgactcgatgtcttcacctctttgcaattaatgtcagcaatcacttcattcctcgccatggtctctaatagttgtcttacttcttcagcattgccatttctggcgtgatggagaagctgttgctccgcttctgtgttcatttctacgcggtcacccgggctcccagagctcccgaggcggtggccacgaccccaggcttcccgtccgcccgccccacgtcgaggaagtggtcgtcaccaactctggctggcactccccgaggacgctcgagcccgcgtaacgtctgtctccgggacccggcgccgggaccacggcggagcgcgaggtggcgcctcgtgccgaattcgccacccaggcctcgctacctagaccc

SEQ ID NO: 358235 - DNA, 510 bp, Homo Sapiens
  misc_feature (155)..(163): n is a, c, g, or t
aaaatgattaaatatgaagtaaaaaagcaagctaaaaattacacatgtactttgcaggagtatagactgtagaagatatatttgccattccttatacgtttaacttttgtgtgatttgccactttatatattaaatttgaataggtctcaactannnnnnnnngtaaaccagaggaataatactgttttgaatttcctaatttaatcctgaagacaaacttacttttatacccccatccatggctcactggtcaatgttttgagctatttccatttgttctcactcaggctcctatataaccctggcattagttatctcttttcgtctttttaaagcctcttggaacaagtctcctgccttccactctggatgtgttggtgaggtttgtgttggagtttgtggagacttgtgaatactatatccctccccatccaggggttccaacactgagcatctttctctcactgacatctttcagcaaataaattcttcccatatattgtcccttt

SEQ ID NO: 358236 - DNA, 457 bp, Homo Sapiens
tagactagtggatcttccgggctgcaggaattcggctcgagcatccagggagcctctgaggagacagcatttgaacttgctctaatgaatgggttcactaggtggaggtggatggaaaggttccataggcgaataacacgtcttgagcgagcctgacaagtcagaaaatgcagtatgttctgggaaaggagcgtcctgagggagaagaagcacaggtgtgagggaacatgtgatgaagaaaggaccacagaaagtcaaggtcagagattggactgcatcctgtgggcagtggtccaggtgacgatgaaaaagagggagaacaggtgagtgctgcagtacagacaaggagtaagaaaacggccatcatcttgtgaattaatacctactgtgtgttaaccagcccttttcctaacaccacaaatcctctcaacgtctgtccaaaaggtgggtggtggtg

SEQ ID NO: 358237 - DNA, 687 bp, Homo Sapiens
  misc_feature (104)..(144): n is a, c, g, or t
tcaggattcggctttagctcgagttttttattccttctttttcccttctcttcttaggaaccatcagtggacatgaatgtttctacaatgcatttcttcatagnnnnnnnnnnnnnnnnnnnnnnnnnnnnnnnnnnnnnnnnncagtgtgggagtgggaagaggagattatagtgactgaagaaagaataggcaaacttttcaaatgaaaatggatatttagtgtattttgtagaagacccccaaagatcctttggggactacaacttcttttgtaaataatgatatatggtatttccatcgtcagttaccgagtatagccactgggtatcactactttgtgttaaaagggccttcgcactttaagtacattacttaaatgttgcttttagctttgataaattgaaaatattttaatgtgttgtatttttgaaattgaaaacactgtaaaatagattgatgtgtcagctatattaagtcaacgtacagtttgcttgagttatagaaaccagcctgtcatcaaatgattctagttctaggactttgtaggcttaactataaaatatttcctttcctctgggtttaagtgattttatttaagtcaactaaggggatttaacagtggactagaggtaataagccacctcagtcaggattaataattcattaataaaatatatttaaccc

SEQ ID NO: 358238 - DNA, 277 bp, Homo Sapiens
  misc_feature (62)..(152): n is a, c, g, or t
aattaccctagtggatcccccgggcttcaggattcggctcgagacctgacttacacacaatnnnnnnnnnnnnnnnnnnnnnnnnnnnnnnnnnnnnnnnnnnnnnnnnnnnnnnnnnnnnnnnnnnnnnnnnnnnnnnnnnnnnnnnnnnnaacatgagcaaatacaaatgtgattcaccacataaataggatttttaaaaagccttagaatcatctcactagatgtagaaaaagcttttgctataatccaacatcccttcatgataaaaaacttc

SEQ ID NO: 358239 - DNA, 584 bp, Homo Sapiens
  misc_feature (512)..(524): n is a, c, g, or t
cattcaccttttatattgccttaattgagtatgctaatataatccatattgttttaaaaatgcatataaagcttgtcctgttttttggtctgaaatgtcccagtttcaatctcaagagccccaatataattttcaggtcacccagaatgtctgattcaggaaggtttaaacactaactctgagtacatagtaaaagtaatatttaaagttgtgttttaaatgtctgtgagaccattctggacaggcttttcatatgctttcaacacttaccatatgaacgatagaatacgtaccttgcctactccagcataatttatatccccattttacatctttacgtgtatttactacttgaacttgaatatgtgaatagagatgatacattcctgggtaatcaaaattaatttctgtattacatttgaacatgaatgtttcaacatatcttgcagaaaatgaagcacagtaataaatttgcattaaaatctaaagaacattctgaattatacttcccnnnnnnnnnnnnnaaatcacattttagaaatgagatctttttcatgccactcaatactcgtgcagagcattct

SEQ ID NO: 358240 - DNA, 1143 bp, Homo Sapiens
actggaagaatcggacccaagaacagtgtgttcacaatgaaaccaagaatgaattggagaagatgttgaaatgtaatgaggagcacccagcttatcttgcaagtgatgaaataaccacagtccggaagaaccttgaatcccgaggagtagaagtagatccaagcttgattaaggatacttggcatcaagtttatagaagacattttttaaaaacagctctaaaccattgtaacctttgtcgaagaggtttttattactaccaaaggcattttgtagattctgagttggaatgcaatgatgtggtcttgttttggcgtatacagcgcatgcttgctatcaccgtaaatactttaaggcaacaacttacaaatactgaagttaggcgattagagaaaaatgttaaagaggtattgtaagattttgctgaagatggtgagaataagattaaattgcttactggtaaacgcgttcaactggcggaagacctcaagaaagttagagaaattcatgaaaaacttgatgctttcattgaagctcttcatcaggagaaataaatttcgtactcataatcagctctgcatacatctgaagaacaaaaacatcaacgtcttttgtccagcctctttttcttctgctgttccacctttctaaacatacaataaagtcatgggataaaaataatcgatgtatgttacgggcgctttaaccatcagctgcctctcgaatggaagaacagtggtaatggattaacatcctattttgttgtactaaagtgacaaatcggaataatataattggtatggccattaggttcagtccttgaagataagaagcttgttctctgtttgttgtcttatttgtggtggcactcgtttaatggattaactgaggttgctcaatgttcagtttcttttccagaaatacaatgctaggtgttttgaaataaaacttatatagcaattgtttaaagttatcaattgtatataaaatcacagtagcctgctaaatcattgtatgtgtctgtagtattctattcccagaaactatttgaccatgataattcagtttatattcaccacatgaaagaaaaatgggtaacagaagaacccctaaaaaggttaatttggattgtaacgttcagtg

SEQ ID NO: 358241 - DNA, 523 bp, Homo Sapiens; identical to SEQ ID NO: 233124

SEQ ID NO: 358242 - DNA, 687 bp, Homo Sapiens
  misc_feature (59)..(59): n is a, c, g, or t
  misc_feature (121)..(153): n is a, c, g, or t
  misc_feature (597)..(624): n is a, c, g, or t
aaacaccaaaaggccccctgtcacaaaggatagacaggaaacatctacactgaatcaantaaggctcatgcttcaaaaacagggggctagctacacctggaatatgagcaaggctgttgcnnnnnnnnnnnnnnnnnnnnnnnnnnnnnnnnntccctgcactgaaggagtatattcatgggggtaatttactaaattcacaggtccatatttaggaatgtttggttaaaaaaatttacctgcccttcttcttaggaaggagtgataagagctttctaaaaactagagtcaagcaaaccatccaaagtgtgaaatgttttaccattaaagttcaaagggcacgtagaactgagaatgcaaaggcaagatggcagtgggaagaagaacgtgacttctgcgtcatttcctggtagctagcgtttagttaaccaaatggaaatacctcggctcagtgcaggattcagtagcagcagtttgtccatattcctgctccgatttgagctggaaattaaacaagcaccagttcatctcaaaagagccttatacaaacacacacgcacacatacccgcacccattcacatgtcatcaccaccccnnnnnnnnnnnnnnnnnnnnnnnnnnnnacctaaattccaaaaaagggcgacaggtattttaacaaaaatccatggctggtccagtacata

SEQ ID NO: 358243 - DNA, 1105 bp, Homo Sapiens
  misc_feature (756)..(763): n is a, c, g, or t
  misc_feature (766)..(851): n is a, c, g, or t
  misc_feature (1039)..(1050): n is a, c, g, or t
gggaggaggtgggggccgccccgcggagaagaagagcgggaagaggcggacagcgaggccaagatttcagctgcgggacggtcaggggagacctccaggcgcagggaaggacggccagggtgacacggaagcatgcgacggctgctgatccctctggccctgtggctgggcgcggtgggcgtgggcgtcgccgagctcacggaagcccagcgccggggcctgcaggtggccctggaggaatttcacaagcacccgcccgtgcagtgggccttccaggagaccagtgtggagagcgccgtggacacgcccttcccagctggaatatttgtgaggctggaatttaagctgcagcagacaagctgccggaagagggactggaagaaacccgagtgcaaagtcaggcccaatgggaggaaacggaaatgcctggcctgcatcaaactgggctctgaggacaaagttctgggccggttggtccactgccccatagagacccaagttctgcgggaggctgaggagcaccaggagacccagtgcctcagggtgcagcgggctggtgaggacccccacagcttctacttccctggacagttcgccttctccaaggccctgccccgcagctaagccagcactgagctgcgtggtgcctccaggaccgctgcgggtggtaaccagtggaagaccccagcccccagggagaggaccccgttctatccccagccatgataataaagctgctctcccagctgcctctcnnnnnnnnaannnnnnnnnnnnnnnnnnnnnnnnnnnnnnnnnnnnnnnnnnnnnnnnnnnnnnnnnnnnnnnnnnnnnnnnnnnnnnnnnnnnnnccgctccaaaattaccccctgggggggccaagttttacccggcacccatttttcttttgaaaaagggggccccctaaggggggcgctattaaaaatataggcccgggggccccttttttttcaaaccccggggattgggaaaaaagcgctcccttggggaatctttttgggaaaaaaccctctctttnnnnnnnnnnnnacaaaaattgggcaaaaaattccctccaaagaatatttataccccctccgggggg

SEQ ID NO: 358244 - DNA, 724 bp, Homo Sapiens
ggggaaatccatttggcttaattagagaattttctgaaggtgtagaagcatttttttatgaaccttaccagggagccatccagggtcctgaagagtttgtggaaggaatggcactaggacttaaggcactagttggtggagctgttggtggattggctggtgctgcctccaaaatcaccggtgctatggctaagggggtagcagctatgaccatggatgaagactaccaacagaagagaagagaagccatgaataagcaaccagctggttttagagaaggcatcactcgtggaggaaaaggcttagtttctggatttgttagtggcataacaggaattgttacaaaaccaatcaaaggagctcaaaaaggaggagcagctggtttctttaaaggtgttgggaaaggtttagtaggagcggtagcaaggccaactggaggcatcatagacatggctagcagtacatttcagggaataaaaagagctacagagacttctgaagtggagagtctgcgacctcctcggttcttcaatgaagatggagttatcagaccgtacaggtttgagggatggggactggaaatcaaatgttacaggtcatggaaaaatggaaagattggccaaataccaaatatttttaccccatgttcctggatccaataagacaggatattgctaatggataacccagaaccgtgggtggaattgggttttgttaacccaaa

SEQ ID NO: 358245 - DNA, 521 bp, Homo Sapiens
gggataggaactatactggaatagatttgatgagtgaatgggagatgaaaaactgaaggcagaaagtacaggtacctcttttgagaagtttggctgtgaagaagtttgcagagatgactgggtagctgggggaacaaacccaaattcagtgttagactttaataggcatactatttaaagcttcatctatcactagttcttttaacctttatttttttgagaaattctaagcatatgcaaaagtagaaaatgaccaaccctgccccatccacaatcctgtctacctcttcctttgcatcattttgaagcaaatcccatataatttcagttataaatatttcattatgtttccaaaagatgaacattaaaaaatgtaagcacaatgccattataacataaaaaattaatgataatttcttattaataaatatccgacttgtgttcacattttcacttttctcaaaaattgtcttagaattttacagattttaaataaggtccacttgcatatgggtgctatc

SEQ ID NO: 358246 - DNA, 390 bp, Homo Sapiens
  misc_feature (222)..(245): n is a, c, g, or t
cggtcagtgggatttagggggaattggtttaaatcaaatataggtaaaaaataatgacatgctcaaccttcctcatcatggagtaagaaaattctacatgattaaagaatccatgtaagtctaattttaaattcctagtaactagagaaaagacttatttatataaaatgaagtatttatgaactgtgataaagcatcaaatcttgatgaaggattgtaaannnnnnnnnnnnnnnnnnnnnnnnaaaacttattccaattgctaaattggtagtttttcagtctttataaatacaggattaaaaatatatatacagttatatgaaatgtttattttctatgtgtgtgcatatagttcaatattatgcaataaatttggtgttttaactt

SEQ ID NO: 358247 - DNA, 995 bp, Homo Sapiens
  misc_feature (971)..(971): n is a, c, g, or t
ggatgaagactcctatgggcgacctggatttaacgcggtggcggctgcataacttcagtatagcgatacattatacgaatgttatggatcaggccaaatcgggcgatactcgaattcgtcgagagcggccttctggcggagcgtgcttcccgctggcggggaacgtgtcgagcaatggcagccctgctgagatccgcgcgctggttagctagcgtgccggggcaggccccagcgcctcccggctctccctgcgcctcctccctggcggcccgggctcggctgcatgccgcctcctatctgcccgccgctcgcgccgggcccgtggccggaggactactgagcccagccaggctgtatgccattgctgccaaagaaaaagatattcaagaggagtccactttttcttctaggaagatttccaatcagtttgattgggctctaatgagactagatctttctgttcgaagaactggccgcattccaaagaagcttctacaaaaagtttttaatgatacctgccgctcaggtggcctaggtggtagtcatgccttgcttctactacgtagttgtggttctctcttgcctgaactaaagcttgaagagagaacagaatttgctcataggatatgggacacacttcagaaattaggtgctgtgtatgatgtgagtcactataatgctttacttaaagtctatcttcaaaatgaatataaattctcaccaactgatttcctggcaaaaatggaggaagcaaacattcaaccaaatcgagtgacataccagagattgattgcttcttattggaatgtaggagatattgaaggtgccagcaagattcttgggatttatgactaaggatcttccagttacagaggcagtattcagtgcccttgtgacagggcatgccagagctggtgatatggagaatgcagcattctcacagtgatgagagatgcccgaatttatctgtncagacacatactttgcattattgt

SEQ ID NO: 358248 - DNA, 676 bp, Homo Sapiens
  misc_feature (586)..(586): n is a, c, g, or t
tttaattctcctggtctgtgaaggattggtatgtgcagtcaatccacataataacaaaaagctcctgtttgaaaggacaatgttaaaaaacagtgtagacattaaaaaccttctgaaaaagattcttaaaatgctatcttccctcaaatatattcctgttaaatattaattcagtttgttgggtctaaaagaaaatgccttatagctggaaagacatcctttcctactgtcccatcaattaaccatgtctgctttgtgtttggtgtggaattaccaccattagaacacaccacaccttgactgctagatagatagtatatgagtacagttttaaattaacacagtattaaaggtaggatctaaaaaaatcttaacagattattgtaatgtagattaacagactaaagagtatttcccaaatagaccactccagtaatttgctaaaactattattattaccaatatgaaagtgtcccattatcccggtgactaatagcactggtatagaaaagggtggtgtagggctggcagggtagcttggtaggtgtctaaggaaccatcctgccttgtgctctatgactagctntaacctgcaagtcacaaaaatgcactcataatgaggagacgactagctttatttgacttctgagactttgtccatggtgtggaaagccga

SEQ ID NO: 358249 - DNA, 523 bp, Homo Sapiens
gtgtataatactgtagtttgtattaatacaataatatattttagtatgaaaatttggaaagttgataagatttaaagtagagatgcaattggttctcctgcattgagatttgatttaacagtgttatgttaacatttatacttgccttggactgtagaacagaacttaaatgggaatgtattagttttacaactacaatcaagtcattttacctttacccagtttttaatataaaacttaaattttgaaattcactgtgtgactaatagcatgatgctctgcagttttattaagaaatcagcctaaccatacaactctcatttccttagtaagccaaattaggattaacttctataaacagtgttgggaacaatgtttaacattttgtgccaatttgttcctgtattcatgtatgtaagttacagatctgactcttcatttttaagttccttgttacatcatggtcattttctagttttttaccagactcccatctcacaataaaatgcatcaacaagacctg

SEQ ID NO: 358250 - DNA, 1038 bp, Homo Sapiens
  misc_feature (67)..(67): n is a, c, g, or t
  misc_feature (640)..(706): n is a, c, g, or t
gatagacatctgtcaatccaggtcagtccagtccacagatcgatcaagtctcctctatcatgaaggnatagcccataactagtatttggggtaatgggagcatttaaaaaattgatattttaaagcttaaatgaaatgttatccaaatatgatttatgattattttccttctatgagtattctttaattgtggaaggcagtttttcacaaaattattgagtttaaaaaaattgatggttgttttgcatttcacctagtagcttattcaatggtttgtttttctgctaaatgttaaccgtcaaaacttgaattaatttcttaattgctatttctacttcaggaatcttaagaaagatggcttaacccagtcagaagggacaagcataattttcttccatggctatttaagtaagtattaggagagctttcacgaccatgctatagcttcctagtgacgcagaattggtaagacttgtgtgatatatacatgtgtgacttgttacatatcatagcaactgtgtagtgggaaggatgtaaacagtttctccttgcagttgaccatcattagaagaatcactgcattcccagtgtctgatgagcttcctagtcctcaggaaaatgttaagttctgatcccatcnnnnnnnnnnnnnnnnnnnnnnnnnnnnnnnnnnnnnnnnnnnnnnnnnnnnnnnnnnnnnnnnnnnccctctaaataaactccttgttaactgttccctgccacagcacacacaaaagtttataaaaatattgaaaggatagtctcacaaaaaaagcgaagtctgagtttacagactgagtatcaagtacatgcaaaaaagctttcatttcacccgtatataaatggtctagagaaagatacatgagaaaagtactgactacataacacagtctttgtggcacttaactaggggtaggggagggaggaaataaatagttcatagttagttagggtcaattctctgtcccatagtccaaactgggagatcccacaagtgtcccaagggcagtaaacatc

SEQ ID NO: 358251 - DNA, 664 bp, Homo Sapiens
  misc_feature (93)..(93): n is a, c, g, or t
cctgtcacacaggctcagtcccagctcaatcagtatcgtgaatcaaggtctctctcctctaatcatgaaagaaatagacccataactagttantgggtaaatgggagctatttaaaaaattgatattttaaaagcttaaatgaaatgttaatcaaatatgatttatgattattttctttctatgagtattctttaattgtggaaggcagtttttcacaaaattattgagtttaaaaaaattgatggttgttttgcatttcacctagtagcttattcaatggtttgtttttctgctaaatgttaaccgtcaaaacttgaattaatttcttaattgctatttctacttcaggaatcttaagaaagatggcttaacccagtcagaagggacaagcataattttcttccatggctatttaagtaagtattaggagagctttcacgaccatgctatagcttcctagtgacgcagaattggtaagacttgtgtgatatatacatgtgtgacttgttacatatcatagcaactgtgtagtgggaaggatgtaaacagtttctccttgcagttgaccatcattagaagaatcactgcattccagtgtctgatgaacatcctagtcctcaggaaaatgttaagttctgaaaaccatccaaaaagcctcgtgcc

SEQ ID NO: 358252 - DNA, 791 bp, Homo Sapiens
  misc_feature (306)..(315): n is a, c, g, or t
  misc_feature (699)..(699): n is a, c, g, or t
tatgtaacaagtcacacatgtatatatcacacaagtcttaccaattctgcgtcactaggaagctatagcatggtcgtgaaagctctcctaatacttacttacttaaatagccatggaagaaaattatgcttgtcccttctgactgggttaagccatctttcttaagattcctgaagtagaaatagcaattaagaaattaattcaagttttgacggttaacatttagcagaaaaacaaaccattgaataagctactaggtgaaatgcaaaacaaccatcaatttttttaaactcaataattttgtgnnnnnnnnnnccaccaccaaacttttggttgtaaaagagaacccttgttcccttcctaagaaactgccttccacaattaaagaatactcatagaaagaaaataatcataaatcatatttgattaacatttcatttaagcttttaaaatatcaattttttaaatagctcccatttacccaaaataactagttatgggtctatttcttccatgattagaggagagagaacttgattcaagatactgaaaaatagagctgggactgagcctgtgaatgacaggaatgatctattaccaggtgactagtcggaaactacacagacgtgcactggtctgcatttgggggctaaagtgtatatattccatttaaaatggaatttggtttggaattggggncagtcttcagtaaaagcctttctcctttcttttctccattgaggacagttctgctcagcaaaaattgttgagtaccctggttctgggcaggg

SEQ ID NO: 358253 - DNA, 819 bp, Homo Sapiens
gccatgtcgccgagggcgcggagccggggccggggtccgggtcctgggcccgggccggggccactctgccccgaacacggccaggctctgagctggttctgcggctccgagcgacggcccgtgtgctgccgcctgcgcggggttgggcggtcgctgccgggggcaccgcatccgccgggcggaggagcgcgccgaggagctgcggaacaagattgtggaccagtgtgagaggctgcagttacagagtgctgccatcaccaagtatgtggcggacgtcctgccggggaagaatcaaagagcagtgagcatggccagtgcagcgagggaactggttatccagcggttgagtctggtgaggagtctttgcgagagcgaggagcagcggttactggaacaggtgcatggcgaagaggaggcgggcccaccagagcatccttgacacaagcggggtgcactgggccgagggcgctgcgaaaactttgacacccatccggcactgggcctgggtgggcattgcttactccaacctgggattgacccttccagctggattccggaaatgcgagccaacaagaattctccgacgaagtgaaccggaacgtaaaggcacgaagtcgccattatttgggaaatcccgccagggaagttcggcacaattgtttcaaaccctttcacttgcacgacacgtgcctacttcgcgcgtgagccccacttaactgtgaacccacagctctgtggcccaagagggcgaggttacactgggcggactcctcctctacaggcacatcaaccgcaacatatagcgaatccgtttagcag

SEQ ID NO: 358254 - DNA, 960 bp, Homo Sapiens
  misc_feature (27)..(27): n is a, c, g, or t
  misc_feature (94)..(94): n is a, c, g, or t
  misc_feature (706)..(706): n is a, c, g, or t
caaaccaaggaaggccgcaggatgccntgagcagatgtcctcagctcagggggaacggctgcactgaggtaagaaatgcatgctgcccagatgnccgcgtgtgtcactccttgaagaacttccatggggagaacagtccaggcattctccaggtaggaaatataaatatagcgagccgtattgcaggccaggccaatgtacagaaccctgatgtggccgatcaattcaataagcttgtgactaaaaaaatatgctgtcagctcagacacatgactcaggactgaacagaccccaaaaagggttgtagttccattaaggtcttccaaatgccagtagagaaaggtgaacacgaagccatatccaaaacccatgaaccaagccacaaacagcactgagccatactgcacgctgcagagcagcttgattaagtcccaaaagttgaaggcctgcgagtggcttgtggtggttggtgtctcctcagaggactctgtagagttgttcctttccacctgcgggatctccacctctttccctttagaatcatcgtttttgaaatggttgtagcggaaccggaactgagtggcaacggatcaaggccatggtcatgagaacgccgaagacgatgaagacgatctggtaattcctgtactcggggggcttacacccctttccatcgatgagcacttcgatgtgggtgtagtcgatnccgatgcccacagacagcatcgccaggccccagcccagggagccccacatgcgctgcaacccatagcgatctctgtgttttcccagatactggagtgtgaccgtgtctacgattgtgacagaagaggcactgaaaaattctcctattatgacaactaccaagatcaccaagaatatagcttcaacttcttgttgatcataaacaagcatgacttggtcagaaggtaaagatttggtggtggtaacccagtaggc

SEQ ID NO: 358255 - DNA, 840 bp, Homo Sapiens
agcaatgcaagtacaagtaatccaaagctcgatcctgatctgcatgaaatagcatcataatgcaatccgcaacttgcatcattctcaatcaccagaaaatcaggtatcagttcaggagcatcaggtataagatgttcaaatttctatagatggtatagatggccaaaacagcatttcgttctaacatagctgtgtcgatgctccaaacatgcacgaatagctggcattaaaggttctagcaattctgcttctttcaatttgcaaagaaaacgaagagtagatcctcgaataaattcattaggatgttgaagatcctttctgtatgcatcacatacaaggatcatctcatgtaaaagtctcccatctggagttgttttaggaacaatttcccaaaataccagaagtaatttcttgatagtgtgatcctgaagaggtagcacaaaacgaatgatggtcatcagaagtccaggaagtttttcaccattcagaatcataatgattactttcttcaaagcttcagtctttgactttacatctcctttttctagatcattttttaagctaatttcagatggtggttctgaatccattggcacgttaattaacgtgtagcatacgttctcagccgccgtcatggtttctggttatattataaccaatccttgacacaagatttaaggatgccagaaaatcacgcctctgggactgggggcttgtggcccactaccaggctccgaggggcagtggtttggtgcagccgcggatccgtctactgcggctccgtctactccggatatgaaccgcagcagcggcggcggcggctccagagtccttggctga

SEQ ID NO: 358256 - DNA, 651 bp, Homo Sapiens
ggattccttgtggggaggctctaatttctccagagatgcttctctacttggaggtctgccctgtgtcgggagcattagtggccctgcagagaggtgggacattatttggatactcttgctcgtagggagtttgttgcctcccaaaaggtgtgtggcatttgtaagttgttctccttttccaaggttcttcagaagacttgaatatggtttgtaatctaggcgccaaaattgaaattccctccaaagagccacacaaataaatgacctcccataccattaagttctctctatgcatggcaatccctagttaaccccagacaggtaagaagagagagtgtttttcatcaatgacaaggaaagttttttctggctaatgtggtatagtagcaaatgcaactaaaaaggacacccccaagcatgtctttaattcatttgtacacatccaacaacatcacttttaagtacacataggtaggataaatatttagtcattaagtatctgaagttattgtaattctatttcagcactattcttttccctacattaacattaaagacattgttggagcaacttttattattcattagtgtgttttaaagtggacctgaacagtgctttttgtaagtatacatccgttctatgtctttgtg

SEQ ID NO: 358257 - DNA, 692 bp, Homo Sapiens
  misc_feature (647)..(647): n is a, c, g, or t
cccaggcagccagtaccagccaccagcctccgacccggattcagggagccccttcaagccactggtccctcagcagccccacttcccactgctgccagccctccccagtctccagcagaacctgcccatgccagctcagagatcttctgcagaaaccaacgagctgagggaagcccttctgaagatcttccctgactcagagcaaagactgtagaccagatcttggaggcccacccatacatgaaagatctaaatgcgctatctgccatggtgttggattgaagattgtgctgagcgctgagcttgcgctcagggctggctgatcaaactcaagctcacacctgtacctgatgggaatgaacataatgtgaagaaacttatttcccagtgtaaacgcagttgtacagaaaaaaaatgttttgggtataaatctgggttttcaaaaccagcttttttctatatataaattatgctgctattacagatttaacattttctgttaaaggaaagtctacattttctgcctgttcagaactgtttaatagcagttactcttgagtgtatttacctttttatgttttttaaactattttccttaaagccgaaaatattgacaaatggatatggttagcctttataaataaatnaaaaaaaagtgttgctttcttaaggaaagcaagacgtcttaaagt

SEQ ID NO: 358258 - DNA, 1316 bp, Homo Sapiens
  misc_feature (956)..(957): n is a, c, g, or t
  misc_feature (1061)..(1061): n is a, c, g, or t
ctgtgcctcagccgagctcaagcagctactgcgggcaggagtacccgtgaacaccggctcgtgtctggaggtggctggtccacctccgtgtcagcacctgcacactccaggctgctaccaggaactgctgagccggggccaggcccgcgagcaccctgctgcccgccagattgagctggacctgaaccggaccttccccaacaacaaacacttcacctgccccacctccagcttccccgacaagctccgccgggtgctgctggccttctcctggcagaaccccaccatcggctactgccaggcctgaacaggctggcggccattgccctgctggtcctagaggaggaggagagcgccttctggtgcctggtggccattgtggagaccatcatgcccgctgattactactgcaacacgctgacggcatcccaggtggaccagcgggtgctccaggacctgctctcggagaagctgcccaggctgatggcccatctggggcagcaccacgtggatctctccctcgtcaccttcaactggttcctcgtggtctttgcggacagtctcattagcaacatcctccttcgggtctgggatgccttcctgtacgaggggacgaaggtggtgtttcgctatgccttggccattttcaagtacaacgagaaggagatcttgaggctacagaatggcctggaaatctaccagtacctgcgcttcttcaccaagaccatctccaacagccggaagctgatgaacatcgccttcaatgacatgaaccccttccgcatgaaacagctgcggcagctgcgcatggtccaccgggagcggctggaggctgagctgcgggagctggagcagcttaaggcagagtacctggagaggcgggcatcccggcgcagagctgtgtccgagggctgtgccagcgaggacaagtggaaaggggggaagcctgacttggnncacctcccctcccacagccttcctcacccttggctggcagacccactggaggtcaggcacggaccagtggcaacacccctgggtgtcccatcaccatgtgaccnttggacatgtccctttcccctctctgggccctcagctttcccactggggaacatggggtgctgcaaagccatttggttggggctactttcttcatagggcactttacttacccaggggatggccacccttttcgtcacctcttccacagagcactttgggcatggaaacaagcaagagcactgccctcctatagggtaacctgagaacatttctctaagttatatcaatataaaaaccaaggtaaattgttaaaa

SEQ ID NO: 358259 - DNA, 702 bp, Homo Sapiens
aggacacaggcgtgagccaccaccccaagcccatcatccccgaggctgagactctgggactcagagagtataacccacgagagaagtagagctaggttcccaggggctccaagtctgagcgggaggacctggggtgtgtgattccacactgcccacacgcccgggttgggggttggataagtagtagatggataagctgggccaccccattcactatcttctcttccctctgcagcgctggggcctggaggcaaacctcttaagccaggtaagacccaaggcctcggagcattgagagacagcgagggagctggggagggaggagcctacccagctgggaatgggacaaggaaactaggaacaggacaaggaagccaacgggcaggaggaaggagggaggtgtggacaccgattagcctcccaaggatgagtaggccggggccaggtcccagggcttccaggaacaagaggctggaagcagctccatgtcctccctgtgtgagggcgtctagcatctaccctacatgtgcatgtgtgttcacccagctgtccagagactcctctctgcaaaggagaggctgttagaggcaacatcagggattgctccggttccagtggcctccaagccttacatgaccctcgggagctcagacacagatcctcagccccaacttccctgagtgtccgggttgttggtcctgc

SEQ ID NO: 358260 - DNA, 993 bp, Homo Sapiens
  misc_feature (801)..(801): n is a, c, g, or t
  misc_feature (842)..(842): n is a, c, g, or t
  misc_feature (861)..(861): n is a, c, g, or t
gctctctgttcaagtcattccacacatttccctattttaggctattataatatagaaagaaaatgggaagcattagttggagctagaaaatgaactgtatattattgctatatttgctaataccaactatttcaataagtgttgtaccatatgtagcattaaatataaaatacataaaagaatgtacagaaaatagcttttattgagtaatattacatttcatttatactgtagcaatatatttgtaggtatactatgtaagggctttaaataaaagaggtccattaatacttccttataaaaattctagtctgtttcattactgcccagatgttttagagataaatatttatgcagaaggtatttttgaagtctccttttgtctgatagagtttaacagatatttaaatttagtgctcagaatccacaagtcacggtctaaacacacttagaatactacagcataaatctgttagcattattgccaaataagacagttgggatccaaacccaagtcttgagcaatgtttttctcaaaaagctgctatccaatgatataggaaaatacattgtgttttcctaaacacacttttctttttaaatgtgcttcattgtttgatttggtcctgcctaaatttcacaagctaggccaatgaaggctgaatcaaagacatttcatccaccaatatcatgtgtagatattatgtatagaaaataaaataaattatggctctaacttctgtgttgctggttatcttggttattttcggcgttatactaatgtgtttattgagagcattntaccttccagacttctcatggctaacttttggtctgtattntgctccttagatgtgaatnattcttattagtctgcttcctgctacgcaatgactgcatttctatcatttctcagttggtagtatatgtggatagtattctactggataaatgattgcagtttatcacttattatatgtagcttttctacgg

SEQ ID NO: 358261 - DNA, 779 bp, Homo Sapiens
  misc_feature (136)..(136): n is a, c, g, or t
aaaaaaatgacgtacttccagaaagttcgggctttaagcccaacagtgtacagttaattgctttgttaaatttaaccaatcctggatttcaagatttaagcaatttctagttctcccacagaaacgaagattctgnatgtggttaatcataattagtcataaattaatcccatcactaaaaaataacttacaaagtaaaaaaatgaaaaatagatatttattgagaggaaaaggagaaccatttcccacattagagctctggtgttgagtattcagtgcgatttgatatattttaattgctattgcactataacaccctttcctttgaaaattctttgggtgtgcttccctgttctacctaaattagctgataaatcacacaaaccaataaccgagggccttatacttaaggaaaaagaaagtcattatgtatgtgccttgcacgtttatgtaaatacagttcacattgctggtctcatttgtccttgtttagaaggaaaaaaataaagagattattataacttcagctcactttgaaagtatctgtccactttttttcaaaatacttcctcatattgtggccagctctgcctatatcagaatcatcttcattaaatgtttcacagttgtcaaaaacaagcctgacatctagagcaaaggtttcaaggtttggatacctgaaagaaaacacataattagagattgcgttcatagagtggatttgttttgtaaacaaatgaagagttaataaagggtaaaaatgaaagaaaaatgattcc

SEQ ID NO: 358262 - DNA, 640 bp, Homo Sapiens
  misc_feature (133)..(142): n is a, c, g, or t
gtgaaccaccatgcccagccgaaaagcttttgaggggctgacttcaatccatgtaggaaagtaaaatggaaggaaattgggtgcatttctaggacttttctaacatatgtctataatatagtgtttaggttcnnnnnnnnnncaggaatacatttggaaattcaaaacaattggcaaactttgtattaatgtgttaagtgcaggagacattggtattctgggcaccttcctaatatgctttacaatctgcactttaactgacttaagtggcattaaacatttgagagctaactatatttttataagactactatacaaactacagagtttatgatttaaggtacttaaagcttctatggttgacattgtatatataattttttaaaaaggttttctatatggggattttctatttatgtaggtaatattgttctatttgtatatattgagataatttatttaatatactttaaataaaggtgactgggaattgttactgttgtacttattctatcttccatttattatttatgtacaatttggtgtttgtattagctctactacagtaaatgactgtaaaattgtcaaaaaaataaatatattaaataaatactggccgtcgtttaccgtcgtgctgggt

SEQ ID NO: 358263 - DNA, 1307 bp, Homo Sapiens
  misc_feature (1125)..(1260): n is a, c, g, or t
ggatatcaaacactgcacacttgacaagtgttttcattccccgccctctgacagaacaacattcctaattctttgaaggcaaccagtgcaaaggctactacacttgtgtaatgatatttagcagatgcatacaggactggatcccagggcactgtcagttcttccctccctctcgtgctgctcagtttgtcctctgctcccatgtaggcctaaagtcaccccactccttagtgcctgcacctcaccacgatattgaggaagcacaggacatccaagggtactctccagtttggctgtggagacttgagcaagccctaaagtcccctgctccctggacttctcctgggttgtgcttttttgggggcaacataccttggacaaagctgagctgacagctaatgtttattagcctcctacctaagtcagtcactttgctaaattcttcacctgtggtaactcattttgattgttataacatctcagcaccattattcccattttaatgatgaggaaactgagtcatagaggatacagacttgcccaaaggagagccaggattttcacaccccctcctcaagctgggcctgccctccaagtgcttgttatatacctccacgggtgtcagcccagatgactcctcacccatccaccacctgcagcttgagatgttaactattagagctccattcttttggttcaaaacgttgatacttacttagatgttccctgagaggagtgtttatttctgagtaaggggctttgttgaaagagggggttagagagagcaagacagcacttgagtgcactggcaggaagcagagataagacttgaatttcagtttggtagaccaccttctttagcagcccaacctgtagcaaatctagtttagcctgcatggcagggagagggattctcttcccaccctcaccatttgcaagtggcaggagctgagaatgccagtacgagagtgtagccaaagtgagaggctgagagcaaaggagacatttttttcagttttgagtcgagtatccagacagaggcaaatcattttgtttaactttttattaaagtgtaactatagaaacacatcaatgatttttcacaagtggagcacgtgcatacannnnnnnnnnnnnnnnnnnnnnnnnnnnnnnnnnnnnnnnnnnnnnnnnnnnnnnnnnnnnnnnnnnnnnnnnnnnnnnnnnnnnnnnnnnnnnnnnnnnnnnnnnnnnnnnnnnnnnnnnnnnnnnnnnnnnnnnttcttcgtatctggtttcttttcaccaatattatgtttgtgagattt

SEQ ID NO: 358264 - DNA, 941 bp, Homo Sapiens
  misc_feature (22)..(22): n is a, c, g, or t
  misc_feature (34)..(34): n is a, c, g, or t
  misc_feature (46)..(46): n is a, c, g, or t
  misc_feature (637)..(682): n is a, c, g, or t
ttccttctgaaaaacctcaccnaaactggtcccnaaatcatgaacngttaattttgtcctaaagaccgtattaaatactttgcactgcagcaccttctacaagaggacagccaaagaacttcacatgtgttatcactgggctcctctgcaagaggctgggaggtaaaggaggggcagggattgctgttacggccctctctgtcgtggggaggcctaggtaggactttgacactgagaggtcaaaggtatgaacgcagcctggaaactaatcattagagggggctaataaagattcggatgggctttcttctaattcaggctatttcaaatgaaacttaggtctaaaaggataagcagagagtgaggaaagagggcaagacatggaatacttatatttatcaagagtaactattgtaattctaccagggaagaagaatcttgggtttcacagtatgcttatgacctcatcctcagctactttggaatcagcttcccaaacattgttgttagagagttggcaaccacatctgttcttgaatttggcggactgtcagggggagatttatcctttcaattatttatacaaactctctatctctgaaaccagaatccaatttggaaagataaatacatctcnnnnnnnnnnnnnnnnnnnnnnnnnnnnnnnnnnnnnnnnnnnnnncattctgaactgagatctgcaaacaaaatctatttggagtgatatttggggcttttcctagaaattaaaatagcttccatcggtactcaccaaatggcatgttcctcgcttctttaaatttttaagactccaaaaagaaagtataaaatattatagttaacttatacagtttattaaattttatagagggttttcttgaattggatcatctaaaaggattctgaaatctgtctaagacaaatctcatctcccttttaat

SEQ ID NO: 358265 - DNA, 926 bp, Homo Sapiens
ctctgagagctccaggaatttggcacgagcagaaattgggaagaattactctatgtctgtatatcttgtacggcagcttacatcagccatgttattacagagattaaaaacgaaaggtattagaaaccctgatcattccagagcactaattaaagaaaaacttactgcagatcctgatagtgaaattgctacaactagccttcgggtatccttgatgtgccctttaggaaaaatgaggctgacaatcccatgccgtgcagtgacttgtacacatctgcagtgttttgatgctgccctctatctacaaatgaatgagaaaaagcccacctggatttgtcctgtgtgtgacaaaaaagctgcctatgaaagtctaatattagatgggctttttatggaaattctcaatgactgttctgatgtagatgagatcaaattccaagaagatggttcttggtgtccaatgagaccgaagaaagaagctatgaaagtatccagccaaccgtgtacaaaaatagaaagttcaagcgtcctcagtaagccttgttcagtgactgtagccagtgaggcaagcaagaagaaagtagatgttattgatcttacaatagaaagctcttctgacgaagaggaagaccctcctgccaaaaggaaatgcatctttatgtcagaaacacaaagcagcccaaccaaaggggttctcatgtatcagccatcttctgtaagggtgcccagtgtgacttcggttgatcctgctgctattccgccttcattaacagactactcagtaccattccaccatacgccaatatcaagcatggcatcagatttgccaggagaacaaagaagaaatgatattaataatgaactgaagcttggaacatcttctgatactgtgcaacagtgaatacaaaataaaacaaataatttgt

SEQ ID NO: 358266 - DNA, 425 bp, Homo Sapiens
caagacaggcgggtaaatcgtagctggtaatttgccataccggggccttaggttggtgttcttgggttactggttgctgcttcgaaggttcttgggagggagtaacttggcccgatcgaggaaagcggacgtggttttcttccgtaactgtttggatggatgttgaagagactttcgcaaccgtactgtgacttcctgatagcacgaggttaatggagcttatatagtgtgtgcgtatatagcttattgcgtgtcgtgacggctatatgataaaggaagtatgggcgatttctccttacgattagccgtcgttgaggaggtcgctacgttccgatatctagtagacttcctgatcctcgaaggggtattggatactaatcccgtccgggggacctcataccaggttcctacgacccaaaaagtcc

SEQ ID NO: 358267 - DNA, 1540 bp, Homo Sapiens
  misc_feature (170)..(170): n is a, c, g, or t
tgaagttaaaagtttcatcagaaactttacatatctttagcaaatatatttttatatgtgtatggcatataatggaaataattctttgagcaacagaagctattattaactactgcaagctaagccgagcttaaaaatgccttttgttttaaatgggctttgagaaaaanaacagaaacaagcgattatttcaaatcaaccaaccaactcagtatcctgtgttttgatagacaagagtttactaaatatattgatactgtaaatagcctctctcgctatttactatcttatagtaattcaggctctaattagctgagggaatgaaacacacaaaaatcactgaattcctaagagttccttaaataagcagtactagttacaaatcacagtataagatttaagtgcctgggggaaggatacaatttttagaaattacatattgggtcagttttgttttgtttttggtgaggaaaaggtggtaaataggaaaccatgaatgggaaggatggcaataagtagcaactatactttccaatgactaaagaaagaaaatctcagtatattcgttctcatgaagacacagtcagacactggacaatgtaatgtatgcaactgcaaacgttacaactgcagccagaacaatggctgggtggatcgcacgtaaagcttgccactaaaaatcaaagcagaggttaacaggaaacctggggggagtgtggaaaagggaaaactgttttagctgaataaaggtgaattatataatttataatagctgtggatgagcacaggagagagaggaaagaaaagaacagtcgaaatgagcaactcaccttaccctctgaccctgattagacaggatcaattgtaaagtgagggcttctccatgacaccatagttctgcccaatactgcatttgggataagaaattctacacttggatgtctcgcttcacaataaaacacagcttaaaaataaaataactgaaagaaatagaattcagcaaatagttattttttgcacttgaactgaaacgtactgtactgtaaattatgactcattttaagtgacctttaaaatcagatgtatttattatgcttgtgtaattatagaaataaagaaatgggtgacaggcttaacctcacctatgaatgtacagtatgtggatttgtgaaactgactgtaggaagtcaaaaacttgtactgtatcttgtgtttacagttctgatttattcctttgaaaagcctgctgttttggaaatgcacagttgacatgttgaaataaaaatgaataccatttttaaatgtttcttaaatgataaagatgtgaccaaacaaaagtcctatactctaatgaatgagaccaaattcaacatgcctttgttatggaacatttactgtgacagcagaatcgataatgcagtcatttccagccttgtgagctgacaccttcatgggtttgtggactttgtgactttttcttcctgtccccaaagtgccatatgctaccttaaaaaatattaaagtgaattcaaattacaaa

SEQ ID NO: 358268 - DNA, 809 bp, Homo Sapiens
  misc_feature (88)..(100): n is a, c, g, or t
aataatgctatcttatcctttttagtgctatttctcaggttttctcagtcaaccagctagatgcatgtgatgcatgtctatccttcannnnnnnnnnnnncatttctggattttcctgggatttctgacaacacaaaagtagaaagtgcttggtatttctgtcttatacataggaaaacatttaaaataaatagtttttaattgtaggctcaacatctgttaccccatagctttttcgtatattgtttctttccctttgaatttctttttactgtcatctattattttaacaggagttaaaataactcctgttaaactttctgacaatatcataagaattcatattaaaggtgttattctttctggttgtgagattctagcacaaaggcctaaaatcatcaaattagatttccatttgtaaacaaattctaatgggcaaaatatcttgagagcagtttttatatggattatccataaaatgacctttacatatccctgcagagttggccttttgcccgtggtgtgctagtagctttggctgatgctaagctttcctgggatgcgccctattttttaaagaagtaatcgcttttgaattaagttatagcattactaatccatggtaatgactaggaaaccctctgtaaatttacaagatttttcaaattggtggggagtgaataaataccattttaaaagagtccagaaatcagttttggcaaagggaacttttcctaaattccaatttatgaatgaattatagcccataatttattttgaaaaacctaactttatgggtataccagggg

SEQ ID NO: 358269 - DNA, 638 bp, Homo Sapiens
cccagccaaaggggaaaacacagggcccagggaattgtcacattaagaacaaaccccacggacccaccagaacccgttggactaatcagcctcaaatcgcagccttgcaattcaaagttaccacaggtaacccagaaagggagcacggaaagcaccgcccactgcctaaggctatgagatggaccagaaacctgtgcttactaaaaacctgccttattccagaaggaaatcaggaaacaccaaagacacttcacagtacagcaaaataaagtaaatgtgaatcatgttggctgaggagaaagtgaagagtctaagactatgtcataaagtttacctctactctaaactctcattactggtgagccaccaatctgactttaagctagcagctaaattgaagaggaaaatgtaatcaggtaaaggtttataagatgcaaacaaaacaggacagccaccacagtttctgagaagacgcgcagctccagctccaggagaaacagggtggccatctcctggggctgccccgcagcaggtgtgtcagccccaaagccagcgtctctcagggtgaacggtgactatgggcttcatggggccacacacctccagtacaagctgaggaaatctcccagggcaattca

SEQ ID NO: 358270 - DNA, 1996 bp, Homo Sapiens
  misc_feature (25)..(25): n is a, c, g, or t
cgggctgccggattcggcactaggngccaagtgtggagtagtttcaacaacagctttgtcagcgtctaccgccagtaacgccatggcgtctctttggagctcctgtgtggtgttgccccttctggctttgacgtggatgtctgcggttctggccatgacagataaacgctccatattgtttcaaatactttttgctgtgtttgattcattgcaaggctttgttatagtcatggtccactgcattcttcggagagaggttcaggatgcatttagatgccgattgagaaactgtcaggatcccatcaatgcagattcttcgagttcgtttcctaatgggcatgctcaaatcatgacagactttgaaaaggatgtagacattgcctgtcgatcagttcttcataaggatattggtccttgccgagcagccacaattaacaggaacactttctaggatttctctaaatgatgatgaagaagaaaagggaacaaaccctgaagggctaagctattcaacattgcctggaaatgtcatttccaaagtcatcatccagcaacccacaggtttgcacatgcccatgagtatgaatggagcttagcaatccatgtttgaaaaaagaaaatagtgaattgcggagaactgtgtacttatgtacggatgataatttgagaggggctgacatggacatagtccatcctcaagaaagaatgatggaaagtgactatattgtgatgcccagaagttctgtaaataaccagccttcaatgaaagaagaaagcaaaatgaatattggcatggaaaccttgccacatgaaaggctattgcactacaaagtaaaccctgaattcaatatgaatccccctgtaatggaccagttcaatatgaacttagagcaacatctcgcaccccaggaacatatgcagaatttgccctttgaacctcgcacagctgtgaagaatttcatggcctctgagttggatgataatgcaggactatcaagaagtgaaactgggatcaacgatatcaatgagttctttagagagaagaaaatcacgatattcagaccttgactttgagaaggtcatgcatacaaggaagaggcatatggaactatttcaagaactaaatcagaaatttcaaactttgggacagatttcgggatataccaaatacaaggcagtatgggaaaaccccgcaccaaacaagaatccatgggacactttcaaaaaccccagtgaatacccgcattacaccacaatcaatgtcttagacacagaggcaaaggatgctttggaactgaggccagcagagtgggagaagtgtctgaatttgcctctggatgtgcaagagggtgactttcaaacagaagtttaaaaaaatcaaaatggactaaggtagagacaaaactttattgcactgacacttaagacttgggaagcctgacatttctatctggacagtgtgactatcttatgtcaggaccttcatgtgcccaaacggtcagtggtgttttccatatggtaacttctcactagtcaggcttagtggagagatgaccaggtgtacagttctgaccatcctgtgttgtaagtacccgtggaatggatttgtaaggtaatctttatagataaacctcaagcaacgattcatgttgtaaccgcttcatatggtttagttttcaaaaaacttcaccatgaagcacaatgtatatatttatgccagtttttaaagtttataacagtctgtttggccattactacactttttactttataatataaaagcaaagtttttgtcattaaatgaatgtttgttgagctacattcttcattgctttaaatgcaataaagtaataatctcacttttatatgaataatatatttcacatctttattattgcagttttctctagaaagctctgagaagctttctctgctgcagctgtgtataaaatatttaaaatgttgtatggtgtaaataaacttttgtctacatatc

SEQ ID NO: 358271 - DNA, 685 bp, Homo Sapiens
gggggggcgtgctgggatctttctctctgactatacttagtttgaaatggtgcaggcttagtcttaagcctccaaaggcctggatttgagcagctttagaaatgcaggttctagggcttctcccagccttcagaagccaactaactctgcagatggggctaggactgtgggcttttagcagcccacaggtgatcctaacatatcaggccatggactcaggacctgcccggtgatgctgttgatttctcaaaggtcttccaaaactcaacagagccagaagtagccgcccgctcagcggctcaggtgccagctctgttctgattcaccaggggtccgtcagtagtcattgccacccgcggggcacctccctggccacacgcctgttcccagcaagtgctgaaactcactagaccgtctgcctgtttcgaaatggggaaagccgtgcgtgcgcgttatttatttaagtgcgcctgtgtgcgcgggtgtgggagcacactttgcaaagccacagcgtttctggttttgggtgtacagtcttgtgtgcctggcgagaagaatattttctatttttttaagtcatttcatgtttctgtctggggaaggcaagttagttaagtatcactgatgtgggttgagaccagcactctgtgaaaccttgaaatgagaagtaaaggcagatgaaaag

SEQ ID NO: 358272 - DNA, 718 bp, Homo Sapiens
  misc_feature (112)..(124): n is a, c, g, or t
  misc_feature (188)..(207): n is a, c, g, or t
  misc_feature (405)..(405): n is a, c, g, or t
  misc_feature (421)..(422): n is a, c, g, or t
  misc_feature (455)..(455): n is a, c, g, or t
  misc_feature (477)..(477): n is a, c, g, or t
  misc_feature (642)..(642): n is a, c, g, or t
agccccgatcatgggcaagggcagcctttcaactgtttttgaacaaagaagacagtaattactaaatatgcagtgttaacatgtatatccagattctgaaaatgtgccctcnnnnnnnnnnnnngatcttcccaaactatcattccacacatttaacctccttccataccaaatctttctcataaggnnnnnnnnnnnnnnnnnnnncgaattttattccctcttccctaatttcttgctatgaaggattggatacttatcacactaaaaaaattatgctgaaatgtaatccttaaggggcattttaatttctcattttttatttcaaaactgccaaacagaaatgcgaatttcagatatttaaagccagcccatagtgaatacagtgctacatcaagaggaaanacggccgggcgcggtnntcacgcctgtaatcccaacactttgggatgaanaacagagcacttcctaatcatngaaaattctccagattgtgatttaaaacttttagcagaatcttagaatttctaaagactgcaggaaagtgcctaagacaaggcaggattatgaaagccattatcactttctagcctacagtaatgctggataagatagatagaatatgacctgcctaagtttganaaaccggaacttttaagcattgtacgggtctcatataatacattctcaatataatatacggcatttagaagcttgc

SEQ ID NO: 358273 - DNA, 980 bp, Homo Sapiens
  misc_feature (391)..(405): n is a, c, g, or t
cgggtgtctctccatcacagctgcggctctggcttcttccaggaagtgaggtggttcgctccccgtgcagctgctgctgccgctgcgttcaacgctctgtaggcctgcacggcccgctctctctcctcctccacaatccgctggcgggccagggaggcggtcagaggctgggacacaccaccgggggctcagaagcatccgcagcatctgcgatctcctgccaggctggtccttgcttacgctcctctggggcctggcagtcagctctgggggctgcaggacaacctcaccaaacttcaccgtgtctcggagcaactcctgctccagcctgtctgccgccttttcctcctttttccgtcggactttatctagtcgccgcttctggaacgcnnnnnnnnnnnnnnnctgctcagacttctccttgggagctgcctgcacctctggctgccggatggcctggttcttgctgaggaacagcacatgctgggcctcttgctgcatgcggtggatataggccccgtcggactcccccttcctctgtttgaacttggggactgcgatgtcgggctcctctccctttgcttccttctccaatgtctttctgaaggtcacctgggctgctttcttcctcttcttgttactgatcgggtttttcatctcttggcggctcctcataatctcccggagccggaaaggaatctcctgttcgtcctggttcttgggcttgcagttcactttcttcttctctttgctgcgaagcccgggccacggggctgggcgctgcttccccagcggctgcacttgctgccgcccccgcgctcgccggggactcccaggacccgcctgcaccctggacaccgctgctccgcgaccagctcccgccatctccacgccgggaggctccctagcgaagccacttccgccttcctgcatggttccgccccaccgatcggcacttccatcccgggaattccggaccg

SEQ ID NO: 358274 - DNA, 1803 bp, Homo Sapiens
acatcaagggtactcctttcagtttaggtgtggcgctttccagaggtcatgggaaatatttcttccgagggaatgtaaccatcgaagaaggcctgcatgacttagaacatcccgatgtgtccttggcagatgaatggtcctactgcaacactgacctacaccctgagcaccgccatctgtctcagttagaagcgattaagctctacctaaaaggcaaagaacctctgctccagtgtgataaagaattgatccaagaagtcctttttgacgcggtggtgagtgcccccattgaagcgtattggaccagcctggccctcaacaaatctgaaaattctgacaagggcgtggaggttgccttcctcggcactcgcacgggcctctccagaatcaacctgtttgtcggggctgagcagctcaccaatcaggacttcctgaaagctggcgacaaggagaacatttttaacgcagaccatttccctctctggtaccgaagagccgctgagcagattccagggagcttcgtctactcgatcccattcagcactggaccagtcaataaaagcaatgtggtgacagcaagtacatccatccagctcctggatgaacggaaatctcctgtggtggcagctgtaggcattcagatgaaacttgaatttttccaaaggaagttctggactgccagcagacagtgtgcttccctggatggcaaatgctccatcagctgtgatgatgagactgtgaattgttacctcatagacaataatggatttattttggtgtctgaagactacacacagactggagacttttttggtgagatcgagggagctgtgatgaacaaattgctaacaatgggctcctttaaaagaattaccctttatgactaccaagccatgtgtagagccaacaaggaaagcagcgatggcgcccatggcctcctggatccttataatgccttcctctctgcagtaaaatggatcatgacagaacttgtcttgttcctggtggaatttaacctctgcagttggtggcactccgatatgacagctaaagcccagaaattgaaacagaccctggagccttgtgatactgaatatccagcattcgtctctgagcgcaccatcaaggagactacagggaatattgcttgtgaagactgctccaagtcctttgtcatccagcaaatcccaagcagcaacctgttcatggtggtggtggacagcagctgcctctgtgaatctgtggcccccatcaccatggcacccattgaaatcaggtataatgaatcccttaagtgtgaacgtctaaaggcccagaagatcagaaggcgcccagaatcttgtcatggcttccatcctgaggagaatgcaagggagtgtgggggtgcgccgagtctccaagcccagacagtcctccttctgctccctctgcttttgatgctcttctcaaggtgacactgactgagatgttctcttactgactgagatgttctcttggcatgctaaatcatggataaactgtgaaccaaaatatggtgcaacatacgagacatgaatatagtccaaccatcagcatctcatcatgattttaaactgtgcgtgatataaactcttaaagatatgttgacaaaaagttatctatcatctttttactttgccagtcatgcaaatgtgagtttgccacatgataatcacccttcatcagaaatgggaccgcaagtggtaggcagtgtcccttctgcttgaaacctattgaaaccaatttaaaactgtgtactttttaaataaagtatattaaaatcat

SEQ ID NO: 358275 - DNA, 689 bp, Homo Sapiens
  misc_feature (103)..(113): n is a, c, g, or t
ccgggctgcaggtgttgaataaaggacagaatatgaaatgctttgggatgagtctattcttggattttgaatgtttagttttgtttacccaaggttgaattgnnnnnnnnnnncagtcaatatggatttagaaaaaggaacacctgatgaagaaaatgagaggtagatacagtcagtgtcacttcaggacacttaggttttttttgtataaaaatttaaattgaattaaaagaaggagagaaaaggaaacctgttacagaaaagacaagaatctgtgttttggaatgagtctattcttgggtattgaacttttagttctgattgcccaaggattaattgaggaaatcagctaagaaaatggactttagacaaaagcaagaggatcagatgaagaaaaggagaggtagatacagtcagtgtcacttcaggaaagctatttaaaaaaactttgaaatttaattgaaagaagaaacaacaacaaaaaagcctaaacctagcctctgaacaacactaacatgagaacacaagaacttaagagaaaatgtaacctactcatgataagacagaagagacagtgatttgtgatgagtctactctaggactttcaacttttaagtttgttctttcaaagttaatgaaaaaattttgtatatattatgtattgtaatttctaggtgatgctctttttt

SEQ ID NO: 358276 - DNA, 951 bp, Homo Sapiens
cgcatttaaaatcatgtcacctacaagtttaattttcaacatctcatgtttttatttgtcccattacagcctcaaatgttggtcataaaaaaatttaggctaccaaagtttaaagaataaaatgaaaattttataagaacttacattaaaaactcagtagtttgcatgagtaagaactccttgagatacacagatccccccacatttgtatttaaaataattggtgaggcattgaaatccagaattataagaaagcattactgaatatgtgtgttataaaatcaatattattataaacaaaataggaagctagaaatatttgggatcacagtaatagcttttctcaaatatacttttagaattgaatgtacattatcctataatgtaaaaaagcaaattattaattttaatggagctctcgattgacctttttagcatacttttatagcatgtatattaaaatagaatatattttagcaaaagattgccataaaaccctgacttggctcattttgatatttgcactgtgaagagggcttaaattccaatgtagcaatgtggtggcagacaaatgactaggaagttctttcacagtaatgcctagttgttccaaatttgctatatttggaggtgctctactggtacttcctgcttgactctctgacctgtgggatgcacattcttcctcagcgctttttccttgttgtggtgacgtacattcactatctgagagtgaaagaccacacacacccctctttttaaaattattgtatctcttccttttcactttggtttgaacaaagatagtgtcaccttgttccgtgaaaaagaaaaagcataaacagtgtatatttagggtatatgggtgatagcttatgatgtgtgtcaatcagttctctgaatcttttactgaaactgagacaggaaaataaaactgaaacaaatcataaa

SEQ ID NO: 358277 - DNA, 1952 bp, Homo Sapiens
  misc_feature (1679)..(1679): n is a, c, g, or t
  misc_feature (1824)..(1824): n is a, c, g, or t
  misc_feature (1842)..(1842): n is a, c, g, or t
  misc_feature (1850)..(1850): n is a, c, g, or t
  misc_feature (1860)..(1860): n is a, c, g, or t
  misc_feature (1878)..(1878): n is a, c, g, or t
  misc_feature (1907)..(1907): n is a, c, g, or t
  misc_feature (1920)..(1920): n is a, c, g, or t
  misc_feature (1935)..(1935): n is a, c, g, or t
gatcatgatatgtttgagcatagtagctccctaaactcttggagcctttcagaaattccatgtagtgctaataacctttttacttgcaaatgataaagtaactgactcagtgtctttgggctctgcaggctttagcttgttttggtaggatgttcagtatattctcagaattttaccacctatttagctatacttcaagtactctattctctgcactaacttactgtccttctgggaactatgatggggcttcaagggagtcaggtgtcaagaaaggaggggtaagtactctctacttgctggaaaatcattgtaagtctgttgtgtatgaaattttaggaaaagtcttatatagttccctttccagactgttttcttttgactctaactataatcataagtctgtgcttccattatgaaggtcacattcctagcattcttgggaagtattagctcatactctcattcacatatgggaggttagatttttttcctctacccagagtccctttttagtttaccccacggcttagtttgctgtcagataccagttctctagcagattccccaacagttttttccccagtggggaggggtggaagggagggactgatataagtaaggagatgagtagttgtgttacagttcattttctttaaaaaaaagtattttgagaaaaggtgcaaaatattcttgaaagtctctaggccagccaaagtccacatatggatatttggggatgttatttaaatactcagcaggctgagtgcaggtatacgtgtgtatagagtgtgtatactttgcttttgttttataacattgtcagctaattttggctttgttctttggcatccattcttattataagtgatggaatgccatgaaatgtactgtattgtatattacttgggaggacactaggttttcaaagaagtctggcagcacttgggttatagagggctcagcatgaccaaagtcctaaagattttacctcccagctttggttgtatgtgttcccaagtggtgaggtgagattgtggctggaggaagaaaaaggatggcatgaaagaatgacccttattgtggtctgtccttctaatcaacataattagggcagcgtaccccaacatgaaaatgatgacctggccatttttaatggccagagcttgaagtctggtctctcattttgtttcagaaatgagtgagaggccttcctgcagagcagtcaggagaaatggtggagcctggggccctggaatggctgaccctgtgcctagagagctgatggcaagggctgtctggcatggctcatttgggtggggtttccccaggcataccttagttccctgatcctctgcaaagagtagctcattgactgagcaagcgcttcaggaggactgtgctggttgttcccagaccaaagagagtcacttttgactccatcaacttcaaggggacagagcctaggcagcagattctcctaatttttaacactaaattcaaggaagcagtggaggaaagaatgcattactaccacagatagaaataggggactcatagaactctcgactagtacctgtcagctctcaaatgcattcttgtgtctttgcttgagctgccaaagaagggtcacaaagtgttcttcctcatggaagaagtgcctcggggttgcagggctngcaaagtgacaactggcactggaatggacactttattttttggctttggcttatttatttaggcactggggagggcccagggggaatttggtggatttacagttaggcactttggggaagtttaaagccccctttgggctttgcnttgggagagatgatgggntgcttggnatttcctttnggtaatcagggaaggctncctagttccttcctattgtgttcagagtngggttaaccaccntgggagagtccactnccaaagagtagttgctt

SEQ ID NO: 358278 - DNA, 1202 bp, Homo Sapiens
  misc_feature (243)..(258): n is a, c, g, or t
ctccttgcaaagatgagaccatggaaaacctggaatccaagggcaaccaggccccccaggcatctgcgacccatcactatttttagtgtattgccagaagagatccgttcagaaaaggaccaaactattagtgtctgatgcctcattcagcagcctaggcatggtgctttttctgtggtcttttgcatctcaggaagataaccaacagtaatcccttgaaaagaaacttaagtacctcggtgnnnnnnnnnnnnnnnncttatggaaaaaaatataaaagatcacatatactgattttaaaggctcctcagtcatttggagcccttggattagcagcattaattaaatctcaagggtttcttgtaaagtccatttatgttaatcaaagttgaatataaaaatccaccattgcctgttagccagtcagttttagtcactgtgaaatatttcacattcagcctccatgcagtagagatttgagtttaatttcatgtccatgtgactttcatgtttcctatctcatagctcatgctactacataagccaaaacatgtatctcatcattggaagtaagatcagggctgatattcacctggggatagacagtattggtgaactactcatttactacagtgtctcagccttgataaagggcagtggattgcctgttgttcggtgttgtgaatagcacctctgaataagattagagtgtttcttaattcatttcaaactctaaaattagattaatggtggtgctaagaaagagtattaattactttgggaatggtcaaaattaacattaaaaacattttagacaaaaaatttcattgtacattcaaagaaaatgtaagtttggaagtactaaaagactattttatacttgttgattaatcggaaatgtttggttgtatgcccttcattttcccatttcacttatatgtgtatgtccatatatgttaattttcattgtagcaaagctaatggaaataaagctaatgctctagttgaaagaaaaggaaaactcctgaaatcctagaatgtcttgttatttttagctgactgtaaaatattatgaacagtctttgtgtattgtgcttaatgcttttgtaagaaacagaatttgaaatatttcatccttgtcatgctcaaaattttgttacatgcttgttattcagagtataataaagttttgtacaggcctg

SEQ ID NO: 358279 - DNA, 1551 bp, Homo Sapiens
gggacccagaacctgctatgcggaacaaggctgatcagcaacttgtggaaatagacaaaaaatatgctggattcattcatatgaaagcagtggctggtatgaagatgtcttaccaggtacaacaggcaatcaacacatgcctaaaagatcctgtaaggggtttcagacaagacgagtcctctagcgctttgtgttcacacctttactccatgatccgtggaaaccgccaacacagacgagcctttcttatttctttactcaacctctttgatgacacagcaaaaacagacgtgactatgctcttgtatatagcagacaatctagcctgttttccataccagacacaggaagagccgttgtttataatgcatcatatagacattacactctcagtttctggtagtaacctactgcagtcattcaaggagtctatggtaaaggacaaaaggaaagagagaaaatcatcacctagtaaggaaaatgagtcaagcgacagtgaagaagaagtttccaggcctcggaagtcacggaaacgtgtagattcagattcagattcagattcagaagacgatataaattcagtgatgaaatgtttgccagaaaattcagctcctttaatcgaatttgcaaatgtgtcccaggggtattttattacttctcatgttaaaacaacatttgaagaatctttgtggattttctgatagtaaaattcagaagtactctccatctgaatctgcaaaagtatatgataaaagcgataaaccgaaaaacaggagttcattttcatccaaaacaaacactggacttcctgcggagtgacatggctaattccaaaatcacagaagaggtgaaaaggagtatagtaaaacagtatctagatttcaaacttctcatggaacatctggaccctgatgaagaagaagaagaaggggaggtttcagctagcacaaatgctcggaacaaagcaattacctcactgcttggaggaggcagccctaaaaataatacagcagcagagacagaagatgatgaaagtgatggggaggatagaggaggaggcacttcaggggtgaggcggaggaggagtcaacgtatttcgcagcgtattactcattgagaaggtcaaaacgaaattcagactctacggagttggcagcacagatgaatgaaagtgttgacgtcatggatgtcatcgctatttgctgtccaaagtacaaagatcgaccacaaattgcaagagtagtgcagaaaaccagcagtggcttcagtgttcagtggatggcaggctcctacagtggctcctggactgaggctaagcgccgtgatggccgcaaactggtgccttgggtagacactattaaagagtcagacattatttacaaaaaaattgctctaacgagtgctaataagctgactaataaagttgttcagactttacgatccctgtatgccgccaaggatgggacttccagctaatgaatttgtacatgcagccaaatttacaggaatttttttaaaaggcagaaaaacttgaaataccaacattctggc

SEQ ID NO: 358280 - DNA, 627 bp, Homo Sapiens
  misc_feature (41)..(126): n is a, c, g, or t
cccccccaaagggatacctgtcattaagtgatgcatgactnnnnnnnnnnnnnnnnnnnnnnnnnnnnnnnnnnnnnnnnnnnnnnnnnnnnnnnnnnnnnnnnnnnnnnnnnnnnnnnnnnnnnnatacacaaaagtggactactatacagaaaagtgacttcccttcattaagggaaatcaagttgaacaactagggatctcaatagccaaaaacctagaacagttattctctaacaatatttgaggtaatcggttcccaaagcgattagtttagtgatgttgcttatttaaagatacgcttacagaaactgttatcaaagtttataggatattcagtatggaggcaaaattatacattattcctcattacacttattctcatacaaaatttccccttcacttctgactgtgtactttgtaaataacttagaagattaagaaaacacttaatgaagttactatcatatactaataaaatggtaatatttaaaaaatgactactttatccataaaatttctagagcacttattttcttaaaataataagtttttgtgcttactgctgtgtcatcaaagaggttgagtaaagaaataagaaaggctcgtctgtggattccattgggg

SEQ ID NO: 358281 - DNA, 700 bp, Homo Sapiens
ggccattgtccgaccccggtgcggctgaggcccctttgggcagcccctccgcagatcagaattggagacaaccgagccttcggcgggggcgggaggagctgcccgaggctctgggtgggccggaggtcacgaaatccggagccccccagaggcgctcctgccccggagccgggccctggcgaggcaggaatggccccgaggcctccgaccgccgcgccccaggaatcagtgacattcaaagatgtgtctgtggacttcacccaggaagaatggtaccatgtcgaccctgctcagaggagcttatacagggatgtgatgctggagaactatagccacctggtttctcttggatatcaagtttccaagccagaggtgatcttcaaattggagcaaggagaagagccatggatatcagagggagaaatccaacgacctttctatccaggatttgtctgcctcctgccgctgtcgctaccatctgggagtaagggcgaaagaagacagaaacttccaagaaagaatcctgagtgatgtcagcaagaatggctaagtaaggacctccagaagttctctgccccgtacaagccatgcaaatactgacaaaactgtgagaatcagatttttcacaactctggaacatttattccagcaagcagcaaatgttccccttgcagcaagctaggaaacatttatttaaaaa

SEQ ID NO: 358282 - DNA, 1439 bp, Homo Sapiens
  misc_feature (1167)..(1167): n is a, c, g, or t
  misc_feature (1191)..(1191): n is a, c, g, or t
  misc_feature (1296)..(1296): n is a, c, g, or t
  misc_feature (1336)..(1336): n is a, c, g, or t
  misc_feature (1392)..(1392): n is a, c, g, or t
  misc_feature (1400)..(1400): n is a, c, g, or t
  misc_feature (1409)..(1409): n is a, c, g, or t
agactatggctaggtacgaggctcgggtgtcgaattcggcacgaggaccacttattatctatacagatcgtcgctatgacatgctgccttccgtcctcagtgcagatttgtgttcccttctgggaggcgttgataggtatgctgtaagcatcatgtgggaactggataaagcctcttatgaaattaagaaagtgtggtatggcagaaccattattcgatcagcatacaaactgttctatgaagcagcccaagaactactggatggaaacttaagcgttgttgatgatattccagaattcaaagacttgggtgagaagagcagacaagccaagctggaggagttggtgtgggcaattggaaagctgaccgacatagctcgccatgtcagagctaaacgagacggatgtggtgccctggaactggaaggggtagaggtttgcgtacagctagatgacaaaaagaacattcacgacctcatccccaagcagcccctggaagtccacgagacagtggctgaatgcatgatcctggccaaacactgggtcgccaaaaagatctgggagagcttccctcatcaggccttgctgcgccagcaaacctcctccagaccaggagttcttttcagaactccgggaatgtgctaaagccaaaggcctcttcatagataccacggtccaataaaacactggctgattctctggataatgcgaacgacccccacgatcccattgtgaacaggctactgcgctccatggccacgcaggccatgtcgaattgctctgtacttctacaccggatccctgtgcggaggaggagttccatcaattacggtcttgccattcagcatacaatatacccaatttacttctccaataagccaagatattcagatattgtagtacaccgcttgtaaatggcagacatttcaaaagataagaaaatggaaattaagggaaatctgttcagcaacaaagatcttgaggaattatgcagacatatcaacaacagaaaccaagcagcacagcattctcagaagcagtctactgagctcttccagtgcatgtacttcaaagacaaagaccctgccaccgaggagcgttgcatatctgacggagttatttattcaattagaacaaatggtgtgcttctatttataccaaggtttgngattaaaggtgctgcttatctaanaaataaagatggtttagtcatctcatgtggcccagatagctgttctgaatggaaaccaggatcccttcaacgatttcaaaacatacctctactacaacagatggngaaatctgtacgttccatttgtttgaccatgtaaccgtangaatatccatacagggcctacgttgccattctgatacaatcagacttttgaataantagtacanaccatacangatacctacagaacttaatcatcggtcccc

SEQ ID NO: 358283 - DNA, 660 bp, Homo Sapiens
caggatttacacaagattttcaatcttgtataaataacaatgactaacatttcaagtggcttaggaatcacccaaacaattgcatctgcacattttatatccacaaaaagagctgaagatattaaatgtggccataaacagaacctgggaaagttatacagtcacatctgtgagagacaatgaatccagaggtgtacacagtgtccaccaaggtcctgagatcctcatttctcttccttgtttgaggtatccatgctatcattcattttctgcttttgcattcgtgttcgagtagaagtcatttctgccagtttctgctgaaatttggactctcctgggagatgtttacttccatctgcttcatctgatccttcaatatcaaagcgtagttttttcagtggtttaggagggttgcttccttcagcacttcttttgagcacacggtcgctgttacataccatctgatttattttctggaacttctcagaagtctacaaattacagaattctttactttaaatcattaaatgccagtgtttcatagttagcaacctcaagttatagtttgaggtgtgtcaaaaatcaggcaaaggtaataacttcatttaaattttctgcttcattggaccaaataaaagatatgaaaaatctaaaaatcag

SEQ ID NO: 358284 - DNA, 863 bp, Homo Sapiens
  misc_feature (771)..(771): n is a, c, g, or t
  misc_feature (777)..(777): n is a, c, g, or t
gggagacttgagtggccggaacccttgagaccagaggcttaccatgctgctccctaggagggccaggaactgctgacgtgaccactggacagttattcgtgtctcttacaattaccaaacagaatggacaagcttaataaaataaccgtccccgccagtcagaagttgaggcagcttcaaaagatggtccatgatattaaaaacaatgaaggtggaataatgaataaaatcaaaaagctaaaagtcaaagcacctccaagtgttcctcgaagggactacgcttcagagagccccgctgacgaagaggagcagtggtccgatgactttgacagcgactatgaaaatccagatgagcactcggactcagagatgtacgtgatgcccgccgaggagaacgctgatgacagctacgagccgcctccagtagagcaggaaaccaggccggttcacccagccctgcccttcgccagaggcgagtatatagacaatcgatcaagccagaggcattccccacccttcagcaagacacttcccagtaagcccagctggccttcagagaaagcaaggctcacctccaccctgccggccctgactgctttgcagaaacctcaagtcccacccaaacccaaaggcctccttgaggatgaggctgattatgtggtccccgtggaaggataatgatgaaaactatattcatcccacagaaagcagttcaccctccaccctgaaaaagctccccaggggggaatagaatcaaccaggccaaaattnctcaanggcccgccttctcctccaggaaacagctttcaggtcgaaaacagtgggggccctggggaaacccagggcaccctcccaccaggcta

SEQ ID NO: 358285 - DNA, 1123 bp, Homo Sapiens
gcccttaaattttccatttcccattttccatgggccaaaggaaatggaattattgggcccctttttttactttgttacctttttcaaaaatagaggagtaattaaggttcaattcaaagaaacgtcccatcaccaattttaaaactgagtaaaaaggaagtgaccctgttacaaatgacaacaatcagggtatgcaccttgcagaagtgctgcctcagtacgtctaatgagttacaggcacccactgcaccaaaaggtcccctgggtcccattccagaacccctgacaatgtccacctctagactagtgtttgaaaaactcagaattctttttgaactaagaagctggctgccgtaacataagcggcaaaaccaatccaatcaggaagtaagaattggttggaaaattcatagataggcataatttatgatccctgatatggtgtggtagttttcagatgtggatagtgtttgtcatcattaggtttgctgggaaaatgtatcctgctgtagctgggctagagatccacacagctggtccacagcacagcacagccagctgaatgaatagacaggacatgaaagtgtttgcttttcaaagaactgctaaaaccaaaggcagtgtacagaaggctggtgacctgaaccttcattcaggaggaacactactcctcaggtttcccttctctcctctatgcgccaaatttaagacaccttaattggtacttcgcactcacaaacacacactatcataccatgaagatactcattaaagatactgcacgtatctatgatgagaatgctgcagctccttgctttagaactgtctgcacctaagcaattcaaggggcacagatgctggagcttcacacaaagtccttgtatctttaaactacctcacatcaaacagaggaaaggatgacaccccgacttcccaggaaggcagaatgtgttctcagaagcaaccaatctactccaaactcaacttcaaaaatgacaggagaaacattacattaaataagagcatagaaataacatttcactgtggaatgctcagtggttaaaagtgttacagtgtttcacgttttagcaaaccttactcttacaggccttctaattcgctt

SEQ ID NO: 358286 - DNA, 725 bp, Homo Sapiens
ccacaccgggccagccaacccactctccaagaatcccccttctccctgtccagttctggccaatagccaaaaccccacgggtggcccccactcgtcaaagattggtggtgaagggtacagcagtggtgcccacgggggcagaaccatgctacaggccaagacagaagagagggccgggctccctgtctcaagcccagccggcgctgaccttggcagccacttcaggcctgataatgggcagggatggaggccgggagggccagaagaggaatgtacctggtggcagggaaggagacctaagtggcaggaagcccacgttcagccgaggaaatggcagcaggacgaggtggcaggattgggtgtcttcctggtgttggcattagagggccctggggtgagcaggggagtgttgtcttatctggggtctcagtgggagggaaaggaaggaataccaactggagaggaggcagagtagtcatgacagcccaccaagtgcctgcctggccgctggaggagttctcccctcagagcctccagtgtgggtggcggtgtccgctgccccaggaggctctgactgagtgggctatggtccggggacacgggccggctaaaggcactaagtgttcctcctgtgccagctcactgagccacctctgtccccccttcctccctattgcttgttaaaacaagccagcaaagaatagacaggggctacaccctgcctg

SEQ ID NO: 358287 - DNA, 1108 bp, Homo Sapiens
ggtccggaattctcgggatctctcctggagcgctgggccttcgctggccgcaccggcagccatgagctcggagatggagccgctgctcctggcctggagctattttaggcgcaggaagttccagctctgcgccgatctatgcacgcagatgctggagaagtccccttatgaccaggcagcttggatcttaaaagcaagagcgctaacagaaatggtatacatagatgaaattgatgtagatcaggaaggaattgcagaaatgatgctggatgaaaatgctatagctcaagttccacgccctggaacgtctttgaaactccctggaactaatcagacaggagggcctagccaggccgttaggccaatcacacaagctggaagacccattacaggtttcctcaggcccagcacgcagagtggaaggccaggcactatggaacaggctatcagaacacccagaaccgcctacacagcccgccctatcaccagctcctccggaagatttgtcaggctgggaacggcttccatgcttacaagtcctgatggaccatttataaatttatctaggctgaatttaacaaagtattcccagaaacctaagttggcaaaggctttgtttgagtatatctttcatcatgaaaatgatgttaagactgctttggatctggctgccctctccacagaacattctcagtacaaggactggtggtggaaagtacagattggaaaatgttactacaggttgggaatgtatcgtgaagcagaaaaacaggtttaaatcagcccctgaagcagcaggaaatggtagatacatttctgtacttggcaaaagtttatgtctcattggaatcacctgtgactgctttttaatcttttcaaacaagctttacataagttttcagggagaagtaaccctggctctgtggaattgccagaaatctattgaggaaatgaacaatatggtcatcagccggcagaatatttaccaaggaagttttgaaacaagacaataactcctgtgggaaacccatcgccaggctttgggaagcaaccccccttctattcggatccgccacgaaaaaaccctctccgggttttaacggggggg

SEQ ID NO: 358288 - DNA, 1069 bp, Homo Sapiens
ttacggtgcgaggctgggtgccgaattcggcacgaggccgtctctcctggagcgctgggccttcgctggccgcaccggcagccatgagctcggagatggagccgctgctcctggcctggagctattttaggcgcaggaagttccagctctgcgccgatctatgcacgcagatgctggagaagtccccttatgaccaggcagcttggatcttaaaagcaagagcgctaacagaaatggtatacatagatgaaattgatgtagatcaggaaggaattgcagaaatgatgctggatgaaaatgctatagctcaagttccacgccctggaacgtctttgaaactccctggaactaatcagacaggagggcctagccaggccgttaggccaatcacacaagctggaagacccattacaggtttcctcaggcccagcacgcagagtggaaggccaggcactatggaacaggctatcagaacacccagaaccgcctacacagcccgccctatcaccagctcctccggaagatttgtcaggctgggaacggctttgttctgagtatatctttcatcatgaaaatgatgttaagactgctttggatctggctgccctctccacagaacattctcagtacaaggactggtggtggaaagtacagattggacaaatgttactacaggttgggaatgtatcctgaagcacaaaaacagtttaaatcacccctgaaagcagcaggaaatggtagatacatttctgtacttggccaaaagggcatgttctcatcggatcaacctgtgactgcttttaaatcttttcaaacaaggggttagataaggtttcccaggagaagtaacccctgcgtctgggggaattgcaaggaatctatgaggggaaatgaacaattatgtcatcccccagccagaatatttacaaagaaagttttggaaaacaagaaccataactcatggtgggaaacccatcccaaggcatttgggaaaccaaccaccttccaaattccgggaacagcccaaaaaattactcctcccgggttttaaagggcgggcttgccttca

SEQ ID NO: 358289 - DNA, 767 bp, Homo Sapiens
  misc_feature (687)..(723): n is a, c, g, or t
ccggatccaccaaaagagcagggtaagtgtcacagagctcatagcacttattaataaaagttattctccaatggtgattgggcaagccctgcctcctgtattcttccactggattgtaaactgtccatccatccacgttaaacttttcttcatttaaaaatgcaaataatggcagactgtgagccaggggaaacgcgtatctcgtgaggatctcaaacatatctcttctgctgtggccttcctgtttcaaagcgaacctcaggtttctcatgtctttacaagtaatatctagaccataggaattttctcctctacttgtcgcgcctcccattttttcaattctcgagatcacacccagaggaacatcaagtattagagaagaatccgtttccaaacttcttaaataaagacgataatttgtgatgtaaactcttcccttaatggggccattgaaaggacatatgtaaataacttctttgtcagtgattagtgtttctcctggaagtcgaggaacagcctcagtgagatctcgattgactccatctcgagacgtcctcttaatagactcattctccaaggagtgtgaattatatttagaagttgatgcagaagccatcctggaaactctcgggctccgggcgccaccccgctctcgacgaattcgagctcggccgatttggcctgatnnnnnnnnnnnnnnnnnnnnnnnnnnnnnnnnnnnnncggccgccccgcgtgcactccagtccccatagtcattcccgttc

SEQ ID NO: 358290 - DNA, 531 bp, Homo Sapiens
ccccgggctgcaggaattcggcaccaggatcatcccacatccttagcactacttaaccttcttttcctgaagattacatatcagtgtcctgcgtttttatctaatattagagctgaggttcctaggaaaattttgaagtggggaagattatggagaaaatgaaatggaaatttggggagggtggtttgtcagtataaggccctgtggggtaatcatattttagttattacttgttaaaagggtaacagaacctctgtttctttaccaagtcgctggttggccatttctccaattgatgaactaccattggttttagctctttctcatttgggattcccctcaattgcttacatgattctggtacttagagtctaatagagttgctgtgaatatgtagtgctgtacataatggcagttttgtaaatgtgagataaccttgaatatgttgtggtttgtatacagagccattagtattgttattttggccacttttttattcaaaataaataacataattatttgtaaaaaaaa

SEQ ID NO: 358291 - DNA, 1329 bp, Homo Sapiens
  misc_feature (944)..(944): n is a, c, g, or t
  misc_feature (963)..(963): n is a, c, g, or t
  misc_feature (1065)..(1065): n is a, c, g, or t
  misc_feature (1112)..(1112): n is a, c, g, or t
  misc_feature (1114)..(1114): n is a, c, g, or t
  misc_feature (1121)..(1121): n is a, c, g, or t
  misc_feature (1177)..(1177): n is a, c, g, or t
  misc_feature (1242)..(1242): n is a, c, g, or t
  misc_feature (1280)..(1280): n is a, c, g, or t
ttctgagtggggaaagggactaaggtggtctgaggaccccacagagtcacgaagatccacagcctgataaaggtcctgcgggcaggacaggacctcccaaccaagccctccagcaaggattcagagtgcccctccggcctcgccatgaggctcttcctgtcgctcccggtcctggtggtggttctgtcgatcgtcttggaaggcccagccccagcccaggggaccccagacgtctccagtgccttggataagctgaaggagtttggaaacacactggaggacaaggctcgggaactcatcagccgcatcaaacagagtgaactttctgccaagatgcgggagtggttttcagagacatttcagaaagtgaaggagaaactcaagattgactcatgaggacctgaagggtgacatcccaggaggggcctctgaaatttcccacaccccagcgcctgtgctgaggactccctccatgtggccccaggtgccaccaataaaaatcctacagaaacgacaacaaaacaccacagagaaagacctggcgaacgcaggcaaccggcaaagccaacccaagaccgcaacgaaaagcggcgagggctgacagcgagggagaacaagaaagaaaggcagccgctcgggtgccccgcccccgcgcgtagagaagaacactggcaagcagccctaacgccacggggccggtggggccgccaatcgaacaaccgagaaaccccgggagccacgcacccgggttcgacaccgagcgagacaaccgcgccgtctcttgggaacaccgccgacgtgccacgcccgacgctcggaccgcacatacagaaacaagacacccgggcaccacaggacgcgaccgatacactaacgaagagcgcgcgtagggcggtacaaccacaacacgcgccaccgcgcgacggcaacagagaagatagccnctcccagaccaaccggcgntccgtctgacaccaccggcccgcactcgccactcaacgtccacacgccgccgcgggcacatatccctacacgggccgcccgacgctgacattcatagtcagnctgacaggcgtacgacgtctggcggcggcggccgctcccacacgcgncnactcaanaactatcggaggcgacagagaacaagctgggggtcagggcgatagcatctccgcgnccgcacagtggcagactacctacccacaacacacggaccactgagtctgtacccaggtcatatcnacccgacatacaacgacgccactcattcgagtaaccgnagatcaacgctacggcaccagcgcaatcacgcgtcgaatacagtgctca

SEQ ID NO: 358292 - DNA, 2025 bp, Homo Sapiens
  misc_feature (1063)..(1071): n is a, c, g, or t
cccgggctgcaggaattcggcacctcttgaagaacttagggtatcttggctatactagtggattttccttgagctgtatggtttttttcctaattgtggttatttacaagaaatttcaaattccctgcattgttccagagctaaattcaacaataagtgctaattcaacaaatgctgacacgtgtacgccaaaatatgttaccttcaattcaaagaccgtgtatgctttacccaccattgcatttgcatttgtttgccacccgtcagtcctgccaatttacagtgagcttaaagaccgatcacagaaatgcagatggtttcaaacatctcctttttcgccatgtttgttatgtacttcttgactgccatttttggctacttgacattctatgacaacgtgcagtccgacctccttcacatatcagagtgatgacattctcatcctgacagtgcagctggctgtcattgttgctgtgatcctcacagtgccggtgttatttttcacggttcgttcatctttatttgaactggctaagaaaacaaagtttaatttatgtcgtcataccgtggttacctgcatactcttggttgttatcaacttgttggtgatcttcataccctccatgaaggatatttttggagtcgtaggagttacatctgctaacatgcttattttcattcttccttcatctctttatttaaaaatcacagaccaggatggagataaaggaactcaaagaatttgggctgcccttttcttgggccctgggggtgttgttctccttggtcagcattcccttggtcatctatgactgggcctgctcatcgagtagtgacgaaggccactgaaacccgccgagaaaaagaaacatccctgttgtctgctcagtcaagtccccacacatcagcaatctctcaccacttcttttgcaagtttacagaagcaaacagaaatgtacaggatacttaaaatggaataactttttggttgcaaaacagagacatggttctataatgcttcatgtccctccaagatttgagatcaatttagggattgtgaaannnnnnnnncaaatttcatacaatcatatttcccagtacttttcacaatcattttttacccatctaactctatgtttggtggcttcccggtctcttagaactttgaaaacatgatatacaataatgggtatttattatacatccagattctgaaataattttcctactgatgttcagctcacactatctgtacctttttaggaagagaaaagaatcttgaattgtatatatttattttgctttacagaaaaaaatggtttcgtaaataatttgcctattttggttaacatagcacatggagataatcatctgaaagttatagggcactgccactgctgaatcagagcatgcccaatatttgaggtggctctgatttcctggcagctgaactcgggtagtccagtggcctagctggtaccacatctattcccatccagagacatttctctggcaagtgttctcagctgaaaagtggttggggatgattcttaccttgggtaattaaatgaagctacacatttgggtaatctagcaaatgaagtatttttttccctcttggcaacttggtggtcagagttactctgggtctgagtcaactttcgctggggaaaacctatggaacctactgcaaaaagattgtccaaaatgcctaagaaaatactcctctgatgcatttagccttcaaccctacctgtcttgctgaagggagaaaaatgttttagtacattataggcccagcagcttttattcatgtccaccagctagttgcacagagaatcatgtgtacctaactaaggatgatctaggataagtaactcctgttttatattgagtattttagggaagtctttaaaagacttgttttatatctataaatctaggttattacaaatacaagaattttgtaccttaaataagcctcatttctatttcttcttcattaattctccatctagtcttgcg

SEQ ID NO: 358293 - DNA, 220 bp, Homo Sapiens
ctcaagtgttagaagacttctttctccttcctgctggagaaattcaactgcattgcatggagagctaattatatggagagacagatggcattaagtggcaaagtaacacgtcaagctgaatgcttcaaaaacgagaagcaccgtgttccaacgtaagactaaagtggccgttgagtgagaataaagccaaagaattccttggcagcctgaagcgccagaa

SEQ ID NO: 358294 - DNA, 823 bp, Homo Sapiens
agcggagcggcgcagggataacccgcggccgcgcctgcccgctcgcacccctctcccgcgcccggttctccctcgcagcacctcgaagtagcgcccctcgccctcctgctcgcgccccgccgccatggctgcgctcccccgcgcggctgcgtgtcctggccctgaccgggctggcgctgctcctgctcctgtgctggggcccaggtggcataagtggaaataaactcaagctgatgcttcaaaaacgagaagcacctgttccaactaagactaaagtggccgttgatgagaataaagccaaagaattccttggcagcctgaagcgccagaagcggcagctgtgggaccggactcggcccgaggtgcagcagtggtaccagcagtttctctacatgggctttgacgaagcgaaatttgaagatgacatcacctattggcttaacagagatcgaaatggacatgaatactatggcgattactaccaacgtcactatgatgaagactctgcaattggtccccggagcccctacggctttaggcatggagccagcgtcaactacgatgactactaaccatgacttgccacacgctgtacaagaagcaaatagcgattctcttcatgtatctcctaatgccttacactacttggtttctgatttgctctatttcagcagatcttttctacctactttgtgtgatcaaaaaagaagagttaaaacaacacatgtaaatgccttttgatatttcatgggaatgcctctcatttaaaaatagaaataaagcattttgttcacacagaaacaacaaaaaactttcaacgcat

SEQ ID NO: 358295 - DNA, 361 bp, Homo Sapiens
ttagaaaaaatctcagaacacgaaacagaatgttaaattgtcacaggagagagcttatgcccttgaatcaagggaaaatagagttcacaaggagccagcggccggcagcatcacacttttatgacagacctggaaggtaaggtcaagggtgactttggtgggagtattatcagtgaaactattgaggaaatcatttctgctttatctctgtagtgcatgcctcattaaatacattattaaagctttaagatgaattttattaattggcatgtcacatccaatgaaaaggatgctagttttttgtgttgtttgatctttcataaggatttgaacagtcatatgtatcaagggtaaacacacc

SEQ ID NO: 358296 - DNA, 555 bp, Homo Sapiens
  misc_feature (131)..(131): n is a, c, g, or t
tcacagcccttctcccccaagggaggctgaggaggcttctccaccagtggcagccccaccccgtccctggccattcttggcctccaccccgctcaggcccctactcgggcgctcccagaaggagccacctntcagtgcctcacctccccctgcctcccagcctccgcagatgaggtccctgccccttcctcctcgtaaccaaaaccctcactgctcccaggacggtcttatttataaaccagatacatgttcttagtctggtcccagaccaaggagctggtcagacggccctttctaatcctacatgttgagcttatgtaaaaaatgttgtttcctcctgtttttggttcctttcttacccacaaaccattactacttgaaacttaaaaaactcgccaagtgtaaaggctaaagagaagcagtttgacggaccttgtgatttgtactgtttgctgcggagctatttaaagattttggaataaatatacaaaactacggttgtgaaataaaaacttaaattgtatattttgaaaaataaaacactgaaaagaaacc

SEQ ID NO: 358297 - DNA, 710 bp, Homo Sapiens
  misc_feature (12)..(12): n is a, c, g, or t
  misc_feature (42)..(43): n is a, c, g, or t
  misc_feature (51)..(52): n is a, c, g, or t
  misc_feature (66)..(66): n is a, c, g, or t
  misc_feature (80)..(80): n is a, c, g, or t
  misc_feature (148)..(148): n is a, c, g, or t
aaaaagaaaganaatactgtactttaccttcaagggcatacnntcatttanntgcaatttaaggcnactgatattgtggnaaggacacacttgattttagtagtaacaggttttaggagttcaattgtggtattaattttaccatagnagctaccttacccaagcaccacatagtcctatttctagagttcaaaataggtatggagaaatagatatacacatgtatatatttttcctatatgctacattgcatcttatatttatttactcttgttctaggcatcaccctggatttgtaatttattttcatgctttcctcccttactagttagtgaacaccttgaaggcagagtctaaattcattgacctgagtattctcattgcctaacacagtgtccagtacaaaggcacaactcaaatgtttcttaaactgatttccagttagccttaaataagcaaatgagataaacaattacagcacatcagagagttccacaagaaagagagagaataaaatcatactccttacagactaatttaggaaataccaatgctagtttctcactgcactgtccaacgtggctcaatcactgtgattacgcctctttatgtgggggagaggtttacttcttgtgtatttaggagaggagaaacatgaagttcatagagttcactcattttacagcagatctgcctctaaccttgttccc

SEQ ID NO: 358298 - DNA, 1006 bp, Homo Sapiens
  misc_feature (750)..(758): n is a, c, g, or t
gggaagtgagctatagcacatatcatgtgcttagtttgtttatttttctccatctccccttggcttcctagagtttggacatattccaggctaaatgcttttactcaagactacagaaaggtttgaagtagtgtgtgcatggcatgcacgtatgtaagtaatctggggaagaagcaaagatctgtttcattcttagcctcaggcctcatgagggtctccacagggccggagctcaggttacaccactccttcgtccttacaggagatgtagggagaagaatctgcaggctgcttgtaggactgttcaccaagggggataccagcagcaagagagtgcacccgtttagccctggaccctgtttcttactgtgtgacttggctagagttgggagttcccccaaaataaacgtgtccccattttaccagaaccaaacctcaacacagcgaagctgtactgtctttgtgtggcaaagatgttcccttgtaggcccctttcaggtaaccgtcttcacaatgtattttcatcacagtttaaggagcatcagccgcttctcaagtgggtagggaaagcagaaaaacgtacgcaagaggacatggatccaaaatgatgatgaagcatctcccatggggaggtgatggtggggagatgatgggctaaacaggcaacttttataaaacacagctatcacagaaaagaaacttgcactcatgtaaactggattgagaaatctcagtgattctgcaatggannnnnnnnnaacgcagaagtaatggatactctagaattctggtgtttttatatttatgtaataatttcttaaaaccatttcgacagataactattttaattttttttaaaaaaagtttggaaaggtcttctccctcccaagggacactgggcttggaaaaatttgggggccacacccggtttcctaaatggttggtgggaagggcgcgttatggaaatatttttggcttccggcccccccggagaaaccacacaaat

SEQ ID NO: 358299 - DNA, 2076 bp, Homo Sapiens
  misc_feature (778)..(790): n is a, c, g, or t
  misc_feature (1750)..(1767): n is a, c, g, or t
gttaacagtaaataaatcacggattgccttgttgtacactgggtcaattctacacttaaagggtttttttaacaaatccacattatacattttaaaggttccacattcgggaattaaatatttgtttaccacaccagttatgccttaattttgtctcccaaaagttcgtgtgtttaatgtacacttaagagtctcacatttaaagtgttctaagactttggaaacacaccatctaacacctgttagaacgcttaatgtacccccgcatcaattcaagggttctctctaggaaatccgagcttcccgttttctgtcgtggtcactcgcacacgaggccttttctctgtgggtggatgatcccgattaacccggaggcccgtattccaatgtcacgtatcatattaatgcacgcatttccctgtagcctccagttccggatcctgcttctgggcaactatgagacccctttgctcacgcttttttgaacttcacagcattatttagcggggccaattgccgccaaccttctactcggtatgttgattggacctgcccagactgagccccccgctttttaacaagggttaatttagaggtaattatagggtaccgtgccaataaagaatagtaaattagaatttccagccattataccatcgacctagcctccttacaggggcataaatgcatgccaaatgtatagaagaactgaggtatttaagctgaagagtgcctaccagtctaatttaagaaacttaggccaatgccctaaagaagnnnnnnnnnnnnnccttttccaaagatggaaataatgagctagtttatctaaattaatgacctaaatcacagatgtatcaaaattacggcagtttatcgcaaacgttaaactttcacggcattaacagcacagctttggtaggtgaaatatgcatgcaacattatgaaaagtatagtaagaaatttatgtgaggagactaagggtaaaggtgctgtgttttgcttcttaaataagtaaccaatcaattataaaatctgcagcatattttaggtgtgatatgtctaaggtttattttgttagagcaacagcctagaaggcaaaattatttgccataaacatttccatcagtgggaactacctggcaggaggactttagtaaaatggggtgtttagccaaagatcatttttatgataaaaaatatccgtagactacatattctggtttttaaaatgtcttcagtatacatatgacagaaattttagtatgatcctgtaataagttacaactatactagtgagttgtaagtatcacgctgtctcaacgtctaatgcataataaaatgaaaggaatgtaaaacagtttgttccaaaaagatcagagattaaagactatccatgaaggtttcacttttaaggcaagaaccctttttttatgcaagactatgtggcatcagaaaactaaaatgtgattcaccaacatgccagccaatgttcattaaaaatctgtcccttactatcaggtgcaacagcgaccgggaacatcaccttacacagtataacgtggaaagaaaagacaacattggcgcacttctcctctcgaaaaccttatcgttctattcagcttatcaactactgcaggactggcactactgcacacacggagagatggagaagaatctacatcatcctagggactgctggaggtttaagctccatggccttctaacactaagcaaagctgacataaactcnnnnnnnnnnnnnnnnnncctgtcaattagagcacttgctaaatgtcatcattaaagcactcttgtgatttaaacaaagcagaagtgaggaaagaagataagattgtgtttgcgcaaaaaactaaaactacaattagttccaaaattttatacatatgttaaatgttttattctgttatctatcctgttatcaaccaaactttaaattctgccttcaattcattccactcactatcaactttaagtcttcctttccgatttaaataattttccccttaattttttatgttttgtttcttgttttgaattttaaaaagcggattcagc

SEQ ID NO: 358300 - DNA, 459 bp, Homo Sapiens; identical to SEQ ID NO: 7608

SEQ ID NO: 358301 - DNA, 626 bp, Homo Sapiens
cgtacctgaaatgatctgagggttagtaaatatgagtaggttagcggagaaaactaagttccacaagggcctaattaagtagtgaaaagtagcctagcctgaaatttagttggtgggggtatggaaggaatatcattctataccccccatcccaaatatccatcaaggaagccatttcagcaagacatgaacagttactgctaaatctggtgggttggaaaattattttacatgctgaccaagctgggccagagcttcctgggtgaaaaaacacgttcacaactacttaaaacatatatacttccaaaccaataaaatataatttatggagtggaataagattcaatagcaagatctgccccatagataatgaaatctttacttgaacagcttgaaaatatttacaatgagtagtttcagaagctttattgtttaatatgaaaattttagagagagacaagaaaggagagaaaaacataaccagttgaaggttaggtttaacaaaatagccagaatgagcattcactcagtaacaacttaaagactcttaatagtgaagattaataagaaagaaatggtaaaactttcacttatttcccattgaaaaagaggaaaaaaactcgtgc

SEQ ID NO: 358302 - DNA, 1085 bp, Homo Sapiens
  misc_feature (45)..(45): n is a, c, g, or t
  misc_feature (452)..(469): n is a, c, g, or t
cctaatgcaacactgtacacattcgcttagtgtaggagtgggcanaatcaaatgcctattggatactgcccagcaaggaatcaagtgcctgctctaggtaacatggagcagggtgccatggggactgagagtcatctaatcaggcagctgctactcagctccagctaactgttgccatgagcaaagatgggtccgagaatgaggatgtgaaacatcatattttcaataaccactcatattttaaaaacattctgcataccaaacaaaatctacctgagggacaattaaggtccatggcctgccagtttctgcttctgatttgaagcttaggagcaatttggtgagaatttggacactatcagtgataggattggagaagaacttttagtatcaaggaataaacattcagtttcaaatacttagaacacgctgttctaatgaacacagttggnnnnnnnnnnnnnnnnnncttctcttggtttctccctattatgagtatttttcgtagtaggtacattaggtctccatgtgataagtggtttcctgttactgctgaaaaaaattgtgactaggaatttgccaagtcgccaagtgtaagtttttcttcctctgggaaagtggtatatatcactttctcccgacatttattttgtggctgagaaaggagacaggtatagaaaactttcagaagaaggagaaacagaggaaagaccaggcatgcagcacgagtcataaccacctctggatccacggacgcctctggcaccacagacacagtgcaccaggcaaagaatgttcgaaaattgctcaaaccagagcattcagatttcaagatctgtttgtagatctaaataatccagcttttgaccaacatgaccagattttgactacaggaatgagtgggaagggaagaggaaaaagaagcaagataggagaaaagccagacagactcccccttcccaccctcgggctctagaccactcctggctcctggttgctctgcgaagagctaggaggcgcgagaggagaggctggacggcggcgagcgctcagtgaagcgcttcggtctccaggctgagtccgct

SEQ ID NO: 358303 - DNA, 823 bp, Homo Sapiens
agttcccgggcttagccaccattgctaaaagtgcaaccatagaacctaaagaggtcaagcccgaagacaaaaccaccagaacccaagaaaacctttaacagtgtcagcaaaattgaccgactgtcaagaatagccttcccgctgctatttggaatctttaacttagtctactgggctacgtatttaaacagagagcctcagctaaaagcccccacaccacatcaatagatcttttactcacattctgttgttcagtcctctgcactgggaattcatttatgttctcaacgcagtaattcccatctgctttattgcctctgtcttaaagaatttgaaagtttccttatttctcataattcatttaagaacaagagacccctgtctggcagtctggagcaaagcagactatgcagctaggcagacaggattctgacagagcaagcgaaagagcaacagtcatgtcagaaggagacagaatgagagagaaaagagggggacagcatggttcaaagatacaagaaacaagtcagaaaacacacaataaccacttaactaaaacccctaggtcatttgtagatatatattctccaaatattctaaaacaagatactgtatatgtccaaaaatatcccatgtgaacggtgtcacaacagggtacaatcataaatgttacatgaagacacaaatctcacacaatcacgtcttcattacaccgaactatggcgtgctcatgacaccgatctcggctatcataacctgatgtatagcttaaacatttcggtcccaacgctgagatcccatctttccctcgaacaccacaacg

SEQ ID NO: 358304 - DNA, 1083 bp, Homo Sapiens
  misc_feature (403)..(403): n is a, c, g, or t
  misc_feature (674)..(684): n is a, c, g, or t
ggtaccggtccggaattcccgggattttggaatctttaacttagtctactgggctacgtatttaaacagagagcctcagctaaaagcccccacaccacatcaatagatcttttactcacattctgttgttcagtcctctgcactgggaatttatttatgttctcaacgcagtaattcccatctgctttattgcctctgtcttaaagaatttgaaagtttccttattttcataattcatttaagaacaagagacccctgtctggcagtctggagcaaagcagactatgcagcttggagacaggattctgacagagcaagcgaaagagcaaagtcatgtcagaaggagacagaatgagagagaaaagagggggaagatggttcaaagatacaagaaaaagtaganaaaaaaataacacttaactaaaacccctaggtcatttgtagatatatatttccaaatattctaaaaaagatactgtatatgtcaaaaatatttttatgtgaaggtgtttcaaagggtaaattataaatgtttcatgaagaaaaaattttaaaaatctacgtctttattacacaaactatggtgtgcttatgtttttgttttgctttttaaactgatgtatagctttaacattttgtttccaaagctgaagatccccattctttctctttgnnnnnnnnnnnggcctaatgcattattttgtcataaaatgctattttaaaattcatggaactttcatacgtaaaaggtgcagttgctcattgtaaagcacatttagtccaatgaaaattaatgctttaaataggttactttccttttcattctgagcttttaccactagaactccaggaagaataatttttaacaaacatggtatactccctagaaaactaaacctaaaataagtttaaaaaataattcccttttttccccccaatttttccaaaaagcacattgaacccccaaccctcaccttaaattctccctaatagaaaaatggttttttaaaagggggcaaaaataaattttgtcaaacttcctggaaattggttgaaaaggaattcctttttaaataaccaacc

SEQ ID NO: 358305 - DNA, 753 bp, Homo Sapiens
ctttccgtcacactgttaggcttgagaattggcccatggaagacaggtgcagcactttctaggaaggagagtgtggaacttgggctcttggccaacaaggtcagtaaactgtagtttcattggggctcacactctacttagcacatgtgctgagggtttgcatctgcccaggtgagaaatggcaccgaggaaggcccacctctgggggcacgttgagggaggcatgtaagcaggtgtgatattgccaccctttcccacggaccctacccgttcccactgtgcagtcattatgtcagggaggaccgtgcccttgaccctaggggtcctggggccctgtccaattctggtggctgcgaagcagacaggaggaggttgtagtttcctgatgaggaaggaatgacgtgactaagagcagtgagcctgtgagggtcactgtggtattgcctgagctccaggaggcctgtgaagaaggtgcagtgtgttcttcccaccttccgtcccgttattcatgttgtaaatattgtgctcccttgtaggaagagccatgggtccaaggccacaagcccctctgggccctaaaattggtacctgaatactcattcccacttctgaatgggtgctgaggagggaggaaaatggtgcctttcctctctgcgcaaaggagcagacacctcacagctgagacaggtttcagttcctgctatggcaggatattttgccaggtatagaaaaataagacaatactgattaagc

SEQ ID NO: 358306 - DNA, 749 bp, Homo Sapiens
  misc_feature (13)..(13): n is a, c, g, or t
gcccaagcattcntatactgttgttaaaacatgccatccggtgcacagtgaaaaaatccagtgaatatttctttataaaaaaatatcaatagcttcaaataaatgtttaaacatgccttgagaacatgtactggctatgataaatcaattatttgacatattggatgagtttttttagtgatctaaaagaaattggctaaaacccatacatgacaggtttggaaagctctaactcaggtcagaaaagtgggagagagatcagatcctttttatggaatgaaagagcaacaatttaaatatcttttttgaaatagtgaaacattttgggctcaattagtctttattactttctttctttttacagagacgaggtcttgctatattgcacaggctgcagtataagcctactccacagattggcctgattaacatacaaaaattggttacagagtctgcagagtcaaaagagatgggcaatccacaaaaatattatttgttttattaagagaaaattcacctggtaaaaagaggcctgagatgatgcatcaaagtagagaattgttcccccctctctcaatttgcagctagccaatacgcagggcagagctacttgaatcaaacaccttgaagaaaggccctgcaatcatattcaaagagcatattgtagattttacaacaaacgcccccctgactggtcctaatttaccagggaattctccattgagagaaagaaaacgcctcaatttttc

SEQ ID NO: 358307 - DNA, 718 bp, Homo Sapiens
  misc_feature (74)..(74): n is a, c, g, or t
aaccaagtggtaaaaggtgcatctaaagtgctatatggctcattaggaactaagaactctcgggctcactcagnacacaggtgtcagcagctcagaccatgtgccgaagctctgcccagctaaacggtgtagctcccaaagtcatggactgctcgcatctgttatgaacggctagtgcccacactggagagactgccaagtatcttgagtgtcatccccaatggccccaggaaggaaaatggactctgttcttcactttcattactgttgaactactaaattctcttgcaaaaaccatcaacaggcatttactaagcatatgcccacagggaacccagcatgaaaagggcccttccaatttcatattcgacaggcatgtgcagaggtaatgaaattattcagcagagaatggttaggagtagccgggtaagagtaatccgtaacgtccgatgcatgtgacctagtatctagggtcagggatccctcggaagacgctccgtggtacacactatgagacatcctgttgtcgggtctaagctctttgtcatatgccatcatattccactcctggcgcctgtttctggcctaacctttttcacctcacgggtggtgccatctatacgcttttgctccttttaacgccttttctctttccttttgtcttctgtgtcctgtagcattttttctttccagaggtcaaagaaataggaaggatcag

SEQ ID NO: 358308 - DNA, 741 bp, Homo Sapiens
cggtacgagctcgtgccgaattcggcacgagtataaatccagccattgacataggccagattgaaggtgcatttattcaaggcatgggactttatacaatagaggaactgaattattctccccagggcattctgcacactcgtggtccagaccaatataaaatccctgccatctgtgacatgcccacggagttgcacattgctttgttgcctccttctcaaaactcaaatactctttattcatctaagggtctgggagagtcgggggtgttcctggggtgttccgtgtttttcgctatccatgacgcagtgagtgcagcacgacaggagagaggcctgcatggacccttgacccttaatagtccactgaccccggagaagattaggatggcctgtgaagacaagttcacaaaaatgattccgagagatgaacctggatcctacgttccttggaatgtacccatctgaatcaaatgcaaacttctggagaaaacagagtgcctcttcccagatggcaatctgtcctatctctgtgctggaagatgctagatctgaaagacagagtttccacaagttcagaaatcatcccacagtgttgcttttctatggagctgatttaaagtattccaattagaattgatagatatgctaaagcaatctataaatcattttcaatgttataaacactaattggttttcctctaggggtgatattcggcaatactctggctttttcatccgt

SEQ ID NO: 358309 - DNA, 761 bp, Homo Sapiens
  misc_feature (101)..(101): n is a, c, g, or t
  misc_feature (134)..(134): n is a, c, g, or t
  misc_feature (145)..(145): n is a, c, g, or t
  misc_feature (168)..(168): n is a, c, g, or t
  misc_feature (170)..(170): n is a, c, g, or t
  misc_feature (212)..(212): n is a, c, g, or t
  misc_feature (220)..(220): n is a, c, g, or t
  misc_feature (241)..(242): n is a, c, g, or t
gaagaaagtgggtcttcctattcccttgtcccttagcccgacccttcgggcttataaggcagggtacgcaattgtgtctgggttgccctattttaaaggtntaagccagtggttccgggattcaattaggtttntcctctccggnccgttaagaagaccgttgaaccnanagcaaagtgtgtagaactggctttcgattttgaaagaacggnccgctggnctgtcggcctgcggcagagannagggccagccacagcatggtgtccgcgcctggggcctcgaagcgcagcgggtccccgaacctggcgtggaaccccggcatcgcctgcctcacacctggggtgtcggcccagccaggatgcatggaagaaaaatggatggccgggtgcccttgggcccaccgctccgtcagaaccacttgctgcctctcactgaccttgttttgtgcatagaccatagttccatcaaatggtgttctttcggactggagatcattggtgttcagtttctgaaccaacattcctcctgaggagacggttatcactcgggggtcgtgttctttctccagcacagggatcaggccggtcgtgagaatgtacacacctgaggggcagtccctccttccgaggatccttcaagccaaatgttccttttcccaggactggaagaaagatgccttagagcctcatgtaccgacaggaaaagatgtccacactacaggaatacaggaagggaaaaagctaaagccgaattcctgcagc

SEQ ID NO: 358310 - DNA, 493 bp, Homo Sapiens
agagagctcacagaagatggacttgaaaaaaactttgctgccaatactctgggtgtgtacattctcacgaccggcctgatccctgtgctggagaaagaacacgacccccgagtgataaccgtctcctcaggaggaatgttggttcagaaactgaacaccaatgatctccagtccgaaagaacaccatttgatggaactatggtctatgcacaaaacaagggcgcccacattgtctgtaaggctgccagcaccctccgccttccttgtcgctgctgtgtgccttccgaaggtggccctgtttgagactctttgcacctccactttttctgtttatatgccctgggtgtgccccagttttgctccttgaccccagaccaaatcctggtgaattacatttcatgactccaaatcctgacatttgaaagacctgcacttttttacagttttcccaaaggacatgggaataaaccatccccttgtaaatgagaaaaaa

SEQ ID NO: 358311 - DNA, 992 bp, Homo Sapiens
gcggccgctgggctgtgcggctgcggcagaggagagggccagccacagcatggtgtccgcgccctgggcctcggagcgcaggcggtccccgaacctggcgtggaaccccggcatcgcctgcctcacacctggggtgtcggcccagccaggatgcatggaagaaaaatggatggccgggtgcccttgggcccaccgctccgtcagaaccacttgctgcctcttgttttgtgcatagaccatagttccatcaaatggtgttctttcggactggagatcattggtgttcagtttctgaaccaacattcctcctgaggagacggttatcactcgggggtcgtgttctttctccagcacagggatcaggccggtcgtgagaatgtacacacccagagtattggcagcaaagtttttttcaagtccatcttctgtgagctctcttttattgaccatgcaacctgcattattgatcagaacatggagtttatgttcctgcttgaaattttcaacaaatttaccagatttgcttagggatcagacaagtccacaatgtgcagaaaaatgttctggttaccgccctcccggatgatctcacccctggcatcttctgctggggcttgatctcgacaaaccaggtgaacatgtgctacgctactgcttgtctgagtaatcaaataggcgagatgacaacctgccacacaatcgccagacgtgtggtctcatcacagctgtacctctgctacaagaagtcttcatctccacgatgcgaaaatcgagcgatctctccacagagatgcatcgattgtgtatcacaagtacctcatcactatcgaccacgaatctccaataaccacgttctgtagagctgagacttctggggcgacgtcctcccctggcgcaagcaactcgaggcgttcggttccaagagacagtctccgcgcgcccctcagactgagcctggaaagattcgcgggagcgccattcgacaccccgct

SEQ ID NO: 358312 - DNA, 330 bp, Homo Sapiens
  misc_feature (205)..(272): n is a, c, g, or t
cctcgtgccaagcttggcacgagggaaaatttcaagcaggaacataaactccatgttctgatcaataatgcaggttgcatggtcaataaaagagagctcacagaagatggacttgaaaaaaactttgctgccaatactctgggtgtgtacattctcacgaccggcctgatccctgtgctggagaaagaacacgacccccgagtgnnnnnnnnnnnnnnnnnnnnnnnnnnnnnnnnnnnnnnnnnnnnnnnnnnnnnnnnnnnnnnnnnnnnaaccgtctcctcaggaggaatgttggttcagaaactgaacatcaatgatctccagtcc

SEQ ID NO: 358313 - DNA, 596 bp, Homo Sapiens
  misc_feature (31)..(31): n is a, c, g, or t
acaaaaaaaacctattgtctaatgctgttcntggatcacagcagttatttattagatgtgtgttgaataacagaattaatccaaaatttaaaaagcctagctgtgtatctgtccgtggatcatatgacaaggtctttggcagcagaaaatttcacagctaaatgtcagatacgaaagcatgaaaatttaaaactatagaatataattctggaataagcattggtatccattagggaaaatagaatatcgttcagtagtctagtgataagtttggatatcatctcattgttagacttacctccaaataagtgctcagcaggcagaaaaagttcttcagggaacccattcacatagggaaagatgtgaaaggtacagtccaggaaatataaatgtcttcatagaataagtaattgttcattatctgaactggaatttacatggactttctaggacagttacctctccattataaaagctaatagaaggcgcggtggctcacccctgtaatctcagcctttggaggccgagcgggcagatccgaggtcagagatcgagccatcctggctaaccgatgaacccctaaactcgtaaaatac

SEQ ID NO: 358314 - DNA, 1228 bp, Homo Sapiens
ggatgccctggcagtcattcctctgccatggggaagcttctgatgagagaaaggagccccacatccactgaaacatcctttggttctcaagcttcttctggaggcagtaaggaaaaataaaacccaccaaggctcaagaagggaactatagaaaagttcaggtttttaggctatagcagagacagtgagaaagcatctgggcctttctcttcctcttggtccagggacctcattcaccaactagagcttggtgtacaggaaaggggtcacagtgctgagggggcttgagtcccacctttcagcttgatggatgctcacctcttctcagccccagctcgtgccctgtttttctagccatagcccccagattactcacagctcctcatgccatttcctgtccagattgctatgtatgactctgacctctcttgtccagtggtctggtgctcacctcctctcactgctagaatattcaccaagggtttgcatttgggaagtcccttaccagctcctgcttagagctggtagggccatacatgtccacactcccaactggtggctctcccgctgaatggggcctcagcaggtgcccaggctgctacaaccttggccactctgtttctccaccccagcactgggcatggtaattagcctttccccatgttaatttattcagttttttcaagggtcaactgaattccccacttcctgggtaagaagcatgatctccttttaatttcacgtctaagatcctggcagcttcccctagctggttcctctgtagtcctgctgggactgtcagctcatttaaatgtgggtctgcagaaggctttaggtctcccccaacccccttacctttcacagaggaacctttcatcaggataaatgattattgctgccctgtgggtcttgctcaatactgttcatacctggagagagaaggtattgaaacatctcctttatgtgtgactttcccaaatttttaaaaattgtttatggtttaggccccttaaatactgtgtagcaggatgaagtctaccattaccagctgggtcaccttggatgggtctgtcaacatctaagcctcagttccctcacctgtaaaaatgagggtagtccctacctcataagggatattgtgaggatggaaagcgaaagtgtgagaaaatacctcccaagtgcctggtacatagtgggtgctaaataaaccactttttgtctgcaaaaa

SEQ ID NO: 358315 - DNA, 615 bp, Homo Sapiens
cagaggatacagaggcaaagaagaggaaaagagcagagcgctttgggattgcctgatgaaaagttcctgatactttctgttctccagtgttttccatttctctccttcttcttggtcacatatatgcctaaatgcacagtcatgtgcctacgtcctgcctcgcaatgagggagcatgtaccccaggttcaagtgctggattgtgtcatgtgaccatcccaaaactcaaagcaccctatggccgtctttgccctctgtcacataacttgaaaactgcctgatggcctttttgcagtggttccctccaggaagccttgatctcagttgaagaagttctttcctggcattccaatgcccctgtcagctccatactcctcagacacccttaacaaaggctgtcatgcacacaatgtgacaaatacacaaaataaatgataattacactaataatgatatgttcaaaggggcactggccaggtccacacacatcataaggggggaaagggtgctaactcccactgggttgctgagctgtgccccccaagtcccttcactctgtgcctctttgggggtagggaggaacaggggaatgagacttcagctcacagatttatgt

SEQ ID NO: 358316 - DNA, 1106 bp, Homo Sapiens
  misc_feature (910)..(950): n is a, c, g, or t
agctcctggaggcggaggccgcgggtgggggcctagtggagtgaggggtaacaagatggcgaccgagacggtggagctccataagctaaagcttgccgaactaaagcaagaatgtcttgctcgtggtttggagaccaagggaataaagcaagatcttatccacagactccaggcatatcttgaagaacatgctgaagaggaggcaaatgaagaagatgtactgggagatgaaacagaggaagaagaaacaaagcccattgagctccctgtcaaagaggaagaaccccctgaaaaaactgttgatgtggcagcagagaagaaagtggtgaaaattacatctgaaataccacagactgagagaatgcagaagagggctgaacgattcaatgtacctgtgagcttggagagtaagaaagctgctcgggcagctaggtttgggatttcttcagttccaacaaaaggtctgtcatctgataacaaacctatggttaacttggataagctgaaggaaagagctcaaagatttggtttgaatgtctcttcaatctccagaaagtctgaagatgatgagaaactgaaaaagaggaaggagcgatttgggattgtcacaagttcagctggaactggaaccacagaggatacagaggcaaagaagaggaaaagagcagagcgctttgggattgcctgatgaaaagttcctgatactttctgttctccagtgttttccatttctctccttcttcttggtcacatatatgcctaaatgcacagtcatgtgcctacgtcctgcctcgcaatgagggagcatgtaccccaggtacatccatgaactgcggcagcagtttgacttattgctgtttcagctttaaggttgttgtgtttttgtttttgattatgttgcttgttaatnnnnnnnnnnnnnnnnnnnnnnnnnnnnnnnnnnnnnnnnntggcgggcggcctcgggccctcaagaagcttttcaaaaccttttcttttgggcgcgcggggcccacgtagggaaagggaacatgggccttaactggttttcccaaggaaaatccccgggcctggacctaaagggcttgggaattccccccccaaat

SEQ ID NO: 358317 - DNA, 938 bp, Homo Sapiens
ggcaccagggaaacttacacatacagacacccccactcagacagtgtacaaactaagacggcctaactgaactaagccatatttatcacccgtggacagcacatccgagtcaagactgttaatttctgactccagaggagttggcagctgttgatattatcactgcaaatcacattgccagctgcagagcatattgtggattggaaaggctgcgacagccccccaaacaggaaagacaaaaaacaaacaaatcaaccgacctaaaaacattggctactctagcgtggtgcgccctagtacgactccgcccagtgtgtggaccaaccaaatagcattctttgctgtcaggtgcattgtgggcataaggaaatctgttacaagctgccatattggcctgcttccgtccctgaatcccttccaacctgtgctttagtgaacgttgctctgtaacccttgttggttgaaagatttctttgtctgatgttagtgatgcacatgtgtaacagccccctctaaaagcgcaagccagcatacccctgtatatcttagcagcactgagtccagtgcgagcacacacccactatacaagagtggctataggaaaaaagaaagtgtatctatccgtattcaaatgaagttattcttgaactactgtaatatgtagattttttgtattattgccaatttgtgttaccagacaatctgttaatgtatctaattcgaatcagcaaagactgacattttattttgtcctctttcgttctgttttgtttcactgtgcagagatttctctgtaagggcaacgaacgtgctggcatcaaagaatatcagtttacatatataacaagtgtaataagattccaccaaaggacattctaaatgttttcttgttgctttaacactggaagatttaaagaataaaaactcctgcataaacg

SEQ ID NO: 358318 - DNA, 814 bp, Homo Sapiens
  misc_feature (786)..(786): n is a, c, g, or t
  misc_feature (802)..(802): n is a, c, g, or t
ccaccgagattcagaaagacaaatccattttctttgacttcctctagcttggacctcacaggctcacattctctctatttctataaggtcaccttttgtaatcaaatccatgctatccacatgagtgagcaaagccacatgtaccacaccagcgtttaccaactcccttcgaattcttttgatctttactatcatctgagaggagaagtattgaatagagctggcatcaaatacaaatgccacacaatgaattctgtccttcagcgatggggaatcaatgtagtcatgatgatttaatttgattgattccatgggattaaactggtatctatcacgaatgttaccgttcaagatatagaatatgtcatccctgcacaggccgccttctttctcactcagccccagtgagtcacacagaataaacggcaggtatttgccatctttcccgtctctaatagagtatgtcctatacttctcagatatcccagttgtattagtgcccaccaaagcctgatgcgttacatgcccttggaaaacagacctcactgagttgaaaaagctggacttcccagctccaattggacccagcagcagaattcgtatttgttgaaccagggatccatatggttcataagttctcaaggcagacagtaagctcttcctgagctcaatgaccccttttatctttctttcatccagtgaatctgttgtactgtctgtagtatcagctagagctgagggtagctgctctgtctggatagctaggcaggcacaaaatgggagagngaaattattcagcagntttgaagcttca

SEQ ID NO: 358319 - DNA, 1107 bp, Homo Sapiens
  misc_feature (42)..(51): n is a, c, g, or t
aatatagagagtctgggccctcccaaaattcacacaatttgnnnnnnnnnnaaaggaaatttctttttcctttcaaaggggatggtgggaaattccaagtgtaggtccagggaagggatttaatatttggattggattcccaagggggattaaaacgtgggtttttattcccggaaagtttacccgttcccaggattttggaaataggttcattccccgccacaggcccgcctttttttcttcatttcagcccccaggtaagtccccccagaattaaacggcaggtatttgccatctttcccgtctctatagaagtatgtcttatacttcttcagatatcccagttgtattagtgcccaccaaagcctgatgcgttacatgccctggaaaacagacctcaccgagttgaaaaagctggacttcccagctccaattggacccagcagcagaattcgtatttgttgaaccagggatccatatggttcataagttctcaaggcagacagtaagctcttcctgagctcaatgaccccttttatctttcgtttcatccagtgaatcttcgcatcgaaaaacttcataatcctgaatagagatagtacaattttgagcaagtccaagattttccattgtctttaagtccataatcacttttctatttcttccatctatctggaaattagttggggagttatattttgtaacatcacaacaaaacagtgtttctggtgtacatagtcctagtttccattctgaaattttagtatcttgaagtgcaaaaaggatgatggaagcatactttccttcctggtaactctcttctgcatatgctccaataatatgatcttcactataaatcactgttagagtaggcccttgattacaacatctgtcaagcaaaactccattacggaatccatggacactacccttatagagaaggctaagccgcttccctccaaaatgattttgcaggatcttttcgtgcaaccatgtcaaacgagttgtcactgccatacttcttgatctgttgtactgtctgtagtatcagctagagctgagggtagctgctctgtctggatagctaggcaggcacaaaatgccgct

SEQ ID NO: 358320 - DNA, 731 bp, Homo Sapiens
  misc_feature (680)..(680): n is a, c, g, or t
cacgagctgcttaggtctccaaagatgcccacctgggtcaaattcagaataatgaactcaggtacatcacccagaggcatttagaatggactctctcttcacctggattatgtgctgagtgttaagtgatttttcaaatatctgggggaaggagtggtaagagatacactctggtcatcctttggtgtggtttgtgggggatacttggttgattcttgtagttaaagtgaagttgcttttctgaaaatgttccctgtcttcaggggacttacccatcccaggggacacatccatcccaggggacacagccagccctttccagggaaatacgatgtttctgagtgagaggtgatttcagtgcagataggaagagctggtgcacaccagcagggttgccttccatgccatcttccagctggtgtgggatagactaagggggcagatttttaagaaccccaccagagttgacatacacacgtgattctcgtgtctgtctctcaaagctctcaatgtctggggctgtgtttgccctcttttcattgatgctgccatgatgcaaaatgtttcttaaacattattcctggttcttagaatatgtgattactgagtattggatttctttcctgaataataactgctcattgtagaaaatatgaaaaataaaatccataaaagactanataaaatacttgagggggggcccggacccttcgccctatagtgagtccgat

SEQ ID NO: 358321 - DNA, 442 bp, Homo Sapiens
  misc_feature (346)..(346): n is a, c, g, or t
  misc_feature (393)..(393): n is a, c, g, or t
  misc_feature (399)..(399): n is a, c, g, or t
  misc_feature (431)..(431): n is a, c, g, or t
aaacaacatatatgaagggatgtgatgccactaactagtgcacattgtttctcaatgtgccattgagacacaaggcacagtaagtcaggattctgaggcattggaagggttttcttcagctgtaattgtttccacagtgcttttcatctgaggggctcaaagtttaagagtgcattcaataacccatgtactagcttcttgaggtaagtaaataaatcttgttctcatgttacatgttaatacaccaaggcaccaaaacatttaaagtgccatgaattaggattacatcagaaatcagaaaagcttgggattgagctaggtcaccgtgggtttcacggcctgttantccccaacatttcggggagggcccaggatggggagggtcctcttggnggcccnggggttttccaggaccagctttggggccaacntagttgaggac

SEQ ID NO: 358322 - DNA, 1345 bp, Homo Sapiens
  misc_feature (445)..(496): n is a, c, g, or t
gccagaaaagccggggtataaaaaccctctggttgacaggaattcctggtaaagaaattaatttaccatctattccgtggggcaccggtcaactttccgaattataaaatttggtaattagattccgaatttatattaagagtggtgaaaagtcaattatggggtaattttttcatttaaatggcatttttaagaacaaacaagcacttaaatgaatggtggctcaacagggaaaaggactattttaatgtaaaacaatattaaatcagcgtatgataaggttgagtgctgaaactgtgaaaactgataatttagaaattgtaaatgcttttattcaaaactgtaaaaaggcaccaattaccctagtttgctggaatcacagttcttatgaataatagcatctactgatgaacatgatcatgaattaaatgttttaaattttaannnnnnnnnnnnnnnnnnnnnnnnnnnnnnnnnnnnnnnnnnnnnnnnnnnngaccaaatccaattgacagtgattacctgttatttggctgaagaaaaccaggaatgctcataaccagcagttcccaagcaccttgtgcaggtgactcaggggctactgaggagctggttaaggagaaggaggatatgcccagtgactgggaccctgccacagcatcaaacagataagctcacttctgtctgttttactgtacattgagaatatgtgtaagtcattttttaaaaggcttcttgtgattaaaagagaaaattctgaaaaccacagcaacatatctatgctgtttccaagcatacaaagagaattagaacatctgagacaactatggctccaaacaatcagaagaagggttagttttccttttctccctattgaataatgtccaaaatgatgtgtcatctattgagcccatactatggagtagcaggctactagttagatgccttccccagttaacagcacatatccaaaggacagctagcccaagtgggaaggtggtaggtaaatgctcatctgggctaggcaaccaccacagcaagcaggtcccctctcagcctggccttggcaatgagctgcttctgagaagccacagctatctgtggttgagagctcactcccttgaggcattgcagagaacaagagacatgggctgtggggcagcttttcaataaaactgagaggcacatcaacatggcactgtatgtgtccacttaaggatatatgataaacatgcaatttcaaaaggtaaattattaaagataattggccaatatatagatatgcatagtttttagcacataggccctcaataaaatattaggatctagtctgaaaatgtaattc

SEQ ID NO: 358323 - DNA, 638 bp, Homo Sapiens
  misc_feature (227)..(227): n is a, c, g, or t
atatattaatgcttctaaagcaaagtgtgggcaggcagattactttataaaaagaaataaaagtcatctcaattagaaggaaagaagtaaaactagctctatttgcacttgaaattatctttcacatataagatcctaaagcaaccagaaagaacccattagaatgaagagctggtaagtttagcaaagggtttggtatactcagtcaatatacaaaaatcaatctngcctttatgcactagaaatgaaacaatccaaaatttaaatgaaaacaattccatttacaacaatagcatccaaaatgaaatgcttaagaacacatttagcaaaagaagtgcaagacttctacactgaaaactaaaaaacatcgttatgtgtgaaggggagggaagaaaggaggctagaggataacttaagaattaagggcatcttattttgggttgataatgttgaggatgcttatgactgaaagggagttattcattcttcagtgatttcttaatttgaaatatggaaccaatgtttctgcataacataaacatacaaatgaattaaagtgaaaattctaaggttcccattattgctatgcttatgtttatgagagtattttaagattttatcaagttcccaaagtactc

SEQ ID NO: 358324 - DNA, 655 bp, Homo Sapiens
  misc_feature (21)..(21): n is a, c, g, or t
atcttgttacactaaagacanagcaataaatgcttctaaaatttgccaaaattcaggaatgtactgttttaaaagcttctctcttactaaaatttagaaaatttctatcatgtttgaaaaactttaaaacagctttgtaaatagcctttaaggtcatgttaaagattcaatttatgttgaatagtcagtaaaagtaggtgtgtaattcattttgctacctgtgagtctggcttgatgctacatttgtgggttaataaatagacttctttgctactgttttaaagtgtcataatgttgtcttgctttatgaagatgacactactgatctccaatcaacagggcatgtgcatttactgatttttctggaactaagagagaatttgtgctaaattggtcacattttcacatgcagtgaaagattggcaatactaacttcttatgtggtcagtagaacacttctgatgtatttagcctaactcaaagctatgcatgtaaacagagataggcctctatcataatcacagttacaaacacatattatacactaaattcctttcagtgattaaaaaaacaagttcatgtaagaaagcaagacaacccaataagaaagtggttaaattcattttccatgtcgtcactctcttctgcctcgtgc

SEQ ID NO: 358325 - DNA, 875 bp, Homo Sapiens
ttcggctctagagagaattgatgaggtattagtggcttagaagaattagtgatataagttgggaataaaggggtagcccgacagtggtaagtaaaaatgtagtactccattgtttttgctatttaaatataatgtatcaaaaacctttattctaaaatttccacaaatgattccttttatccatcttcttgtaatcctaaaagcatcttctcactatgtgctgtagtttgaaacctaacgaatcctcctacttgagacactgtagaaaagtaaaaattgttgcttctgttttgttttaagaggaaatgagaaggccagcagaagtagattaaaactagagagctggtttattaaaataagcagataattatccaggcttaaagtaatagcttacatgttttgaaaatccttgtacttatttttgtttttattgttgcaaaaaaatgttaatgggctgttgaaatgacctccatttacttaaggtaatccaataaggtcttttttaaatatacaaattttactcaagtttaaattgtataaaactgcttagaaacctgaaattttatagtgtgtaatatcttatgtgtatatagcatcctgagctgtgtgatacagtagatttcttcttagcagaaacatgcgaggtagatttaataaacaacaaaaatcagcttatggttctacttattgaatctgctttactttttagcaattttcttccttgtgaacatgaaccatataaagtgtctgtgacttaatgatttcatgtaagtctgtcgcatacatccttcttttgtagcttacaccatgtggatgctctgtctgtagacactgcttgataaaaggagaataaacctcttacattttaaaaaaaa

SEQ ID NO: 358326 - DNA, 1579 bp, Homo Sapiens
  misc_feature (85)..(99): n is a, c, g, or t
  misc_feature (104)..(154): n is a, c, g, or t
  misc_feature (998)..(998): n is a, c, g, or t
  misc_feature (1024)..(1024): n is a, c, g, or t
tgacttattttgaatggactacattatagcttaactagattgtacgagtgcttatcaactaatatgttaaaatatggtaattccnnnnnnnnnnnnnnngagannnnnnnnnnnnnnnnnnnnnnnnnnnnnnnnnnnnnnnnnnnnnnnnnnnttggaagaagagcttaaaaaagataagattttaaagagtcccaagttatttaagttgagtgtaattgtcatttaaggaaggcaaatgagtttatcatccttcttaaagagcatctcttttaactgttggacaaaaccataactttgtcattttacaaggaagaacctcttaagaagtcctcagaaccagaagcaatgtgaactctcagcgctggtcctggtgggtttgctgaccatgactgggcaagccgttctttttgctgccatcttcctcatcataaagtgtggaacataggcaattgctttgagattcttggatagaagaggacaacattctgcacctgcccccttttttaaatctttggggaaagatgagtaactttccccactactctgccttcctgttcagtaactcttacttttgcctgaagtaacagcatcttctacttctccatctagagatttttgtgtgtgtgccatcaaggttagcaaactttatacgtagcctaacacctaaaaaatgcactcattatcttaaacctaataaattccagagtttattgtggttctcctctgttgcccttcctaaaaaatgagctgaagatgacagtatttttctttacatgcttggttatgacttttaaagttttatttaaataaatgttgaagctcaagtttaaagaagcgttgcagaggcccacggtctcctgggtcccggccacctgtccatattccacatttgctgactgtgctccctgcactccactcaagttgagagttcaaatagtcttgaaggggaatcagcttcaggatggaaggacccagggagaggccccgaagtgggnagggttctgtgaaatgacagactaantgcgagtgtccagagctctctgccatgatacttccttgggactgacttggctgagaacgtgttctgtcagaggatttgttagaactctgcccttttgtctgaaactcaaggccaaggagaatgataggagacttaggacagagctgacccttgcaccaggctgggaggctgcagcccttttagatgccacttactgtaagtggccagaataccagagaggtgggttcccatggtcaaatgcacagtaggtgtttacctttacatttggatcaccttgtagtctttaaattcttggtccctgaggccaagtccacaacttgccttctagtcacttgcctgcccgcagtggtggtggatgtgttagctggtagatttggaatcagtcaccagtctttctgtactgtcttggttagctctatataagtaggggcagcttagccctgaggcccagagacctgctgtcctttttctccttgagggaggaaataaaactgcggaatacaatgtccttccatagcatgggaagaagaaaataaacatctcctttcccccagc

SEQ ID NO: 358327 - DNA, 1445 bp, Homo Sapiens
  misc_feature (451)..(462): n is a, c, g, or t
  misc_feature (749)..(749): n is a, c, g, or t
  misc_feature (886)..(886): n is a, c, g, or t
  misc_feature (1076)..(1076): n is a, c, g, or t
  misc_feature (1183)..(1183): n is a, c, g, or t
  misc_feature (1210)..(1210): n is a, c, g, or t
gagggaaattctgactttgtgtaatgtatctctcatttttgaggcttgctctcaaaagggttattgctggtgtatagggactttatatgtaggtctttagctgctttgtaatacaaggaaaagagaaacaaaaattcttgacttcctccattttgacctccttcattttagaataattttcttagattcttactgtacttttccaaggtacccctgattaaccaggggctaatatacatgtcttccctgttcttgtttcctagaagtagatatgactgtgaggaatatgaatacataaattttgtacctttaagttcctttttaatcagaaacatactctgcatctgctgtatgatgacctagaagggagtgaaaccacaggcacatcaagatgcctttgaaacaggcaagaggcatcaaaatgtcaaaaccatagatttttgtgtggggnnnnnnnnnnnngagacagtttttgccctgttgcccaagcttgcactccaccgtccctctcacccactcctcataacccgatacccccagtaattcatacccgtaccccctccccgcgctacggacgatcacaacaagcggtttattatttactctcgcgaccacacgacaggtctcaccccgggaagtaacccgcgcatatcctcgacgctaaccccctcggccgaaaaattccgtttccccaccatagccataacgctcgtcctcgccctcgatgcccccccgctggctccgacgtntccaatactgctcaccaattgtgacgccagttcaccgactacaccacacgcatgacgtaagattcacaacctcacaacacgccaccgcagacataacaagagaggacagagagcgacatgcgtctcacggagccgtnaaaagcatatcgtgttgccgaccacagctgcatctagacagccacgtccggaatgcgccgcttccgtatattcgctcgcccacactgtttcgctcctcgccgctctacaggagcgtctcatgcgcaacagacgagtcaatattactacactctcagcacgctcctacatatccgactcagacaccgcacntcattggctcacacacgcataccacttgaaatatacaatatcttagcgtatcgccgcagctacatacggcttccaattctatacttacgaactcgatgatcacatcnacgatacatacgcgagacgtcagatgnctctacacgcttctccgatgccgtacatatgagtgtccgcgccgtataaccacgctcggccttagagcacgacctgatatatgacgactcagcacgccaacatcgcgtgaacaataccggccctggattaatagaccgcacatcgcgaaagttgtacctccgatatgatacccctgtgacgacactcaccgatgctcacgactcgacacacgcgcatacccacatctgcttagct

SEQ ID NO: 358328 - DNA, 614 bp, Homo Sapiens
gtaaacgacgggccagtgaattaaagaaaacattcaaaatgtttactgtgacttactctaggatctttatttttcttcctgaaaaaaacttatctaattataatgaaagtcactgagaaaacagaattcacttaattaagtgtctaacattaaatgttgttgaaatgatctaacatttatggccccaggacacatcctctcatttcattctcttgactaataagtgaaataaggctcagacttttccaagatcacatagcctgtgaagtgagaaagctgtgagaactttcagtctccaaatcttcatctcctttcaatctatcatatattggaatatgtcacaataattagttttcttcagaaactctttccactaaaagagtgtcttatcaacatttcccacatccttacactctcagtctctggagggcagaaattaatttccactcacaaaaccaataccaagtgtctactgtgtgctaaaggctctgctaggtgttggcagccatgaatagaccatgcctctatgtgagaagttcacagtctctatgggagaagaaataccagccaatagttatatacacaataacaaagctatgtgtgagacactgtgg

SEQ ID NO: 358329 - DNA, 544 bp, Homo Sapiens
  misc_feature (512)..(512): n is a, c, g, or t
gctaaattggtaatgttgcttgaactttatgactacattttcttttaacttttttcatggacttccttatatgtacataataattaaatgttgaaatttatgaaatacttttatgaatttagataatttttaaatattgttaaaatttattgaactaaaaagtaatgtaaataaaataattcatgttaaagatggaacaaaataattaactttacatgtttggtgatacagatgcaaatgtttttgatatatggagatgttgagtcttttgactttactaaaggtgctgaatagcattaaattcactattttccttttctgttttacttgtgaaaataaaaatgcactaaggttgggtagaagttctgtttgcactcactaattgtgacagacagaggtttttgtaagtatttattgtacaattgatgcatgtttatttttagcgttgttattgcctctggtgttaataaatgaacaaatggctatctggagaaagatattgtgggtacttntgggtgctcaattggggtttcccccccttctc

SEQ ID NO: 358330 - DNA, 888 bp, Homo Sapiens
  misc_feature (51)..(51): n is a, c, g, or t
  misc_feature (831)..(831): n is a, c, g, or t
gaccctgctaaaaaaagatttgattgatcaggaagatacatcaattccaangccaattatacctaataacgtagcattaaaatatatgaagcgatatttgagagaagagacttctggttctaaacaaatggagcatacatattttttcttattcttcccactaagtacagctaaaaactctggaaataattcttaaacattagagaagagaaaaagactagctagggactttggtacttgaagaatgttatggtgtgaaaggagtggaaataaaatattaatctgaaaaatatacaacatgttacattgtgtatatggtcttaaaatggtttatagactatcataaactgatgcgtacagatatgattgtgggatatagacattaataatcctttttctatggtgcatagagttgatttttaagaagaaaacgacttttcataatactccagcctcaaattttgcctcaccagaatccagtgtgttttcaagaactggaactttctccaggttggtttcattttttaaaatgatcgactttactatttgattacatttattatggaaaatgtaaatatgcagaagaatgctaaaatagaaagtacccattatcccatcatcccccaaacaacaaaagataatgtgtattcatttctagtccttttatgtggatatatagaattttaaaaacaaaatactgtaaaattatatcctgatttttcacattttggagtaaccatttcttgaggacaatattctttgcatgatcttcagtttcattgtttacatcagagtctaattatagctggaccatactttacctcaaatatntggatttcagattgtttaaatttttgctattggtttgtatgaatattttttatactt

SEQ ID NO: 358331 - DNA, 464 bp, Homo Sapiens
  misc_feature (112)..(112): n is a, c, g, or t
  misc_feature (405)..(421): n is a, c, g, or t
catccccatgcctttgacctccaccgacctctgcccaccatgggttggaactaacttgttaccttccctcgctccacagaagaagacagccagcttcaggggtccctgtgcnggccaagccagtgagcctgcggggaggctggtccaaggagaaagtggaccagctcccatgacctcaccccactcccccaacacaggacgcttcatatagatgtgtacagtatatgtatttttttaagtgacctcctctccttccacagaccccacatgcccaaaggcctcgggacttcccaccaccttgctccacagatccagctaggcctgacctgtgcctcatcccgagccgctcggactctggctgatcccgaggctttgtcttcctctcgtcagttctttaggttgtgnnnnnnnnnnnnnnnnnaataactcaaaaaaaaaataaaagacttggaggaagggtaaaa

SEQ ID NO: 358332 - DNA, 577 bp, Homo Sapiens
aggcaattgagagagagaactagttctctctctcctgtgccgcttatgcacacacagacaaaagtgtatatatacatgtcagagcatgtgtacatatgctttcgtatgtactcacacagtatgtctctagtatatattgtgggagtagatatatagatattcaaaggcaatgaaatattgctctccagatatatatgtatataaatagtgttgatataactgtatatacacatgtatatgtatgagttttaaatggcaatcttttacatttagcaaaatgctgcccctactggaatattgtcactgcagtggcagttgtatgtaatgatttaaaatacattatcaaaagttatttaaagaacatttaaagtctcatctaaagacatccacacactatttatttatcttccttttccttttattgttgtgtttttcttaactgaaagggagactgtcattttatgccatctgtcccatgagagtaagaaagagctggagattcacttgaggagctttgtgcatttttcctctctctggtggagatgttccacagaccagactggttatttcactttgc

SEQ ID NO: 358333 - DNA, 589 bp, Homo Sapiens
aggaattcggcacgagacctcattaaaaaggagcactctggaggacacgttttggcacctgttggctcccgtgtctgctgactgagggcattcaggagtaaatgcacaggtcggtccaggcccgtctgggtttgggatgcactgagttggaggttatgaaagctttgatcctcttcttcctctgctgggcctcgcagcattcccaagggtcacatgccctggcatgggcagaaactgggctaatgattctttgcccacttcacccctcgtgtctctctttgttgctaagttctttccctcttggaaggacagatctgccgggctgctatttatagttgcctttggcctttcactgctctgcgatttggcaggaaataaggcgattaaccctatgtgtccacaagcctcaagccttgtttcaggtcaccctcaaatcacactctctttaggcaaaacaggaaacttcttaagtgacaaattttaatgccagacatttaaggagaggattattgttgattccatttactcatgcttgcaaaactagagacccctaaggcagaactgagaataaacatgtttactttgggcc

SEQ ID NO: 358334 - DNA, 780 bp, Homo Sapiens
tagtggatcccccgggctgcaggtctgagctctctctctgatatgttctagccatgaatttgcctgagaaacttgtaacctatgtgcctcaatatattccatagaaagtaggtccccctgccttctcccactcctcacactcttctacagggataggcttttgcaaatatatcagataaattttttgtttcttgtttatttttaggttattttcttggaaggttgggaaaagatgtttgttttaacaggtcatgtactacgttgttgttttcatttctgttataagtaaaactaaaagcacagaatggtgggaaaggggctataatgtggttcattaataatgttagcagcttttttctaaccatcctgtctaatggttaagacaccagtaacaaaaacacatgatttggaaatactttggctttttcatatacctagtggtgccttatcataatagcactgttacatgaaataagcccctaccttcttactttctggtttgttgaaaaaatacactggtgctctttgaagtgataaaatgagtgtttatgaatgggtgtaattaggaaatacttctcatctgacagctacaaataactaagtttggaggtatttttcactctatatgaataaatatttttccataaaatagatgtgattatatttattgtttaaataggtcccaaaatataattgtcaaatatatattttaacatcactgttgtcattcttaggttggttttgaatttattcagtatacaggttgtcatactgcattgc

SEQ ID NO: 358335 - DNA, 2218 bp, Homo Sapiens
atcaggccaaatcggccgagctcgaattcgtcgagagcggactgcagcagccggaggtgacagcgacgcctcagccgcctctgttgctctcggagccccggcttcccctgcaccgggaaagcgccccctctcgagaggctggtccctggagaactgcgaacgagctgcagaaaaccagattttaaaatgtagaagtcgttgggctgcattcctccgaggaccagtctgatcgcccaggactaagagtggcagcgtatgagaagttgggaccatagcagcaagggggggaggggagtgttgcagcaggcattctcttctggaaggagtcgctgggagcagtgcggttggacacaagtttgcgtaggagtgttttccttttgtcaataattaatcaccggaattagccaggtagaatttgagttttagcaagagtcctgagggcggggccgaacacctaactccgggaggctcccaggcgcccggcgcagtgggaagctcgcagcagctggggaggagccaaagcctcggcgctcacctaagccgcagggagatacacccaactgggagatgaggaaacagcaacccagagaggagaactaacccacacaggatcatttcgcgaaggagcaaggctgaagaaccagacctggactttcttaggacaaacttactgcagcttgaaggagccaaccatggatttgaggcgtgtgaaggaatatttctcctggctctactatcaataccaaatcattagctgctgtgctgttttagagccctgggagcgatctatgtttaacaccatcttactaaccattattgctatggtggtatacactgcctatgtctttattccaatccacattcgcctggcttgggaatttttctcaaaaatatgtggatatcacagtacaatttctaattgatcctgttcacattcagtgaaatggcattgcatatttatatgttgcttacagcttattgatttaggtaactattgtgtcttccttcactatctgacctgaaaagcactctcttctctatgcactcttatattctgcctttctgcctggagtttgaaatacatgtctctttagtttcttttgcacatgctacattgtgctttagaccggagataatacagtgactttacctcacaaatcatattctgtcaacacaaatctatgaatttagtttatttaaaatcagaacaatttcctacaaaatttttctggaaaatagactcctaacagacctaccagaatcatgcttaaagtgctcccttgacacttattctatactgaaggataaaattttaaaaaatctttataggctactgtcagaagtatcctatccttgtttacgatgtataaaaagatgtgaataaattatatggaccccctaagtcttattttctagtaaactgatgatactggaaattcttttacttcaaatgcaaaagaataagctggaggcaattatttcctttcatacagagttcatgaattgttttaaatgcttcttaaagtctggctttataaccgtttaaaatcaacaatgttgattttagataaccaaggaagtattataatacaaaataattttaagtgtaagaaactaaagtataatcaaagtaaattcagttattgaatttgtggtgttgccttgccttgcataatgctgggggaaaaagagaaaagaaatggttttcttttggaactttcattcagtgtagagggaaaaaagcatgtattgggccaccgaaagacaagctaataaataggctgaaagtaatattctaccagcaggaactcaacagctccagttaaatgctttgatataggggctcctttgcagagccaaaacaagatttattaaatttccttcaaactgtttatcttttaaaacaaatataagggttttaattatactgctgaagcaaatgtgaatgccaaagactatgttttgcagttttgctttcctcccaataaatattaatgtatgtaattctagagggtaaaaatgtaaataggtttggacaatatttgcacccttgtttgtgttatgaaaaaaatttttccaaggcgagctagagagaaagatgtttggcatgccaaattaacttgcatgtttgttaaaaaaacaaacacatgttttgaagagaaaccagatctgaacatgtatttgttgagttttgcaaaataaaattaattttgtaagt

SEQ ID NO: 358336 - DNA, 773 bp, Homo Sapiens
ctagaatcttgttcctggggccactgcttgccagggcgttacaccaaattaaattattggaaacatacatgtgctgagactcttccacatccaaggtgctgtctaggggctgctcagggtgcacagataagtaggtgccaatatcctgcctctggcggctgcagtaggagaacaaagcaagtgtggggaaggtgtggggttagaagagttacagagggccttgattttcaaagggagaaattatacttggctgagtagttgccagtgtggagcaaatgggggtttcagatgggagagtgaatgtacattcagaattctgctttaggtagagcagcaggtgagcagggcatgaggtttagcaggatgcaggataacccatcaaaagcattgaagtgagaagctgaccaccagcaaagcagtgggtttgaacggtaaagacagatgggagccacataagagacagcatctattgagacccccccaacccaaccgacctaagtgaaagcaaaagagaagcaatgaaagctcaagatgaggctgaagtttggagcccctgggactgaggctatggagaagcctttaatagaataagaaacaatagatcaagtgtctcagggtgtcattagggatgagcttagcttccacaataccactacaaactccccacatacactgaccctgcctcttaattttccagcctgcccgcctagccaaaagcatagggaaggccctcggggtgcatttctgtaggcaggggtcattcctgagcagat

SEQ ID NO: 358337 - DNA, 1757 bp, Homo Sapiens
  misc_feature (109)..(110): n is a, c, g, or t
gagaatacctctttgttttgttgtgaaaaattctgaagtacgagtgccactaatattgtcatattttgtgttaaggatcatcaaaattttttgagactcctcacagaanntgaagactggctgtatgaagaaggagaggaccaagctaaacaagcatatgttgacaagttggaagaattaatgaaaattggcactccagttaaagttcggtttcaggaagctgaagaacggccaaaaatgtttgaagaactaggacagaggctgcagcattatgccaagatagcagctgacttcagaaataaggatgagaaatacaaccatattgaacagtagggaggaagttaacctagattttaataagagaaccaacctaaacaagcaatatgttgacaagttgaaagaattaatgaaaattggcactccaggttaaagttcggtttcaggaagctgaagaacggccaaaaatgtttgaagaactaggacagaggctgcagcattatgccaagatagcagctgacttcagaaataaggatgagaaatacaaccatattgatgagtctgaaatgaaaaaagtggagaagtctgttaatgaagtgatggaatggatgaataatgtcatgaatgctcaggctaaaaagagtcttgatcaggatccagttgtacgtgctcaggaaattaaaacaaaaatcaaggaattgaacaacacatgtgaacccgttgtaacacaaccgaaaccaaaaattgaatcacccaaactggaaagaactccaaatggcccaaatattgataaaaaggaagaagatttagaagacaaaaacaattttggtgctgaacctccacatcagaatggtgaatgttaccctaatgagaaaaattctgttaatatggacttggactagataaccttaaattggcctattccttcaattaataaaatatttttgccatagtatgtgactctacataacatactgaaactatttatattttcttttttaaggatatttagaaattttgtgtattatatggaaaaaggaaaaaagcttaagtctgtagtctttatgatcctaaaagggaaaattgccttggtaactttcagattcctgtggaattgtgaattcatactaagctttctgtgcagtctcaccatttgcatcactgaggatgaaactgacttttgtcttttggagaaaaaaaactgtactgcttgttcaagagggctgtgattaaaatctttaagcatttgttcctgccaaggtagttttcttgcattttgctctccattcagcatgtgtgtgggtgtggatgtttataaacaagactaagtctgacttcataagggctttctaaaaccatttctgtccaagagaaaatgactttttgctttgatattaaaaattcaatgagtaaaacaaaagctagtcaaatgtgttagcagcatgcagaacaaaaactttaaactttctctctcactatacagtatattgtcatgtgaaagtgtggaatggaagaaatgtcgatcctgttgtaactgattgtgaacacttttatgagctttaaaataaagttcatcttatggtgtcattttaaactcgcccccgcacattccgagcgcaccctgtcggaccgcccggccctggagaaactttttagacccctccccttcggcgtgccggccccataaggaaagtgaacaagcgcccatagctgttccccaggcaaaccgcggtcctcaataatggcttggatcccccccc

SEQ ID NO: 358338 - DNA, 1332 bp, Homo Sapiens
  misc_feature (18)..(18): n is a, c, g, or t
gctgggattgacatcttntgtgcagtaatgttcccatggtggagttaagtctattactttgtcatggggctgtagttctacatccagtgtcacctgaaatagctgaggatatttttctggtacatcacatgcatctaactcaggcttggtgaactttaaaactgttgtgtcaagtggtatgaatccagtgtgaaactgaagctggaatatctgtgtgttggtcaccttagcctgtagccggctcccaatggttgacctcaagtgatacatggaaacaaccacgtctccttgcacagtgatgttcaagggaatgaagatttttccatcttggacacgatattctttcattcgttcaaaatctgtgcaagtcgaatatattttggtttctccaatgagtacatcacagtaagggcgacatccattcctctgtttgttgaaaaagggtattggactgacagtgatcgacttaattgtgagaggcttgaagtgagggcggtagggcttgtctgccagtaggtcacacatatagcccaggtatctcctatgggatggtgaaagtccaattcctggtcgctttgcatatagcaatcgaatggctgggccaggagtagagtagagattacagaaaatgaacatagcaccaaccagaattgatgatgccgcccgtccatccaagcagtggacaacacagacatttttgggattctgcagtagccagttatacatattccgacacacagcaaaaaggttgtgcagactgggagcctgcctaatgggccaactgcattctgagacccggctgtgaaacttggcagttcgataagacttaggtgacagattgtatactgtgtagtggtcaagatgtctggaatccaaaaagcttcgaatgtcatcaacctgattcctgaatcctatgtcaacattgtccagaggaaaggacatcacaataattctggaggtaacataagtgaagtctaaatctccctttgtgtagctggtcacagattgtatcactctagaagatgtgtctttgagggtgtctttcaagttgtcctttaggttactaaagagcctccctgcacctccttttaccatgtcaaagagacctcccccatagctgggctccatgtctggagatgaggcaccctgcgccgcctggcgagctgagcgtggcctccacagccgccgggtcgccttccacggccgccgacaaggaaaacagcgtccggctcttatggcctccattctcagaggcgcccacatcggtggcaccgcagccactccccacgcgcagcgctcagcccgagacgcgagcgccaccgcatcgccgcc

SEQ ID NO: 358339 - DNA, 586 bp, Homo Sapiens
gctcgtgcagactgggagcctgcctaatgggccaactgcattctgagacccgggctgtgaaacttggcagttcgataagacttaggtgacagattgtatactgtgtagtggtcaagatgtctggaatccaaaaagcttcgaatgtcatcaacctgattcctgaatcctatgtcaacattgtccagaggaaaggacatcacaataattctggaggtaacataagtgaagtctaaatctccctttgtgtagctggtcacagattgtatcactctagaagatgtgtctttgagggtgtctttcaagttgtcctttaggttactaaagagcctccctgcacctccttttaccatgtcaaagagacctcccccatagctgggctccatgtctggagatgaggcacctttattttcagaatctttcattctctgcttcctccctctgctgcaaatgagcaggaaagtccggctgattctgcaaccctgacttttgatttgtcattcacagtcagcggtctcgggggcgaagtctctcaacggaggagcactcgggctatgataattgcatgcaagtcggtgtgcggggttat

SEQ ID NO: 358340 - DNA, 1848 bp, Homo Sapiens
  misc_feature (1802)..(1802): n is a, c, g, or t
gggttcagagaagtatgcaagaaactgtaaataagttacaccaaaaggaggaacagtttaacatgctgtcttctgacttggagaagctgagagaaaacttagcagatatggaggcaaaatttagagagaaagatgagagagaagagcagctgataaaggcaaaggaaaaactggaaaatgacattgcagaaataatgaagatgtcaggagataactcttctcagctgacaaaaatgaacgatgaattacgtctgaaagaaagagatgtagaagaattacagctaaaacttacaaaggctaatgaaaatgcaagttttctgcaaaaaagtattgaggacatgactgtcaaagctgaacagagccagcaagaagcagctaaaaagcatgaggaagaaaagaaagaattggagaggaaattgtcggacctgggaaaagaaaatggaaacaagccacaaccagtgtcaggagctgaaagccaggtatgagagagccacttctgagacaaaaaccaagcatgaagaaatcctacagaacctccagaagacgctgctggacacagaggacaagctgaagggcgcacgggaggagaacagtggcttgctgcaggagctggaggagctgagaaaagcaagccgacaaagccaaagctgctcaaacagccggaagatgccatgcagataatgggaacagatgacccaaagagaagactgagactctggcctccttggaggacaccaagcaaacaaatgcaaaactacagaatgaattggacacacttaaagaaaacaacttgaaaaatgtggaagagctgaacaaatcaaaagaactcctgactgtagagaatcaaaaaatggaagaatttaggaaagaaatagaaaccctaaagcaggcagcagctcagaagtcccagcagctttcagcgttgcaagaagagaacgttaaacttgctgaggagctggggagaagcagggacgaagtcacaagtcatcaaaagctggaagaagaaagatctgtgctcaataatcagttgttagaaatgaaaaaaagagaatccaagttcataaaagacgcagatgaagagaaagcttccttgcagaaatccatcagtataactagtgccttactcacagaaaaagatgccgagctggagaaactgagaaatgaggtcacagtgctcaggggagaaaacgcctctgccaagtccttgcattcagttgttcagactctagagtctgataaggtgaagctcgagctcaaggtaaagaacttggagcttcaactcaaagaaaacaagaggcagctcagcagctcctcaggtaatacagacactcaggcagacgaggatgaaagagcccaggagagtcagcaaatgattgatttcctaaattcagtaatagtggaccttcaaaggaagaatcaagacctcaagatgaaggtggagatgatgtcagaagcagccctgaatgggaacggggatgacctaaacaattatgacagtgatgatcaggagaaacagtccaagaagaaacctcgcctcttctgtgacatttgtgactgctttgatctccacgacacagaggattgtcctacccaggcacagatgtcagaggaccctccccattccacacaccatggcagtcggggtgaggaacgcccatactgtgaaatctgtgagatgtttggacactgggccaccaactgcaatgacgacgaaacccttctgatggaagccttccaggggaaaaactggggcttggctcaaaaccgcccttcgcattggaacacaaccgttaacacccagncaattgggggtggggcgaaacttttccggggagaacaccccgaggg

SEQ ID NO: 358341 - DNA, 1350 bp, Homo Sapiens
  misc_feature (64)..(76): n is a, c, g, or t
  misc_feature (1274)..(1274): n is a, c, g, or t
ttgccaaccctgcctgtatagccagcaagaatttctaattatagcaaacagaaacacttgcagnnnnnnnnnnnnntgagaacgggaacatgataattttcaaagaaagagtcttctttcaaggaaagtcaggttcatggttacgaagctgctgacccccaggatcccagcccgtgggagagaagggggtctctgacagcccccaccccgtccccactgccagatccttatggggtctgagtttcaggggtggggccccagctggaggttataaaacagctcaatcggggagtacaaccttcggttgctcttcggggaaagctgctttcagcgcacacgggaagatatcagaaacatcctaggatcaggacaccccagatcttctcaactggaaccacgaaggctgtttcttccacacagtactttgatctccatttaagcaggcacctctgtcctgcgttccggagctgcgttcccgatggtcctcctttggctcacgctgctcctgatcgccctgccctgtctcctgcaaacgaaggaagatccaaacccaccaatcacgaacctaaggatgaaagcaaaggctcagcagttgacctgggaccttaacagaaatgtgaccgatatcgagtgtgttaaagacgccgactattctatgccggcagtgaacaatagctattgccagtttggagcaatttccttatgtgaagtgaccaactacaccgtccgagtggccaacccaccattctccacgtggatcctcttccctgagaacagtgggaagccttgggcaggtgcggagaatctgacctgctggattcatgacgtggatttcttgagctgcagctgggcggtaggcccgggggcccccgcggacgtccagtacgacctgtacttgaacgttgccaacaggcgtcaacagtacgagtgtcttcactacaaaacggatgctcagggaacacgtatcgggtgtcgtttcgatgacatctctcgactctccagcggttctcaaagttcccacatcctggtgcggggcaggagcgcagccttcggtatcccctgcacagataagtttgtcgtcttttcacagattgagatattaactccacccaacatgactgcaaagtgtaataagacacatcccctttatgcactgggaaaaatgagaagtcattttcaaatccgcaaatttcccctatggagccttcaagatacaaaaagagaatggcagccctggtaatcacagaaaccagggtccagaagaccagaaaccntcctttcccagctacttccaatccgtgggaaacggtacaccggtaacaaataaagaaaacccccgggaaaaaagaa

SEQ ID NO: 358342 - DNA, 687 bp, Homo Sapiens
aattttaggtctgcagttttaacatcttccatttctaacttcattatagccccagtgtccaaaggctgaagctaacaactaagtttcttaacagcttatgaaatgacatactaccagataacaattctgacattaatcacccagaagtaaagacttggtattgggaaaatgctcttaaaattaccatttgattagtattcatctgccatctttctacactgccaagatttgcttaatataaaactcagatgaaacaatcgtgaggctgggaagaatgggacagttgaaacaataaatgcttgtcatctcagaagataagcattaaagatggagataaagaaaaattcatgagacagaagatctaggcaatgatttagaggaaacctcctcccaaaaaccccagaggaagaatatgacctgtgtttcaaattttgcctttctgaactatttaaaattatgtgtatgtttttgctttgtattttaaaagtaaagctgctgtcctcaagaaacaggctaaaagtgtgttgcccattgggggtttgccctgacatcagttatagttacttacttgccaatcagcagatcaaatgttcgttccatgaccttctggataccaagtcgatcaatatctctcatggaaaaatactggatatcatagttctttaaaataaaactgtgatgagatat

SEQ ID NO: 358343 - DNA, 937 bp, Homo Sapiens
cacggggcgggcggacgctggcgcgggtaggtaagagcagcggcgggcggtggcgctcactcccggcttccaaccgcgcggagcctctgccttggagattctcagtgctgcggatcatgtccctaaggggcagcctctcgcgtctcctccagacgcgagtgcattccatcctgaagaaatccgtccactccgtggctgtgataggagccccgttctcacaagggcagaaaagaaaaggagtggagcatggtcccgctgccataagagaagctggcttgatgaaaaggctctccagtttgggctgccacctaaaagactttggagatttgagttttactccagtccccaaagatgatctctacaacaacctgatagtgaatccacgctcagtgggtcttgccaaccaggaactggctgaggtggttagcagagctgtgtcagatggctacagctgtgtcacactgggaggagaccacagcctggcaatcggtaccattagtggccatgcccgacactgcccagacctttgtgttgtctgggttgatgcccatgctgacatcaacacaccccttaccacttcatcaggaaatctccatggacagccagtttcatttctcctcagagaactacaggataaggtaccacaactcccaggattttcctggatcaaaccttgtatctcttctgcaagtattgtgtatattggtctgagagacgtggaccctcctgaacattttattttacaagaactatgatatccagtatttttccatgagagatattgatcgacttggtactccagaaggtcatggaacgaacatttgatctgctgattggccaagagacaaagaccaatccatttgagtttcgatattgatgccatttgaccctacactggctccagccacaggaactcctgttgtcgggggactaaccc

SEQ ID NO: 358344 - DNA, 849 bp, Homo Sapiens
aatgtattaacagctttattaacaaagtactaggactaatagcaacaaaatcaaggagttgcaaccataagaaggatgagtgtccaaggacaaccagttaagtattattttaagtattattttatcctcttcctttttaggagacaaagaccaatccatttgagttttgatattgatgcatttgaccctacactggctccagccacaggaactcctgttgtcgggggactaacctatcgagaaggcatgtatattgctgaggaaatacacaatacaggtatgtagcaaccagggtctgcagcctgttaactacataggtaaatatgctagagtctcttgcctgcaaaggatcttttctgctattccacatcattgcagagtttgtttttgcttaaacttttgtagctaaaaattatatggccatgctaataaaaaggatatagtcctttagagtcatgcttggacatggctcttaccaaattacactaaggtaataatgagtaaaaaattgtatatttaaacaattaaatacaagaataaattgtcaaactgatgcagttctttgagttatctaaaggcagattaagataagaaggcaagataagataagagtgcaaggctgtaatttgcactctaagagattggttcattgggagttgtgaatttggagctaaagctgatctcttgaagaaatctgcaaactggacaatatcttgggtcctttatgtagggtaggtcttgtactagagcctgaaaggatttctaataagggggatacagttagatgagaatggctgatggaaagagtactaagatgaattccacgttatcaagactggctacttttcc

SEQ ID NO: 358345 - DNA, 630 bp, Homo Sapiens
  misc_feature (115)..(141): n is a, c, g, or t
ctcaataataggggtatacctgggaggatccagcagtaatccccagggtactaggattactagtactctgatggaactagtcttccttccttattcctcgaacatgcagtacatnnnnnnnnnnnnnnnnnnnnnnnnnnnccttactttgttttacttgccatttattgtaaggaaactttaaagcattttttaggaaatactcaaaagcaaggttggaaaatgttttatctttctatagaaagttgggtacagtatgtaactgcgggaaacccactgcccctttgtaagctgtggaacccaaactgtatggggatatttgatgttttcagaaagaggaagaaaatatggtccaaattaaattttccaaagatacctcaccttggactgatttgtctgactacttttcttgctccccccaaaaaatgagttcttaaaaattgcccagtgacttatagagaattttcttttatactctagctttgattctgtgctagtaggtatcagtattgcaggtggcaaatcctagttacccttttaatttatcttcatttgacagctcctttcaagtgatatttctttatcagtattactcagtcctgaagactgatccaagagttttcttttgtt

SEQ ID NO: 358346 - DNA, 548 bp, Homo Sapiens
ccaacgcctaaaaaaaggggggaacatatagcatagtactctaatgtaccaatgtgggaaaaatgttagaaataacataatgaaattatgttatcataataaaacatataatcaaataggtataagcaaagccataaatattgtttggaccagaggacagcatattctgaccaacataaaaagaaaatagctaatttaaaaaataacccttttacctaaagtcattattgaaagtttcaaaagagaaacactttagaagaaaatgtcagtttttgaattttttaaaagctcatacaaaacatgaattccttttcctaaattagtctcaggatcctggataaatgtcataatgtccccatagagtgataaagggtgagaatctggccctgaataaccactaagtgaatttcataaatatttgaaataattgtccttcactgttttaagtagctatcctcctgttgtggttcctcctcaaaaacacctctattttacaataaaacatattgtagccaaaatctcgtgccgaattcctgcagccaagggga

SEQ ID NO: 358347 - DNA, 814 bp, Homo Sapiens
  misc_feature (66)..(66): n is a, c, g, or t
  misc_feature (83)..(265): n is a, c, g, or t
aacagggtctttctgtcaccaagatgagtacagtaaggtatctaagccactcaacctcacttctgnctcaaatgatctcccgnnnnnnnnnnnnnnnnnnnnnnnnnnnnnnnnnnnnnnnnnnnnnnnnnnnnnnnnnnnnnnnnnnnnnnnnnnnnnnnnnnnnnnnnnnnnnnnnnnnnnnnnnnnnnnnnnnnnnnnnnnnnnnnnnnnnnnnnnnnnnnnnnnnnnnnnnnnnnnnnnnnnnnnnnnnnnnnnnnnnnnntttgtccatgattttgacagcatgacctgctaattctaccagagactccagtgggaacactcagcaaaataggctttgactcccacagtttccatccttttgcagataaataaggaagtaagtacacctttggctaaaactctggcactctgggcagttgatcctggcagagtccaagggtcagacccatggacctgtgaagtgggcaaccgtttccgggaactgtccatagcacttgctggggtgaccaggtcctgcctttcacgtcacctacttatccgactatttcctccatttgcttcttttctatttgccatcacctgtgacccgatggggccagacccctggttcatcccaaaccacatgacatgaacggactcttcctagggacagaggtttctccccagcagggatgccctcaccctcattcaatgtttatcgtctcttttcaattcctttagaacctcagccccacacatacatttattaaatgttcttttcttctcaaatatgaatggtaactctagtgagagcctacttgaacaggct

SEQ ID NO: 358348 - DNA, 321 bp, Homo Sapiens
atgaaccaccgcaccccagcccagcatttgtcccttggtggactgctttatttcacttagcataacgtcctcaaggttcatctatgttgcagcaggtgtcagaattcccttccttttaaaggctgaataacattgtggtatacaccccattttgtttatccgttcatctgttggtgtgtattcaggctgtttctgccttcgggctgttgtgaagaatgccgctatcaacatgggtgtgagaatatctgttcaagtccctggctatatttttcttttggatatttagccagaagtggaattactggatcatctggtttcttt

SEQ ID NO: 358349 - DNA, 298 bp, Homo Sapiens
ttatttaaatatatataaaaagtcattggtgaaaagagttaagaagtaggttgcaagtttaatcaggtggctagagaaggactcactaagcagaggtgtttgagaaaagacctgaaggagctgactgtgacagggaggggagcgggaatgactcatgagatagctgtgtggaaagcatcccaggcaaaaggaacagcaagtgcaaggcactgacgtgggagggggtgtgtctgatgtaacagaggagccttgtgccctggagtagagcaaacaaggggaaaacactaaaggatatact

SEQ ID NO: 358350 - DNA, 620 bp, Homo Sapiens
  misc_feature (373)..(373): n is a, c, g, or t
  misc_feature (376)..(389): n is a, c, g, or t
tgtgtctccttggctctctatttcagtgagcggccgcgtctctgttggaaccggcggcgttgcgtctaaaaaggcgaaagccttgaggttgaaggtgggacgagcctaatgaagtggttagtcaacgaccgcaccgacccttaagcgttcttaagacgagagctgtgaggggaaactacgcaaggagcccttttcccttaatgtcccttcgactttcctttcacttcgaaatgaatgtggaaatgctgtcacgccttatttttctaattcctcgatgttgggttttttctcttctttatatctcaacttttaatgctcttcttcctatgacctttcatctaaaaactgaccactcctttacaggtttttacgngtnnnnnnnnnnnnnntctgtctttctttaatcttacatagctgaacgaattcattggctcagtatttttaagataactagtcagtatatactgttctgtaacttaaaagatgacctgaaaattaacaggccctctcccatttctcttctcactctatcccccaccgaagagggctcagaaaaaagtttttattaatatatttggggtcggagaaatacaaacatcacaaagaaggtaccgagctcc

SEQ ID NO: 358351 - DNA, 832 bp, Homo Sapiens
ccccacctgtcgcacgtctgttcttctcacctagccgtggcatgattataggagtacagctgcgtgcagggatcagctgttgtataaacgcgcggtccttcctctaagcttgcactcaggcagctcggattcgcatctgacttacacttcacatccaaggaggtgattatcccggcctgtgtttggttgggtctccaatttctctagaacggaatgtgttgggggtactacataaagggattgaataagcgctggcgttttcaaatagggtcccttgtaacttattgatgagagggcactgattgaccggggagggctttaaaatgatttgggaacaacttattgcttttgcggctcagttgaccatcggccaaagattatcaaccttacagagaaacattcatcagaaatgaccatatataaggacagttgcacggttattttgcaacacaagggggcggcaaggtccccatttttatcctgtaatactgtatccctaacaaagatttggtctctgctatcttacattattaatgtttctcagatggctgaggggctcgcttcatctgttccgtctgacacttatctcaagtgtgtctgtcattcctaatgttctcaggatgtgctctgataaaaccctccccataacctcagttaataaaaatttacagaagacttctcaaatacctgagttgtttttaatacctgtacaaaggagtaaataggaccctgagtctattaaaatgtaattcaaagtagcatatgattgactgacagtcatgtaaactgtatctttctttttctgatttaataaaaaatacatttacttcta

SEQ ID NO: 358352 - DNA, 627 bp, Homo Sapiens
gccaacgggccagggccgatcgggcgggccctcgcttattcgcccaacctgtcgaaaggggaatgttcggcaaggggattaagttgggtttcgcaagggttttcccagtcaagacgttgttaaacgcggcgcagtgaattgtaatttttttgtcaaaataaataaaccaattaattaattaattttaaaaaatgaatgaatgaaagcaaagtgcagtaggtgctcccaggagggagagatcccatcttgatggtgggtgggagggggaccagggagactgtggaaaaagtggcactagagtcagaacgtagacatgcggagaaaggggggagggcactgtatgaggaaaggcacggggatcggacactgtgccacatctccggggaagagaacccttttaccaagcctccgagatccttgcaatgtggtcacagtctgccatgttttgtggtcacactcaaactacgtttcagccatagcaagccgctcacagctcttcgactgtcccagctcaggcctttccgctgctgtctcctctccctgccgtgccctctccttgagtactaggctgctgcagtccaatccggctttccacccaaagaatgcaaaatcggcacgagctcgtgc

SEQ ID NO: 358353 - DNA, 765 bp, Homo Sapiens
  misc_feature (63)..(63): n is a, c, g, or t
  misc_feature (88)..(88): n is a, c, g, or t
accccggaaccaattattgaaatgtgaagagatcattttcagcatatttatatattaaaacanaaaaggataagtattgagccagtgnccaaaaggtaatattactaccatgtagactgttatagttcaaattgtcccacttcacccagaattttagaaactagaagtctgggaggtactatatcagctgtagttgggtaattccaagtgctgatagtactattcatcttttttattattgtgtcagatgaaacaaatgccaagttgcaaaatatgcagatttttattatataatggttttaggcataaattattaacaagccatgccttatgtgtttcatcttatatttttctttagaactaaactataacagattttggaaaatgatttgacgtgcttgctcacttgattgacttggtcagatatttgaatgatggtattacctagattctaatccttgattctagttatataataaataatatagaatatgaaaatatgtttgggcatttactgtttatattatgtagtagcctccatcatgacacacttactacatttatgaattgagcagttctgtaattgtaattattattgctgttcatgtaacaaaacatgcttatgataatagcaaacaaatagaaatgcccccaaaatgctatttttttaattcagttataactgttactcttgtagttgtgtatgacgcaataaaatttgtaaaaaaatttcagcatgaaaaataaaatttgtatcactcatgt

SEQ ID NO: 358354 - DNA, 704 bp, Homo Sapiens
  misc_feature (39)..(39): n is a, c, g, or t
  misc_feature (273)..(303): n is a, c, g, or t
ggcaaggcaacaagtattgagaaaagttcaaaaaaatanagccatacgcttcaaatgctatcaaaaaccttcaattctaaactcatacatataaataaaaaggaatgatgtaaggctcttgattattaagttaataaatcaaatatacacagtgattaataaaaaagaattatttacatagctatacaaagttctacttttgacatttttttctttaaattcttcattttaccagcaactgctgacatcaaagtctcccttcccccatcatcnnnnnnnnnnnnnnnnnnnnnnnnnnnnnnngtcatttgtgatcgttgctgtggttctgagctgcaaaggcactttcaaatacagaactacttgtacgtcatcataaaacctatatacaaaatcaactcaagagtcaataaatataaataaaactatgatctaagactgcatcaccattaggacatctggcagaagtgggagctcaaagaccagggggctgggcaggctcctggtgatgcaaggtctccctgaaacttcctggcacttggcaccactgtgccctggagggcagacacaccggtagccattgatctcatccacacaggtcgctccaaaggcacaaggtgaagactggcattcattgatgtttattctgcagtcgggaccagctaaacccggggcacattcgcaccggtaaaagttgtctccat

SEQ ID NO: 358355 - DNA, 1100 bp, Homo Sapiens
  misc_feature (1038)..(1038): n is a, c, g, or t
  misc_feature (1051)..(1051): n is a, c, g, or t
  misc_feature (1081)..(1081): n is a, c, g, or t
ggcacgagacattgccattccaaggaattctgagagtaggcaaacaaattttgccttcatggtacagttctcagtttttcttataggagaaatatggtatatgtttataagaatcttttatgagattatagatttcaatgctgtggatagtgtcttgcacccaaacaagaaagtccataatggaatgatcttccctcagcttcctatcgatttagttacctcttgaaagcacaaaaattaaaacattgccatatgttgaatttttaaaaagcacttggagtgagcgaacatttcctgataaatgccttttagagataggttcttgatattcagacatctgcagaaatgttctggttcccaaagtcatttcacttcgaaataaaacacagctccttcaaacagcactttttccacataaatctagttgcctctccctgtggacattcagaactgatagaacaaacactactcttttgaatttgatggattcgtgtcctttaaagtgtttgaggacctatgcagagcctgtaacacttgggtagtacctgctaggacaatttcttggcaattgtcttactactagggatcagtaagatttagattctgagcccataatggcaacagccccctcacctatgggaagctgacttccctcagtcgggcacttctcatgggggctgaacatggttcctgccattctgttacccactctcccaggtgagccctggattggctcccagaaggcctttgtaaaatcagtagccatcctgcaggcaggtgggagcaacaggggcttcagtagcttcattttcctgtcttgcagacagagacccttggctaccactgtgctgctaataggataagtactctgttgccagattaccatgccttttatacaaaaccaaattaacttacctaatacctgacacctctttggggctctgaactgctttctcttcatcaagcatgctaagcactctaggacagaattctaggaatttgggcagacagtgggaaggcctttaattggaacttaantccttcgttggantgaaagggagttttaaaattctgaggttcnggaggatattgattaggca

SEQ ID NO: 358356 - DNA, 841 bp, Homo Sapiens
  misc_feature (699)..(699): n is a, c, g, or t
cactctcccaggtgagccctggattggctcccagaaggcctttgtaaaatcagtagccatcctgcaggcaggtgggagcaacaggggcttcagtagcttcattttcctgtcttgcagacagagacccttggctaccactgtgctgctaataggataagtactctgttgccagattaccatgccttttatacaaaaccaaattaacttacctaatacctgacacctctttgggctctgaactgctttctctcatcaagcatgctagcactctagacagaattctagaaatttggcagacagtggaagcctttaattgaacttactccttcgttgactgaaaggagttttaaattctgagctcctgagatactgactagcaaccatggaatgaatgtgtgaccagaaagtggctttgacaccaagtgctactgtccctttgtaattggcttctaacagattcaaccagaaataattgataatgtgaatttttgttaattgttcacttgtaggaaaatagaacatgtatcaccctttgttaggtagacatgaacttttcctgcacaaagccttgcttttagagaatgcccaataaggcaagaaaaagcatagtaacttgtgctttgagagctcaatatttgtatcttatcagtacagaagaaatatttctgtgtaacttgatcttctgtctagtacttgtcnttataggtaaccaacactgaaaacttttgtagtgatgactacccaagaaatacattagtaaaacaaaccttttatttcccaattgtttaaagaaccaaccctttgatgctggctacatggattcccatgcctcaagaaccct

SEQ ID NO: 358357 - DNA, 467 bp, Homo Sapiens
gctggtcctcaaaactccctgaccctcgggtgatcccacctgccctcaccctccccaaagtgcctgggattaacaggcatgaagtcattgctccccagcccattagaaagattgttaatccctatgaactcccttttgtaggagagaaagggccaatctgtaggggtagccctgtccaggtaaagttgttttcagcctcatgtctactgttaggtgagggagtcacagccagacagagagtattgctggagggtgagagaattgtggagaccaactaccacatagcaagagcccagctcttgggagcattgagatgtaagctcagggttacacagttccaaatcttgggaaggggcttttcagacagactgtttgctttctgctgagataaggaatgcatcactctgccagagtatgactttttacagattattaaataaagctgcatatgtctcattgttaaaaaa

SEQ ID NO: 358358 - DNA, 535 bp, Homo Sapiens
ctgtgcttacgtaagaaaacacgtggagaagatcaaaaattccatggatgggaagaatgtggatacagttttgatggaacttggagtacgttatcatcgacttatctatgagcatcttcaacaatattcctacagtcgtatgggtggcatgttggcaatttgtgatgtagccgaatataggaagtgggccaaagacttcaagattccaatggtattacatctttctgatactctgcatgctctttgcaatcgtctggtagttgccccagataatttaaagcaagtctgctcaggagaacaacttgctaatctggacaagaatatacttcactccttcggacaacttcgtgctgaatatagaactgccccgccttgctcgacacttcagatgagattgaatttacaaagggattcagcgccaagtcctttacagaggaatggcttatacttaagcccccctctggtggatagcaccacgagatacctttggcacaggcaacattttgggccatggcctggaccagccccttccttc

SEQ ID NO: 358359 - DNA, 1463 bp, Homo Sapiens
  misc_feature (224)..(233): n is a, c, g, or t
  misc_feature (781)..(781): n is a, c, g, or t
  misc_feature (882)..(882): n is a, c, g, or t
  misc_feature (1153)..(1153): n is a, c, g, or t
  misc_feature (1191)..(1191): n is a, c, g, or t
  misc_feature (1202)..(1202): n is a, c, g, or t
  misc_feature (1411)..(1411): n is a, c, g, or t
gatatactggtggaaggggggagaatcccataactaactgctgaggagggacctgctttggggagtaggggaaggcccagggagtggggcagggggctgcttattcactctggggattcgccatggacacgtctcaactgcgcaagctgctgcccatgtttccctgccccacttcacccccttgggggctgctcaagggtaggtgggcgtgggtggtaggaggnnnnnnnnnnacccagggctctggaaggacaccaaactgttctgcttgttaccttccctccgtcttctcctcgcctttcacagtcccctcctgcctgctcctgtccagccaggtctaccacccaccccacccctcttctccggctccctgcccctccagattgcctggtgatctattttgttcccttttgtgtttctttttctgatttgagtgtctttctttgcaggtttctgtagcccggaagatctcccgttccgctcccaagcgggtccagtggaaaattcccccttccccctggggaaaatgcacctacccttggtttttggggggggttttagggggcggatttattggattttcaaggcagggctttgcctccttttcggctattttttctttaccccttgtgccctcttttgtcccacccttcttaaattttgggaagaggaaaatggtggcacaggaacaacggaagaaataacaagaggcaatggttcgtgagaataggatcgcgaccccttcctatcgccatgagaacacacgttcattcagcggggncgcgccaattattcctcgacgcgtgtagtactagagtcgacacacaatatttacgcacttaacgttgtctaagaacatcatgcgacgcgtgctgggtgctnctcttatgtcacgcattattgtgaatcgtgtcctctcacatgatttccatatcttcaccccacccacgaatcacatctgacccttttcttcactcttcagaacctcgttatacagaatactgcgaaacacaactcctaaccttgtcttaacaccaacccactttgccgcccactctcgtgtatccgcaaccattcttatgcgatgattcccctccaactgcgggaaaaacccgcgccgcctccggcgcaccacagcaccccctcgtctatncccccgctctggcgcggcgccgcccccgccccccactnatcgcccctancacaacatacgagcgtataaacacgagaagccacaccccaacgagcccacaccctacacctccacccacctccggttgcttcacttcacagccaaatacacccaggcattaggaccgcaggcgcgtgagaaaatacttaaccctctgtaagcgacttccccgcgccgaaagctagaatacacgaagaggtaaggtgcgcactgtaaggncgtaaatcccccccctcctctgcgccacgcgtagagcgacagacctataccg

SEQ ID NO: 358360 - DNA, 914 bp, Homo Sapiens
  misc_feature (440)..(503): n is a, c, g, or t
gtttcaagaaacattgctgagggtagcagtgaagttggatgtttgctaggaaattatgaaaacaaatgtgactcagagaggtcatttcacattttatctttatatcctctctttactaaacctgtgtttggataagttggtcaatcatccaaggatcctctatgttttctttacagttgacactgggtcaattttctaaggaaaacaccttgacaaataaagcatcttcattagaggtcaggaggaaaaataactattctctttcaaaagaaaatctgaacaatttttttagcatggcccaatgttctatttcctatatttagaaactttgaataagggtctagtaatcttgtctcagaggcatagaaacaaaagtacagttattaggtttaactatactcaaactatttgctatttttaaacatttttgctgtaagttnnnnnnnnnnnnnnnnnnnnnnnnnnnnnnnnnnnnnnnnnnnnnnnnnnnnnnnnnnnnnnnnattttctttgttaaaaataacaattgaaaaagactggcatgagacatgaatggctgagtcatttaattgccatacaaataaaatgctgacaggtttcaagcaaaaaatacagtatgcaccttaaataatgcctcagaattgtataatttaagctcactaaaaaccttacttagtcttaaaattctccttaggggagccttttcagcagttatggacatcaaagaaaaaagtatcttgtaaaagcacaatgaaatttagaaaatacacattttagtggcaatcacaaatgtcaatataaaagatacataaaatatgttaatgcaagaactttttcatattcattgaaaactataactttgtgctatttataaagtagatattttccaggtatggaaatataatttggaaacc

SEQ ID NO: 358361 - DNA, 941 bp, Homo Sapiens
cccagctaattacctcaaatgtgtgattgtttaatatataccacactatgtttgcacagagcagggcttccattagcagtggatatttttatgtctgactttgaaaatcagtcaacacaatttcattggtgtgaattatttgttgctctttttcatattttaatggagagattcctattataaggtccatgctttaaacataattatatctttctatatccagccatctggaaatacataggggtaagaagtatttcttgaaatgtccttgtttagtaagttagtaaaaactgggatgactagtttgcaagatgtcttgtaactgcatagcagatgacacctggcatggcaagtctcattcacttcagcacaacactctgacatttcagtctgatatttactttgccatttaatgacaccattatatcatagagattttcagtgacattggagtattgtaattattactttcaaaaaattatttttaataggatgattaaaccaatgagaagaaacacacataaatgatattttgcagtttatctgtattaagaaatgcttcttgccaatttctagttttagtttttggattgctacataagactttctttccatttactttatgtgtttttaaaagctgcaggtaatttttaaggtttgatggaattataatggaagccttgtataagttaaatgaaattggtaaaggagagcttactttgtctataatgcattcaggattaaaaattagatttcaaaatgaaatgtctgatttgtaaaatatttaatgttatatcagacttacataaaattttctgtgagaactcaaatgcatttgatttttaatgaatgttctgaatgaaatatgaatttttgtctttcagtctctgtagtttatctcaatatattaataaaaaggtctgttctcactgtaaaaaaaa

SEQ ID NO: 358362 - DNA, 685 bp, Homo Sapiens
atgagccaacgcgcctggcccactttttaaaaccaaagctaactcttcttagctactacacccaaatcagatgatcatttaagccaccatgtgtttgagttctaacctccattgtctcagtgcctcaccacagatttctggaacctggtagaagttctaaattatagaacaagttagaactaactggtggtgatggaagggaggaaatcacaagggaaacttgaaaaggtaatgtatccaccagcccctggggcagggcaagtttccagctgcccatggagctcaggtagcctgggaagtgtgctcagagccgaagccaacatctacttttgaaaaagaaccaccttcttttttggaaggtgcaagcaagtcttccctttgccttctcacttcatcattcttaccctagccacagtcgttcactggcaagtgttttttcagtatgctgaaaaattaattgtggagcctgtatctgatgcctggatgctgagtgggcatgagaaagatatttgttacagtttcaggtcaaactaaaggggagacagtgataacaagggttttctatgctatggaaacaaggaccactataggctcggatgaggttaagcaacttgatgatcaaccaccaccgtggtccatgtaaaacaaggactttaggccaggcacagtggctcatgcctgtaat

SEQ ID NO: 358363 - DNA, 189 bp, Homo Sapiens
gtcttttaaaataacattttatttttcgttgtcaatgattaacttttaagtctattagaagagtatcatgattatagtgaataaaaaaatatagatgagagaatacaaatattaggttatacaaagttagttttttaaaaatcattgtccaccaaaattttcaggactttggagttctcaaaaaaaaaa

SEQ ID NO: 358364 - DNA, 991 bp, Homo Sapiens
  misc_feature (574)..(574): n is a, c, g, or t
  misc_feature (584)..(584): n is a, c, g, or t
  misc_feature (932)..(941): n is a, c, g, or t
ccggaagaaacagttccacacgggctggcctgaccatggagtgccctaccatgctacagggctgctttcctttatccggcgagtcaagttatcaaaccctcccagtgctggccccatcgttgtacattgcagtgctggtgctggacgaactggctgctacattgtgattgacatcatgctagacatggctgaaagagagggtgttgttgatatttacaattgtgtcaaagccttaagatctcggcgtattaatatggtccagacagaggaacagtacatttttattcatgatgccattttagaagcctgcttatgtggagaaactgccatacctgtctgtgaatttaaagctgcatattttgatatgattagaatagactcccagactaactcttcacatctcaaggatgaatttcagactctgaattcagtcacccctcgactacaagctgaagactgcagtatagcgtgcctgccaaggaaccatgacaagaaccgtttcatggacatgctgccacctgacagatgtctgccttttttaatttacattgatggggagagcagtaactacatncatgctgctnctatggacagctacagggcaacagctgctttcatcgtcacacaataacctctgccaaacactgtaaaaaacttctgggaaataagggtatgatttatggctgtaccctccatggggatggtaaacgaagtcaaccttgcccccagggctgcccctcaatactgggccaaaggaaaggaatgcttccaaattggcccctttccaaggggaaaggtatggctttggttccatgggactggggaattgggttccacccggaattttttaaggaatttggaattctaacaaaaaccccccgggaggggtgtttttttgtgtggggggaaaccaattttcccaaccccccgannnnnnnnnnttttctccctcccagaaaaaagcgcccttggtaatcccaaaaggggggtc

SEQ ID NO: 358365 - DNA, 750 bp, Homo Sapiens
ggtctggatttccaggccgggaatcgtgtggaggcatgcccacaggtttggacaacttaaaaggaaggaaaggagggaacaggttgcttcttcattgtattgggaaaggcaatttcatttggaaagggcagtaaatggtgcatcaaaattccaaaaggtttcaattaggactttcaaacgtaggaagcaaagttttttgttgctatttaataatacaccacacgggaaattatttgccaatgaatcccaaagatttggtacaaatagtacaattcgtatttgctttcctctttcctttcttcagacaaacaccaaataaaatgcaggtgaaagagatgaaccacgactagaggctgacttagaaatttatgctgactcgatctaaaaaaaattatgttggttaatgttaatctatctaaaatagagcattttgggaatgcttttcaaagaaggtcaagtaacagtcatacagctagaaaagtccctgaaaaaaagaattgttaagaagtataataaccttttcaaaacccacaatgcagcttagttttcctttatttatttgtggtcatgaagactatccccatttctccataaaatcctccctccatactgctgcattatggcacaaaagactctaagtgccaccagacagaaggaccagagtttctgattataaacaatgatgctgggtaatgtttaaatgagaacattggatatggatggtcagatgaaagataccaaaatgtcacc

SEQ ID NO: 358366 - DNA, 922 bp, Homo Sapiens
  misc_feature (390)..(390): n is a, c, g, or t
  misc_feature (729)..(729): n is a, c, g, or t
  misc_feature (860)..(860): n is a, c, g, or t
  misc_feature (903)..(903): n is a, c, g, or t
aagatttatgaaaggtacaaattgctgaggagaagcaggaaacctgtttccttagtggcttttatcccctcggcatgcgatggggctgatgtttctataattgcctcagactttcacatttactagtagggctgagagaggctttagtgaggaaggaatattcagaataaaacggttgagaaagctgagaagaccattgagttttgatcagttgtgaatagagtgcaaagccatggccaagctgtttttggaaacgctggccggcgtgtcttcagtggaaaaagcaaatctggagcgagagcggggcgtcctcagtcctcaacctacaatcactgtatggaatcggtcctggcagctgaacataggaggtcactggaacaagtgatagtncagattggctttcaaacatcctcctggcttgagttttatcagctacaatgtgggtcctcttttgaagccttaattcacaacagcagctttttgggggtggggctgggcgggtgttgtcattgttctttcccttcctgtaagtgtcgctagttgctgcctcgtatctcaggtttttctctgtttttgagaaatggacagttttttgaccaggatgtgacttcatgtttcctatggtgacttctaaaaccagcacagaatgatatgactcaacacagaccgacttggttatggggatgatgagccgcacagacctcactagttggtgcacaaataatgtgncaatgatggggttgtaaagtgaaaggcagaagaaggggtcagccgcattggtaatgatacctggggaaagtgctgggtcaacggatttgaggttagttttttagataatacattgaaaatcctttaaatcnggaccattctccaagtttccacacagtaggttttttgatggtnatggtacacacacaccaaa

SEQ ID NO: 358367 - DNA, 719 bp, Homo Sapiens
aagcagaaagtccaaaatccaatttaaattgaaggtggatttaaaaggttcagttaaaggtaaaaaaatttttgaaaataggaggaaacccttattaaaatttgttgagtggacattggatttggaaaagtttagaaatgtaaacaaggtggacaaggatttgagattggatgggaaggcaaggccatcaggtggtggcaggagttagtgggctgttggagttctataataaacccttcccccaattgtagacctgacctaggatgaaaagataacccctcctccatgctgggagtgtctctttctgcctgcccaggggcacctgggacttagggtcagtttcattctggcactgttctctcttgtgattttagaacattttctcacttggcacaagtgatgcacaaatgttgtgattaacagctgcctagcccagttgttgtcaaaaggggaggttcctttgtgtgataaaatgtagataccaaattatatgtgcagctttaacagacaactcttttcccacccaccctctatcccccaaaagcaaaatatcttttgtttttccaaagtcataagaggcacaaacaggtagcaagaaggcatcagtgaagcatctcccgctgagcactctctttggccctggtgagtgatctttcctctattcaggtgatgacagtgggtcccctccggccagttctctcatgaatctaggatatttt

SEQ ID NO: 358368 - DNA, 1328 bp, Homo Sapiens
  misc_feature (264)..(264): n is a, c, g, or t
aagtgggaacgtaggtaagtagatgcaaagaggtaagtgaatgtataaggagtataggggaattgggtagtgggtccctcatgaagttatgtgtttgttatttgtagaagcaagagtttattaggtgggagtattggtaagtgatgcattaaagtgtagttcgcaaagtgataatttatgtactttgtaagggataataatatgaagatttaacatgacaggatagtagttgatttgagtaagtaggtggtaagtgatagcggntgtatgtattgggagttagagagcaatagaatatggtagcgagtttaagaaatgttattgtatacaatgtgtggaatatatgaataatataggtttataagttatgaattgatttttaaataatgggtttaggctaggcaggtgtaggtctggttttgggcctagtgtcaggttgcatgcctgtatttggttttaattcattgttgttttttattaaaacaggtaatgagtataaaataatatgagagggtctctcttccctcattgccataactcattatttgttgaagtatggagaaggttggagttgtagggtcagtgggccctcatgggagatgggggccatacctggtccagccaaggcctgtgaatgcagctcaagccacatcccctactttctcccatcccctcctccggaagcctcttccctgatgtcccctcccaggcaggcagcctcagccagagagcctggaaatcactggggcggtggagcctggagcctgctgtctggctcagcccgtggactctatgccctcacactccttctccccccctccaagttcaggcagcgcctggggcaggtccccctcaggcatctgggccacctcggcccactgcgtccgcagagtggggctggcccctcggctcagcagaagccccacggtaggcccatgccctcgctctgcagccaggtgtaggggggtctttcggagccagccggtagcatccacctgggcacccctgtccagcaggcagccggcaacctccacgtggccttcccgagaggcgtgatgcaggggtgtgaggcccagggtgtcccgcgcatccacctcggccccctgggtgaccagcaactggacggcaagcaggtgtcctcgggcggcagccctgtgcagcgcagagcggccatgcctgtccctgatgcctgggtctgccccgtggcccagcagcacctcaatgtcctgggagcggcctagggcggccgccagacccagcgctgtggcccccgcgccatcccgggcgtccacccgcgccccgcgcgccaggaggaagcgccgcccgct

SEQ ID NO: 358369 - DNA, 2248 bp, Homo Sapiens
  misc_feature (1496)..(1540): n is a, c, g, or t
ccgctccaattcagcagcccctgggcaggtcccccctcaggcatctgggccaccttcggcccactgcggtccgcagagtgggcctggccctcgggctcagcagaagccccacggtaggcccatgccctcgctctgcagccaggttaggggggtctttcggagccagccggtagcatccacctgggcacccctgtccagcaggcagccggcaacctccacgtggccttcccgagaggcgtgatgcaggggtgtgaggcccagggtgtcccgcgcatccacctcggccccctgggtgaccagcaactggacggcaagcaggtgtcctcgggcggcagccctgtgcagcgcagagcggccatgcctgtccctgatgcctgggtctgccccgtggcccagcagcacctcaatgtcctctcctccacgctggcaccttgccgcagcagctgcgtcaccaggcctgcagggcccctccacacggcctggagcaggtgcccccagccctggacaacactaggcccctctgtcctggttcccagggcctcttcggagtccagctccatccaccgcagttcctgttcctcctcctcctcctctctgggctcaggcctgctgggaggccatctgggggggagcagggatcctacatccactgtggaggcctctggcctgcccccagccgtgtcccaggccaaactggagccccccattccagttaccacgttagccttcagaggggcttggctcttgttacccaagggagctggctcaggagctttctgctctggcatgagggtcctctgtagacgggttcttggccgaggctcagcctggtgaccctcgttcacagaaatcccgttctgcaggctttgggatggaagtgtctgctgctgaaaagctgaatggtggcaagcttcagccttgcagggggtgggagaacacagctggtccctgggccaggctgaggccacctgacgctgtttactcagccacttaggaaggccctgccttcgggcacagccccctgtccaacatactccctcccctgctggctgcacagggccccagttcggctgccctcctggggaacaaaggccaggcggttggggaggacaagcaggaacatgcttgtggacgaaagttgctcagacgccacctcccccaggaagcgcagccttggatgtaccccgatgtgcccctggaaggcctcacagggctctccatggggcccaccctcgggcagccccctcacccactcctgtcccagctggctaagcccacccaggggtgggtgccggcccctcctcccgattccaggctggggaggagggcagggtgaggttctggccttcctttctgtaaatgctggacaggacaaaagattcaccaaggactccaggcaggtggcctggaaaagagggtggcgctggcatgggagggacgaaaacccttggggactggctggggcaagtctggagccagggaagggacagatgccnnnnnnnnnnnnnnnnnnnnnnnnnnnnnnnnnnnnnnnnnnnnnagaatccctgctagggtgcgtctgcatctggaaaagcagctctgccccagcaaggcctggggcagcgggatcctgggggcctggggcaggatgggtggggctggtgctgagggcatcttcctgtctccagtacctggggccaggcaggaaaagggagcatggctctccgggggaggctccaacaaaccaggcccctccaaacgccgccacggagaaagggaatcgagagcctacccgattaccaaccaccccatccaccctccagataccccaacgtccccccacagtataagtattcgcacctcccgggccacctgtgaccaacgtggacccccccctcccaacaccccacccgtacctcagccgttaatcaatcacacagcccaggaggcggtacccataggaagcctacacgtagctcccacaacccacaatgttcgccccacaggaacatgacgacgcagcggcaaccgagaccaagaacttctcatcaccacatccctcaactcctccaataagaccggaaccacctacccaacatacaacacaccacccagccgcatttacaaacacagccaggaaatataattccacacacccatcacgaccccaccactgcccccagcggaaccccccgcacttgcacccggaccacctgcaccaccagatccccccatccagccgcacaggttctccccgcagaacaac

SEQ ID NO: 358370 - DNA, 940 bp, Homo Sapiens
ggtccggaattctcgggatcttttcagcagcagacactccaccccaaagcctgcagaagggattttgtgaagagggtcaccaggctgagcctcggccagaacccgtctacagaggaccctcagccagagcagaaagctcctgagccagctcccttggatggactcccagaggcctgagcccagagaggaggaggaggaggaacaggaactgcggtggatggagctggactccgaagaggccctgggaaccaggacagaggggcctagtgttgtccagggctgggggcacctgctccaggccgtgtggaggggccctgcaggcctggtgacgcagctgctgcggcaaggtgccagcgtggaggagaggacattgaggtgctgctgggccacggggcagacccaggcatcagggacaggcatggccgctctgcgctgcacagggctgccgcccgaggacacctgcttgccgtccagttgctggtcacccagggggccgaggtggatgcgcgggacaccctgggcctcacacccctgcatcacgcctctcgggaaggccacgtggaggttgccggctgcctgctggacaggggtgcccaggtggatgctaccggctggctccgaaagacccccctacacctggctgcagagcgagggcatgggcctaccgtggggcttctgctgagccgaggggccagccccactctgcggacgcagtgggccgaggtggcccagatgcctgagggggacctgccccaggcgctgctgaacttggaggggggggaaaaaggaaatgggaagggcatagagtcccacggggctgagccagacagcaggctccaggctccaccggccccagtgatttccagggctctctgggctgagcgcccctggcctggaaggggacatccagggagaagcttcccgcaaagaaggggatggg

SEQ ID NO: 358371 - DNA, 529 bp, Homo Sapiens
  misc_feature (73)..(163): n is a, c, g, or t
  misc_feature (430)..(430): n is a, c, g, or t
ttcaagtgattctacagcctcaacctcctgagtagctgagaccacaggcgtgagcccccacatagggtaattnnnnnnnnnnnnnnnnnnnnnnnnnnnnnnnnnnnnnnnnnnnnnnnnnnnnnnnnnnnnnnnnnnnnnnnnnnnnnnnnnnnnnnnnnnnatgagctaccatgcccggcctcttttcactttcttgatgatatcttttgaagcacaaaagtttttaattttgataaggtccaatttatctaattgagtgtgtgtgttaagtgtgcttttagcgtaatatctaagacaccattgcctaatacaaagctgaagagatgtactcctgttttcttctaagaattttataggtttagctattaaagtctttggtccagtttgagatcattttgactatggtatgagtgccactgtattgctntgcatgtggatattcaagtttccccgcactatttattggagaggctcttacttactcctttgtatccttttctggtttatgagtgtcttgctctggcaa

SEQ ID NO: 358372 - DNA, 639 bp, Homo Sapiens
ccggcgtatattcttcttaatacttctgctaatttctgaattttcctatagtagatataatatgtattttcaaatatttacctgaaatatatatttgtgttattttaagaaggaagaaaagctgaaaataaaaatgtttatggatgaaattagaacaacagaaaacttgaagatgcattatgattgcattatgtgaaggtgcacacgcatttagtaataactagaagatgtcaaaacacatgattttgttagagtggattggtaactttttaagaactaagtcctttaaacttttaactaattaatttttacaataaaataaagggaaactcatgccatgtattcccttcataaacttaagagacccccattatcctttactttaaaattcctataggatgtcattatgcttctttctattgtaatggcttggtttcagatcactaataaagaatctggattacatttattgacagttagttttcctgatcatgtataaggaattaaccatttgagttactgattattctttaaagaactgtacattttggaagcctcaatataagttacaagtgatcgcatatctctgcaaacattatacagtgtttaaattcagttacttgacgcagcttttgggtt

SEQ ID NO: 358373 - DNA, 1409 bp, Homo Sapiens
  misc_feature (1063)..(1112): n is a, c, g, or t
  misc_feature (1184)..(1192): n is a, c, g, or t
cggcggcggaagcggatcgcactctcttgtgggcaacttgaaacgaaagtgaccgaggagctccttttcgagctttccaccaggctgggccagtaataaaggtgaaaattccaaaagataaggatggtaaaccaaagcagtttgcgtttgtgaatttcaaacatgaagtgtctgttccttatgcaatgaatctacttaatggaatcaaactttatggaaggcctatcaaaattcaatttagatcaggaagtagtcatgccccacaagatgtcagttgtcatatccccaacatcatgttggaaattcaagccctacctccacatctcctagcagcaggtacgaaaggactatggataacatgacttcatcagcacagataattcagagatctttctcttctccagaaaattttcagagacaagcagtgattactctagtttgatgtcataatttctcatggagttaaaactggactcttcaaaatgatagagttgtctgaatttggctgaaatgcgaactactaatcgattcaagcttgttatcaagacacctagagatcaccagatgacaggattggacattgagaaggaccagattattgagatgcgctgtctgataactgactctgatctcaacattttggctgaaggtcctaacctgattataaaacaaccagatgagttgctggacagcatgtcagattggtgtaaggagcatcacgggaagtctggccttaccaaggcagtgaaggagagtacaattacattgcagcaggcagagtatgaatttctgtcctttgtacgacagcagactcctccagggctctgtccacttgcaggaaattcagttcatgaagataagaagtttcttgacaaatacatgccccagttcatgaaacatcttcattatagaataattgatgtgagcactgttaaagaactgtgcagacgctggtatccagaagaatatgaatttgcaccaaagaaggctgcttctcatagggcacttgatgacattagtgaaagcatcaaagagcttcagttttaccgaaataacatcttcnnnnnnnnnnnnnnnnnnnnnnnnnnnnnnnnnnnnnnnnnnnnnnnnnntgagaagaccgtgagttgatgccagttatcatgctgccactacatcgttatctggaggcaacttctggtggnnnnnnnnnctcacgctgatggcttggcagagcaccttccgttaacttgcatctccagattgattactcaagcagacagcacccgaaaaactatttttcctcctaatatgctggttccctttatgaccccccaacttcctttggaagtaacccaggtcatggtcccttccccttgggaacctaatatggcattttggctttttaaaacccatttttctttttggtc

SEQ ID NO: 358374 - DNA, 1486 bp, Homo Sapiens
  misc_feature (43)..(79): n is a, c, g, or t
  misc_feature (1025)..(1025): n is a, c, g, or t
  misc_feature (1340)..(1340): n is a, c, g, or t
tcgattcactatagggcgcctggagtttacgcggtggcggcgnnnnnnnnnnnnnnnnnnnnnnnnnnnnnnnnnnnnnatcaggccaaatcggccgagctcgaattcgtcgagagcggggccaggttagggagggggcgacgctgagatgggggcggcggcggcggaagcggatcgcactctctttgtgggcaaccttgaaacgaaagtgaccgaggagctccttttcgagcttttccaccaggctgggccagtaataaaggtgaaaattccaaaagataaggatggtaaaccaaagcagtttgcgtttgtgaatttcaaacatgaagtgtctgttccttatgcaatgaatctacttaatggaatcaaactttatggaaggcctatcaaaattcaatttagatcaggaagtagtcatgccccacaagatgtcagtttgtcatatccccaacatcatgttggaaattcaagccctacctccacatctcctagcaggtacgaaaggactatggataacatgacttcatcagcacagataattcagagatctttctcttctccagaaaattttcagagacaagcagtgatgaacagtgctttgagacaaatgtcatatggtggaaaatttggttcttcacctctggatcaatcaggattttcaccatcagttcaatcacacagtcatagtttcaatcagtcttcaagctcccagtggcgccaaggtacaccatcatcacagcgtaaagtcagaatgaattcttatccctacctagcagatagacattatagccgggaacagcgttacactgatcatgggtctgaccatcattacagaggaaagagagatgatttcttctatgaagacaggaatcatgatgactggagccatgactatgataacagaagagacagtagtagagatggaaaatggcgctcatctcgacactaacacatgttaaaaggacattgtttttatagggtcattttaagccctttgactaagttgatatgggaaatattttgcntgaaaaactgtacagagcagctttacaagttgtcacatttctttatacatttttttaaagctacagtttaatacaaaatgaattgcggttttattacattaataacctttcccctcagggttttttgaagaggacagggttttatgccaaagaaagtgccacaattccctaatcattttagacactttacgaggggggggaagtttgtattgacaaagcccgtacttttaaattcactcgttaccctttttggactggccaagagtattccttgcttagtgaactccagaaaacccttccccgggcttgaccgcnccacaaaagggggttacctgggaacttttacggttaaactcccaaaaaaggaaaacctttttctagcgggattcccacttttacctaaacagtttgtaatttcgcaaaaggggcgttatatggggggaaaaagcttttggggcgga

SEQ ID NO: 358375 - DNA, 1468 bp, Homo Sapiens
  misc_feature (52)..(88): n is a, c, g, or t
  misc_feature (927)..(936): n is a, c, g, or t
  misc_feature (1177)..(1301): n is a, c, g, or t
  misc_feature (1303)..(1305): n is a, c, g, or t
  misc_feature (1319)..(1334): n is a, c, g, or t
gactgatagactcatatagggcgacttggagcttcaccgcggtggcggccgnnnnnnnnnnnnnnnnnnnnnnnnnnnnnnnnnnnnnatcaggccaaatcggccgagctcgaattcgtcgagagcgggagactggggccgtggctgctggtcccgggtgatgctaggcggctccctgggctccaggctgttgcggggtgtaggtgggagtcacggacggttcggggcccgaggtgtccgcgaaggtggcgcagccatggcggcaggggagagcatggctcagcggatggtctgggtggacctggagatgacaggattggacattgagaaggaccagattattgagatggcctgtctgataactgactctgatctcaacattttggctgaaggtcctaacctgattataaaacaaccagatgagttgctggacagcatgtcagattggtgtaaggagcatcacgggaagtctggccttaccaaggcagtgaaggagagtacaattacattgcagcaggcagagtatgaatttctgtcctttgtacgacagcagactcctccagggctctgtccacttgcaggaaattcagttcatgaagataagaagtttcttgacaaatacatgccccagttcatgaaacatcttcattatagaataattgatgtgagcactgttaaagaactgtgcagacgctggtatccagaagaatatgaatttgcaccaaagaaggctgcttctcatagggcacttgatgacattagtgaaagcatcaaagagcttcagttttaccgaaataacatcttcaagaaaaaaatagatgaaaagaagaggaaaattatagaaaatggggaacatgagaagaccgtgagttgatgccagttatcatgctgccactacatcgttatctggaggcaacttctggtggnnnnnnnnnnctcacgctgatggcttggcagagcaccttcggttaacttgcatctccagattgattactcaagcagacagcacacgaaatactatttttctcctaatatgctgtttccattatgacacagcagctcctttgtaagtaccaggtcatgtccatcccttggtacatatatgcatttgcttttaaaccatttcttttgtttaaataaataaataagtaaataaagctagttctattgaaatgcnnnnnnnnnnnnnnnnnnnnnnnnnnnnnnnnnnnnnnnnnnnnnnnnnnnnnnnnnnnnnnnnnnnnnnnnnnnnnnnnnnnnnnnnnnnnnnnnnnnnnnnnnnnnnnnnnnnnnnnnnnnnnannncaaaattgtgcggnnnnnnnnnnnnnnnnaaaaaaaattttcacaaaacccttttttttgggggcggcggggccccccaaaagagaaagggaaacgggggcaaaatgggtctcccaaagaaaacccccgggaaaagaaaaaaggggtggggatcccccccacc

SEQ ID NO: 358376 - DNA, 1012 bp, Homo Sapiens
atgttatacatcaagaatctcattagcagtagccaagagaatatattggtatttcataatttctactgaccacaaaaggattgatttgtgttttaaaatcagtgcaaagcatgctcctaatcattgtaataacagaatgtcagtatttagtttttcttcagaaaacaagttttagaagttagtagaaggtaaaataatccttaactatggtaagtggtagaagcagagtaagactatatggaagttcagatatgtaaagtggtaagcgctaaaaaatgtgggtttttcctttccccttttcacgaaaagccaagaactactagaatgtaaatgaacagaaactatactagaaatttgagttggtaagaagaaaatattacctttttaaagaaagagtataatggatcagaaaaacattttccatgtataaagttccatttttttctgtctatcttttctttattctccttttacctccattaccacttctcttgccactattccttcccttgtacccatccttcatgtctcctagagaaataaaatacaaagaatgatgaaaaactatttagtctactattattttaaggaggcgaactccttgagagccctctatgcttttctcaatgtatctatattgtttaattcaataaatataagaaagcatattcagattcctttgatttctttacatctaaatcttatttgtttaatatatgtaaatgccagttataccttgcatatttcaagtgaaatgagaaagaatagtttatttaagatttccttaaaagagctgaaaacaaatctttatgttatctgatacttgaattttggatgatgagtggtgaagatgtctataaaacagattaaacacaataattcagtgtgaatgacctcatttaatttgtatgaagtagtcaagctgaaagaatgagcacctccagaggacattattaaagcagtatctctctcgataaccatatttacagaaaaatagatgtatgctcgtgca

SEQ ID NO: 358377 - DNA, 755 bp, Homo Sapiens
  misc_feature (19)..(19): n is a, c, g, or t
gccggcccaaggatccgcntgctaagatccaaagtgtgggattaaggcgtgagccccatgccggccacaaatacggtcctgaccataagaattgataatagaccagggaacctcaaaacgatgtcaattatctctaaattaatctataaagataatacaataacaataaaaatgccaacaagacagaggagcaagactttggttagctaattctaagccatatagaaaaataaacaaagaaaacttcccaggaaaactctgggaagtagaatgagggaagatgataaccaaggaatagagtcattaggtataaataggtaatctgatcaatgaaacagaataaaagtccagtaataaccccaaactgtaggaactaagtacacctatagacaacatttcaatcagcagggcaaagctgaactaaatgaaggacactgccataactgggcagccatctggaagaaaagtatagttggattcccacctcgacactttatttaacttacattttgtgtgggtaagtgcatttaacttaaaaataaaattacagaagtacctggagaaaacacaagaatatttaatttgaattagaaataataataaaataggaaaggcctttcttatgacacaaaacctagactctgaaaagactgataaatttcacatcaaaacatttaaaacatttaatttctgatgaaaaaatagaccataatcaaagtcaaaacgcaaatgaaaaactgtgaaaaatatctgca

SEQ ID NO: 358378 - DNA, 1029 bp, Homo Sapiens
ccagaatagtgctcttgcaccactgagggtgctagactggctttgtgcatcttatttcctaagaatatcagtttttattatgaccttaattataaatacctatatataggagtaggattttctctcacccaaccctactttaatcattatcacttaagtgtaaacctccacctccccctctttccctttaccgaaaaaaaatgcactttaattcctaaggagagtggctgttcctggccctgaaaccagattacttcaggaggagagttaaggagggagagctcttaccagaccctgtgaaatgaaccaaatttcttaatgtaaacacacaagtaataacatccacttttaagtggcccccactccatgccaaagggaaaaagaaccgccaaattgaaaaagggttctaaatacctgtcctgattttggaagtttcactggggaaaaactacctaagattattttcacagctaccaatttgtcagaaactttggtggtgttttgtgggaggctgagattttttaaattaaaaatcaagtgaaaacacaaagactctaagacacgatcctgatttgtgtcatttctaagtatcagatttgttctcccttcatttgacaggtgttctcagtctctcctcctgtaagattctgtccttcccctgatgacaagccaatagttcttggtggggttgcatgtctcctagagccccaggacccctgtcgtgtcggggaaggggggagggcaggagggtgggcagagactcgggttgggggagggagttcaaagaaagagtgaaaatatgggtttatataaacatatttaaagcagtttagcaaaagctttctcgttgaacagctttaagaacaatgtgaatgaaatcttagcaacttggttagtaatctgaaaagtctattaatgtatacttgaaattctgtttgtataaaaatgcattttcccctttattttaacactgtgtaaaagaacattatgcatgtgagtggtttgagaattaaatggtttaataatcag

SEQ ID NO: 358379 - DNA, 767 bp, Homo Sapiens
agcggaacatgagcagaaaaagtccagcaagcggactttgccagcagactacggtgattctctggcaaagcgaggcagttgttctccgtggcccgatgcccccacagcctatgtgaataacagcccttccccagcgcccactttcacctccccacagcagagcacttgcagtgtcccagacagcaattcttcttccccaaatcatcagggagatggagcttcacagacctctggtgaacaaattcagccttcagctacgatccaggaaacacagcaatggctgctcaaaaacagattctcttcctacacaagactgttctctaatttttcaggtgccgacttattaaaactgacaaaggaggatttagttcaaatttgtggtgcagccgatggaattcggctctataattcactgaagtcaaggtcggttagaccccgtttaaccatctatgtctgccgggagcagccaagcagcacagtgctgcaagggcagcagcaagctgcaagcagtgcaagcgagaatggcagtggggcaccctatgtttatcatgcaatctacttggaagacatgattgcctcagaagttgctcgaaaacttgcgctggtgtttactatccctctccaccaaattaatcaggtttacagacagggttccaccgggtattcacattcttgtatagtgatccagatggttcagaaatttccaagcatgagagttgccttggaattctccacagtaaaaagctgaaagtagttgatggccatcc

SEQ ID NO: 358380 - DNA, 991 bp, Homo Sapiens
  misc_feature (137)..(137): n is a, c, g, or t
  misc_feature (500)..(525): n is a, c, g, or t
  misc_feature (929)..(929): n is a, c, g, or t
ctaccaatgtgaagaatgtgggaaggtcttcagaacttgctcaagcctttctaaccataaaagaactcattctgaagaaaaacccctacacgttgtgaagaatgtggcaacatctttaagcagttatcagacctcanctaagcataagaaaacccatactggagagaagccctacaaatgtgacgaatgtggaaaaaactttacccagtcctccaaccttattgtacataagagaattcatactggagagaaaccctacaagtgtgaagaatgtggcagagtcttcatgtggttctcagacattaccaaacataagaaaacccatactggagagaaaccctacaaatgtgacgaatgtggaaaaaactttacccagtcctcaaaccttattgtacataagagaattcatactggagagaaaccctacaagtgtgaaaagtgtggcaaagccttcacccagttctcacacctgactgtacatgaaagcattcatacttgannnnnnnnnnnnnnnnnnnnnnnnnnggcaaagccgttagtatctgctcgcatcccactttacatcagagttcagacttaataaagttatcataaatgtaattactattgaaagacctttcatgaaatataagtctccagagcacacaagagtatttcttctgaaaaaaatgttacaattatactagatggaagacttgcatcagttgcttaaactttcagaaaatttgtagagaaacccaacaaatctcataaatgtggaataacatttgttcaaaaatgatagcttagaaaacactagagttcatactaaaagatattttgcaaatacactaaatggaaaaaatagcaaaatccaatttaagtaaacaatggaggatttgaaggagaatggtatagacacggtgcctttcagaaatgacactgaatcnctgtgttgagtctacagagacatctagacttttgatcatttatcattcacgtttgggaggtg

SEQ ID NO: 358381 - DNA, 587 bp, Homo Sapiens
  misc_feature (412)..(412): n is a, c, g, or t
  misc_feature (565)..(565): n is a, c, g, or t
acacttcacatttgtgtctttttcaacagaatgctggctcttaacaaaacctatctactcatttgctcaacccttttagacatttaaatagttacagaagcattacagcatatcactacaaaaaaactgttggagtttagtatttctttgcagtcacttttctctagactgactactgagtataaaagttccttggattatttatttcaatgtggttgttactgatttgaaataagttagaattggtttcttttggtttttagtctcctccatcatccttattggattaatttcattttttggggggactactgggaagatcacccttcttgcaaaaataaagaaatatacaaataggtgtaactcaaatgtcatgggtttgtctgactcagcgactcatccctgtgaagcngggtaaccaactttataactttccggttcattcttacagtgtacacttttgaaaaaagtaaacagtagatgtacagcgaaaatatgttttctgaatggtccatgtgtccatcagcaaaagatcaacatagcatactagttacatctcatcctnccctgtgaaagggggatcctct

SEQ ID NO: 358382 - DNA, 434 bp, Homo Sapiens
gcatgaattcggcactagtgcttcccgtctgcgcgagtccacgcagctccccaggtacccgccctgcactcctgaccctttcttctctccagtcatccaaccccacctaccccaagtcttcctttctcggatccctgggtcccctccttgggagttgccaccattccctcccggtgctcccttccagagctagcgagccagaaccgtagtccgcggaagcaacctgaccgcgaggtcaacgcgttgggccccaggtggcagcgcgttgagcaccccgcatccccggcgggtcgcctttcccactgggcgcttcggtttccgcctctagtgggctttccggtgtggaagcgcgcctgtggttccagctactgggggtgagccgggaggatcacttgagcccaggaaggtcggctgcagtgatccatgattgcgcc

SEQ ID NO: 358383 - DNA, 1083 bp, Homo Sapiens
  misc_feature (980)..(982): n is a, c, g, or t
  misc_feature (985)..(985): n is a, c, g, or t
  misc_feature (989)..(990): n is a, c, g, or t
  misc_feature (995)..(996): n is a, c, g, or t
  misc_feature (998)..(1002): n is a, c, g, or t
gcattttcaaaaattcagtgcaagcgccaggcgatttgtgtctaaggatacgattttgaaccatatgggcagtgtacaaaatatgaaacaactgtttccacacttgcacctgatcaagagcagtgcttctccatttgttttgcagagaaatgtttttcatttcccgtgtgtttccatttccttctgaaattctgattttatccatttttttaaggctcctctttatctcctttcttaaggcactgttgctatggcacttttctataaccttttcattcctgtgtacagtagcttaaaattgcagtgattgagcataacctacttgtttgtataaattattgaaatccatttgcaccctgtaagaatggacttaaaagtactgctggacaggcatgtgtgctcaaagtacattgattgctcaaatataaggaaatggcccaatgaacgtggttgtgggaggggaaagaggaaacagagctagtcagatgtgaattgtatctgttgtaataaacatgttaaaacaaacaaaaattgttatttttcttttccttcggtcagtgcacattagcatttgaactacctggggattctttatcagaactgttcttgttgaatatttatacttaattgaaataattccttaagggaggttttgtttaaaacgtattaacaggaaattgtgtatgagatatttaatgaaataagaaattcaacaagaatgattaagtcacttcccaagtggttgtcatttgttaaaccctggtttacctgtcttgctattatgacatttcatttggaaggatgtttgtgttgtagctaactgttcaagtctggtgctgactgctgttcttagccatcacaaaacgctaaatttgtgtaattggagcttcctgctgttatctggaaatagcaggaaagcgcagctttgtatattgtttcctaaagtatattaaaataaaaaaagaaactattgctacccnnnaanaaannaacannannnnncccaacatgttggccggcctcggccctccagaagcttttctaaaacattccttttgggcccccgggccccgtaggcaatgg

SEQ ID NO: 358384 - DNA, 1018 bp, Homo Sapiens
ggggtgtttggagaaagggactcaggtttaatgagttaatctcacttggtgaatatgaaaaggcagcttgttatgcagcaaacagtcctagacgaattcttcgaaacattggtacaatgaatacatttaaggactgacattttctgaggaggctggggatgtgatttgtgattatggggagcaggatacttataacaaggccaagtgcctggctttagctcagattatctacagtgaatgtggcctgcacaagaaagctattctttgcttgtgtaaacagggtcagactcatagggtcatggagtacatacagcagttgaaggactttactaccgatgacctgttgcagctattaatgtcatgtccccaagttgaattaattcagtgtctcactaaagagttgaatgagaaacaaccatctttatcttttggtcttgctatacttcatctgttctctgtagacatgaaaaaagttggcattaagctacttcaagaaatcaataaaggtgggatagatgcagtagaaagtcttatgataaatgattccttttgctccatagaaaagtggcaagaagtggcaaatatatgttcacagaatggctttgacaaattatctaatgacatcacgtctattcttcgatctcaggctgcagttacagaaatttctgaagaggatgacgcagtcaacctaatggaacatgtgttttggtagttctatatcttaaccagctgagggagcttgtacaacaccttatgtatgctggttgggaaaaactgattttaacgtaactaacttataaataaatctagagtaagaagatctcagaaataaatcacactcttgttatgatgacatttagatttgtctttgaaaatattatactattgcttcctatttcccatatggtcatttcttatattgaatcttgataaaatccaagattataacctttgtgtgaaaagataacaattcactggccgtcggtttaaccgtgtgactgggccctggcgtttccct

SEQ ID NO: 358385 - DNA, 2699 bp, Homo Sapiens
  misc_feature (280)..(280): n is a, c, g, or t
  misc_feature (1273)..(1273): n is a, c, g, or t
  misc_feature (1923)..(1993): n is a, c, g, or t
  misc_feature (2412)..(2412): n is a, c, g, or t
ccccgaaccttttaaccattccccccaaggagtcctgaggggatttgaatttcccttccctgggttcgaatttccatttccgcccattgccattgggcggtgtttttattgccagccccctttattttcccctggctccagtttcctcatccttagaaggggagcagagcacctgtgggtaactccctgccccttcctttcttttcctggtattgggtggcccagttggtgccctcacatggcgctagcactgagtgggctcaaactctgtacgcgtttntaagcatattgacgaagaaatctggaaacctagtaccggggcaccatatcgttaccccaaaggaaaatgcatgcacgctgtcagagatgacgaacactgcgtctggaacttcttaagggcacccacgtgtcctcagctgcagacagcagcgaggagacacccagggaattcgagacagcggaaggcggaagggtcccgcaacaacccaccctccagctcaggtgagttcagagtgagaacgcaccgccaggcttggacaaaggcacccggcctacaccccagcggctccccgccggggcctacgtggacttcagcctccagccacagggacaagagctgctggccagggctgcccgcctgggctcactgcgcctgcgcagtgagcagcgcgccccaggtcttctgcccgggcccactgcgcctgcgcacggagtagtgcactctcgtcggcggcaccggcccactgcgcctgagcacgtagcggtgcatttcgggacgtgtagttttccccggcaggacggtagaagtcgtggtttgtgcgcggccaggcgctggagcctccgctgccgggagcagtaagtgtgtgacgtcggggtagaagggagtgacccaaattccaaaagctctttgggatgctgcgatgtcgcggccggccccgcgctcgggttttccctcctagacaaaagtctgccggctcccggtcgcgccgggtcggggatccggaaggtgaaggccgccaggccccacctgcggggcgcccctgctggacctggccgtcgggcgccgtcaacccgttgagcagcgtgttccggctggcacgtggcccgggcggggcccaggattggttcaagcctacggtgttggtccccggagagtctagggagacaagcaatcccctggaatggtgggggaagcgatgacagcccctggtcctcatccgcagctctgggggaagtcggggggtggggagggcgggtgttgctccctgagtgntgggggaagggtatggggagaggaccctgaactagcccccaggttacccaggaggagctgaggcccagagaggttcagcgactcgcccagggttgcacagcgagcacaggcaccgacgtcgccctccgaggcctagttttccccggcaggacggtagaagtcgtggtttgtgcgcggccaggcgctggagcctccgctgccgggagcaatcagaccttccagctgcctctcatgtacttgtctgttgggggcttgtgttgatcaggagtgaattcacagtctaccatgaattggaaggttcttgagcacgtgcccctgctgctgtatatcttggcagcaaaaacattaattctctgcctgacatttgctggggtgaaaatgtatcaaagaaaaaggttggaggcaaaacaacaaaaactggaggctgaaaggaagaagcaatcagagaaaaaagataactgaagattctgccatgtaaatgtcagcttgagtggactccagctgagaagaaagagaagaaagacttaattattgaataatttgtcagaggataaactcccaacctagacctttcacttaaaatagtgtgaatttgtataatgtttttaaaagaaccagtactggccgggtatgctggcttttacctgaannnnnnnnnnnnnnnnnnnnnnnnnnnnnnnnnnnnnnnnnnnnnnnnnnnnnnnnnnnnnnnnnnnnnnncaaaaaggggaaaaacccgctccccacttaaaaacattaaaaatttacccccgggggtattgggcccaccgcttctttttatcccccacctttcctccttgcagaagccctatcagtctggaggaaatatagcgtcttcaaaaacccccctacagactcttggaagagttttctcacaaccattatgccctcctccattactgtttgtggacccatattgcgtctcccctcccccaactaaccccgtgacgcccgtggtgtgccccactaaaataaacccaaggtctatgcgcggccggatttgctctttcgtcgtgtttactccacctgttagcatattgcctcgcgctttaccgccattctcaaatataacgtttttatgtgccattccctaccaaaacacaaacatcatatcattncgactcgccctgcgagattctcgctcacccgttctatcttccctctaccgctcaacaatcaacttacctttttttacccctctcatctgtgtccaccaatctccccgcatctacacctaacttcaacctatccttctaactctacaaactttgcacatttttgcccagttcgcacatgtcacaactcttaactatacgtgttcatacgtgactctttctgtttcaaccgctatcacttcaatccccttacctttccacaaccacttgatattataacaatccgcctc

SEQ ID NO: 358386 - DNA, 786 bp, Homo Sapiens
  misc_feature (331)..(343): n is a, c, g, or t
cacaggtccctggtaaggggagacaaagggtgtggctgacaggagacttctaggactacccttgcccaattccaccagagcagccccacttcgtgtgtcccacatagttggcatccacaaattgatttggaaaaccgtttcccctacttaaaggaaatcctatgaggaaatggcccccagcccagtatgcccctccaacctgctgagtcctggcctttgggagaggctctttggagaccccatatgtcatattaactttaccctgatgagattatcttaccgtctggggtcatcccaacttgagctcccaggaaacccccgtgtgaggggnnnnnnnnnnnnntcctcctccagttcaacagtagagcaaaggacctgaccaatcattttgtccacgtcttcatttgaaggaatccttcatgcccattttatgaaatgtctttagctcaaagtaatccacagggatccagcttgccatgggcgagatattgtccagatggtcgccaagcaagactccctcctcccgattgtccttccttccttgtcggcaaagtggtggaggatgagtgagaggcagccgcagaggggaaactccatccggaccctccaaggggagtaggtggtcccagttaggaccttccaattcatggtagactgtgaattcactcctgatcaacacaagcccccaacagacaagtacatgagaggcagctggaaggtctgattgctcccggcagcggaggctccagcgcctggccgcgcacaaaccacgacttctaccccgct

SEQ ID NO: 358387 - DNA, 318 bp, Homo Sapiens
cagccacctgtccagaagcccagtgtggggacccactctcaccaccagggatccggctgctgaggtggctcagaccttcccacgtaggaaagagggagagggcaatgccatcaacgagtccaggaactgggttgagcgctttaccccaagaacagacacacactgtctgccactgtctagctgttggtataaaacccactctcaactctgaacatcagtttcccagtctgtcaaatgggagtgtgagctacctgccaaaatgcagggaggcttctggggaagctcggggttatgaatgacctctcctggtgtttgtta

SEQ ID NO: 358388 - DNA, 628 bp, Homo Sapiens
accaaggaaaaatggttaaagggaggagggaagaagcttgtaagcccaccaatctgactaattaacgcttaaacctgaccaaaatgggagcccagtctctcccagccttaaaaagcttagtgagatttaggtaagataaaaaaacatttctaatggctgttaaacataaaaagggttgccaagagaggggaagaattcccttgtttggtttttaatgaggatacattctctgttatgtcaatcagaagcagaactcattgctggacaactatacaaagatgaatactaaaagatgtatcacagaaatgtttttagttgcgaaaaacaggaaataatctaagtgtccaccaaaaggggattggttaaataaataattattcgcaataaaacagcttgtagccacttaaaaagatacagatgtagatttgacacgaaaagctatttccaacttcctgttgggtgaaaaataatcaaattctaagtaaaattatatatatgcataacacacatctgtaccagcccagagagtacctacagcattccctgaaatgttaaacagtggttatctctgggagactttcttgtaatggttatttaaaatccacaaataactaatctctcagtgagg

SEQ ID NO: 358389 - DNA, 521 bp, Homo Sapiens
gactaaactctagtcaacagtaagtgtcatgtagcagctcctgggaatctcctttaaaaagagagcttgtttatacctattgtcatctctgttcttctgtgccccttcttccattttgctgcctggaaagcagatgtgatggctggaattccagtcaccattttggaccatgaggacaacaccctagagatgtggagtggctaaaagaagcctgtgttcctgagaacttagaggaccaggacctctattccaggcttggacacctacatttagactattatatgaggaagcaatcaacttctcacttgtttcaaccactttcacttgcagtcaaacctgaattgtaagtgaaattgctttcctgatagcaaacctgttggattttctccagaatccctgggccacttttagcagtcagattcgtctaatcctcctttaaagatggtggcagtgaaactggtacatgggacctgactgggctttgtttgcaactttctgataatttataattatttccaaat

SEQ ID NO: 358390 - DNA, 768 bp, Homo Sapiens
gactgggatgtggggtgatacaggtagatgaagataattgtaaggaagaaaaggcacaagtggcaaacaggcctttaaaatgcattgttgaggaaacctatatcgacttgaccacagaatctcccagttcatgtgaagtaaaaaaagatgagttaaaatcagagccaggatcaaattgtgataactcggagttgcctgggactttgcataattctcacaaaaagagaagaaacatttctgatctaaatcatcctcataaaaaacaaagaaaggaaacagacttaactaataaggaaaagaccaagaaacctacccaagattcttgtgagaatactgaagctcaccaaaagaaagccagtaagaagaaggcccctcctgtgactaaagatccctcatcattaaaggcaaccccagggattaaggattcatcagcagcacttgccacttctacaagtctttctgcaaaaaatgttattaaaaagaagggagaaattatcattttatggacaagaaatgatgaccgggaaattttattggagtgtcagaaaagagggccatcatttaaaacatttgcatatttagccgccaagttggataaaaatccaaatcaggtctcagaaagattccagcagctaatgaagctctttgaaaagtcaaaatgcaggtagttaatggttacactacaggagactagtaaaataaatgtttgacactgtagttgtgcagttaatggctgttagtcattgaagatgtgaatagtgggtgaga

SEQ ID NO: 358391 - DNA, 1320 bp, Homo Sapiens
  misc_feature (461)..(463): n is a, c, g, or t
ggatcatcaaagagactgcctttgacatccttcagtactcagagcctcagtcaaggttctggggccgagataagaacgtccccacaatcggtgtcattgccgttgtcttagccacacatctgtgcgatgaagtcagtttggcgggttttggatatgacctcaatcaacccagaacacctttgcactacttcgacagtcaatgcatggctgctatgaactttcagaccatgcataatgtgacaacggaaaccaagttcctcttaaagctggtcaaagagggagtggtgaaagatctcagtggaggcattgatcgtgaattttgaacacagaaaacctcagttgaaaatgcaactctaactctgagagctgtttttgacagccttcttgatgtatttctccatcctgcagatactttgaagtgcagctcatgtttttaacttttaatttaaaaacaccatccnnnttgcagatacttccaactgcagctcacctatttaactttgaagtcaaaaacactttttgcacaccattttgtaaatgaaacttaagaattgaattggaaagacttctcaaagagaattgtatgtaacgatgttgtattgatttttaagaaagtaatttaatttgtaaaacttctgctcgtttacactgcacattgaatacaggtaactaattggaaggagaggggaggtcactcttttgatggtggccctgaacctcattctggttccctgctgcgctgcttggtgtgacccacggaggatccactcccaggatgacgtgctccgtagctctgctgctgatactgggtctgcgatgcagcggcgtgaggcctgggctggttggagaaggtcacaacccttctctgttggtctgccttctgctgaaagactcgagaaccaaccagggaagctgtcctggaggtccctggtcggagagggacatagaatctgtgacctctgacaactgtgaagccaccctgggctacagaaaccacagtcttcccagcaattattacaattcttgaattccttggggattttttactgccctttcaaagcacttaagtgttagatctaacgtgttccagtgtctgtctgaggtgacttaaaaaatcagaacaaaacttctattatccagagtcatgggagagtacaccctttccaggaataatgttttgggaaacactgaaatgaaatcttcccagtattataaattgtgtatttaaaaaaaagaaacttttctgaatgcctacctggcggtgtataccaggcagtgtgccagtttaaaaagatgaaaaagaataaaaacttttgagga

SEQ ID NO: 358392 - DNA, 303 bp, Homo Sapiens
tccctaagtctcccttctacccacagaaccaacaacacccttcccggcctttcctttccctcgccctcttctcgtcccctaagcaaacaacatccgcttgcttctgtctgtgtaaccacagtgaatgggtgtgcacgcttgatgggcctctgagcccctgttgcacaaaccagaaacagagcggagcaagggggcctgacaagagttcctttttagctgaacaaacaagtgctctccataataggtggaatcagacagttaacacatttttatgttgaaaacaaaataaaaggaaaaaaattt

SEQ ID NO: 358393 - DNA, 740 bp, Homo Sapiens
ctgcagctgggcctggaggcagaggctctacagcagcagtgagagccgagctgtggcagacacatgctcttcccctgactcacggctgcccagttccctccagcgaggctgctgacctatttttctattaggaacaaccagccaatgtgataatgaggaaaatgtattctggcccctatgaagtttagtgaagcccgaatgaagtggaggaggccacggagatgcacgaggaagagcattccaggcagagggaacagcgaggacaaaagcccccgggcaggaatgggtgtgcaagcctgagatccaacatggcggagagcaagccggaagtgctgcgcggggatcctaagggagcactgaacaggacaagctcagttttgtccctcaaacctccacaatcagctattttacataaggaaagtgggtggtgattaacctcagagtctccagggacagactatccaggactgtgcctgaaatagaagaggaattaacatcatacagaactgaatacggtgactgaggggagtttgtgtctccccttttaggaaagaagatgagaataagtatgaaggagagtcatgtccttgacattaagcaaaagcatgatgcatgtatttgaaatgtaattagaggtgcccacttctgctcagcaattttcttgtagacctcattgctcatgttattctttcctctaatctatgttttcctctcttctgccctttttagcagtctacagc

SEQ ID NO: 358394 - DNA, 1398 bp, Homo Sapiens
  misc_feature (1032)..(1032): n is a, c, g, or t
ttgtcacttcgtaactattcgacaaaactgtgtgttgtatgcactcttctgtacctgtaacagaaaatactaagaaaaaattccactgcttttgcgagtaagtcttctactggaacttgttctaaggaaatatgcacaaagaagttctctgtagtatcttctaaaaagcagaactggaaactacctaattatctaccaaaacagaaatggtttagcaaattacagtaatgaaggaaaattacaaaatattatggtagttgtaaaaacctaaagcacatttttgagaatgtattacaaaacaatgatttgcagtacataaatccatacacatgtgcataaggattagaagagagtattaaaaatcgtaatgataaaggagctctgggtaattttctccataagtttttattactgttagattatctttaccacagagagcacagaacatgtggttaaaatgcaaagaacaggaacatcccactggcaaggactactcatgtctaatcacagtgtgatcatgaaatattctctcaaaatgtactcagaacacttcagatgtttacaggatatggcagaagagggacgtctaagagaggaaaagctgtgtggaattgatctttcatttgcttctgatcttttattttcaattttagatgctctggaagttatttttcttcaaagtttagatagctcttaagacaatccatggaattcattaaaatctcaatgaattcctactctcaatcttacaatgttgctggggaaaccaggtattcacttgtattttggaaaaaactgagaatcaaggatgaaagttaatagttgtctactgcaaaaggtaaaacagtatttattgctaaatgaactgcaccactaaccttacacaaaaatgctcagtgaggctggagtggggtatggtggtcagcagaggctttaaagatagtgggagatcaatgggattaaagcctggccctaggactggtggaaaggaacatcaagaactttccacgaggatgggagatttaacacccnaaagcgcaagggtggaaaataaatagaggagccaagaactgtttgcctcgaagaaattagcctagggctcccatgatgttaaggaatcccagatgtgccctgatggtaacggagagttacccaagattgaacaagagcaagtaagtgctcaaagaagtggttggggagactccctggaagcaaagcataagacaggttgaacagtgcacacaagtggtgaaggcagaaggcagcagtcgggatttgaagagacttgaaatacagaaagaacagacaaacatgaaaacatggaaaaaatccaggtgtgtgggggctgaaaatcaggcttcagcctcaccacttactataactcctctaggcaatgaa

SEQ ID NO: 358395 - DNA, 1205 bp, Homo Sapiens
cgagtcggtccctgcccctatcacaatctgtattatccatgaattcagtaaccctcccaatgtccggaataaggtgcgcattcgcagctggatggacactatagcaaacatcaatcaagagctacattaaatatgaattcttccctgaagccactcgaagtgaagaagacttaaagaaataccccaagtacccctgggggagagaaatctatactttagaaggtgttgtggatggagctccatattccatgatttctgacttcccttggctgaggtcattacgagctgcagagcccaacagcttcgctcgatacgactttgaagacgatgaagaaagcactatctatgctcctagaaggaaaggacagctgtctgcagacatctgtatggaaacaataggagaggaaatttcagagatgcgtcagatgaagaagggtgtatttcagcgagtagtggcaatttttatccactattgtgatgtcaatggagagccagttgaagatgactacatttaattggtccctcctcctttccagctattttgtcagaaagcaagtagggccatccagctgccagagtgctccacagggacttgaggcatgcagttgggaggtcctggctcggtttgctatatagggaatatataaggaacatcgaaattgtatacaaagatttgtacataaaaaatatacaaagacgcttcctaaagtaccaactttatatcatatgtttatacaatttaatttaaaaattcattttaaggaagacagataatttgaaagacttttgtttttcttgacttaattcatgaagtatcattttttgactgagtctccatttacttcattcttaatgattattgtcatccctttaaatctgtgcctttttcttcttgagcgaagctgtttgagtaaacctgttgaagagtgtttgtgtcttttgtgcttttttgttgttattaaaacaccaactaaaccttatagtcaagacaaggctctatgtttctgtacaaagctgtagttctttcttagtattatagttgccatgtttcttaaaatcaagtaaaaagacttatgagcttaaaaaaaagtgagtttgagagggaaatggaaaagtttccagagtatttctagtaatttatttccacattgaattgtgtatatgctttatcttgaatataaaataaaagtttattaaaaacttta

SEQ ID NO: 358396 - DNA, 946 bp, Homo Sapiens
  misc_feature (79)..(79): n is a, c, g, or t
  misc_feature (251)..(307): n is a, c, g, or t
  misc_feature (341)..(349): n is a, c, g, or t
  misc_feature (885)..(885): n is a, c, g, or t
  misc_feature (916)..(916): n is a, c, g, or t
agtgctatagaaagatttagaaataggtcctcaaatcccaatgaacaaggagaaaaaggaaattatagccagaatgtgnaagtggggcacactggacggatggaggctgggaagaagccaacacaaaaagacggacaaacccaagggcatctttccagtctaggcacaaacatgtttcagtctcaaaatatctctcttgtagaattccagggcttcagaaaaaaagtaaactaaaacgaggtagccagacnnnnnnnnnnnnnnnnnnnnnnnnnnnnnnnnnnnnnnnnnnnnnnnnnnnnnnnnntcagcagaaaaaaggaccatgatttcaaattccnnnnnnnnntttttaaacaggaaagaagattaagaacatgaaatgagcatgaatagcagagtactgtaagaggaggagtgatgagaagagactgggattagttacaaagtggaagggtgaaaaggcctttgtagctgggtttgctttttatacatttcaaaataaaaaccagatcacagtattcaaatgaaagctgaagtgaaagcagacattttcctcaactccccagggttgaaaagaccagtcactccccacccccatttccagtcacagcagtggggatacagtagctgaatcagtcctccaccccctgcaggggagtgggtgggtaagcagcagagtccatctctccatccgcggggaaaaggagctgggagtagggtaaggtaggaaccccagctgcaaagagaatgggctggaagccgggagggggctggaggagggagaaggaaacgagcctgaggcttctgtcatagccccatctcatccgctgcaatgatctgtgcgtaagtgtgcgtgtgagtgtgtgggggcggtggaatggncgatgaacagggcgggacaaggggagctcgntgccgccctcacctgccttctcactgtccg

SEQ ID NO: 358397 - DNA, 689 bp, Homo Sapiens
agcgtgggggaatgtgacatcagcggcgccgggcgcttggggctggaggaggcagctcgcctcagctgcgctgtgcacacctcgcccgggggaggacgcagacccgggcaggcggcagggatgtcggcgaaggagaggccaaagggcaaagtgatcaaggacagcgtcaccctcctgccctgcttttatttcgtcgagttgcctatattggcatcatcggtggttagcctctatttcctcgaactcacagatgtcttcaaacctgtgcactctggatttagctgctatgaccggagtcttagcatgccgtacattgaaccaacccaggaggcaattccattcctcatgttgcttagcttggcttttgctggacctgcaattacgattatggtaggagaaggaattctctactgttgcctctccaaaagaagaaatggggtcggactagagcccaacattaatgctggaggctgcaacttcaattccttcctcagacgagctgtcagattcgttggtgttcatgtatttggattatgctctacagctctcattacagatatcatacagctgtccacaggatatcaagcaccttactttctgactgtgtgcaaaccaaactatacctctgtgaatgtatcttgcaaagaaaattcctacattgtggaagatatatgctcaaggatctgacc

SEQ ID NO: 358398 - DNA, 1008 bp, Homo Sapiens
  misc_feature (575)..(630): n is a, c, g, or t
taggcttgccattatgctctttccccactgtttaatttattttttgagtggttttgatagggatgacaacaagcatctttaacatatcatgatttacttaccatttaaattgggttatttctagtaaatcgtacatttccacggtttactcaatttttgtgctattgtcatgtatatttaatttctgtcataaactaaaaaatataatggtatcacttttgccttaaataatgtcttttaaagattttcagagaagaaaaacgtatagtgattaatatccacatatttacctcttccagcgcatttcagtatttcttgtatatcagagttaccatctggcatcatttctcatcagctgatagaacttcttgtccatcttgaagtataaatctgttaccaacaaattatcttagattttgttgatctgaaaaatgtatttttggcctccattttaaaaagatagtttcattaaatatagaattcttgatttttcatcttcagcactttgaattatcattccagtgtcggataatttccactatttatgttgggaagtcagatgtttatatagcatnnnnnnnnnnnnnnnnnnnnnnnnnnnnnnnnnnnnnnnnnnnnnnnnnnnnnnnngactgtaatgttccttgctttggttttctttgggcttcacccagttggatttgttgagcttagcggatctcctagttagtagcttttatcaaacttggaaaaattttccggcgaacatttctttaaatatttttttcggtccaggttctttttttcattacatctaatacttaaaattatgcctgtggttgaactaccttaatgttacctaaggtcggggaactttggggtaatgtttcaatcctgttttggctcccgggtcctttttaaataaactgtcccgcttcttacatcgaaactttcaaaatttcactggcaattttttgggttcaaatggttccgcgttttccatcccaaaaattggtttggttaaaaaaa

SEQ ID NO: 358399 - DNA, 806 bp, Homo Sapiens
  misc_feature (743)..(743): n is a, c, g, or t
tgataatgcaacttcatgtgatgttgtggaggatacgggatacaggacattgcctaagatactgagccatatcgccccagcattttgcatgagcagctgtagcttcgtagtggaaaaatctaaagaatccacagcacgtgttgtagtttggagggaaataggagtacaaagaagttataccatggagagtactttatgtggctgtgatcagggaaaatacaagggtttacagattggtacccgagaactggaagagatgggagcaaaattttgtgttggtcttttacgtttgaaaagactgacctctccattggagtataatctgccttccagcctgcttgactttgaaaatgatttaattgaatcaagctgcaaagtaactagccctaccacttatgtcttggatgaagatgaacctcgattccttgaagaagttgattacagtgcagaaagtaatgatgagttagatattgagttggctgaaaatgtaggagattatgaaccttctgctcaagaagaagtactttctgactctgaattatcaagaacatacctaccttgagcccgctgccatctcttgttaactgcaaagaataaatgaaatatcttggtttttatttcccaggaagcttgagagaaatgagtttatacagagctgactcaaaaagacaaaaagtaacttgggccagtttggtttcaagataataaatgtgttattaattaatgataaaattggcgcttgntttattttcgatattcaatgcactttatgtagcattgaatgatcaaatattggatttaccttt

SEQ ID NO: 358400 - DNA, 1512 bp, Homo Sapiens
aaagtggaagttaccaacccaagagagaatgggtctagctatccaaccacccaagtaaaacaccttcaggcatatcacccccttttcctatttgagtaactaaaaccacacaaacaccatttctgtgaactcaagtgatattagatagacaaaataacattttacatttgttgattctgttttctggtttacatccgatttctatttcttttattgctttatagagccccgtgacctagaaataaccctgagtggtcaacaggtctacctgtgcttctagatagaactgtatccaactgttccctgttgatatcaatataacttatttttaaatgattttataaaaaataattttaactctagtctcaaaagtcaaaatccacatagttcatcttataccgagtatatatttaatattattttatatatttggaagttaagatctctttacagatctctttctctctcaaatggaaaacctgtttctcatacctgttttctaaaggacctatctgtcattttctatttttagtcatgcgccttttagccacatgtcagaaagctcattatgggttatatctctgttcttagactccgtactcctccactaatccggacacagaaggaactgtcagaaaaaatacaattactagaggctttgggagacattgaaattgctattaagctggtgaaaacagagctacaaagcccagaacacccattggaccaacactatagaaacctacattgtgccttgcgcccccttgaccatgaaagttatgagttcaaagtgatttcccagtacctacaatctacccatgctcccacacacagcgactataccatgaccttgctggatttgtttgaagtggagaaggatggtgagaaagaagccttcagagaggacctgcataacaggatgcttctatggcatggttccaggatgagtaactgggtgggaatcttgagccatgggcttcgaattgccccacctgaagctcccatcacaggtgacatgtttgggaaaggaatctactttgctgacatgtcttccaagagtgccaattactgctttgcctctcgcctaaagaatacaggactgctgctcttatcagaggtagctctaggtcagtgtaatgaactactagaggccaatcctaaggccgaaggattgcttcaaggtaaacatagcaccaaggggctgggcaagatggctcccagttctgcccacttcgtcaccctgaatgggagtacagtgccattaggaccagcaagtgacacaggaattctgaatccagatggttataccctcaactacaatgaatatattgtatataaccccaaccaggtccgtatgcggtaccttttaaaggttcagtttaatttccttcagctgtggtgaatgttgatattaaataaaccagagatctgatcttcaagcaagaaaataagcagtgttgtacttgtgaattttgtgatattttatgtaataaaaactgtacaggtctaaaa

SEQ ID NO: 358401 - DNA, 491 bp, Homo Sapiens
aaaaaaagcactgagaacattactgtatccctttcccctgtgctcctcccagagttcaatttcactcaccatgtaacctgtgatgggagcttcaggtggggcaaattcgaaagccatggctcaagattccccacccagttactcatcctggaaccatgcccatagaagcatcctaaggaaaagccaatattattgtactctgttgttctgcacagataggccataagcataaaaaagccaacaccttcctctgactccctcttataagttctacagctgtactttcgggcaaggagtgtctttccaaaacgcaaagctagactcagacctgttatgaaggtcctctctgaaggcttctttctcaccatccttctccacttcaaacaaatccagcaaggtcatggtatagtcgctgtgtgtgggagcatgggtagattgtaggtactgggaaatcacctgtgaaaaataagacaaaaaggctgatgtagact

SEQ ID NO: 358402 - DNA, 471 bp, Homo Sapiens
agggcccgaaggatggcttcagggtaaacatagccaccagggggctgggcaagatggctccccagttctgccccacttcgtcaccctgtaagtactcagaaccaggaggactagaagactccttttggccagataagactacgttctctattgcagcttctgaaccagagactgatgttgacacactttttttccatttggcaggaatgggagtacagtgccattaggaccagcaagtgacacaggaattctgaatccagatggttataccctcaactacaatgaatatattgtatataaccccaaccaggtccgtatgcggtaccttttaaaggttcagtttaatttccttcagctgtggtgaatgttgatattaaataaaccagagatctgatcttcaagcaagaaaataagcagtgttgtacttgtgaattttgtgatattttatgtaataaaaactgtacaggtcta

SEQ ID NO: 358403 - DNA, 953 bp, Homo Sapiens
  misc_feature (16)..(16): n is a, c, g, or t
  misc_feature (59)..(59): n is a, c, g, or t
  misc_feature (72)..(72): n is a, c, g, or t
  misc_feature (740)..(817): n is a, c, g, or t
actaacacgaaccagnctggctgggccaaccaatcccgtccctgaataattgccccccnggcttttttggtnaagccatccacttggattttaaccctatgccaaaagagagggtgagtgaacaaggcacaggggtggaggagcaagctctcaacaattgtcacttcttcaagcgaagaatcgaaccaagcgaatgagatttaagtcgaggcattagataataccgatatatcataatccagacccaaacagttggccaccaccatgcctcagctactcaacatttcacttccaagcgaatccattgcaatggactgcaatctttgcccacaaggttgttcttgttttggtttgttttgtggtttagtttggattttggacaaggattaaggtagctggaggacatttaattctattttagtgatgtgattatatttggagacataaaacacagagaaaaacataatggcaaacagacacaaaacaagactgccaagtagagtgtgcacatcacaccacagcaacacactgtcatcaagaaaactcacaaaacgtgtggaactaacatttccaaatctccatgaaggacataaaggattggtggttggccaagagtgatggtctttgcattgcctatagagtgatttgaattagataatatatcggatctttcttacagttcaccatccatcctgaagttgatgaacattacatgtgtcctcagttgtctttaagtagannnnnnnnnnnnnnnnnnnnnnnnnnnnnnnnnnnnnnnnnnnnnnnnnnnnnnnnnnnnnnnnnnnnnnnnnnnnnnacacactagaagagaaggtttaataattgataaaaatgtacaaaaatattcaaatcagaaatgctttaaaatgtgtaccacgaagtcaatacttctcagtgagtagggaaggcaaaatacttcctcaatagcaggg

SEQ ID NO: 358404 - DNA, 973 bp, Homo Sapiens
cctgggtggcgaattcggcacgagggaaggaagtagctatttctaccttctcatccagtaaccaggtatcctgcccgctatgtgaccaatgctttccacccacaaagattgaacgacatgccatgtactgcaatggtctgatggaggaagatacagtattgactcggagacaaaaagaggccaagaccaagagtgacagtgggacagctgcccagacttctctagacattgacaagaatgagaagtgttacctctgtaaatccctggtcccatttagagagtatcagtgtcatgtggactcctgtctccagcttgcaaaggctgaccaaggagatggacctgaagggagtggaagagcatgttcaactgtggaggggaagtggcagcagaggctgaagaacccaaaggaaaaaggccacagtgaaggccgactccttagtttcttggaacagtctgagcacaagacttcagatgcagacatcaagtcttcagaaacaggagccttcagggtgccttcaccagggatggaagaggcaggctgcagcagagagatgcagagttctttcacacgtcgtgacttaaatgaatctcccgtcaagtcttttgtttccatttcagaagccacagattgcttagtggactttaaaaagcaagttactgtccagccaggtagtcggacacggaccaaagctggcagaggaagaaggagaaaattctgaatttctagggtccaaaagttgacaaaaccattagtaggaggggtgggccatgttcattaagccatagtggtccctagttcattgttgagcaagttttagccctgcagttttcaccaccagcacctacccagcattctggtttttatgttttttatgatctatgcagacaactgtgtattctgttttataacagtttgtttgaatttacttacagttaaaaaatttaaatatatttatgtttgtacgaaaaaaaa

SEQ ID NO: 358405 - DNA, 574 bp, Homo Sapiens
aggcgtgacaaaccctgtgcccacgctgcctccactccgggagactcagggctgggagaacatgccctggtcaccactgcgaagactcagggctggggaagacatgccctggccaccagtggtgagccagcgagacaggaccccacgcgcgctgacccggggacgccatggaactcactcgcgattcctgcacgcgcgctgacccggggacgccatggaactcactcgcgattcctgctcacagcacgtttcctgctcgaaaaccaggagagcctccacgtgccgactagctctgtccacacatccattgcgcagctctgcagcggaaggaccttcagtaaagacgctggtttgtaacgagagaagcgttccaaagtgtcacacgacattgtttattactaaaaggagcagaatttcttttcttgacagtgttgttttcgtaacagtatgatttaaactgttacattcatttaggaaaactttttttcatttcataagtaatcaagcgatctttccagcttaaaagcaaagaaaaaaggctcagggtaactttttaaaccacttcatcaataag

SEQ ID NO: 358406 - DNA, 868 bp, Homo Sapiens
ctgtagtgggccactcagttagttcacccaggctcccacattctccatgctctgattcaggaaacaaccagaactgtggacagtcttaccaaagacactaacatcatcaccagagaattaaagaaatccagtgagtggcccacaacaattggctggcataggacatgatcctagcttcccacagggcacttgggattgtgcagtcagaagtgattgatgtgcatatgtttccacagacctctctgatgtctatgccgtcaccaaaaatattcagactgcaaaccaggaaatgcattgaatgcccaccattgaccttatacttccgtttaaggacactccaggcccaacgtctcaaggccagttaggctagcttcctttcaaacctcaaatctgggatgctgtctaatttaacctttaacccttttaccatttgccctgagaacactagccggcagcacttccagctgcagcgtttacccaaagatacctctgccaggaaagaccttgcttttattattacttttgcatttctctagcatattgacattggaaacaaaagacatcattctatatatagcattctggttttagtggagggagttccatttacaaaatatagtaattcttgatcactgaaaatgtcagagcctagaaaacggagcattcctatgcgtgatgttaacatcattaaacagttgatggccaaagactcatgtgatgaatccaatttttctaaaataaatagctcagatgattcagatgattctgatattaggtctgtttagaaataaaacttcaaaaacagtttttatattttacttccacattgaaaatcagtcagatttgctttggcctcaaagaatgtgtt

SEQ ID NO: 358407 - DNA, 443 bp, Homo Sapiens
ttctgggtggaggctttccgactcccaatcatgaaggcaagttaatctttccagttagtgacttttgcccccatagttggggtaaacacttccctagattgagaaaaagcagctacagtcaatcctgctctgtttgcctcatttggtgatcagtcagtcacacataagttccttgtattctaaatttcatgcacttctcccagatgctatagggttttctctcactgttgccaatggatgtcatccagacagtgggctcatatcttacggttttgtgcaatcattgtcgtattgtagtcttaagactcattatagtgtatttttgatatttttgaaatgtgttaaattttttaattcagtaatatgagccagagcatgttgcagcaaatctattgtttgtaaaaataacaataacaataataaataaaataaagtggaatctt

SEQ ID NO: 358408 - DNA, 640 bp, Homo Sapiens
cgcataatggatggaaccagctccctctcaccagcaagtgaacatccttctcacttccctctggagctctgtaggtaggtcccaatcttacaaacatctccaagtcttagacagaagtcaacaggaaaatgagcagctgcacaactcgtcctggagacttagatcgtccatagctcacactactgccactaggtgggcgatgcagcagccagttgcctctggttttgtctttgggctttcttcttactttatataaagaattgcagaataagtattgttcttgttatgaatcttctacacagaaagtacccaagaggtaaaatattggcatctcctatgcttcgataggcctgtgtcatgcaagggctccaggataaactggacggccattaggagacaatatgtggtagggtggatcaccgcaaagtccgcaacttcattcttaaagtcagtaagaccaagaacccacctattccagacacattttggtatgcttcagggcattgtccataaccatagagcactcagctgataatttggatgtgatatcaaatgagccaggcagcttaacagagagatcaggaaaggagaaagagagcctgctaaaactgttgtcccaagtaactatgaatgtccaagc

SEQ ID NO: 358409 - DNA, 421 bp, Homo Sapiens
  misc_feature (384)..(384): n is a, c, g, or t
attctctctgttaagctgcctggctcatttgatatcacatccaaattatcagctgattgctctattgttttggacaatgccctgaagcataccaaaatgtgtctggaattggtgggttcttggtcttactgactttaagaatgaagttgcggacttttgcgtaagaagaaagcccaaagacaaaaccagaggcaactggctgctgcatcgcccacctagtggcagtagtgtgagctatggacaaaagatctaagtctccagggacaaagagttgtgcagctgcttcattttcctgttgacttctgtctaagacttgggagatgtttgtaagattggggacctacctacagagctccagaggggaagtgaggaaggatgtttcanttgctgggtgaggagaagggagctggttccatccatt

SEQ ID NO: 358410 - DNA, 1576 bp, Homo Sapiens
aagacattaaagttaccctaatagaaacagaactactggcagaatatgtgataagaacatttgctgttgaaaagggaggggccggaggtgaagcaaactgcagtccatccagagaagtgtcacagagaggtgtgcatgaaatccgagagatcagacagtttcacttcactggctggccggatcactggggtcccctaccatgccaccggcctgctgggattcgtgcggcaagtcaagtccaagagcccgcccagtgcaggcccactggtggtgcactgcagtgctggtgcagggaggactggctgtttcatcgtcattgatatcatgttggacatggccgaaagggaaagggtcgtagacatctacaactgcgtcagggagctgcggtcacggagggtgaacatggtgcaaacagaggagcagtatgtgtttatccacgatgcgatcctggaagcctgtctttgtggggacacctctgtgcctgcttcccaagttaggtctctgtattatgacatgaacaaactggatccacagacaaactcaagccagattaaagaggaattccggacgctaaacatggtgacaccaacgctgcgagtagaggactgcagcatcgcactgttgccccggaaccatgagaaaaaccggtgcatggacatcctgcccccagaccgctgcctgcccttcctcatcaccatcgatggggagagcagcaactacatcaatgctgccctcatggacagctataaacagccttcagcttttatagtcacccagcatcctttgccaaacacagtgaaagacttttggagactggtcctggattatcactgcacatccgtagttatgctaaatgatgtggatcctgcccagttgtgtccacagtactggccagaaaacggagtacacagacacggccccatccaggtggaatttgtctctgctgacctggaagaggacatcatcagcaggatattccgcatttacaatgccgccagaccccaagatggatatcggatggtgcagcaattccagttcctgggctggccgatgtacagggacacaccagtgtctaagcgctccttcttgaagctcattcgccaggtggacaagtggcaagaggaatacaatggcggggaaggccgcaccgttgtgcactgcttgaacgggggaggccgcagtgggacgttctgcgccatcagcatcgtatgtgagatgctccggcaccagagaaccgtggatgtctttcacgctgtgaagacactgaggaacaacaagcccaacatggtcgacctcctggatcagtacaagttctgctacgaggtggccctggaatacttgaattctggctgatggtgtaaacagctctgcaaacaatccctttcataccacaaagccaagacgttccatggtattttgtgcaaagagaagaagacttcccaatatgcttattttggctttgcaaaattggctctgttttaaaagcccaagaaagtgtttctaaaattgcttgcactgcccgatcccagtaatgctgctgcctgacaggacacacacacagccacagtgccaattt

SEQ ID NO: 358411 - DNA, 581 bp, Homo Sapiens
  misc_feature (17)..(17): n is a, c, g, or t
gcgaccgctgcgcttcngggaactttcagggcgccaagtacgggtagcgcttctgatggattcccgggtctgggaggatccgattatcccggggccgggtcgacacgcacaaagctgaggttagagttggccaggaagggaggacctggtgagccggtggaacaaaagcggaaaggcctttccttctaggagcaaaaccagcgacgcgtcccggacgcccggggacccctgtgggtctcggtttccttcgctgtgaccctgacatgtttccctccaccggcccgaggaaaccgtcgcttccagcctccaggtaccgtcacctctgcggggctgcgaagcggaggaccgggacagagaaggagccggcggtcctggacagccgcgcggctcaaaacccgacggcgcggggactccgggcctggggcctccatggctgtggcctccttatctcccgggccggctgctccctacgctgcggggctgagggcactggggacccaggggcttctctggcactagcgaggacctaaccttgagtgaagaacaatgtcaagtgaaagtgaagaataacgggctcgtgc

SEQ ID NO: 358412 - DNA, 884 bp, Homo Sapiens
  misc_feature (134)..(258): n is a, c, g, or t
  misc_feature (795)..(795): n is a, c, g, or t
  misc_feature (811)..(811): n is a, c, g, or t
  misc_feature (846)..(846): n is a, c, g, or t
  misc_feature (858)..(858): n is a, c, g, or t
  misc_feature (868)..(868): n is a, c, g, or t
tcgtattcggccgggcatacagaagaatgagtaccagatgaggagtcataaatatcactggagaccgggcctgtgccaggactgtcagagtacggaacagtgccaagaacttctctactttaaaataacttttnnnnnnnnnnnnnnnnnnnnnnnnnnnnnnnnnnnnnnnnnnnnnnnnnnnnnnnnnnnnnnnnnnnnnnnnnnnnnnnnnnnnnnnnnnnnnnnnnnnnnnnnnnnnnnnnnnnnnnnnnnnnnatgagccaccacacctggcctctagtgtgtttactgtgtcttctcagtttctaagtgctcttccaaaatgtgaattcttttgtgtccccgaatcctatcacgtgtcatggtggctgtgaagatgtttgccaagcctgctgagaaggctcatctgtggcatccaaaagcagagatttcaactctggacccctgtgacctgcctttgtaattatggatacccagcactgttttgaaatatcagtggacatccagtttttaaaagccctcagagctttgggagacacccctttatctctctggcatgtcagagaaccgattcaacccttctcatctcctcctccttccctctcttgggccatcaggatgcggcagaacttcactgtgcatgtttttacagctcttctccagtaatgctgccatttccactgcagaccacaggataaaaggaccgcttcaccgtgggcccagggtacccttttaagtaggagaggggagaaggaaagtactgctttgatctaaaattaaggcaaacgtttnttcaataaacccaccntgagacttgaccattatggtggaccagcagtgggntttgtcatgggnctgcccactnggggcggcaacatttc

SEQ ID NO: 358413 - DNA, 816 bp, Homo Sapiens
gaacccggagtgagaggcgcttcagagactggagggacggacctgcaggagccagggctgcccgccgagctgcagttgccgctactgccgctgtcagcgcccgactgaagagtgacagccgcaaaagcaggagtgagcaccgaaccccgcgcttctacctaacaggtgcatgcgccgatctggtgagtggacccagctcacaagatctcaggtaaccattcatgagcctgaggctgtgagaaatgctcgctgtgcaaaggggaactctcaccagattttctgaaactgttctagaaatacacttttcggattgattcagcattaccagcttatccaacaaaagtattaacatatacattaacaacgtcgaaagtagcctactttaagagaaaatatgcagaagaagaagatttacatcaagattaccatgggtattttccaaaacacctgatattacctgaggacagaacttgcattctcaaactttctctggagaagctcaggtttcttgaagacccagaaacctacttaagaaggtctgtgttaattaacaatttgctgaggaagatacatctagagacggagaaagagagctatgaatactttaaagaagctccctgttataagactgcatattctgatacaagaaaacggctgaagtttatggtacaggaatgctgttctcagtctctctattatgaagagctgcattcgtatcatattgtgccttatgcttcggagaatgccatttatgaaatgggctacactagcagccacttggagcaaaattctcagttgcttatttataaaatgaat

SEQ ID NO: 358414 - DNA, 1102 bp, Homo Sapiens
  misc_feature (898)..(917): n is a, c, g, or t
gcagtactacagcggtataaggtagcgaggctgggtggcgaattcggcacgagggaagcttccggtggccggcttagtgaggagctatggctaaacatcatcctgatttgatcttttgccgcaagcaggctggtgttgccatcggaagactgtgtgaaaaatgtgatggcaagtgtgtgatttgtgactcctatgtgcgtccctgcactctggtgcgcatatgtgatgagtgtaactatggatcttaccaggggcgctgtgtgatctgtggaggacctggggtctctgatgcctattattgtaaggagtgcaccatccaggagaaggacagagatggctgcccaaagattgtcaatctggggagctctaagacagacctcttctatgaacgcaaaaaatacggcttcaagaagaggtgattggtgggtggccccttcctccccccaacatcagtctgctgcagctgccagaaaacatgcctactactaccagcagaaagggagcagagcccagagcatcaccaggagtgcctgctagtgtactggcagcttgccaccccctcctctcccttcacccagacacgtggtagggatggaaaaggattcttcacagagcactctggcacaccatatcggagaaaacttgatagattagttaatggtttttcttgaattcgagaagcatagatctgttctccatattggtatgttctccctcaaccaagatcttctaaaaagaaataatattttagtcttctgcttgaggaactgactgtgaagcgacgcccagtgaaaaacatgttcttgcagcagctctggtggcagctgtccttgaggaacctttggtgtgtggtgggaagctatcagaacaagaaatgtaggcatttcccgtttttttnnnnnnnnnnnnnnnnnnnncagggctctgccctcttgaaaggcatttacttgtttaacacttgtccagctacagtggggtacagtagctggctattcacaggcatcatcatagcccactagtctcatattattttccttttgagaaattggaaactctttctgttgctattatattaataaagttggtgtttattttctttcac

SEQ ID NO: 358415 - DNA, 995 bp, Homo Sapiens
caagcagatgtgggggtgaatttctcaccccgaaaacacgattagcatgcaggttgctttccaactattggaattagagatacttattggcagtgcacctcttgtgtgtaatcatgatcactaaggcaagattatttcaacttgtttagaatatcagcagtatcttatcagatgcatgtttacacagtgtggacctgtgacttactatttaaaaaaaaaaaagaaataaagaaaaatctcaaacacagatccctaaacacaatttagttgaaaacgaactaaatgaacatttaaaaaagttcccacccctaaaaaattgccagattatttcctcattattggtcacagcctcaccaatttgctaccatggttgacgtttgctgaagcacagctaccaaggtccttaatgtgtaatacaatctcttcagggttggtacggtgaagtcctccaactgtcaacctggaacctgagtgacctttaaaaggcctcaatccattcactggacagtggtccccggcagtgggtgttcaatggtcctaggggtgctttcaattggggttaacttggttgtccagttgcccattaaactctggacccagctgatctgatctgcagaccagtggaaagtcctttgtttttcaacaggaacacgtgggagcagtagaggcagctccttggcccagccaaaaacaggtgccaggtggaatttgtctgtgtttgtgtaaagccaatgcggcaggagaactggaaagttcccgggaagcattccctgcactaggcgtttcataccacggaacctttggaagacgacaagtggatggactgaattctgatggccaacgtcctctgtaagtcctggagcacatcctggccggtcccttcaccatttttgtcatacaggagctgcttgaatgcttcgttttcaatgaggaccatcatgtttttgagaaagtagccttcgcaatatgctgagagctctgtgactccaagaaac

SEQ ID NO: 358416 - DNA, 662 bp, Homo Sapiens
gcttcttaaccacttacattaaaattgagaggagaaaggcattttcagtttctttagttaataaaaagaagccatttctggaggagttttatgcctgtaccagcagaggttcagccttccaggaatctcatcatgatccatactgctgacacaggcctttgtcacctgaagcattcttaaaataaggagactgacattaaacaggacaattgtgaactccactttgtaagcatcatacatatcttacaactcattctgaagactcctttattcttgctcttcccagagagctactgtgtttagtcatgctcactgcactcacaagagaaaaagagtaagtggcatatttgcaggtgttgatggttacaagagcatttttactttttcctccatgtttgttctgcagcatttccattgatgcatgctattgtagacttcttaggttgaccttggccttgacctccaccactagctcatgacccaaaactgaagatgtgcatcagaaagggacagatttggtctttctgctgtaaaagatattctgccttagtgcctgctaatttgttgtgcatagtcctgtgctgccaatcttccccaccaattgttaaggttaatgtgtgttttatatgtgtattcacaaacattaaaatgtaatcagtgga

SEQ ID NO: 358417 - DNA, 1846 bp, Homo Sapiens
  misc_feature (43)..(43): n is a, c, g, or t
taggtgaaaattccttataaatccaggattggctctgagaganctggctaagattcaggaagaaacaaaaaattcagaatcctacaaggttttgatgacaattagggccaaaattttaggaggagatgtaggatgcaggagaaaattaaagtgttttctttatatcagaggaggaaatagtagaggtcagtgaaggtctggggtagggaaacattcagactgtccattgcatggctgtggagtgagactgcccttagcctgggtcagccttcctgggccataaattgggcatccgtgatgctaggtaactgtgggaacaaaatgacagcttagagcagccatgggtgatgtttggtggtaaaaaacctacaggcgtttggggtcccatgattgttccagaccatgactcttcctggttgtgggtttgttacagagcaggagaagcagaggttatgacagttatgcagactttccccctcctttttctcttttctcttccccttgcttttccactgtttcttcctgctgccacctgggccttgaattcctgggctgtgaagacatgtagcagctgcagggtttaccacacgtgggagggcagcccagtactgtccctctgccttccccactttgagaatatggcagcccctttcattcctggcttggggtaggggagaccattgaagtagaagcctcaaagcagacttttccctttactgtgtgtactccaggacgaagaaggaagatcatgcttgatacttagattggttttcccagggaagagggcggagcagagcaaagtcactgtgaaccctgggccaggccctggctgggccagctcctgagagcgtctcgtgttgcagacccttgcccacttcacccacctgcaccttctccccctctcacagtgtcactgctgctaatggtcaaagtcaaatgtgtggccacatgggatgggccaggtcctctcaggctactttctggatgtcatttttaaaatatggaaacatgcaggtgccttcccaaagaggcttggactggtatatccaacgagaaacaaataagctaaagaaagtttaaactcaagaagaaagatgttgacagtctatgtaacagctggaaagtttataggcacccacctttgggacaacccagtgattatgaacatgtgatatctactatttaaaagaaatgttctcaccttgggttgattgtggtataccatgtgttatgaaaattgttgagctgaagctttgaatcgatttagttgagtctgactcacttgctttggttcctgtgtattttactacccctcttgtcagtgaccttccttccccaccccacccagagtgaatttgtagcatgattgtataaacctctatgtagaaaatggagatttcttgctctgaaatgttaagctctaactgatccatttctgtgtcctttagcctagtatgtctgaacttccattcttgttatatatttaaactttccctctatattataggttttgtggcatccacggtcaggtgtagaggaagctgccccttgcagaactgtactgtaatatttttcttttataaatattttcacaggactgattgtacacagggcttgtaataaaattttaacactgtgctgtgaaacaactatggggaatctccattgaaggctacttcatgggcacctgaaagtggagtgttatagctatgactttctatttcttgtttcctaagtaaattaaacctaattttcaccctttcattctgtttcagcctcctgtataagaagtaccgtattttctgcccatcatactttgtaataaaacttgaacatgaaaaggaaa

SEQ ID NO: 358418 - DNA, 606 bp, Homo Sapiens
gcggggggtggcagctacatgtctgcctctgtgggtgatgatggatcggcccgcatgtttgacttccgccatgtagatcacagcaccatcatttacgaagacccacagcatcacccactgattcgcatgtgttggaacaagcaggaccctaactacctggccaccatggccatggatggaatggaggtggtgattctagatgtccgggttccctgcacacctgtcgccaggttaaacaaccatcgagcatgtgtcaatggcattgcttgggccccacattcatcctgccacatctgcaccccagcggatgaccaccaggatttcatctgggacatccagcaaatgccccgagccattgaggaccctatcctggcctacacagctcaaggagagatcaacaatgtgcagtgggcatcaactcagcccgactggatcgccatttgatacaacaactgcctggagatactcagagtgtagtgttggtggcgctgtgcccacgaggcaggggcttttgtatttcctgcctttgccccacccccaaacctcctgtataagaagtaccgtattttcgtgcccatcatactttgtaataaaacttgaacatgt

SEQ ID NO: 358419 - DNA, 1065 bp, Homo Sapiens
  misc_feature (409)..(476): n is a, c, g, or t
  misc_feature (497)..(575): n is a, c, g, or t
cccttaagcccaagaatgcctgaactcccaaccctggttaaaaaatttaaaacttccccccctatattaataggttttggggcatcccacggtcaggtgtagaggaagctgccccttgcagaactgtactgtaatatttttcttttataaatattttcacaggactgattgtacacagggcttgtaataaaattttaacactgtgctgtgaaacaactatggggaatctccattgaaggctacttcatgggcacctgaaagtggagtgttatagctatgactttctatttcttgtttcctaagtaaattaaacctaattttcaccctttcattctgtttcagcctcctgtataagaagtaccgtattttctgcccatcatactttgtaataaaacttgaacatgtaacnnnnnnnnnnnnnnnnnnnnnnnnnnnnnnnnnnnnnnnnnnnnnnnnnnnnnnnnnnnnnnnnnnnnccccaccaacttctctatcannnnnnnnnnnnnnnnnnnnnnnnnnnnnnnnnnnnnnnnnnnnnnnnnnnnnnnnnnnnnnnnnnnnnnnnnnnnnnngggggcgccggggcccccccaaggggaaaagaggaaacggggcctatatcgggtttttcccaaagaaaaacccggggcccaagaaaaaagggggtgggatttcccccccaataaataaaaacccccccgcgggggcaaaccccagcggttcttctgaaaaaaactccccaaagggggggtttccggaggggccctctaccggggtcctttcacaagagagggggccccaaacgcgaggcctcatttaaataaatatattacgccctcgcccccccgggaacattactttgcgcaaaaaaagtgttgtggaaacttctattataaaaaaatttgcgcgcggcgacgttggaaaacgctctctccccaaactgcgcggttggagaaaccccgtgtacatcccaccgccccgtaatataccccctttttttcgcccgcttgtcgcgaaaaattattttctccccccagggtgggagaaaagcggcggggcgca

SEQ ID NO: 358420 - DNA, 653 bp, Homo Sapiens
gtagctactaccttaattgaaataaaatgatacttacggatattgcatagtttaagttagatttattgaaagatttcatctgtcgtgtttcatgtaaatgagaacagattatttgcatgaaaatatatacttcaacaaaaatctgttctttaacagagtagtggtagattattacactaatgagatttcactttggtaaatacttcatgctttcagagcctattaattttaggtggacaaatttaacaagttttctgttactttttaaaaagaaaaaatcccagaacataagaactatattatgaacacatgatttgaacctgttgtggtaaagatcttgtacaggatgcaaactaaaaacctaatccctgccatcaaatttattagaagagacctatatatgaacaacttaaaggcactgatttctataatagagctctaaaaacatgccaccagtgtatgaataagggaaagattaattttggctggaccgaatataaaaaattgtatttgaagaattgatactttaacttggaccttgaaggtaaagcttcaaaagacaggttactgaccattgagtgtttactatgtacccaatgtgtatatttttctttttaatcttcccaatagctgaataaagtatagatactatt

SEQ ID NO: 358421 - DNA, 625 bp, Homo Sapiens
ggagagcccctcccggtaaaactgaactcttctacagaagcaaatgtgattaaagaggctctagactcctctttggaatctactctggacaacagctgtcaaggtgcacaaatggataataaatctgaagttcagttgtggctgttaaagagaattcaggtacccattgaagatatacttccttcaaaagaagaaaaaagcaagaccccacccatgttcctgtgcatcaatagtgggaaaacctaatgagaaaatcctttgccactcacactgcagccatggtccagcagtacggcaaacggagaaagcagccagagtactggtttgctgttcctcgggagagggtggatcatttgtacacattctttgttcagtggtctcccgatgtctatggaaaagatgccaaaggagcaaggctttgtggtggtggagaaggaagaactgaacatgattgacaacttcttcagtgagccaacaaccaagagctgggagatcatcactgttgaagaggcgcgcaggatgagcacatgcagctactatgaagactaggacgaagaggtgctgcctgtcctacggccccacagcgcgctcctggagtatgcacatcgagcagctggcccgcgcc

SEQ ID NO: 358422 - DNA, 779 bp, Homo Sapiens
  misc_feature (40)..(41): n is a, c, g, or t
  misc_feature (44)..(44): n is a, c, g, or t
  misc_feature (56)..(56): n is a, c, g, or t
  misc_feature (124)..(124): n is a, c, g, or t
  misc_feature (128)..(128): n is a, c, g, or t
ccctcactaaaggacaaaaagctgaagctccacgcggtgnncgnccgctctagacntagtgacccccgggttgcaggaattcggcacgaggtattgagaaaataatcattatcccccttacctntctngtgtaaccctgttttcttctacctccctgtctttcttttttccctgttctctctttctacttcttaaaacatgcccattttcatcacaggaatgcttgagtttagaggactaaggtgatcttctaagctctgggattccaaattcctcaaaattgaagtccttttttataagacaataagtggagtctatgctgaacatttgaaacaactatcacatatgattcatttgtccttcagctaaaattcatcttatatgtgtctaaaacaacgtatcctaaaatggaatgttgcaaagaagacaatccgtttcctgaattatttcagtcttcaaatgtctaattcaactaaagatgttcaatgacattgattagaaacatacggaagactttagataacattataaatctagataaatataaataaatggcacaaaatacttttgatttctaacatagatgttttgatttattgcatttcatcatagaattttgacttaaaccttagaatctgtgggatctttgcaaaagtacttcatttctgagctacacacttgtctaatgttcttactaccactcgagtggggcccgtacccaattcgcctatagtgagtcggattacaattcactggccgacgatttaccgtcgtgctgg

SEQ ID NO: 358423 - DNA, 1025 bp, Homo Sapiens
  misc_feature (306)..(306): n is a, c, g, or t
agggagtggagagagaaagggagcagggcctaggaggtcctgaggtgcaggctggccgctgaaggttcaggatcttcccccacgcggcaggacatccgccaaggttcccagatctgagacggcgcacctcctgcgtgtccttgacggcaggtggactttccagacccagctggtgacgccagtgccccctaaatcccagaggtggccccttccctcgtgccctggccgcagcccctgggatcccgcggacccctggcctggcggtgcaggagtggtagcaggtccgcgcgccttcttgccggcggncggcgctgctcagcggcgcggctggactgagccgctcccgctgcgctcagagtccgggcccctggcgccatgccaggcccggcgggcgtgcgcccggcgcgcagcactgcagcgctggtcatatgagcagaaatgatgagaaaagcactctttaatcttttcgcacttgctctgcccgctcatacagttgcaggatgtcgatgacagacttgctgaacgctgaggacatcaagaaggcggtgggagcctttagcgctaccgactccttcgaccacaaaaagttcttccaaatggtcggcctgaagaaaaagagtgcggatgatgtgaagaaggtgtttcacatgctggacaaggacaaaagtggcttcatcgaggaggatgagctgggattcatcctaaaaggcttctccccagatgccagagacctgtctgctaaagaaaccaagatgctgatggctgctggagacaaagatggggacggcaaaattggggttgacgaattctccactctggtggctgaaagctaagaagcactgactgcccctggtcttccacctctctgccctgaacacccaatctcggcccctcttgccaccctcctgcatttctgttcagttcgtttatgttattttttactcccccatcccctgtggccctctaatgacaccattcttctggaaaatgctggagaagcaataaaggttgtaccagccaaaaaa

SEQ ID NO: 358424 - DNA, 1002 bp, Homo Sapiens
  misc_feature (231)..(231): n is a, c, g, or t
tggtggccttgctgcccactgacatgttccaagtacccaggatttccgcttttgctcagccgcccatccttgtccgtgtcgctctcgtgcagcaggtgcttgcttccaccaggggctggtcctgggcagggggcagcacccagtggcccacctcactcccatccaggtgcccatccttgttcagatcccggaagtcccggaactgctgcctctccgttctgcacccacgcncggctcctcctccccaggcttcggctgagtacagatccgcgatgtactcctccaccctggacatagccatctttgtttctgtccaggtcctccagggtttcagcaatcacgatgtcccgcatgtgagggaactcctcggggtgcaggaaggctgtcagctcctctcgagtggccatcgagtccccatcctggtcggccacccggaaacgccgctcgtcccgagccagcatctttttgtaggtctctgcatcctccacgtcatgaaattcttcaccgggcgcgtagtggccataggtggcgttgcgcagctcctcccaacccacacgcccgtcgcggtccgtgtcgtacgtgtcccaggccgcgctcaccgagtcccgtatgtgccgctgctgcgtgtgcgcgatccacgcgcgaagctcggccagcgacacccagccgtcgccgtcccccgcgcggtccatgcggtccacgatccgccccagacgggcctggctttcctctggggtgagttggtcgaattccttggccacttcccgtcccaggaaagcctcatggtcgtactggaagttcccgtgggcgtcatcatggggagcgtcgctcaggggggccgcctggtgcaccctcccctggccatgagggcctgcgtctggggatggcttccctgggccccgtgcctcagtagcaacagaagcagcagaactgatggtcgccacatcatcggtctcctgttatccagcttcgctccgctctccacgctccgctctgcgttcc

SEQ ID NO: 358425 - DNA, 1113 bp, Homo Sapiens
  misc_feature (952)..(952): n is a, c, g, or t
caaaaggttatcagggtttgcctggagacccagggcaacctggactgagtggacaacctggattaccaggaccaccaggtcccaaaggtaaccctggtctccctggacagccaggtcttataggacctcctggacttaaaggaaccatcggtgaatatgggttttcccaggccctcagggtgtggaagggccctcccggaccttctggagttcccggacaacccggctccccaggattaccctggaacagaaaggcgacaaaggtgagccctggtatttcaagcattggtcttcccaggtcttccctggtcccaaaggtaatctttggcatatagttttaggcacatacttgagcagatatgaaattttttaatactatgctcattcctaagttttcattaaacaaactatagaatgacatagtatattctggataagagatttattccttttcttttctcttagatgataagaagatatgttttagggtttgtggccagtccaaaataaaaagggaaaactttctgctttctttgtttgtcttctatctgaatttctggatatacttcaatgaatctcaatgcctagatttttttctggtcttgttaggccatcccttttgtagtgatggagttgttggcctttgtcctgaatgttattattaactaatttgaaaagacttatgaaacaaagtgacagttaatgctaatgtaagtaatattccttaactgcatgtctgagatagtcctctgaatacaattttacaatgccctctacttctgctctgtcaatggtgaaaactttggtggtgtttctcaagtgaatgcaaatttagaatttgtttcagaatcattggactcaacaggaatttagttgacaattgtttaattccatgtcaaaaagtagtaactcctgaatcatctagtcagaccacagacctaaaaagtattanaaaaggaattttggtactcaattttcatggaaatagtgaaagttcccaatgatataaaaatttattgaattgtatgtaaggataatttttcttttaatattatataaaaatactttattttgatcatctaatagatcaatgtcttataaagagttcgtttg

SEQ ID NO: 358426 - DNA, 396 bp, Homo Sapiens
  misc_feature (37)..(37): n is a, c, g, or t
ccaggacctttcccccccggcccaaagggaaggtggnataagcctgtgacatcttgtgatgctgtttatcttggtttgacattggagatacgctagtaactgtgataccatactataaaacagaagaattttctgctactaaaaactgcctttttacaaaatgactgtaaatatttgtaaaataaaataacactaaactttaagcccaaaaggagagatagagccatgtgttcagttgtggacctgtccgtggggcacagtgccaccccatcacagtgttgctgtcatcaggcaaaagtgaatgtttgtttatggcaaattcgtcttttgcgaatggcttaattctgacactacctttctgggaaatgttaataaatttttaatattcaaaaaaaa

SEQ ID NO: 358427 - DNA, 672 bp, Homo Sapiens
acacaagtgaatggaaaatttccagaccaaccaattcacatcgagtatgttccttctcacctccatcatatgctctttgaactatttaagaatgcaatgcgggcaacagttgaacaccaggaaaatcagccttcccttacaccaatagaggttattgatgacttgggaaaagaagaccttaccattaaggtaaccattctctgatttcctttagggtgtctcttgagagaattaaatagggtcaatagtaataaagctgtctgctttttgcaatagataacagtcatatatgccaggtgattgttaaatgaaggaaagccatttttatttagacaaatgcacattgattttaatgtgtggctttgatgacttgattgattgttttagatttcagacagaagaggtggtgttccccttgagaattattgaccgcctctttagttatacatactccactgcaccaacgccttgtgatggataattcccgggaatgctccctttgggctggtttttggttaccggctttgccaattttcctcgtcctgtatggcaaagatcttttccaagggaaatctggaatcctcctaccccttttatccagggatattgggaaaccgatagcctatccattcctacttttaaaagggccttttgtcctttcccggaggtcct

SEQ ID NO: 358428 - DNA, 844 bp, Homo Sapiens
  misc_feature (669)..(669): n is a, c, g, or t
  misc_feature (674)..(674): n is a, c, g, or t
  misc_feature (678)..(678): n is a, c, g, or t
  misc_feature (686)..(686): n is a, c, g, or t
ggggttccctttttccttcctcaggttttgtctcttcctgtgttgtccccagcaagggagagactgtggggtggattgggagaacagattaggagtatagcaaatgaacccagaatggaacagtggggagctaactgtgaatgaggagagtacctgctgcaggacctggaggtcaggtgtgaatgctgtattggcacagggaataaatatcctggcgtctggagccttcacctctccgtcaagtccttcctgtgatactgccatggcacaggatctgagttgcagctctgcaccctaaatcacaccctgggcattgtctgggctgcagggctgccaggttctgtacttgtgtccagctgtggccctggatgctggagctggagggttttctgtgctcagactgtagcctgtagctcttggcctgtgtagagccccctcctgtgccctcagtggctgtcgtttgttaacatcatcaggaagatgggaaaggtcaggcagaatttttctgccctacaaagggtggaagagaaaggacacagtattttcatgaatttaccatatatctttgtttttcttcaacgaaaaagttaattgaggcaatgtcatctgctcaaagttgagtggtttattcacaataaactgtaagtttctgattttggcacaccacanaatgngaangagaaganagattcttggcgggccgccctcggcccctggaaaaacttttcaaaacccttcctttggggggccggggccccattaaggaaagggaaaaagggctcaataactggtttccaaaggaaaaaccgcgggcaagtgaaaaggggctttggagttccccccc

SEQ ID NO: 358429 - DNA, 1214 bp, Homo Sapiens
  misc_feature (1110)..(1113): n is a, c, g, or t
  misc_feature (1116)..(1116): n is a, c, g, or t
  misc_feature (1118)..(1119): n is a, c, g, or t
ggggtgccttatgcggtgattttaatgataggtgtcatatataggacggagtaatctgtttacattctgttcttctcgatgcactcacaagcgggtaactaggtgacaagaaaacaaagatcttattcaaaagaggtcttacagcaacccaacgtctcatcttcccatagtaaagatgacggcgccttgaggtaagctacaggcaacaccacttccgcgtttctcttgcgccctggtccaagatggcggatgaagccacgcgacgtgttgtgtctgagatcccggtgctgaagactaacgccggaccccgagatcgtgagttgtgggtgcagcgactgaaggaggaatatcagtcccttatccggtatgtggagaacaacaagaatgctgacaacgattggttccgactggagtccaacaaggaaggaactcggtggtttggaaaatgctggtatatccatgacctcctgaaatatgagtttgacatcgagtttgacattcctatcacatatcctactactgccccagaaattgcagttcctgagctggatggaaagacagcaaagatgtacaggggtggcaaaatatgcctgacggatcatttcaaacctttgtgggccaggaatgtgcccaaatttggactagctcatctcatggctctggggctgggtccatggctggcagtggaaatccctgatctgattcagaagggcgtcatccaacacaaagagaaatgcaaccaatgaagaatcaagccactgaggcagggcagagggacctttgataggctacgatactattttcctgtgcatcacacttaactcatctaactgcttccccggacaccctccacctctagttgttactaagtagctgcagtaggcattgctggggaagaaacaaacacacaccaaacagtactgctacttagtttctaaggctgcacagggaagggaaagactgggctttggacaatctagaggtaatttatatccgcccccaggtggagcaacatgcgattctggaggcacgggggtaactgaaagtgagtacatatagtctttctggtttctggagataacccatcaataaaagctgcttcctctggtnnnnaanannaacacgtggcagagacgtggccaatccgtacgtaagtcaaaaaaccagacgtataaccttttacccgccccggggaaccttattaccatacgccg

SEQ ID NO: 358430 - DNA, 995 bp, Homo Sapiens
ccccccaggggaaaatggccctatatgtgcaggggttaaatttttgggtaaacacaacttaggaagggtgggagaggggggtttttcccggggggaaaagcccaagtttaaggatggagagtttaaaggtggttggaagggccccacgggaaaaaaattaggtttttggttaagcccctaattccaaaaaggggtgtccctttttttggcccctgggcccttcaaggttgggcctgtgaattttccttccaattggggttggcaatttccttccttttcggggtagggaaaggaccgggccccttttggaatccaagattccaggggattttccaacttgccacagcccatgggaaccccagccccaaggaggcccatgaggatgaggttagtccaaattttggggcacattcctgggccaacaaaggtttgaaaatgatccgtcaggcatattttgccacccctgtacatctttgctgtctttccatccagctcaggaactgcaatttctggggcagtagtaggatatgtgataggaatgtcaaactcgatgtcaaactcatatttcaggaggtcatggatataccagcattttccaaaccaccgagttccttccttgttggactccaatcggaaccaatcgttgtcagcattattgttgttctccacataccggataagggactgatattcctccttcagtcgctgcacccacaactcacgatctcggggtccggcgttagtcttcagcaccgggatctcagacacaacacgtcgcgtggcttcatccgccatcttggaccagggcgcaagagaaacgcggaagtggtgttgcctgtagcttacctcaaggcgccgtcatctttactatgggaagatgagacgttgggttgctgacactggtcctcctacgcctgagaccgacgttgccaggaccgcaaggtcagggggacttggctgtcccccgtctttcaaataaagctgtttgtcgaacg

SEQ ID NO: 358431 - DNA, 456 bp, Homo Sapiens
  misc_feature (30)..(30): n is a, c, g, or t
  misc_feature (44)..(44): n is a, c, g, or t
tttgccaacccagggacccagccccaagancccatgaagatgancctaatcccaaatttgggcaacaatccctggccccacaaaggtttgaaaatgaatccgtccaggcatattttgcccacccctgtacatctttgctgtctttcccatccagctcaggaactgcaatttctggggcagtagtaggatatgtgataggaatgtcaaactcgatgtcaaactcatatttcaggaggtcatggatataccagcattttccaaaccaccgagttccttccttgttggactccagtcggaaccaatcgttgtcagcattcttgttgttctccacataccggataagggactgatattcctccttcagtcgctgcacccacaactcacgatctcggggtccggcgttagtcttcagcaccgggatctcagacacaacacgctcgcgtggcttcatccgcc

SEQ ID NO: 358432 - DNA, 1437 bp, Homo Sapiens
  misc_feature (63)..(99): n is a, c, g, or t
  misc_feature (1068)..(1068): n is a, c, g, or t
  misc_feature (1087)..(1087): n is a, c, g, or t
cgggaaaaaaatattatggaaccttaccttaatgggcgactggagctcacgcggtggcggcgnnnnnnnnnnnnnnnnnnnnnnnnnnnnnnnnnnnnnatcaggccaaatcggccgagctcgaattcgtcgagagcggagcggtgacctccgacgccccgggcaagagaacgccaggagggataacgggaggaaggccggccggggccgccaaggcagtcccaggctcgcgtaggaggcgcgcagaccttgcaccttgcaccttcgcagcgccctgcaccccgccaccatgtgcgagctgtacagtaagcgggacactctggggctgaggaagaagcacatcgggccctcatgcaaagttttctttgcatcggatcccatcaaaatagtgagagcccagaggcagtacatgtttgatgagaacggtgaacagtacttggactgcatcaacaatgttgcccatgtgggacactgtcacccaggagtggtcaaagctgccctgaaacagatggaactgctaaatacaaattctcgattcctccacgacaacattgttgagtatgccaaacgcctttcagcaactctgccagagaaactctctgtttgttattttacaaattcaggatccgaagccaacgacttagccttacgcatggctcggcagttcagaggccaccaggatgtgatcactcttgaccatgcttaccatggtcacctatcatccttaattgagattagcccatataagtttcagaaaggaaaagatgtcaaaaaagaatttgtacatgtggcaccaactccagatacttacagaggaaaatatagagaagaccatgcagactcagccagtgcttatgcagatgaagtgaagaaaatcattgaagatgctcataacagtggaaggaagattgctgcctttattgctgaatccatgcagagttgtggcggacaaataattcctccagcaggctacttccagaaagtggcagaatatgtacacggtgcagggggtgtgtttatagctgatgaagttcaagtgggctttggcagagttgggaaacatttctnggagcttccagatgttatnggtgaagactttgttccagacatcgtcacaatggggaaaaccgatggggcaacggccacccggtggcatgtgtggtaacaaccaaagaaattgcagaagccttcagcagctctgggatggaatattttaatacgtatggaggaaatccagtatcttgtgctgttggtttggctgtcctggatataattgaaaatgaagaccttcaaggaaatgccaagagagtagggaattatctcactgagttactgaaaaaacagaaggctaaacacactttgataggagatattaggtatgttcattatgaagttgtcatgtagttactcatttttttcaaaataataatagtttat

SEQ ID NO: 358433 - DNA, 788 bp, Homo Sapiens
caatctgcaccagcaatattaaaataccaccactatatctgaacttattttacctataacaacttttaatttggtgtgtttaatataaaaagggtccataggaatttatagattcaagtttcaagtattcttcttcaggtactgaaccaaaaaaatgtacatttaacattaatccaaagtctaagccctggatatattattatttggtggcagggttcctaaaagatggtctcttgctccttcagtgacagccacgttgacagaccacagaggtgcaaacacatgcacactaaagatttcacagctactcacaagtgacgagactgaccacatcgaagcacagttgtccctaagaacatacagctcaaaaatgttcatgttctctttaagaatactgaagtataaccatcctcatgaagattacagctccttcttacacttgtagacactgacttactctgcaaggctgtgaagagaagaatctcagctccagtgtagaaaaataatacagaatacgtgagcacttccacgggtgagcctgcctcagaccacttccctccagacagcataaagcagatgcaggctgctctgtcagaaatagaaccattccttgcctccttgccgttgcaaacccattaaccataaatctgacagggataagaacagattttttcctattaaagcaactctttggtcatggacaaactgaaaagatttgaaattttttttcattagggtcccggaacaagatttctttgtttttaatctttaaaaaaattaagaagacc

SEQ ID NO: 358434 - DNA, 687 bp, Homo Sapiens
  misc_feature (549)..(549): n is a, c, g, or t
gcacgggaaatcgtgccagtatgtgaaggaagccaaaatggaagagaagctgtcgaatcctcccgcaacctgcactccaggcaagccgtccagtaaatcacagaacaaatgtaaaccctctcaaggcctttccacagaagaaaacctgtctgcctccatcaccaaacaacctattcatcaaaaggaaaatatcataccattacttgtgacaagcaattctgatcagtttttgacaactccagatggtgacgagaaggacataacgcaggacaattctgaattaaaacacagatcctcaaagaaagatttgttagagatagacaggttcacaatttgtggaaaccgaattgactgaatctgtggcttcatgcgctgaagaagctgggtcctggggcaacaagtgctgtgttgccaggacaaatagatgctaaacatggcacttaaatatttatttaaaaacttaaattattattggcaagcaaatcttagtatctttcttccagtaatatggcctggctgagggtcagaccacaggacaggagcgacctncggccttgactgtctgggaagcttgatggattataaaacttcctcctgcctggccaagcagcagcatcatttccaggacccaacaaaggcaacatctctgttttgctttgtcagtctgggcttacagtgtgttgcccc

SEQ ID NO: 358435 - DNA, 1880 bp, Homo Sapiens
gtcgccgcggtcgaggatctggaggtttgtccccgccgccccgacgcttccgcccggtccgtcggcacgtcggccctgcctcccggaccaccctgcggggcgcaccagcgatctggggtgcggggctcggcctccctgcgctcctggctgacggtgtgaccttgggtcttaaccatgaacttctctggaggagggaggcaggaagcagcagggtccaggggtagaagggctcccagaccccgagaacaggaccgagacgtgcagctgtccaaggctctgtcctatgccctgcgccatggggccttgaagctggggcttcccatgggagctgatggcttcgtgcccctgggcaccctcctgcagttgccccagttccgcggcttctctgctgaagatgtgcagcgcgtggtggacaccaataggaagcagcggttcgccctgcagctgggggatcccagcactggccttctcatccgggccaaccagggccattccctgcaggtacctaagttggagctgatgcccctggagacaccgcaggccctgcccccgatgctagtccatggtacattctggaagcactggccatccatcctactcaaaggcctgtcctgccagggaaggacgcacattcacctggccccaggactgcctggagaccccggtatcatcagtggcatgcggtcccattgtgaaatagctgtgttcatcgatggacccctggctctggcagatggaatacccttcttccgctctgccaatggggtgattctgactccagggaatactgatggcttcctccttcccaagtacttcaaggaggccctgcagctacgccctacccgaaagcccctttccttggctggtgatgaagagacagagtgtcagagtagccccaagcacagctccagagaaaggaggaggatccaacaataaaatattaatttataaaaaagaaattttaaaaagtaacaagaaagaactcgtttgaaaccatgtttcatcatcctgtagctacatctggtcttccttgtgtgctgggggactgcagataggtcaggggtatcagcctcagccactcagacaaggaaagggggcaccacatgagctcagggacccccacccccatccctggcctgggtgatggtacagcgtctggccctgccaggtccttggcctgcacaaagtcagtgacagcaggtgaaatgcccagctgggtgcctgcctggagcgggtgtggggcagtgagcccctgtgggtgtgggcttgggagtggctgtgacagggtggtgagcaggcaaggggcaatcagacagccctcagaaggcctcatggcccccggtgagctgcaggaagaggtccatccagctcctccccacgggcccgctcccgcgtcgacaggaaaatgtagcccccgatatactcgtgtacaattcggcagctggcagacacgcagctgaaggccacattgatgtgttcatcaaactcgatggccacttgccggatgtcccagttgacattccactggcgcatgttgctgaaacgccaggtcttgaccacgtcgcccacggccaagtcgatgcggatcagtcggttgttggcgatgcccaggatctcgtctttcctgctgcccttgaacctgaccatgacataggagatgccgaagtcgggcagggactgccaggcctggatgaagcgcagctgggcctctgccagcgacaactgggccacattctggtgggcttccaggatccgtggggtgagctgcttggccttgaactttcgctggaaacggggggcaacgaggccgtaggggttgaggccctcggcagaggcatcagggccgtgggggtggttgcctgggcccacactgcccgtgc

SEQ ID NO: 358436 - DNA, 949 bp, Homo Sapiens
cgacgcttccgcccggtccgtcggcacgtcggccctgcctcccggaccaccctgcggggcgcaccagcgatctggggtgcggggctcggcctccctgcgctcctggctgacggtgtgaccttgggtcttaaccatgaacttctctggaggagggaggcaggaagcagcagggtccacgagtagaagggctcccagaccccgagaacaggaccgagacgtgcagctgtccaaggctctgtcctatgccctgcgccatggggccttgaagctggggcttcccatgggagctggtaagtaggggccttggaggctggggcttgagcccagagagaaacgtgagcctgtctgcgactcctccctgatggctgcctccaccgctccctgaggaaggcacagagtgcacttcctccccatgcacagaggagagcaaggcctagagcccctgtcatgtccacagcagactgaggagagttcttgtctgggccaggcctggtgaccgccccctccagccaagcagccagatcagcacttaccccgagggcgagccctggagggtacggtgcagctggtggtgtgagtgtgcactccgggccagcgctatgctgggcactcacctccctgcccctccgtgaggcagatcctctttatatgtaagttgaaaaaactgcggcccagaaaggggagactttctaaaggtcccacagaggatgcccaagcgatctccaagcccaggaacttgtatcggtagcctgtggcatacctgttaagccctggcccagtccagagcaaggttagctccttgagcaccctggctgcccacagatggcttcggtgccctgggcaacctcctgcagttgccccagtaccgaggcttctctgctgaagatgtgcagcgcagtggtaggacaccaataggaaagcagcggtccgcctgaagctgggggattcc

SEQ ID NO: 358437 - DNA, 806 bp, Homo Sapiens
agcggagccgccgggagcacccagagggacgggaggcagccgcgcagccccgagctgggcagtgtcccgagccgccatggatagcgacgacgagatggtggaggaggcggtggaaggttattaccccaagaaaaagccagtagaataactactgccttcattttcacccacctctgcaaaatcagctcaccagaatgattgggaagacaccaataagggcacctggacgatgacggattaccgcacgggttctgcacagtcacctactcctccacagacagatttgaggggaactttgttcacggagaaaagaacggacgggggaagttcttcttctttgatggcagcaccctggaggggtattatgtggatgatgccttgcagggccagggagtttacacttacgaagatgggggagttctccagggcacgtatgtagacggagagctgaacggtccagcccaggaatatgacacagatgggagactgatcttcaaggggcagtataaagataacattcgtcatggagtgtgctggatatattacccagtaagccgtgtgactgttcactctgctggaaagtaacatactgtgactcttcacaatgaagagtaaaatgtattctgtgttagaacttgggagctgtgaaacctgagagtcaccacagctgacaccaagagtttatgaggcatgccctctcactgttactcactattggcttagattgtgggccttgaatccgttattaattatttttcagcgttgtttggaaagggctaattacttatgacttaaacaaatgagac

SEQ ID NO: 358438 - DNA, 627 bp, Homo Sapiens
ggcatagtggaggttcctgtgctctgagaacgcagtgtgaatctagacatccactgcagcctgggaagagctgtgttttcttcaaaagtctttaactttcacagtcacccctctaaagaaatgttctctgattgaaggcatgcttctattcctactttattgtgtttcatgcattctgccagagtaattacttttcataccaattcttggatgcagagaaatctctggtagtctaaggggatttcgatccaagtaaagctactatctcctattccatccagacttttccgtctgcctccattctctcagtcacatacctagaagcaagccagaaagcctgtccaaccaaaatcactctccaaagcccaagcactttattgttctccctgtctgttatcgagccaaggtgtatttggcctcattttatgccattagttgtctggctttcatggctctgcaccacattacagtcagagcaggaaggccagcagtggagatagaattatggcagaaacccagagtagaggcctctgctggtgagggagcctgcagcactctccacgctggtgggtcctagcatgcccaacagacccccatcccttcccatcagccttgggcgtacgggga

SEQ ID NO: 358439 - DNA, 880 bp, Homo Sapiens
gccaactaccctggctggtaggccccattcctttcccttttgggtggaaaagctacagaaggaaagtcgtgggaacaaaattataccgagggctttttttgtttggttttatacttttatcaaactccccagcaaacttgctgactgcatttccacacattaccaacacctgccaggacttcacagcagggtgacccgctaagcaagctggcctaggttcagcccacactgctgctacctactcttcaagacattaggtgtgaacagagaaggggaatgaggtgacctgggtttgaatgacccagggcccaatgcacaagagagaattttgatgtcaaattagggtggcaaggagaaaacaaaaaagatccaacttagaaacagaaccatgattcaacatttgcaaaaagcatcatcaataagcctgaagaaggccacggactgtgcatccgctggctcagagaaaggctgggcagccggaacagcagcttcctgggtaaccaggcaacaatctcagcgcctgggagtcagggctgcgcactccactctggccagaacacaaacggcattggcactgtaagctctcagttacgtggccctcttttctctcctctatttctccaaacatatgtgcacacccagaggaactgagtggcaattccagggtgcgggcgggcaggaggggagagaggacaaagagagaataagatgagctaaatgttttgtgaaaagccaccgcccatccgaaagcttgtgacttcccttgccccaacaatctttgtaggttgccccttttcccattcctacccaagaacacaggggtgggggagagggaaggctctctttgtcaaaaagcagttatctacatttcagaagaaaa

SEQ ID NO: 358440 - DNA, 968 bp, Homo Sapiens
  misc_feature (48)..(87): n is a, c, g, or t
  misc_feature (318)..(370): n is a, c, g, or t
  misc_feature (394)..(425): n is a, c, g, or t
  misc_feature (441)..(452): n is a, c, g, or t
  misc_feature (473)..(473): n is a, c, g, or t
  misc_feature (493)..(493): n is a, c, g, or t
  misc_feature (506)..(510): n is a, c, g, or t
  misc_feature (516)..(557): n is a, c, g, or t
  misc_feature (561)..(563): n is a, c, g, or t
  misc_feature (565)..(567): n is a, c, g, or t
gacccaccccgttttcccggtccgggggttcaaaataattcccccttnnnnnnnnnnnnnnnnnnnnnnnnnnnnnnnnnnnnnnnnagataaaattactaaaccgagcggccgtgtaagaaaggggccatcgccggggggcgccaatatggttttgtggggagggtccccctgcggttgccttgggggggaaagggccccgagggcgcggccctttacaaaaaaacaccccagcggggggttttttgaaaaaccccccctgggtatggggcccgggaaagcttctttattagggggcgggagtggaatttcttctannnnnnnnnnnnnnnnnnnnnnnnnnnnnnnnnnnnnnnnnnnnnnnnnnnnnacaacgcttgtgggcgccggcccnnnnnnnnnnnnnnnnnnnnnnnnnnnnnnnntcctgttgttaggttnnnnnnnnnnnncacaatgggcgaaagggagtntgggggggtattttttgggntggtgtggggggnnnnnaaaaannnnnnnnnnnnnnnnnnnnnnnnnnnnnnnnnnnnnnnnnntttnnntnnnttatggtctaatatgggctttagttaatatttccaataagtcaatttcaactgtcagtgagaaaaataaagtttatttcttatacagaagtaattccaattcaggttttaagtctgaaccttcaaacttgggaagtttttttccaagtcatcagcaagcgccttatcaacttcacgtaggattttaataaaatcttccaccacagggctatagaaaggaagaaggttttgaaatgcagaggaacacttctgtttgctcaactggccttcctttactccctgagccaccgtctcctttgttaatgcctgaaaaatattagaaagaaattcacataaaatatcctttaagattttcaagtggaaatcatcttgggttaaatcagtccttttagtttcctctcc

SEQ ID NO: 358441 - DNA, 1331 bp, Homo Sapiens
aagcggagcttccggcaacggccttcaagcgcgggacgcgacaaagtcatggaccgcaacccctcgccgccgccgccgggtcgcgacaaggaggaggaggaggaggtggccggtggagactgcatagggagcacggtctacagcaaacactggctcttcggcgtcctcagcggactcatccagattgttagccctgaaaacaccaaatctagctcagatgatgaggagcagctgacggagcttgatgaagaaatggagaatgaaatttgcagagtatgggatatgtcaatggatgaggacgtggctttatttctccaagaatttaatgctcctgatatattcatgggagtactggccaagtccaagtgtcctcgattaagagaaatctgtgtgggaattttaggtaatatggcctgtttccaggagatatgtgtgtccatcagcagtgataaaaatcttgggcaggtgttattgcactgtttgtatgattcagacccacctactctgctggaaacaagcaggttgttgcttacttgcctttcccaggcagaagtggccagtgtttgggttgaaaggatccaggaacatccagctatttatgatagcatttgcttcattatgtcaagttcaacaaatgttgacttgctggtgaaggtgggggaaggttgtggacaagctctttgatctggatgagaaactaatgttagaatgggtcagaaatggggctgctcagcctctggaccaaccccaggaagagtctgaagagcagccagtgtttcggcttgtgccctgtatacttgaagctgccaaacaagtacgttctgaaaatccagaatggcttgatgtttacatgcacattttacaactgcttactacagtggatgatggaattcaagcaattgtacattgtcctgacactggaaaagacatttggaatttactttttgacctggtctgccatgaattctgccagtctgatgatccacccatcattcttcaagaacagaaaacagtgctagcctctgttttttcagtgttgtctgccatctatgcctcacagactgagcaagagtatctaaagatagaaaaaggagacggtggctcagggagtaaaggaaggccacgtgagcaaacagaagtgttccttctgcatttcaaaaccttcttcctttctatagccctggggtggaagattttattaaaatcctacgtgaagttgataaggcgcttgctgatgacttggaaaaaaacttcccaagtttgaaggttcagacttaaaacctgaattggaattacttctgtacaagaaataaactttatttttctcactg

SEQ ID NO: 358442 - DNA, 219 bp, Homo Sapiens
tagtaatcttcaacaccttagaagctgctgcccaatacatccaagcatacatcttaaaattacagtttaaaatatttttaaatgaaatttgacactaacatttgcagaactaccaaaacctgccttggaaaactggtttggaaaatggatgaataagacagcagtagggtcttgttcagctcaaaagcctctgtttctaaggttgcttttattgagact

SEQ ID NO: 358443 - DNA, 585 bp, Homo Sapiens
gagactagtgtgttcaaagaggcaggcggatgatccccatcctacaggggcatttattttgtggacaccggggtcacctgggaagcaggtctggcctcagttctccggcctggggcactgattgatctgtgtctcgcttgtggaataaagaggattcctgtttcagtgaggaaccacacctgctcagagggaaaatactctgcttgtcagaatctttcactttctgtgaaccagctccttggcctgatagggtcacagggcccaggagtggtcaaggaagcttctgtgaatgtattgaacgtcaagagtgtccagggggatgtgtggagtttggcccgattcctgtcattgccagtggaaatgccatctctggagtttgccccaggtgtttgtgaagcaggttgggattcggagctgaacgctcctctaaagatatgtgctggcttcttatgtcatggctagacagcccctgctgggcctgtatgcatgtccctttctctatgcccctgagttgtgtcaggagatttgaggaacttctgactcatcctaccaagtggctatggcctttttgcaaaaagctgtgtc

SEQ ID NO: 358444 - DNA, 977 bp, Homo Sapiens
gctagcacagttggtccgagctgccgaaaggtctggtcgcagagacaggaacgtgtaatcctcagcgtgctccagcccacagcttcgctctactgctcggcagggcagctggcctctgggcaccggcggcccctctgcctcgcggaaaagcctgatgaagtcctccgatattgatcaggatttattcacagacagttactgcaaggtgtgcagtgcacagctgatctccgaatcgcagcgtgtggcccactacgagagtcgaaaacatgcaagcaaagtccgactgtattacatgcttcaccccagggatggagggtgtcctgccaagaggctccggtcagaaaatggaagtgatgccgacatggtggataagaacaagtgctgcacactctgcaacatgtcattcacttcagcggtggtggccgattcccattatcaaggcaaaatccacgccaagaggttaaaactcttgctaggagagaagaccccattaaagaccacaggtctgaggcgcaattacagatgtaccatctgcagtgtctccctaaactcaatagaacagtatcatgcccatctgaaaggatctaaacaccagaccaacctgaagaactaagtagtgaaagcatcaatcaagacataagaacaaaacattagcactttctctgccgtggagaattgcttatcaaccaccagaggaggcttctttcttgaacaataaacatttcttataaggattcacagattccacatacgactgatcttgatcttcggaactgactgcaggtttctttgaccttttccctttttctaatacggcggtacacgctatgatattctggatgggcatttataaattcttgccctgataacatatttagcacatgttctaaatcatagtcctatagcaaacagttggaccattatccaacctgaaagtttgcaacatttcaacttcccactaatatccagaattcctc

SEQ ID NO: 358445 - DNA, 2156 bp, Homo Sapiens
  misc_feature (1886)..(1886): n is a, c, g, or t
ctggaccggtccggattctcaaatgagaaaactcaaatattcccatcacattggttttattgggagaactccagaaccaagcagagaaggaagggacccatgacagcattagcatttgacaatcacacatgcagtggttctctgactgtaaaacagtgaactttgcatgaggaaagaggctccatgtctcacagccagctatgaccacattgcacttgcttttgcaaaataatcattccctgcctagcacttctcttctggccatggaactaagtacagtggcactgtttgaggaccagtgttcccggggttcctgtgtgcccttatttctcctgagacttttcatttaagctccaagccccaaatctggggggctagtttagaaactctccctcaacctagtttagaaactctaccccatctttaataccttgaatgttttgaaccccactttttaccttcatgggttgcagaaaaatcagaacagatgtccccatccatgcgattgccccaccatctactaatgaaaaattgttctttttttcatctttcccctgcacttatgttactattctctgctcccagccttcatccttttctaaaaaggagcaaattctcactctaggctttatcgtgtttactttttcattacacttgacttgattttctagttttctatacaaacaccaatgggttccatctttctgggctcctgattgctcaagcacagtttggcctgatgaagaggatttcaactacacaatactatcattgtcaggactatgacctcaggcactctaaacatatgttttgtttggtcagcacagcgtttcaaaaagtgaagccactttataaatatttggagattttgcaggaaaatctggatccccaggtaaggatagcagatggttttcagttatctccagtccacgttcacaaaatgtgaaggtgtggagacacttacaaagctgcctcacttctcactgtaaacattagctctttccactgcctacctggaccccagtctaggaattaaatctgcacctaaccaaggtcccttgtaagaaatgtccattcaagcagtcattctctgggtatataatatgattttgactaccttatctggtgttaagatttgaagttggccttttattggactaaaggggaactcctttaagggtctcagttagcccaagtttcttttgcttatatgttaatagttttaccctctgcattggagagaggagtgctttactccaagaagctttcctcatggttaccgttctctccatcatgccagccttctcaacctttgcagaaattactagagaggatttgaatgtgggacacaaaggtcccatttgcagttagaaaatttgtgtccacaaggacaagaacaaagtatgagctttaaaactccataggaaacttgttaatcaacaaagaagtgttaatgctgcaagtaatctcttttttaaaactttttgaagctacttattttcagccaaataggaatattagagagggactggtagtgagaatatcagctctgtttggatggtggaaggtctcattttattgagatttttaagatacatgcaaaggtttggaaatagaacctctaggcaccctcctcagtgtgggtgggctgagagttaaagacagtgtggctgcagtagcatagaggcgcctagaaattccacttgcaccgtagggcatgctgataccatcccaatagctgttgcccattgacctctagtggtgagtttctagaatactggtccattcatgagatattcaagattcaagagtattctcacttctgggttatcagcataaactggaatgtagtgtcagaggatactgtggcttgttttgtttatgtnttttttcccttattcaagaaaaaagaccaaggaataacattctgtagttcctaaaaatactgacttttttcactactatacataaagggaaagttttattcttttatggaacacttcagctgtactcatgtattaaaataggaatgtgaatgctatatactctttttatatcaaaagtctcaagcacttatttttattctatgcattgtttgtcttttacataaataaaatgtttattagattgaataaagcaaaatactcaggtgagca

SEQ ID NO: 358446 - DNA, 670 bp, Homo Sapiens
  misc_feature (15)..(15): n is a, c, g, or t
actgggaagggcacntactgtcctcccatggcagaagatggaagggcaaggagagctgaacatgctaccgcaaaccctataatggctcaatcaaatatgaggcaagagtccatgtgacctaatcatctcccagaaggctcagcctcccaaccctgttgcattgggattaagccaacacatgaattgtggagacaacacattcaaaacatagcattccacaccttgggctccccagattcatgtcctcacatgcaaaataaattcattccatcccaatagcccctaaaaagtcttaacttgttccagcatcaactttaaagtcaaagtccaaagtctcatctaaatcagatatgagtgagactcaaggcatgattcatcatgagacaaaggatgtacatttgcaatgtttgtcatgtcagacaaaacaaaaatatgtaaatatccatcaatagggaactgctgaaaaatttttttgtataatcataaaatgaaacatgcagatgtttaaaccaatgagctagatctcaacgtgctgatatggaaagtgcttcagaatgtattaaggacataaattaagtgtacaataatgtgtgtgtgtgtatatatgtatatgcttacgtgtgtatggaaagtatctcagcagatacaataaaaacttaattgtgattaa

SEQ ID NO: 358447 - DNA, 876 bp, Homo Sapiens
  misc_feature (30)..(30): n is a, c, g, or t
  misc_feature (173)..(215): n is a, c, g, or t
  misc_feature (218)..(229): n is a, c, g, or t
tgaacacgcgcatatataaatactcactanacacactagcgagtgcagagtagacatgaatcacacagacacacccccattcgactccccatgccgaccccaccatgatcgctatggaacacgcgaggaggatatctagaacagtggagccccgggctgcaggaatacggtannnnnnnnnnnnnnnnnnnnnnnnnnnnnnnnnnnnnnnnnnntgnnnnnnnnnnnncaaccttgaaaattcaaatatggatggtgactctatcttccaggtgaagattagggattactaggacacaatggagctggaaaaagtacttccattaaaatgataactgggtgcacaaagccaactgcaggagaggtatgcgacatgagaaggaaattttattttaaatatagatgacatctttctataatacctatcagaaaatcaaatatcatattaaaaaatagatgaaaaaattataaaatgactcttgcgaatccaaaaaatattgaagcttaatggccacatttaactcctatagaagaagggggattggagcaaaaaccaaaggtggaactgacattcatagacatgagcaggaggagttacaaggcagcagagcaacagtaaggaaacagcatgacaacagcctcaagatcatggggaactgaccacaggagaacctactgaggcccaagctaacaatgaaagagcactaggagacgaatgcacctgagaaaggaacgcggaaaagaagatgctgctcttagcattcaagggaccagaaagaagcatcaaaattagaagcaagaggaaagggaaaaataggcaattccttcactaaaaattaagaaggaaatattacaacaatggcttttatcacggcg

SEQ ID NO: 358448 - DNA, 804 bp, Homo Sapiens
agcggggcgacgtctgactggactcgcggcgacttacctttcagtcgtgcgctcctgatccggcgctcggaatttgtccccggcttcagggctgcggggcctggaaggaggcgtatcgaggcggctcgaaaacgatccagggagccgaggcgctcctcttgtcatcccactcagcgccatgtcctggatgttcaagagggatccagtttggaagtacttgcagactgtccagtatggagttcatggaaattttccacgcctctcatatccaactttctttccacgttttgaattccaagatgttatccctccagatgactttctaactagtgatgaagaagtagattccgttttatttggaagtttgagaggtcatgtggttggactacgctattacacgggagtagttaataataatgaaatggttgcattacaacgagatcctaataacccttatgataagaatgcaattaaagtaaacaatgtgaatggaaatcaagttggccatttaaagaaagagcttgcaggtgctttggcctatatcatggacaacaaattggcacaaattgaaggggtagttccttttggtgcaaacaatgcttttaccatgcctctgcatatgactttttggggaaaagaagaaaatagaaaagcggtttcagatcagttgaagaaacatggatttaaattgggtcctgcaccactttaggattcaatttggaaagtggttggggcttctgaagagctggaccaagctatagtatgccagtgcatgctgcagtacagatgacaactgaacagctt

SEQ ID NO: 358449 - DNA, 457 bp, Homo Sapiens
catgaatttgggacgagtctatctccaataaccgggtttatcctctgctatagccaatttccttcctaatctgaatctctttagctggatatttgctaacacttgtcacactttcccgatattctgcctaatgaaacttactatcgacttgcttccatataaataattatcaactgatttataaataatacaagacaaataacaattattaatattatcatttgttaataaagagttacaggtcaggcacatttaaatatgtgttttgtttaactttcacaatactgcaaggctgattttataatcggcattttctgggttcaatttctttattctttactactatttttattccaagctctcagctcagaagtaacctgcccaagatatcccagacagctgggagatgccaggattccccagatgctgctattcatgctcttctatgtcacttgtt

SEQ ID NO: 358450 - DNA, 1862 bp, Homo Sapiens
  misc_feature (1411)..(1809): n is a, c, g, or t
tcaagatgggcgggatgccagcctgttacataaatgtgccaaaagcctggccatgcctggaaaatggaccaatccgcccgccaagaggttgggtctcgttccctagagagaaggaagtttcctctccttgaagtccagccgtccattccggtggaggcagaggcagtcctggggctctggggctcgggctttgtcaccgggacccgcaggagccagaaccactcggcgccgcctggtgcatgggaggggagccgggccaggaacaatatgttagccgtgcactttgacaagccgggaggaccggaaaacctctacgtgaaggaggtggccaagccgagcccgggggagggtgaagtcctcctgaaggtggcggccagcgccctgaaccgggcggacttaatgcagagacaaggccagtatgacccacctccaggagccagcaacattttgggacttgaggcatctggacatgtggcagagctggggcctggctgccagggacactggaagatcggggacacagccatggctctgctccccggtgggggccaggctcagtacgtcactgtccccgaagggctcctcatgcctatcccagagggattgaccctgacccaggctgcagccatcccagaggcctggctcaccgccttccagctgttacatcttgtgggaaatgttcaggctggagactatgtgctaatccatgcaggactgagtggtgtgggcacagctgctatccaactcacccggatggctggagctattcctctggtcacagctggctcccagaagaagcttcaaatggcagaaaagcttggagcagctgctggattcaattacaaaaaagaggatttctctgaagcaacgctgaaattcaccaaaggtgctggagttaatcttattctagactgcataggcggatcctactgggagaagaacgtcaactgcctggctcttgatggtcgatgggttctctatggtctgatgggaggaggtgacatcaatgggcccctgttttcaaagctactttttaagcgaggaagtctgatcaccagtttgctgaggtctagggacaataagtacaagcaaatgctggtgaatgctttcacggagcaaattctgcctcacttctccacggagggcccccagcgtctgctgccggttctggacagaatctacccagtgaccgaaatccaggaggcccataagtacatggaggccaacaagaacataggcaagatcgtcctggaactgccccagtgaaggaggatggggcaggacaggacgcggccaccccaggcctttccagagcaaacctggagaagattcacaatagacaggccaagaaacccggtgcttcctccagagccgtttaaagctgatatgaggaaataaagagtgaactggnnnnnnnnnnnnnnnnnnnnnnnnnnnnnnnnnnnnnnnnnnnnnnnnnnnnnnnnnnnnnnnnnnnnnnnnnnnnnnnnnnnnnnnnnnnnnnnnnnnnnnnnnnnnnnnnnnnnnnnnnnnnnnnnnnnnnnnnnnnnnnnnnnnnnnnnnnnnnnnnnnnnnnnnnnnnnnnnnnnnnnnnnnnnnnnnnnnnnnnnnnnnnnnnnnnnnnnnnnnnnnnnnnnnnnnnnnnnnnnnnnnnnnnnnnnnnnnnnnnnnnnnnnnnnnnnnnnnnnnnnnnnnnnnnnnnnnnnnnnnnnnnnnnnnnnnnnnnnnnnnnnnnnnnnnnnnnnnnnnnnnnnnnnnnnnnnnnnnnnnnnnnnnnnnnnnnnnnnnnnnnnnnnnnnnnnnnnnnnntggcgaccggttattaggccgatggcccatctacgtgaactattacccctatc

SEQ ID NO: 358451 - DNA, 844 bp, Homo Sapiens
  misc_feature (479)..(479): n is a, c, g, or t
  misc_feature (703)..(711): n is a, c, g, or t
ctctgaagccgtcatctggagtctgtagtgaaggcctcttgttagggaaactggatggttagtgttcaaaatccattttgcgtgtgtgcaaggacacaggtggtattaaacagaagagaaaatcagatgactgtgaaatgttcaatactaaataagatgatttttagtttttccaggggcattgttatttgtgaccacaatgaaaaatgtagacagtgatgatctggtaactggcacacttcccaagctcaagagctcaaaagaatggttggagcccaagcccctttgttttatggaggttttagctaaagaagatactgaggcagctattcaatcaatattatacaaagaaaattctgtaattaagaaacaaagggtcatcctttctagaaagagaaccgctgtgctatcaggagggaaataatccaagtgccaaagaggccatctctgaagggtatttttctttcttgagcctcagncaggaacgggaggaagaccaggatgggtctccctccccgccgttgggactgccgaagctggagctataaaaaagaagagggaggtttcagcaaccaacgagcacacaccctgatccttgattggtgaaaggatacacaaaatcaggctgcttcagaggaagtcatttgctcacaggaatcagggtgaaggccaagggcggcactcaaaaattgtcctgtttttnnnnnnnnngcatttgcaacgaacttcctttaatttttgagttcagtgtttgtgataattaaaaaatggcaataccatgtattttccccagaagttaaaaaatattgctgaacgaaccaataaaaataatttcagctccctc

SEQ ID NO: 358452 - DNA, 1286 bp, Homo Sapiens
  misc_feature (1145)..(1153): n is a, c, g, or t
tgatcgaccgtcaacggacgcggttgcgggtgggtggcggcggctggattggccgggccacgcgccggtcaccgagaagcagcgactccagccccttccgcaaaccaagacccgccacctagagccgccgcccaatcccctttgggcctgaagccgtcctccgccgccccggcaccgcccgcgcggactcgctgtggaacccgcggcgcagggggcggagtgctcgcgcggcgctgcgtccgggagacggttttagctaaagaagatactgaggcagctattcaatcaatattatacaaagaaaattctgtaattaaggaactagataagtatttacaacatcatgccttcttaacatgcaagaagaaaggagatgttatataaaagatgggttgactgtgtggcagatcctcttcagaagacaattatagaaaaagtttgctcacataagaagattacacaaaacaggaggcaaggggaattagatggctttttaaaacatgtaacatacacacagggaaatgcatttatagaacattatgatccaaaagagtatgatcccttttatatgagcaagaaggaccccaattttctgaaggcaaaatatattcaataaaggaattcaaagaagttgaaaaggttcagctgcattccagattcccacaaatttctaattcaaggcactttataactccaaacgagtgcctgaaactgcctacaagatacatagaaagtgaattttgtagaaggagaaggttaaaggtgaaagtgaattttaatgactgtagttttgatttgaaacccttggcaagagctccttatcttttggaatccccaggaagaagaaaaaacagttattttaaaaaacaaagggtcatcctttctaaaaagagaacccgctgtgctatcaggagggaaataatccaagtgccaaagaggccatctctgaaagggtatttttcttccttgagcctcagccaggaacgggaggaagaccaggatgggtttcagcaaccaaggagcacacaccctgatccttgattggtgaaaggatacacaaaatcaggctgcttcagaggaagtcatctgctcacaggaatcagggtgaaggccaaggacggcactcaagaattgtcctgtctctnnnnnnnnngcatctgcaacgaacttcctttaatttttgagttcagtgtctgtgataattaagaaatggcaataccatgtattttccccagaagttaagaaatattgctgaacgaaccaataaaaataattacagctccctc

SEQ ID NO: 358453 - DNA, 1152 bp, Homo Sapiens
gcttgcccacccatgctcaagatgggcgggatgccagcctgttacataaatgtgccaaaagcctggccatgcctggaaaatggaccaatccgcccgccaagaggttgggtctcgttccctagagagaaggaagtttcctctccttgaagtgagagctagaatcgcactttctgtcaagctgagagaaagactcttttccagaggctaaaaggacaagaaaatctgatttgcttgcttctaactttgcgttttaaagggggaaggaggaaaggaaagagggggagggtggttctgcttagccccacccctccggctaccccaggtccagccgtccattccggtggaggcagaggcagtcctggggctctggggctcgggctttgtcaccgggacccgcaggagccagaaccactcggcgccgcctggtgcatgggaggggagccgggccaggaacaatatgttagccgtgcactttgacaagccgggaggaccggaaaacctctacgtgaaggaggtggccaagccgagcccgggggagggtgaagtcctcctgaaggtggcggccagcgccctgaaccgggcggacttaatgcagagacaaggccagtatgacccacctccaggagccagcaacattttgggacttgaggcatctggacatgtggcagagctggggcctggctgccagggacactggaagatcggggacacagccatggctctgctccccggtgggggccaggctcagtacgtcactgtccccgaagggctcctcatgcctatcccagagggattgaccctgaccaggctgcagcatcccagaggctggtcacccgctttccagctgttacactcttgtgggtgctggagttaatcttattctagaactgctaggcggatcctactggaggaagaacgtcactgctgggctcctgatgggcgatgggtctctatgggtctgatgggcggaggtgacctccctgggccctgttttccaaggctcttttacggcgaggaagtctgttcacacttgctgaggctcaggaccctagttccgcaatgtcgggactgttcccgggcgatttgcccatttcccggggccccttttctcgttcgggaattccgggcgaccgggccttctggcccagatcg

SEQ ID NO: 358454 - DNA, 2529 bp, Homo Sapiens
  misc_feature (420)..(420): n is a, c, g, or t
  misc_feature (2452)..(2463): n is a, c, g, or t
tcccccctgtataagagcccaaagcgcggtgggccctcttttgggtgcccccggaagaggggggagagacccattccccctttacaattttttcacaagagggtgttctttgtgttggccaaccctataaccctgtggaaaaaaattgttcttggataaaaaagaggtgggggagagcccttgccatttcttgggccatactttaaccagaggtggtgtaagaagtccaaggagccttccacagaaaagggagccttccccaaatagaaaatgctccggtgaaaatgatcaggtgttctcttcaatcccatgcccgaggcccaaacactttataaaaaaccagttgatcaagtaattccagtgaaagaagaggatctctggaggtaataaaaattgctcccttaattcattcttcttttntagtgctttctgtctagtgtttttcaaccataaaatatttttctttaggctcttcaattttcttctaaaataataaaattgtctttcatgggcctctgatgacttaacttcctttttttcttaggtagtctcccaggctctctgtggcttccacacagatgctaggatacatgccctcagtgtaagttgctaccagaagatacagatgggtcttcacgacaaccacaccagtgttctcatttttggcataaagagaatattcatctgcccggacacatctgtaatcttttcccttgaaatacagtccttctcttcgggcttgcaaagggttcttggcaaatccattcaccagtgttcggacatcactgggcgttacattgaaacctggtgatgctacacacaagctccgctcctggattttgatgagggctgcactgtccacatgcttggttcccaagagggtgtctaacaataagctctgcaaatggctcatgttccctcaactctccggcacaggcgcccgtttcccgccactgccttccagtggtttggtccccgagcaggacccaaggcggggcagggggtggtgagcggtgaattccctggcaccgaggactcgagggagcggacgccaccccgctctgtggtgcccgcaaggacccggcgaccaaggacccgaccgtcaacggacgcggttgcgggtgggtggcggcggcaggattggccgggccacgcgccggtcaccgagaagcagcgactccagccccttccgcaaaccaagacccgccacctagagccgccgcccaatcccctttgggcctgaagccgtcctccgccgccaccggcacacgcccgcgcggactcgctgtggaaccccgcggcagcacgggggcggaacgtgcatcgcgcggcgctgcgtccagggagacggtgggcgccaacattcgcgcgttcccgcaagacgcgggcgtggctcccttccagccgcagtcggacggctccggggtcgtcgggccgggcccgagtgtgtagcaggacggccgcgggcctgctggccttgggagggcagagaggtgcctgtcgcggccggcgacctccccgccaggccgggcggtccccgcgcacgacgcgcctgcgcgggaggcccccggcccggggctggcgtggaggccgcaggcgcccggcctagtgggtgggaggaagggccgggagtgggcgcgatgagcgagagcgggtgcggacgcctacgacatccccgtcgcacccgtgcctcggggaggacttcgagccgctcagagctcgaagactcgcgcagtatgaccgaaagcccctccctgccttctctaagcagctcagcctgtgtttctgtggccagaaagttgcagttcttcccactcgaggccaccaaagtcagaaaagtgtcgcaaatgggactccgagaggccaggctgaagctgccacactggctggaatgggctgccttggaaggggacgtgcgaatcccttccaacggaccgggggattctttcaaagagcatctcgcccgcttataaaggaggctgccctcccatgcccccacctccgagtccgccattgccccgtcccctcgctccggcaccctgaccgcttcctgcccctccatcccatttttcccccgtgttgttatgtatatcgccccgcccctccaacctttacagcattccccttactgtcccgcgacaagcgccccattcccttacttccgcccccccctctcttcttttcccccgcgcgcctttcgctttctgtctgggcacccccatgccgtaccctctccccttcccccacctagtcccggtccctaccggcctatttccctcccgctctcaccctcacatgttctaattccccccagcgcccttttccccccttttatcccctacctacactccctacgaagaacttgttcgtgctcagtgtcctgccactctggctataggcacctctctctccgtgtttcgttgttcccctcttccatctacccgctctttannnnnnnnnnnngtctattgtatttacccctccccgacatgttctcccccgctcgtacgtcttcatgtttgcccacgg

SEQ ID NO: 358455 - DNA, 587 bp, Homo Sapiens
  misc_feature (45)..(45): n is a, c, g, or t
ctagaggatccccctcgagcggcgccgggcaggtttaaccccccnttttccaccagggggtatagatgatacatatgtagaggggacagggacagactgactgaatgattataaatgaacaaagatgacattaggtctaaatcaactgaaaaaagcatcaaatgatctcttagtacctttttatttacatgttttaaaaagccatctaattccccttgcctcctttttttaatcttcttatgtgagcaaactttttctataattttcttctgaagaggatctgccacacagtcaacccatcttttatataacatctcctttcttcttgcatttaagaaggcatgatgttgtaaatacttatctagttcctagtaaacagtggtagaaaagacaaatatattatcctaaagctttcttgttctaaaattttccaaaacttaaacttcataagtttaaattactcctaagaataacccacagagacattcattaattcaatcgtttctttggctttaacttctactatgtgacatacactctgctgcaaacaaggaaaacacaggtatttggggcaacatgcctgctct

SEQ ID NO: 358456 - DNA, 1012 bp, Homo Sapiens
  misc_feature (49)..(85): n is a, c, g, or t
acatgatcgactactatgggcgaatcggagctcatcgcggtggcggcgnnnnnnnnnnnnnnnnnnnnnnnnnnnnnnnnnnnnnatcaggccaaatcggccgagctcgaattcgtcgagagcggagttctctgtagtgtttgccaatgttggagccgtctgcaaagtgtccccggcaagaagatgttctcagtgcagctgagtcttggtgagcagacatgggaatccgaaggcagcagtataaagaaggctcagcaggctgttgccaataaagctttgactgaatctacgcttcccaaaccagttcagaagccacccaaaagtaatgttaacaataacccaggcagtataactccaactgtggaactgaatgggcttgctatgaaaaggggagagcctgccatctacaggccattagatccaaagccattcccaaattatagagctaattacaactttcggggcatgtacaatcagaggtatcattgcccagtgcctaagatcttttatgttcagctcactgtaggaaataatgaattttttggggaaggaaagactcgacaagctgctagacacaatgctgcaatgaaagccctccaagcactgcagaatgaacctattccagaaagatctcctcagaatggtgaatcaggaaaggatatggatgatgacaaagatgcaaataagtctgagatcagcttagtgtttgaaattgctctgaagcgaaatatgcctgtcagttttgaggttattaaagaaagtggaccaccacatatgacaagctttgttactcgagtgtcagtaggagagttctctgcagaaggagaaggaaatagcaaaaaactctccaagaagcgcgctgcgaccaccgtcttacaggagcttaaaaaacttccacctcttcctgtggtggaaaagccaaaactattttttaaaaaacgccctaaaacaatagtgccggaccagaatatggcaagggatgaaacctattagccgctggcgctcaacagcc

SEQ ID NO: 358457 - DNA, 466 bp, Homo Sapiens
gggctgcaggaattcggcaccaactctatacacaaaagtaaatcaaaacaccaaaaacaggggtctatgtaaagaagcctcttcccgtgaattgctcgttgcatagctgcagggagggtgtttaggggcatagagaatgaaaacatacctgtattttggtgtagggaaattgtttctgtcaattcacaccgtccacacaccacctcccaccccaaccccgccactaccaaattcctctaaataaaaataattatgagatacaggccaacaaaaacgtcagcgttaggctgttatttagagagaattggaaagcgtttgaatgtggccctgctgtttaataaacgataacaatgattaaaaaacaaaccgaaccctctttgaccatgtcaaaagggagctcaaacaagtcttaagatgtagcaattttacatgtatgccgatttgctatatgcatttttctgctctg

SEQ ID NO: 358458 - DNA, 789 bp, Homo Sapiens
  misc_feature (193)..(340): n is a, c, g, or t
ggcttgagattgaacttgacagctcgaccctaggtacccgccacgaatccagcccagcccgcggggacaccgggtttctccagacctcgcagggaacatttgcggatgggctggtagaggaggctcggacatcccagttccgcacccgcactcgaccaacgcgtggtagcggaacccctgtcgtagcgaggcnnnnnnnnnnnnnnnnnnnnnnnnnnnnnnnnnnnnnnnnnnnnnnnnnnnnnnnnnnnnnnnnnnnnnnnnnnnnnnnnnnnnnnnnnnnnnnnnnnnnnnnnnnnnnnnnnnnnnnnnnnnnnnnnnnnnnnnnnnnnnnnnnnnnaacaacgttcccaaaactctaaacttacaaatgttgtctcccgtccatcccataaacttaggcgacaaacctggcgcagggtgacctgagacaaaggcttcccggcccctgtctccaagtcgtccatccctggggcgtaggcacgttttagtgagccctgtccggcgaaacccgaaactgcggccaccttggcagcggtgggccccaaaaggaaatattcaaatattctgaaactcgtgcatgatttaggactgacatttttacgtttaattttcttgcagttttattcttgctagtaaaggtaattcgttagaaacccttaagtgcagtttctcctctgtgtcttgtttaacttttcgtgttagcgaaattcacaaatttggaccaagggaaccgggagcgcggccgtcctcgcccgggattccggtcatcgcaataatttgggtttt

SEQ ID NO: 358459 - DNA, 824 bp, Homo Sapiens
gggctttgttccagggctggagcggctctgggctccggaatcgcccgcagccggtactgcgggacccactgcggatatggctgtcttggctggatccctgttgggccccacgagtaggtcggcagcgttgctgggtggcaggtggctccagccccgggcctggctggggttcccagacgcctggggcctccccaccccgcagcaggcccggggcaaggctcgcgggaatgagtatcagccgagcaacatcaaacgcaagaacaagcacggctgggtccggcgcctgagcacgccggccggcgtgcaggtcatccttcgccgaatgctcaagggccgcaagtcgctgagccattgaggatcgcgacgcagtcggcgggaccctcatggaagcatcgccctcgcctcggaccttgcctggcgctatttttgcagggagctggggagcaggaacgcctcggacctgagtgctctccatattgtggggttgaagtctggatgggagcttgccaagtccctttttaggctttttaattaggaagcatttcgaacctgcgcaacagaccaaagaacagtacaaagaacatccgtgtacccagtaccctgactaccgactacctacaacccgtccctgccccatcctgagttcttttgaagctgatctcaggcatcggattatttcttctgtaaatatttcagaatgtatctctccaagatgagagctcattaaaagataattacaaagcttatcacatccaaaagaattatcaataattttgaaatattattaaacgtgtaataaatgttcaaagttccacttgccttaa

SEQ ID NO: 358460 - DNA, 1003 bp, Homo Sapiens
cggcacgctttacagttattgggatcttaatatgtgccaggaattgcttcaaagcttccatgtctaactcctttcgtctttacaatgatgaggcaaaaacatattagtggcctgaccaaggttaaatagcgagtaataggcagaatgaagactaggactgcagagcccactctcctctactcctagtgagttttcatccaatcatgaaaactacaaactgctcactgagggcagacagcagcttggattagattagctacattgaatttcatgggatactcttttaaaatagttttatatcatttactttgtattttgtttatcaaaccaaattagcaattgtattacccagtgaacctgcaaagtttaattctgctagagaatagaattggccacttgtgagctatgccaacccattgataatgacgaaagtgcaagcatgagccttcttggcctcttttacatctcttaccatctaaatggcaattgggtgtcttgctgaatcttacccagctggcaatctaaagtcttggttataattcagaatttttgtctgcctgagtgtaattcaaatgcagggccagatattctcttcaaagccaagttatgattaatgttggaagtatcttctatggaaacatgactgggctgggaagcctgaggtttgaattctaaggctggatccactcccaattcgttctgcggtactgggttaacacttttcatttactgagtctcaactcccacatatgtggaaagacagtttgaagtaaatgatctataagatttctttgagctccaagactctatgatcctcatagagttcttaatgaaagaaagaaagaacctattatgtacatggtgaaaagacaatggtatcattttctaagacttatttttagatgactaggaacaagagggataacctaatttctaatatttcaaaaaaattattaggacttccacaatgttaagttccatctttcattatatgttttagctt

SEQ ID NO: 358461 - DNA, 1093 bp, Homo Sapiens
gcggctcggtcggcggccataggacccagcgcctgcccggccgccagcggcttctcttcttgcccgtgggcctcagcggaagaccgggcggcagcgaaacctcagcacgccgctgcctctctgcgctctccgacggtctgggggcgctgcgccctcgcgccccggcggcccgcggcggcgtgtcacgtgcctcaccgctgctcctcctcctgctagtgccctccccgcgcttggccgccgcagccccgcgccggcagctcggggactgggagcgctcgcgcctcgggtatgccgcacccccggccgggcgcagcggcgcgtggaggtgctcaccgggcgtcgccgctgccgccggcgcccttccccagtaccacggcccggcgcctgcactcgtttcctgcaggagagagctaagcttgtctgctggatccctgcagctggagcgcaaaaggagagatttcacctcttctgggagcaggaaactctacttcgacactcatgccttagtgtgcttactggaagacaatgggtttgctactcaacaagcagaaatcattgtgtctgcattggtcaagatcctggaggccaacatggacatcgtctacaaagatatggtcaccaagatgcagcaggaaatcacttttcagcaagtaatgtctcagattgcgaatgtgaaaaaggatatgattattttggagaagagtgaattttcagccctcagagcagaaaatgagaaaataaaactcgaactacatcagttaaaacaacaagtaatggatgaagtgatcaaagtccgaacagataccaaattagacttcaacctagaaaagagcagagtaaaagaattgtattcattgaacgaaaagaagctgctggaattgagaacagaaatagtggcattgcatgcccagcaagatcgggcccttacccagacagacaggaagatcgaaactgaggttgctggcctcaaaaccatgcttgagtcacacaagcttgataatattaaatatttagcagggtctatatttacgtgcctaacagtagctctgggattttatcgcctgtggatctaataaagtgtctatttaaagtg

SEQ ID NO: 358462 - DNA, 813 bp, Homo Sapiens
  misc_feature (652)..(669): n is a, c, g, or t
  misc_feature (739)..(739): n is a, c, g, or t
  misc_feature (761)..(761): n is a, c, g, or t
  misc_feature (784)..(784): n is a, c, g, or t
atcctaggatgtgcttgttctggaaggatgacatgggcccagactgaacaagtcagcttgatgatcttaaatgatggaagtataggacgttgcttattttaaaacaagggaaggacacaaaatgggaatgactgcttagtcctttctcagatactcttaaaacaattttttattgttaaatttgtggtaatacatggtcacaaccgtggatcaaacaaggtcagtctaaagtggcaggtcctaggtgtgacctgataccaccaccctttgtggcagcaccgggctggactgccctgatccctgggacgtgagacttagcttccagccagtgtgaatcattgtatctgtctcataatcacagcacagctgcagacacaacaacgtgcagcattttttacataaaaatatggtagaattaatttatgacatggaaatgccttacgtggtatcacacttagtcttgaaaaaaacaccaaggtgacgtttaaaatttttagtacatatcctcaaattggagctaagttatacttcttttataaccttttgggcatctggtcgagagaagacaagattttctctatttacagtgaggcaataaatatgtttgccacctttgctcgtgcgaaatccgcacgaggaactagtctcgagnnnnnnnnnnnnnnnnnnggtcaattataatttatttaagagcttgggcccagttttataatcttacaagaatgaagcagggaccaanggtaagtgcaacccttcctgcncactggggttcctgcgcttcaancctgggtggcaattttcctttaatgtact

SEQ ID NO: 358463 - DNA, 352 bp, Homo Sapiens
  misc_feature (44)..(81): n is a, c, g, or t
gagatggagtcttgctctgttgcttaggctagagtgctgtggtnnnnnnnnnnnnnnnnnnnnnnnnnnnnnnnnnnnnnnctattttaaaacgtattgttatatcttggctgggcagaggcaggcgggggtgggggaagactcagtgagccaaggccatcccagcgaggaccatgttccgtctggggctgtccctcatgggaagagaggacatgaccccaaggaacctggttggcccttgttggtttctaggggctgattagcgagagacctccttctggctgcccatgttcagatgcacttcaggaaatggaacaattcccacgccggtaacctctagtgaacctcgtgc

SEQ ID NO: 358464 - DNA, 612 bp, Homo Sapiens
  misc_feature (16)..(16): n is a, c, g, or t
  misc_feature (25)..(25): n is a, c, g, or t
  misc_feature (109)..(109): n is a, c, g, or t
  misc_feature (125)..(125): n is a, c, g, or t
  misc_feature (192)..(192): n is a, c, g, or t
accatctataacatcntgggtgtcntgacacgatgataactgtatctaccaatccaattaacaaagggtagcattctttatggggaaggatatgtcagatatatattgnttatatgttggtagantacacattaaatctccagtataggtatatatgcttatattgaaagatgtatcaatataatcgtcatntatgtacctttgtgaagtaagttaaacagttatgggcaggtagtgactagagactcatgtggtattttattctctttccaagagaaacagaaatgagagatcttaaatgaaatcattagtcattaggaaaactagggacataaaagacagtgggcacacaaggtcagtttcctggttttgataatggaccatagttacgtaagatgtcactggtgaggcatgtgggtgatggatgcatgagacctctctgtactatttttccaagttcttgtgagagtacaattatttcagaatataagtttaatagcccactatcttttaagtttaaacaatgatgtggttcagagaacactcatggcttccctgctctagccatcaaagagaattgtgacttactgaatataacaataaccctcgtgc

SEQ ID NO: 358465 - DNA, 604 bp, Homo Sapiens
atgagccaccacaccctgcccatgtgttccctcttaatgtatgattacatggatcttaaacatgatccttctctcctcattcttcaactatctttgatggggtctttcaaggggaaaaaaatccaagcttttttaaagtaaaaatggagacagagtttctcctaataaccggagctgaattacctttcactttcaaaaacatgaccttccacaatccttagaatctgcctttttttatattactgaggcctaaaagtaaacattactcattttattttgcccaaaatgcactgatgtaaagtaggaaaaataaaaacagaactctaaaatccctttcaagccacccattgaccccactcaccaactcatagcaaagtcacttctgttaatcccttaatctgattttgcttggatatttatcttgtacccgctgctaaacacactgcaggagggactctgaaacctcaaactgtctacttacatcttttatctgtgtctgtgtatcatgaaaatgtctattcaaaatatcaaaacctttcaaatatcacgcagcttatattcagtttacataaaggccccaaataccatgtcagatctttttggt

SEQ ID NO: 358466 - DNA, 1131 bp, Homo Sapiens
  misc_feature (196)..(217): n is a, c, g, or t
  misc_feature (909)..(909): n is a, c, g, or t
  misc_feature (932)..(932): n is a, c, g, or t
agcgggtctcggctcgctcgcgcagcggcggcagcagaggtcgcgcacagatgcgggttagactggcggggggaggaggcggaggagggaaggaagctgcatgcatgagacccacagactcttgcaagctggatgccctctgtggatgaaagatgtatcatggaatgaacccgagcaatggagatggatttctagnnnnnnnnnnnnnnnnnnnnnnacctcagtccccccagagactcttggccgtgatcctgtggtttcagctggcgctgtgcttcggccctgcacagctcacgggcgggttcgatgaccttcaagtgtgtgctgaccccggcattcccgagaatggcttcaggacccccagcggaggggttttctttgaaggctctgtagcccgatttcactgccaagacggattcaagctgaagggcgctacaaagagactgtgtttgaagcattttaatggaaccctaggctggatcccaagtgataattccatctgtgtgcaagaagattgccgtatccctcaaatcgaagatgctgagattcataacaagacatatagacatggagagaagctaatcatcacttgtcatgaaggattcaagatccggtaccccgacctacacaatatggtttcattatgtcgcgatgatggaacgtggaataatctgcccatctgtcaaggctgcctgagacctctagcctcttctaatggctatgtaaacatctctgagctccagacctccttcccggtggggactgtgatctcctatcgctgctttcccggattttaacttgatgggtctgcgtatcttgagtgcttacaaaaccttatctggtcgtccagcccaacccggtgcctttgctctggaagtctgtccactacctccaatggtgagtcacggnagatttcgtctgccacccgcggncctgtgagcgctacaacacgggaactgggggtggaggttttactgccgatcctggctacaggcctcaccagggactacaagtacatcactgtccccaaaaagggaagaggggtttcccttccttatcaagcctactgccttccaatccgaagccacggggggcccagcacccatgaaaccttcttgaacccgtggggaa

SEQ ID NO: 358467 - DNA, 519 bp, Homo Sapiens
cgggaaagcagcgataggagatcacagtccccaccgggaaggaggctcgggagcatgacgggcacgccgtctaccaccacaaaggcagggtcactgctggaactccggggaggccccctggggggaaagtgggccttgaacttggtctggaacatcctggccaggatgacgagcagcagcaccagacagcacactggatgccgtgaacgccacaatcttccacgtggtcaggagggtctcatggagtagctgggccaagtatgctctgatttgatgcagtagacttgataagaaggaaaccactctccatactggcaggtgatgtacttgtagtcgctggtgaggctgtagccaggatcgcagtaaaactccaccaaagttccgtggttgtagcgctcacaaggccgcgggtggcagacgaaatctccgtgactcaccattggaggtagtggacagacttgggcagtaggggagaataaaagtttcagaaccacaagctcacctttgcctgaagcccct

SEQ ID NO: 358468 - DNA, 1282 bp, Homo Sapiens
accgttaaaacacggagagggcaccctcttgaccacccattacatgtcagagcctgaggctgtgtgtgaccgtatggccatgatggtgtcaggaacgctaaggtgtattggttccattccacatctgaaaaacaagttcgctagagattatttactagaaataaaaatgaaagaacctaccccggtggaagctctccacaccgagattttgaagcttttcccacaggctgcttggcaggaaagatattcctctttaatggcgtataagttacctgtggaggatgtccaccctctatctcaggcctttttcaagttaaaggcaatgaaacagaccttcaacctggaggaatacagcctctctcaggctaccttggagcaggtattcttagaactctgtaaagagcaggagctgggaaatgttgatgataaaattgatacaacagttcaatggaaacttctcccacaggaagacccttaaaacgaagaacctcctaacattcaattttaagtcctactacattattagtttccataattctacaagaatgtttccttttacttcagttaacaaaagaaaatattcaatagtttaaacatgcaacaatgattaaagttttcatttttaaaaaatttaggatgaaggaaacaaggaaatatagggaaaagtagcagacaaaattaacaaaatcagacatgttattcatccccaacatgggtctattttgtgcttaaaaataatttaaaaatcataaaatattaggttggttatcggttatttatcaataaagctaacactgagaacattttacaaataaaaatatgaggtttttagcctaaaattcaaatatatcagctatttttaaacattagttactcagattctaatttaatgtgacattgactataagaagatctgataaactgatgaaatggcacagcataacatttaattataatgacattctgattataaaataaatgcatgtgaattttagtacatattgaagttatatggaagaagatagccataatctgtaagaaagtaccgcagttaatattttctttagccaacttatattcaatgtattttttatggatcctttttcaaaggtagtatcagtaggcatagtcattttctgtatcttttcacctcacagttcatgaacatttcccatgtcattatagcacttttgtgttatataattgctgcattaatgttatagctgtattgatgtaataccagagttgttacgttcgggttatatgcaagtttatttcttag

SEQ ID NO: 358469 - DNA, 1205 bp, Homo Sapiens
  misc_feature (891)..(891): n is a, c, g, or t
  misc_feature (1143)..(1153): n is a, c, g, or t
agcgggctgtgcgccctgggcgcgctcgggattctcgcctggcgcggctggggaaggtgaacagtgtggcccgccatgttcttctccgcggcgctccgggcccgggcggctggcctcaccgcccactggggaagacatgtaaggaatttgcataagacagctatgcaaaatggagctggaggagctttatttgtgcacagagatactcctgagaataaccctgatactccatttgatttcacaccagaaaactataagaggatagaggcaattgtaaaaaactatccagaaggccataaagcagcagctgttcttccagtcctggatttagcccaaaggcagaatgggtggttgcccatctctgctatgaacaaggttgcagaagttttacaagtacctccaatgagagtatatgaagtagcaactttttatacaatgtataatcgaaagccagttggaaagtatcacattcaggtctgcactactacaccctgcatgcttcgaaactctgacagcatactggaggccattcagaaaaagcttggaataaaggttggggagactacacctgacaaacttttcactcttatagaagtggaatgtttaggggcctgtgtgaacgcaccaatggttcaaataaatgacaattactatgaggatttgacagctaaggatattgaagaaattattgatgagctcaaggctggcaaaatcccaaaaccagggccaaggagtggacgcttctcttgtgagccagctggaggtcttacctctttgactgaaccacccaagggacctgggatttgggtgtacaaggcaggcccttttaatttataattgaactgaaaaatatgccccctaacagaaaataaaaatatgggactttcctanaaggacatgggaacaggaaacaaaggggccggcccgcttctaaaggtatccccttcaagggggccccaaaactttaccgcctaaccccgccttttcttgggacaaaggggggtccccctattaagggaggtccgtaattattaagcctaagggaccttggcccctcccttttttaaccaacgccccggagcgtgtgaaaaaactgccctaccttggggaaactttttggtgaaagaaacccttaatttttcnnnnnnnnnnnaacataatgttgggggaaaacttccctcccggagaactttttacaccccttc

SEQ ID NO: 358470 - DNA, 845 bp, Homo Sapiens
  misc_feature (657)..(657): n is a, c, g, or t
  misc_feature (659)..(664): n is a, c, g, or t
tccatttgatttcacaccagaaaactataagaggatagaggcaattgtaaaaaactatccagaaggccataaagcagcagctgttcttccagtcctggatttagcccaaaggcagaatgggtggttgcccatctctgctatgaacaaggttgcagaagttttacaagtacctccaatgagagtatatgaagtagcaactttttatacaatgtataatcgaaagccagttggaaagtatcacattcaggtctgcactactacaccctgcatgcttcgaaactctgacagcatactggagaccattcagaaaaagcttggaataaaggttggggagactacacctgacaaacttttcactcttatagaagtggaatgtttaggggcctgtgtgaacgcaccaatggttcaaataaatgacaattactatgaggatttgacagctaaggatattgaagaaattattgatgagctcaaggctggcaaaatcccaaaaccagggccaaggagtggacgcttctcttgtgagccagctggaggtcttacctctttgactgaaccacccaagggacctggatttggtgtacaagcaggcctttaatttatattgaactgtaaatatgtcactagagaaataaaatatggacttccaatcttccnannnnnncacgcccccccacaaaccacccttgtgggcccgcctccgcccctccaaaaagtttctaaaaccattcctttgggcccccgggcccccgaaagggaaaagggaaaatggccctaacctggttccctaaggaaaacccggggccaggacataagggttgggaatccccccccataaaaaaacg

SEQ ID NO: 358471 - DNA, 797 bp, Homo Sapiens
  misc_feature (732)..(733): n is a, c, g, or t
ggggctcgggattctcgcctggcgcggctggggaaggtgaacagtgtggcccgccatgttcttctccgcggcgctccgggcccgggcggctggcctcaccgcccactggggaagacatgtaaggaatttgcataagacagctatgcaaaatggagctggaggagctttatttgtgcacagagatactcctgagaataaccctgatactccatttgatttcacaccagaaaactataagaggatagaggcaattgtaaaaaactatccagaaggccataaagcagcagctgttcttccagtcctggatttagcccaaaggcagaatgggtggttgcccatctctgctatgaacaaggttgcagaagttttacaagtacctccaatgagagtatatgaagtagcaactttttatacaatgtataatcgaaagccagttggaaagtatcacattcaggtctgcactactacaccctgcatgcttcgaaactctgacagcatactggaggccattcagaaaaagcttggaataaaggttggggagactacacctgacaaacttttcactcttatagaagtggaatgtttaggggcctgtgtgaacgcaccaatgggttcaaataaatgacaattactatgaggatttgacagctaaggatattgaagaaattattgatgagctcaaggctgggcaaaatcccaaaaccaggggccaagggagtggacgccttctcnnttgttgaacccagctgggagggtcttaccctcctttgactgaaaaccgccccaggggaccctgg

SEQ ID NO: 358472 - DNA, 880 bp, Homo Sapiens
agcgggcacgctgtgcgccctgggcgcgctcgggattctcgcctggcgcggctggggaaggtgaacagtgtggcccgccatgttcttctccgcggcgctccgggcccgggcggctggcctcaccgcccactggggaagacatgtaaggaatttgcataagacagctatgcaaaatggagctggaggagctttatttgtgcacagagatactcctgagaataaccctgatactccatttgatttcacaccagaaaactataagaggatagaggcaattgtaaaaaactatccagaaggccataaagcagcagctgttcttccagtcctggatttagcccaaaggcagaatgggtggttgcccatctctgctatgaacaaggttgcagaagttttacaagtacctccaatgagagtatatgaagtagcaactttttatacaatgtataatcgaaagccagttggaaagtatcacattcaggtctgcactactacaccctgcatgcttcgaaactctgacagcatactggaggccattcagaaaaagcttggaataaaggttggggagactacacctgacaaacttttcactcttatagaagtggaatgtttaggggcctgtgtgaacgcaccaatggttcaaataaatgacaattactatgaggatttgacagctaaggatattgaagaaattattgatgagctcaaggctggcaaaaatcccaaaacaggggccagggagtggacgccttctcttgtgagccaacctggaggtcttaccctcctttgactgaacccccccaagggaacctggaatttggggtacaaacagggcctttaattttaatatggaaactggaataattgtccctaaagaaaaaaa

SEQ ID NO: 358473 - DNA, 360 bp, Homo Sapiens
  misc_feature (35)..(35): n is a, c, g, or t
  misc_feature (40)..(40): n is a, c, g, or t
  misc_feature (45)..(45): n is a, c, g, or t
  misc_feature (249)..(309): n is a, c, g, or t
cctctgccttccccaaaacaggtgaacccaagggnaaagnaaggngcaagcccacagtgcttctatgagccaccctgagaagtctcacgtgatcacttccgccacagcctgtttatcaaaagcaagccccccaggcccagcccacgtgcagagggaggagaatgaggttctgtgttttgaagggaagaatatcagaattggtagacatttcaaactgtcacattagggatacaaaaatgaacaggctgnnnnnnnnnnnnnnnnnnnnnnnnnnnnnnnnnnnnnnnnnnnnnnnnnnnnnnnnnnnnnaaccaggagttcagtactaacctgggcaacaaagaggcccctgtctctgat

SEQ ID NO: 358474 - DNA, 1250 bp, Homo Sapiens
  misc_feature (188)..(277): n is a, c, g, or t
caacacaccattggaattttgcagacagaaagagatttttgttttctgttttatgactttttgaaaaagcttctgggagttctgatttcctcagtcctttaggttaaagcagcgccaggaggaagctgacagaagcagcgttcctgaagtggccgaggttaaacggaatcacagaatggtccagcacnnnnnnnnnnnnnnnnnnnnnnnnnnnnnnnnnnnnnnnnnnnnnnnnnnnnnnnnnnnnnnnnnnnnnnnnnnnnnnnnnnnnnnnnnnctagtctcactaaggagaaacttttactggggcaaagagccgatggctgccctgccccgggcaggggccttcctatgaatgtaagactgaaatcaccagcgagggggacagagagtgctggccacggccttattaaaaaggggcaggccctctaacttcaaaatgtttttaaataaagtagacaccactgaacaaggaatgtactgaaatgacttccttagggatagagctaagggataataacttgcactaaatacatttaaatacttgattccatgagtcagtttattgtagtttttgatttctgtaaaataagagaaacttttgtatttattattgaataagtgaatgaagctatttttaaataaagttagaagaaagccaagctgctgctgttacctgcagaactaacaaaccctgttactttgtacagatatgtaaatattttgagaaaaaatacagtataaaaatagttattgaccaaatgctaccaggctctgcagcagctcgggggcttataaaatgttcatagggatgttacaatataattttgtgttataaaatatgccattataattatgtaataaccaaaatttcaacctagagtgttgggggttttttggaaaccgcagtctattagtactcaatggttttatacaccttacttctgacagagcggggcgtatgctacgactacaacttttatagctgttttggtaatttaaactaattttttcatattatattgttgcatccctacttcttcagtcaggtttttttgtgcttacaatttgtgataactgtgaataactgcttaaaaatacacccaaatggaggctgaattttttcttcagcaaaagtagttttgattagaactttgtttcagccacagagaatcatgtaaacgtaataggatcatgtagcagaaacttaaatctaaccctttagccttctatttaacacaaaaatatga

SEQ ID NO: 358475 - DNA, 858 bp, Homo Sapiens
agcggaggcgccccaagctcggtcctcaagaagccatggcggaatccagggccgtctgtacctttggatgtgcttggctgctgcgctggcatctttcctgatgggatttatggtgggctggtttattaagcctctcaaagaaacaaccacttctgtgcgctatcatcaaagtatacggtggaaactggtatccgaaatgaaagctgaaaacatcaaatcatttcttcgttcttttacaaagcttcctcatctggcaggaacagaacaaaatttcttgcttgccaagaaaatccaaacccagtggaagaaatttggactagattcagccaagttggttcattatgatgtcctcttatcttaccccaatgagacaaatgccaactatatatcgattgtggatgaacatgaaactgagattttcaaaacatcataccttgaaccaccaccagatggctatgagaatgttacaaatattgtgccaccatataatgctttctcagcccaaggcatgccagagggagatcttgtatatgtgaactatgctcgcactgaagactttttcaaactagaaagagagatgggcatcaactgtactgggaagattgttattgcaagatatggaaaaatcttcagaggaaataaacgttaaaaatgccatgttagcaggagccataggaatcatcttgtactcagatccagctgactactttgctcctgaggtaccggcatatccaaaggatggaatcttcctggaactgcagccagagaggaactgtgttcaactttgaatgggtgctggtgacccactcactccaggctatccgcaaaagacaggtatgtattctgggaagtcacccg

SEQ ID NO: 358476 - DNA, 506 bp, Homo Sapiens
gacctattcatgagtcactaaagacaacctacagctgtcactgtctgcagaggatgaaaaaaaatcgttttatttccaagcaacattagctggtttattaagcctctcaaagaaacaaccacttctgtgcgctatcatcaaagtatacggtggaaactggtatccgaaatgaaagctgaaaacatcaaatcatttcttcgttcttttacaaagcttcctcatctggcaggaacagaacaaaatttcttgcttgcaaagaaaaatccaaacccagtggaagaaatttggactagattcagccaagttggttcattatgatgtcctcttatcttaccccaatgagacaaatgccaactatatatcgatcgtggatgaacatgaaactgagattttcaaaacatcataccttgaaccaacaccagatggctatgagaatgttacaaatattgtgccaccatattaatgctttctcagcccaaggcatgccagagggagatcttgtatat

SEQ ID NO: 358477 - DNA, 705 bp, Homo Sapiens
ggtttttgaaacagagtctcattctatgttgtccatccaacatctcttcccttatacttccctgactgcaaccttggttctccagtccctgttaggagacactcctccttgtttttgtagatactcacgtcctcctgtctcatagcatatatatcatcccactatcatagtaaatttgcttatctctggatttatcgaccctgtgggagccctcccccccatccactctttgctctatcaaggtaggatgtttttaccttcacattccccagaagccagcatagcacctagaacagtctaggttcgccacatatgttttttatatgaatgaacgaatgaagcagagttatagataaagataaagcactgaacatcccatactagcccaagatgccacatagctagtctgtgatagagcccgaagtaggaatctgtctctgattccagtactgtttctatgacacccattgctttatgtctttgctctggaaaaaagcaggagcatgttgtttctgcatctattaaaaaacataagtataaatactaacttcttcagtcctcaccggacagagggagctgtttcccacgttcccgacaccctttcaggagattcataatgtacatgttggttaagggtgagcacatcactagcgaagcccttgatcttcaggcaagaaagagcgaggaggaggaggaagaggaaga

SEQ ID NO: 358478 - DNA, 484 bp, Homo Sapiens
  misc_feature (386)..(396): n is a, c, g, or t
atcccccgggctgcaggtttagctctattgatactctttctaatgctgatatgatcttgagtataagaaatgcatatgtcactagaatggataaaataatgctgcaaacttaatgttcttatgcaaaatggaacgctaatgaaacacagcttacaatcgcaaatcaaaactcacaagtgctcatctgttgtagatttagtgtaataagacttagattgtgctccttcggatatgattgtttctcaaatcttggcaatattccttagtcaaatcaggctactagaattctgtattggatatataagagcatgaaatttttaaaaatacacttgtgattataaaattaatcacaaatttcacttatacctgctatcagcagctagcannnnnnnnnnncaagtattttgtgtttggaatgttagaatgagatctgaatgtggtttcaatctttttttcccagactactattttctgttttaggtct

SEQ ID NO: 358479 - DNA, 1193 bp, Homo Sapiens
aactacggctaggtacgaggcctgggtgtttaattcggcacgaggcttaaaaccgagggcccgcaggggtccccgcggccgccgcgatgcagaaatacgagaaactggaaaagattggggaaggcacctacggaactgtgttcaaggccaaaaaccgggagactcatgagatcgtggctctgaaacgggtgaggctggatgacgatgatgagggtgtgccgagttccgccctccgggagatctgcctactcaaggagctgaagcacaagaacatcgtcaggcttcatgacgtcctgcacagcgacaagaagctgactttggtttttgaattctgtgaccaggacctgaagaagtattttgacagttgcaatggtgacctcgatcctgagattgtaaagtcattcctcttccagctactaaaagggctgggattctgtcatagccgcaatgtgctacacagggacctgaagccccagaacctgctaataaacaggaatggggagctgaaattggctgattttggcctggctcgagcctttgggattcccgtccgctgttactcagctgaggtggtcacactgtggtaccgcccaccggatgtcctctttggggccaagctgtactccacgtccatcgacatgtggtcagccggctgcatctttgcagagctggccaatgctgggcggcctctttttcccggcaatgatgtcgatgaccagttgaagaggatcttccgactgctggggacgcccaccgaggagcagtggccctctatgaccaagctgccagactataagccctatccgatgtacccggccacaacatccctggtgaacgtcgtgcccaaactcaatgccacagggagggatctgctgcagaaccttctgaagtgtaaccctgtccagcgtatctcagcagaagaggccctgcagcacccctacttctccgacttctgtccgccctaggccccgggacccccggcctccaggctggggcctggcctatttaagccccctcttgagaggggtgagacagtgggggtgcctggtgcgctgtgctccagcagtgctgggcccagccggggtggggtgcctgagcccgaatttctcactccctttgtggactttatttaatttcataaattggctcctttccccgggaacccaaaccactcacaatgatttcccttgttg

SEQ ID NO: 358480 - DNA, 522 bp, Homo Sapiens
ggagggaagcaacccccacccacccagcaagctgtcaggagaaagactccagaggatcagagagaagcaggtcaagcactcaggccttgtaggtactgtaacacagccactttgacgagatggaaagcactccagcggccagagtgacttgacctggtttagcaataggaaacctctggctgctagttgagaaagaggataggggtaggagtgccaaagctggccaagcaactgggaggcttgggaaacaacccgcgccagacagagatgatggattaaaggactgtagatcagacgagtaacagaggagctgaggatagaggagtcaccagattctggtgactgacggcctcagtgctgtaccaagagggagagtgtcatgcttctagtcagcatagggagagcagagagacaaatacaaaatgctttattgattgattgattgattgagacagggtcttgctcatgcctaggctagagtgcagtggcacatgtcatggctcactgcagcctcaacctccc

SEQ ID NO: 358481 - DNA, 440 bp, Homo Sapiens
cgttgcttggaacttcatcctcatggacggccttcgaggacctggagaaaccctccggcctcggtggctcgccggtcctgcggaaccgcttggctgtcagacagctttcaaggagacggtgggtcactgccctgctctcagacccacacttgctcacatcagcccgtgtggttgcctggctccgtcccctctgtccctagcactggcaccaaggctgggcccccaccccctagatccgcggctgccaggcctgggagaccagagtctgccctggagaagccgccagggtgccccgttgctgcctggtgccccagtttagaaccaacatggtgtgcgctttcttcctattgtgtggacttttgtgctggtatgaattcgattccattttaatgcatcctgttaaatcaagttaaaagaggggaaagcaaaaccaaaaggag

SEQ ID NO: 358482 - DNA, 413 bp, Homo Sapiens
tggaaaataactgttggtggaacccataacgacattttacccagctgtgtagtggattagtcccaaatatgtcctcaagaagttaacacccaagcattcctcatcccatttaaacttggatgctaagactattttgcaaaacttaaaaagatgcaatcttgtacatatttctgtaacctgagctgaaaacccaaataacaatcattgacatactttaaggctattgtttcaggtgggggtgtatacatcccaagggcatggagatgatcaatccattgaggaagtattaagatgattatttatatttaatctcatccttttaaatttctatttttgtatattttataatgtacataatatatggtacaattgtacacttctattatttataaataaacatttattgatacatt

SEQ ID NO: 358483 - DNA, 1203 bp, Homo Sapiens
  misc_feature (633)..(633): n is a, c, g, or t
  misc_feature (713)..(713): n is a, c, g, or t
  misc_feature (747)..(747): n is a, c, g, or t
  misc_feature (843)..(843): n is a, c, g, or t
gtggatcccccgggctgcaggctcgtgccgaattcggcacgaggaagcctgtgtctactaagagggatgcccagtgccccactgggcaggacgggaagcctagcctgggccccctctgtgcacacagttcaggcctgcccagcttcttatgggcaagccaccatcccactctcgtctccctgagctgtctggttctgcggacccaggaagggccaggctggggccctgcttgtgtttatcctcggctgctgtcttcccagcaggccccaggcaaggaggcttcccactgctgctgctaccggttctccacaccaactctcacggatgcacagatccctgtggtccgccatcgccgacacacacacacgtcgtaatgtggctaacgcttgactcacttaacactactcatggggcagggcggagggtggattgttgctttttgttttttgtaatttcctactagtatttgggtaactttgggggtggggagggcaatgtgggggcaggggaacatgtcattgtgatgacttttttgatattcattagaaacaatacatcctttctgagatatttacagtattattaaaaaatgaaaatggttgtactggtttgcatattgaacattcttatggngcattcatagggtgcatgattgtctgcttactcacttttaaccattaaagaaatgaacaatcagtgtggctattcttaanaaatacaaaaaaactcgagctcgtgctgaattcngcacgaagctgccctagcagtgttcaggcttcttccggtagtgcgatgctcagtaccttttggtcagaccattgcaagcttgtgagcctctcgtangatacggattgacgtccttgcacagtcttatctgtgattaacagatagctgaccagtaaaggatgtgaagtaccaatctaagaaccagtgtgttcgtttgaccttgcaacgtccttaggaaactattctccacaaaaagttttcctatcaactaaattgtgtgaatgcgttacataccaggatcttgccttacacaagggcattgaagccttccagccttattcttttacttggtaagacactcttgctcaagtggaaagtatcccacccgcaacaattactcttttggctttaaacctttataaagtaagtcttaacctttttgggatactccctttgtatatcgtgaatattctgcac

SEQ ID NO: 358484 - DNA, 781 bp, Homo Sapiens
ccccacaaggccattgtgggaccgggccccccctccaagtatatttagagaaaatgtaagaaagtaaatatattatatttttttccaaaataagaacatgtttattcagatgtgccagaagtccagggtcacgcggcttcgcatttaggagatgctttacaagctctcccattttcttttcagaacatacactgggggaattcacaaactaaaacaatttctggtgacttccaatctatatattatactttacagcttcaattgaatttttttaaaagttaacttccaagctggcttgcctaacactgtgagtcaaaagtaaccctaaaaaggaaaaacacacagcactgaagggtctctgggtggtaatgccagcgtgggctggggaggtgagactaagcacatggctagcagacctcaggatgggccctggggctcatcatacagaaatatgacaagatgatgaagtcacaacttcagatgtcattggagctatctgtatatgacacacacattataaacaaataacctggaacatttcacagtgtacgacacctgttctacctgggaatgcaaaccctgagctgcaaataagaacacagacgtgggagacaccacggcctgaagctgctctcctcttccccgctctcctctctccggtcccgtgatgggttacgctgagccagcaatgtgcacgcactaactccacaggtgttaaaggtaaggtcacttctaaacacacaacaaaattaccttaacattaggacattaaaagttaaaa

SEQ ID NO: 358485 - DNA, 1298 bp, Homo Sapiens
  misc_feature (306)..(306): n is a, c, g, or t
  misc_feature (327)..(327): n is a, c, g, or t
  misc_feature (378)..(378): n is a, c, g, or t
  misc_feature (394)..(394): n is a, c, g, or t
  misc_feature (402)..(402): n is a, c, g, or t
  misc_feature (426)..(426): n is a, c, g, or t
taaactttaactcataactttaatattttcatacaatcaaaaaatagagatatactctaggcataacataaattgttataattgatcagaatatcttgaatatatttttacagataactagtggtttctactagcagattaaaaccaagagaaaattaaaagtaagttcacatttaaaaaaaattataagcaataaatacagcactacagccaccactaattctatatacattggattacatttaaacaaacactgcattccagaatgaatattttatgaataaatgcattggaaattaactttanggaaataaaatgacaaattangaatttagaagattaaaatatgactttcacaagtaatcacagtaaaatgcngatctacattttaaangctagaantttccccaaatttatttttttggncagcaaagaggtttgctttaaaaaaagtgtcagatttactttgctttatgagtatgatacaaagatattaagtagcatttagcttttgagaaatctaacatttaaaactatcctaaaaatatatgggtacaaaactaacagtgattaatcatgaatgactgctacgcctcaagactctacaacagacaaaccctggctataaaataaatctgatctagaattaatattataaaagcacaacaaaaatacttgaaaattacatgtttattttaatataatctctgatcattcaacattttttactgtcacttctactgtcaagatggttgagagttgacagtttgtctagaagaaggctgatatatgtcaacatggtcagcaaaggatttaaatatgggtctttgaataataaatagctaataattgagtttattaaaatgaatttttgtataatttaggcagttgaaggtctagaacagcctgcgttcctttctatggcagcttgctatgaaattcatgtttcaaacaaaacaatactttttcatgcatagataaattataaatgtactgaccagaccattctatatgttaattcttatgaatttagataatttgtcttagcaatttgaaataagttctgaactcaccatctattgacatattgacagcttaagaaacaacttatgatgagtaatttgtttcatccattttaatcaacttgacacacttaaaaaacagatacccatgacttttcccaaaattgacttttactaattgaagtcattcttgttctttagagatttcagcggaaaataacattagagaaactgaatcccatgcaaatttcactttaattcattagcaaggttttc

SEQ ID NO: 358486 - DNA, 777 bp, Homo Sapiens
cactgacaggagcacaggtaaggctaacaagatcaccatcaccaatgacaagggccggctgagcaaggaggaggtggagaggatggttcatgaagccgagcagtacaaggctgaggatgaggcccagagggacagagtggctgccaaaaactcgctggaggcccatgtcttccatgtgaaaggttctttgcaagaggaaagccttagggacaagattcccgaagaggacaggcgcaaaatgcaagacaagtgtcgggaagtccttgcctggctggagcacaaccagctggcagagaaggaggagtatgagcatcagaagagggagctggagcaaatctgtcgccccatcttctccaggctctatggggggcctggtgtccctgggggcagcagttgtggcactcaagcccgccagggggaccccagcaccggccccatcattgaggaggttgattgaatggcccttcgtgataagtcagctgtgactgtcagggctatgctatgggccttctagactgtcttctatgatcctgcccttcagagatgaactttccctccaaagctagaactttctttccaggataactgaagtcttttgactttttggggggagggcggttcatcctcttctgcttcaaataaaaagtcattaatttattaaaacttgtgtggcactttaacattgctttcacctatattttgtgtattttgttacttgtatgtatgaattttgttatgtaaaatatagttatagacctaaataaacttttaaaactc

SEQ ID NO: 358487 - DNA, 555 bp, Homo Sapiens
  misc_feature (494)..(494): n is a, c, g, or t
aaaaacaaaaacagaactctgcctcatagcgtcttttaagttatacactggacctatcctttcctcactgacagacattttaaaaattttttggtaaggcctagttcatataaaatgtaatccaagccaaaagttaacaagaataaggggaggaaaggggactccaatagcagagaaaggtatttacctgggatatacactgcaagaaaatcaaagctataagaaacgtccatgaatagtagccataaggcatcagagtgataaaattcctgtccctaggagggaatattggagtttgccagagaaacagaatgagagagacagagaggtttattgtaggaattggctcatatgattacggaggctgagaagacccacgatctgccatctgcaagctggagaatcaggaaagctggaggtgtaattcagtcaagtccaatggccagagaagcaagtgtactgatatccaagagcaggagtttgcttcatatggngcactgaatggactgatgcccatccacattagtgagggtggatcttctttactcagtctac

SEQ ID NO: 358488 - DNA, 626 bp, Homo Sapiens
tcgatctcctgacctcgtgattcgcccagtaggcatgagccaccgcgcccggtcgagggttttctcatagtatgtttagttgttctgaggagctttgtatctttgagaaatgcatgtttacaacatccacagtttcttctaaagctttcaggtgaactgcacacagttccactatgtcttctggggaaactcttgaatatcctggtacatcttcctttataaggactcatactgggcccactatgtaaaacgtggttttgcgggatattggaggttttgcaccacagagaattcaagtcacttgggagtgttcatctatttaggaagtatagttttttttacttttgtcttcaggaatatgcactgctaccttttagaaataatttctattgcctttattatttttgttgttatttaatgggaaaaggttagacgtggccaggtaaatgttatcaaataaagttagttattcgtattcaacaagtggaatttttactttgctgttctcagaaagccatgaatctgtgtgttctcggaaacccatgaagcattatgtatacaaattaaaaattgtagtgtactgctgcgaaaaagaagaggcacaaaagaagaaggaccttgtcggc

SEQ ID NO: 358489 - DNA, 1086 bp, Homo Sapiens
  misc_feature (18)..(18): n is a, c, g, or t
  misc_feature (136)..(162): n is a, c, g, or t
  misc_feature (863)..(863): n is a, c, g, or t
  misc_feature (931)..(931): n is a, c, g, or t
  misc_feature (947)..(947): n is a, c, g, or t
  misc_feature (964)..(964): n is a, c, g, or t
  misc_feature (975)..(975): n is a, c, g, or t
  misc_feature (982)..(982): n is a, c, g, or t
  misc_feature (1022)..(1022): n is a, c, g, or t
  misc_feature (1033)..(1033): n is a, c, g, or t
  misc_feature (1046)..(1046): n is a, c, g, or t
  misc_feature (1055)..(1055): n is a, c, g, or t
gggtatttttctattttnagtattctggcagcaaatttgaggttgtacacatttcattatcaactaaacaaaacaagaagcaagcaaatactttaaggttttcacagcctttttcatcacagggaaggaaaaaacnnnnnnnnnnnnnnnnnnnnnnnnnnncgtctttccaaattcctggccacatcaatagtctagaaagtgcttatcaggacaccaaatatttctgtgttcctaaaataggtctgaaatttttacccagtattgaatgtatacctgaagtggtcaaataatacttcttataaaaaagttgttctacctaagattatagttttaactttaaattaaagaatggccacaattaaccaacatgcaaaaattctcagactaaacactgagaaattcttcatacaatgcatttgccaccttattgcatttttaaaatctttattctgtagtgaattggtattcccaatctgcctaagcaaaggcatgcccttctaacaagatttgcttagagcagaggtgatagaaggaagaatccgaagaccctctggcatggcaatctgggagcagcacattgttgatggagtccaagtgagcacatttcacacaattcatttagtgacaagtgggcttgctcccttttcatccaggaaaaaaactactcacagaccactgcccagaatctggaataagaaccctcattttaaggtattcttcccaacaaataaatatctaaatattgaaagggggcatatcagaaaacttaaaaggacacaataaccaaaaccaaaaccctttttcaaaacaagtaaggcatgtctgtatttagttcactctaaaacattccttagcttttncttgcagtttgttccctaaaagatttgattgggcacaagaggaacgaaattattaataaaataaaagncttatttttgttttgnctgtggataatcggtancaaaacgtttnccagatnctgagacttagatggatcttttaaggtgaaagtagaatgnccaggttctanctgaaataatatnctgaaaggnaacaaagcagtccatttgtccatgtgtcttt

SEQ ID NO: 358490 - DNA, 500 bp, Homo Sapiens
taaagtcagatcatgaagggataggtgttcatctaaggttacagttatgttaccgaaacacaaaactgccaaaatcttactctgctgttatgaatgtttaccatcagcattattttatcatttaatatgtgctcactgattgttaactgtagcttcagcgcgtgccaagcagttgacttaataggatcatcttgtgaatttgtttacgtgatgccaagcatcaagtcatgttttctttagtgtgtgtgcttacacaggtgttaaacagtttttctctattttaaactgagccttctttttaatatattcccgaagagatatgtaaataagctctcagagtttctgtgatgatttgttgagccttgctggacaagtggtttgtttgtgtgcaaaccaaactttctttacccagtgcaatagatttgtttgactgcttgtgtctttttatgacctgtttgcacttttagaaaattggtaaataaagcaagtatatttttaaa

SEQ ID NO: 358491 - DNA, 446 bp, Homo Sapiens
  misc_feature (168)..(248): n is a, c, g, or t
atcatcacatacaaaaggtagctacacaattaggcgctgaacaaaccacagcaagggcaacaattctcactgcattttcccaaaaggcaattgaatagatcaagctttagctaagcttggcctgaatgtttctgtgaggcatcttcctggttctccctttaacttgcnnnnnnnnnnnnnnnnnnnnnnnnnnnnnnnnnnnnnnnnnnnnnnnnnnnnnnnnnnnnnnnnnnnnnnnnnnnnnnnnngctcacgacatgcatacttctgtgcataacttgagtcattcggtagctgttgacaggaggtatactttcttgttgctctgctaacagcttacatatggttacccatatactactccgttaggattcacattcaatgcgacaactgatgcaagggatctcctggcaatgcgggctcataccccttcactgatttactcg

SEQ ID NO: 358492 - DNA, 692 bp, Homo Sapiens
atttggcttctggtctactttccttagataaattccatgtgtaaatagacataatcaaatattttgtcaaaacatagcttgcaggcctggaaagtatgatcttctatatactggcttctgggcttcaccaatcctccctactaacttaatggtagctactttggggcaattcaaaattataggtttgggtaaaatgggaatgtaaccagtttccctttaggtttgctgtatggagaaggtgactgagaaatcctaggtacattgtcctgctaaaactatctctatttcttttataaatgttttatgattttcagtttacaagtccttcagctctgtggttaaatttatttctaaatatcttaatttatttttcatgctcttgtaagtggaatggtttccttgatttctttttcagatagtttgtttttagtgtatagaaacaccactaatttttgtatgttagttttatctcctgcagcattactgaattggtttattagttctaacaggtttttggtgaagtctttaggttttctctatataagatcatgttttctaccattggcaatctaacttctttcaatttgaatgggaggcccttgaattctttttcttgcctagatgctctggtttaacagtgttatgttgatagcaatggtgagaatcggcattggcttggctctgatctaggg

SEQ ID NO: 358493 - DNA, 1353 bp, Homo Sapiens
  misc_feature (490)..(545): n is a, c, g, or t
  misc_feature (1268)..(1268): n is a, c, g, or t
actacatcaagccttgtatacttctgcttaaatgtaattcaatccttggttgttatggcaaacagaaacccaacaaaaagacagactctggtactatggtaacagagccactttatcatttggtcaaaatttggcattatgattagctttgtagaactgacctgtttatttggcaatgctgttaaaggatcatttcggtttcagacttcaaagttgattaataaatttaatcttaacttcttattcactggaatcaaaacgatggttggtactgtgtttactgtttaaaatgaagtactaaagccctgagaactgcacctcattttctttatccagaaattgtgcttatatattttcctgtcaggtttaaaaagatgttttaattcataaattattgttttcattgacattaaaagactgtgatattgaaagatgaattacgaaatttgctgagattgtttagtaaaattttgctggtcaaaacggtgtnnnnnnnnnnnnnnnnnnnnnnnnnnnnnnnnnnnnnnnnnnnnnnnnnnnnnnnntgtaaaatgtaaaatgaaatagctatcatgaagcagaaataccatggtggaatgtatacggttgacgtgaataaaccaatttggcactgggcgggatttgaacaagtcccagcttttgaatttccatttggggacccgcactgccaaaagctggaacttttgcttttggcagcaaacaccacccagagaaaaaccttctgggtgcccttgcttcgaacgccacccaatcctccccaaatgggaagtttcacccgttttttccttatacgccttgcctatgacgctcagaatacccacggcgcgaaatttttgagaacattggtggagccccaaaaccccttcttatttgttttgggccgccactctctatgtacaacaatcatatactgtaggtgtaacagagaaatttagagaagtatccctcccgctggggccaattttctctccccgcgatatctcatgccccccgcccactcgaagttgttatggctccccgagcttcgcttcagtgcctccacgcgacaacaccgatcactctcgtgtcacaagaggccgcgcgcgctgtacgcattcagacgcgttgcatagcgagcgcggcgcacagagtgagttcactcgcgatgtctcctatacagcctccaccgctggcagtcaccgaccgttcatgtcgtatgcgattctctcgtcgtcttatgcccactcgcgccgccctcccccacccgnggtggtgcgtgttaggtctctgccacccgtccgcccgtccgctagtacactggtctcttgttctcgcaccgacatcactgccgtg

SEQ ID NO: 358494 - DNA, 854 bp, Homo Sapiens
tcgggtggtgtcctttgggggtttcggcccagcaggaagacttcgcacctcctgtttggtttcctgcgttgcctttctggccccaggattccccggattgcctgccgttttggctaaatgtggagtgagggacgtaatcgccagcaaccagaaaggtttcctttgcacactgtatccgcctgatctataagcagtgaataagttgcggcatctcagaataccagcagaaagtctttaaatctgtccggcaaagttgttaaaacccgtaaccaccgacgtgaccctcaggtcaggttcgcagtagttcagatggcttatattggagagcctgcccgcctcccccgtctggttggtcagcatgctcaggatggggttgtactgccggttcagcttctcttgctctcggttccagtatgcctcgggaggggtagatatcttccagaacttctctttgggtattattacttccccttttccatttttttcttggctactgcttttggagacttccataataaaataaatgaagacatttgccatcatcaggatacccaacaactttattcttcgacgtccaacactcatttctcatatcttgtccgggagcagctccagctcggcggggcgggggcaagggcgggagatcgcggccacatccacgtcccggccgctccgcgcggctcagcccggcgaccgccgcagctcacgctccatgcgcggcgccccggacgggcggcccggcggtgtcggcggcagggactgctccggcttggctctgctagcctccggcacttgttgccgctgctgccgctgccgctgcgccatcccgggaattccggacccggtaccaacca

SEQ ID NO: 358495 - DNA, 441 bp, Homo Sapiens
gagggagggatgaataggcagagcagagaggattttttggggcagtgaaactactctataatgatggttacatatcatcatctatttgtccagacccacagaacgtacaacaccaagaacgaactccaatgtaaattatggactctgggtaataatgatgtaccaatgtgtgttatcagttgtaacaaatgtacactcttgttggggatgttgatagtcggggagacaagacagggaacgtatgcgaaatctcttccttctgctcagtttcattgtgaacacaaaactactttaaaaagtaaagtttattttaaaaagaggaggtcttaggacagaaccttagagaattcttaatattgaggaactagccttagaatagttctgctcttccttgtgaaaataattaacttaaatatctgctctgaatataaaactgaacat

SEQ ID NO: 358496 - DNA, 236 bp, Homo Sapiens
ctgcttcaagttccttaggtccctttggaggatattgatgggggtggaggtggggatagaacatctttcacactgtttggtacagagacgctcaaagcttttcccagggaaaggaactctctaaaatagtaatctgatttgatgaaagataaaattttaatatagcttcagttaaccttcaggatactttaaatgctacattgtatataaaagtaataaagtacaaatgaacacga

SEQ ID NO: 358497 - DNA, 1695 bp, Homo Sapiens
gggcacccaacaggtaccacgaagccttggggagccgggttcaaggggtgggtccccgggcggaacgtcaagtaccttccggtgtacggggttgttactgcccaggttatgcgcgttacagttccctcggggcgttgaaaccccaagcaagtttctgaggtccgcacatttaatcgagaacacgtagcgcttccccgacgtcttgtggatgatgttcttgtcgtaatagtagcgtaagccccggctcagcttctcgtagttcatcttgggcttatttttcctctttccccaccggcgggccacctcatcggggtcggcgagcttaaactcccatccgtctccagtccagctgatgaatgactggcaggatttgtctgatagcagctccaggagaaactgccacagctgaataggtccacttcctgtgaagccggccagcacagctgcaggtataactggtttgccttgctccaccgggtcactcctctcttggatgtaatccttgaaagacatggttggcttattgaggcagagagactggctgcagtcatcttcgaagctctcgaaggaaggaacccgttgcacatccagcaaggacgactggctgttccaggactggaggagggagtctgagctctcgaagctgtccgcaccgttctcaggggagtcgtggtctttgggcgtcccagaattgttggtgagcaaattcaagttgctgcctgggaagtcctgactgacagagcagtaggtgacgctgacggagctgagccgagacttggggaacatctgaaactcctgctcagagctgagtacgctgggtgtggaggccggacacatgctgtccaggaggccgcctttggggtaattctgtgtctgcattccatagggcgcctgctctgtgccaaaacctaatgtattgctgttaatccaatgaggaacggaggtgaggtgtgaattttcttcaatattgatcttctgtcttttcttggttttctttgatcatttgctccagatgttcccagagaatgtcacccacaaagtcaggtgccagctccagaaagcgttccttgccaaggttacacagcatctggccattcatgccgaacctctgcagattcacgttcaccagactgaactcattggtggcccagagaagccactggcatacctgttgctcactccacagccaggggttctttggaatgcccaggcgccgctgttcctttttgaagccactgaaggtagcttttaaggcttgactcatcacagccttgctgcacggggttaacaaaggcaattcacagttggcggagtcatgagaaatggaatccaagcctgttggcacttcttgcagtgtttgctcttcatttagagaaggaaaaacagcaaacagggacccatcaaaggtgtcaaaggctggctggcgcttgagtgtccctctgtaactgttagccacaggggctacctggtccatattcttgattccgaaatcattcatcctgccgctgcgggcagggccggcgcttggtcgggacggtggctgctcggcgcccgcggctgctcggtgcgcgccgggcgagggcgagggcgccggccagagacgatcagggaggccggacgctggccgggcggctccgggagctctgagctggagcgacaccgcactcgtcagtctctggaggaagtaaccccgct

SEQ ID NO: 358498 - DNA, 1133 bp, Homo Sapiens
  misc_feature (947)..(955): n is a, c, g, or t
cggacaagggtgcgaggaaagtcagtgagcaaatcgctgaccaccggggctgccagctcgcctgactcccggcctcttgcgctcctaggggcggagaagggtgcgggctcttcgccctttgtgtccttctttcactaacttctggactttccagctcttccgaagttcgttcttgcgcaaagcccaaaggctggaaaaccgtccacgatgaccagcatgactcagtctctgcgggaggtgataaaggccatgaccaaggctcgcaattttgagagagttttgggaaagattactcttgtctctgctgctcctgggaaagtgatttgtgaaatgaaagtagaagaagagcataccaatgcaataggcactctccacggcggtttgacagccacgttagtagataacatatcaacaatggctctgctatgcacggaaaggggagcacccggagtcagtgtcgatatgaacataacgtacatgtcacctgcaaaattaggagaagatatagtgattacagcacatgttctgaagcaaggaaaaacacttgcatttacctctgtggatctgaccaacaaggccacaggaaaattaatagcacaaggaagacacacaaaacacctgggaaactgagagaacagcagaatgacctaaagaaacccaacaatgaatatcaagtatagatttgactcaaacaattgtaatttttgaaataaactagcaaaacccgataacccgcccgccaaaccatgtcaagggcgggcgcctctagattatccctccgagggggcccagccttacgccgtacccaggctttcttgtacaaagggggccccctacagtgaggccgtattataaccctaggccctgggccgccctcttttcaacctccgtgattgggaaaaactgcctaccttggggaccttttggggaaggaaccctcacctttnnnnnnnnnaacttaatttggaacaaacttcccctacaggagattttaaagccccccagggaaatttacaacatctctttaaagggcataagtgggtctaaacctaaacctgggaatagggtttccgcttgcttgcaaaaactctttggcttacacggcgcgacgaattctattacgaaatatttct

SEQ ID NO: 358499 - DNA, 859 bp, Homo Sapiens
  misc_feature (734)..(734): n is a, c, g, or t
  misc_feature (738)..(738): n is a, c, g, or t
  misc_feature (741)..(742): n is a, c, g, or t
  misc_feature (745)..(745): n is a, c, g, or t
  misc_feature (758)..(760): n is a, c, g, or t
  misc_feature (763)..(765): n is a, c, g, or t
  misc_feature (844)..(844): n is a, c, g, or t
ggggagcaaatcgcggaccaccggggctgccagctcgcctgactcccggcctcttgcgctcctaggggcggagaagggtgcgggctcttcgccctttgtgtcctccttctttcactaacttctggactttccagctcttccgaagttcgttcttgcgcaaagcccaaaggctggaaaaccgtccacgatgaccagcatgactcagtctctgcgggaggtgataaaggccatgaccaaggctcgcaattttgagagagttttgggaaaggtatgggaaagattactcttgtctctgctgctcctgggaaagtgatttgtgaaatgaaagtagaagaagagcataccaatgcaataggcactctccacggcggtttgacagccacattagtagataacatatcaacaatggctctgctatgcacggaaaggggagcacccggagtcagtgtcgatatgaacataacgtacatgtcacctgcaaaattaggagaagatatagtgattacagcacatgttctgaagcaaggaaaaacacttgcatttacctcctgtgggatctgaccaacaaggccacaggaaaattaatagcacaagggaagacacacaaaacaccctggggaaactggagagaacagccagaaatgaccctaaaagaaaaccaaacaatggaatatcccaagtattagaatttgactccaaacaatttggtaattttttgaaataaacctagcccncggnggnnggncgcgggaaaaaannnaannnacaatgtgggggccgccttcgggcccctccgaaaagccttttctaagacccatttccgtttggcggcggggggcccccnagaaggttaaggtgt

SEQ ID NO: 358500 - DNA, 833 bp, Homo Sapiens
  misc_feature (196)..(210): n is a, c, g, or t
  misc_feature (759)..(759): n is a, c, g, or t
  misc_feature (796)..(796): n is a, c, g, or t
taaaattatcctataaactttgtatgatagatattattctctattaaaatcttatatacttcctaaatatttttaaagtggtcataaagcatttatttctctcgctgatctaacaacataaacatctaaaatttattttcattgtatgcaataaagcataagattacatgtatttttcttcaagactggagtcaannnnnnnnnnnnnnnagcatcttaaccctgtgattctcttacttccaaaattggtgataagagaaggaaaggcaagatttaccatatagtgagtgggtttaaaacttacactcagagttagactgtgttcttaatttaatacatttgacttgacttatttacagtttcaaagacactaacataaactacatcactaatcaggcataagtgtctgaagaagcagatcacgtcttcatacctactaaaggacattttaaccaccttgtcgttggccagtagattgcactgatggagtgctggagaacagcatcacccttctgcattatctggaagtaagagccagtattaactccttcctggttcatctagcaccttaacctgagctgggtgtgcttcagcatgttgaccatgtgactgacacttagcacatacaattttttagattcccagcgggtaggagaccaatgttttacctatattcttgtaaatggtggtagcaaaattaactgtgatatatagtgattgtgctaaatgttagaaatcactctaggacttattccctgnaatgctcttaaaggtaaaacaagtgacccaaacaganaccaaggttgccaaaatgctggggggaaccttcaatg

SEQ ID NO: 358501 - DNA, 578 bp, Homo Sapiens
agagtcataatgctatgtgctcagtggcaaaataaccaaaaaaaggttaaaatggccaaatttctttttggcaaaatttacttttgctgactaactacaagtttatgttttgtataaaagttccatgatagagacagtattaattagcagctaagagagcgcagtgtctaagactgctagggttggaaccgtaaactattctcccctgactagaactgtgacctgaagcaaatcattcaacttctcctcagctgtaaaatacggacaataataacagtatcctcctcagaaagtagttggttctatttgaattaatacatgtaaagtgctgagaggaacttcacgcacatggagtacttaataaatatcagttattatcattagctggtgtttgacatctactttcaaggcattgcaaactgtgtttctagaaatccaaagataatggtaccaaggtgaatgctgtgatcttctctttacaaagcctcaaatatcttccactctctcctgtgacagttgttagctatttagctgaaattaactgtggattatttggcccgtcgacttggctagaccga

SEQ ID NO: 358502 - DNA, 891 bp, Homo Sapiens
  misc_feature (584)..(585): n is a, c, g, or t
  misc_feature (588)..(588): n is a, c, g, or t
  misc_feature (590)..(590): n is a, c, g, or t
tatatgccagtaacactcattttaacgctactttagtggcaaaaaattgtaaacacctcagatgcctattaaaagaggaatggtttaaagatactattatagccacactatgaaatataatacagtagttaagaagaacgagcttgatttgtatgtactgacaagaagaatctataaggtatgtaaacagttgaaaaaaaagctacagagttttacatttgtcaagatctaacactaaacaaaattagaaacatgtgaaatccatatacacacgtagaaaaatacatataatgagccgtggatggaaactcgcaaatgtgatattaaagactagcactataagactgagtgagatttggagagtataggaaaggaggcttttagttaatatagagagatattcaaaaatttatgagtgtgatctcatgtattagttattcggttaaagaaacaaaattaaatgaaaaatacatttttaaaaaggttgcaattctgaattatgggagagaaataaaaattagcaaaacatatttgcaaagtggctcaagaggaaggagctgaaaccctaagaatgggtgagtttnnttntnttttcagagacaatacagaaaagaagaggcaaaggggccgagatgggatacagacctgtatcacacaggtgtgtgcacattctcatttagaactggaacaagggagtcagatttaaaattctggtgcagattccaaaggtgttctctgagggttcttttgtttggagatgccatgtgttacagcacagttgatcaacctggcttagagcgtcacatttttcctctgttggagcaagaagtacagaaggaattggaatttagtggaattgaagatctttttgaacagaatctgcagatgtgt

SEQ ID NO: 358503 - DNA, 339 bp, Homo Sapiens
cttccatatactttaaatcatctctacattacttataataatgaatgtagtgtaaatgcctatgaaaatagttactacactgtattgtttatttgtatttttattgaattgttttggggtggggggcagctgtatctttcttagtaatagaacccctggttttagctgggcacatgactgccctcaataaagattaaagtaccccagccttccttgagattgtggccatgtgactgaactttagacagtgagatataagcagatatcttctgtggcagtgttaggaaactattaaagacagtaagaacattgccctttgccttctttttcctttcttca

SEQ ID NO: 358504 - DNA, 672 bp, Homo Sapiens
aacagaagagtactcttgctccagtagcttgaatcaaatccggtagaggagagaacagaatggcagacctctggattagtctgtacttctggtattcttggaataaacctcaactattaaccgtgctgccttgtacaaactctctaccaggccaaaggtaatgaggaatcagcagtacaccagttttacatatagataagaggctgacaagaactggtttgtaagtttaatgaaatatttatttaatctaaatttcaacatttaaattggcttcctcattgcctctataaagctagttaaaaatatactagaaggcagcttcacattttgcaaatacatccatacaagtcttataagacctgctttgtctctttaaaaatattattttatctacatattatatctaggtattatctacaaagaggcagactgttggccacaaagacttgctggcagtcactgcatgctatgctgctctttgtggctgcccttctcaggcagtcaggaaaaagtagaacaaacacaaatgtcatcaacgctaatgcttccagccagatcatttcacgatctgtgagcacaattctgtaacaacagcttcatttcagcctagccattcatttaggttctgtggatgtgaaaaccaaagaataaaaaattgttaaggcaaatcac

SEQ ID NO: 358505 - DNA, 863 bp, Homo Sapiens
ctgtgtgttttgtgcacctccactttaggtaatcatagggagcacatttacaggatggtctaataacatgaaaacaggctagtttcaagcaacagcaatgtcggttggaaagcaggcgtcatttgccttgaaaaaagccttttgacaacatacaggcattcttttaaaaccaggctgaaacattttatttccgagacttaacgttgtgtttcctgtttcttaaacctagcacctctgtgtatttgaaaataatgagacatctttcattggattttggaaaattgttccccatgggattctaacctcactaccaaatgagtgaaagcttgattaagagttcttccatatactagcctccttggaagaagtgatcagaaggtgataagaaggacagaaaggactattttaaagttggactgaaggagaaaaaagcaaaattcttgtttcatcccaattctagttagaacaaagttaaacccccgtaatcttaaagagaaaatctttggaggttttaattaaacattttatacatttaaagtcttgttaatggtgctttaagtgtcaatgtagcatgtaaaaggctttgtacagacaggtaaaagttccatttctgagtgatgaaatgtaacacttcttcatctttaacttgaaatcaaaactatcagattttatttttgtataatttaaggaaggtaaagttaggggactagaagactctaaattggcttctacagatcaataatttaaatgtaactagttgggattttatagttaaaattatatttgtgtatataacataactaatctgtaaattgtaataaatatatttgcaattattaaatgttaagtgatattttggttca

SEQ ID NO: 358506 - DNA, 776 bp, Homo Sapiens
  misc_feature (490)..(527): n is a, c, g, or t
cggaagagaaagcaaatctgtacaaaaatactctggttgcaagaaaagctagggcacactgttcaactaagagtagtttagctgttggaaaaataagagcatttaattttatctaaaaatatgtataaatcccctcaaaatggtaatgaatcatacacagtacatactaaaaatatttaaaatagagaatattcctcacagaggacttttttctttaattactgctaaaaaaataattacaaagtccaaacaggcagagagatttagcacactgatcacacgattctccatcatcctccacgcttgctctgaagagggtttaaaaagtccagtttctcgttgatttcgctgctccatttagccaaggttggcctggccactgattggccacaagtgggtaatgcgcttggataggtcatgtttgtgtcttggaaatttgggtacgagttgcctttagcttaaatgtctttaaggaagaagaagaagaagnnnnnnnnnnnnnnnnnnnnnnnnnnnnnnnnnnnnnntgtccaaagggaattctggttggtcctctctttcttcggttatttttaggatcatctcggccatcgtcgcccttcgtgggaggcctcctcaaggtcgagtgagctgtgtgtagacgggttgttcccagtgctggggcctgtgctcgtgccgacttcctcccgctggagctccaggttttccaattgggcgccccctcgacggttccccaaggtcttcaaatcgctgcggaggggcccacgtcggatcac

SEQ ID NO: 358507 - DNA, 1253 bp, Homo Sapiens
  misc_feature (272)..(272): n is a, c, g, or t
  misc_feature (1214)..(1214): n is a, c, g, or t
  misc_feature (1226)..(1226): n is a, c, g, or t
tgttgctggtattacatcaaacctactctggataaattttccagtagggcatctgaaattgctttggcaaaagcaaaacaggttatcaatacaccaaggacatcaagtagttttaatgcaactacagtgttgagtgcttttttactgggagaaaaatcctagcagaacctgctactctgggcgcattaggtagttttatgcaactatagtattaagagttttattggaagaaaaaacactgtcagagcttactgctccagaccttttttttnaatagaagagactggtaaaaatgatgcaggggctgaatgaaagccagctctgctccagtggctctctgagttgagcatgcatcagttaccttaagggcttgttaaaacatcgctaggctccaccctgtttattcaataagtttgttatgggatataagaagatgcattttattaagttcccccagtgatcctgctgttctactatagggaaccacacttggaaaaactagttctacaaattcacctgtatgttgtaaaggagtcaagtcaatgaaggagttataaagagttgctgaaaaatggagtaacagtgtatgggacttcacatcagttctccttattgattgttagtttgatccctcttgttcttttgttgtaaacattttctataattaggaaatgccatttaagagtgagagaggtatatatctatgagccattgtgtttggtgttttacaagaactttaccatactggtgtgtagtccattctgtacagtttaaaagtgattcacgatttgcaggctttttatcagatcacaaaaaaatcagtctttaagcatttgcttggtaaggtttcttaagattaggtttataatacaaccatctgtaatgtatctctcgtttgagcttgtgggccatacaattcattaactagatgaatacattgtggacagcatcctcactacccctctctactcactcacaaagaaccatgatacactggaatgtttttctctggaatcctctttctactcttgtattaaaatttttccccacttcatgattatattcaaaataaacaactacatcattacttcttgtcttttgcttctgttgtactatatttggaatgtagatgtacttgggaaagtcagactagatcaaagttactattcttacaagttttgaaaattagtgttttagaagaaactcactcatgnttggtaacttcnttaacccggtcagtggttggaaagatg

SEQ ID NO: 358508 - DNA, 858 bp, Homo Sapiens
  misc_feature (818)..(818): n is a, c, g, or t
cggtctagaactcccggattctccgggctgcatgaattcggcacgagctttctgcatattattcagcctccaaatgcaaatgaatgatataaaaataagtagggaacatggcagagagtggtgcttcccagcctcacaatgtgggaatttgacataggatgagagtcagagtataggtttaaaagataaaatctttagttaataattttgtatttatttattctagatgtatgtatctgaggaaagaaatctggtatttttgctttccaataaaggggatcaaagtaatggtttttctctcagttctctaagctggtctatgttatagctctagcagtatggaaatgtgctttaaaatatgcttaccttttgaatgatcatggctatatgttgttgagatatttgaaacttaccttgttttcacttgtgcactgtgaatgaactttgtattatttttttaaaaccttcacattacgtgtagatattattgcaacttatattttgcctgagcttgatcaaaggtcatttgtgtagatgagtaattaaaaaatatttaaatcacattataattctattattggagagcatcttttaaatttttttctgttttaacgagggaaagagaaacctgtatacctagggtcattatttgaccccatagtataaccagattcatggtctaacaagctctcagtgtggcttttctctgaatgcttgaatttcacatgccttgcatttcacagttgtactccatggtcaaccggtgctttttttcacatcgtggtacttgtcaaaacattttgttattttccttggtnaaatatataaaaaaggttttcctaatttcactttgctgcc

SEQ ID NO: 358509 - DNA, 652 bp, Homo Sapiens
gaaagaaaataaaattcagtctcaagagtaaaccctgtgtcttgtgtctgtagttcaaaagtcagaaatgattctaatctaaacaaaaagatattaaatatacagaagttaaattcgaactagccacagaatcatttgtttttatgtcagaatttgcaaagagtggagtggacaaagctctgtatggaagactgaacaactgtaaatagatgatatccaaacttaatttggctaggacttcaattttaaaaatcagtgtacctaggcagtgcacagcacgaaataagtggcccttgcagcttccccgtttaacccactgtgctatagttgcgggtggaacagtcagcctttctagtagtttatgatattgccctctttgtattcccattttccacagttttttccgcagacttctttctgcaaattattcagcctccaaatgcaaatgaatgatataaaaataagtagggaacatggcagagagtggtgcttcccagcctcccaatgtgggaatttgacataggatgagagtcagagtataggtttaaaagataaaatctttagttaataattttgtatttatttattctagatgtatgtatctgaggaaaaaaatctggtatttttgctttccaataaaggggatcaaagt

SEQ ID NO: 358510 - DNA, 480 bp, Homo Sapiens
  misc_feature (28)..(28): n is a, c, g, or t
  misc_feature (75)..(75): n is a, c, g, or t
  misc_feature (90)..(90): n is a, c, g, or t
agcttgtacagttaacttatagaggggnagccatatttaacattctggatttcagagtagagatttctgtgttgncccctagaaagcatnacatgtagtttatttcagcatccttgttgggtggggccctggctctcttcccctttggtgggacctcccctttctttgggcttcagttcactcaggaagaaatgaggctgtcgccatctttatgtgcttccagtggaaatgtcacttgctacagacaatagtgcatgagagtctagagaagtagtgaccagaacagggcagagtaggtcccctccatggccctgaatcctcctctgctccagggctggcctctgcagagctgattaaacagtgttgtgactgtctcatgggaagagctggggcccagagggaccttgagtcagaaatgttgccagaaaaagtatctcctccaaccaaaacatctcaataaaaccattttagttgaaaagc

SEQ ID NO: 358511 - DNA, 622 bp, Homo Sapiens
ttatctgagagttgttttttattgcagcataagttaagcttatccttaacaatatgttgggtaaggccagaaacagaagaaaaagcctcaaatctgaaaagtactacagagaaaaggaacccagacagtaaagattggtgtaatgtttcacacgcattagtttttccatcgatgaagtaaaaattcaaaaattacaactccgtgagtatacacagtactacttcccctcaactcatttttataaaaaggaaagtattgtcctgtcctaagaggaaagatcacatatttttcccctttagcctgcttgtctcttggcccatagaaattcttggcccattcttgccttcactgaatgcctctaataccttcagaagccaagaggaaagcactcttctgggtcaatgttcttctctgtagacagtattttatcaaacagactttagtttgtcaccatgatttgataggtagccccaaaactccagctgatgttacaagagtctcatttcttaaaatcaaggaaacgggtccctttggtcatggtttctctgtaatatcaacttggatatcacatgtccttcagagttgttcttcattgctctcaaatactggattgctgtaagac

SEQ ID NO: 358512 - DNA, 800 bp, Homo Sapiens
ggtccggaattcccgggatgccgctgcggcagcactcgagccagctcaagcccgcagctcgcagggagatccagctccgtcctgcctgcagcagcccaaccctgcacacccaccatggatgtcttcaagaagggcttctccatcgccaaggagggcgtggtgggtgcggtggaaaagaccaagcagggggtgacggaagcagctgagaagaccaaggagggggtcatgtatgtgggagccaagaccaaggagaatgttgtacagagcgtgacctcagtggccgagaagaccaaggagcaggccaacgccgtgagcgaggctgtggtgagcagcgtcaacactgtggccaccaagaccgtggaggaggcggagaacatcgcggtcacctccggggtggtgcgcaaggaggacttgaggccatctgccccccaacaggagggtgaggcatccaaagagaaagaggaagtggcagaggaggcccagagtgggggagactagagggctacaggccagcgtggatgacctgaagagcgctcctctgccttggacaccatcccctcctagcacaaggagtgcccgccttgagtgacatgcggctgcccacgctcctgccctcgtctccctggccacccttggcctgtccacctgtgctgctgcaccaacctcactggccctccctcggccccaccaaccctctggtccttctgaccccacttatgctgcttgtgaattggggtttaagtgattcccaaattaaaacttgagcccagcaaaagacgaaaaaaacgtcttccagcgct

SEQ ID NO: 358513 - DNA, 745 bp, Homo Sapiens
gtagcgaggcctgggtggcgaattcggcacgagggccagctcaagcccgcagctcgcagggagatccagctccatcctgcctgcagcagcacaaccctgcacacccacaatggatgtcttcaagaagggcttctccatcgccaaggagggcgtggtgggtgcggtggaaaagaccaagcagggggtgacggaagcagctgagaagaccaaggagggggtcatgtatgtgggagccaagaccaaggagaatgttgtacagagcgtgacctcaggccagccagtgtcctcccatagtggccgagaagaccaaggagcaggccaacgcggtgagcgaggctgtggtgagcagcgtcaacactgtggccaccaagaccgtggaggaggcggagaacatcgcggtcacctccggggtggtgcgcaaggaggacttgaggccatctgccccccaacaggagggtgtggcatccaaagagaaagaggaagtggcagaggaggcccagagtgggggagactagagggctacaggccagcgtggatgacctgaagagcgctcctctgccttggacaccatcccctcctagcacaaggagtgcccgccttgagtgacatgcggctgcccacgctcctgccctcgtctccctggccacccttggcctgtccacctgtgctgctgcaccaacctcactgccctccctcggccccacccaccctctggtccttctgaccccacttatgctgctgtgaa

SEQ ID NO: 358514 - DNA, 826 bp, Homo Sapiens
agcggaatgtttcatcggcgtcaataggaggcatcggggacagccgctgcggcagcactcgagccagctcaagcccgcagctcgcagggagatccagctccgtcctgcctgcagcagcacaaccctgcacacccaccatggatgtcttcaagaagggcttctccatcgccaaggagggcgtggtgggtgcggtggaaaagaccaagcagggggtgacggaagcagctgagaagaccaaggagggggtcatgtatgtgggagccaagaccaaggagaatgttgtacagagcgtgacctcagtggccgagaagaccaaggagcaggccaacgcggtgagcgaggctgtggtgagcagcgtcaacactgtggccaccaagaccgtggaggaggcggagaacatcgcggtcacctccggggtggtgcgcaaggaggacttgaggccatctgccccccaacaggagggtgtggcatccaaagagaaagaggaagtggcagaggaggcccagagtgggggagactagagggctacaggccagcgtggatgacctgaagagcgctcctctgccttggacaccatcccctcctagcacaaggagtgcccgccttgagtgacatgcggctgcccacgctcctgccctcgtctccctggccacccttggcctgtccacctgtgctgctgcaccaacctcactgcgcctccctcggccccacccaccctctggttccttctgaaccccacttatgctgctgtgaactttaatataaaaatgattccaaataaaacttgagcccacgaaagtaggacaaaaaacttctccagggctgg

SEQ ID NO: 358515 - DNA, 640 bp, Homo Sapiens
  misc_feature (546)..(563): n is a, c, g, or t
ccctcatcgtggcagagcgtattgcgggcatggaccctgtcgtgcactctgcgctccaggaagagaggctgctgctggtgcagacgggctccagctccccgtgcctcgacctcagccgcctggataaggggctggccgcactggtgcgggagcgtggcgcggatctggtggtcatcgagggcatgggccgtgctgtccacacaaactaccacgcagccctgcgctgcgagagcctcaagctggccgtcatcaagaacgcgtggctggccgagcggctgggcggccggctcttcagcgtcatcttcaagtacgaggtcccagccgagtgaggcgctgcagctgccggactcttctgcttgtcacttgtcaggaatgtgtttttaccaccacagggaaactgcgttcaaatcaacgtatttatatggtactgctgtgacgcggcacatacaccccagccgcacagatgcgtgtgacccagaggcgagacgcagctttgtcctgggagacgttcatattggaatctatttaactgctaaagaacctttnnnnnnnnnnnnnnnnnnaatagagagatctatacaggtatgtctgacgggacgcagcaccgtgggcacgcaccaaatagagtttttaaaagagg

SEQ ID NO: 358516 - DNA, 436 bp, Homo Sapiens
  misc_feature (30)..(30): n is a, c, g, or t
acccctcccctgtgtgccttgtggttccantaaacccaaacccgaaaactgccagggaaggtactcttgtggtaaggtggtcaacatggagagctggggctgtgggcagtgccttctcccttgcccatctgaacattgggtcatcctgaggagagatagacccccaaaccctcggatgcatgacagacccttgaactccaaggagcagaccccactggataagggagagatgcccaaccctgcccagtaggacactacttccacttggctctgttctgcttccctggcagatttgcagggctgggcattggctacaagaagtctcgcattcccagtctgcttcattcttggcttcctattgggtgatccatgatggagtcccgcaaaaacaaaaaccaagaaaaagccaaactttaccctatcaccatcattacca

SEQ ID NO: 358517 - DNA, 1476 bp, Homo Sapiens
gggggcctgcatacttacttactttattcccgattgaagacaggaccaaagcatattcctctgcagacaccattaaagttcatggtggatatggccctgggaatggagtatctgagcaacaggaattttcttcatcgagatttagctgctcgaaactgcatgttgcgagatgacatgactgtctgtgttgcggacttcggcctctctaagaagatttacaggggcgattattaccgccaaggccgcatggctaagatgcctgttaaatggatcgccatagaaagtcttgcagaccgagtctacacaagtaaaagagatgtgtaggcattgggcgtgaccatgtgggaaatagctacgcggggaatgactccctatccgggggtccagaaccatgagatgtatgactatcttctccatggccacaggttgaagcagcccgaagactgcctggatgaactgtatgaaataatgtactcttgctggagaaccgatcccttagaccgccccaccttttcagtattgaggctgcagctagaaaaactcttagaaagtttgcctgacgttcggaaccaagcagacgttatttacgtcaatacacagttgctggagagctctgagggcctggcccagggctccacccttgctccactggacttgaacatcgaccctgactctataattgcctcctgcactccccgcgctgccatcagtgtggtcacagcagaagttcatgacagcaaacctcatgaaggacggtacatcatgaatgggggcagtgaggaatgggaagatctgacttctgccccctctgctgcagtcacagctgaaaagaacagtgttttaccgagggagagacttgttaggaatggggtctcatggtcccattcgagcatgctgcccttgggaagctcattgcccgatgaacttttgtttgctgacgactcctcagaaggctcagaagtcctgatgtgaggagaggtgcggggagacattccaaaaatcaagccaattcttctgctgtaggagaatccaattgtacctgatgtttttggtatttgtcttccttaccaagtgaactccatggccccaaagcaccagatgaatgttgttaagtaagctgtcattaaaaatacataatatatatttatttaaagagaaaaaatatgtgtatatcatggaaaaagacaaggatattttaataaaacattacttatttcatttcacttatcttgcatatcttaaaattaagcttcagctgctccttgatattaacatttgtacagagttgaagttgttttttcaagttcttttctttttcatgactattaaatgtaaaaatatttgtaaaatgaaatgccatatttgacttggcttctggtcttgatgtatttgataagaatgattcattcaatgtttaaagttgtataactgattaattttctgatatggcttcctaataaaatatgaataaggaaa

SEQ ID NO: 358518 - DNA, 472 bp, Homo Sapiens
ctggcctccagtttagaaggaaacctgctgtccaaactaagatgctgtcctgacagttcccaacttgcagctgctggttccacgcttatgttcgcctgccaaactccgctcccgctctttcttctctgctgtgacaccctccaaggctgcaactttcatccgtaatggattcgtttacacttggtcaaggctctcgacaacagtgggaccaaaacccagaggttcacagaaactacaatagtcaccgtgagtcaggccagtctgcccagaggatggcctgcaggactgcccacagcatttggaggccaggcctcagctgcatctctgaagcccaggcaaaggcggccctggggaaggtggaacaccagcatttctactgatgctctggggtcctgcagaaccctgactgtgccacagaccttctgtaccgtgtccatttccatataatctaataaatccttcttacaaagga

SEQ ID NO: 358519 - DNA, 1235 bp, Homo Sapiens
  misc_feature (14)..(14): n is a, c, g, or t
  misc_feature (25)..(25): n is a, c, g, or t
aggcttggtaccgnccgcggggtangatccgccatgaagagagaagggggtgccgcccacctctgctccgacagactcccggagtcccaggcagcaagacggcaaccacgcacccaacttctccagccacggctcatgccgccgtcgccagcggcgccgacatgacaaggcgctgcatgcccgctaggccaggtttcccctcgatccccagccccggggtcgtcagccccgcgcgctgccatctgagacccggtagataccagaccatgctgcagcgggaaagagaacagagagtccatggggacaggaagcagtcaattatacgatttacttcaaaccagcttcaaaacaagacagacacatgttggattcaccacaaaaatcaaacatcaaatatggaggaagctagattgtctatcactgggacacgagcagctctgaaaggaaactatcctcaccacaaagaatctaaacccaaaagggtgccaccagaaaagagccctatcatagaagactaacatgaacggctgtcacagagcaccatgaagatcatggtatacatgagtacacgtaccgctagatctgtcactagcctccagactatcaagcccaaaggaacacactatctactgataccataacgtccactagtcactttgcccacaagcgagaacgacagccctacctaaccacgacgcaacaaacaatagaatacccccagaagcacgacaggcacggtcggcgtagtccacaatccgacggaccgcagacacaacggcgaacgacacacactagcggacatcaacagacatacgcaaccaacaccaccccaaccagacagccaacaaaaggcagcaacccacacggccaagcggagaacgcccacgaacaagtccacagacaatagccgacgcaccacgacacgcaaacagcacagaagccagagcaaggaccacgccacaccctgcacaacacgagagcagcgacacgaaggaaggggagcgaagacaggcagacacgcgagcgcagaacaagcaagcagcccagcaggcgcgacgaccgacacacacaagcacaaagacgacgaaacagccaacgaaggaacgacaacgagcagcgagcgaccaaaagacgacacaaaacaaggaacaggaaccacagagacaaccccaggcaagaagcacacggacccgccaccagaagcgcgacgcagacagaacgcgccaaacaacaag

SEQ ID NO: 358520 - DNA, 704 bp, Homo Sapiens
accacaagtgaactgatcatcctcaatattcacacaagagctggcttaggtggggtattaaattgccaccttcgtggttgtaaaaggcaaccaaaacatggcaaatttcattacacaaaatttcatcaactgctatactgaattatgtttagaagattctgaaagcaagattatccagtgggtaaatgagagtcgactggattctgtcagttcaaagaaggaaagaatcaaaacttccctacaacttcactaaaatttattatatgtacagtattcccactcctggcattttctggcaggtttaaaaatattcagcataaatccagcagaggtggccgagcctaattgcctaaataagttcccagaaaatttaaaaatcattttagtagaattccagtacccattgtcactgcaataagtgggttttagaaaataagtgtgaaaagaatcaggtgttaatataatactaaggataaagctttagaagctattttactacataggtaaagaaaagataaactaacttgtaacaaagaccacaactgcatgttggattagattgtctcatatttcagaataaaatgtactgtatacttttcctcactttgttgtgcactgtaatgaaatgtgaaaaatgctttatttagctgtatgtgaatgaaaatatgcttgtatttagtaaaatgattgattatgtgactgtg

SEQ ID NO: 358521 - DNA, 600 bp, Homo Sapiens; identical to SEQ ID NO: 91804

SEQ ID NO: 358522 - DNA, 613 bp, Homo Sapiens
  misc_feature (38)..(38): n is a, c, g, or t
  misc_feature (123)..(135): n is a, c, g, or t
cggcaaaaggggaagcccaaggcgtaatttgggtaccnccaggcacaagtccgaccgttgtaaaacggcggccagttaatttttttatatttaaaaagggtgaggataagatagagaaagtgnnnnnnnnnnnnnagaaatcccacattttaatacattgccatgcacataaggagtcaagtaatgctgaatacaaaatagtcaaatatccaaaatgataaagcagattttccagcctgatagagatcatgctcacagatacaagggaggcaaacatctgtacagtttcatttttatccattttataagagtcatgcccccctcaactctttttgaggacaactggaaacagaaggaaacataagaatatacaaaggagacccaaagggaattggcaagttgatagctgctgaagatatggaaatcggtggttcaaaattgtggtacacaataattcttatgtttagagaaaaaaagtttctaaacatcttatgccctggaagccaggaaactaaagtggatatccaacagaaaaggcactcttgttttaccacataacttgattgcctcctcctaagtctagtcctgggagtttttctaggatgcacagagg

SEQ ID NO: 358523 - DNA, 1075 bp, Homo Sapiens
  misc_feature (96)..(114): n is a, c, g, or t
  misc_feature (136)..(187): n is a, c, g, or t
  misc_feature (254)..(374): n is a, c, g, or t
caaaactaggttggttaaacatatctctggtacatcaaggggcatgatacaaaccagtctaaagactgtttataaaggagagagctggcgacttannnnnnnnnnnnnnnnnnnggacagagtctccctttgtcannnnnnnnnnnnnnnnnnnnnnnnnnnnnnnnnnnnnnnnnnnnnnnnnnnntgggctcaagtgttcctctcaccttatcctcctgagcagctgggactacaggcacacaccaccacannnnnnnnnnnnnnnnnnnnnnnnnnnnnnnnnnnnnnnnnnnnnnnnnnnnnnnnnnnnnnnnnnnnnnnnnnnnnnnnnnnnnnnnnnnnnnnnnnnnnnnnnnnnnnnnnnnnnnnnngtgtgtgtcactgtgcctgacagctgacagttttaactgacaactttgataacagaggctgctattttggttttagataattggccagtgacagagtttacccttgcctcctttcttggtctgccagctttgtcctttctgagtgatcctctttctgtattgagaggaagtgtgggtctacatagggatgtttggatgctatggcaagaatctttttgtttttggagtgtagtccatttgcaatagaaataaaaaaatccgtcaccaaattgtaacctggatgttatagcccagcatctagaaatcctatgaaatgtattagcacaatatcttgccattgtcccatctaggaaattttttcttgttgtgaggtagggaagtgaggaggaaagccatgccgaagcaaatgttagaatcttaggcatcctatttgttcatgccatgggtatttgctttggacttggagtctgtactttgaaagaggcctttgaaaaaccaaataattctgtgtgaattttcttgtagcgtgcttcatgaaaatatctacttatccaggttttgcaaatgtacatgttcatttgaatgtaaatcaccatttcttggaaccccacgttttttcttaaaaattattctgaattaaatgtatatttctttagccttccctacacagtactaataaaagacttttctttctgttcatg

SEQ ID NO: 358524 - DNA, 426 bp, Homo Sapiens
  misc_feature (356)..(356): n is a, c, g, or t
  misc_feature (368)..(368): n is a, c, g, or t
  misc_feature (373)..(373): n is a, c, g, or t
ttgctgttgaggactggttctgccaggcatgatcaatgaccacccacaatgtcctgtggcccagcctgtggagaggtgcccaaacagagttatctgggtccacatccatgtgcccagctattctgtccaatcatagcacaaagacaggttgcctgtgtccagagggacacagcagcctcaggcacacgcagcccttacttatgagcttgatggtcatcagcaaagactctctccctttagggagggttctccttggggacttttcagtgtcttgggcagggaaagagatgggcacacacgaagcactgatttgaaggacagttttaatggaaaggattttttacagaggtttgggncaaggggtattnggaanaacaacagggggaacagttaaaacaccccgggggttgacaaggccaaggttag

SEQ ID NO: 358525 - DNA, 1185 bp, Homo Sapiens
agcggaaggtacactataggctcggggaggtagaattgggctatttgctgaagcttcttggtggcccttgctagcccaggaagaaacttacattttgatttttttgtaccatggctttggttcacaaattgctgcatggtacttattttctcagaaaattctctaagccaacttctgccttgtatccatttttgggtattctctttgcagagtattccagtagtcttcagaaaccagtggcttctcctggcaaagcctcctcacagaggaagactgaaggggatttgcaaggagatcaccagaaagaagttgctttggatataacttcttctgaggagaagcctgatgttagtttcgataaagcaattagagatgaaggcaatataccattttaggcttttgaaggatgaaattgtggatcattggagaggaccggaaggccaccctctgcatgaggtcttgctggaacaagccaaggttgtctggcaattccgggggaaagaagatttggataagtggacagtgacttctgataagacgattggaggcagaagtgaagtgtttttgaaaatgggcaagaataaccaaagtgcactgctatatggaactctgagctctgaggcgcctcaggacggggagtctacccgaagtgggtactgtgcaatgatatccaggattccaaggggtgcttttgagaggaagatgtcttacgattggtcccagttcaatactctgtatctccgtgtacgtggggatggtcggccttggatggtgaatatcaaggaggacacagatttcttccagaggacgaatcagatgtatagttacttcatgttcacccgcgggggaccctactggcaggaggtcaagattcctttttccaaatttttcttctctaatcgaggaagaatccgggatgttcagcatgagcttccgcttgataagatctcttctataggattcaccttggctgataaagtggatggtccattcttcctggagatagattttattggcgtgtttactgatccagctcatacagaagaatttgcctatgaaaattctccagagcttaacccaaggctttttaaataaagatcatatggtagttttgttttactaatctaagggtactagcatctacaatgatatagacaaaataaaatatttctttaatggcaaaaa

SEQ ID NO: 358526 - DNA, 680 bp, Homo Sapiens
  misc_feature (144)..(144): n is a, c, g, or t
  misc_feature (178)..(324): n is a, c, g, or t
agcggataggctcggggaggtaagcggcggcaggccggcggttggtgtgtcccgggtgtggggaggcgacagagccctggcacttgagggttgagggggcctcccaagcgcggcgaaccgtctagcctccggagccaggccgtngagtgcgggaggtatacgccaaggcgaaagaatnnnnnnnnnnnnnnnnnnnnnnnnnnnnnnnnnnnnnnnnnnnnnnnnnnnnnnnnnnnnnnnnnnnnnnnnnnnnnnnnnnnnnnnnnnnnnnnnnnnnnnnnnnnnnnnnnnnnnnnnnnnnnnnnnnnnnnnnnnnnnnnnnnngaattgggctatttgctgaagcttcttggtggcccttgctagcccaggaagaaacttacattttgatttttttgtaccatggctttggttcacaaattgctgcatggtacttattttctcagaaaattctctaagccaacttctgccttgtatccatttttgggtattctctttgcagagtattccagtagtcttcagaaaccagtggcttctcctggcaaagcctcctcacagaggaagactgaaggggatttgcaaggagatcaccagaaagaagttgctttggatataacttcttctgaggagaagcctgatgttagtttcgataaagcaattagagatgaagcaatatacca

SEQ ID NO: 358527 - DNA, 1511 bp, Homo Sapiens
  misc_feature (1413)..(1413): n is a, c, g, or t
gcagtgctttatgtttggggagttggagcagggtatcttttcatcaattagaaggaaagtttgaaacttctgattacctttatgttggtttctcttattatttgtctcttgctagatctgctaaaccaacccagcttgctcagagatctcatattgaagcaacatacaggcaatccacatctttctttccctttgaagtatagtcattggatgggatgagggacagggcctgttgggttcacagggccttgcactgcatgggcacatacttaaaagctcttgtgcatggaatccctgtctgttagccacaggcctctttagctctatacattcaaaataactactgtagtagaaaatagataagcttcagctgagttggcttttgatagtggctaatatgatttgggaatatgtcagtctacagaacctgcatcctgtaaaaacacctttggggtagacgataaaagtcatttttaaggcaaatacttaccatgtgactttttattaccaaatgcatcagtagtggagctggtatgttgtttcataggatggaaacattagaagtccagagaaaaataaattttaaaaaaaggtggaaaagttacggcaaacctgagatttcagcataaaatctttagtatgaagtgacagaaagaagagggaggctggttctgttgctcgtatcaataggttatctgtgtccctcatcttggtgttacagtgctatttctgtacacattatgaatatgtggttgacccctcctgtcaaatgtaccacccttttccaacaaaattccttcaaaatctcttaatgccaacaacaaaagttcccttcttgttataataacctcatttacctcaactcctaccatttttcacttctcttggaggaagaatttttagcttttgtctttaaaaaagccaaaattttcgaagttcatacaaaggcccttgatggaaaccttgactgggagccgagccttttttttgcaaaccgctttttccttggaaaagtttagtcaaccttttccgtttcgtgaaaaacacccctttacgattcagcactccacccgcccggggggcaatagacccccttacaagcaaggggccttacatgtcatccaagttaacatacctctatattgttataaacaccgattgtcacacctcttggttatttatttcagcccgtaaacttcctctgaacacaacctctttttcgaattgctatatattctccctcgagaagtttgggaaaactaagacacttccgaatatctttcttcctcttactctcccacacccttactacttgcgagagtgagagcaaattgccaaacaatttttatactatttacacgtataaacaaacacactactctcgccacatttacgcaatttctccgcacgcangtgcgcgacgcgccaacgagatattcatctcacacaacattcctgttcggcgtaaggttcagtcctagcaacaatcttacactctggcgcggcagatg

SEQ ID NO: 358528 - DNA, 597 bp, Homo Sapiens
actaggactactttttaccaaaagagaagcagtctgggccagatgccctgccagggggacatggacccacgtgcttgaggcctggcagctgggccaagacagatggggctttgtggccctgggggtgcttctgcagcctcgaaaaagttgcccttacctcctagggtcacctctgctgccattctgaggaacatctccaaggaacaggagggactttggctagagcctcctgcctccccatcttctctctgcccagaggctcctgggcctggcttggctgtcccctacctgtgtccccgggctgcaccccttcctcttctctttctctgtacagtctcagttgcttgctcttgtgcctcctgggcaagggctgaaggaggccactccatctcacctcggggggctgccctcaatgtgggagtgaccccagccagatctgaaggacatttgggagagggatgcccaggaacgcctcatctcagcagcctgggctcggcattccgaagctgactttctataggcaattttgtacctttgtggagaaatgtgtcacctcccccaacccgattcactcttttctcctgttttgtaaaaaaa

SEQ ID NO: 358529 - DNA, 211 bp, Homo Sapiens
caaaattgactttaaaaataaattagattgtgttttaggataatttactttcctgatgacctcaataactttctttttccagcatattgatgttttccttttaaaactgtgaaacctgcccatcagggccaaataaccaccttcagccatcattttctgatgtaccattataccaccaaaactgtttctgttttctgtgatgtacagttac

SEQ ID NO: 358530 - DNA, 1236 bp, Homo Sapiens
tctaagatagaggtttggtcaacagtgcttaataataaataagaacctcctgccattctaattttcctgctgcaccccatcccccacacacccctcacgaacattgatataagcagtattaacacagtataaagaatgttcaccttgcatatgtcatttcaggcacatggattcaggagaagcacagttgagtggaagaaatggtagacttgtgaggcttgccccaggccttgtgtacacgcaataagtggtgagccatgggtctctccgtcagcgcctccctccccgccaccacttcaggccaacaatttaaggtgctgagttgtaaggctcctccattgtcagtacagggctcgcctttgtagccctgatcactaccagtacacttttcaagacaactgagtatttttgtatgcctttgccttccctttgtccatgaaacatgaagagttgtttatggttcttgacttctctgagcagagtgtctgcatctcttggagagttacacatttcttcatgagccatttttctcattcttagatgcacctgtttttatcctttgcagaccatcttctgccttcttattttcctgtctgtcaaagacagaaattacaggagatagggagggttaaattagcatctctttcaaaagatgtatgtcagaatttcctttgcacaccaagaactggagcttagagccccactattctctaagccaggttctagtgccttacactccagaatgtcagatggtgggtgcagatgggaagaaagagaaaagttcatctcggtgtgtgggttcccatccgccccacatagcctctccttcttcggaacaatgggcgtggggtagaaagctctttcagtgaagggtgttctagcagctcagttaacactttactctccagtcaacacttgggacatataaaaatgccattgtaactactgtagagtcctgtgactcatcgtttgtgtttgtcagtgtgcagttcagcttagcccttccctgttcctgtgtagttacaatctggccctgaagacatccgaggcacttcagtaagtgggatcttttctagagatcctgggtgactttgggtgcacagggtgaccgagcatttctgcccctgtgaatgtggcactaacactgtgcactgtctccaccaagcaaggtttccactgagtttcttctcatgttactgggtttgtaaatgaataaacacattttaactactcaaa

SEQ ID NO: 358531 - DNA, 1319 bp, Homo Sapiens
  misc_feature (18)..(18): n is a, c, g, or t
  misc_feature (84)..(84): n is a, c, g, or t
  misc_feature (120)..(128): n is a, c, g, or t
  misc_feature (795)..(1048): n is a, c, g, or t
  misc_feature (1071)..(1095): n is a, c, g, or t
caaatttaaattttaatnatctccctgcccagtctttgctcaatgggagatgacaggacccaacttcctcaaacgtgatttccnccatttcattgaatgacatttatatgccacttatgnnnnnnnnntactgctgtgaaagaaatgtactttaaagtttgcagcactaccatgcagggtacatggagaataggcatatagccactaggctacatgaacacgtcacgtttgtattttgtgttggcctatgtataagcccaatctagcatgtttgagggcatgtgtgagagtaggtaagggagctgtaagttacattcaggtgggaatttagggctttctgcacaaaaaattctaatttctctgtccttttgctatgttgcatctcccagtgttgacaggttagtctgcatgattaataactgagcagctgtagagccatgccagtaagtctccaattcctgaacgtggccacatttgtcttttgatgtgactttcaaccacaagccacaaagtaagtctttcactaggctccgttgacttcagtctttatataagggtttcaaggtattttgcagtcaagaatcaatggcacctcgcaactgtcttatgaagtaggtaaaacagctccatcttaaatacgggacaaaagttcgaggacttgaccaaggtcacacagggagggtcccaccaaggcagggagagagaaaggggatgctgtcagctaattctcatggtccactcttaaccaaaacatcatttaaaaaatggggctggctcggcacggtggctcacacnnnnnnnnnnnnnnnnnnnnnnnnnnnnnnnnnnnnnnnnnnnnnnnnnnnnnnnnnnnnnnnnnnnnnnnnnnnnnnnnnnnnnnnnnnnnnnnnnnnnnnnnnnnnnnnnnnnnnnnnnnnnnnnnnnnnnnnnnnnnnnnnnnnnnnnnnnnnnnnnnnnnnnnnnnnnnnnnnnnnnnnnnnnnnnnnnnnnnnnnnnnnnnnnnnnnnnnnnnnnnnnnnnnnnnnnnnnnnnnnnnnnnnnnnnnnnnggacagagcaagactccgtctcnnnnnnnnnnnnnnnnnnnnnnnnngcggggcgggggtaggagccattggttcttagctgaagtcagctggggacattgttactgtttgtttcgcactggtttaggatcaggtggttctactgggactagcaatttaggacctatctttggctggcttacttgaattcaatttaataattgctgccctttttttgggaaaattgctcaacagggtggtgaaaagaaaaaatggggggtttcaaattcag

SEQ ID NO: 358532 - DNA, 1856 bp, Homo Sapiens
  misc_feature (877)..(891): n is a, c, g, or t
  misc_feature (1724)..(1724): n is a, c, g, or t
  misc_feature (1728)..(1728): n is a, c, g, or t
gggacacatctaagtttgctgggggccttcatttctcaggaccaaaggtggaaggaggtgtgaaaggaggtcagattggactccaggctcctgggctgagtgtgtctgggcctcaaggtcacttggaaagtgtgatctggaaaagtaacattccctaaaatgaagatccccaaatttactttctctggccgtgagctggttggcagagaaatgggggtggatgttcacttccctaaagcagaggccagcatccaagctggtgctggagacggcgagtgggaagagtctgaagtcaaactgaaaaagtccaagatcaaaatgcccaagtttaatttttccaaacctaaagggaaaggtggtgtcactggctcaccagaagcatcaatttctgggtccaaaggtgacctgaaaagatcaaaggccagcctgggctctctggaaggagaggcagaggccgaagcctcttcaccgaaaggcaaattctccttatttaaaagtaagaagccacggcaccgctcaaattcattcagtgatgaaagagagttctctggaccttccaccccgacggggacgctggagtttgaaggtggggaagtgtctctggaaggtgggaaagttaaagggaaacacgggaagctgaaattcggtacctttggtggattgggggtcaaagagcaaaggtcattatgacgtgactgggagcgatgatgagacaggcaagttacaggggaatggggtgtcccttggcctcctaaaaagtcccgactgtcctcctcttctaccaatgaaagtgggaataaggttggcatccagcttcccgaggtggagctgtcagtttccacaaagaaagagtagcaggcctttgtatgtgtgtacnnnnnnnnnnnnnnnacaaaacatcagccttgggtggtgtgttcctatataaactccaaagggaaacacaccgactgcctcagcaatcatgcaaagaccttgcctggcccggtggcaagcgctgaaaaaccgaccgcctgtaggctcctggaactataccagataggtaaagagttccaagttcgtccagcccatgtgcaaaagtcaacagtatttgccttaagatttcatatatatatatttttttgcattgactgctgagagctcctgtttactaagcaagcttttgtgtttattatcctcatttttactgaacattgttagttttggggtaatggaaacccactttttcattgtaatgactttgggggcttttgttagtaagggtgggtggggtgatgggttgcagacggaggtcaggtcttcctctttcctgagactggatctgttcaaacagcaaacgcccacagatggcccagaggtggtggtagtcagggtgtgtgggtgtttttagggttctttagtgttgtttctttcacccaggggtggtggtcccagccagtttggtgctgacggtgagaggaaattagaatctgtttgcaaattgtccaacccaccccctcaacatgaggggcttccattttctgtgttttgtaagggaactgtttccttcatgccgccatgttcctgatattagttctgatttctttttaacaaatgttatcatgattaagaaaatttccagcactttaatggccaattaactgagaatgtaagaaaattgatgctgtacaaggcaaataaagctgtttattaaccctcgaaaccacaaccccccatcgccaccnattntttccttggccgggccgccttccgggcccttgaagaaagcctttctaaacccatttcccttggggcgcccgggggccccagaatgggtaaacgtgaacatgggcccatgaaactggttttcttaaaga

SEQ ID NO: 358533 - DNA, 1271 bp, Homo Sapiens
  misc_feature (825)..(826): n is a, c, g, or t
  misc_feature (829)..(956): n is a, c, g, or t
  misc_feature (1025)..(1035): n is a, c, g, or t
  misc_feature (1090)..(1100): n is a, c, g, or t
  misc_feature (1137)..(1190): n is a, c, g, or t
  misc_feature (1207)..(1218): n is a, c, g, or t
tgtgctcgggagccctccagtctctgcctttctcacacaaggcgtctctgggaaggcagtggattgttggtctgcgtggaacttctcaggtggacaccagagcatggaacacatccacgacagcgatggcagttccagcagcagccaccagagcctcaagagcacagccaaatgggcggcatccctggagaatctgctggaagacccagaaggcgtgaaaagatttagggaatttttaaaaaaggaattcagtgaagaaaatgttttgttttggctagcatgtgaagattttaagaaaatgcaagataagacgcagatgcaggaaaaggcaaaggagatctacatgacctttctgtccagcaaggcctcatcacaggtcaacgtggaggggcagtctcggctcaacgagaagatcctggaagaaccgcaccctctgatgttccagaaactccaggaccagatctttaatctcatgaagtacgacagctacagccgcttcttaaagtctgacttgtttttaaaacacaagcgaaccgaggaagaggaagaagatttgcctgatgctcaaactgcagctaaaagagcttccagaatttataacacatgagcccccaaaaagccgggactggcagctttaagaagcaaaggaatttcctctcaggaccgtgccgggtttatcattgctttgttatttgtaaggactgaaatgtacaaaacccttcaatgggatgtgtgttttattaactgcttcaccagtaaattttgcatgatggctaagctaacataaaaaaagaataataataacttggaagttttagtttaccnncgnnnnnnnnnnnnnnnnnnnnnnnnnnnnnnnnnnnnnnnnnnnnnnnnnnnnnnnnnnnnnnnnnnnnnnnnnnnnnnnnnnnnnnnnnnnnnnnnnnnnnnnnnnnnnnnnnnnnnnnnnnnnnnnnaaattggggcgcccccccccccccaaaaaaatttttaaaacctttttttggggcggggccccccaaggnnnnnnnnnnngggcaaaattgtttcccaaaaaaacccgggaaaagaaaggggttgggtttccccnnnnnnnnnnncccccggggaacacgaaggtttttaaaaaacaccaannnnnnnnnnnnnnnnnnnnnnnnnnnnnnnnnnnnnnnnnnnnnnnnnnnnnnctctttattataatttnnnnnnnnnnnngtggtatttttggggaagagggggggaaaatttataaaaaccttcgccgcaca

SEQ ID NO: 358534 - DNA, 485 bp, Homo Sapiens
cgggctacttgagggtggagggtagtaaaaaggagagcagtagaaaaaataactaatggttattaggcttaataccttggtgatgaaataatctatacaacaaacccccatgacatgacacctacaaaacaaaccttcacatgtacccctgaacctaaaataaaagtctaaaaaaattaataaggaaagatttctacaaaatctacaaaaataactgcatttctatatgccagaagtaaaaataattttcggtgatatgtgtccccacccaaatttcaccttgaattataataatccccacatgtcaagggcaggatcctgttgagatcactgcatcatgggggcagtttcccccatgcagttctagtggtagtgagtgatttcgcacaagatctgatggttttataaggggcttctcctttcactcggcacccattctgcctcctgctgccctgtgaagaggtgacttctgccatgattgaaag

SEQ ID NO: 358535 - DNA, 641 bp, Homo Sapiens
  misc_feature (260)..(260): n is a, c, g, or t
ggaaagagcatgaccgataaagaaaacagttcctttctgatggggagcgtctgagtgcagatcatgaggctctttctctaggtttaattcttttccatggtgaccggacttggtgtcttgtagcctggttacgaagtgggacgttgagcttctactgacgatgccctgcatggaccagctgggatctggctggggctgccctgtgtccctaacgacccataggcaatccatcttcttgtgtcagcaatttctggacaccncactgttttccaccaagagctgaggtggcaacaactcagtgagcaataaacaaaatgacacagaaatgcacagtgttgttatgaaggagcctgtttacctgtgttcaaaatctggcaccattcccttgagcagggcccgctcaggagggaccaggtctgccagtttctgtgcctgcagagagacgaagccccacgagccacaccctactctacaagaggaaagggggttggatgggaagaatctattttgctgatttggaaagcacacagccgacctacaaacctcctgtgatggtgtttcttcggatgtgtaaaataaggctttatttgtcaattccgctgtaaaataagcattgtccgagtaaaaacagcagcaacaac

SEQ ID NO: 358536 - DNA, 429 bp, Homo Sapiens
ccaagggcgagaatggaccctgatggacttggacatggagctgtccttgatgcagcccttggttccagagcggggtgagcctgagctggcggtcaaggggttaaattctccaagcccagggaaggaccccacgctcggggccccactcctgctggatgtccaggcggccttgggaggcccagccctgggcctgcctggggctttaaccatttatagcactcctgagagccggactgcctcctacttgggcccggaagccagtccctccccctaagaccccgcgcctctgaaggggcttggaaccagtccgccgctgcacatccttcttggcttcctggcgccccctatcgggggtgagcgaagcccccactactaaatggcctctctccactaccccgactatccctgcacataaactccgtttttttt

SEQ ID NO: 358537 - DNA, 683 bp, Homo Sapiens
  misc_feature (629)..(629): n is a, c, g, or t
gtatgttgcagagccagaatttgaatccaggtctttttgcctccatggctagtccttttatctccatgggatacagtctaaaatccttagtttgaggttcaagactatcactaataagagtcttactcatctacttcagccatatctctttccgttcccacaaaccttagctcccacatttggcaggtccttgccaaggagcacaggtaaagtgtctctttccttttaatggctcaccatggagctgtagctaaatttctgtgctcttacccctttattcatgtagttcctcctatcaggaatatcctgcccactctctgcttaactatgacaagaggtcatctgtccaaagagaaagaagagagtttgtggatttaggagaaaagaaaagactccaaatactgctatgggcatttatttaaaaagagaaatgaccaaagaggttaacaagtatttagatgaagctgggcagttgtagtccgtggtgctcttggtctgcacaaatcttcctcttcctccagcagtgctgtatggatgttgttgaatgttgaggtctgtctgcattttctcattttcatgccaagtcaatcacgggatctggctgtcttcctttctgtcctacctatatntgctgggttctctctctttccttgcagcgtaaaataaaaattattccccacaat

SEQ ID NO: 358538 - DNA, 514 bp, Homo Sapiens
caatgagttagatccagtactaaaagatctccttccaccaacagacgcccggttccggccagatcaaagatttttggaagaaggaaatttagaagctgcagcatcagagaagcaaagagtagaggaactccagagatctcggagacgatatatggaagaaaacaatcttgaacatataccaaaattttttaaaaaagttattgatgccaatcaaagagaagcctgggtttctaacgacacctactgggagcttcgaaaggaccctgggtttagcaaagtagacagccctgttctttggtagactgggaatgtagagctagccaacatatcacattctgaatgaataaataactatgcacaattatgtttcttatagctatgtgtggtttctgggtcaactgaaaacctaccatttgcttttctattcatctttataatggactttcagaagtgcattagacaaggcccctaaccactttgggatcctttctgttttgctgcaaccatattcctt

SEQ ID NO: 358539 - DNA, 532 bp, Homo Sapiens
  misc_feature (414)..(433): n is a, c, g, or t
ggacttttaaaaaggtgcgcacagcttctgataaatttataactagacttaacctaatcatgtctcgttccagttctcttttctctgagcccttttcaaagtctcctctctttctcctgtcatccttttcctttcctgtccgtgtatctccgtttcttcaacatgacaagcatacagacttgaacacccctccggtgttcttccgagaactgtgaagtccatgttcatccaaatgtaaccaaaaaagaagtcaccctacatgtctgaaaaactgttgcttctcctctgaaacttcaaactccaacgatttccaaatacaatagctttgttttctttagttctgtaatggataatgtttaaaggaaaactttacaccaggcttctggttacactagaagtcaagcccattagggnnnnnnnnnnnnnnnnnnnnggttgttgagaagtttcaaaaatcagttttcaagctgtggtctttcaaacacatctgcacataagtcacacatttcaataaagcattttcaagactgtt

SEQ ID NO: 358540 - DNA, 429 bp, Homo Sapiens
gggtccatgaaatcaatgaaatctttgtgtgatgtggatcatagtttctcaggctcccttagataattgcttatgaatattgttctaactctgtgtaagaagagtagaaatctttgctaatgttagaaggtttgtattattgatccagaatgcattttgctagtttccaatggatgggagagtaaataatgctgcattcacaatttaataagttactttcccttgagccttaaggtaactttttctttcctgtcaactacagcactgaagttatagtaagtgaatgagattatcagttttcagggttggttttagagtactgtaaatcaattagctgtcttcctaaagagttacaactcccattcagtatactggataatgggtgtgtgggtggggctggggagggcgggagatagtttgtagaaaaga

SEQ ID NO: 358541 - DNA, 1703 bp, Homo Sapiens
  misc_feature (477)..(489): n is a, c, g, or t
  misc_feature (1183)..(1263): n is a, c, g, or t
  misc_feature (1304)..(1391): n is a, c, g, or t
ggattagactgttctttcttcatcataatttgagatacatcctgagtatgactgtctaaccctttctgtgtggcagaaaaatatgttttccaggtagtttttactactacagagagtctgtaaataagtgctttaaaaaaataacaaaccaataagatatttgtctcctatataaacattctgtgtatttagcacttgaaaatcaacaaatccagaatttaaaaaaatgccacagacttttcaaagcccaactgtacttttttgagaatttgtccgtacctactaatatgccttattcttcttcacctagtgttttaaaagtcctgggtagaaagagttttagaaatgtaatcagttgttcagcttcaataatatagagatctaacatagtcagtcctcaggccccctaaagaaacaagcaagaaagtgagggccatcactagggttggctttggggagggggggaccacataaccnnnnnnnnnnnnnaagtgtgaaagattagtgccttttggcatacttttgattttagaggatatagtatcggcattgacaaatcacgtagaaacaaagaatgctatagatgacaacagtattaaatgttactcctgattctgcagaacagcttttgaagatactggggggtatcttcaagcctcagagcagcttgtttcagatagaaattctctatgggttgaaatgccaaaaacagaaaacatgatgttgactcatgtaatttagtccattttagcagagcctttagtgttaacaccagtggcgaggagcattgcatattctctgtcagcagcagcactcccacaccaggtggttctgggctctctgtaggctggtcctagtaggtgacacccggcaacacccctgttggacaggattgattgttcgcagtcttagaccaacacttcagtcagaaatgttactgggaggaggaaaggaaaatcactttttttcctccatgtggaaatgaggagagaggaaagtggattgcaaaccaaaatgtgagtcagtgtgatgaagcagtggctctgtcatctcggcctttatccaataacaaaccagcatctcttaaaggcgcttttggcctagacacccctgaagtttggatgaagtctggtggattccctgtctgttgtatttctgtgtgccggggtccggaccccggcannnnnnnnnnnnnnnnnnnnnnnnnnnnnnnnnnnnnnnnnnnnnnnnnnnnnnnnnnnnnnnnnnnnnnnnnnnnnnnnntgaacggtggcaagctagaaatctagaaggaaagcaatacnnnnnnnnnnnnnnnnnnnnnnnnnnnnnnnnnnnnnnnnnnnnnnnnnnnnnnnnnnnnnnnnnnnnnnnnnnnnnnnnnnnnnnnnggtaaaaggaagagacagagggagagagagaatgacagtggtgtataatttattcccttctgtggttcaagactcagtctccagccccaaaaggatcctaaaagtaacttgttgaaaataaatcccaaacaagaaccaacatagacagctatctgccctacccggctgttctacccgctcagcctgcgggtctttcagtacctggtggggccgcaggggcggggcgcccctggacaccgccactccacgtccccagtgtcaagtcacaaaaggcaagctcatcaaggcaaatgggttctaggagcccaggtc

SEQ ID NO: 358542 - DNA, 1296 bp, Homo Sapiens
  misc_feature (70)..(80): n is a, c, g, or t
  misc_feature (812)..(847): n is a, c, g, or t
  misc_feature (854)..(1165): n is a, c, g, or t
  misc_feature (1181)..(1208): n is a, c, g, or t
ctcccctctagtacccaaggaatatcgtatctcagatgcatggcctactatcacactgggtctgtaaagnnnnnnnnnnntgcatggccacagttccaggtagctggatttagtggatttatatatgacagtacagtacatcatcagtttcacccacagggcagaacttgcctccattcaggcatctctttacaactggcagcaatgcagcattaagggtttttagccaggacctgctgtttgcagtcctgcaccttgtagtgttactctgggtgttgcacactccatgattactagaagacaaacacctaaggcatgcaatctgcttggagtgcatctatttacatgaagctgctcacgggagctggtgattcttccagatatgagtttcgtaggttggcaaagagttatcacaccatcagagattttaccaatggaaagagaatagctgaagattatattgcaatgttattgtgaaacatttaactttcttaagtttaaagtgtactatctcctgcagctcaatataaacaacgatgtatttctttgtagcagtatgtggagtcagaatgggttttccaatctgatttaatccctgagcagctatgttaaaagttaactttttaaaaaagcccaataaaaaactaaatactgtattaaaactctaccacaatgttacagggataaacttatttctgtacagaaacattaaagctacttagaagctgtttacatcctttgcctctcagaaaaaaaatatacatttccggaaactgttcaggtacttaagctggacataaattaccccaagnnnnnnnnnnnnnnnnnnnnnnnnnnnnnnnnnnnngagaccnnnnnnnnnnnnnnnnnnnnnnnnnnnnnnnnnnnnnnnnnnnnnnnnnnnnnnnnnnnnnnnnnnnnnnnnnnnnnnnnnnnnnnnnnnnnnnnnnnnnnnnnnnnnnnnnnnnnnnnnnnnnnnnnnnnnnnnnnnnnnnnnnnnnnnnnnnnnnnnnnnnnnnnnnnnnnnnnnnnnnnnnnnnnnnnnnnnnnnnnnnnnnnnnnnnnnnnnnnnnnnnnnnnnnnnnnnnnnnnnnnnnnnnnnnnnnnnnnnnnnnnnnnnnnnnnnnnnnnnnnnnnnnnnnnnnnnnnnnnnnnnnnnnnnnnntgagaccctgtctccnnnnnnnnnnnnnnnnnnnnnnnnnnnncaaaggatatccagagtctgcactatagtaaaataattaataaaaacaggaacattagatatgcaaaatacatgcagagggaacaact

SEQ ID NO: 358543 - DNA, 1766 bp, Homo Sapiens
agatgaagaaaatgtgtgtgatctttaataacacatccctatagaaagtggataaaagatataccaaaactgtaatacagatatatacaaatataggtgcctttttgattactcttgtttgtctagtatggtcttggaaagaaaaccaagcaagcaagttgctgcctattctatagtaatattttattacacatgattgatatttttgtggtagggaagtgggatgctcctcagatattaaaggtgttagctgattgtattttatctctaaagatttagaactttagaaaatgccgacttcttccatctatttctgaaaggttctttgtggatttatatagagttgagctatataaacattaactttaggatttgggatttaaaatgcctattgtaagatagaataattgtgaggctgggattcactacacaagatgaacttcacttcataaattaattataccttaggcgatttgcttctgataatctaaaagtggctagatgtggttgtttggttaaggtgatatggaggtgggagagcttttagttaagtaagaagctatgtaaactgacaaggatgctaaaataaaagtctctgaagtattccatgccttttggaccctttcctcgcaactaactgtcaactgttgatcaaaaaagtcaaggcattgtatgttgcttctgtggttattattctgtgatgcttagactacttgaacccataaacttggaagaatctttgagcaaattttctcagttgtctgtatgacttcagtatattcctgggaatgccataggattttttgtgcttgatacatggtatccagtttgcatagtatcacttctttgtaatccagttgctgttaagaatgatgtactttaaaggaaaagagaaaactgcatcacagtcccattctccagtgtccatgcaatgaattgctgagcatttaggaagcagcaccaagtctattacaggcatggtgtgaaacttgatgtttgacctgtgatcaaaattgaaccattgtacagtttggcttctgtttgcttcaaaatatgtagaattgtggttgatgattaatttgcgagactaactttgagagtgtaacagttttgaagaaaacattgaatgttttgcaaatgaaggggcttcacggaatgttacaatgttactaatataatttggcttttgttatgcaaattgttaacaccagctattaaaatatattttagtagaaatgctttaattcatatttttttcctctacactgtgaatctttaagccttggtggactagagcaacatcgtgctgcccaaaggactaacctatgcaaactagttcacattttagtggatgtcgcagttaatgtgtaataagacattatttcccctgcataatgtacaacagcattgaaatgacacattaagcctagcatcacattgtatagtacagtcactcacaaacccttcaaggctaccctaatcattaacattaatatttgtttaaaagcaaatcaccgatttatctattgaaactacttaaatgacggcaaaccaggaatgacagatggctgtgtcagcaatggctttaatgtgttccctgcaagtggtctcctatgatagaactgcgttctcaaatgcactctcttcagggtcttaatattctgtgttttctctctgtatttgtaaaacattataacacattaatttcctatctctacacatttggtttgcttaaataaatgcaggatataaaaaaaatggttcac

SEQ ID NO: 358544 - DNA, 1031 bp, Homo Sapiens
  misc_feature (923)..(923): n is a, c, g, or t
gtagcgaggcctgggtggcgaattcggcacgaggctggggttgcggcgcggcggcgaggaccagaccgggggcggggccggtagtgggagtgcggggcgcgcggtgacagcgcggggttggcggcgtgggacccagggggcgacagaggcagcagcagcccgaggcctgaggagaggagaccggcggcggcggcaatgctggagacccttcgcgagcggctgctgagcgtgcagcaggatttcacctccgggctgaagactttaagtgacaagtcaagagaagcaaaagtgaaaagcaaacccaggactgttccatttttgccaaagtactctgctggattagaattacttagcaggtatgaggatacatgggctgcacttcacagaagagccaaagactgtgcaagtgctggagagctggtggatagcgaggtggtcatgctttctgcgcactgggagaagaaaaagacaagcctcgtggagctgcaagagcagctccagcagctcccagctttaatcgcagacttagaatccatgacagcaaatctgactcatttagaggcgagttttgaggaggtagagaacaacctgctgcatctggaagacttatgtgggcagtgtgaattagaaagatgcaaacatatgcagtcccagcaactggagaattacaagaaaaataagaggaaggaacttgaacccttcaaagctgaactagatgcagagcacgcccagaaaggtcctggaaatggagcacccccagcaaatgaacctgaagggagcgccagaagttttttgaggaagccctcccaccaggacatggaccagtacctggccactgggctacctgcagattgcagagcggcgagagcccataggcagcatgtcaatccatgggaagtgaaccgtggacctgctgggagcanaatgggacctggatgggacatatcgggaccaaggaagggcccctggaaccgcctttcctggaaactcccggggaggggaaaaagaagaaaacacctgggggggcttgg

SEQ ID NO: 358545 - DNA, 1012 bp, Homo Sapiens
gttgctttatagaggcagtagatccaatgtatatcttgcttaggccatcagccaaacaagactaataggcttgactacaatttcttcggaaaaaagctgctttctgggcttcagcctcacttcctttgttctacatcccagaagatgcatcgtgagggcatgctggcctggtaactggaggcttcacttgaccagcactgagcttctgtgtcactcattcaggtctcacatccatgtcatctccaggactcaccgtagtcagagggatccctctgaactagatgcagagcacgcccagaaggtcctggaaatggagcacacccagcaaatgaagctgaaggagcggcagaagttttttgaggaagccttccagcaggacatggagcagtacctgtccactggctacctgcagattgcagagcggcgagagcccataggcagcatgtcatccatggaagtgaacgtggacatgctggagcagatggacctgatggacatatcggaccaggaggccctggacgtcttcctgaactctggaggagaagagaacactgtgctgtcccccgccttaggtagggttgacaaacttgcattagctgaaccagggcagtatcgatgccactcccctccaaaggtgagacgtgagaaccatctgccagtcacttacgcataaacccccaagctcacagccagctcctggctccctaaccccacggttccacacggctgtgtggcagctgcaacagtggtgtggttccgtcatgaattcttctcaaagatttgacatgctccactccggtaactttggtgagttgagagctttcttgtttgttttccctcctttaccacccagaaatccatttgagtctgctccttgtgggttaaggactggcgttttgcaggggaggtgccggacttctcctgccgggggctcacgggggaaactctttcccttctttcgttgcgacaagggcattttaaggggggcggtggccctggccaatgggggcca

SEQ ID NO: 358546 - DNA, 1045 bp, Homo Sapiens
  misc_feature (132)..(175): n is a, c, g, or t
  misc_feature (198)..(218): n is a, c, g, or t
gggcaatcataaaactgacagaacagactctgtagcaataagataccaaattccaacctaactctggcatagcatcacatgacagataggagacctgagggaaatacaaatattttacccccaaatacatgnnnnnnnnnnnnnnnnnnnnnnnnnnnnnnnnnnnnnnnnnnnnagacagagtgagacttcatctcnnnnnnnnnnnnnnnnnnnnngttttagagcaggaatgaaaggaagcaaagtacacttggaagagggtcaagtgggcaacataagagatccaagtgccctgttcagccttgggcttggggttttatacattggcatggttccggggtttgtgtttttcttcccttaattttccccttggggcaggctgtctgcatgcacagtgacctgccagcacttgggaggggccgcatgtgcagtgcgtttactgaagttgtgtgtatgctcgtttgaggcatttttctcttaccagtcaagcattcccagaggaaggtcatataccagttaaactcccattttgcctcttagtgcacatgtttgaaccgactcgcctagctcctgagatcttatcaggaagctgctgatcactagctccaggtattttctatctactgggagactgcaggtccctggaaccagctgcaaccaattatcattttagcgacacagtttaacaactgcctgaccatcacctgatggttgcctgacgacctgataggggccctctcctgccctgctcagttctgcctaactgcctactctaacatactgatttatgtcttggcctgcaacttctgtctccctaaatgtgtaaaaccaagctgtaactgaccacactttctcaggacctcttgggattgttctcccagccatggtcactcatattggctcagaataaacctctttaaatatcttgcagagtttggttttgttcatcaacatggttgtgaatatggattgtgtttattggttaagagataattaactttgaaaagttaatgtctcattaaaataaaacataattactttg

SEQ ID NO: 358547 - DNA, 855 bp, Homo Sapiens
ggagtggccagtagggacttgcatagtgaggtgggaagcagttctgcgattatacggggtgtaggaaagtgatgaaggtttgtggctaggccctgccgaaggtgcagggcttgagaggcttactcggctagagtggtaaacttcaccagacttccaacaaaaagcttggatagcttttgtttctgactatactgttgtggttgcagcccctcacagaatggcagaacagtatgtgaaagcgtggtaacacctcggtttcagtgcaccatgtgtttgctttgtgaaggtgaagaatatgttggtttagagaaagaaattggatgtaattttatgcaatttacttttaaagacaaacataactatttagcagagaatattttaataaatgcaaaacaacagctggactgctgtacatcaaggacagattaactggaaaacatatgttccttatgtgtgattgagagccattcagaaaagacttcctttgtgttcagcctatacttttccatatggtataccttgaaaaaaattagcacaccatggttatttttctaccttttataaaagacagagcctgtttactcatttagaagatagagaaaattggtctaaaattgaacatcctagattcacactcccaagtcacttaaggtgatttgatggtgaggaaaatgattgacaaagcccaacaatgatctcaggaattacattttccaacagaccaaaaaatgttttcatgtagcagcaatgcagatttggtgaatatttaatatatattttagtatgtatttcactttatgactgacaattaaaaaatattgtttggccaaatagtaaacacccttttgaacccaa

SEQ ID NO: 358548 - DNA, 2040 bp, Homo Sapiens
  misc_feature (29)..(29): n is a, c, g, or t
  misc_feature (58)..(58): n is a, c, g, or t
  misc_feature (93)..(93): n is a, c, g, or t
  misc_feature (118)..(118): n is a, c, g, or t
  misc_feature (126)..(126): n is a, c, g, or t
  misc_feature (217)..(217): n is a, c, g, or t
  misc_feature (243)..(243): n is a, c, g, or t
  misc_feature (247)..(247): n is a, c, g, or t
  misc_feature (277)..(277): n is a, c, g, or t
  misc_feature (288)..(288): n is a, c, g, or t
  misc_feature (346)..(346): n is a, c, g, or t
  misc_feature (350)..(350): n is a, c, g, or t
  misc_feature (577)..(577): n is a, c, g, or t
  misc_feature (582)..(582): n is a, c, g, or t
  misc_feature (645)..(645): n is a, c, g, or t
  misc_feature (659)..(659): n is a, c, g, or t
  misc_feature (726)..(726): n is a, c, g, or t
  misc_feature (735)..(735): n is a, c, g, or t
  misc_feature (1041)..(1111): n is a, c, g, or t
aaagttgtcagaggttccagtcatgacgnaggtctgtgaagtacgtggtactgtgggnggccctcgttgactcacgttgccctgcatccaacncccgtggatggactggaccttagcnagacgtcnaggagcggcggtagggatgcagtgtcggccgggaggtaccggggcatggcgccgtgctgctgcctaagccggtgcgacccgcattcctacntctgccgtggtcactgcgtccggcanatangcctggaatccaaccgccgatggcgtgcgntgtcctctcanagcatgccggcgcagtaccggcctacggcacgatacggtatcgtgtgctcgtggagangganacgcagcggagcgcgagacgtgtcgatcatggtgagaagtcatgcgcgtaggtggggtgtacgtcgttgggctgcgatagcacggacgggccgcgctgacagggtcgagcgcgtgcgatagttatacacgctgtcgtgcggcatgccgtggcggccatgttgatattaaagcaagtagacgtagacgatatatgcgggggaggcgccaggtctcactgcggaagacnagtcngcctcgtcgccgtgacgcgccaggacgcgcgggcgtcataagcagcgcagaatgtagcagtgncgtgcgtgaggcgngggagcggacgcagcgggggtgcagcgtctggtaggcaagtgcggtgcgtggcggtgacgagggagngagcgcgcncgccggacgcgacggccgatctcgtatagacagattcttaccgcgagccaagaccggcgcgcgcgtgcggcggtcgacgaagcagccgttcgcgccgcttccgtacgtgggcgcgagaaaagagaggggatgggaacgcgggaagaccgcgacgacccactcctatcgcctcggtgctggggagcggagacgaggaggacagaggaggggcgaggaggttagagaaatgcgaagggggcaccggtgggcgccattcctcggtgaagagggggcgcgcgggaaggggacgccaacgagagggcgctnnnnnnnnnnnnnnnnnnnnnnnnnnnnnnnnnnnnnnnnnnnnnnnnnnnnnnnnnnnnnnnnnnnnnnnagccagcgtgccgtgtccggggggcttgcttagcgaacgcggctggggtcgcggttgggctctctcctgggggggcccgggccaacaccaaatgtttgtgaagcttttttgggggcgcgaggcgccgcccaggattgattccagcacgcctcggcggccgcagagcggcacgggagcccgaggggactgtttgccgtgatgcaggtggtttttttgctaatcaaatactgcagtactgatttaatcagtataaaatcgaaagagctttagatctgtaataaaaatccaaatttggggaagggcaaactttaaaacagcagccaagtagagaagggttggggaagggagaggtgagtgaacaggcacattggaactgtggggacatgtaactgaccactgtcaaaccagtgtaagtttcttggtttctcatggaaaacattttatacacctatttttcttccttccatacttaagtccatcagtgtccaaatacgtctgttccattttttgtctgatttttgttgggatattacaacacagtattgcatttactccagttcctgctccatgtgaaaaaattagatgatttcaaatactttcttcagctccacaataagctgccagtcactcttctgcatttcatctctgaaccagtctttgagtgcatcaatggactgccggctgatcttactaacaagaatatctgtagcttcaaaatgtcttccaaacattttgggtgactcaccagggataggttctatttttacacaaacttcttgtcctttttttgcaacatccacttgtttatggtttatttcaatacttgttactattccgatgtcaacaaaatttttgcttgggacacacatgggtgtcccctgtttcacctgacctgcttcccccgtagtcatcaggatcctctagacgca

SEQ ID NO: 358549 - DNA, 555 bp, Homo Sapiens
  misc_feature (528)..(528): n is a, c, g, or t
ctgaggtgggcagatcccctgaggcctttgatattacaaaggatggtgtaccaagaaatatcctcatggaaatccccgtgaacatgtgcaaaggaatctgtaggttacattcctaaatgctgagtcagagcatctcagcatttaaaattgtgattgccttcagaagaggatgcaccaatttatcctcccactagtggtggctttgtgtaattggactttgtaaaaatctttgacacattaagctggaagtctgcaaacttgttctgtaaagggccagatagtgaatattttaggcttctcaggccatctgtgtcccagctgttcacctctgcctttgtagaatgaaagcagccacagccaatcaataaacgagtgtgactgttccaataaaactatgtatgggccctgaaatctggatttcatatgatttctacatatcacaaaatagtcttattttgatttttttcaaccatttcaaaatgctctattcttagcttgctctctgcacacaggcaatggactagaatnggctcactgaccatagtcatgcctgtg

SEQ ID NO: 358550 - DNA, 2190 bp, Homo Sapiens
  misc_feature (200)..(298): n is a, c, g, or t
  misc_feature (437)..(536): n is a, c, g, or t
  misc_feature (2036)..(2047): n is a, c, g, or t
cccacaggggcgccacaagggggtgttattgtccgcgcggggggattttcgggtgttccccccacccccgtgtgtggaaaggggttccccctttggggcggaaagagtttttatagaaatttccccccaccttctctccaaaaaatatgccccgggggcgggggcctaattttttatatatggagcctcgccctgggggnnnnnnnnnnnnnnnnnnnnnnnnnnnnnnnnnnnnnnnnnnnnnnnnnnnnnnnnnnnnnnnnnnnnnnnnnnnnnnnnnnnnnnnnnnnnnnnnnnngggggggaattccagccccttttctttgcccccggtttcctttggaaccagtttgggccccttctcctttccctttggggccccgcccccaaagaaaaggtttaaaaaatttttggaggggcggggggggccgcccaannnnnnnnnnnnnnnnnnnnnnnnnnnnnnnnnnnnnnnnnnnnnnnnnnnnnnnnnnnnnnnnnnnnnnnnnnnnnnnnnnnnnnnnnnnnnnnnnnnnctgtagaattttattttgaaaatatttcacttcaagattgatctaaaaaacattttaagatatgaaaatgttatacaacttatctattacaaattaatcagataattctgcaattaggtacactgtgttagctcgcctacataaaaaatattgcacattttattttgtctccagatgtgatcgatgtctaaactatatagaatttcaaactattttaaagttattctgtgaaatgtcatctttataaatatcagaactaaatgcactgtaaacagccattttggtaaacatgcatttattcacagttgatttatttcctttagataaatgtgtaactgctcaaaattatataataatctatgtagaggtacaagagcacactatacaaatctatttctatcttcatgttgaggaaacactgatcttggcaaaaatctggcatgatttttaaaatgaactattgctggtaagaaggcatactttaaaacttttctgtggcctgcacctgttttctttttaaattaaaatgtaaaagcatttgttttcagagattcatttatcactgagtaagtgattacataaaaaaatggaccctaaagcaactgagttaaaatgctttgagagccccattctacttgtaagttatcaatgccttaaactgttagaccactcactaatcataattttaagaaacggacaaaaatcagacaattttaatgtcaggaaattgacacaaacctgcataatacagcattcctccattgatttgaggtcatattatactttaaaaatataaataaatatattgaatcatgagtcttatttctataaccccaaaaagtgtttcaaaatgcttctaaaacagaagtgggtgactgtagaatatagttccagacttgactattactgtcaaacacaatcgttccttacaaataactctactggtgcactggcttgattgattccagcaatttcattttacaggagtgaaccacacgttatacacacagagaatatattacttgaaaatccccaaaataggaagaaaagtttagaaagttgtcaaatacttccaaatgaaaagtaaaggtctatttctagccctctttcatacccttaaagttggaatctggcaaaagtccatgggtacaatttacaaactttgacaaactattaagtaaaaaccattttctttgggggaggtgagagaaggtacctttaaaacctgttatacaaaattccagctgcctttttataaaagtacgttccttagattaaaaccataaaattaaggtgcaagagtttaacaaaaatgaactaaagagctttattgacatcacagtacattcaagaataattttaagaacattacagctgaaagagaatggcatgtttatagtcttattatgcactatattttttgaaaaaaacgtaatacaaagaaatcctattaagtaacttggagcagcattggaaaaagtacacctatgttacagattnnnnnnnnnnnngattctggtttcacctacacagccacaatgtacctctataatgagacaagcccttaaaactcatggaatttttttaaagaacatcatggcattcttgccacatcattcctcagcgtttacgacggggaggggttgttgatctg

SEQ ID NO: 358551 - DNA, 635 bp, Homo Sapiens
gtatatagatatgaccacatcaaatagtgaattgtagaaactagtgactatgtataaaggcattcaaatgccctagagttattgtattgtgcaaatggaaaccttaaatttgtattagaaagttaaagacagtcaacgttgtgaaggccaccatccatggttaaagagccaaacctttataaaatgtggttattttcagcaagttctttaaccaccccttccatctcttcctttaatttattcataccaagagtcattcctaataatgtgttagaacttggataaaattggggtccatggtaatgtttggattcccactggaagctgtaaacattttcctgaggcagagtttccttgtaactcattagtatattcttgatattttgatacttcttcttcaatatcaaaacactgattagtcagcgataataactgtttcctaagatgaagcatctttcttatccattcttctgacttattcaaaaatgcctcatactttttaacacattcatctgtaaagtgcgtcatagcttttgtggcatggtaatacagtttttgcttatcaaatttgtggatttgttcttcattataagctaatctacgttctgctttgtcttttttgaactgatagtaaa

SEQ ID NO: 358552 - DNA, 990 bp, Homo Sapiens
  misc_feature (328)..(383): n is a, c, g, or t
agatgtctgaataactccttacatttataaattcttatttaattttatagctttaatgcggtccatcatttctaataatgatattggctacaagaataatgatcatattatttatcatataatttaccatttgtaaagcaacaaattgcccattaacaatgaaattgtagttacagcatctaaaattattagaaaattatattagcatggaaatatgttcatgatatatcactgagtgaaaaaaatctggctaccaaatatgtagtctgactcattcttatttcaaataataaaaaatatgtgtatgtttgaaaatatgcacattagnnnnnnnnnnnnnnnnnnnnnnnnnnnnnnnnnnnnnnnnnnnnnnnnnnnnnnnnatacacacagatagcacaggagagagacagagtgggagaaagaggagggaggaactatctcttccttttttctcagcttaatttcagctacaggagaaagtacactagaaactaattaacaggaagagtacaaaataatatgttagttataactatcttcaggagatgagaactgggaacatgggtgacttttgcttatttgcattttctaattatttaataattatataattatattatctctctctgtaatttgtgtagtaaaacatcagttttatatccaaatttttagtcatttataataaaaggtatattagcatatgattattttatccttagcccacaaataaaactcacaccacatttcctaacactatgggcattttggaacacagtcaatagtgtcacccaataaaataaatcttgaatggttgattttaatacactaaacattacatgaaaatatgctatcaaaaagcagacattaatatcttcttaataatttttaaaacatcctaaatttaataccaagaattttgcctacccaagttaacattatacaattacatgtaatatacatattcaaaatggcataatcacatgaaat

SEQ ID NO: 358553 - DNA, 477 bp, Homo Sapiens
  misc_feature (289)..(320): n is a, c, g, or t
agtgtacgtttgtgtgttcatcaccttaaattatcttaatttgagacttttttataatggtttcgtaatgtgaaatcaaatactaatttaaactctggagcccataatatctacataaaagaaaatataaactgactaatattgtcaagtcatttaaatgataagtaaaacttcaatggattaagaaacaagcatggcatatttgattcagatcagttttttgacaatatttgtatgactttccaaattgatgtgactgtaaactttgaattcctcaaaattgacagannnnnnnnnnnnnnnnnnnnnnnnnnnnnnnngtatgtacacacacacagagagatcatttaaatgtaaatgatgttaagaaaaaccaaaacagtagcatatgcaggcaagtcattggaccaataggcttaatatttatgaaactgacaattgttctgctttagtttcaggttacaattatgtttaaag

SEQ ID NO: 358554 - DNA, 1088 bp, Homo Sapiens
  misc_feature (511)..(597): n is a, c, g, or t
gctaaagcctaaaagcaaaccctgacaaattcacaaaggggtggattggtgattgagtcctgccaaattagagggtcttgggaaatgctgtgggctttccatgaatccgttgtaataaaacataaaccagtccacataagtccaaagtgatcagacagtaattttactgcccactagaacaagattaattcacacaatcaatgacacatgttagccaggtcgatatttaagcaaaatacatctaagaacagctaacaaataactcttctcaaactcacatagagcattcagcaagatagaccacatgtgctgagccatcgttagtattttctgtcctttctctttgactcgtgtatagtgtgctcaaactcttaaaattatacactttaatgattatacactttcatgcatctcaattgcatgtaagttatatttcaatatatttgttaaaagtttataattaaaaaaactgtcctagcttgattcaagaaatcttttttatatttaagannnnnnnnnnnnnnnnnnnnnnnnnnnnnnnnnnnnnnnnnnnnnnnnnnnnnnnnnnnnnnnnnnnnnnnnnnnnnnnnnnnnnnnaacttttttcatgatttataaaaacaaaccccagaaaactctcagcatgataagaagagaaggcaacactttcaaccctattaagggtagatttgaaaaaaactcagaggtaacattatattaaatggcataggattgaatgcttttctattaaatcagagaaaaaagtagaatatctgttgttattctttcaattcagcattatactagagatctaaatcaatgcaataaagtaagaaaaataaataaaagtattgaaaagattgaaaagaaagaattgaagctgtctttattcacagataatgactgtgtatgttaataatcctagaaatctataaaaatctgccaaaagtaattagtgagtttggtaatgttgcagaatataagctcaatagaagtagtctttggtatttctgtgtattagcaatgagcattttggaaaatgaaatatacaatttcatttcaagtaacatctatccatgttgtgcttg

SEQ ID NO: 358555 - DNA, 657 bp, Homo Sapiens
  misc_feature (14)..(14): n is a, c, g, or t
  misc_feature (22)..(22): n is a, c, g, or t
  misc_feature (38)..(38): n is a, c, g, or t
  misc_feature (43)..(43): n is a, c, g, or t
  misc_feature (56)..(56): n is a, c, g, or t
  misc_feature (61)..(61): n is a, c, g, or t
  misc_feature (79)..(79): n is a, c, g, or t
  misc_feature (101)..(101): n is a, c, g, or t
  misc_feature (191)..(191): n is a, c, g, or t
aaaaacccacccanagttgggnaccccctcgggccccnggggntaccttggcccanggaanccctttatgagccatganccttgtggccaatggcctacanccaatggtcaacctggaaacccacagtgaagaagacagcactgatgccccaaagagaagatacccgtattaaccctatttaaaaacctanaatgccaatttccgtgcccattcaggaatcctgggtgggggcccattacgtcacttatgcccaaaaaccccaaactgcaagtggtactgttacaatgacagcagctgtaaggaacttcacccggatgaaattgacaccgactctgcctacattcttttctatgagcagcaggggatagactatgcacaatttctgccaaagactgatggcaaaaagatggcagacacaagcagtatggatgaagactttgagtctgattacaaaaagtactgtgtgttacagtaaagctaccactctggctgctagacagcttggcggtgagggagatgactccttgtagctgacatttggcaaaagcgtcactgaaaggcaagctaaatgtagttattttatcctgtggccctgaagcacaaaataaaaattctaattaaaatagttaactttaagagtagtaatcattttattt

SEQ ID NO: 358556 - DNA, 793 bp, Homo Sapiens
  misc_feature (749)..(749): n is a, c, g, or t
  misc_feature (757)..(757): n is a, c, g, or t
  misc_feature (765)..(765): n is a, c, g, or t
  misc_feature (781)..(781): n is a, c, g, or t
gcctggccaacatccggacagcagtatggatgaagaccttgagtctgattacaaaaagtactgtgtgttacagtaaagctaccactctggctgctagacagcttggttgggaggaagatgactccttgtagctgatacttggcaaaagtgtcactgagaggcaagctaaatgtagttattttatcctgttagaatacaaattctaattaaaatagttaactttaagagtagcagtaattttattttgaagtctcatgcaagttgtccgatagagaactttcaggcagatcccaccattagcctgtaaacaaaaggtttggcaccagccacctgggaccaaataagaattcaattgtgcttgtccagatatgaacaaatatgtagtgagtatagagtttaccataatcataacaaatattaaagatttccttggagtcagagtaaaaaacaaacaattataatgttgtctagggacgacatgatatgctacctcctttttcctgaagttttattccattatattgacaagatggagaaaagcaagatcaccgagggtgtgccaaatgattccttaaggcatgggaccgaggatttttcaatttattttttaaacctgtttccataccctttcctttgtctttcttgctttttgtttttgccgttgtatttatgtttgagacacaaccagtcattgggtggcaggggcatatagtgggtcagtctgaaagggagggcccctcttaagagcnggtggtgnccttccancccagaagccctggtngggaagaccccg

SEQ ID NO: 358557 - DNA, 1436 bp, Homo Sapiens
cttcttggtctggttggtacctcgaggccattgagacctgcctgagctgaagggcacctcgccttgcacgctggttcgacacctggacgcccgtccccctgcaattatgtacacgcatcattgggcttcaatggattgtggaaaaggggagcaaaggatggtttggggggtacgtccggctttagccgagggcgtacgctttcagccccgaccctgtcagtgacttgtaggcgttgaggctgggccggcctcgagaacagtcacggcctggccagatggctgggagctgtgcacctggatggagtccaccctctgcgggcgggctggcgggttgtctcccctgccaaagctctggtttctggagaggtgagaggaattggaggagttagtgttgtttctcttgagagtggtggcctggtggcttctcgtgagcgagttcgtggggtagctcctcttatagtcaaccccgtaggaagaggagtggtgcatttccagccgcttgcttagaccggtctgagacagggaggctcccgggggacccagggaggcctcccgctgtggaactttggggggcaggctgtccaggttctccacaaggttcaccccatggttgggactcttgctgctgagatgttccttgatggtcttatactccagtgtggcggcctggtcctccagcgccatctgggccacctcgctcattttgggctggtccacgtactcatgctggtagccctgctgcgtgatgggcaggaccaccacgctggggatgtggctgggggaggcccgcaggggcaggtccgtgggaatcacaggggagcccatggggggcatgtccatttgtgcaggcattgatgaggttctggttcctctcccactcgcggctgccgcggctgggcttccgcttctgctgcagcgttggggttgactctggggtggggagggccgtcaggtcccaggtggtgctggtctgctttaatgagcatcttggccgtgttgccggaagtggcgagcttgccgttgtgcatgagtgccgtgaggatggcctccggctttgggtctttggattgagtgtccccaaagaggccgctgagcttggtgacgctgctcatggagccccggcgcgagtgggtgagctccttctccttgcgctgcaccacagccacgtctttgcgccgatgatcacagacgcagtagacggtgatgcccgagaagacggcccccatgacgaaagccaggatgactgcaatggccaagagggtgacgggaaccagctggtcgtggcctttgaggtaactttcccgaatcactccattcagtgccacaaaggaattgtgacagtcccccagaccatctgtattgccacgctctatgtcctgctcaaaagtcagtctgctgttgggtgataaatggctgcaggcaccaccttcctttat

SEQ ID NO: 358558 - DNA, 457 bp, Homo Sapiens
  misc_feature (278)..(278): n is a, c, g, or t
agatggtctgggggactgtcacaattcctttgtggcactgaatggagtgattcgggaaagttacctcaaaggccacgaccagctggttcccgtcaccctcttggccattgcagtcatcctggctttcgtcatgggggccgtcttctcgggcatcaccgtctactgcgtctgtgatcatcggcgcaaagacgtggctgtggtgcagcgcaaggagaaggagctcacccactcgcgccggggctccatgagcagcgtcaccaagctcagcggcctctttngggacactcaatccaaagacccaaagccggagcattccttcacgccacttcatgcacaacggcaagcttcgccacttcccgggcaacacgggccaagatgcttcatttaaagcagaccagcaccacctgggaccttgacgggcccttccccacccccagagttcaaaccccaacggttt

SEQ ID NO: 358559 - DNA, 738 bp, Homo Sapiens
  misc_feature (630)..(695): n is a, c, g, or t
ctcagtttgagagaaataggaagccctttgcagttgaggtgttaggaacctgctggtcatggtgtggaaggccaaatgaagctgccacagggtttcttgtcagtcctttgggaaatgggagggagtagtttggggaggagggtgggaaccctaatttccacagaatgaaattttgatgttaaatgacatgtatacaaattcttccttaagtgaaagttatgctgcatcgaattgtaactgaaagtatagatccaacaaatagagactgggttctagagagttctggtctatagaaacccaaaacttctctcataactcaagtatggaatactttttttaaagaaattcttatcatgggtgttgtaataatgaagacgaatttgactttatgcagtgttctgcagcatgcctcccccacatctcatagcaccaggttgtgtctgacctgacataccctgcagctctcagctggctgcagtaacattttgtgggagaaagaggagctggagttacagaaatgattgtcccttggttctcagtttttagcccttgagaggacatacttttccagcctcatgggtatggcactcttaattaaaatttcagtgactgtttactggatgaggcagnnnnnnnnnnnnnnnnnnnnnnnnnnnnnnnnnnnnnnnnnnnnnnnnnnnnnnnnnnnnnnnnnnaatgtaaaagcaagtgaaattttaataaacttctgtaattacc

SEQ ID NO: 358560 - DNA, 574 bp, Homo Sapiens
gcacgaggaaaggttgtgtgatattccaaggcactgaccgtatccttccccgcgaccttggccccgccatgctttcttaatgcctcaggcagcatgaccacctgcttacacgagcgctcacgaggacaaagtcgtaaaatccactccagactgtgttctaaggggggctttactgtatttgttaattagtgtcacaagccaagtggttcaatttcattctttatttttaacttgactacctgtgatgactttgagacttagagttcagttaaaccgattatattagctcttaattttgccaaaaatagctggacacatagaagaaattatttactctttgataagtatattctgatatttaaatgaaaatactgtattatttagtttattccgttaatttaactaggaaagatgctatctaaatttaataggctagtgtgcttgtgtgctttaattaagtactattttgttagttactggtatgcattgaaatattttcccccaaagtaagaactgaagcacattacaaaggacctaagtgaaagagattaaaatgaaaattttgtgaggaaca

SEQ ID NO: 358561 - DNA, 882 bp, Homo Sapiens
ctatttgttgacttttgtttttcatttagttttggaaaagactatttgcaaaagtacagagttatcttcagcaattacttcacaacttagattggtaccaagagtgacaggagatcttgtcttggaagatcattattagatgccaacaaggagacccactgtgatttctggtaacctatttggggaaaaagacctaatgacctaatatgcaatttctgtcctcgtgtctttttctctaacacacagtcatgggtgaaacatttcagacacctcaggcagcacttatggtttctaattgtgagaactacccttccatcaaacaaaaagggcaagggtgggagccccggctacttggttaaacattttttactacaaattcgcccagaaaaggtgaaatattttgttataaaactgtattaagcatggcctaagtatttattaggtatatgatctgtgtagtatgttccatcagaaatatttcttactagtgctttaagctccagagtaaacagtcatttaaaatggagttcactgggcaggtttcccctttaatctagatagaaatactctttatcagagatttaaggcactgttttgctaactggtaaataaaaccaaatgtaaatatgtaagaatgtttatttgttgcacataacttttttggtattaaatgtagaagttaccctcgtgccgaattcggcacgagaagaatatgagttttgaaaccagacactctatatttggattccagctcaatcactttgtaaagaccttcagcaagtcctttaattctctgagccttagtggcttcatgtataatctgggaataataacacttgccttacaggtttggctcaagatactgcaggcacttgttcgggg

SEQ ID NO: 358562 - DNA, 608 bp, Homo Sapiens
  misc_feature (111)..(111): n is a, c, g, or t
  misc_feature (144)..(144): n is a, c, g, or t
ccaaattgttccagtattagtcatgaatgcaaagctttagtacttgagcagaagagaaactccttcaaaagtcataaatcctgagtgacaactgtgcttggatgcaagatnccttcacctgtgaacaacttggctgggggtggngggctgttccacaagttcacctgagcatgtaaaggtgggtaacactttagaagaataccggaaaagtgccagtaattctctttctcccatagtatttaagccagaaatattgctagtttaatattgtgtcaggtcgtcctattaaccaggagcagatgacagtaaaatttcagtgaatagcaccttgacatctacaacttaaaaatggtgattgaagcaaaatatgtaaacttgtacggggtgatcgtgtgctttggaacagagtattgttgaagtaattagaagatatattaaggtgttcctggtaatgaaggcatgtaagttataataattgtagctttctgaataagtgtcaaactatatctttaagtgtgctgtatgctgagttacaagttaggtcatttatgaatggaatgtaaaataatactaaaaatgcttcaataacttatcttggtattgctaat

SEQ ID NO: 358563 - DNA, 1045 bp, Homo Sapiens
  misc_feature (352)..(352): n is a, c, g, or t
  misc_feature (1026)..(1026): n is a, c, g, or t
cctattctcttcagactgcatgaatcctactgctcaggaccaagtctaggtgagaggagagggcaatcaacctctttggtttcggatgttgtgtgcaaagcccagggttcaaataagcagtaattatctcctattacttagtgctgatcaacagcacctctacgtctaattgccaacctgccctaatcatgttgactattcttgctttagccagagacagaaggaccaaattttataaataacactttattgtcattattccattaaacgattaggggatgtggacctgcccttgctttcaaatgcctctagccctgatggtttctggattatttaataaatctgcacattnttcttgcaggtaagtgacactccctgtcctagtcggtctatctggacttgcccttgtctgttcgtggtcctcggtggttatctgcagcttgttaatcgtgtaaagtcaagagaagaatgtatacacatatgtgtgttgaataattactattggcataggtatgtgtatacacacggtacaccaatctacagtatatatagcagagaatcagaggctaaaaatattaccccatatgttccagtattagtcatggattgcaaaggcttagtaacttgagcaggagagaaaactccctcaaagtcataaatcctgagtgacaactgctgctggatgacagatcccttcacctgtggacaacctggctgggggtggggggctgttccaccagctcacctgagcatgtagaggtgggtcctgcagtggtctcgtgggtattactgcttgtgtctgattgtccctgtattttgtaacactttagaagaatacagaaaagtgcagtaattctctttctccatagtatttaagcagaaatattgctagtttaatattgtgtcaggtcgtcctattaaccaggagcagatgacagtaaaatttcagtgaatagcaccttgacatctacaacttaaaaatggtgattgaagcaaaatatgtaaacttgtacggggtgatcgtgngctttggaacagagtattg

SEQ ID NO: 358564 - DNA, 742 bp, Homo Sapiens
ttccatagatccggcacccacctgtgcacttggccagccttgagagatgagagagcccagacccttgtctccgaagaattgaaagattgagagaaatgaaaacgaaataaggaatccttttaaagcatgttgagaaagtattttttggtatgaatgggtgacgggccttttaatctttcaggaatacatataagcaggaatacttagcctgtattgggaaggtgcgtgaaactcaaagttgctaacatcatcttccttattttcagccagtgctgttactgcatttagcatggcttctgacgaggcagtggagagttcctgacagcatagcatactgccttctgacagactgggttaagctaccaaaaatgacaaccagggattcatttatcacaggactttaacaccatatatttccctcccagtttttctccccttttggtttaatagttaaaacatttttcataattagtgctgtacatttgattgcaaacaaattggtgatacttctaaactataactataaatctctagaattctgtgaatttcaacattatttgaagtagttcttcagttatatttacatgtgttgtaaatatgtaaatatacttttagcttaggaagtcttccagaatacaaactactcccagttagatatcagtgagtttgaataactgaagaaatgttgacaatgttaagtgtttgattttatataacaagcttattaaatatatttttgtgg

SEQ ID NO: 358565 - DNA, 928 bp, Homo Sapiens
  misc_feature (843)..(843): n is a, c, g, or t
agctaccatgcgtggtagtgtgttgggggtgggggtcctgggcactagctgtgtgaagggatctggcagggcacccaggcgcccactactgaaccatcagcatgtcagtggcatttaaagccatgcagctggaggggccactgagattgtctctgagtattactgagaagcaacagaaaagagccatggatggagcccttgggctctctgggaaatgggaaatcagccaaaggactgagaaggagttaccttaaggtcagagaaaaccaagagagtgtggtgttctggaagctgagctttctttattcaacctcattcccttctccaaataagccacttgtgtagttgggcccctccagggttgaaggcaagaggagaaaggcacagcgtttgggaaacaagacttttcctgcaatagcctgggaaggaataaaaggatagagtgtttgggtttttgtgtaatggtggttaattggggtggaacactcacacgttgtgctttttctgggcttcccttatcccccagaacactctaccaacctcggggaactcgggcacatccttctgtttctccttcagctctatcctgctttcctcatcccttctgacaccacgtcctcactcacctgcacaagaatccctgcatcaggttctcctttgagggtacccacccaggacagtcccctaccacttctgtcttgggctgaagttgcccacgtccacaaaatctgtactcccagcgggggtgtttggcccgaggagtcagtgttattactggtggatgcaccgtgtccacagcagcccccaatcccagcgatgcgtcagatcttacgtggcttcctngctgggggagatggccttcacccacgggaatgccggggttctccctttctttcctcaccccaaccctttactcccccaggagaaa

SEQ ID NO: 358566 - DNA, 434 bp, Homo Sapiens
caaaagtctatgcatttattattatttttggtaattactttcttattttttccccacaaatgaccattaagtattattttacttacagcatgtaaaagcatttaatgatagaaaatatttaaagatctactttgatctagaatgtaaggtgtaataacataaaataaatggtctgtgcagcccacctctaaaattatgctctatacatttatcagccaaaatgaatacacatagaattagatatgtggacatctgattccaaatatgtgtttgttgagagaaagagaagccacgtctaaactgaaaaaacaaaacatactaataaggaatactcgataaattttaggaactcaggaaaagtctttaaggaagaaaaagtaactacactggttatcataactaagacacggaatacagaggagagggctactccc

SEQ ID NO: 358567 - DNA, 882 bp, Homo Sapiens
tggccatgattgtacatgctccctgtttcttgcgggacatcgtgctgggccatagtcctctgtaggcagtctctgtagcagtagaaattcggttgttatggagggtgccacactccctgggaccgatgactgtaccagcttcactaagtgccagctgctagctgctagactctggagcaccttgagtacataggtgatacagtacctactttagatacagactggcagctaaccacaggtgccctacacttgtcaacacatctggaaagtaaaccaagaaggggaggaagacagattccaggcccactccaaactgggtaatcggaagctgctgtggcatggcaccaatcatggccgtggtggccgccatcctcactagtgggctccgcatcatgccacattctggtgggcgtgttggcaagggcatctactttgcctcagagaacagcaagtcagctggatatgttattggcatgaagtgtggggcccaccatgtcggctacatgttcctgggtgaggtggccctgggcagagagcaccatatcaaacacggacaaccccagcttgaagagcccacctcctggcttcgacgagtgtcattgcccgaggccacaccgagcctgatccgacccaggacactgagttggagctggatggccagcaagtggtggtgccccagggccagcctgtgccctgcccagagttcagcagctccacattctcccagagcgagtacctcatctaccaggagagccagtgtcgcctgcgctacctgctggaggtccacctctgagtgcccgccctgtcccccggggtcctgcaaggctggactgtgatcttcaatcatcctgcccatctctggtacccctatatcactccttt

SEQ ID NO: 358568 - DNA, 620 bp, Homo Sapiens
  misc_feature (368)..(437): n is a, c, g, or t
  misc_feature (467)..(490): n is a, c, g, or t
tttcggcacaggctctgccagatagccagtctgttatgaagctgcactactgaggcagcacatctgaaagcctaagagaaacctgtccttctgtcctgagaaacgggaaagggtccagggtagtaggaagaatatgggaagaatcttcactatgtatttctctggggcaaaacagtgggggagggtgacactaagactctaagagaaagaataacccctgccactagtgaaaggactaggaaaagaggctcctgggagccagacagcataaggaaagtctctgagaggacagagatctaattccaagttgcatatgtgtagaaaaaacataaagaagtatagcaagctggccaggcatggtggctcannnnnnnnnnnnnnnnnnnnnnnnnnnnnnnnnnnnnnnnnnnnnnnnnnnnnnnnnnnnnnnnnnnnnnttggcaatgtggtgaaaccctgtctatacnnnnnnnnnnnnnnnnnnnnnnnnttagctgggcatactctggggctgaggtggaagagctatggaggcagaagttgcagtgagctgagattgtgccactgtgcacctgcggtcccagctgctaggaaggctgagctgggagaatcccttgagc

SEQ ID NO: 358569 - DNA, 1020 bp, Homo Sapiens
  misc_feature (122)..(131): n is a, c, g, or t
gaaaatcaaattcagggaccacaaagaattttcagtgggaatgtctagtctgaggggtctgaggttgtttttactttattgtgttgtttaaatattttaaaaatatctttagcgtttggtcnnnnnnnnnnctgtaaacatttaatttggtctgagaaaagctgaatgtttgggtgtgacgtttgactgaggtggattggggctgcctgtggacattagtgaacaggtggtaggcttcaggaatatccagttttaatcagttgcatttggtacagaattttgagtaatggtgaaaattgttgtctttggaaagcacaaaagaaacctgggaaaggcagttcggctcaggtagctacacataacattgtgtatgattttcacttcaaagctgtctggaaggaaatgcagtcagctccagctagtactatttatgtacccagataactaagatattgtttcatggccttgccttagtcagaggcccttttctctgtcctgaacccccaggtatgggtgaaattggaaattactaatctattggaaatcagttcctgacatagtaaagtttgctttcataactgcagcaaaaaaggtcaacttgccaagtcactgctgccatgtgtgtactgtattattttcagaaaaaaatataatagtctgagtccaagttatcttgatttaaaattgatagagaaaagaaactgtcgagcaagttatataacaactaacaacattgcactttctgtatatgaaatcaatatttaaataacttatttttctccattgctgttcttaaaaacattgtaagtagctgtaatataccagtaccaatatgttcttgcaattgcttcagcccaagaaagctgtgtattgttttaaaaattgtaaaaattattgtgatgattcatttagcataaagagaggtggacggaagggttttcctatgtatcaaaacttgtctataattatgtcatctatgtacctagaaaaaagtaaataaatttcttcagttgaatatgc

SEQ ID NO: 358570 - DNA, 499 bp, Homo Sapiens
atttaagttaaacaaagggggtcagacagacattgcatcatccagacatgccttgttggacatgtagaatccgatggagcactgcacaccagaatgattggccaatgagcagcttctctccctgaaacaataactgcccatttggcaaagggaaagatgacaataatcagaagaagaaaatgaatgggatgcataccatagacgaacgaggcggagactattgcgggaatcttactgttcaggagctgttcctagaactaactcccttactgtcattgatgtgcattccactctgtgcttttctgtacaaccattcaagttttaatttcccaggtgaaccatctttatctgccattaccacaagctttcaagtttccagttattttcatcatcataaccagtacggtgctattatttacctatgtacgtgtagttatgtataattttgtaattagttacaatggttaatgatttgcatggttagcggcgaggacagcca

SEQ ID NO: 358571 - DNA, 460 bp, Homo Sapiens
acaccaagaaaaatcacacttagaccaatagcattatagaaagcatccacactttataatattctaagtaacaaaaattcagtttagcagccgaagcaagcatgaaatgaggaaggaaaacaggaagagagctaatggttatgctgttgccttggggaaggtggggggggcctgttttaactaatgtgaataagcctctaaacacttcctgaagacttaaagaggggcaccagaattctttaactctggtgatacaacagtcaaggttaactgccttcatttaaatggcatgcctgcttcagtgtaccaattcagtggattctactgctctgtagctgcttcccaacgcacagaaaaggagtcatgtgaaaaataattttaaaatccagaggcatgcaagtgaacatccattcagcattctatgccagctcgtacagaattcgtgcagcccgggaaatcc

SEQ ID NO: 358572 - DNA, 1909 bp, Homo Sapiens
  misc_feature (607)..(616): n is a, c, g, or t
cattagttggaccctgggtcctggagtaaagtcaggagtgcagggatgactataggtaggagagattcccatcccttggtgtgggagagcaagttgcctatgtccatgttctgtgagatggctttcctcatagatggatgggaaaatgtcaggctctttgctgctggtttgaattggacacactgctgcggctcctcctgcaggcctgagggggcttccctctgcttgtggagtggttggcattcccagcagtatcaaccctcagaggagcgggaactggggaattctggccctacgtgcattcacaggcaatgatgggtttgtgtgtatggtgtcatgagatcctctacctcataacaaaaggacagtgggtagactaaggcagtagctcaaagggctttgcaaaattttaatatattaaaacaagaggcatctgctagaaaacattctattgtataaaacccgagttcttaaaaacatgttttttttggcactttcattccctccctcccctttccccagcatattgcaaaaagctctccagtgctaaggcattggcagggtgtgtaaacagcacccagcatatgtggaagaataatacaaagcnnnnnnnnnnctttctaatatgtctgtgcagcaagcataaataacaggacccattccaaggagtgtgtgtgggttttccccctcccctgtgtcctctgtcaccttggtgatgaggccagagtgatgtgaagactgggagggaaccctaggtcagaccttggtttcctgttgttcttcccaagacccagggttccctcggtttccatttggtcctgtagtgaaatgctggtggttggttttaggttggggaaaagacgggtgctggtgtttaaaaggagtaaaggcataggcccctcatgacctgcagggaccccagccactgcctctgggctaggcttgagctcctgggagtcgggaagctggtttgacattttgtaggtttctctctactgtggagctggagatcaaatgattgggatggttcttcctctggccttacggaggcaaggaagtgctcttccttagtcccgtggagttgtaaggctgagactagggagatgggtcttgtaactgaaaagtaactgcttctccaaacaccacctgcagctttctggggcaccattgtttacaggactagctttagggcatgactagattctgccccagttccacctgccctctccctctactcccctcagttcacccacaggcacctggcagtcagctgttgaggtgcagggcctcagctttgtcccggtgtgccacctctgaaccctgctgtctggtttaagtaccactcctgtgggaatggtggcattgttcctagttgtgcccggttcccactcccctcccccaggactggttgatgtctagagctgcctttcacgtggccccaccctcccctcttgcatagtggatctgaaaagcagcaccttgtgacttaacatcacctgcttcatgtgctgggctagctctcgtgccagccaaactcgggaggaaaagggacctaggatctaggcaggggctgggctgaaatcagtagagggcagggaggaaagaacacagttcccacgctctcatctctgctttgctggtgaggctgatggcccccagtgaggccgtcatggacagtaggcggggtgggagtacttggacgagggtgcacctgggatgtgctgtgccctttcacacagacggaggccttccccgttcctgggagggcaccgacagtcagactgccccgggctggacggaaatgtattatgcgtgtttctgggattgtctgtcgctaccccagagggatgccctctaggcaagtggggaacatccgcctgtgggcttcctccagccatcggctcctctg

SEQ ID NO: 358573 - DNA, 557 bp, Homo Sapiens
tagaaatctgttcaattaaaaatgcttagtttatacaaagatactacacaaaaatagaacaattagtctgaattaacgtatttacatattgcatatggaagataagttcatttatcttcctttctaagacatatttaatgtaggttacatacactccaactattactttgcttttgcatatgaaactagaaaacactgactttgtttttataagttattaaatgtgaaattgatctgcatcagcttatttataaaagtaatgttatttccaagaaaatgttactcttagcattgattttgtatgttagactttttacattgtttatctaatattatttatgacagtaattttaaaatatattattcataagttcaaggatcccatatagtataagaatataatttcacttgctttgaaagttgatttaattgactgactaaatgaaaatgcctacccactcacataacatacctcaggtctattttaccttacactgaatgttctgtgagtgggtaggcattttcatttagtcagtcaattaaatctgtaatgaagc

SEQ ID NO: 358574 - DNA, 813 bp, Homo Sapiens
  misc_feature (69)..(70): n is a, c, g, or t
  misc_feature (764)..(764): n is a, c, g, or t
caagttccaaagacttggcttaatgcatcaagttttggttattctgctatagtagaataataaataatnnaatatgtagggtatagtatagctactttctctgtgaagaagttgataccagactagtgttttatgaagttaatttttagtggcaaagtttgattgcaagccaaaaatgttcaataaaaatgttgttctctacctaatttatagtctttttcttgtgaaatgatcattgaagtagttactaacaggtaatgaaataaaataccaattttgctagtgaaaaatagttttcaactgagaaaagcacttggcagaagacctagaaacatgcaggctaatgctacactctattgcagcttcaaataagttgtttttgatgccttttgagaagaacaaactaagatgaaaataattccttgaacatttatcagcattgctgtttaggtacccattagaaagtgattaacattcgatacctaccctttccaaaacacaaaatcactggcaagcatcatcacacactcctaaaccagcaacatctgagaagcacaaaacaccttcccttttgtctaataacctgttggttagttattggaactgcaaggcttacaaactcctcccctgtcctttatccttatgtaagcttgcacattctccaggaatagctattttcaaaggtaatttcaaaagaattaatacaatgaattctactgggcagtttgggggaaaatattgacgatattaaaatttaaaaaatncctgcctgacacatataaggcctccccagtccctcatacaatccgagtg

SEQ ID NO: 358575 - DNA, 422 bp, Homo Sapiens
  misc_feature (284)..(284): n is a, c, g, or t
  misc_feature (326)..(326): n is a, c, g, or t
  misc_feature (369)..(369): n is a, c, g, or t
  misc_feature (377)..(377): n is a, c, g, or t
ctgtttcagacatttatttccatttaaatgacactttgaaagatcgaggagccaatctgtaccgcaaagacaacttatcatcaaagactctagaagtacaatcgtatcaattcacaagacttgatttcttcaacttaaatgatagcttttagttaaaatatacctgagagaagaactccaaaggatgcctgcctcataatctgccctggacttgtcattcccgacagggcacctcaatggacactgccccaccccattaagactctgaagcgtagggtcccatngctttgcttccgaaatccaaggggaacaagaagtacccatcncttacaaaaataagcatgtcaacatggttcagtacatttttcngacacatntaaaatcaaaataaattggtaaaaatatttttccaggtacaaaat

SEQ ID NO: 358576 - DNA, 526 bp, Homo Sapiens
gggctgcaggaattcacgaggtgacatggcacaaaacaaacagcaataaagatgtagccataacacaaagaataaaaagaagggctgtgatgcatacacagttgggataaacataagtagacacacaaacaaaactaaagataatcagaaaataagcagaatgtctctttaaattcagaaagagtcaattttgcagcataagaacaatgtcctctccatatacagaatcgattttatttcttcaccacgcatatttctttatctttacttggagctacaaactaactccagcagaaatatttatggccaataatggtgcatccattacacagcaagcattgtgtttgctacacttacatatcaaaatatctttatgacttatgaagcctccccagtatttacttaaacaaattggctgaatgaataaattcacctatgtcaattataaagagtaaaaggaacaataataaaggaaacttagcttacacaggtttctccaattaaaataacaaaatgggatgttcta

SEQ ID NO: 358577 - DNA, 753 bp, Homo Sapiens
  misc_feature (684)..(684): n is a, c, g, or t
  misc_feature (686)..(686): n is a, c, g, or t
cgggctgcaggaattcggcacgagaaaccttggagacctcaccgcgttgacccagcaccagtgctcgcgggggtcccgcgagggtctcggtagccgcgcgcccagagacccccgccgcggcccgattctctgagcgccagacatgaaccgcaagaaactgcagaagctgacggacaccttaaccaaaaattgcaagcatttattccgaggttttgataaagataatgatggctgtgtaaatgtattggagtggattcatggattatcactgcttcttcgaggatctttggaagaaaaaatgaaatattgctttgaagtgtttgatttgaatggtgacggattcatttcaaaggaggaaatgtttcacatgttgaagaacagccttctcaaacagccatctgaggaagaccctgatgaaggaattaaagatttggttgaaataacactgaagaaaatggatcatgaccatgatgggaagctgtcttttgcagactatgaactggctgtgagagaagagactcttctactggaggcctttggccatggtcttcctgatccaaagagccagatggaatttgaagctcaagtattcaaagatccaaatgaattcaatgatatgtgaataactaaatgtctatattgtctcaagtgagtaaaaaaggaggcacacacatattgcttatntnttctacttagttcagaaaaatgatgttgattgtgtgttttcagggtgaaggatgaggttcacttaca

SEQ ID NO: 358578 - DNA, 755 bp, Homo Sapiens
  misc_feature (617)..(617): n is a, c, g, or t
  misc_feature (624)..(624): n is a, c, g, or t
  misc_feature (631)..(631): n is a, c, g, or t
  misc_feature (652)..(652): n is a, c, g, or t
  misc_feature (668)..(668): n is a, c, g, or t
ggccatttcaagggaggtggtaatttctcatagtgtgatttcatggtatgtaaagggtttagataaggagctacaagatccctgaggcattttggacctctcttttccctttggctcactctatttggggggactccaccacagatagagggtctgcctttgcctggatgaccattccaggaatgcccttgctcgaggggtcaattcaaacctaatgtaaaggagaactcacttgtaacttgggatgtggtgtttgtgacaaagttgaatccaaaattgggttcgcaaccagtagagtgtgtctgtgcacacaggtttattgagtgttaaagtgaaaatagacttgccaccctgatgggcaataatgaattaacccttttgtcttaggcttcgggtaacaccaagaaacagtccttgacagaaactgtcaattgccaaagaggacttaaattggttcactggcagtacaagaaatagaaaggaatcctggccattccctcacccctaagggaaatgacagacagctatctcttctctagggcttcagaatcccactgaagagctgcttcagccagggacctttgagttcccacgggtaaggaagcagagcattgagngggaganggagaanaaagaagggagaaattcatanagtcccatgcaaccancaagatgccggcgaggtgtagagcctagtaatgaaagtggttacttatggtagtgagagaattactgcaacagcatcggttgaaaag

SEQ ID NO: 358579 - DNA, 1026 bp, Homo Sapiens
  misc_feature (34)..(34): n is a, c, g, or t
  misc_feature (112)..(112): n is a, c, g, or t
  misc_feature (178)..(178): n is a, c, g, or t
caggattagggtccccaaagacggaaggtttgtnataaggctccttctcccacaaagcttccaggaatctccagcctacgtgaaagaactgaagcatactacatccagggcnaggatctgggccacgcaaagggaagtaagaagtaggtaggctctaggatagcacagaatttaagancaaaggctctggagccagtgttacccatgttcagatcctggctttgcctctgctggccacataaccttgaagggatttacttaacctctctgtaccatagtttccacattggcaagctgaataaaatgatagtatctacctcaagggactgttgcagggaataaatgagtgaaaggtttcagaacacagtgggctgaactttcagtttctctcttgtggctgcaattcctggctctatgtctgccttgctccacctgaaatctactccactcctgaagacccaggagttgagattgttctcttctagatgtacctatggcctagacaggtcaggtgactcctctggggcttgcaagtaatcagccaatcagtgggagagcactgattagcaggacatggggcagggccttcacaaacacctgggcaggggagtggccttggccaagacacagattcctgttttccaggggatggtgaaggaggctgacttctgacaactcaagtcagcaaacaataggcctaggattgaggtttactccaagtgcaatggaggtaaagggtggatgagggagtgctcgttgtccccttaaggttggggctgggggtggcatgagggagggaagacttcgcacagtgagggactcctcattggcccttgacagttaaaggatggagggctttccagcaatgaggcatttacagaagacagccaggcatgagtctcccagtgcccccacccaatcatccctccatgctactatcacccgagtggccgaatgcccttcaagggctccctttgtcctcaccagaaagcctaaccccagagcctggcatcccaggtccctgct

SEQ ID NO: 358580 - DNA, 547 bp, Homo Sapiens
ggccttgaaggctgggtaaggggctgggagggctttaggggcattccagggggcaggcacagaactggaggctctgccgggcacacccacaggagagcaatggctggagggtgacatggactgcagggtgtggccgcggcagcccagctcttaaggggacagcctgggaaaacagacttagggacaatgatcttgagccatgaaatgatgtccaatgccccttgtgccacctgacatcagcctgattaatgaacaaacagaagaggaagcaggggacctgtgtgtccctctctctgcttttctgtctttctctgtgccccctctcttatgtctctcacgctgtctcttgtccttgtttttaactctgacacgccgtgggaacttggctcacttcctagggggaagctgtctggactggcccagagatgggcaccaccatttcccaataaacacaagataaaatcagagagctggcatcagttccgcggctggactcagtggggaaaagggcaaaaagcagcagaaataagagcagggaaagaacagg

SEQ ID NO: 358581 - DNA, 728 bp, Homo Sapiens
  misc_feature (634)..(634): n is a, c, g, or t
acaggttgagttacttgcccaggattccagagctgggaggtaggcagcgaattgtggtggttaggaatatagacagtggagcagggtggctgtggtgaggattgaatgggttcgtacacaatgtgcttacaaagatgctgggcaattagcatccttgatggatgaaactcctgctttcacactcagttaacagtacaatatccttcaaagcaggctatccttttatgaagcgattgtttctgatgttagcctttcttatagtgaacagacatttccctctaacttccaccattcaattcaagtccacctttggcaaatgcaaaacaagccttattcttctttttataggtgatagcccccttctagaaatcagaaatactgatccttctctaatgactacttcttccttccagattttagaaatcttgagctgcgtcttcagtatgctgtctgtgaaataaggctatcattgcgtggcagccaagattttcaccaggattgtgattcccttatgacccatttgccttcctgggtaggaagtgataaatggcctgataacgtgaggttttgccaggaataataataatgatgtgttaatatttcttgagcaatcactaatgggccagacactatntttagtgctctacaattatgaggggttaaattcttatgaccaccttttgaggcaagggctattgattcccattgaagagatgaggaatttaggg

SEQ ID NO: 358582 - DNA, 1039 bp, Homo Sapiens
  misc_feature (881)..(890): n is a, c, g, or t
agatgtggccaaagaaatggctgacaccctccctctaccccatacaactattcccctagattattctttatcctcatgacatcaggataaacattaatgttgtcacagtagcagtaggtagaatattgttcgtttagtctaatattaggctatttctcccagtagattcattgctaatgcaattgaattataaatttgggcagagttttagagaaaattgccattaaatcaatcagcttgttgtaggagcttgtctatatgctaatagcattggtgctggcatatttgggcagtaatttcagcattgcatacataaatttgctattgttacatttggattaatattaaaacctgagtttatagtgtttcaggtgtagttgaattatatgtaagtagatataaattttgttatttttgtgttaaagaactagtggcagtgtgggctttagtacagtaatgtattttttgttcattgtgagaaattttattgatgccatgtgtacactgaaacttaaagcctttttaggtggagaaacggtgggactgtttgtagatgctatctctgtcgatagtggatgcccattttagataagattcttgttctgcctgtggaatccttaatagtttaaaatcaatacttctcgagtagtttctaaagactgtttggccaatctgtttttaaaacccaagggtttaaaaaaatctttcaaggcttccctaatgaagttaagtgcacctcgcccaaatggggaaaaaggaaaagtggattcgttttggaaaatttttgggattctgaacgttgaattttacgggatgaaatgggttttgagtttttattttggtccaaaaatttggcctgttttttataatccaacagggannnnnnnnnnccctattaagccataaaaaatcaaaaagtttggcctcaccggtttaattttaccctgtggaatggtcaatgaaaactttggaaaactggcccccgtgaattggaaaaaagttttgccctttttaaggcaaaaatttataaaacgtgggg

SEQ ID NO: 358583 - DNA, 617 bp, Homo Sapiens
attcaaattacccactggaatgcaccgagtggggtttcaccctctgctgcttgtatgtttctcaacccatgttctaatcccatgcagtcatcattcaggaatccctgaggatcccctgattcaacttctcttttttgaatagattagaaattcctatcttctttcacttttactgtgacttttcagcttcctgttttccattcctgagggctatgaatcatatttccaaaataaatgatgatctatggagaggattttgcatttccaacatccttagctaattttaatgaattatcatgggtcacatgatcctaaggcttcaggaatcggaggaagtggctgacactgacttaccattttaaccaaacaatcactgcacttaagcttggataagggtcaaataaaactaacagggctcttatgcaagcccttccagtctggtaagttatgagtatttatgttttatttccccccaaaaacaataagaccctcagaggcaaggaactcatcttggtttttgtcccttacacacctatctcagtccagtggtatgatgggcactggaaacaaaccacctgggtcaaatcctggcttggtcacttattggccaagtggcc

SEQ ID NO: 358584 - DNA, 746 bp, Homo Sapiens
  misc_feature (59)..(67): n is a, c, g, or t
  misc_feature (722)..(722): n is a, c, g, or t
tagtggatcccccgggctgcaggctttatgacatctgaaatgatggttggatgcaattnnnnnnnnntctatgttggtgcttttctcaggctttgtcatttaagttatattgtattaagatgtcacaaatcagactgaaaggcttagaattaattttgtttttctttgaaagaattgcttaaaattaaccatcaatgtttttagcgagtggagataatgaatctttggttggtgtctgtctgtgtgatgttttcaaccaatagccaaataattattgaacttacatgaaaaagagtgctaactataattttatttagattactttattctttgaaagtgactacaaggctattaagtacataatcattcattttatttactcagaagttgcctctccattactgttaacttgtttagtaatttatataattgcagtacttttaagtgttggacactgggattcaggttgtatacaaagtagtagctgacgaaaaatatgtatatttttgtgaaatgtatcaagccctaaagttcattttagagaaaggcccagaaaaacgtatctgtgtttaaaaacaaaggacaggtcattcgtcaatttgaatcatttttacttttgccactacaaactttttaattggcaatatccatcatccaactggatcttcatgtcagtgtcagggatgccacgttgacaaaagtatttaacacatcctttcagnttttgtttgttttttactcctaaa

SEQ ID NO: 358585 - DNA, 989 bp, Homo Sapiens
taactcagaacctgctccattgactttgacatcacccagaatggttgctgctgataatcaggacaccagtaatttacctcagttagctgtaccagcacctcgagtttctcatcgaatgcagcccagaggttctttttactccatggtaccaaatgcaactattcaccaggatccccagtctatttttgttacgaatccagttactttaacaccacctcaaggcccaccagctgcagtgcagctttcttcagctgtgaacattatgaatggttctcagatgcacataaacccagcaaataagtctttgccacctacatttggcccagccacacttttcaatcacttcagcagtctttttgatagtagtcaggtgccagctaaccagggctggggagatggtccactgtcctcacgagttgctacagatgcctctttcactgttcagtcagcgttcctgggtaactcagtgcttggacacttggaaaacatgcaccctgataactcaaaggcacctggcttcagaccaccttcccagcgagtttctactagtccagttgggttaccatccattgacccatcaggcagctccccatcttcctcttctgctcctctggcaagtttttccggcataccaggaaacaagggttttcctgcaagggccagctcctgttgggactcctagtttcaacagacaacatttttctccccatccttggacaagcgcctcaaactcatgtaggaatcctggaggaactcttcccaaagagttttgaataagttattaaatcatttatttcagttacaacaccatgttgtaactttagtaaactaagtggtatacagatgcccaaggtttgttctgtggtcatgtgaaaaaaatgtcagtcatttttagcatagaaaacttgagaattattctttcaagccaaaaatgttttacagtagaacctggatcaagaaaagaggtactaggctgggtgcaggtgtga

SEQ ID NO: 358586 - DNA, 829 bp, Homo Sapiens; identical to SEQ ID NO: 5615
  misc_feature (578)..(578): n is a, c, g, or t
  misc_feature (758)..(758): n is a, c, g, or t

SEQ ID NO: 358587 - DNA, 531 bp, Homo Sapiens
  misc_feature (223)..(223): n is a, c, g, or t
accatgtccttctggagacccggaaccccccagcaggccagggaggcaaggcctgggccgccaggaagccatgcttgaacactaggttgggaggggaacaccccagcaccttggtcctattgaggcttgaagtgcctgcttgatcctgaccaaggggccaagtggaagcctgtgctggttgtggggaaagtccccaggctcacatggtccaagtaggcatacnacgagcgtcaggaggataaagatggcccacagagagcagcatgttcttccggttctcttgccgaaagaaacttcagttccttctctgggaggaaagagggtgatagggataggacaggcagtttaggcccgtctgttctgctctgcctctccaacgagtgggtacacactgctgagggcaaagacgcacccttccagccacctccttacccataaaaatgactctgcccttcttaatctgcccaaatcctgacacccttttggctatagagccagcctgataaagtcccaacgcccagtgctgctcgt

SEQ ID NO: 358588 - DNA, 900 bp, Homo Sapiens
aaaactatgaccaaactctatgcatgaagcatccagaaatgacacgtgaacagaacatgtccagtctaatgggaaactgaggagactggcttggtatagaaactggaagtgtggtactgatgaagcaactatttttaatttagaacagcaaagctgatgtcatattcaaaaggaagggctaattggtaataatcttaataaccaagtcaaaaatacaatctcttttttattaagaaatcctaatgactgaggtagatgatgctgttgtcagataccgaagtaatttggtttaagatatgaaaatgatgaaaccaagggaaagaaagcactgttttgaaattatcttctgtgttaaatttagatgcataattaagaatgcttccaatttaaggttctaagcacaaaatccagatatgtcatgttatggacttgcttcctgaagatgatatcagcagttgatagaaagaatccacactcttacagaacagcaaatcataaatggttgtctctgtgaagccagtagctttgcattcgatatttctatctgggctcattccaaatgttcaggatttggattcctgaaggcttcttcagcatttaactaattctttgttggctgaaggggctgggactgtttctccacacacaaactgatctttgtcataaatgacttttataatgagagagcagctaggacacgttgccacgtcttccccattctccaaatcttccttggtgatggagaagttatctccacatgggcagggatagaaatacgtctccgagtcctcgtcatattggaagtcctcgatttccacctcgtcatgaaacactgccatggtcagcgggggtggccgaaggggtaacgccccagcagtccgaggccagctccgagggtta

SEQ ID NO: 358589 - DNA, 719 bp, Homo Sapiens
  misc_feature (633)..(633): n is a, c, g, or t
  misc_feature (647)..(647): n is a, c, g, or t
gggatgccgagcccaggccggttccggcgaagttaaaccctcggagctggcctcggactgctggggcgttaccccttcggccacccccgctgaccatggcagtgtttcatgacgaggtggaaatcgaggacttccaatatgacgaggactcggagacgtatttctatccctgcccatgtggagataacttctccatcaccaaggaagatttggagaatggggaagacgtggcaacgtgtcctagctgctctctcattataaaagtgatttatgacaaagatcagtttgtgtgtggagaaacagtcccagccccttcagccaacaaagaattagttaaatgctgaagaagccttcaggaatccaaatcctgaacatttggaatgagcccagatagaaatatcgaatgcaaagctactggcttcacagagacaaccatttatgatttgctgttctgtaagagtgtggattctttctatcaactgctgatatcatcttcaggaagcaagtccataacatgacatatctggattttgtgcttagaaccttaaattggaagcattcttaattatgcatctaaatttaaaagaagataatttcaaaacagtgcttttctttcccttgggtttcatcatntttcatatccttanaccaaattaccttcgggtatcttgacaaccagcatcattcctacctcagttcatttagggatttcctttaat

SEQ ID NO: 358590 - DNA, 960 bp, Homo Sapiens
  misc_feature (417)..(507): n is a, c, g, or t
  misc_feature (582)..(582): n is a, c, g, or t
gctgcaggaattcggcacgaggtctgtggtagttggtctgctctgctctttgcttcttttttgtagttttcttgatcgtgatcaattaagcagaaagtagaatttcagtcaggtaacctgtctatattagctaaattatcttttgcttattacatagagtgctagaagtatgctgtcatggcatatgtcctagtttctcatcaaatggaccaaagtcagtgattttatttgaagaggaaaaattgaacgtcattgtaaattaagttgcaagtttagtaaccatattgtaccactgtttgataaatttgaacgctttatggtatttcatatttagaatgttcaaaatagtactgaagtattcaaatacatacaaccctgagcgatattgaagtaaaataaacatgtatttaaggaagnnnnnnnnnnnnnnnnnnnnnnnnnnnnnnnnnnnnnnnnnnnnnnnnnnnnnnnnnnnnnnnnnnnnnnnnnnnnnnnnnnnnnnnnnnntcttggaggggggccccggaccaaattcgcctatagggagcggattacaatcactggccggggtttaacacggtngaatgggaaacccttgcgttaccaccttatcgctctgaggaatatcccctttgcaagttgcttaaatccaaaaggccccccggacgctttccaaagttgccaacctgatgggatgggcaatgtagcggtaattttgtaaaattcggtaacttttgtaaataggtctttttaacaataggcgaattggaaatccttatattaaagaataccggaatggtgaggtttgcctttggacaaaggcctttaagaccgggtccacccaaggggaaaaacggttagggataggcattctgaccctccctataagttttggtcaggggccaagcttaatggctctaaggcgcccttttaattccgaaacccaaccgccaaaaaggt

SEQ ID NO: 358591 - DNA, 516 bp, Homo Sapiens
  misc_feature (316)..(330): n is a, c, g, or t
tcacaaagtgccccctccatgtccctggacccttaagatatccccttgacaccctggtcagagactctgtgtctgactcaggtggtccctgcagagtgccctgggaagggaaggagcactgatttgggggttttgagggtcaagtaggggttggtaacacctggaaagaaggactctttcacttcgatccctggacaattatggaggattcggaggtagaagaggggaaggaagatggtttctatctcatgacccccactccctgtgagagggaatgggggaagcctgatgaccctcagctgttccaatctagtannnnnnnnnnnnnnnaaaattactgtatttattatgacgatggtgactccccagtgcaaaggggggccagattctgtgtgtttctctaacctctttgtaaataaatgcacagtgtaacatgaagacaatataaaggggccgctcgcgatctagaaccgacgcgtggtcgacgatatcccggaattccggaccgttaccagg

SEQ ID NO: 358592 - DNA, 1688 bp, Homo Sapiens
ttttgtataaatcagcaagtatttattttaaataataagagggcagttttataccatacatatttacaaaaatgctttgctatagaaaaatagaatcaatcactgaatccagaccaccacagtggagaacctcctggtaaagctgtgttttttcccacactggaacacaagagtagccctgtttctgcacacgttagtgcaccgctgctacgtgtggccgcccagctgtctgcaggctgtgccgaccactgcctctgtctccaggaagcagaggcagaagtgatccttgctgaggagggccatcgagtctccgcttaaatgccagcacagagagagcactgcaaagtcgccttccccaggcacctgcaccgacatgcagcccgctggggaccacaggtagagcctgctgcctcccgtgcagatggccagccgcggctgctgcgggtcccactgaaacgcgcgcactggggacagctgctcgagcaccgcgaacagcctcagcttctgaatgtcccagacccagacggcattgggaatgttgtcgttccttgtcgccaggaagtagctgtcaggactaaatgccagcattcctatgccgattttcgggtttgctctgtcggtaacaggtttcagtgtctgtaaggagactgggacagaggcgatctcatatttactctctgagctcgggagagggccggccccggcccggggcggcgggaaggagaggcagcccagtcccagctgtgggctcttctcggcctccttatacaccactatcttgggatcattaatggctgcaggatgcccaaactccgtgatcattttccaagtcacgtgattaaggatgcgcacctttccatcatagctcccaactgccaggaactgactgctggggctccaggccacagacttgatgcccagggaccactcgtaagcgctgtacgtggacaacaaccggccatccaatgagtacagcagaatcttgtactccaagcaggtgtcccacactgccagcacacagccgtttggggcccactcaatccctgtgagatcctgggtgtccgtatcaaaatgccgcaggagctgccaatcactgcagacgaagatgctcacgtaatctttgcagtcgcgccgttctgccagcgccatgtagcggccgtccctggtgaaggtgattccctgcagacaagctttcgggtatttgatgtaagacacggattttgtgcacaaggaccagacggttatccgcagatggaattccgtggtgttgagaatgtggcgcccgtccgggctccagcacgaggccaccagcccggctgagccctcgtctattttgcagtgccattcgggctgctctaaagaccagacctgcaccagccctcgcttgtacatggcgcacaggatgaagagcgagtctgccgaccactcgatgtgctggatctggtctaggcacgtgtacagctgaaggatctgaagggtgttcacatcccggaccactaaccggtactggacacaggaagccaggtacttgccgtccggggagaacttgcagagtaagctggagagcttgaatacctcggagaagttcatggccgccgcctgccgcgggcgccaccctgcgcccgaaaacccgcgggacccttgggcgcgcacaacagccgacgccggcctccgattttgaaaaatcc

SEQ ID NO: 358593 - DNA, 861 bp, Homo Sapiens
gggggacattcagaagctgaggctgttcgcggtgctcgagcagctgtccccagtgcgcgcgtttcagtgggacccgcagcagccgcggctggccatctgcacgggaggcagcaggctctacctgtggtccccagcgggctgcatgtcggtgcaggtgcctggggaaggtaagcacatccccgaggccacggacgtggcagccttgctgtgtgcagtctggcatcacacgggctgaactgttgaagcccagctgctgtctccggcagcactccagggaaactgccctcagagtctttgcgtaaacctcaagacggacacacaggggacccgctgccctcagctttatgggctagaagcagcctctccctgacttgaggcagctctggggctccaccctggctctgcctatgtgggtcactccaggcactgtgctggcctgcaggacaagggggtgccccatccccccagaatctgggcctcccctgctgcaatcctctggccaccctgtctctctctaggcgactttgcagtgctctctctgtgctggcatttaagcggagactcgatggccctcctcagcaaggatcacttctgcctctgcttcctggagacagaggcagtggtcgcacagcctgcagacagctgggcggccacacgtagcagcggtgcactaacgtgtgcagaaacagggctactctgtgtttccagtgtgggaaaaaacacagcttcaccaggaggttctccactgtggtggtctggattcagtgattgattctatttttctatagcaaagcatttttgtaaatatgtatggtataaaactgtagttttattatttaaaataaatacttgctgatttat

SEQ ID NO: 358594 - DNA, 701 bp, Homo Sapiens
  misc_feature (525)..(546): n is a, c, g, or t
aaatttcagctacaagccctgtaaggcaaaggtttattcctgtatggattcccaaaaaggaaaacttgggatttagaatcatcgtctggaattttaaagcagaagggtcaacatatacgcaaagaacttccgcttcaccccaactcaaagcttctctgcttttcagagaagcagaaaaaccaaccagaagcagtcagagacactacagaaaacaaacatgaaaactctaagcagagctgcctagagccacatagtacagagacaaacagctggcaagaatgaaggccagtgagtcttcaagaaaaattcaatagtctctgttttcaaggtacaaaaacgtgttttacattccagaaaattgtctacacaatatgttttcttttttaaatttgatactcaaaattctgctctctctaaatttcattatgtcaaaaaaataaatcatttaagatactacttaaaagaggtattattgtacctagattttcgaagttaaatctctattaccatcaagagacacaaacnnnnnnnnnnnnnnnnnnnnnnggtgttacgatttgaagaagacaatcatgaacacccaagaagtggaacgaacccagcttacttattcagacacctgatatcacctcagatcaggggcctctgtctgtctgctgggatttattttatgggccacagaaagacaaattaagggcagt

SEQ ID NO: 358595 - DNA, 1666 bp, Homo Sapiens
ttggcttgtgcttcgaagcctttgtgtctatgaagtccacatcaatgcagctcataactggaagtcactggggagttcttttgctgctgctgggtttaaacctgatcatgcattagaatctccctcagcacctgttgtggctctgccacacctctggggcatcgtcagtgtcaggatccaagccttcagggcagggaagtttcagcaactcttcgcggagctgagcagtgtgacgcttgagagctgctgcatggtgagacatagtcctgcctacccgcttatcactgctgtactgctggatatccgcaatccactcctcacattgggccattatctcaactcttttcaagtaaaaatgtttgtgtattacctctttaaaacatggtgaagggtttctgatttgttctagcattgcccacttaactgttgcttgtcgaatgtttccatcatattctcgagaactctgtgtgccactgggagtgcctctagaccgttcatatcccggttcattaaaataaggctcagctactaatataagggactggacagacaccaacacttgcaaaaagcttgaggtctgaggattccacttctcttctggtcttccatgccacgtgtttaagatgcttaaacaaaccttgccatcattataaaggtttggattgaatcgcacgctatgaccaccagttgtctctagattcacaagagggggtgaactgggataatcttgaggaaaatacacatcaaactcaaagcagccatttgcataaggggtgtccgctggaccagttattagaaccttcatgatatcaagtcgctcctcatcacagcgtaccaacacactagaggatgaagacagaggcagtgaggttgaaagcgtcacagcttcctggggcaagtcggcgaagctctggcagcactgttcgcatcattagcatttgttcacctgagacatgtagtggtaatttactttaaatcccaatttcccatcttcatcttcagaaaccatttcaaacgtatcaaactgtaatttcttcataacagccacatatttttcttcaagtgactttaatactgacaaaggtttgggtttcatagccgccttcttggagtattcacccagtttttgttcctgatttgcttgccgcaaactggtggtggctgcataaactatctcagcagtcttttggatgtctggtaccaaaagagtaagtccttctggttcttgatcagacgcatctggttttactcctgttttaacattttcccttttagatcttaaacggttggtataggtatcaacacaggtcttcattttggctaacaatgtaccaacagaagtttgacattctgactgttcttcttcctgcttcaccgttctctgtagaaaggggcaacaataggggcaccatggcagcacaagaacgcaatggcccgaagcaattccagcagtgcccgatagagtggcacatgtcttgccatgtccagaactgaatcatttcgtagataagactgacatggctgggatgaggcaggactgacctgagaagctcgagaagtacagaacgaagggcattactgttctgccctctagtctcatgagatgactgagcttctccatttaccgcactactgacgggatttatgtaactggcaagaccccgct

SEQ ID NO: 358596 - DNA, 880 bp, Homo Sapiens
  misc_feature (16)..(16): n is a, c, g, or t
  misc_feature (36)..(36): n is a, c, g, or t
  misc_feature (43)..(43): n is a, c, g, or t
  misc_feature (478)..(738): n is a, c, g, or t
gccgaaaaaattccangggtaataattaaaagaagnattaccnggctgaaataagtgtgagcctagaaacctagggtaggctgtcccacttctttttctgttgtccctgacagtaaagcaaatagtaagcccatgtccttgaaaagtgatttgcttgtttcatactgacatctaaagacatcagccttctctttggcaaccctggggatactcctctgcaccataacttattaatgtttttttagacaaggctaaacctgaatgactctacgtatctatagtttcactgctcatataccagctgctacaagaaaaaccatgacttgtaagtttgtctttactcctaattgctaaattaactgaaacccttcctgtctagggagaattgctgctagtaaggtcagtttgcaatgttcagctttagatatgtgtcgtaatgggagtctgaaaactgtaataaactgtattcatatcctgnnnnnnnnnnnnnnnnnnnnnnnnnnnnnnnnnnnnnnnnnnnnnnnnnnnnnnnnnnnnnnnnnnnnnnnnnnnnnnnnnnnnnnnnnnnnnnnnnnnnnnnnnnnnnnnnnnnnnnnnnnnnnnnnnnnnnnnnnnnnnnnnnnnnnnnnnnnnnnnnnnnnnnnnnnnnnnnnnnnnnnnnnnnnnnnnnnnnnnnnnnnnnnnnnnnnnnnnnnnnnnnnnnnnnnnnnnnnnnnnnnnnnnnnnnnnnnnnnnnnntttcccgttaaatttttcgtaaaatcagcttcatttttttacccaattaggcccgaaatcggcaaaaatcccgttattaaatcaaaaagaattagaccgagatatggggttgagtgtttgtctcacattttggaacaagagt

SEQ ID NO: 358597 - DNA, 1359 bp, Homo Sapiens
  misc_feature (854)..(862): n is a, c, g, or t
  misc_feature (922)..(1036): n is a, c, g, or t
  misc_feature (1054)..(1285): n is a, c, g, or t
tggtatcccccaacacggatgagtttttagatcttcttgccagctcacagagtcgccgtctggatgaccagagggctagtttcagtaatttgccagggcttcgtctaacacaaaacagccagtcggtacttagccacctgatgactaatgacaacaaagaggctgatgaagatttctttgacatccttgtaaaatgtcaaggatccagattagatgatcaaagatgtgctccaccacctgctaccacaaagggtccgacagtaccagatgaagactttttcagccttattttacggtcccagggaaagagaatggatgaacagagagttcttttacaaagagatcaaaacagagacactgactttgggctaaaggactttttgcaaaataatgctttgttggagtttaaaaattcagggaaaaaatcggcagaccattagttactatggatttattttttttcctttcaaacacggtaaggaaacaatctattacttttttccttaaaaggagaatttatagcactgtaatacagctttaatacttctctggacatgcgcgtttgagggtggaggggccctgtaaggtgcttcatcatctgtgattactgcttgggatgtgttctttggcagcttgtgagattactttacctagtgtttataaagtaggaagttaagtgaatcatagattagaatttaatactcttatggaaataattttttaacatcttaattgacaatggcgtttttttatacataaccatggatgtagtgggaaacaatgttgtttggtaaaaataatgtacttgatcaatgtaaaaaagtatataaaatagtcttactaaaaatctaggnnnnnnnnncctccatgaaaatctgtttttttaggccaaagtcagtataaaagaaactctacttcttgnnnnnnnnnnnnnnnnnnnnnnnnnnnnnnnnnnnnnnnnnnnnnnnnnnnnnnnnnnnnnnnnnnnnnnnnnnnnnnnnnnnnnnnnnnnnnnnnnnnnnnnnnnnnnnnnnnntgaaaaataaatcagcannnnnnnnnnnnnnnnnnnnnnnnnnnnnnnnnnnnnnnnnnnnnnnnnnnnnnnnnnnnnnnnnnnnnnnnnnnnnnnnnnnnnnnnnnnnnnnnnnnnnnnnnnnnnnnnnnnnnnnnnnnnnnnnnnnnnnnnnnnnnnnnnnnnnnnnnnnnnnnnnnnnnnnnnnnnnnnnnnnnnnnnnnnnnnnnnnnnnnnnnnnnnnnnnnnnnnnnnnnnnnnnnnnnnnnngagcttgagaccaaagcccactgggactcccagccctggagttggaccagaagccaaggacttcttggtccttc

SEQ ID NO: 358598 - DNA, 801 bp, Homo Sapiens
  misc_feature (64)..(64): n is a, c, g, or t
ctagtacagaagggtttatggcttaaggtgagtaaaagccgtgttcccatgaatctttataatntaatggttcattttcttaaagtatctcaacaaaaagaaggcatccaagatatactttcctttggaggttattttcaatgatactcaaaggtatattcaatttaatttttctaaatacgagaaaaaagtcaaccgttaatgctatctttcacatctacatttctaaatcaattcctgattttaagcttaaagcacaattttcaaagaaattctgaaatagccatctatgtcattttccccttcagcataaatgtacaaaaagcaacctccaacaaaaataaacagaattttagccctatctagattttaagctgctcaaggatagtttcatatctatggtgcctcagtttgtgtaaaagctatgacatcatgatttagatatgtgaataacactagaggatgagtgggatgtgcttgagtataatctagcagcacgaaaaagttttaattacaacccttgtactctccactgtttataatgtgagtttttttaaactttctctttatatgatttcaaagcctagaaaaatatcattcttcctggaataaatctctttctgacttgcagtaactagaagtcattttcgctagtggaataatatgaatagtaaaaatatacattaacactcaataattttttgtatttttaaagatgtaaaacataataaggcatattaaaattacactgagcttaattaatcattggtagttaagaagaaacctcagcatcttaaaaag

SEQ ID NO: 358599 - DNA, 754 bp, Homo Sapiens
  misc_feature (349)..(349): n is a, c, g, or t
  misc_feature (525)..(525): n is a, c, g, or t
  misc_feature (630)..(630): n is a, c, g, or t
atttcattcaggcttcccgtgtctggttggctacagtgtgggaatttcctcccacttttcagccactactgaggatgcctttcggcaaaattccttgaaattggaaacttacagggaaattcctttcctccaagagtgcgctctcctccagtgttggcttgcttttggttgttctccgtggttttagatagctgtctttatattaattctggagtttacagttgatatctgttgggggcttagtttgataacatgtattcttctattactagtagccagacctgtatgtcttacttgacctgatggagaaaagtttcaacttatgagacaatactgtgctagctagttntactgatttgtactctaaagtacccaagcctaaaatagtagagctgtctatcccacatgaaacttctctgattttcactgctttttataaaaagtatacatgttcacatttctgtaggtttttttaagcatcacaatttttataaactttctatatttccaaggtctacctgcttntgtattttgcctagtgagagttttgtattcatgtaagaataatctcttggggtgagtatctattttccactcatccaaaacagatagagcattgatttcactaangcgtatgttctagtttgctttggtattatattagaaatacctgggtgataatttgagctaaagtatctctctaccctcattcccagcttatcacccgcttttacacttccaggggtggaacatt

SEQ ID NO: 358600 - DNA, 1003 bp, Homo Sapiens
aaatggcgcccactggtctcatacagaggagctgtgtgactttctggaattatagaaatatccgcatccagccatgtgctgagcagaccaatgtaaaatgttcagcaggtttccaaatgtctcttggatatatttaatcatctctgcagaagaactcaaaatctcagagcagctccactccagatccaggggcaggaggcagcctccagggagggaggctgcgtttacgagaatctgccttttgtgtgtgcctggctgggaccagcctctgggaaagagaagcaccaagacgtgaacagggctgtgggccgatggctttagcagccacataatccctcctttgatgtccagggtcagttcgagcctggtcccccaggctaggaggagacgaatgaaagaatcttgctgtggtctttcctgcaaaggaaacagcagtaacattgattacccagtcaccgggaggaattcttgtgagcgcgcacctctgtgtgcctttgctctccactttcaagagaggactttaatcacaggacaaggagaagacccaggcccatttcagtctccgggacgggtcacagcgagccgtgtgacgctggcctgctcacacgtggccatgacaccagcaggctgtactcaggctttgcgtacacaatagctgctaggagtacccatttcagacacgcacccactctaactgttctcagaaagtctcagctcacctcgccgtgggagagctgggccctgcctcccttacacatgggggcaaacggccccctgctggcactgtgtcctgccttcaggcctgggagctcttaactttctgccaacagggttttccaagtctacaaacccccacgccgcaggagcacatgcagatgactggcaccgtgctgccgccgggccggggtggacgcagggtggacgcgggcctgtctgccgcgagtgggagccccagctctcctgagcctcgggcacttacagacacgaaggctttttgctcaag

SEQ ID NO: 358601 - DNA, 503 bp, Homo Sapiens
gggagcccaggtggtggccgaaatgttattttaacgaggaaagaccacagcaagattctttcattcgtctcctcctagcctgggggaccaggctcgaactgaccctggacatcaaaggagggattatgtggctgctaaagccatcggcccacagccctgttcacgtcttggtgcttctctttcccagaggctggtcccagccaggcacacacaaaaggcagattctcgtaaacgcagcctccctccctggaggctgcctcctgccctggatctggagtggagctgctctgagattttgagttcttctgcagagatgattaaatatatccaagagacattggaaaacctgctgaacattttacattggtctgctcagcacatggctggatgcggatatttctataattccagaaagtcacacagctcctctgtatgagaccagtgggcgccatttaaaagaacaggatgagaatctaagatatattattaataaatgtaatgga

SEQ ID NO: 358602 - DNA, 2854 bp, Homo Sapiens
  misc_feature (233)..(243): n is a, c, g, or t
  misc_feature (650)..(650): n is a, c, g, or t
  misc_feature (657)..(657): n is a, c, g, or t
  misc_feature (1262)..(1271): n is a, c, g, or t
gctggtaccggtccggattctcgggatccaagactggggtagaattttaaagattcaacactggtgtacatatgtccgctgggtgagttgacctgtggcctcgcacagtgattctgggccctttatgcttgctgtctctcagaattgttttcttaccttttaatgtaatgacgagtgtgcttcagtttgtttagcaaaaccactctcttgaatcacgttaacttttgagattnnnnnnnnnnncgccatagcacagctgtctttatgcaagcaagagcacatctactccagcatgatctgtcatctaaagacttgaaaacaaaaaacagttacttatagtcaatgggtaagcagagtctgaatttatactaatcaagacaaacctttgaaaggttacactaagtacagaacttttaaaccttgctttgtatgagttgtactttttgaacataagctgcacttttattttctaatgcagaggatgaataagttaaatacatgctttgaggatagaagcagatgttctgtttggcaccacgttataatctgcttattttacaatatacacgtttccctaagaaatcatggcagagatgtgagggcagaatatacacaacagatgctgaaggagaaggagggtagtgttttgncaaaganaaagaaaagaaccaacagaattttaactctattaacttttccaaattttcctatgcttttagttaacatcattattgtatcctaatgccactaggggagagagcttttgactctgttgggttttatttgaatgtgtgcataacagtaatgagatctggaaaacacctatttttttgggggaaaaaggtttgttggtctccttcctgtgttcctacaaaactcccactctcaggtgcaagagttatgtagaaggaaagggagctgaaataggaacagaaaaatcaacccctataactagtgaacaccaagggaaaataccacaatgatttcagaggagactctgcaaaatcgtcccttgtggagaatgcaggcaacatggaatactacgaatgaaatcacatcactgtatcttttacatcaatagcctcaccactaatatatcttgtatctaggtgtctataatggctgaaaccactacatccatctatgccattgacctgaaaacttaactgtggcctttatgaggcagaaaagtgaactgagttttcgtagttaagacctcaaatgaggggagtcagcagtgatcatgggggaaatgtttacannnnnnnnnncttcagaagtaacgctttctgatgattttatctgatatttaaaacagggagctatggtgcactctagtttatacttgcgctctgaaatgtgtaaacatagggtgcctacctatttcacctgacccatactcgtttctgattcagaatcagtgtgggctcctgcagtgggcgcgggtcacggctgactccaacttccaatacaacagccatcactagcacagtgtttttttgtttaaccaacgtagttgtaattagtagttctataaagagaactgctttttaacattagggactgggagcagtccatgggataaaaaggaaagtgttttctcacgagaaaacatgtcaggaaaaataaagaacactttctacctctgtttcagatttttgaaacacttattttaaaccaaattttaatttctgtgtccaaaataagttttaaggacatctgttcttccatacgaaataggttaggctgcctatttctcactgagctcatggaatggttctgcttatgatactctgcacgctgccttttagtgagtgaggagtttggggttgcctagcaacttgctaacttgtaaaaagtcatctttccctcacagaaagaaacgaaagaaagcaaagcaaagtcagtgaaagacaatctttatagtttcaggagtaaatctaaatgtggcttttgtcaagcacttagatggatataaatgcagcaacttgttttaaaaaaatgcacaatttacttcccaaaaaagttgttacttgccttttcaagttgttgacaaacacacatttgatattctcttatatgttatagtaatgtaacgtataaactcaagcctttttattctttgtgattaaatcctgttttaaaatgtcacaaaacaggaaccagcattctaattagatttactatatcaagatatggttcaaataggactactagagttcattgaacactaaaactatgaaacaattactttttatattaaaaagaccatggatttaacttatgaaaatccaaatgcaggatagtaatttttgtttacttttttaaccaaactgaatttttgaaagactattgcaggtgtttaaaaagaaagaaaagttgttttatctaatactgtaagtagttgtcatattctggaaaatttaatagttttagagttaagatatctcctctctttggttagggaagaagaaagcccttcaccattgtggaatgatgccctggctttaaggtttagctccacatcatgcttctcttgagaattctatttggtagttacaattacagaaactgattagtttgtcagtttgcagatagatttagcacagtactcatcactcggatagattgagatgttctttcacatcagatgatctgtaacactgtaagatactgatctttacaactgtttaatcagttttatttttgtacagtattagtgacctaagttattttgctgtcccgtttttgtaaatcaaatgaaattataaaagaggattctgacagtaggtattttgtacatatgtatatatgttgtccaaataaaaataataaatgataaagactgaaaaaa

SEQ ID NO: 358603 - DNA, 872 bp, Homo Sapiens
  misc_feature (181)..(231): n is a, c, g, or t
ggacatgtctatttctaaaaatccagtagtttctttgcattctcagtagtacacgttgtatatatatatatgtaacaaatttggtagttttcagtatgtgtgatgtcctttgggggttatttatcttgctggtccataggaggggtacactaccccaagaatcaagacatctgagttctannnnnnnnnnnnnnnnnnnnnnnnnnnnnnnnnnnnnnnnnnnnnnnnnnngccattgtctcccagtcatgtttaccacccatgaaaggactcgtcggtttgatgtttccattaagctcaatgagtaactctaatagttactcttgaatctggattgaaaaacaccatgcatctgatgagataattcataaatgttgccccttttttaaatgatacaaccctaaaagtgactgaattgcccaagtgcttgaacatggcagaggtagttactcttattttgcagtttgtgcacttaaaaattcctacagtgattgttactttactggggaaaaaagatgaggtgaaacttcctcccaaggaattaaaatatctgtagaagccatggcttgcttttataatgtggaaatcatttgatttgctgtaattcacgcagatccctccttttgtcagggggaaatgatttgcatcatgttcttttttcataatgcttttacttcctgtttggatcagttgtatgtaaatgtacatttttgttactttggctgtgcccgttagaatttatcttccataaagtatttctcccattgagtctaatgatgtatactttgcctaggtctttccaaaattaaatttatgtaaatgtctattttatataaaatatgattaaaataagtatgtctggtttcaatctc

SEQ ID NO: 358604 - DNA, 846 bp, Homo Sapiens
  misc_feature (45)..(45): n is a, c, g, or t
  misc_feature (154)..(204): n is a, c, g, or t
aaaaggggcaacatctatgaattactcatcagatgcatggtgttnttcactccagattcaagagtaactattagagttactcattgagcttaatggaaacatcaaaccgacgagtcatctcatgggtggtaaacatgactgggagacaatggcnnnnnnnnnnnnnnnnnnnnnnnnnnnnnnnnnnnnnnnnnnnnnnnnnnntagaactcagatgtcttgattcttggggtagtgtacccctcctatggaccagcaagataaataacccccaaaggacatcacacatactgaaaactaccaaatttgttacatatatatatatacaacgtgtactactgagaatgcaaagaaactactggatttttagaaatagacatgtctctccacggtaggagtcaatggtgatctatgcttacaaaccaataatgaccatatattgtggtggatgctgattttatgagttacaggccctaaagattttaattgaaaagatcaattaaaatcaatattttaatatcagccaattgattgttataaagatcttatcaattctgttgtgccactttgattgatattaaaccatacttttgattgcagttattctctgttctctttaaattacatggctacaaataaaatattgagggaaataatattttttggaagaactattcagcatattttccttttgcatcaaaaacgtcaagaataatcataaaatcttataatatttctctatattattttttgacatcctaagcttttatcttattcaactgcaacctcaatgctagatttgacaggtacttaattctttttaaatgtcaaaagataccatttaaa

SEQ ID NO: 358605 - DNA, 754 bp, Homo Sapiens
  misc_feature (197)..(197): n is a, c, g, or t
ccaggctttgagaaaacagcatttataatactataggacttacatttcttgcacactttggtagcccaaatagtttttccactgtgaagatggaccatgtaaatatcttcataattatatacccaaatatacttaatggacatgataaatggttttgggtaaggttcacaatttttcaaaagtattggtggcatagnaaacacatgccttttaaaaatttattttttcaatgaacgtttcttaggcatgtgtaagaagtattgcttcatgtggttgcactcttcccttgaaatgggaaaaaagtacaggtaatttagtttgcttgggacagcttctccataacatttgttttcgaccatattaatcccacagttaccagatgaccttagtataaatttttacaatatatttgttcataaagaatatatccttcaaaatatatatagctttgaaactaccctttaaataccttcattttctccagaatttcctttatctattgcccactgttttatgaataatttttaaagccttagaaatcatacatctttatctgtcacaatgtgaaacatgcattcttttgaattatataaatatctaagagtttataataacattccaatattttctttccagggtaaatattctgtagtttctatactaacataattaagtaattatggtggcatattcacttttaacattattttttcctagactcaactatgcaattaaagcctgcttttggaaaatg

SEQ ID NO: 358606 - DNA, 631 bp, Homo Sapiens
  misc_feature (273)..(285): n is a, c, g, or t
gaagggtctcataaacagctaggcaattaatgcctaaaaacatggaccaagaaagccgcttacgccaatgatgggtgctgcagtgcaagtactctcggaagtcaagcatggaaaagaaggggacagggggatacagacccatcaccttcataatttctgcatttctagagaaaattcaaggaagaaaacaatatttcaggttctaggaaatacttcagggtttcaggagacagagttcacaggatgtgaacatggattccattacaaaagccnnnnnnnnnnnnngggaacaaagggctctcacccaccctcagctaagtactcaggtctgaaggcaaccacactgattatggaggctccactttttcactatccaactcaaaactgtcattgtcagtctttttttgaattctttttaaagacaaaactaaacccagaagatcgaactggaaataaaagcagacaaagagaccaccaaatatactgtttaaaaaaacaacaacaacactgctcatggtttacagtatgtggacagttcctttgttcatgatagagtaaacaaaagtcccttttgtgtgcttgagcaaatgaaaaccaagaggagaaaaacacacaccacctcccatcccct

SEQ ID NO: 358607 - DNA, 943 bp, Homo Sapiens
  misc_feature (243)..(262): n is a, c, g, or t
  misc_feature (851)..(899): n is a, c, g, or t
ggttggtggtctctttgtctgcttttatttccagttcgatcttctgggtttagttttgtctttaaaaagaattcaaaaaaagactgacaatgacagttttgagttggatagtgaaaaagtggagcctccataatcagtgtggttgccttcagacctgagtacttagctgagggtgggtgagagccctttgttccaaaagtccattagttttgctgttgtttaggagtaggtggttgttgttgnnnnnnnnnnnnnnnnnnnnggcttttgtaatggaatccatgttcacatcctgtgaactctgtctcctgaaaccctgaagtatttcctagaacctgaaatattgttttcttccttgaattttctctagaaatgcagaaattaggaaggtgatgggtctgtatccccctgcccccttctttcccatgcttgactcccgagagtactggcagtgcagcacccaccattgacgtaagcggctgtcttgtcccagtgtttgtaggcataactgcctcagctgttaaggagacctgtgtcaaaacttacatccacattcctacacccccacaaccccatcactttctggtgttaaccctaaaatacccacatgtattgagctggtcttctgcatttaagtatttctccccagtttttttcccccactgtgtgtggggggagggtccataaacccgagtgtgcctttgctttccacccttgctagacactggtagatgcaacaaactcagatttatatttgttgtaaagttgtaaaaatattgtgatgtcaccaattttccttccatctccacatcccctaacatctgattcacgacttaatgtatgttgtaagnnnnnnnnnnnnnnnnnnnnnnnnnnnnnnnnnnnnnnnnnnnnnnnnngctctttattacttaaaagtaataaaacctgactgttctatatt

SEQ ID NO: 358608 - DNA, 955 bp, Homo Sapiens
  misc_feature (772)..(772): n is a, c, g, or t
  misc_feature (875)..(875): n is a, c, g, or t
  misc_feature (932)..(932): n is a, c, g, or t
gggtaaaagaaagggagaaatgtgacctgttaacaaaaaaccatggactaaaaattactttgggagaagaaaaagatagaatttcagaaaggaacagtgaagaggagaataaacaaaaacttatgacctttgatcatcatccattgtggttttaccttgatattatcaaagctacccctttaaatattgatggacagcgttattctcattgcctgtcatttaacagactaaggtgctctgcatctttatacaaaaattatattccttcttttgtgctacataatttatctagtatttggaagccatcttttacaaacaagaaactgtttttgactttcgaatctcagacaagagtaggtaataaactaaatgatgcagggtttatttctccagaaattttacatagtcatcctgatacttcgtgctctttgggagtcacttctgattttcactttttaaatgaaaggtttgatagaaagctgaaaagatgggaagaacctaaggaattaccagctgaggacagccaagacttaacaagcactgactaccgttcccttgagctaccattatcacaagggtttgcctttcaattagtaaagctttttggatctccaggcgttccaatggaatccttgttgcctgatgactatgtggttccccttgactggaagacactaaagatgatctacttgcaatggaagatgtcagtggagaaaagacagaagaagaatggttgaaaaatgaaaattccttgaactttgagttctgctgncttcatggtactgctgaagatcatgatcacggagaaaagtcagagtgctcagtgccaacccaagggatccttccagagacgtacccgttgataccaaaatagnttggataatctggtcaaccatcttgataagtattttgatataagtatgccatacttntgttgatagaagaaagtaaggca

SEQ ID NO: 358609 - DNA, 857 bp, Homo Sapiens
  misc_feature (187)..(187): n is a, c, g, or t
  misc_feature (210)..(210): n is a, c, g, or t
ccatgggaaatttaagatttgtccagatgcaaaccaatttcaggattacaaaatacacgccctgctttagcccacgtatatgaaccaaagcataccttctaatattttgttaaaaataagtcaaactaaagcataatccagaattacctgttacatagtgagaaagtaggaaagccctccaggggcnccgtgccccaagtaaaagacaangaagtaaatttatacaatgaaatccacgtatactcaggctctttacactaaaaatcaaagtggagaccaaccagttcctaaagcataaaagagtgatttaaagaaaatatcacattttgagttacggtatattcatcacatttttccctgtaattttcactttaacagtgatagtcttagcagcaaaaatttgctgggaatgttaggaaaaaaggaagccacacatacctactaatttaaaaatatataaactattttttacagaagggcaggtttaaaagaaaatccaatcatgatcttttcatgccattttttgtcaactttccatacacacgcagacgctaacaaagtactgtgtcatatacactgaagtgtcctgaagatgcctgtgagctgctgattccagctggtaccagggaagcatgtgtggctaagttgcaacaaacttaaatttgttccccttagttcttcatctttttaaaagctgaataaaattaatgtcaatcgggtagggccggtattaacagcatcaaccgcttgcttactatgaatcatccgcaacagaaacccacgtgcattctccattcttaaaaagtcagtgtaaaactaacggccacttcctccctaggtgcctactatcgctatcc

SEQ ID NO: 358610 - DNA, 917 bp, Homo Sapiens
tctggggcaagtagtctccgcggttataggtagcgaggcctgggtggcgcgggggcacatcagacccctacgtgaaggtatggctgatgtacaaggacaagcgggtggagaagaagaagacggtgacgatgaagaggaacctgaaccccatcttcaatgagtccttcgccttcgatatccccacggagaagctgagggagacgaccatcatcatcactgtcatggacaaggacaagctcagccgcaatgacgtcatcggcaagatctacctgtcctggaagagcgggccaggggaggtgaagcactggaaggacatgattgcccgtccccggcagcccgtggcccagtggcaccagctgaaggcctgagtggggccaagggaggcccagggggccgagggcccaggtccccatcatgccctcaccactttatgcacaacgcccggcctgagccccctgccatagggaggggaggaccctgagggctcagccagggaggggtcccaggactcaactgggccccgtttctaggaagtaccagccccatcccccacagtccagctccggggaaggggctctgggaggcattttcctgctttgccccttttcttcctgacttactaatactaaagaagttgggggagctcgagagccagacggccagacaggcagacccctccagaggcccgccaggtgggcatggtcccccattttctttaaggcagcacctggagtggagagaggccactccctctccagcccccgatgtggacccggggaggggaggctgaggcgtttggccccggcctggccaggagaggcccatccccagggcagtttcaggtgccggctgggccctgaatgtcgaggatagtatatagcccgctcctgggtcctggagctgtggccctttgtaaa

SEQ ID NO: 358611 - DNA, 816 bp, Homo Sapiens
cggctctggggtatcggtgctggtactttcctagtcttcggggcccagttgagtccggggaccccttcccctgcgtgagccctcagggtcctccccctccctattggcaggggggctcagcccgggccttgtgcataaagtggtgagggcatgatggggacccgggccctcgggccccctgggcctcccttggccccactcaggccttcagctggtgccactgggccacgggctgccggggacgggcaatcatgtccttccagtgcttcacctcccctggcccgctcttccaggacaggtagatcttgccgatgacgtcattgcggctgagcttgtccttgtccatgacagtgatgatgatggtcgtctccctcagcttctccgtggggatatcgaaggcgaaggactcattgaagatggggttcaggttcctcttcaatcgtcaccgtcttcttcttctccacccgcttgtccttgtacatcagccataccttcacgtaggggtctgatgtgcccccgatgtccatggctttgaggttccgggctttgatgatgttcacgatgatggagttggcagaggggttgtagcagagagacaagagcagctcccctcggctcccactcccatcgctgcatggcttcagatccttccagaaggtctgcatctgggtcaggtccaccttgttaagggggatggacaccttcccaatggggtcgttgcggctgaagcggtcatagtccaggacttggaggtagaggatcctctgcaccaccttctcatagggaaaaccttcaaagaggaaggtctcgttccag

SEQ ID NO: 358612 - DNA, 515 bp, Homo Sapiens
  misc_feature (11)..(11): n is a, c, g, or t
  misc_feature (43)..(43): n is a, c, g, or t
  misc_feature (48)..(48): n is a, c, g, or t
  misc_feature (70)..(70): n is a, c, g, or t
  misc_feature (83)..(83): n is a, c, g, or t
  misc_feature (157)..(157): n is a, c, g, or t
acttcaagggnaaccaacgaacccccttcttcaaagatctacntgctnccccgaacaagaaacaacaagntggaaaacccaangttgaaacggaaaaaaacctgaaacccccaactggaaacgaaaaccttccctcttttgaaaggttttccccctnatgaaaaaggtggtgcaagaggatccctcctacctcccaagtccctggactatgaccgcttcagccgcaacgaaccccattggggaggtgtccatcccccttaacaaggtggacctgacccagatgcagaccttctggaaggatctgaagccatgcagcgatgggagtgggagccgaggggagctgctcttgtctctctgctacaacccctctgccaactccatcatcgtgaacatcatcaaagcccggaacctcaaagccatggacatcgggggcacatcagacccctacgtgaaggtatggctgatgtacaaggacaagcgggtggagaagaagaagacggtgacgatgaagagga

SEQ ID NO: 358613 - DNA, 500 bp, Homo Sapiens
tcggtaaaatgactgcccatccattaagcctagggcaagccagtctcattccatgatagcatgcctcgccacagaagctttttgcactttaagtcagagtgccaaaggcaggcgttgaaattcattctttggcattcttaaggtatagaccagagcaaaggcagagctactcagccactgctccctggcctccaggcagactgctggtccccagctctccaagataggcccttgatctgtgtcccaggcaacacacagcaatctcatgacatttctgggacatattttctactgggatcacagcagctttctagggctctcaataatcttccaatgtttgcatcggtgattgtggtattttcccccaagaaaaccagagtcaaaccatgtttctttaaaggggctgtggccctattagccatgctttcatggccaaaatctgcacacctgtctgctttattcaggatagagcagggaggccacagccctgaaacaagggc

SEQ ID NO: 358614 - DNA, 696 bp, Homo Sapiens; identical to SEQ ID NO: 7692
  misc_feature (503)..(503): n is a, c, g, or t
  misc_feature (506)..(507): n is a, c, g, or t
  misc_feature (520)..(520): n is a, c, g, or t

SEQ ID NO: 358615 - DNA, 1286 bp, Homo Sapiens
  misc_feature (1055)..(1055): n is a, c, g, or t
tacagaagctatacgaacaaagaaaaatggtcatgtacctcaacatgctaaggacttgtgaggcctacaatgaaatcatctttccccactgtgcctgtgactccaggaggaaggggcacgttatcacagccatcagcatcacgcactttaaactgcatgcctgcactgaagaaggacagctggagaaccaggtaattgcatttgaatgggatgagatgcagcgatgggacacagatgaagaagggatggccttctgtttcgaatatgcacgaggagagaagaagccccgatgggttaaaatcttcacgccatatttcaattacatgcatgagtgcttcgagagggtgttctgcgagctcaagtggagaaaagaggaatattagttagagactgattatctcatgtgagccaggacattcttccagcaaggttggcctctggatggtgaacgggctgtgcaaaaaagccctgcttcttcccttgtctagagggtggacattggctacaggctcttccatctctcatgacttcatggaccctcctctggcagttttttaaatcagatcaccctccatgttgttcctgacccacaggggaagctgtcctcagttgtagccgtcttgactggatgagtcctggcagtctttctaggcgaaccaagaatgtttgtgtgagggaaggtgtttgctgttgctttactgctgtctgtatgtgccagtgctggaacagaatttggaagattctgaataattacttacttattctcaaagaaaatctttgaaagaatcaggaggtcaagtcaagaacatgaaaatttatattttagtacagtagaaagaacattggactctgggaattttatctgcattttctcctgacttttttttccctctatataattttaaataaatcagcctccctaactttcacttgtctcttctgtgaaacaggaagactgaaccacgtaattaatatccaaagtcccttccaactctaaaaagctatcattctagattagaacttatatcaataaagatatgaccaatcagatttantcatccaaacatacctgtttaacttctattatagacttatctccatataatatgatatataccttcccaataactctttttttgtttcctttcagaacattttgcacataacgaaatcacatcatagagatgttaccacctaaccctttcttatcccttgcctttctttacccccaccttttactctttcatatcccatttatatcatataccatttacatataaaataaa

SEQ ID NO: 358616 - DNA, 1199 bp, Homo Sapiens
  misc_feature (1046)..(1072): n is a, c, g, or t
gacagccacgtggccgcaggaggatttacaacattttctttcgccatcgatgttatcgcaaaatgtgtgagagaagcggctgcgcagcccggacgggagcgtgagggtgcgggccaggtaagcagccccggcggtttcgccgcatacgggactgcggggcgaccgcgggcaccagccacgcgcagcggctccgcggggtctcggccgggtccgcgctctgaaggatctcgagagccatggatggtgcaggcgggaccctcgagctgcagcatctccggtgacccggggttgccgaggaggtggagaccagcacaggtggtccggcccgggcgcctccgaatccgggggtggtcaagacggatccccaaggctgaggtcggcagtcccggggactcgcagctgttgagcctgtggagacgcggccccgtgaccgaggcacccttcagcaacccgggggcagcgttccagagactgaacttctcaaatcactgcttcaacagcttttaaaaatctggacctagttactccgtgtcatctatgtgtacaagatttagaaaaaaaatcccaaacccaagggtgggcagccgcgaggatgtacagctcctggcagtgtgcgctcacccggagacctgaggtcaaagcccaaatgctgagcacctcctgggaggcgggagcatggtctgctcagtgccagacatctggatattgagaaaacatctgggtagctggggttttcaggtttctgcctgacatttaatatcacaaacattgagcctgctcctgtcccccaccagccacgcggcttctcctcccaaacatacccagctccttcccctgccttcctgacgggtaagaaacatccattctttccaattccccagcgttttccccctaccggaaatctgatgggcttatgacatcatggctggctgctgagcgatgaagtggatgccacaaagaaatccgacatatcagatagattctgaaatcggtttccctccagctgtagtaacaggcgtgaagtcaggagaatttgagctttgttnnnnnnnnnnnnnnnnnnnnnnnnnnnccataacaaagtcttgccctgtattaaatgcaattttcttaaaaacaagcaaaccttttggacatcattttattttaatagaaatgctgagttttatgaaactaaagtggctaataaatcagacctg

SEQ ID NO: 358617 - DNA, 472 bp, Homo Sapiens
  misc_feature (14)..(14): n is a, c, g, or t
  misc_feature (122)..(122): n is a, c, g, or t
  misc_feature (298)..(324): n is a, c, g, or t
aattcggggggttntcaaagacggatcccccaaggctgaggtcggccagtcccggggactcgcagctgttggacccctgtgggagacgcggcccccgtgaccggaggcaccccttcagcaancccgggggcagcgttttccccctaccggaaatctgatgggcttatgacatcatggctggctgctgagcgatgaagtggatgccacaaagaaatccgacatatcagatagattctgaaatcggtttccctccagctgtagtaacaggcgtgaagtcaggagaatttgagctttgttnnnnnnnnnnnnnnnnnnnnnnnnnnnccataacaaagtcttgccctgtattaaatgcaattttcttaaaaacaagcaaaccttttggacatcattttattttaatagaaatgctgagttttatgaaacttaaagtggctaataaatcagacctgaagctttgtgtgagtgttcc

SEQ ID NO: 358618 - DNA, 773 bp, Homo Sapiens
  misc_feature (233)..(246): n is a, c, g, or t
  misc_feature (381)..(381): n is a, c, g, or t
  misc_feature (555)..(563): n is a, c, g, or t
  misc_feature (672)..(698): n is a, c, g, or t
aaaagacatactatatctggggaggagtcatcaggaggagcattgtgacactttgagggatgatggatatgttcactctcttaattgtagtatgcatgttctccacaaggtgtgaaaacttatcaaatagtacactttaaatatgttcagtttattttatgttaattatatctcaataaagcttttaacaaaagcaaacatctcttgcctacataaggatgacacagctcttnnnnnnnnnnnnnngattcctgctagattgtgtgcagcaaaataaaaaggcttcctttaaagtagaatagccctgtgaagagtgggtggaaagaaaatagaagcctaaaaatagaagatatatttctaattccatctgtttctattttntgtcttgtatgtttcggaattatagcatagcaaaacagagttgagaagagttcatctacaaaaggtatgttctttagggaaagaaattctattcttacctctgggccacacatcccatgattctaacaagaactgttgtgaagggttaaatctattaatctgtcctctggtagnnnnnnnnntgaagaaataataactgattcaggaagtggtaacaggttgtggattagcttacagaaaagaccactcacttactaattactttcttgggctcaccacttgtcccaaaannnnnnnnnnnnnnnnnnnnnnnnnnnctgtctgtctgtctgtaagtggtagagtctggagatggaccacagtgtaagaaccaaggattgatacctttttta

SEQ ID NO: 358619 - DNA, 439 bp, Homo Sapiens
  misc_feature (426)..(426): n is a, c, g, or t
gaaagagaatcaataaatcacagtctgaaagttgtgtatgttgtgtgcaagctcagaggggcagtcttcttcaatttgccttgtgctggtgaattgcttgaatgaacttcggtatttcttaacaccaggtactggagcccaccttctttctctccctctggtttcctctttaaatcacagcctgaccccagtctttatagtccattgtaagtggaagttatagctctattcttcacccacaccttgctccctatcattgatacttagaagaaagtaacaatttgcagtactggctgaactcctttgggaaagtttctggagtgtatcaaataagaattcatcatagtaacatggtcgttactggctgaacaattttcatgtttctggaattcacgtgtatagttaacagcttgatatgtcttacanaagaaactactta

SEQ ID NO: 358620 - DNA, 1158 bp, Homo Sapiens
  misc_feature (460)..(473): n is a, c, g, or t
ggtattacagtatttgtggccaatttggagaaaccagtgttatggttttctgattttactttatgcagtttatttcttaaaagaaaaaattcttgcagaacacagacatgaacacagagtctttgaaaagtgtaagagtataggcttcagtgtggatatttctcaaaagatgtagaatctcccaactcaaagtgtggtcgatggactggcagcatccacatcacctgggagatttgagagatgaagaccttcattcctcatcccaaacctactaaaaggaatctgtattttcacaagatccctagtgacttgtatgctcaagaagcactaatgtaatgtttttaatccacccaaccctaaaggataatccttgagaaagacaaaactactttaatggggaaattttgtccataatattcaaccaggaatgtaacaacttttagacatggcccacttaatnnnnnnnnnnnnnncctgaaatttatcttgttgctgctgtatagtaatgaagtatgagaatgggaacatataaattaaaatgccatatgttaaataaatattcatgacctgattgaattaattatacacaaccttccattgtttccaacctaagtagtttcttttgtgagacatatacagctgttaactattacactgaattccagaaacatgaaaattgccttagtaaacaattatttaatgactaagtacaatagtctcaaaaagaattttgttcagccagtaacgaccatgttactatgatgaattcttatttgatacactccagaaactttcccaaaggagttcagccagtactgcaaattgttactttcttctaagtatcaatgatagggagcaaggtgtgggtgaagaatagagctataacttccacttacaatggactataaagactggggtcaggctgtgatttaaagaggaaaccagagggagagaaagaaggtgggctccagtacctggtgttaagaaataccgaagttcattcaagcaattcaccagcacaaggcaaattgaagaagactgcccctctgagcttgcacacaacatacacaactttcaggctgtgatttattgattctctttctcctttaaggctctccttaacattagtattaatctgatttgtccataaaagaacat

SEQ ID NO: 358621 - DNA, 1023 bp, Homo Sapiens
  misc_feature (630)..(630): n is a, c, g, or t
  misc_feature (690)..(690): n is a, c, g, or t
  misc_feature (698)..(698): n is a, c, g, or t
  misc_feature (705)..(705): n is a, c, g, or t
  misc_feature (765)..(765): n is a, c, g, or t
  misc_feature (778)..(778): n is a, c, g, or t
  misc_feature (798)..(798): n is a, c, g, or t
  misc_feature (828)..(828): n is a, c, g, or t
  misc_feature (855)..(855): n is a, c, g, or t
  misc_feature (945)..(945): n is a, c, g, or t
tctagaactagtgcgatccccgggctgcaggaattcggcacgagcatcttgaaagtttacgaacaagaactgcagaagccttaaacctggatgcggcgttatttgaactaatcaagcgatgtcagcagatgtgttcgtttgcatcacagtttaacagttcagtgtctgagttagagcttcgtttattacagagagtggacactggtcttgaacatcctattggcagctctgaatggcttttgtcagcacacaaacagttgacccaggatatgtctactcagagggcaattcagacagagaaagagcagcagatagaaacggtctgtgaaacaattcagaatctggttgataatataaagactgtgctcactggtcataaccgacagcttggagatgtcaaacatctcttgaaagctatggctaaggatgaagaagctgctctggcagatggtgaagatgttccctatgagaacagtgttaggcagcttttgggtgaatataaatcatggcaagacaacattcaaacacgtctatttacattagtccaggctatgggtcacgttcgaagtcaagaaacacgttgaaatgctccaggaaatcactcccacctttgaagaactgaaaacacanagtcagagtatctataataacttagtgagtcttgcatacccttagtcaccgatgcaacanatgaatgntcgagtncaacgtcatctgctacttatcaggcatccttcgctgcagcagtccggagtaacacttggncagaagactcagnctgatgtcatgtcacagaantgctagaaagctgaccaggaaaaatcttgntacattaggctgatacttcaccaaagnaccgtttcaggaacttgggcagaaagtgtgcttgtgagtcctaaaaaaggcagtcagaggaccttaaaacttggaaagccgtgaacgaangaaactcctattccgggagttggtggatagtttacagggttgcttatcactaatagaagaactaattatatacttgga

SEQ ID NO: 358622 - DNA, 961 bp, Homo Sapiens
  misc_feature (88)..(88): n is a, c, g, or t
  misc_feature (110)..(110): n is a, c, g, or t
  misc_feature (153)..(153): n is a, c, g, or t
  misc_feature (155)..(155): n is a, c, g, or t
  misc_feature (160)..(160): n is a, c, g, or t
  misc_feature (163)..(163): n is a, c, g, or t
  misc_feature (168)..(168): n is a, c, g, or t
  misc_feature (179)..(181): n is a, c, g, or t
  misc_feature (188)..(188): n is a, c, g, or t
  misc_feature (191)..(191): n is a, c, g, or t
  misc_feature (201)..(201): n is a, c, g, or t
  misc_feature (208)..(209): n is a, c, g, or t
  misc_feature (216)..(216): n is a, c, g, or t
  misc_feature (224)..(224): n is a, c, g, or t
  misc_feature (243)..(244): n is a, c, g, or t
  misc_feature (249)..(249): n is a, c, g, or t
  misc_feature (257)..(257): n is a, c, g, or t
  misc_feature (259)..(259): n is a, c, g, or t
  misc_feature (280)..(280): n is a, c, g, or t
  misc_feature (283)..(283): n is a, c, g, or t
  misc_feature (292)..(292): n is a, c, g, or t
  misc_feature (299)..(299): n is a, c, g, or t
  misc_feature (302)..(302): n is a, c, g, or t
  misc_feature (670)..(670): n is a, c, g, or t
gagttaatcacagtggtgcccaatcactacagccatgggggccttccggtttcttgacttgagcatttccttcccaagaataattgcnaagatcttagatggcctattcntggtcagctctaaaaatttattctggtacttcaagggtcaccntnccctntcnggtcntgtttcctcgnnnaagctcntgnaagccttgcntcgtccnngaattcnggcacganggaagccaggttgaataannttcanagctgaangntggccaactccaaccactttnaangatgaatanaagtganttntcaaaagtcaaggaagaagtttaaccgaaataaacaagtcatcaaataaacacaacacaaagccaaaagagcaaaattaatgtgactattacataaacacaaaaacataaaagctatttcaaaataaaaattagttatctgtatacagttttaagaaatctaagttacataactggtaaatctataaaagtaaagcccatttgtataagcagatgcagaagatgctacataaagtcctgccctataggggttgatttaaaatacaaattaaaatatttatttctaaacatagattcaaaatattgataattatttcactcttataaggaatatgatgatttttctctaagtaaataaatgtttaatanaatcaggcatggaaaaagaaataactcagtaatttgctcccgggttgatgcagggtcctaaggatggctgcaatcagaagttatatttctgctctgctgtggaaactctgaaggtttgatcagagaaacaaactcttcctcataccttttcaggtgactgccttcctttcatcacgaagggccattcaaattttctgcccatgcctccagggactcccctatggctgctgcagctgataaagatgcatccaagaagaacttccaaggaatggtcaatgtgtggcacagcct

SEQ ID NO: 358623 - DNA, 770 bp, Homo Sapiens; identical to SEQ ID NO: 7093

SEQ ID NO: 358624 - DNA, 726 bp, Homo Sapiens
  misc_feature (52)..(128): n is a, c, g, or t
  misc_feature (432)..(482): n is a, c, g, or t
ataaacccaaaggacattatgtgtgccatgtgtgtataagtgcacacagaannnnnnnnnnnnnnnnnnnnnnnnnnnnnnnnnnnnnnnnnnnnnnnnnnnnnnnnnnnnnnnnnnnnnnnnnnnnnacatatacctataatgtgtgtatgtgtatttattgaagaaacagataccatactcatttctaaaagaatattcagagaatatcaagatgattctggctgaaaaaggccagtggaaattcaggtgaaaatgttcatcaattcccattgcatcacctctgtaatttttcagctctctgtataaacattaaatgtcttatatagcagcaaaaatataaaatagttgtccatattttcacaggtgtggtgtaatttataaaattagaaagcaacttatcagctacttaagagaaatggcaagttttgnnnnnnnnnnnnnnnnnnnnnnnnnnnnnnnnnnnnnnnnnnnnnnnnnnnttggtctctatttcattttttgcatcagtattaatactaaaatatgtctcgctagtgatgtttttatgatatccctgatcctaactgaagagacagttatttatagtcatttattttaaaaaatgaaaataagtgaataataattaggttaacattgttgctccctgtgacaaaattttataagcaaatttcaaaagacatgttgtaaattaggaggctcaacaataaaacattatgctcccag

SEQ ID NO: 358625 - DNA, 1096 bp, Homo Sapiens
tatctcttacattggacatgagtagcttggggaacattgaaccctttgtgtctataccaacaccacgggagaaggtagccaatggagtatcctgcagtcagcccagccgaattctcacaaggtcctcagctgagggacgtcgtggcaagttcacatttactccaaagtgaattcatggaaataccaatgaactttgtggatcccaaagaaattgatattccgcgtcatggaactaaaaatcgctataagaccattttaccaaatcccctcagcagagtgtgtttaagaccaaaaaatgtaaccgattcattgagcacctacattaatgctaattatattaggggctacagtggcaaggagaaagccttcattgccacgcagggccccatgatcaacaccgtggatgatttctggcagatggtttggcaggaagacagccctgtgattgttatgatcacaaaactcaaagaaaaaaatgagaaatgtgtgctatactggccggaaaagagagggatatatggaaaccttgtcttaaagcaaggaagccacacccaacatgtgaagcattactggtacacctcatggcctgatcacaagactccagacagtgcccagcccctcctacagctcatgctggatgtagaagaagacagacttgcttcccagggccgagggcctgtggttgtccactgcagtgcaggaataggtagaacagggtgttttattgctacatccattggctgtcaacagctgaaagaagaaggagttgtggatgcactaagcattgtctgccagcttcgtatggatagaggtggaatggtgcaaaccagtgagcagtatgaatttgtgcaccatgctctgtgcctgtatgagagcagactttcagcagagacttgtccagtgagtcattgaagacttgtcagaccatcaatctcttggggtgattaatcaaattacccaccccaagctttctagaaggagctttcttgaatggaaggaaagagaagctcttgaacccattgttggcatggattgtggaagactgggcaacatattaaagatttcagctccttgtggtatgaatgcattttgaacg

SEQ ID NO: 358626 - DNA, 784 bp, Homo Sapiens
  misc_feature (562)..(562): n is a, c, g, or t
  misc_feature (605)..(605): n is a, c, g, or t
tcagtgccggagccctcggtgcgcggcggagagaagaggattccggcgggaactcgactcttggcgccaccgcctcatgcactgtgtaggttttgagagtattttagaagggctttatggaccacggctacgaagagacctcagtttatttgaagactgtgaaccagaagagctgactgactggtctatggatgaaaaatgttcattttgtaacctacagagagaagcagtcagtgattgtataccatctcttgattcttcacagtcaacaccaacagaggagctatcatctcagggccagtccaacactgataagattgaatgccaagcagaaaattacctaaatgcactctttcgaaagaaagatcttcctcagaactgtgatcctaacattcccctagttgctcaggaattaatgaaaaagatgatacgtcaatttgcgattgagtacatttcaaaaagtggtaaaactcaagagaatagaaatggttcaattggaccaagtatagtatgtaaaagtatccaaatgaatcaagcagaaaactcccttcaggaagagcangaaagccccttagacctcactgtgaatcgaatgcaggaacaanatactcagcagggggatggaagtgtagatctctctacaaagaaaaccagactaaaatctgaagaggcatccatatgtgatccttcttctgaaaatcagtgggtggcatgctatcagtgagcccccattagaagtgccctaatcggtccattgaaaggatctgaattgacaccgcttttt

SEQ ID NO: 358627 - DNA, 536 bp, Homo Sapiens
tagcacatggtattggaatgcgggaaaggccatgggggcccctctgttttcagaccctccatgcctcctccagtccctctacctcttgaccctgccagcctgtcaacctgtcctgacctcactcccccctgcacccccatctgttcctgtcctctcctgctgtatcttatcctggatctgaagccagcctagctctgggctcccctgctcctgtcctggggcttctgagggacccagtgggccctgctcagctgcctctcccccaccatatctgggctatttcacattttctcagacttccccaaagctgctctgtactctttgttctttttaaatcagcaaatggcttgatctgctgcttgataggtgacccattaaccacccgtgtatccacatattaccccttggctggggtgggggtcctcttcttccttgaggacaccctcacttttcaccaatccagcttgccaagctattcaggtactttactctggcctttttctctgcccttatttttaggccatccctttttagcg

SEQ ID NO: 358628 - DNA, 907 bp, Homo Sapiens
  misc_feature (196)..(196): n is a, c, g, or t
  misc_feature (738)..(740): n is a, c, g, or t
  misc_feature (771)..(771): n is a, c, g, or t
tacgggcactttattagtgcctaggatttgtttcaaaggaaatatgaaatgtggccctggcccgacttagttttacggcgagaatatctattaaaggcctacttacttgaagggtaaaggttgccaggtctaggggaagctttgggagggtggtgtcttgtgccagaaaaagtgggcagagtagggacgaaagacntgcattctacgcctgtttcttgtcacttgctctgtacacttagacacgagcttgacctcttgagctttagtttccctcctctgcataatgagagggttagcctactgaattgtatgggaaaaaaatcaagtgtcctgggtcataggccatgcctgctgaatccgactgttcagaaagaggcctaggaaatctgtgagggaatccccaggggaatctcgtgaccagccaggtgtgaaatctgctaactggaagatctcaaagcttccttcactttttgtgattttgtggtcatgtaacgttactgtattattctacgtaaatgtgggtacttggatgtttatcatactgtttctctgtgtttacatactaatttgtgtaagaaatgcattttagtctgtgtacctcaacctgctgtttgtttcctagaggtgttagtagtctttaaatacaagtaagacttaagaggatatttgatgttatttacctggatattttcttccccttttatttatttagaggaaattgagattctaggagccagnnnaatgaaaacaaaattctaaggcaaagttgangaaaaaaattacattatttcttaccatttgctactttataatgaaaatttaaaaattatatgggaagatttttctctgggataacaaatccttgtcatacagtaagaggtctttttaaagtgggtaggcttaaggc

SEQ ID NO: 358629 - DNA, 1351 bp, Homo Sapiens
gcaggcggcagccagagctgcgcgccgcggcggcggaagatggctgcggccgaggtggcggacactcagctgatgcttggagtcgggctgatcgtgaccatctttccaccgtagaaaaggacacaaatggagaagttctgtgggtgtggtgttatccttccacgacagccacattaaggaacctgctgctgagaaaatgctgccttacagatgaaaacaaacttctccatccctttgtctttggtcagtacagaagaacatggttttatatcacaacaattgaagttccagattcttccattttgaaaaaggtgactcatttttctattgtcctgaccgccaaagattttaacccagagaagtatgctgccttcactaggatattgtgtagaatgtacctgaaacatgggagcccagttaaaatgatggagagttatattgcagttctcacaaaggggatatgccagagtgaagaaaacggctctttccttagtaaggattttgatgcccgaaaggcctacctggctggctccatcaaagacattgtatctcagtttggaatggaaactgttatcttacacacagcactgatgctaaagaaaagaattgtggtgtatcaccccaagatagaagcggtccaggagttcaccaggactctgcctgccctggtgtggcaccgacaggactggaccatccttcactcttacgtgcacctcaacgccgatgagctggaagccctgcagatgtgcacaggttacgtcgctggatttgtagacttggaggtgagcaacagaccagacctctatgatgtgtttgtgaatctggcagagagtgagattaccattgctccccttgcaaaagaggccatggcaatgggcaaactgcacaaagaaatgggtcagctaattgttcagtctgcagaagatccagagaaatcagagagccacgttatacaggatattgctctaaaaacaagagaaatctttaccaacctagcaccattttcagaagtttcggctgatggagaaaagagagtccttaatttggaggcgctaaagcaaaaacgatttccaccagcaacagaaaacttcctttatcatctagcagcagccgaacaaatgctgaaaatctgactgtgtgacagaacgtatcactgatgactgatagaaagccctctttcactctgattacccactcactacatgaagtcctgaaaataacagagaaactgttatatctttttaatgatttatttgcaagtattgagatttgacctgatgcctgctgtcagtgctggacgaagtgctatactaccttatgtgacattacagaacaggtagaggtcctggcg

SEQ ID NO: 358630 - DNA, 752 bp, Homo Sapiens
gtcctgcaggcggcagccagagctgcgcgccgcggcggcggaagatggctgcggccgaggtggcggacactcagctgatgcttggagtcgggctgatcgaaaaggacacaaatggagaagttctgtgggtgtggtgttatccttccacgacagccacattaaggaacctgctgctgagaaaatgctgccttacagatgaaaacaaacttctccatccctttgtctttggtcagtacagaagaacatggttttatatcacaacaattgaagttccagattcttccattttgaaaaaggtgactcatttttctattgtcctgaccgccaaagattttaacccagagaagtatgctgccttcactaggatattgtgtagaatgtacctgaaacatgggagcccagttaaaatgatggagagttatattgcagttctcacaaaggggatatgccagagtgaagaaaacggctctttccttagtaaggattttgatgcccgaaaggcctacctggctggctccatcaaagacattgtatctcagtttggaatggaaactgttatcttacacacagcactgatgctaaagaaaagaattgtggtgtatcaccccaagatagaagcggtccaggagttcaccaggactctgcctgccctggtgtggcaccgacaggactggaccatccttcactcttacgtggcacctcaacgccgatgaactggaaaccctgcagatgtgcacaggttacgtcctctg

SEQ ID NO: 358631 - DNA, 824 bp, Homo Sapiens
  misc_feature (389)..(442): n is a, c, g, or t
agcgggagggcggtcctgcaggcggcagccagagctgcgcgccgcggcggcggaagatggctgcggccgaggtggcggacactcagctgatgcttggagtcgggctgatcgctctcaccaaggaccgaggggccgtgggaaacgtctgacgcccacttcacggaggagcaaatggaggcccaggccgtcattgtgcacggacacaccataggccgtacagagccgggagtgggaccctcgcagtgtagcccagagcccccaacccccaccagtggagagctcctgcatcatgtgatcgagcttgtgcataaataaagcaggagtttctacacaatcctgtgtggtggaatctcggttagctctgaggaatacggggtctccctcttatnnnnnnnnnnnnnnnnnnnnnnnnnnnnnnnnnnnnnnnnnnnnnnnnnnnnnngcccaaaccatcctcccgcctcggcctccgagtggctgggacctcaggcgtgcaccaccacccgattaattttggtattttctgtggagatgggataccgacatgttgtccagtgaccatctttccaccgtagaaaaggacacaaatggagaagttctgtgggtgtggtgttatccttccacgacagccacattaaggaacctgctgctgagcaaaatgctgccttacagatgaaaacaaactttctccatccctttgtctttggtcagtacagaaagaacatggtttttatatcacaacaagtgaaagttccagattcttccattttgaaacaacggtgactcatttttctattggtcctgaccgcaaagattttaacccg

SEQ ID NO: 358632 - DNA, 786 bp, Homo Sapiens
  misc_feature (306)..(335): n is a, c, g, or t
aagcaagttagaaggcgtacgaccagacccatcccctgcatagttagccatagttctcaaagcgatattagtccctcagaagaagatgaagaggaagagctgggagcacatatttaaccaaaaataagaagtccaataggtcttggacgaatacactcctaccagcactgggcaggcagacagaagagggcccagattaaattaaaaagtgtgtgattaattgccagctagtaaagaacaagatgaaatccttcagaaagcaaatatatgagttttggtgagctgaagagatctgtatctgaagtnnnnnnnnnnnnnnnnnnnnnnnnnnnnnnaatattattattatttaatgttcttttaaagggtgactgggtcagtataactgagcataatctgttttgtctcagagtctggctatcttttttcccaatatcagtctctcaactaaaccaaacatgtttttaacttctcccacttaatttagtaggttaacaagtctatgtaaaagaagagtatcataatttagcttaatagtcccttgcaatactattttaatattttaaaatcaaaatatcactttaaaacctataggaattatttttgcttcctttggctttggttcttttgtatcatacaattttatcatttaaaatcaaagatcttaccatcagatttacctgggctatagtagtaattttaccacttacccatggccaaatgtgtatgacaatccctacttcatgagattatcataaagatgaaattaaacctgcagcccggggg

SEQ ID NO: 358633 - DNA, 1619 bp, Homo Sapiens
  misc_feature (1400)..(1400): n is a, c, g, or t
  misc_feature (1446)..(1446): n is a, c, g, or t
caggctggtaccggcccggagtttccgggatatcgtcgaccacgcgtcagggaggcggaggagaactgagcagagcagagcatcgagccaaaggggagatgagtttgtctgtcctctgctgaggctacggccgggcctagggaactgggagcttgggtggaagcgacacccgtggaagtgggaggaggtggcgccgggactttaaccccttgtgggctctgcggcaggggatttaaccctttgtggatctggcccctcggaggcagcgtcatcggtagttttaaccccttcggggctgggtttcacgcactggacttaccctcatcaccttgctcaccaactcctttattaggggtgctccgcttggaaggtttgaggcccacctccgcccattacgtactgttcctgccgctgcacccccttggacccgctagctggccgcactgtgggcgcttaaccctttactgacttgagctccccagattgcaagttggagttttgctgatagaaggactagctaaaggcgtcactgcaggaattacaaactgaagaggactctgttggactgtattatttgacttcatgcttttttttaagaaaaacccatttttttccttaaggacttactagccaaaatttcttaaacttcgaggactctactagccatggccgagccattcttgtcagaatatcaacaccagcctcaaactagcaactgtacaggtgctgctgctgtccaggaagagctgaaccctgagcgccccccaggcgcggaggagcgggtgcccgaggaggacagtaggtggcaatcgagagcgttcccccagttgggtggccgtccggggccggagggggaagggagcctggaatcccaaccacctcccttgcagacccaggcctgtccagaatctagctgcctgagagagggcgagaagggccagaatggggacgactcgtccgctggcggcgacttcccgccgccggcagaagtggaaccgacgcccgaggccgagctgctcgcccagccttgtcatgactccgaggccagtaagttgggggctcctgccgcagggggcgaagaggagtggggacagcagcagagacagctggggaagaaaaaacataggagacgcccgtccaagaagaagcggcattggaaaccgtactacaagctgacctgggaagagaagaaaaagttcgacgagaaacagagccttcgagcttcaaggatccgagccgagatgttcgccaagggccagccggtcgcgccctataacaccacgcagttcctcatggatgatcacgaccaggaggagccggatctcaaaaccggcctgtactccaagcgggccgccgccaaatccgacgacaacagcgatgacgacttcatggaagaaggnggtgagggagatgggggcagcgatgggatgggaggggacggcagcnagtttctgcagcgggacttctcggagacgtacgagcggtaccacacggagagcctgcagaacatgaggcagcaggagctcattcagggagtacctggaaactgggagaagtgccctcttcgcgcatgggaggacgaagaacaacccggcttgcggcctgggaaagcaagccgg

SEQ ID NO: 358634 - DNA, 1678 bp, Homo Sapiens
  misc_feature (21)..(21): n is a, c, g, or t
  misc_feature (30)..(30): n is a, c, g, or t
  misc_feature (36)..(36): n is a, c, g, or t
  misc_feature (66)..(102): n is a, c, g, or t
  misc_feature (978)..(978): n is a, c, g, or t
  misc_feature (1002)..(1002): n is a, c, g, or t
  misc_feature (1125)..(1169): n is a, c, g, or t
gggaaacttgactactgaccntccacatanatacgnggcaacccggagttcacgcggtggcggcgnnnnnnnnnnnnnnnnnnnnnnnnnnnnnnnnnnnnnatcaggccaaatcggccgagctcgaattcgtcgagagcggaggacgtgttgccctttctgtgtaagctgtgagcgtaggcggccctgagggggtgtgttgcaggggtttccaagcccagcaccagcacccttgcccttttccatcaggggttcagcctagggtccccgctggtgggcggctcccgagtcttggagaagagcacgagaacctagaccgcccccgaagtgcggagaccccctgggcaggctgaaagatggcggcggcgtctgtctctgcggcttctggttctcacttgtcgaacagctttgctgagccatcaaggtctaatggaagcatggttcggcattcttcatctccatatgtagtatatccttcggataagcctttccttaatagtgatctacgacgctccccaagtaagcctacacttgcctatccagaaagcaacagcagagccatattttctgctcttaagaatcttcaagataagattcgacgcttggaacttgagaggattcaggcagaagaaagtgtgaaaaccttgtctagagaaacaattgaatataagaaagtactggatgaacagatacaagaaagggagaattcaaagaatgaggaatcaaagcacaatcaagaactgacatctcagttgttagctgcagaaaataaatgcaatctattagaaaaacaattggaatacatgcgaaatatgataaagcatgccgaaatggagaggacatctgtcttagagaaacaagtttccctagaaagagaacgacaacatgatcaaacacatgttcagagccaacttgaaaaattggatcttcttgaacaggagtataacaaacttaccacaatgcaggcccttgcagaanaaaaaatgcaagagttggaagcanaactccatgaagaaaaacaggaaaggaaacgcatgcaagctaaggcagctgagttgcagactggtctagaaacaaatagacttatctttgaagataaggcaactcccgtgtgttcccaatgcnnnnnnnnnnnnnnnnnnnnnnnnnnnnnnnnnnnnnnnnnnnnnttctaggaactattttggtgcacaaccacattatagattatgcttgggtgatatgccatttgtagctgggaagtccacaagccctagccatgccgtggtagccaatgttcagcttgtcttgcatctaatgaagcaacacagtaaagctttgtgcaatgatcgagtcatcaacagtattcctttggcaaagcaagtatcttcacgaggtggtaaaagtaagaagttgtcagtaacacctccctcctccaacggtattaatgaggagttgtcagaagtcttacagactttacaggatgaatttgggcaaatgagctttgatcaccagcagcttgcaaaacttatccaggagtcgccaaaccgttgaactgaaagacaagttggagtgtgaatcggaggcattagtgggaaggatggaagcaaaagccaacccaaataactaaaagtcgaaaataccaagcccagctggagaaacagaagttagagaaccagaagaaggatttaaagctcca

SEQ ID NO: 358635 - DNA, 661 bp, Homo Sapiens
  misc_feature (98)..(98): n is a, c, g, or t
  misc_feature (144)..(144): n is a, c, g, or t
  misc_feature (160)..(160): n is a, c, g, or t
ttaatccagtcgggttcttctgaagctggaagccgacaaatgctgtaatgaagcaaccacgttctatatatcaaactctggcaggactggtagggtanggagcaccggagcccaaatgtggccattggaacaggcttgcctgtntgcgatctgtgaatgncaagatctctttacacaaactacagtgctcagggaaagtctgtttgttcatcttctttgagatatgtccaatcagcacccgtgcagttctgtcatcatactctgtgatccaggtgtgcagatacacttctcctaagactcgcttcatgtgttccctggtcaagtgcatctccacagcttcgattttcccttggatttccaggagtttctcttccattggctcacggcctccagcatctccagtcgtggggagcgagtcatcagtggcctcctctacatctccttccttgctcctctcctgcaggccttgcttcaccacctgtttggaagaagtgccttcttcctgctgttcatcgtcagcattgcccatcccaggcgaatccactagtaagatttttgagtcctcatgggtgggtttccacaaggcttctgaaggggttttctgcattgactgatataaaatcctcaggaggaaaagcttaaaacgccaaaaataggtgac

SEQ ID NO: 358636 - DNA, 487 bp, Homo Sapiens
  misc_feature (98)..(98): n is a, c, g, or t
gcagaaaaaattctccctaaaaatcggcttcaagtgttccccgggtccaaatgcatctcccaacagcttcgaattttccccttggaatttcccaggantttctccttcccattggctcacggcctccagcatctcccagtcgtggggagcgagtcatcagtgggctcctctacatctccttccttgctcctctcctgcaggccttgcttcaccacctgtttggaagaagtgccttcttcctgctgttcatcgtcagcattgcccatcccaggcgaatccactagtaagatttttgagtcctcatgggtgggtttccacaaggcttctgaaggggttttctgcattgactgatataaaatcctcaggaggaaaagcttaaaacgccaaaaataggtgactccactgctttcaatctttttttccaaagcttcttgtaaaaattgagggatatgtttatcttttaaaatcttccagcgtactaggtcta

SEQ ID NO: 358637 - DNA, 405 bp, Homo Sapiens
  misc_feature (337)..(345): n is a, c, g, or t
aaatttaataggctgatagccagaagggacttgtctcaaataagactttggacttggagttttgagttatgctggaatcagttaagactttgggggactgttgggaaagcatgattggttttgaaatatatataaaagacatgagatttggaaggtgccaggagcagaataatatggtttggctctgtgtccccacccaaacctcatctcaaattattatccccacacatcgacagagggacctgtaatcgccatgtgtcgaagaagtttacttcatgctatcctcatgatagtgagtgaattcttaggagatctgatggttttaaaagtaggaggnnnnnnnnnctgtgcactcacttctctctcctgccaccttgtgaaaaaaggtgcctgcttctgtcttgc

SEQ ID NO: 358638 - DNA, 1154 bp, Homo Sapiens
  misc_feature (182)..(208): n is a, c, g, or t
  misc_feature (774)..(775): n is a, c, g, or t
  misc_feature (784)..(784): n is a, c, g, or t
  misc_feature (860)..(860): n is a, c, g, or t
  misc_feature (908)..(908): n is a, c, g, or t
agcggagttgtcgctggccgtgtgacggctcgctgttgccctgaaggcaggcgagccagctgcccaggaaaggtggaaagtggtagaagctgacccctgagccctggcaggtctttaagtgcgtttgtgcagccgatttcaaggctaagagagaaagactgcctctgatccctgaaggaagnnnnnnnnnnnnnnnnnnnnnnnnnnnctcaacattggaaaagtgtccccaaggaaaacaaagttgtggagaaggccccagtgcagaatgaagcccccgctttaggaggtggtgaataccaggagcctggaggaaatgttaaaggggtttgggctccaccttgccccgggttttggagaggatgtgcccaataggcttgtcgataacattgatatgatagatggagatggagatgatatggaacggttcatggaggagatgagagagctaaggaggaaaattagggaacttcagttgaggtacagtctgcgcattcttataggggaccctcctcaccatgatcatcatgatgagttttgccttatgccttgaatcttgaggttaataatcataaaatccctgctttctaaattcgcatttttcctggtgtacctttaatgtgaaccttttggcattcttctgcaattttctgattggagattgcattttgacctagtctgtaagtttttctgtcagaagaggactttcatcaactttcatggaaagatgtttattgcatactgtaaagttaataaagcaatttaaaagcatannaataaaaanattaaaaaaataaactggcgtcgtttacacgtcggactggaaaccctgcgtaccaactaatcgcttgagacatccnctttgcaagtggctataccataggccggacgatcgctttcaacattgncagctgatgcaattgaaatgtaccgtatatttgtaaatttcggtaattttgtaaatagtcattttaccaatagccgaatggaaatccttttaataagaatgacggattggttatgttttcccttgacacaacccctttaagacggcctcaactaaggcgataccgtttaggggagcccttcgaccatcctataaagtttgggtcgggccaaacctaattgacttaggagccctttacttgcggaaa

SEQ ID NO: 358639 - DNA, 1021 bp, Homo Sapiens
  misc_feature (50)..(86): n is a, c, g, or t
  misc_feature (399)..(413): n is a, c, g, or t
ggaatgatagactcatatagggcgaaccggagctcaacgcggggcggcgnnnnnnnnnnnnnnnnnnnnnnnnnnnnnnnnnnnnnatcaggccaaatcggccgagctcgaattcgtcgagagcggggatgggaactggaaatctgagctcacagtgacgtggcccttaggagacccagagccaatgcgtggattagtccctcatcctagttgcagtctggtagttgtcgctggccgtgtgacggctcgctgttgccctgaaggcaggcgagccagctgcccaggaaaggtggaaagtggtagaagctgacccctgagccctggcaggtctttaagtgcgtttgtgcagccgatttcaaggctaagagagaaagactgcctctgatccctgaaggaagnnnnnnnnnnnnnnncaccgggaaaaaaattcaaccattggaaaattgtccccaagggaaaacaaagttgtggagaaggccccagttgcagaattgaagcccccgtttaggagggtgggtgaataccagggagccgggaggaaatggttaacgggggtttggggcttccaccttggccccggggtttcgggagaggatgtgcccaatagggctggtcggataacatggatatgatagatgggagatggagatgatatgcgacgggtctcagggaggagcatgagagagctacgggaggaacaattcgggaacttcagtggaggtacagtctgcgcattcttataggggaccctcctcaccatgatcatcatgagtgagtttggccttatgccttgaatctggagcgttaactacatcttaaaaatccctgatttccataaaattccgcacattttttcgctggtgttacccttacagtggtgaaaccctttgggggcaatttcttcggggcaaatcttcgtgaattggggacgatgggcctttttggaacctacttcctggtacgctttttcctggtcagcgcacagatgacttctcactccaaccttccatgtgcaaccacg

SEQ ID NO: 358640 - DNA, 1054 bp, Homo Sapiens
  misc_feature (634)..(634): n is a, c, g, or t
tgaggttcccccccagatggaatccgatcgacttaaagatgattcgggaacaatcacaaataagtgtgaggagttcttcagtcacagcagcagcctcttcactcagtccctaccctacgatcagagcttaatgtggtccttcagaacatgaaccaagtctattctatgtcttccacttacatagactagtcgaaaactgttaacttggtgttaaataacactcaagctgcagaagccctcgctaaaactctatgacactaaactgtgtgaagaagaagcagttatagctgacaagaataatattgagaatctaataagtactttaaagcaatggagatctgaagtagatgaaaagagacaggtattccatgccttagaggatgagttgcagaaagctaaagccatcagtgatgaaatgtttaaaacgtataaagaacgggaccttgattttgactggcacaaagaaaaagcagatcaattagttgaaaggtggcaaaatgttcatgtgcagattgacaacaggttacgggacttagagggcattggcaaatcactgaagtactacagagacacttaccatcctttagatcattggatccagcaggttgaaactactcagagaaagattcagganaatcagcctgaaaatagtaaaaccctagccacacagttgaatcaacagaagatgctggtgtccgaaatagaaatgaaacagagcaaaatggacgagtgtcaaaaatatgcagaacagtactcagctacagtgaaggactatgaattacaaacaatgacctaccgggccatggtagattcacaacaaaaatctccagtgaaacgccgaagaatgcagagttcagcagatctcattattcaagagttcatggacctaaggactcgatatactgccctggtcactctcatgacacaatatattaaatttgctggtgattcattgaagaggctggaagaggaggagaagtcactggaagaagaaaagaaagaacatgttgaaaaagccaaagaattgcaaaaatgggtatcaaatatcagcaag

SEQ ID NO: 358641 - DNA, 2146 bp, Homo Sapiens
  misc_feature (1366)..(1366): n is a, c, g, or t
cgctcccggggaggtgttgcagccatggctacggcagccggcgcgacctactttcagcgaggcagtctgttctggttcacagtcatcaccctcagctttggctactacacatgggttgtcttctggcctcagagtatcccttatcagaaccttgggcccctgggccccttcactcagtacttggtggaccaccatcacaccctcctttgcaatgggtattggcttgcctggctgattcatgtgggagagtccttgtatgccatagtattgtgcaagcataaaggcatcacaagtggtcgggctcagctactctggttcctacagactttcttctttgggatagcgtctctcaccatcttgattgcttacaaacggaagcgccaaaaacaaacttgaagttgtctgaaagcttgctctacacttttacattcatcctcacccttttttttgtggggtagaggaggtgcagtaatttactcagtgatctttctactttctagaaactgtccttcaaagctctttaagaccccctcgttagtcagttttttctcttatatgctctggttgagcttgaatagaccagttgttacttaagaaagaaacagagaaagattttagcttttcaatcctatttggcagaggacttcagctaccttcttacagtctttggctgtgttggtaccctcgtgtgctctgagctaagccacatactaaactgactttttggtttgtatacccttgctcccgccttctgatgaaaacaccttaccctcacaaccaccatctttcctctcctttccaaagctctttccaccttgctgcactaagataaagtgacacttccactatatgtcaattccacacacatttattaggtacctgtgaagtaggatcctatcctctcaaacttccatttctcatgctacagagaaagataaggaagatgagcaagtgcctggaatggggcaggctgagcagtcacacaggcacagaggcacactgagaacctacaggggagactgcagagtgccttccctgatgctgcagccggaagtcatccttccctccacctggcccctgagacactctactctgcagtgtgcagggcctgatggcactgctagattgctccttcagctcagggccacagcttaaacagctttacctttcccctcagcacctgtcccactaccttgcacacaggtactctatccatgtttatttggaacaaaggagggaaactgatttcactttcacttgttcattatcattccaatttttatgtgaaaatggcacaacccatttggggtacactcatctcaaaagaaaagcccaagactacctctgactggtaccaccctttttngtgggttccttggtgagaaacctttatctttttcatacttttctattctccatcacttctccaaaagtgtctttttccagctctgatttattcaaaacacacaaacattcctgtttagagattctagcccatggattatccggctagttagtacctctcctgttcacttggttatactttattattgctcacaggctggggaggcagaatgactgtgtcccctcaccctggcagaatgttgtcaccactaggagccattagggcttcttccctggaggactgcctgcttgctttctggggacactagccctcatttcccttctgtggtacagtggggcaaattatttgtattaagcaaacatttatgggaaacaacccgctcccgaaaacggagcccccaagtaaagcacaaccctgaaagattatgaactatgaattgtctctagtagagataaatttctgcaaacatatctcagtcttccctctgtttctctggtgattaagaagttcctttttggtaaggaaaaggatttttaaccatagagttaggcatcatggaaattcaaaccagatttcttaatacctggtcttcctcaaagagaaataataacagtaatagtggtgctgggaacaatatggcagattattgaatgaaattgattaacttgaataaaatgctgtgaattttctctagctgaatgcttttcttgtatttgtcagttttaacatattgatgcacatttgatactttttctcaaatagactactagggaactgttt

SEQ ID NO: 358642 - DNA, 718 bp, Homo Sapiens
tgttttttggctagatactaggtattcagtgtttgctgagatgacaggtttctactaatcagccagttatttgggaaggagaaaaactttttctcaattctgaacatgatgcagcttgttaactctccagatagtgcctttgattgaaaataaggtctacacctttttaagtatattatttctgacatcgtaagaaataatttagttccttattctcatttatcttttatataatgtactgtaatattcaggtttaaagtaaaataagtatatgaattatattttggtaaaactgtttcatgaccagcttgattaatgtatattaacataccagacattgacagcgaacatttcatgaaatcagttatttacttactaaaacaatgagttttagcttgaaagttactgctgctctattattaacaaaactaagttttaaaaattaattttaattctactgaagtttaatttctggttaaaggtatagtggatgctatttatgatccaagtttttacatcacatccattgatctgcctatcccttctttttactccaaagaggagatgatagaataatacattcagtatactaccaagaagcaaagttataatgtgtttcattttgctattggaattttttattgtaacattgtatgataacctgaaatgtttacttgtgccttttctttaaacaattaaagttttccatatttataag

SEQ ID NO: 358643 - DNA, 463 bp, Homo Sapiens
gtcctcatcgtagtctatctggaagtgccgggactccctgattgactggtcatctttgaaccagacaacctcggggtctgggtatccttcaatcttgcagtcaaatctagcaacatgaggcttttcctcagcaacagcctcaaggaaagcttgggacacatcttcttcagattctagtttttctgcattgagcgggctggttggtgaccctgttgaggatttcctgccactgagccctgagatcattgccatagaggacagtcttccaatggctctcacagcattgcccgttttctggaaaatagacacgagggttggactcaggcgttgtccctggttccagctgggtagtgcgaggggctgcagggagtagagcccagccccagagaagcagctgttccctggaacaaggacctcctgagagccgaggttctgccagaggagcgaacccaaccttgctctg

SEQ ID NO: 358644 - DNA, 793 bp, Homo Sapiens
gctggaccggtccggattcttcgatatcttctgacacactgacagtgctgagcagagcaaggttgggttcgctcctctggcagaacctcggctctcaggaggtccttgttccagggaacagctgcttctctggggctgggctctactccctgcagcccctcgcactacccagctggaaccagggacaacgcctgagtccaaccctcgtgtctattttccagaaaacgggcaatgctgtgagagccattggaagactgtcctctatggcaatgatctcagggctcagtggcaggaaatcctcaacagggtcaccaaccagcccgctcaatgcagaaaaactagaatctgaagaagatgtgtcccaagctttccttgaggctgttgctgaggaaaagcctcatgtaaaaccctatttctctaagaccattcgcgatttagaagttgtggagggaagtgctgctagatttgactgcaagattgaaggatacccagaccccgaggttgtctggttcaaagatgaccagtcaatcagggagtcccgccacttccagatagactacgatgaggacgggaactgctctttaattattagtgatgtttgcggggatgacgatgccaagtacacctgcaaggctgtcaacagtcttggagaagccacctgcacagcagagctcattgtggaaacgatggaggaaggtgaaggggaaggggaagaggaagaagagtgaaacaaagccagagaaaagcagtttctaagtcatattaaaaggactatttctctaaaactccaaca

SEQ ID NO: 358645 - DNA, 1124 bp, Homo Sapiens
tcattctgtactgcagaatctactccttggtcaggactcggagccgccgcctgacgttccgcaagaacatttccaaggccagccgcagctctgagaagtcgctggcgctgctcaagaccgtaattatcgtcctgagcgtcttcatcgcctgctgggcaccgctcttcatcctgctcctgctggatgtgggctgcaaggtgaagacctgtgacatcctcttcagagcggagtacttcctggtgttagctgtgctcaactccggcaccaaccccatcatttacactctgaccaacaaggagatgcgtcgggccttcatccggatcatgtcctgctgcaagtgcccgagcggagactctgctggcaaattcaagcgacccatcatcgccggcatggaattcagccgcagcaaatcggacaattcctcccacccccagaaagacgaaggggacaacccagagaccattatgtcttctggaaacgtcaactcttcttcctagaactggaagctgtccacccaccggaagcgctctttacttggtcgctggccaccccaagtgtttggaaaaaaatctctgggcttcgactgctgccagggaggagctgctgcaagccagagggaggaagggggagaatacgaacagcctggtggtgtcgggtggtggtgggtagagttagttcctgtggaacatgcactgggaaaggtggaaatcaaggcccgggctgtgaatatttgtctacccccctgggagcttttgatttggcacgtagcccaaaggctagtcattgtctgagctccttaaaagtggttcattttgggccccctccccaaaaaacttatttgtccccatgtagaaatgccgtcctttttggcttgggagctttaaatgaaaagcgctttcctttcaccttgtgtctcccaacctcaaagcgaaggttgtgtgcaccttcccgtctttttataggggaatcgccgttgtaaaattccccaaagccccaaacagttccgatgcccttctataactcattaccttaaagaccatatttgacctcacaaccttgaacccacccgtgtagaggccttatccgactacgtgggcttgaggggtaaacggtcgcactcaacg

SEQ ID NO: 358646 - DNA, 1709 bp, Homo Sapiens
ggcgcgccggcgccgggccatgtactcggggaaccgcagcggtgtgccacggctactgggacgtgctggcggtggccgcgggcgctgagtgggccggcgccggcggggacactgagccccgcgcccctcttcagccccggcacctacgagcgcctggcgctgctgctgggctccattgggctgctgggcgtcggcaacaacctgctggtgctcgtcctctactacaacgttccagcggctccgcactcccactcacctcctcctggtcaacatcagcctcagcgacctgctggtgtccctcttcggggtcacctttaccttcgtgtcctgcctgaggaacggctgggtgtgggacaccgtgggctgcgtgtgggacgggtttagcggcagcctcttcgcttcgttgtgtggaagatcttcagacaattcaagtgatcaagattttaaaatatgaaaagaaactggccaaaatgtgctttttaatgatattcaccttcctggtctgttggatgccttatatcgtgatctgcttcttggtggttaatggtcatggtcacctggtcactccaacaatatctattgtttcgtacctctttgctaaatcgaacactgtatacaatccagtgatttatgtcttcatgatcagaaagtttcgaagatcccttttgcagcttctgtgcctccgactgctgaggtgccagaggcctgctaaagacctaccagcagctggaagtgaaatgcagatcagacccattgtgatgtcacagaaagatggggacaggccaaagaaaaaagtgactttcaactcttcttccatcatttttatcatcaccagtgatgaatcactgtcagttgacgacagcgacaaaaccaatgggtccaaagttgatgtaatccaagttcgtcctttgtacggaatgaagaatggcaacgaaagatggggccttaaattggatgccacttttggactttcatcataagaagtgtctggaatacccgttctatgtaatatcaacagaaccttgtggtccagcaggaaatccgaattgcccatatgctcttgggcctcaggaagaggttgaacaaaaacaaattcttttaattcaacgggtgctttacataatgaaaaaaccacttgtggcacacgatgggcatctaacatcatcatcttctaatgtgttggagattttcatttcaaatatattttttaaattactctattttccaaaacacgtaatgcatttttctcgaaaataccttactgtaaaaataactgtcgcgtacacatgtgtgaagtagctagaacatactgaattttttttgtactgttggactctattcagtgtcatgtcctatatctgatcaagttatcaaggagataattctagaatgaaaaagaaaatcctcttgttggaaacaaaagacgttttatatgtgcagtatgacaaagaggagtttcagagacaactttgaatccttgtcagcctggagaccagcaccagaggaatctacaaggcaaactcccatataattgctttccccaaattgctgcccctacagactcaaagctccttttctttggtttgtgcttctctaaaggtctttgagatttgctcatttccctggaattcccacatatatattacatataccccgttataaacctatgttggtcttctcctggtaatctgccttttgtataagggcct

SEQ ID NO: 358647 - DNA, 958 bp, Homo Sapiens
  misc_feature (721)..(741): n is a, c, g, or t
  misc_feature (828)..(841): n is a, c, g, or t
cttcagggaagaattggaggcgagtcacagagcgcagtgaaggaagcaagtttattggaatctactccgttagagagtgcaagtcctcagactgcaggaggaggaactcccgtccttcggtagtgtcactacttagaggcaactgtgaggagctgtgattaatcgtggaatgtgctgatgtgcccactaaagatgcctggtaagcagtggctcctctaacaagtgggcagcttggaactgggaacgagagagccaccgaaacagaatgagggagacaaagaagtgggcatcacccttaactccacaagggcttcccaagggcgctgtaccgtacgcaggcccaggacgaactttatttctcgccccagcatcgctgtccttgtcggtgagaccctggctttagggcagacaggaccacgtttcataagttcatgctgtcccagcagaggaataacgccagaaagtgttccagtacaaccagagaaagagagtccatgagaaatctgcccttgtgaagttggaatcccctcaaccttaccccgctgacttgaatgaagcgactgagacgggctatgatggagcagatccgggttgctcgaccttctcccttgcaccaacacatgtagttaatagttactggacatgcatattcaagggggtccaggtaccaaacttgtattgaatggtatgtgccagacaccggcttgagatctggagaatnnnnnnnnnnnnnnnnnnnnncgagacatccagagcacagtagcttgcggtcttcctggaactagagaaaattcagcccttctgctccttgggaagctatgtttgggnnnnnnnnnnnnnngagagagagagagactccaaagagtttgttattaaatttaagttcaaactaggtgtatatagtacaaaagttcttaccatgcatttaatcttaaaatgtgctgatatctagaaccct

SEQ ID NO: 358648 - DNA, 1230 bp, Homo Sapiens
  misc_feature (1102)..(1102): n is a, c, g, or t
ggggagaacagggttgactgcaccgttgaagcccgcccagcattataaggaaatgttcttaatgactgctgcatctttgtaaaacgtttggtcatctaacagatggttttaaagtgtacaatatccaaaataacgatagccctgtatccatacattgtttcattgaaagaattctctattgcctcttcttggtagagccatagtccttaaggaaaatcacgataatgaatacggagacttggttgaaggcacagttctgggatcagggtctaaatgtgcagcttatgagaaccttcaagaccactcactgggcacggctctgtggagcactggagctgtttggattccccagccctttggtcatatcctggaattccgtggaggctgcagaacttagatgcagctgttttttacagcacctatttttgtcagattggtaaggaaacactgagtcacagaatacttaagaattggagactccagtaatgtaggatggcctgagaggacgtccaagtcccaaggggtggacacggcatgttcctcgggcacagcctcagtgggggccttccccaggcgcagctcggccacctgaggaaagggtgtttcggaggcgcagccacacacacagcgctggcagcctcacggtcacgcccatcactccctgccccccactgcccttgagaagttagtggtgtcacatccttagttttatagacagctaggaatagattgtgaagaacactcagttcactactgtgttacatttatatcacaagcttcaattaaaatggattttaaaggattttaggatttacctttagtattaacaacgtatctactgacatactgttaggattcaaaaccagttaagtataagaattacttcatgtggttttcctagggtacaatttataaaaggtagaaagcatccaagtggctcctcaacaattacaattcttaatgatttttctcacagctgtgcccttctgtcagggtcagtgtcaaaattcgttatcaaaggcaaaacctactgtgccaagctggggcgctatatgtgaacggagtggaaatgcttcagtcacctctgccgcagctttgtganttccagcagttctcacaaacggtctgtcacatgatgaaaagaagcagcttgtataattccaactggtgtttcatttctgttctaatgctaagtggtaacgcttaacaaacagactaaaagctgtgtgc

SEQ ID NO: 358649 - DNA, 649 bp, Homo Sapiens
ggatcttcaggttaactaaaaggttataccaacgagcaaactcccaaaagtttaggtaagaaaaaattagtacctgctttaaaaataccaactcacttctgcttagtgtgtggaacaaggcaaacttctctttaaaaaggatgcttctattaaggagagaaaaattctctctcaaagcaaaacaaaaaaacctacacgcaactgagtgagtaggtctaaaatcactccagagctacctctgggtcagaactagagcaacaatggacaacacaacacaattttcacaaatgtactagtttcctttttgttaaaaaagggggtaggattaggtttcatatattaaagtcagcagaaatttcatgtttcacaatttgttgccagagagatccccaaattccttgaagccactgggaagttttctgaagatgcgcattaaacagcagcaaaatactgaaacaattctattgctaaaaagcagctacttctgcttctgcctttagaatactaattgtaatacagtaacaacaacaaaatgctgatttgtgccatcaattgaaatttgagctattccaaaaattgttttctttaaaactgttcaaggcaggacatcaataatcatagtgggtaaatattaactgagttttggggg

SEQ ID NO: 358650 - DNA, 426 bp, Homo Sapiens
ctctcaaaccaaagcaaaaaaacctacacacaactgagtgagtaggtctaaaatcactcccacaaatgtactagtttctttttgttaaaaaagggggtaggattaggtttcatatattaaagtcagcagaaatttcatgtttcacaatttgttgccagagagatccccaaattccttgaagccactgggaagttttctgaagatgcgcattaaacagcagcaaaatactgaaacaattctattgctaaaaagcagctacttctgcttctgcctttagaatactaattgtaatacagtaacaacaacaaaatgctgatttgtgccatcaattgaaatttgagctattccaaaaattgttttctttaaaactgttcaaggcaggacatcaataatcatagtgggtaaatattaactgagttttggggg

SEQ ID NO: 358651 - DNA, 1075 bp, Homo Sapiens
  misc_feature (18)..(18): n is a, c, g, or t
  misc_feature (37)..(37): n is a, c, g, or t
  misc_feature (388)..(408): n is a, c, g, or t
  misc_feature (910)..(928): n is a, c, g, or t
  misc_feature (981)..(1011): n is a, c, g, or t
ccagggccggccaaggcnttgcctagccatggcccanagtggacgaaaaccgcctcggaaatccttttgcacgagggccggttgcctggatatctcgatatcagctgtcctgaactctctggttgcatctgtcatctgtgatgtactgtttcagattgggcagttatgacataagtgagaaggcaagcatgtgtgagtgaagattagagggtcacatataactggctgttttctgttcttgtttatccagcgtaggaagaaggaaaagaaaatctttgctcctctgccccattcactatttaccaattgggaattaaagaaataattaatttgaacagttatgaaattaatatttgctgtctgtgtgtataagtacatcctttggggnnnnnnnnnnnnnnnnnnnnnaaccaaagttgctgtctagtgcattcaaaggtcactttttgttcttcacagatctttttaatgttctttcccatgttgtattgcatttttgggggaagcaaattgactttaaagaaaaaagttgtggcaaaagatgctaagatgcgaaaatttcaccacactgagtcaaaaaggtgaaaaattatccatttcctatgcgttttactcctcagagaatgaaaaaaactgcatcccatcacccaaagttctgtgcaatagaaatttctacagatacaggtataggggctcaaggaggtatgtcggtcagtagtcaaaactatgaaatgatactggtttctccacaggaatatggttccattaggctgggagcaaaaacaatgttttttaagattgagaatacatacctgacaacgatccggaaactgctcctcaccactcccgtcatgcctgctgtcggcgtttgaccttccacgtgacagttcttcacaattcctttcatcannnnnnnnnnnnnnnnnnnactgcctatgggctgtgatgtatatagaagttgtacattaaacataccctcannnnnnnnnnnnnnnnnnnnnnnnnnnnnnnaagtacaaagttttagtttctttttcatgatgtggtaactacgaagtgatggtagatttaaata

SEQ ID NO: 358652 - DNA, 265 bp, Homo Sapiens
attctaatgtcccacctattttcacttgtccattccatgtaccagcttacttatgatacttagtcacataattatctttgataaaggtagaggcacaaagaggcaaactaagcaagtcaaattctaatgtgtgtacttcataataattttttatccattttcatctttatattctgtaacatgaaacttacctaatcttcaaatgttagcttcattttttacctttgaaatacttaatctttctgaataaatataatgtgtctat

SEQ ID NO: 358653 - DNA, 1144 bp, Homo Sapiens
  misc_feature (986)..(986): n is a, c, g, or t
  misc_feature (1009)..(1009): n is a, c, g, or t
  misc_feature (1029)..(1029): n is a, c, g, or t
tgaggagggcaaatcaagtcgtctctgggagcctcggtttccctgtccttccaactggatgctgctggctccgtgattatttcaccgagcaccagatgtgcacatgtgaggacaggcgacgactgcccagaaagggcaggggttcctctgccccacctgcctcacctgggaaagctgtgaccacgctgaggccaggttcctgggatgaacatcaggacacctgtgtgccatagctcatcccagactcctccaatccgggtcttgattcaggccggaggcggtcatccctccaaaggcaccagggagccatggaagaggatggaccccttcgaggacacgctgcggcggctgcgtgaggccttcaactgagggcgcacgcggccggccgagttccgggctgcgcagctccagggcctgggccacttccttcaagaaaacaagcagcttctgcgcgacgtgctggcccaggacctgcataagccagctttcgagacagacatatctgagctcatcctttgccagaacgaggttgactacgctctcaagaaccttcaggcctggatgaaggatgaaccacggtccacgaacctgttcatgaagctggactcgggcttcatctggaaggaaccctttggcctggtcctcatcatcgcaccctggaactacccactgaaacctgacccttggtgctcctggtgggcgccctcgccccagggaatttgcgtggtgctgaagccgtcagaaatcagccagggcacagagaaggtcctggctgaggtgctgccccagtacctggaccagagctgctttgccgtggtgctgggcggaccccaggagacagggcagctgctagagcacaagttggactacatcttcttcacagggagccctcgtgttgggcaagattgtcatgactgctgcccacaagcacctgacgcctgtcaccctgggagctggggggcaagaacccctgctacgtggacgancactgcgaccccccagacgtggnccaaccgcggtggccctggntctgctactttcatgccggcccgaactgcgtggccccctgactacgtcctgtgcaccccccaaaatgcaggaaaaagctgcttcccccccctggcaaacaaccatccccccgttt

SEQ ID NO: 358654 - DNA, 525 bp, Homo Sapiens
  misc_feature (317)..(327): n is a, c, g, or t
ctgtcttgctttaatgtgcttttgtgctggtgtgcatatgtgtgttacagaatataggtataaggatggcttaggctgcctttcttggtcctccttctagaagttgatactgacaaaagatgctataataaaacattcatcaccaggaaactgaatttttggggtatcttgaaatatttcattttcttatactattatattctgattatattatgtcttccatttggaaaaggaaaataagtctcatatttcttaaatgcaagacttaatgtatggcttagaagaagccaggattatttgtatggaggcctgatttnnnnnnnnnnntgagctcttagttagcttatcaatccaacaatttgttttctttgtctcttaaaatttctacagaattcacattcatttggcagtgactattcttgtaaggtgtgaagaatcagattattccatcttacagaattaatagtgtttcttaacagataggaaaagaaattaaaataataattaaattacataactaaatta

SEQ ID NO: 358655 - DNA, 735 bp, Homo Sapiens
  misc_feature (127)..(127): n is a, c, g, or t
gttctcttgcactgaggacccgtattaagggtgacagatgcatcttctttctctccacttggcttgcagaaggaggaaccttgcgggatgacatttgcactacaagttagcatctgtgtgacacagnacaatgccaggaaacaccgtgggtaagccccacgggcagctgtaggtccccaagtataccagaaagagagtaagagctcaatttctaagtgtgaccagacacgtgcagcattgtgtcaaccccgtcttgacggcatccttgaaaatcaaatgcagaagtgatcctctaacctcatcactccttaggaactgcaaagccctggatgctgtgtttggacctgcagcaggcacttgctcatcatcagcaggggtggcttcagctgctgcctaatcactcgctttagagcatggtaccgggtcccacatctgggccatctcatagtgggtcacgggtgtttctgtgtaggataaagctttgtgtcatgaccgtctcctcccttccacaaaggcagctgggtctccaaagatatcactgggtccaagaaactttccctggattgaagcacacaagaaacaaagacagttcttctcttgacacccagctccatggaagcacagcctcctgttttcatttccggaagggggtgagcctgttgaaggtgtgccagaagagcgaggaaaacctcttgggtaccgccagcctgcagcccgggggataccactagttgt

SEQ ID NO: 358656 - DNA, 1420 bp, Homo Sapiens
  misc_feature (1203)..(1272): n is a, c, g, or t
  misc_feature (1323)..(1323): n is a, c, g, or t
  misc_feature (1329)..(1329): n is a, c, g, or t
ctgctcttcgtggccgacgctgcattcacctaagtccccaaagatgtgacagtacggcatttgagacgacatcgaaatgccctgcgcgttccgggccagcgctgccacctcgtattcgctggagattcagtggtggtacctcaaggagccaccccgggagctgctgcaagagctggcgctcagagtgccgggcgcccggagcaaggtaacaaataaggatgcaactaaaatcagcaccgtacgcgtccagggcaatgacatctcacaccggcttcggctgtctgccgtgcggctgcaggacgagggcgtgtacgagtgccgcgtgtcggactacagcgacgacgacacgcaggagcacaaggcccaggcgatgctgcgcgtgctctcgcgcttcgcgccgcccaacatgcaggccgccgaggccgtgtcccacaatccagagcagcggcccgcgtcgccacggcccagccagcgccgccaacgccaacaacgcgggcgccgcgagccgtaccacctccgagcccggccgcggcgacaagagcccgccgcccgggagccctcccgccgccatcgatcccgcagtccccgaggccgcggcagcctcggcggcccacacgcccaccaccacagtcgcggcagctgctgctgcctcgtcagcgtcgccgccatcgggacaggcggtcctgctgcgccagaggcaacggctcgggccaccggccgtagctacaccacagacccactcttgtcccctgctcctgttagctctgcataagttcctgcgcctgctcttgggacattgacagacaagaccaacccgagcatctcagaggccgcacatgacctgcccggggccctcggtgaggaccatgtcgctggatggacacagagagactgagagacgcatgaaaaagtccacatggaaaactacactaactaatatttttgggaaagttacacaaatgtagaacacctaaaataatgcatctagtttccaaataatttggagtttggcccatgcagtctgcatgggaatcaatgatttctctacttcaatgtagttttcttttctacacttttccctccaagtcttcattttgcacgaactgttgagcagttatctttaggattaatattgtacaaattgttggggtcaaagccttttgacaaagcaaaatatttttagtagattattgtgtttaggannnnnnnnnnnnnnnnnnnnnnnnnnnnnnnnnnnnnnnnnnnnnnnnnnnnnnnnnnnnnnnnnnnnnngattaaaaaagacacatcttatcataattaaaattcactgtcaataatatntatttntaaataaagattggaaacaaggtcagacactcgtttataaactggattgtatattgctgaagaacagctgaataaaaaacaacttttgaat

SEQ ID NO: 358657 - DNA, 774 bp, Homo Sapiens
tctcatttcatagccgattcaatgaatatgattagaaattcactgagctcactcttgcaggtttaaatggaggcctgcataaggactgcaagaggaaatctgggtgggagagaatgtaatctgatcttgcactcataggcaatgctgcaatgcaatcatgtccaatacaagcacagcttcattcataacaggaaacgtcttctttgggaaaatagctctattggtgcccaaactcaggtatgccagtgtatgcaggtggagtcgccctacccctcttccaaacatgtcctgtgagatttttaaaataagatgggatagtacaggggcatgaaaagaattgattccttcacaggatttgaatccagttcaagggagaatgtagaaaattcaaaacccaacatataaggtatcacacaacccaagaaaagtaaaaccattgcaagtttacttgcgttgagtacaaaacagatttaatggtgttctatgtcatagtttaatgctctgggtatttaaatatgttttcaacaggatttgagttgaaagtttgtaatgtgctttgatggaacacctctcaatttctattcaataaacttatgtaattgtccattgacaatataatgataacagtaccattgaactctaaactgtggtttatcttcactactgggaagcaactgtgcatcagtattaaagatatgcagaaacataatattcactaatttgttcatctgcttctgtatattgtttatggaattacatggcaagaactgtttt

SEQ ID NO: 358658 - DNA, 1367 bp, Homo Sapiens
  misc_feature (406)..(406): n is a, c, g, or t
  misc_feature (1204)..(1204): n is a, c, g, or t
  misc_feature (1208)..(1208): n is a, c, g, or t
  misc_feature (1277)..(1277): n is a, c, g, or t
  misc_feature (1290)..(1290): n is a, c, g, or t
gaggactttaaatatctctttatgaagttccctgcctaacctctttctatttaaaggcaaacaaatttcgaagaggttttgtgttccctctttatgtttctctatgacccagtttagtctaaaaccttagttcattacatatacaacacatagcctttgatccctggtaactggcaggtgttggtgattaataaaccaaggcttcaaagtgaagtatgtgtgtgcagatgacttttggaataacgtgggcatagcatcataccttcctgattgtcttcagcatataaaaattaactgttgtagttaaaattatgtcagtgcagagcttgtgggttacttgggaatgttctttcagaatagtccatgttgcctattaaacctagttttaaaacacattggggcagtncaatttatgcacccaaaatatcaccctcaggtagattgagggcaagataaaatgctgtatgtagctatacaaaggaattcagaaacattactggaaagcaaagcctttgtcagcttgctactgacaaagtagtaaaaagctactaatcagtgttgagtcagatgtcaacagaaaaatacaaatacctatgagagccacagcagtttctcatttcatagccgattcaatgaatatgattagaaattcactgagctcactcttgcaggtttaaatggaggcctgcataaggactgcaagaggaaatctgggtgggagagaatgtaatctgatcttgcactcataggcaatgctgcaatgcaatcatgtccaatacaagcacagcttcattcataacaggaaacgtcttctttgggaaaatagctctattggtgcccaaactcaggtatgccagtgtatgcaggtggagtcgccctacccctcttccaaacatgtcctgtgagatttttaaaataagatgggatagtacaggggcatgaaaagaattgattccttcacaggatttgaatccagttcaagggagaatgtagaaaattcaaaaccaacatataaggtatcacacaaccaagaaaagtaaaaccattgcaagtttacttgcgttgagtacatgttttcaacaggatttgagttgaaagtttgtaatgtgctttgatggaacacctctcaatttctattcaataaacttatgtaattgtccattgacaatataatgataacagtaccattgaactctaaactgtngttnatcttcactactgggaaagcactgtgcatcagtattaaagatatgcagaaacataatattcactaattngttcatctgcttnctgatatggcttatgggaatacatggcaagaactgttctaaagcaacattgctttccacattactttagaagtgaaa

SEQ ID NO: 358659 - DNA, 1979 bp, Homo Sapiens
  misc_feature (1649)..(1672): n is a, c, g, or t
cggagcggggcgagagcggcgactaaggatatatcgaggggccccgcactgggggcacctgttcggggtggcgattgtataaagcgttcgcggcggcggtacgcgcaacaaggcggtgtgagtgaaggatgaggggggaaggagcgcggcaggggaataggggaaaggtggtcgatcgtcccaggagggataaccggttaggagggtccagcggggtgtgcaaagagggagggtgcagaaggcgctaaatggggggtaacagagttggggcccatggtgggggtgttaggtgcctgccacccaaggttcgggccgttcgaggggtaccgccgtgcagggatttggaggcaggttctctggagtgaggaagggccgaatgctgtgcagctgagggctcgctcgaggaacccgagttcgcacgagagcggcagcaccggcgggactgggatatcgtgtccgaacatggggagacaaaatggctggcacgcccggagccgaaagtgcatccgggctccgggacacgcccgaagcgcgactcccagaatgctctgcatcgacagcgggagacgagacgcgctcggggatcgctttgctgccactaggccctgtgctcctccccgcagcggaaggcctaggaatacgcggtgtcttacgtcgcttcctccgttcttcgtggcactggccaacgggacgcttagtctttcggcaacggggtgaaaccttcctcgtgcctgaaaaaacggtacttcgcggtgtggcttcggcgcgtgcgcaaaaggccgcggggcgcactccagttcccggcaggccccgcgacgcgcgtttgcgtgctaacgcacgcagttagtcgtgctgacgtgcagcgcggcccaggcggggtgcgagtggcgcagtcggagcccgttgcggcccctgaggaagcgaggaggcgtcggcgtcggctgaggcgggcggaccggcgaggcgaggcggcggccccaggcccgagggactcgggagctcgagcagcggcggcggcaagacctctccccctcggaggcggcgggcggaggcggcgggagcggtggtgccccccccgggcacggggccatgtacaacgggatcgggctgccgacgccccggggcagcggcaccaacggctacgtccagcgcaacctgtccctggtgcggggccgccggggtgagcggcctgactacaagggagaggaggaactgcggcgcctggaggctgccctggtgaagcggcctaatcctgacatcctggaccacgagcgcaagcggcgcgtcgagctgcgatgcctcgagctggaggagatgatggaagagcaggggtacgaggaacagcaaattcaggaaaaagtggcgacctttcgactcatgttgctggagaaggatgtgaaccctgggggcaaggaggagaccccagggcagaggccagcggtcacggagactcaccagttggcagaattaaatgagaagaagaatgaaagactccgtgctgcctttggcatcagtgattcttacgtagatggcagctcttttgatcctcagcgtcgtgcccgagaagctaaacaaccagctcctgagcctcccaaaccttacagccttgttcgggagtctagcagttctcgctcaccaaccccaaagcnnnnnnnnnnnnnnnnnnnnnnnngtagaggacggtcagagagcagctctcctcgacgggagagaaagaaaagctcaaagaagaagaagcacaggtcagaatctgagtccaagaaacgtaagcataggtctcccactccaaagagcaaacgtaaatctaaggacaaaaagcgaaagcggtctcgaagtacaacaccagcccccaagagccgccgggcccaccgttcaacttctgctgactctgcttcctcctccgatacttcccgcagtcggcgctgcacagaccattcggaagacacgctccagcccttctagaagcacgacagccaaac

SEQ ID NO: 358660 - DNA, 645 bp, Homo Sapiens
tcttttccaccacatccttatatatatggacacacagtcacgcaagctagttcccatgactcctggatctatgtgtatgcagaaggctacatatacatagttgcttctttcctttccattgtagctctttgcctctcaattgtcattgatacatgcattgctcttattctgtctggcattacaattgcagttttgcctaatggcaaaaaccagccatcccattgcccaaaagagtcaacagtatctgtgtttgtactgtgcagttttcaggatgagatgacagatagcacgactacactgaggcaccctcagagaaggcagggcctgatttatctagctgtccagccgctgtggctggaggtaggctagttgggatgggcagctaagcagtcttctcttctgcctttatgagattgggtagaaagatggggcatattcatctacccccaaaagaacactataaaaacagctcctctatatttccacctctttctatttatgcaactcatcttcacagattgttctaaagtaaaatagatggtgtatgctgtatccacaaatcatctgtaacaattatgttttcagtgctgtgtcattccaaataaacctttggtaatcttcaacgattaccctaattccaaaaaa

SEQ ID NO: 358661 - DNA, 462 bp, Homo Sapiens
agtccatgtaatgtaaccagttcgaaaaaagtcttaaaaatgaaattgttgactttaaacacacaatcttcggagccgctcacaacgtccgtagaagcagactcctccccgctcctggggaaaaccctgcctaatatttataacgttatgacatactgtaatactcacaaggtggttgtagaagtataaacacgactggagttatctgattggctgctgatttaaatttccatttcatcacagcaataagacactcggggcggtgcattttctgtgaaatgactactgtccggggcccgaggtgctgcctcgcacaatgcatcaaaggaggttgtgtccgtggtcgtaacctcttcgcgtgaaaggcaccgcctggtccagtctttgtgaaggaacaaaataagttcacttccttgggcaccgccacccaccctcagcaaatgacaaggctggagcgcagct

SEQ ID NO: 358662 - DNA, 1877 bp, Homo Sapiens
  misc_feature (433)..(602): n is a, c, g, or t
  misc_feature (1414)..(1472): n is a, c, g, or t
atatatgctgtgagaagttgtaatattaattggcctctttgggtgggactctaagcagtatttgcagaaatatgcttctggtccaacttgtacatccagaacaaaagggcccctctagtagctgtgtgctggattattcaggactgattaactcaagttgctcattgaatcacatcatccactttatcccagaaactagaactgtgagaaaccaggtttagaagacagtcacagaacagcacacatccaaattcagcgccattgaaagttggcctaaggctcagtgccactcacccctccctccccaaaagacaagagaaatttggccagatggggaaggtcactggaaattgaggccaaagggctgatcagaattgcctttataatatatttgatggatgcctataaatgtgggttttgcaaatattgtttnnnnnnnnnnnnnnnnnnnnnnnnnnnnnnnnnnnnnnnnnnnnnnnnnnnnnnnnnnnnnnnnnnnnnnnnnnnnnnnnnnnnnnnnnnnnnnnnnnnnnnnnnnnnnnnnnnnnnnnnnnnnnnnnnnnnnnnnnnnnnnnnnnnnnnnnnnnnnnnnnnnnnnnnnnacaaaacttgaagtttgaaacccccagcttgctgaggagccctttttatttttggtactgagagtctcaaggtcccatagctacatggtacagggctgttgtctgcttgctgcacagcagaaattacaccatccacaggaaatggactatttttgcagtccaacatcagccaaccacacacagccgtgtttggaagctgaagagtaaagaaatttctaggaatggctgttgttctgttttttagcacagccatttagatataacatccttcacttaaaaattaaaaacatcagtactaccaccaccaccaaaaacatcaacacagatcttcacatctgcccattctgtggttagtcaatggcttgcaataaatgtgcaaactgcatctataggaaacatttttgtgattacggaatactttagttgattgctgaaaatattgaaaggtcttcattttacagtgatgagtacatatgcatgtttcggggacttggcccttctgatgaggggccctcggtactctggataacgaagcttgtgcagagtggtaaccatgcttacacactaaactataatataaaggaaatgaagccatgttaatctgagagcagtgtcgccatagttgtgttgtttacaatactctataaatgggttcctgttgccctgtaattaaactgctgcccgtagaggcctttcagttccttttctgtccttccccttcttaacacaagctcaaattttctaacttgtttttattttgaagacttttaaaatggacattttcaatacataaaaataaacagtgctttatnnnnnnnnnnnnnnnnnnnnnnnnnnnnnnnnnnnnnnnnnnnnnnnnnnnnnnnnnnncactaaacccaaactattaacacctactcatcctctacactcctagtttccccttacttcgccttcttccacaccattcgctctttaaaaccctttccttcactcgaaaaactccctttttaccatatccccttcgcatcaacctctatttctttttagctcctctctaatcctctgctcctttacaccctctcatatatttcagacactccattattttttacatcaagtacctactcttctacgaacctcgttttatctccacaattcttacactctcatcgcatttctctcttttcgcacaatctttcctttcaacaacttcccctctttacatattttctatcctgtttactctctacctcctttttataccactccttatactcctttttccctcgttcc

SEQ ID NO: 358663 - DNA, 396 bp, Homo Sapiens
actacatacttccgaggtaacagagagacacctctgtctctgaaaaaacaaaacttgaagtttgaaacccccagcttgctgaggagccctttttatttttggtactgagagtctcaaggtcccatagctacatggtacagggctgttgtctgcttgctgcacagcagaaattacaccatccacagaaaatggactatttttgcagtccaacatcagccaaccacacacagccgtgtttggaagctgaagagtaaagaaatttctaggaatggctgttgttctgttttttagcacagccatttagatataacatccttcacttaaaaattaaaaacatcagtactaccaccaccaccaacaacatcaacacagatcttcacatctgcccttctatgt

SEQ ID NO: 358664 - DNA, 778 bp, Homo Sapiens
  misc_feature (529)..(529): n is a, c, g, or t
gtttacaaaatgttgggaatttctgctttgacagataggtaagtcccatgggaatttctgctttgacaaatagttaagtcccatggccttcagacaggcaggaagcagaaactttcaaaaaagtaacatttctctggatttaatgtggaaatagacaaaaatttaaagaataattaaaaaaccatggtagatgaaatttggtgattacatatagtttcggatgttaatgctagttgagagaagagaaaaagatagcaagtagaagcagagaacaggatcattggaagggacctgagaaattgccatttcatccattttagcaaatttaattagcatagcatgtaccagtactaggatcttgagtgagtgtgtgagtttagctctgcctaatatattactacttgggggatctttgggagactatatcttcttggagattgagtttcttctataaaataagcataatgctaccctaaatgtaagggttatcatgaagataaataataaaggactacaaaggaccaagcanataagaattactttttgcggtggagaaacaagtgcctgtggagaatatatgaccgaagatcttgtagttatgacttaaacaggcccagaaattaagttttcaaaatctagtaatgtgttttttctgtcttgcaaaaagcagcacacctcaaagaaggaaaacgttgtgaatggtggtataataagggttattagggctttccagggaagataggcatactactttccaaaaaatcccctggtagtatcg

SEQ ID NO: 358665 - DNA, 632 bp, Homo Sapiens
  misc_feature (441)..(523): n is a, c, g, or t
tgtgtgatattggcagagcaaggcacacttgaaggtttttcctttgcagcctgaggtcttctaggatatttacattgtgacactttctccgaggaaagactgggatggaacaaatgtcagtattgctcctacagcatgtacttgaaagcttaggtcatttcagcctaagaaataatttataaaaatgcaacaagagaaggacataaagacagaagatatcctacagaaattttatattttactctggacaaaaatggtttattcatagcccaagtaaaaaaataaaagttgtaactaaatgtaatcaatgtaaccatttagttgtaaaagagtaagcagatgtgtcttcttttattaagcagtcaccctgtcggggtaaaacactgcaactctcctgccaaaagtggggggcttggatctacttgagcattgggagaaaannnnnnnnnnnnnnnnnnnnnnnnnnnnnnnnnnnnnnnnnnnnnnnnnnnnnnnnnnnnnnnnnnnnnnnnnnnnnnnnnnngatcttattaaataaatattaaatctagtgtagcctaaatgtaacgcctttattactattttgttagtaaataaataaaagagaacaaatatctaacaacaaaaaatat

SEQ ID NO: 358666 - DNA, 1892 bp, Homo Sapiens
agcgggatgagggaagaggactccaagcgccatggccgctgccgcccgagcccgggtcgcgtacttgctgaggcaactgcaacgcgcagcgtgccagtgcccaactcattctcatacttactcccaagcccctggactttcaccttctgggaaaacaacagattatgcctttgagatggctgtttcaaatattagatatggagcagcagttacaaaggaagtaggaatggacctaaaaaacatgggtgctaaaaatgtgtgcttgatgacagacaagaacctctccaagctccctcctgtgcaagtagctatggattccctagtgaagaatggcatcccctttacggtttatgataatgtgagagtggaaccaacggattcaagcttcatggaagctattgagtttgcccaaaagggagcttttgatgcctatgttgctgtcggtggtggctctaccatggacacctgtaaggctgctaatctgtatgcatccagccctcattctgatttcctagattatgtcagtgcccccattggcaagggaaagcctgtgtctgtgcctcttaagcctctgattgcagtgccaactacctcaggaaccgggagtgaaactactggggttgccatttttgactatgaacacttgaaagtaaaaattggcatcacttcgagagccatcaaacccacactgggactgattgatcctctgcacaccctccacatgcctgcccgagtggtcgccaacagtggctttgatgtgctttgccatgccctggagtcatacaccaacctgccctaccacctgcggacccctgcccttcaaatcccatcacacggcctgcgtaccagggcagcaacccaatcagtgacatttgggctatccacgcgctgcggatcgtggctaagtatctgaagagggctgtcagaaatcccgatgatcttgaagcaaggtctcatatgcacttggcaagtgcttttgctggcatcggctttggaaatgctggtgttcatctgtgccatggaatgtcttacccaattttcaggtttagtgaagtatgtataaagcaaaggacttacaatgtggatcacccactggtgccccatggcctttctgtggtgctcacgtccccagcggtgttcactttcacggcccagatgtttccagagcgacacctggagatggcagaaatactgggagccgacacccgcactgccaggatccaagatgcagggctggtgttggcagacacgctccggaaattcttattcgatctggatgttgatgatggcctagcagctgttggttactccaaagctgatatccccgcactagtgaaaggaacgctgccccaggaaagggtcaccaagcttgcacccggtccccagtcagaagaggatctggctgctctgtttgaagcttcaatgaaactgtattaattgtcattttaactgaaagaattaccgctggccattgtagtgctgagagcaagagctgatctagctagggctttgtcttttcatctttgcgcataacttacctgttaccagtataggtgggatatacatttatcttgcaggaaattccccaaagctcagagtccagttccttccataaaacaggctggacaaatgaccactatgttagacccccaggctcgacttcaggggtcagtgttcctgtcccaaaccccacacagaatactctgcctctgcttcatgtagcaaatgagcaaaaactcagtatctatcaaaagtgtaaattatatttcctatgcctagtaattcacttcatgtctaaaaatttatctgatagaaacactagcaccagtacatacagaagcatggcaaggatgtttctggcagcacttttctaataataaaagatttgaacc

SEQ ID NO: 358667 - DNA, 1100 bp, Homo Sapiens
  misc_feature (1042)..(1042): n is a, c, g, or t
agcgggatgaggactccaagcgccatggccgctgccgcccgagcccgggtcgcgtacttgctgaggcaactgcaacgcgcagcgtgccagtgcccaactcattctcatacttactcccaagatggctgtttcaaatattagatatggagcagcagttacaaaggaagtaggaatggacctagaaaacatgggtgctaaaaatgtgtgcttgatgacagacaagaacctctccaagctccctcctgtgcaagtagctatggattccctagtgaagaatggcatcccctttacggtttatgataatgtgagagtggaaccaacggattcaagcttcatggaagctattgagtttgcccaaaagggagcttttgatgcctatgttgctgtcggtggtggctctaccatggacacctgtaaggctgctaatctgtatgcatccagccctcattctgatttcctagattatgtcagtgcccccattggcaagggaaagcctgtgtctgtgcctcttaagcctcttattgcagtgccaactacctcaggaaccgggagtgaaactactggggttgccatttttgactatgaacacttgaaaagtaaaaattggcatcacttcgagagccatcaaacccacactgggactgattgatcctctgcacaccctccacatgcctgcccgagtggtcgccaacagtggctttgatgtgctttgccatgccctggagtcatacaccaccctgccctaccacctgcggagcccctgcccttcaaatcccatcacacggcctgcgtaccagggcagcaacccaatcagtgacatttgggctatccacgcgctgcggatcgtggctaagtatctgaagagggccgtcaacagcactgacaaatgaagaagaagaatgagtctcagggcaccttcctgggagtggccctcgccatccaggggaccagcgcgttgcctcccccggcgcttttacatcacatgaggcagctgacagcgttatttattatggcctttgcttgaaacagttgatggaggaantattgttttcctttcagtttttcattttaggaggacaagggcgttcgttttgaattaa

SEQ ID NO: 358668 - DNA, 725 bp, Homo Sapiens
ggctaccccataggcagcgagcagcagctcagggcagttctgcagtcagatttatacccacttttaattacatgtagattaaggagctgcatatacaaagatttctagggaaggagtagtaacttctgggtcctggggtctttgccacggaacagggcagtatgccagggtgttgccacggcaatggtaaactgacatggcaccctgggggtcatgccttagggaaagccgcttacactcgcccctgttttagctcatcttcaagttagtctggtgtccaagctccaccgcctgcctcagtctggtgacctccttctgtgtctgatgagcatggcagcgttgggaccttccccttccaactctctccctcctcttcgtcctccctaaaggacgggtacgaggaggggctatcacgccagcgacatcctctagcaccacccaggtgtgtggggtggggcaggggggcgacgaagtatccagcccagggccacgtagtcaactgccaagggcttcctgggcttctcttctgccccagagcttgtctccacccagcaggggttcccccagcgctaactgtatccctaaagttctgatgtactttacttttccatcttccttgttgctaacatctaccttctgctctgtaagcaaaactaaatcttctgtgcttttgtccataggttgattctacaatctgaaaatcaataaacagcatttgcatgata

SEQ ID NO: 358669 - DNA, 1510 bp, Homo Sapiens
  misc_feature (64)..(76): n is a, c, g, or t
  misc_feature (88)..(166): n is a, c, g, or t
  misc_feature (619)..(653): n is a, c, g, or t
  misc_feature (717)..(725): n is a, c, g, or t
tgggctcaaggaccacctcccaagtagctgagaccacaggtttgccccatcacacctggccgannnnnnnnnnnnngtagagatgggnnnnnnnnnnnnnnnnnnnnnnnnnnnnnnnnnnnnnnnnnnnnnnnnnnnnnnnnnnnnnnnnnnnnnnnnnnnnnnntaaaccactgcacgcagcctaccctctgcctttttaagatgatgtatttatttaatttttgccatcattggtgcttcaccttcctgcgaaggaaattccagagcctgtatttaagctacctaggcttttacactccctttattgcctttccaaatagtatctcatttggtgtactctagtgtcctatacctcttggaaacgaaagagggcccaacctacaactaagaagggacaaaccttgaactaagtaagaccttacacacccagaaagaacactgggccctccttcttcagggacaatgcagtagccacttggcttgtggaatttactgaaggctatttcctgtaacttgctagttaacttagttttgtatttcaggcagaggtgcgctctgtaatgttgggcctttgacttcacagtactggagagctgttcacacagatgtttagacnnnnnnnnnnnnnnnnnnnnnnnnnnnnnnnnnnnaacaactctttcacagaggcagtcattttgaaaggttgaaatatttggcctttaccaaagagcnnnnnnnnnccttaagcaaaatcctttcagaaagaaacaaatgggggaagggcagattaagaatgcatatgtcccaatccacttctatacgagtttaatcatattcacatgagtaaaatgatggaagaactctttaaggtaatcctttgggataaaggatcctgggaagttctctcaggtaaagaaagcttacagcagatttgtaatatatgtctggagagctatttataagaaatttaagaggattgttttgttttcctttattaaagatttaagcctttttactttgcaaaaagaaaactacaaaagttttatagatataactttgctaattttttaaacttttctgaaacgattagctgtagccaaattatgtggttacgttttgctacattagaatttgaaaatgcaatatgtgtggtaaatctactgtttgaaatttataatggtctctgatatgattcgaattttggtaacttttgaaagttattttccccctttagtcatggatttctatttgttttttaatgttaatttttctagaaagcatctgaattgactaggcttttcctatataaaaaactcaaaacttgttaactctgtactttaataaaatttaaaattaaaactgtgttgtttttttctcttctgctagatacatatataattaaagtactcaagttagttgttttgcagagatgttgccttcagatgttaatcaggtctctcaagtttcatggagtctatgctgatcctttaattgacaaataaaagatatatatctgtggtgtgcg

SEQ ID NO: 358670 - DNA, 687 bp, Homo Sapiens
  misc_feature (61)..(61): n is a, c, g, or t
  misc_feature (69)..(69): n is a, c, g, or t
  misc_feature (107)..(107): n is a, c, g, or t
  misc_feature (325)..(325): n is a, c, g, or t
ccagagtaggctctaagagatccccctagctttcaaactgagcagcaaagccaatgcaaanccagtatntgtttggcagaaagctccagtgaaaatatgagatgttntggtcttaactggcagataccaaagagcaaagaaggtgccttattgagttatatttatcaatgtaaaatcccttgtgtatagctacaaatccacttttattgcagatacttaatatgtttctttatagaaagtagctcaaccaaataatctcccaaatttggcaccaggaattgttacagcctacacaccactacagttccttgtaatttaaaacatntgcgttttaagaatagtctccacactccaactatgctgccaatttcttcagctaaaagcttaagtttatactacaaaatactgtatttactctcgacaatagaatgcactcatttacaaagcatacaggactaaattactccaatatgcaacttcaaaatttctccaatatacaacgacaacatttctaacatcatagcttttctattacccaaatcagtaagtctaaatagtagtactgtacactgcacgaggtactattggccaaagtcaagtcgcatatgatcagttcactacaacaggttatacaaaagatcagacccctaatctcaataaactattttgcaaaatggtcaacggaga

SEQ ID NO: 358671 - DNA, 945 bp, Homo Sapiens
  misc_feature (47)..(47): n is a, c, g, or t
  misc_feature (61)..(61): n is a, c, g, or t
  misc_feature (87)..(87): n is a, c, g, or t
  misc_feature (130)..(130): n is a, c, g, or t
  misc_feature (261)..(261): n is a, c, g, or t
  misc_feature (271)..(271): n is a, c, g, or t
ccttcggtaatcagtttgcacaaagagttggtattgtgactcctctntgattggggggtantccatcatagagtcaggctcctttcnttccatatccaagatgcaatggaatatgagtccttatcttganccactacctgggatctctccgtttggaactactgaagagattgattgagctaagagttggtatataagatatcccacctgttctgatagtaagtccatgtatgaaaatatcttaatgctgctcagattttnttcatcatgnttctgtttaatggtatacaaagtggcagccatgctgggacagctaacaatctcaaattcttccaagagagctgataatccattgcttgtttctatttcacaattatcttgttctccatccctttcatagctgatgttactgcaacacattatacagagaaacttggccttggcagcatggtggtattggacagcattcaaagtcttcagtaatgtctgatggcagtttttttgagagttcaatttcaaaccaaaaagatcaatcaaaacagcttctgccatccttgaaagaatacttttatgccaaataaatcacctcgccgcggccgcacagattccccgcctgataccgtcccaggatcccaggggaaacctgacggccaggttccctcgtgccagctgctgggacgaggaagggaggtaggccagggccgcctggcgtgcttggtgcgaacgcggcgggcccagcgcgagagctgggaatcccgggatgagccaagcgccgcatgcccgctgctgcctcagcagttccgggtctgggcggtccgctgagttcgcatcccgcagccccggcgtcgttagaggaacaggaaccagagccgcgcatgggctctcgcccgtgtagccaggcgggttagcgggcaggagtgcaggtctccagagggcacggggcgg

SEQ ID NO: 358672 - DNA, 831 bp, Homo Sapiens
atagaaaaaaacggactgccagttggatttgggagaaaacctaagttaatgtaagtatgaagtaataagccatgtgtgaagtatacccacgttccacttacaaatgtccatccctcctggtcacttgacaatcatgctctgcttcatgaagcgtttcatggagtaaaagcaagcaaggaggcaaggactgtgatttttgatgcaaatatgcccagaaaaagtcacatataggaacttacatatttaatggtggtgttgatgaaggtgacaagatacattataatactttattccaaaggcagcacatggtacaaaatcctgctggagactgtactacaatagtggcctttggaaacaagaaatttgatgatgatcatgaccatgttgatcagttctgaagacaacaaaatgccttcacttcttagcatagaccatctggttttcatttctttgaaaagtgaaaacgccatctttatgaaaatagttcaacaggtgtgttgttttttacttctatcttgttttccccttattttctcagcaggacaagtgatttcattcctgaagcaggaaaagaatgttaagatacatgccactagaaatgacaatgtcaaacactgacagagtcgtttcaagctcagaatgaatcacttttaagacagtacagtttggcttgtttcttttggggccataagacttttaatacttctttcattgagataagatgagagtaaacattcgacagagaaatagtaagaaatatttaaattaattcttctaaacataaatgctcggattaaaacaataagtttggccgggtgcggtggctcacac

SEQ ID NO: 358673 - DNA, 609 bp, Homo Sapiens
acttgttattgaaaaaaaggaaaggaagccaggaaaaagatactatggggtcaagtgtaactccatggaaatgccacgtctgctcttcagtgaagaagctggtttagagtctcacagaaaacttttgactgtatttatttattgttgcaaaaaagacgcttttttattgctgccctcatttgtcagctaagtattttttcttataaaatccagccccggttacatataatcatctgtatcttatcatgattcctgtaggtaaaagtacaagacgacctctagatgtcttttctttctatgaaaggagctgctatgtacacatgtgcacacacacacaactgggaatcaacaatgagtttattgttcatggtagattaaaattaagcttgcataaaggttgggctaagtggtcctggactacagactctgttgccttgaatataacagtacaatttgtcaattactctgcaccaggctaaagtgagtaaaatctatttgaaggtatcttgtttgtaaacatttgtcagattctaatttttttcttttgtattaaaattcaactatggatgtatatgaaacaaaataaatggagataatttttctcccaca

SEQ ID NO: 358674 - DNA, 1531 bp, Homo Sapiens
  misc_feature (60)..(273): n is a, c, g, or t
  misc_feature (692)..(967): n is a, c, g, or t
gggtagggggcggtccacccacagccctggcgtcgcgagcgggggagaggcggtcggtannnnnnnnnnnnnnnnnnnnnnnnnnnnnnnnnnnnnnnnnnnnnnnnnnnnnnnnnnnnnnnnnnnnnnnnnnnnnnnnnnnnnnnnnnnnnnnnnnnnnnnnnnnnnnnnnnnnnnnnnnnnnnnnnnnnnnnnnnnnnnnnnnnnnnnnnnnnnnnnnnnnnnnnnnnnnnnnnnnnnnnnnnnnnnnnnnnnnnnnnnnnnnnnnnnnnnggggcgggcaccccgctcctttcgagagtgttacccccgttgggagggggggtggccagatgattggggccagggatctttctagtttcaggattttagaaggggtttggagaatctgctcagccctcagggattcgtctgtaaagataggataagccaccagataggggatttcagaaagtgtgcgtggctgccaaaaacttctaaacacaagttatatgagtgactcctgtcttctgtggctgagcttgggtactgattgtctttctccatgccttgcatcccctgttagaggagggcctgctgtccatggctgtccatgcactttaaaatgtctcaggtttagctgaagaccagatgggtccaagtttatttatatctgctggcataagaatgatggctaaattacctctttaagnnnnnnnnnnnnnnnnnnnnnnnnnnnnnnnnnnnnnnnnnnnnnnnnnnnnnnnnnnnnnnnnnnnnnnnnnnnnnnnnnnnnnnnnnnnnnnnnnnnnnnnnnnnnnnnnnnnnnnnnnnnnnnnnnnnnnnnnnnnnnnnnnnnnnnnnnnnnnnnnnnnnnnnnnnnnnnnnnnnnnnnnnnnnnnnnnnnnnnnnnnnnnnnnnnnnnnnnnnnnnnnnnnnnnnnnnnnnnnnnnnnnnnnnnnnnnnnnnnnnnnnnnnnnnnnnnnnngtctctttaactttcaagaggtacagcaaaactgaaatcaatgggtgatgacttcttaaagatcaaacatgaagatgaggattagttaagaccagaaaatcattctccgatcttgtatcttcaactcaaattcacactccaaaaggcctgtttgtggtgaggctcagggtctttggcttgttctgaattaatactttctctggaaactctttagatggctttgatccctgtgctgccccccattgcagacacagaaagcgacaggggattctggcggcaccctctctgtggaggagaggaaggtgtggaccacgttcagaggaaggcagcctgaagctgtcctcagtgagatgctgggggatgggcctcttgcccctgctgtgcagcctccatgcagggctttatttaccagtcaccaggtcttcaagacagtctgcaggagagaggatttcagggggaaagtaagccaagccaattcattctcatggtccccttttatcacaaacatgtaagtcttccatctcataacagagacagcaaaagcagtatccaggcctttttttt

SEQ ID NO: 358675 - DNA, 831 bp, Homo Sapiens
  misc_feature (61)..(61): n is a, c, g, or t
  misc_feature (121)..(121): n is a, c, g, or t
  misc_feature (210)..(210): n is a, c, g, or t
cctcgaaatagaaatcaatttccgaatgtcccacctgtaggtggagctagcctatggatcncaagggtatccagagtgatataatggactatgagactcaagaagggaaggaataaaaacntatatattgggtacaatgcacactattctggtgacaggtgcactaaaatttcagacttccccactatacaattcatccatgcaaccaanaaccacttgtaccccaaaagctactgaaataaaaatattaaagatgagcaaaaccttcaaagacgagattgacagtattttagcatacacagaagagtggagaaaaagagaattctaaatcaagagagagaaggatataatgggaaatgaaactgagatctgatctatacagaattggaatatgtccattagaaatgttttcagctgaaagtaacagaattcttgggtaatagagccataaagcctgtgatggttaattttaggcatcaacttgactggattaaggaatatctagagaactggtaaggcattattttggggtgtgtctgtgagggtgtttccagaggagattggcatgtgagttagcgtggactaggcagagaagatctgccctcaatatgggcaggcacctccaatccactggaggcctgggtagaataaaaacagaagaaaggagaattggcttctctctctcccctgcagcagggatacactcttctccaactgcccatggacattaggaccccagatcctctaaccttgggactccaggacttaaaactatcactcccccatcccacccccaggttctcagacttgaaaattcagccttggactgcc

SEQ ID NO: 358676 - DNA, 921 bp, Homo Sapiens
cctatgtcaagttatatgcctatagtactgttcttaattgtatatgtcctgtggtgatattaactcctttttattatttattggaaagttatttggttaccaaaaaaagtgctttcatgaaatgcagtgattatgcatgtttttttcaactcttatttttaactttctacttcattataggtaaatatgaatataattaaaaaaacagtaaatccttttaggggaatctgaaatgccttaatattaacttgataaaccaaaggaatttacatattacatacttcagacttttgatataaatgttcttaaactatgagtttaagcactgcctatggataaagactcacacactctcacatgtacacacacacgcatgagaatttctttttacattgaaaaactctttcatttaattcaaatgctattttcccattataatagcattatttggaagacttaaccagtatcaatttgaaatgctgatttaagtccccaaggatgaaaaatacattttaaaaattattttgttggagaggagtggcatgtgattcaaaagagcattgttggaaaatgctactgtggggcttagaagaaatgatgtttggtttggtatgctgctaactagttgtaagactttacaaatcactttgccatctgtacctctcaattattcctctataaaatatggagataataatacctatctgatcagactttgccccatgaattagtttttaaaagataaagactgaagtatgaaagtgcttttgtcaccccaaatgcaattgacccatgcaaaatattagcatgaatttatttaatcacataaaagtcatgaagaccagccagattttcaagcttcattctgtttcattcagttatattccaaaattcaaatgatcacattttattctttctcaa

SEQ ID NO: 358677 - DNA, 910 bp, Homo Sapiens
  misc_feature (557)..(597): n is a, c, g, or t
  misc_feature (709)..(764): n is a, c, g, or t
actcacaccttgcatttcacccctgcatcccagtcgccctgcagcctcacacagatcctgcacacacccagacagctggcgctcacacattcaccgttggcctgcctctgttcaccctccatggccctgctactggccctcagcctgctggttctctggacttccccagccccaactctgagtggcaccaatgatgctgaagactgctgcctgtctgtgacccagaaacccatccctgggtacatcgtgaggaacttccactaccttctcatcaaggatggctgcagggtgcctgctgtagtgttcaccacactgaggggccgccagctctgtgcacccccagaccagccctgggtagaacgcatcatccagagactgcagaggacctcagccaagatgaagcgccgcagcagttaacctatgaccgtgcagagggagcccggagtccgagtcaagcattgtgaattattacctaacctggggaaccgaggaccagaaggaaggaccaggcttccagctcctctgcaccagacctgatcagccaggacagggcctgnnnnnnnnnnnnnnnnnnnnnnnnnnnnnnnnnnnnnnnnngtcagagtaaagctgctccaccccagattgcaatgctaccaataaagccgcctggtgtttacaagccatagaagacggcggtcagctgcacacacgcgcccgtccaggccannnnnnnnnnnnnnnnnnnnnnnnnnnnnnnnnnnnnnnnnnnnnnnnnnnnnnnngcaacaagacaaggaggggatcttaggataaagtaaatctgcgaagggaggcacaacacacagcgcaagcagaatggtagacgagagaacgagacgacacagagggcagcgtatacacaaacagcgaagcagacgcggcgcagcga

SEQ ID NO: 358678 - DNA, 622 bp, Homo Sapiens
  misc_feature (379)..(379): n is a, c, g, or t
  misc_feature (385)..(385): n is a, c, g, or t
  misc_feature (398)..(398): n is a, c, g, or t
  misc_feature (544)..(544): n is a, c, g, or t
  misc_feature (573)..(573): n is a, c, g, or t
ccgcctccgcgcctgccaagcctgcaggccagagccgggctcggggtggcatcggtggtccttctccctgttccccttccaggtttgcataggggctggaggacaggtcagccagccttctctgcccgcctccatcctgccctgccgtcttctgactttgaggcctcgtatcccagtccaagaccatttcaaacggtagaactggtgccagacacttggaggaggcagggcaaagactcgccagtccgtataaacccttttggagaagccaagatgggatgagctccgcagcacgttcccgccagactgctgcaggcagagttccgcggaaaactgaaccccgggagtcctcaggggcccatctaccccggtacaccgncccctnctttcactgcggngactcggagctgtgggactggagcgcgcaccggcagacttgcgcgcaggttggagttggcgcacacccgcgccagccggggagcggcgtttacgcactggtaccgcgagcgctcaaagcatctcttcggaagtgctttaaggctgngaaaattactatacactttatgccggcancgagcctgggattttagcgtatataggacccgcacattgcttttgcagg

SEQ ID NO: 358679 - DNA, 902 bp, Homo Sapiens
gagcggggtgaagggctggcgcgcttaggcaggcggtggcgcggctggagtgccgcggggagggctgtgccggttgctttctgcagccgcatctcggccagctctcctcgccgtccccggggcgctgtgcgtctccagtccgggaccgaagccgcctgccgtagcgggcggccagatccgcgtcccgcctcagcggccggaggacatgcgggagagagaatgagccagagggacacgctggtgcatctgtttgccggaggatgtggtggtacagtgggagctattctgacatgtccactggaagttgtaaaaacacgactgcagtcatcttctgtgacgctttatatttctgaagttcagctgaacaccatggctggagccagtgtcaaccgagtagtgtctcccggacctcttcattgcctaaaggtgatcttggaaaaagaagggcctcgttccttgtttagaggactaggccccaatttagtgggggtagccccttccagagcaatatactttgctgcttattcaaactgcaaggaaaagttgaatgatgtatttgatcctgattctacccaagtacatatgatttcagctgcaatggcaggttttactgcaatcacagcaaccaaccccatttggcttataaagactcggttacagcttgatgcaaggaaccgcggggaaaggcgaatgggtgcttctgaatgtgttcgcaaagtgtatcagacagatggactaaaaggattttatagggggcatgtctgcttcatatgctgggcatatcagagacctgtaatccattcttgttatttatggaaagtataacaccaaaaactaactgggaatataaagactgccttcttaccaatggaaaaatggatgaaaaagccctcgtggaaact

SEQ ID NO: 358680 - DNA, 578 bp, Homo Sapiens
tgattacccggacgccgctggacctggccgcacgccgcaatctagcaggcgtcggggatccagggccgctttgaggagcctggcttcggatttcgcgtaggttgcatggcccaaggggacggggcggaaagtgcggaggctgaggacaaaatgggcgccggagactcctttagccctcgctccttgcagcgctcgcttgggcctctgcacgtcactcacgccccacctcggacctcgggccgctcatttccgggctcggctttgcaagatgtggtggtacagtgggagctattctgacatgtccactggaagttgtaaaaacacgactgcagtcatcttctgtgacgctttatatttctgaagttcagctgaacaccatggctggagccagtgtcaaccgagtagtgtctcccggacctcttcattgcctaaaagcaatatactttgctgcttattcaaactgcaaggaaaagttgaatgatgtatttgatcctgattctacccaagtacatatgatttcagctgcaatggcaggttttactgcaatcacagcaaccaaccccatttggcttataaag

SEQ ID NO: 358681 - DNA, 700 bp, Homo Sapiens
atactaattcatctatgtaacatgtgaatgaattaattcttcatttacaaataccagaaggttaatctacacaattctgctgacaaaaagcaaaagaggcagttaacaagacgctttaacatcacaggacaggtcaaaagctaagaattctggaaagaaaggcagttaaacaacttagaattctataccaatattactaccaatgtcaaagtaaaaagcttattattatatatccctgtgaaaatctaagagagcaaaggcataaacttgggatgggaatgggaaaaggagaaaagggtaaagagagagagaaaacagcaaaagctggagtctacaccaaaagcagacttctgtagatccagtcactggagggttcaaaaaccttgacgggcgcacactactgtggctaatgtgtagaaaatgttcactcacaatgttattatcatagtattaataaaaatcccctccttttactggtattttctaaagacttttaaaaacatacatctggttactcatgagataacgtttctgtgtttttatgtattagtgaaaagaaagcagatgtgcccagacttactaaactttggtactttgatgagttcaaatgtagaaaagatagcagaaaacatactttaataaaattgaaacattttagggtttaatatgaacattttattttttaatggatacaaccatt

SEQ ID NO: 358682 - DNA, 1452 bp, Homo Sapiens
gggattgaaaagtttaatgtacctgacaatcatcttaatgtcctagaagtccagcactcttgagagggcccatgggtattccagtaatccaaaacagagacaagaagctgcagtacatgtccaaagataatccttagtatctcaaaatatctgagctggcattttctgccaaagtggtaacaagaaccattatttggaatcactaccatttggagcaagaacactgccatggtcaagaaacagttgacttacgattcttccagtgcaagaataaaaataagcttttgatgatgtgtctaatgggatagtgattttgttgtgcactctaacgatctctttgccatcctgttttaatctgacagttctcagacatagagaaaaaaggtaactcatgcatgtactacaaaatcgccaagtgaccacttacattttgtaataaaacctgaaatctgggattcttgatggccatggcactgtacaccaactcaaggcacttcttgagcactatcattattacagcagaattacaggctcagctcttcagaccttaccctgtcttataggcgatacaactggccactgtttctggcacaactccactgccacaggagccaccttgctgccatcccactcctcatccatggctgaagtcaaagcaggggcatcccaagcctcatctgctcaatctccaaacttggagacccctcccttccacctctaatgactgaaggaaatggaagtgggtcccacaacttccatcagccgttttactctaggtctccagagcagccttcagtcaaacggctgtgggggaggcaacggtctctgcgtcagggaccagcaagcaggagagcaggttccaagaaacagctggagacagaaaggatggaccagggatgtctatgcctcactaagtcgtatttcccccatccccatttctcctggctactgacaaaatgaatatggacgcacaatttaccagaagatgttttagccacgttgaatcttggaaggtgagcatcctaggatgggcagtataaacaactgtgtttttaaatgacaaaattattactctaatcaaatttatctgcagttatcgacagtaatcatgatccatcccaccttttaagtttctttcattttcaatatcagccaattgtggtttatcaaaccatccctagccaaaaaaggaattaactgcagtaatacgtaaagtcaatttagaactaaactccaactttaaaaaaattccctgattcatcaaaagtacattttatccacttaggtaagaaaagtataattgtaactcaatctttgattcaataaaaaatatcttcagcaaaagtggataaccttacatgaaagtgagaaatcatgtattacaactttaaatcagacaactttcccacattcttaaaattatataaaaatagttttagcctcgtgccgaat

SEQ ID NO: 358683 - DNA, 790 bp, Homo Sapiens
  misc_feature (34)..(34): n is a, c, g, or t
  misc_feature (52)..(354): n is a, c, g, or t
gcctgctgtgtgcctcaggcaagtccatcttctntgggcttcacgtctcccnnnnnnnnnnnnnnnnnnnnnnnnnnnnnnnnnnnnnnnnnnnnnnnnnnnnnnnnnnnnnnnnnnnnnnnnnnnnnnnnnnnnnnnnnnnnnnnnnnnnnnnnnnnnnnnnnnnnnnnnnnnnnnnnnnnnnnnnnnnnnnnnnnnnnnnnnnnnnnnnnnnnnnnnnnnnnnnnnnnnnnnnnnnnnnnnnnnnnnnnnnnnnnnnnnnnnnnnnnnnnnnnnnnnnnnnnnnnnnnnnnnnnnnnnnnnnnnnnnnnnnnnnnnnnnnnnnnnnnnnnnnnnnnnnnnnnnnnnnnnnnngaaagatgaaaagtacctcgactttaaggatcacacctggtgcattccctggttaccttcgttaggtgggcagatacctacctatgtgacctgtggctgtgtgaccacaggccagcccctgtccctctctgaatggggactagacagaagagctgctgctttcctccacccccaggttgtaataaggaccaaaccatgctctaagcgtccctaagaatgcagatgggtccaagctctgctgtcatggggcacagcctcccctctcctggggaaggggcccccataacagaggtgggggtttagccaagtgcccaggttttgggtgatgctgcccctttaagccaattccccagaaatgaagactacgtgtcaagtcttacaggggtgggaactaacaaactcccaaactgtggtaattgtgggcggcctccccagg

SEQ ID NO: 358684 - DNA, 690 bp, Homo Sapiens
  misc_feature (625)..(625): n is a, c, g, or t
ctcccgctttctagagcagatcaacaaagcatcagccacatcatcgagccagcgtccgagtcagacaccccttgcggatttacctctgagttggtggttgccatggatgtcgatgcaaccctggagcatgtgcaggatcctcagaacactgttaaggtccaggtcttatatccagatggccaggctcagatgattcaccccaagcctgcagacttccggaatcctggcccagggcggcaccggctcatcactcaggtttatctctcccacaccgcttggacagaggcatgccaggtggaagtgaggctgctgctggcctacaactccagtgctcgcattccaaaatgcccctggatggagggtggtgagatgtcaccacaggtggaaaccagcatcgagggcaccattcccttcagcaagcctgtaaaagtttatataatgcccaaacctgcacggcgctaaggcaaaaacagtcttcccaaccgtggcctagagggcccttcttaggtgtcagaatgagccaagcctgaagcacttcacctggaattgatgtgtaggcttaaggagtatgtgacccttacagtctcatctggtatcaaacacaggataaattgtttcttcattnaaaaattaaaaaccttcaagtctacttacccttctcctgtccacaataaagttgagaaaacacca

SEQ ID NO: 358685 - DNA, 665 bp, Homo Sapiens
  misc_feature (473)..(473): n is a, c, g, or t
atcagttcagaccctcactgcatacaggatccctagagggttctatttaatagcttgaggaagggagacttttgacagcgttccaattctttttgcagcatggggaatcaaaggtggcatgccaagttcaactcagggctgaggtatccacattgtccacatcaggcaagccctgcactgacggttgagcctcatggagaggagcatgtgttggaaagagatccctttgttaactgttttgtggtgttctcttcaatgaattagagctcatgccccttttctggctttgctgttgattttggatggtagagaatattcctgagagccttccttttggcccccagcttatgccacccactctcttctcttggttgaattctctgaaggaaaggttcatgtgctattgtcctgttagtcaatagtcttcatatataattgtgttacatatattgctgtagactctcagaaatcanggtagagcttttcctttgagcactttaatgagtgaattcagcagcacagtctcaagaaatggttttccaaccaggagaagttatgtttaatctctgattgcccatttctcttcacacattgatactcgattcagtgagaggtgcttgtggcacccaacagtacccttgtgacacatcatttatgttattgta

SEQ ID NO: 358686 - DNA, 1728 bp, Homo Sapiens
  misc_feature (167)..(167): n is a, c, g, or t
  misc_feature (176)..(176): n is a, c, g, or t
  misc_feature (643)..(667): n is a, c, g, or t
aattccccaagcccgcttaattccatgggccccagggtttttcccttaggaaaacaaggttaagggccccaggttccactttacctaagtgggggcccggggcgcccaaaacggaaaggttctagaaaaggttcttcgagggcccgagggcggccgaacacggtaantttatttgntattgggttttgctttgtcagcctttattaatcaagagtaaagccgagccctagggtttccttaacaacaacaaaaagaacatcaaccttgtttatggcaaacagtgacttaattcttaatgactgttcattatatgtttaacaccacagagcaagaattgatcacgtttcaatcacttattcttctgagattaaaatacaagattaaaacagattaaaataaaattcactccaagaatttaaaaaataattccaaatgaaagacatttcaaacactgtatatagaactcaggaccaaaagaagaccttaaaacattttttacctttgaggtagcacaataatgctgaattagatttattttattacagtgagcttaaaaaaacaacacggaatctaccctttgctcaaggtgggctaaatggttttacgcaaacccctccatgaggttagtgacagttcttgtccnnnnnnnnnnnnnnnnnnnnnnnnnaaagtataaagatagccctgcagtgtgtaaaaggaaacctatgggaaggctgcttcccataaaatagacaatagaatcattgaggaacgtcagcagtcaagacaggaggaacaagaggtcattgtagtgaaaaaccaaaacaacttgtatcttggcaagattggtttacaagttcatgacaagaacaaaaattccaacatcagccaactgaaaataaaagataaaagatgacattcatggatctttttatttttctctgtgcaaaatgctcttctttctgaattagagggtagcttgtacactgtgacatgacatgaaatgctgtgtgcccagggtgctgctgggtgccaacagcacctctcactgaatacgatatcactgtgtgcagagaaaacgggcaatcagaggataaacataacctctcctggctggagaaccatttcttgcgactttgctgctgaattcactcattaaactgctcaaaggaaaagctctaccctgatttctgagagtctacagcaatatatgtaacacaattatatatgaagactattgactaacaggacaatagcacatgaacctttccttcagagaattcaaccaagagaagagagtgggtggcataagctgggggccaaaaggaaggctctcaggaatattctctaccatccaaaatcaacagcaaagccagaaaaggggcatgagctctaattcattgaagagaacaccacaaaacagttaacaaagggatctctttccaacacatgctcctctccatgaggctcaaccgtcagtgcagggcttgcctgatgtggacaatgtggatacctcagccctgagttgaacttggcatgccacctttgattccccatgctgcaaaaagaattggaacgctgtcaggtcctggcaccgtggtaatggctatatcctatttcactcacacacgtccttttaaagtctcccttcctcaagctattaaatagaaccctctagggatcctgtatgcagtgagggtctgaactgatgatccatatgtcaatcagtagttggaggaggatgac

SEQ ID NO: 358687 - DNA, 1622 bp, Homo Sapiens
  misc_feature (296)..(360): n is a, c, g, or t
  misc_feature (1474)..(1474): n is a, c, g, or t
  misc_feature (1496)..(1496): n is a, c, g, or t
attgcattatatattggaaatctaacatggtggacaacagatgaagacttaactgaagcagttcattctttgggagtaaatgatattttggagataaaattttttgaaaatcgagcaaatggccagtcaaaggggtttgcccttgttggtgttggatctgaagcatcttcaaaaaagttaatggatctgttacctaaaagagaacttcatggtcagaatcctgttgtaactccatgcaataaacagttcctgagtcaatttgaaatgcagtccaggggcagttcccgtgcagcatnnnnnnnnnnnnnnnnnnnnnnnnnnnnnnnnnnnnnnnnnnnnnnnnnnnnnnnnnnnnnnnnnggaccacctccaggtgccccaccgccagctccgcatgtgaacccagctttctttcctccaccaactaacagtggcatgcctacatcagatagccgaggtccaccaccaacagatccatatgggcgacctccaccatatgataggggtgactatggcccccctggaagggaaatggatactgcaagaacgccattgagtgaagctgaatttgaagaaatcatgaatagaaatagggcaatctcaagcagtgctatttcgagagctgtgtctgatgccagtgctggtgattatgggagtgctattgagacactggtaactgcaatttctttaattaaacaatccaaagtatctgctgatgatcgttgcaaagttcttattagttctttgcaagattgccttcatggaattgagtccaagtcttatggttctggatcaagacgtgaacgatcaagagagagggaccatagtagatcacgaggagagagaagcagagaacgagagaggcaccgggatagtgaccgagaccgtcatgacgattattacagagagagaagcagagaacgagagaggcaccgggatcgtgaccgagaccgtgaccgagagcgtgaccgagagcgcgaatatcgtcatcgttagaagctgaaggaagaggatcaccttccaagacaaaacagtcttcatgggggaaaaatgacgcttgtccagcagtttgcttcttgtgattgaactgaacctgtaaggattcatggataaaatgaacaggaatagatctgaataaagcaaatctgcataaatggtaaccagtagctctacttttattttttatgttgcttaactgttttatttgaaggaaacctgtgtgatttaaaaagttatagcttttgcaactttattactggttatatacatttggccattatgatgtgcaagcaattggaaaaaaagtcaagtaaatgcttgtttttgtagtagtttgttcttgttaaaaatgtttatatgataatgtctgtaaacagcatcactttgattacaatagatgtagtgttgtaataaactgtttaatggggctgatgtgtaaagctgttcaagttatttgatgtttacacctcagggnaaagtcttgtgttcagcaatantctaaagataatgttactatgacaacattttttactgtcccttaaagcattttgcaatagcgtttttggcatatgcctcaatctaatcttgcgttcagtgaattaaacatagtaattaagaaaaaa

SEQ ID NO: 358688 - DNA, 1294 bp, Homo Sapiens
  misc_feature (979)..(1062): n is a, c, g, or t
ggcggcggcggcggccgaggctgaaggaagatggcggacggcgtggaccacatagacatttacgcggatgtcggcgaagagttcaaccaggaagctgaatatggtgggcatgatcagatagatttgtatgacgatgtcatatctccatctgcaaataatggagatgccccagaagaccgagattacatggatactctcccaccaactgttggtgatgatgtgggtaaaggagcagcaccaaatgttgtctatacatatactggaaagagaattgcattatatattggaaatctaacatggtggacaacagatgaagacttaactgaagcagttcattctttgggagtaaatgatattttggagataaaattttttgaaaatcgagcaaatggccagtcaaaggggtttgcccttgttggtgttggatctgaagcatcttcaaaaaagttaatggatctgttacctaaaagagaacttcatggtcagaatcctgttgtaactccatgcaataaacagttcctgagtcaatttgaaatgcagtccaggaaaactacacaatcaggacaaatgtctggggaaggtaaagctggtcctccaggaggcagttcccgtgcagcatttccacaaggtggtagaggacggggccgttttccaggggctgttcctggtggggacagatttcctgggccagcaggaccaggagggccacccccaccttttccagctggacagactccaccacgtccacccttaggtcctccaggcccacctggtccaccaggtcctccacctcctggtcaggtactgcctcctcctctagctgggcctcctaatcgaaggagatcgccctccaacacaagttctttttcctggacaacctgttgggcagcctccattgggtccacttcctcctggccctccacctccagttccaggctacggccccctcctggcccaccgactccacaacagggaccannnnnnnnnnnnnnnnnnnnnnnnnnnnnnnnnnnnnnnnnnnnnnnnnnnnnnnnnnnnnnnnnnnnnnnnnnnnnnnnnnnnggaccacctccaggtgccccaccgacagctccgcatgtgaacccagctttctttcctccagcaactaacagtggcatgcctacatcagatagccgaggtccaccagcaacagatccatatggggcgaactccaacatatgataggggtgactatggcccccctggaagggaaaatggatacttgcaagaacgccattgacgtgaagctgaatttgaagaaatcatgattgaa

SEQ ID NO: 358689 - DNA, 438 bp, Homo Sapiens
  misc_feature (14)..(14): n is a, c, g, or t
  misc_feature (351)..(359): n is a, c, g, or t
agtgcgatccccgngctgcaggaattcggcacgagcagctcggtggcttgagggtatgtaaaagcaatatctgagccttctgcctgcttccaatatgactaagcttaaaaggagataacccaaaaactgcaggatcatcctgattttctgatctccaaaacaataaaaccttgaatatttccctggactcccttaaacagtttaatccctaatatttaccttgctaatctctgacctttgtgacattaatttgtctgacctttgtgagtataataaccatgtgagaaagttactgtttttccaccatgaacagactactgtcaaccggtaatcctggtaattttaggggannnnnnnnnccctttaagtactgcgtggcaaactagtccttccgtctaactcctcgcatcttttgcaagtaaaccccttttctaagtg

SEQ ID NO: 358690 - DNA, 385 bp, Homo Sapiens
gctgcggtgatctagaggatcccagttcgacggagactctcatgtatgttttttctttgttttaaaggactaatgtttattacagtgttaaataaaagtgtaagatactaagtgtgtagaataaaagtgcaataacaaaagacaatgactttggcacacacttcagtctttatcctctctcctttcttgtgctacctggctctttccataatattgttacagcaggaccgtcttaattgtgtgcattttgaagagatgcgactctgggttaatcttcattagtgtaatattgaagggttgggtttggttttatagagtattctgtatacttgttgggatacacaaataccagatgtgctgtataataaagatcacattaacgttt

SEQ ID NO: 358691 - DNA, 946 bp, Homo Sapiens
ttcccaaaaggatatttccaaataacttataaatcaaaattttttgccaaagaaagtctttttatgaaaagaaataacaggtctctttgtaaacttgttttccattatagctttggcatggtctctgcttatctagacaggcacataattcaggatagtgttgaaaattatttccccaatcagcagctccattgaccaaaccgcagcatttaaactcttcttgaaacacaattatggcttcctggaattgtttttcactttcccctgtggcgctcaaaagctttgtgttttcatagagagtttcattcacaatgcgatcagacttagatttgaaaacagctcctaggatacctgtcgccacctgcaggagcaggatcagaagcaagcctatgaaaaacaacagaagcatgcagcgactttcttttatagcaccgcagcatcccaggaagcccagaatcatgatgatggcacctacagcaatcaatatgtccacagcaacgtaggagctagagcctacatcttcagaaccaaaaattgcttgagagtcattgcttactcgtacccatattgctaatgctaggatcaagataccacatagccagaacaagaagttgaaggtaaacatagaatattttatacaggcactcacacctgccatttcggaaaaggattaggaatccagatgccgtgaatttaactattcgttacaggcttgtcctgcaatatgctctggagcaacttgcctgcagagatttctgtatccacggacatttaaatatcgcaaaggctatctccaggcaagtatgttcctttgcttgtcatagctcctggggcactgggccaggatatttatgatcctttctcaaaaactgcctcctctaaagtaaacagatatcaagtgaagggaatggcactggatcaggcaagagaatggcacagtgctccc

SEQ ID NO: 358692 - DNA, 1148 bp, Homo Sapiens
ttcagtcagagtacgagcctctgcatccaccagagagtccacacaaaggagagaaaccatctcaaaatatcagttatataaaacgttttgctaagagtttaaaatcttaaaacccataagtgccactaggaaggaaaccctgtatatacctacattgacccaagaaatatttacgcaatccctagcagaacattgtttctgaggaggcatatgtgagattgatttgttggttcatgccaagtgtgttccacaggttgactttgaatgtggacctctgagcatccacgcaggatggctctcaggtcccagtcacagacgtcgcttcctgggattccagcacgatgcctccatagttgaaagactacacaaaaagccacaatcattgcccggcctcctgagtcaccttctatctatactttgcttaaaagctatcccagatactcccccttgaggagctcatgcccttccttcctctttattcgagcatactggcaatgcattggaaaacagacagctcccactaagatcacgttctggtatttctgaggttaacacttgatttagcccctacatatctttccatatatcctattatttctgaatatatgtcctcaaaatccccataaatatccatcccttcctagatggcattaactttcattttagattttaggtgactcataattcccattcacttagcctatcagaaaagtcattggcagacatatatgtccttgaaccttttttatttgtgtggattctgctcatcactgtctctgttagacttattttgtagtggctgcatcacatatttttcacttgaatttttttggaaatagctgaatgtaaatagcagggaggaagaagcaagcaaagtgagagcttttcttcatccagaattgccctctgggctcctttggtaacagatggagctccttcctagctagggagaccttatgagaagtggatggtaggaggagtcactaatgtttcaatctctatttctgtaatcttgggcaataatgcataggagttcttgataccccttcattgattactgtgtatcagttctttgttaggcatgaacgtctttattaatccatcattcttttcttcattcaacaaatatgtattgaacacctcctata

SEQ ID NO: 358693 - DNA, 724 bp, Homo Sapiens
  misc_feature (564)..(564): n is a, c, g, or t
  misc_feature (586)..(586): n is a, c, g, or t
agtggatcccccgggctgcaggttggaatagtcaataaaatcatttggctttggaaagaacagaggtattttgttcaatagttttgttttctttaggctgagacagcaattatgccatcatcatcactttccatcttttagaaggatattggttaaattttgagttaatgatttttttctccccaagattcctttctagcccctaacattactatagtcttaaactatcttctgtttgtcatacaaaatggcttctcatagaacaacaccaatgtcagggtaggagctgaggaagaaaaagtaaataaaaatacacaaaatccaaactttgttatatgttccattcagtggccttatacatgacttacaaattttgtttgaagtttaattataactaaccactatttaattcgaattcactgctggctgtatttcctgattcagagttccatattgcttctattgctggttttaatttatttgaacctcagtcttctaaattgtctctatttcctatccattattttttatttgcctagaggtacttgaaaatgcattcagaanaaaaaattcttactcaccattntgtacaactcttcaaaactctaggatatgctacataatgtacataataaaagtagtaatttcaacagaaaatcaagatgccactcgattttgccatggatttataaaatgacacattagaccacagaagcatatgaga

SEQ ID NO: 358694 - DNA, 939 bp, Homo Sapiens
ggttgacccgggccctcctccacacccccttccttcttcgcctcctccctctttcctgcacgggggctcgggctcactataaaaggtgggagcgcgtggtgccccagcaacgacgagtttcagaacgatggagagctcccgcgtgaggctgctgcccctcctgggcgccgccctgctgctgatgctacctctgttgggtacccgtgcccaggaggacgccgagctccagccccgagccctggacatctactctgccgtggatgatgcctcccacgagaaggagctgatcgaagcgctgcaagaagtcttgaagaagctcaagagtaaacgtgttcccatctatgagaagaagtatggccaagtccccatgtgtgacgccggtgagcagtgtgcagtgaggaaaggggcaaggatcgggaagctgtgtgactgtccccgaggaacctcctgcaattccttcctcctgaagtgcttatgaaggggcgtccattctcctccatacatccccatccctctactttccccagaggaccacaccttcctccctggagtttggcttaagcaacagataaagtttttattttcctctgaagggaaagggctcttttcctgctgtttcaaaaataaaagaacacattagatgttactgtgtgaagaataatgccttgtatggtgttgatacgtgtgtgaagtattcttattttatttgtctgacaaactcttgtgtacctttgtgtaaagaagggaagctttgtttgaaaattgtattttgtatgtggcatggcagaatgaaacattagatctagctaatctcggtagatgtcattacaacctggaaaataaatcaccctaaagtgacacaaattgaagcatggacaaattatacattattaaagtgttttcaattcattacacacgaacaacaaaaaaacctccccg

SEQ ID NO: 358695 - DNA, 748 bp, Homo Sapiens
agcgggagggcggcctccggctttgaagttcctcaccgcgtctccttccctctccccaaagcctggatcaccgcccagcgtcaggcgaggggcgacgtctcgaggtaaaacggaggaggtgcgggacgcggagactgcgcgggcccggtagccctggagaggccgaggctctaggccgcgaggggcgggtgcaatggcggaggaacaggtgaaccgcagcgccggcctggcccccgactgtgaggcctcggcgactgcagaaactacggtttcctcagtggggacctgtgaagccgctgccaagtcaccagagcccaaggactacgacagcacctgcgtgttctgccggatcgcggggcggcaggacccgggcaccgaactcctgcactgcgagaatgaggacctaatttgcttcaaagatatcaaaccagcagcaactcatcattatcttgtggtgccaagaagcatattggaaactgcagaactctaaggaaagatcaagtagaactggttgagaacatggtaactgttggaaaaaccattcttgaaagacataatttcactgacttcacgaatgtgaggatgggtttccatatgccaccattctgttccatttcccacttgcaccttcatgttctggcaccaatcgatcagctgggcttcttattcaagtggtttatagaagtcattccctatggttaatacagttgatcacttgatttgaaaactaagaacatggtctttttaa

SEQ ID NO: 358696 - DNA, 830 bp, Homo Sapiens
agcggggggtcggcctccggctttgaagttcctcaccgcgtctccttccctctccccaaagcctggatcaccgcccagcgtcaggcgaggggcgacgtctcgaggtaaaacggaggaggtgcgggacgcggagactgcgcgggcccggtagccctggagaggccgaggctctaggccgcgaggggcgggtgcaatggcggaggaacaggtgaaccgcagcgacggactggcccccgactgtgaggcctcggcgactgcagaaactacggtttcctcagtggcggacctgctgaagccgctgcctaaggtcaccatgagcccaaggactacgacagctacctgcgtgttctgccggatcgcggggcggcaggacccgggcaccgaactcctgcactgcgagaatgaggaccctaatttgcttcaaagatatcaaaccagcagcaactcatcattatcttgtggtgccaaagaagcatatcggaaactgcagaactctaaaggaaagatcaagtagaactggttgagaacatggtaactgttggaaaaaccattcttgaaagaaataatttcactgacttcacgaatgtgcaggatggggttttcatatgccaccattctgttccatttcccacttgcaccttcatgttctggcacccagtggatcagcttggcttcttatccaagtcggtttatagagtcatcttcctatgggtttatcacagctgatcacttgcattgaacaaactaacgaacatgaaaatgtcaagagtggaagatttctctaatcttggttcagcatgaagtggtatctaggtcccttttaacgtcta

SEQ ID NO: 358697 - DNA, 772 bp, Homo Sapiens
gtttgctgtgaacttgcggaaccgggtgtctgccatccatgaagtgcccccgcccagatccttcaccttcctcaatgatgcctgccagggactggagcaggctcggaaggtgctggcctacgcctgcgtgtacagcttctacagccaggacgcagagtacatggatgtggtggagcagcagacagagaacctggagctgcacaccaatgccctgcacatcctcctggaggaaaccctgctgcggtgcagagacctggcctcctccctgcgcctcctgcgggccgactgcctcagcacgggcatggagctgctccggcggatccaggagaggctgcttgccatcctgcagcattctgcccaggatttccgggttggtcttcagagtccatcagtagaggcctgggaggcaaaaggacccaacatgcctggcagtcagccccaggcctcctcagggccagaggcagaagaggaggaggaagacgatgaggatgatgtgcccgagtggcagcaggatgagtttgatgaggagctggacaatgacagcttctcctacgatgagtctgagaacctggaccaagagactttcttctttggtgatgaggaagaggatgaagatgaggcctatgactgagggggcagatgcaggaaacacctagagcagccccagagtcacggggctgagggggcgggagctgcccctgtcatagggagggggattcccagcgtctgtagtgcttcctgtttgctgaataaaggtctctttctccccccc

SEQ ID NO: 358698 - DNA, 701 bp, Homo Sapiens
  misc_feature (11)..(11): n is a, c, g, or t
  misc_feature (39)..(39): n is a, c, g, or t
  misc_feature (56)..(56): n is a, c, g, or t
  misc_feature (409)..(433): n is a, c, g, or t
ccacctttttnccggaaagtatgccaaatagtaaaaggncccagcactgctaatgntttttcccccagtactataacttgtggtttcctgaactcattattgttgtatttccaaaaaagtaataccttttaattagtgtattaaaagttaagtataattattttaatgcaatctaatacaatcagattactcagttgccttacctcatgggaagagttacttttttagatctaaaaagctgaatagcatgttagttacttggtttcaacttgagttttcttttaatgttaataagattgaaactttagtatttagtggggaatggaaagagttgcccttgttgcaagtaatgaagcctgatttgattatgaagctgcttaatcactcttcatgtgttcagaattactgnnnnnnnnnnnnnnnnnnnnnnnnngtcactgtgtacattaaaattttggaagatgctttactatgtaaagtatagatggtcattttaatcattcagccacatacggttgggctggtaaacagcttattctgatacaagaatgcttgggtgcatatggaaagattgtgaaagagtgtgtcttgcatcaacagctgtcttaattatgatatataagtagaaatagagcaaatgttggaatctggtatttttagtaccatgtctttaataaagctaagtattttagaggaaaaaa

SEQ ID NO: 358699 - DNA, 894 bp, Homo Sapiens
agcgggttgaccgcgtgccgggtgtcatggcggcctgcaggtactgctgctcgtgcctccggctccggcccctgagcgatggtcctttccttctgccacggcgggatcgggcactcacccagttgcaagtgcgagcactatggagtagcgcagggtctcgagctgtggccgtggacttaggcaacaggaaattagaaatatcttctggaaagctggccagatttgcagatggctctgctgtagtacagtcaggtgacactgcagtaatggtcacagcggtcagtaaaacaaaaccttccccttcccagtttatgcctttggtggttgactacagacaaaaagctgctgcagcaggtagaattcccacaaactatctgagaagagagattggtacttctgataaagaaattctaacaagtcgaataatagatcgttcaattagaccgctctttccagctggctacttctatgatacacaggttctgtgtaatctgttagcagtagatggtgtaaatgagcctgatgtcctagcaattaatggcgcttccgtagccctctcattatcagatattccttggaatggacctgttggggcagtacgaataggaataatcgatggagaatatgttgttaacccaacaagaaaagaaatgtcttctagtactttaaatttagtggtttgctggagcacctaaaaagtccgattgtccatgttggaaagcctctggagagaacacttttacagccaggacttttgccatgctatcacagtgtggagtgaaatattaccacaaaataaattcagggcatccagcagttggcgaaacgaaactggtgttccaagaggagactccgaaatatttccctctgtccgaagatggtgaaaactcctac

SEQ ID NO: 358700 - DNA, 525 bp, Homo Sapiens
ctgcctatggataaagatcttgccacataaaaacacaagtgccatgtttccatgtaaaaaactcctgtctcccatcatggctagttgttttgtggtccttgttttggtatcatcttcgtgttgttgctgttgttgctttttcctcttctacacattcaaacaaactttcttgtacaaaccatagtctgcaggtcaatgttcctctttattttcaatgtcataaatcatgagttaccactgagtttcatcacctcccatgtagatggcagaacaagtgtttagaaatgtttggtgcaagcaaagcagaaggcagagaaaacatttcccgactgagaggaattaagctgctcttccaaaagcttctgaaatgcacttgatttttttcatttggttgaaaatcagctatgtgaaaatgtgccatcttcgtaccttcttggtcttcctgcttcccttttactgagatggaactcgggagaagtttatgcaccggccctcatctccttcctgaggtcgcatcaaagaaac

SEQ ID NO: 358701 - DNA, 697 bp, Homo Sapiens
aaccttttttgagtagattcgccacatcaaattttgaatacagagaattttgaaagtttaagcatcaaacaccaaagtaaaagtccccaagatccacaaaagatctaggcaagtcttgttcctgtcccactcccaccccacccctaatgaaacttaaaaggtattcccatttcaattatggcctgtatcattcttggcagtttgggaagagaacttttggcttccattggtaactcaacataaatgttgcatagaatttatatatttcaaaattggcctaactgtaggaaaggcaaaatggaagcatttccgatagagccctaaatgagtacaaagtcactttgtaaaaggtgacactaaagtaaaaatatgaccaaaataagaaatgtgcatattagacaaccctgcttcccgaaactttaggaaggacacggagttgtgagtcacacaagggctatgctacttgaagtcaatgttcaccaatcaggcagcactaggtacagaagtcttggttctgaacctggacccagtaggagggaagtctgtgggaaaggggagaagagaatgacaagagaggatgtcatattaaaaaaaggtttcaaacaatattggcaggtgtctactcacaaggtgattggaaaactgcccacgaggagaagtcaactttacctcctcccaaattcacagtacgcgagtg

SEQ ID NO: 358702 - DNA, 1284 bp, Homo Sapiens
tccccatcaaattttccagaatgcaaaacaaaggtttcctgggcagagggcccaaaataaataaataatgaaataatttccacaatgatctggttaaagaaaacacccagaaaatgaatgatttcacatgataaaaaaacctggacttgaatttaaacaagagatggacgtaaaagggatgaagcattgcttcattcccaggagggatgttctttactgcagtacccacaaaaagacagcactatcccagggctgatcttcctatgggcctccaccaatagcctttgaggtagatactgatggcttgaagagaggtaggtaaagtccaaatttgttttcaatccctgcaaatgtagcaactgccagtttgtagcccccaacgtgatcaggattcggggcaggcaggttgatcctggatttaggaactggctctgatcccatgggttttactcctccaaaatcaatgtagaaccatcgctgtagcaattcgtaagttcagcaaagttacaccaaactcgggtgaggatcgaaatacacgagcaccagctcccttccacagagcttttggtccctcttcacgcagtatctttctaaagcagtctatcaactccgctgtaagtgctttgcccagccccgggcagccaccatgtaatctcgtcttgataacatcagcacggggtcactaaagatcgctgcaggcataccagctatggcaccagctaagagcaggcttcctgggctaacctgcccatcttcattcgcaaaggaagccttcacatgagcatagcacggaaagtagatggccgagaaaggaatgtcccgcagaaagcatgctttggcacccttgtagatcccaagaaccccaggtcccgcacgacagacagagcactgactcgaggaccagtggtgatttctcctgccacttgcaaacggatcttgacgatttctaaaggatttgtgaaaatcacctgggagcctccagcgcagcctccagcaagaatttctgcgtgcaacgtgggaccgaaccatctttgtgcataaatttatccctcacaaaatcgttcactgtaagttttatggccttctctggggcaactcccgacaactgtggcaacagacctctatacagtccaaagaagccttcatagcgtagcactttcataaaacagtccaagctgtttttatacatgagttctcccacaaagagccagttgatcgttggttctgcattcgagtttttacaagatcgataggatacacagcagtggctccaacagctccagc

SEQ ID NO: 358703 - DNA, 1086 bp, Homo Sapiens
  misc_feature (1067)..(1067): n is a, c, g, or t
ggggactctgtgtgagggaaagaaaacaatttctcctgctctgcagcttctgttcaggatcaatgtgactctaagaacaaatggatgaatgaatatccatatgaagagaaaaacaataaagaatatcaacacctttgagaacagaatgttaatgcttgatgggatgccggcagtcagagtcgatatggaagccgttcccctgttgctaaataatgtgaaaggggagcccccggaggactcgttatctgtagatcacttccaaacacaaactgagccagtggacttgtcaataaacaaagccaggaacgtccccgtactgccgtttcatcctccccagtttccatgacagcatctgactcctcaccttcttcaacttcaacctcttcatcgtcttctaggtcgtctagcctcatccccaagctgttatcacatcagtatcttcagcgtcatcttcgtcaacagtattaactccagggccccttgtggcctctgcatctggtgtaggaggccagcaggatttgcacattatccatcccgtaccgccttcaagtcccatgaatttacagtctaacaaactgagtcatgttcaccgcatccccgtggtggtacagtcggtgcctgttgtctacacagctgtaaggtcacctggaaatgtgaacaacactattgtcgtgccgcttttggaggatgggagaggccatggcaaagcacaaatggacccccgaggcctatctcccagacaaagtaaaagtgacagtgatgatgatgacctgccaaatgtgaccttagatagcgttaatgaaactggatctacggccctttccatagccagagcagtacaagaggtacatccgtccccagtatcaagggtccggggcaatcgaatgaataatcaaaagtttccttgttcaatttcaccatttagtattgagagcacaagacgccagagacggtctgaatccccagactccaggaaaacggcgtattccacagatgtgattttgaggggatgcaacaaagtgttacacaaaagttcttcacctggaagggttcaccggaggaccacntacagggggaggaaacctt

SEQ ID NO: 358704 - DNA, 489 bp, Homo Sapiens
gaaaccctaccagatggaaccaaacgatcaaggaggcagattaaggaaccagtgaaatttgttccacaggatgtgccaccagaacccaagaagattccgataagaaacacgagaaccagaggacgaaaacgaagcttcgttcctgaggaagaaaaacatgaggaaagagttcctagagagagaagacaaagacagtctgtgttgcaaaagaagcccaaggctgaagatttaagaactgaatgtgcaacttgcaagggaactggagacaatgaaaatcttgtcagatacccttcatgagacccaactctgccacagctcatcctcggaggcaatcccggaaacctcttttataagtgtgattttaaaaatgtggattaaactctcgatagagtacataaagtaaaggagaacagctatattgtcctttctataagcttgtcactgcaacttggactaacaaggcagtagatttgcctgtgtggaattttt

SEQ ID NO: 358705 - DNA, 1200 bp, Homo Sapiens
  misc_feature (309)..(309): n is a, c, g, or t
ggggacaattcagatactagttctagtgtggatggaaggagaaaacataagcaaccagctctcactgcagattttgtgaattattattttgagagaaatatgcgcatgattcaaattcaggaaaatatggctgaacaaaagaatataaaagataaattagagaatgaacaagaaaagcttcatgtagaatataataagctatgtgaatctttagaagaactacaaaacctgaatggaaaacttcgaagtgaaggacaaggaatatgggctttactaggcagaatcacagggcagaagttgaatataccnggcaattttgcgagcacccaaggagagaaaaccaagtaaaaaagaaggaggcacacaaaagacatctactcttcctgcagtactttatagttgtgggatttgtaagaagaaccatgatcagcatcttcttttattgtgtgatacctgtaaactacattaccatcttggatgtctggatcctcctcttacaaggatgccaagaaagaccaaaaacagttattggcagtgctcggaatgtgaccaaggcagggagcagtgacatggaagcagatatggccatggaaaccctaccagatggaaccaaacgatcaaggaagcagattaaggaacccagtgaaatttgttccacaggatgtgccaccagaaccaaagaagatcccgattaagaaacacgagaacccagagggacgaaaaacgaagctttcgttcctgaggaagaaaaacatgaggaaagagttcctagagagagaagacaaagacagtctgtgttgcaaaagaagcccaaggctgaagatttaagaactgaatgtgcaacttgcaagggaactggagacaatgaaaatcttgtcaggtgtgatgaatgcagactctgctaccattttggctgtttggatcctcctttgaaaaagtctcctaaacagacaggctacggatggatatgtcaggaatgtgattcttcatcttccaaggaagatgaaaatgaagctgaaagaaaaaatatatctcaggagctcaacatggaacagaaaaatccaaagaaataaaagattttctgtagtgtttttgaaaagtttgcagcttatgtaatagcagataaaatttctaattgtaaaatgttaaattgtaaaatctaatttgcaaaatgttctcaataaagtcattcaaaatgaa

SEQ ID NO: 358706 - DNA, 649 bp, Homo Sapiens
  misc_feature (533)..(564): n is a, c, g, or t
  misc_feature (637)..(637): n is a, c, g, or t
atgagccaccacgcttggctaagaacacctaaatttttatgtttcttggctcaaaaaccagttccatttctaatgttgtcctcacaagaaggctaattggtggtgagacagcaggggaggaggaagagctgtggtttgtaacttgttcaactcaggcaataagcgattttagctttatttaaagtcttctgtccagctttaagcactttgtaagacatggctgaaagtagcttttctatcagaattgcagatagtcatgttgggctaacagtcaattggatatattcctttacctcacatgaccccagcaactgtggtggtatctagaggtgaaacaggcaagtgaaatggacacctctgctgtgaatgttttagagaaggaaattcaaaaaatgttgtaactgaaagcactgttgaatatgggtatcggctttctttttcactttgactcttaacattatcagtcaacttccacattaatgaaagttgaccatagttatttccaaataaaaagaaaccaactcttaccaggnnnnnnnnnnnnnnnnnnnnnnnnnnnnnnnnggggggggcctcgtgccgaattcctgcagcacggggatcgcactagttctagagcggccgccaccgcgatagnagtccagcttaa

SEQ ID NO: 358707 - DNA, 1388 bp, Homo Sapiens
  misc_feature (694)..(702): n is a, c, g, or t
  misc_feature (726)..(960): n is a, c, g, or t
ggtcggctttctttttcactttgactcttaacattatcagtcaacttccacattaatgaaagttgaccatagttatttccaaataaaaagaaaccaactcttaccaggtcttggactgtgatgtcatattattcagttttatgcttgttcctgagcagaactcataagagtgacatagtcagctgctgcggcacctcagccacgccactcttactcagttcagtgggtgtgcttgcgtggtaggatgtggtgcagccctctctacgctcttctatttttggtatatttcctatctaaccttcaaatagcttccaattctttttttcttggactggcttcattctgaatttgtgctaaaataatctttcataaagagacctcagtttatagcgtaacagactacacaatgcactgatgttttcataatgtttaagggacccactgcaagaagcttgctgcctccttttaattgtattcatttagattttgattttccatgttaagaaggtgaggtccatgttggtgcccttcagagtagagaaccatgtaaacattaggaatgaacagaggccttaggaatgaatagagagtttgccttatacaatttcctgttacaaagctctccctctcatgcaaagtagggaacaccttttgagcatctttgaatttgacaaatggtgctgttgcaaacacnnnnnnnnngagatgaagtctcgcggttgtcannnnnnnnnnnnnnnnnnnnnnnnnnnnnnnnnnnnnnnnnnnnnnnnnnnnnnnnnnnnnnnnnnnnnnnnnnnnnnnnnnnnnnnnnnnnnnnnnnnnnnnnnnnnnnnnnnnnnnnnnnnnnnnnnnnnnnnnnnnnnnnnnnnnnnnnnnnnnnnnnnnnnnnnnnnnnnnnnnnnnnnnnnnnnnnnnnnnnnnnnnnnnnnnnnnnnnnnnnnnnnnnnnnnnnnnnnngtgtgagccaccgtgcccggcctgcaaacacattttaattgacaacactagggctgttgtacaaaatagtaatgatagccatggaagttttaccttattctgtgagaagtgttcttaaacttattaagtgtctaaactaaggtttagtgcttttttaaaggaaagttgtcccaggattcatcctaaagaaagcaaaagttaattcaactgatccaccaatggaattagatgggtagagttgggttcttgagttttaccaccacttagttcccactgaattttgtaacttcctgtgtttgcatcctctgttcctattctgcccttgctctgtgtcatctcagtcatttgacttagaaagtgcccttcaaaaggaccctgttcactgctgcacttttcaatgaattaaaatttatttctgttctagtggg

SEQ ID NO: 358708 - DNA, 790 bp, Homo Sapiens
cagagattggccattccgctactgcgcaaagatggtggaggaggagaacatccgcgtggttcgttgtggcggcagcgagttgaactttaggagagctgtgttctctgcagattctaagtatatcttctgtgtctctggagactttgttaaagtttacagcacagttacagaagagtgtgtacacatactgcatggacacagaaatctggtgactggaatccagcttaaccccaacaaccatctacagctgtattcttgttcccttgatggcacaattaaactgtgggactatatagatggcatcttaataaagactttcatagttggatgtaaacttcatgccctctttactcttgcccaagctgaggattctgtctttgttatagtgaataaagaaaaaccagatatatttcagctggtttcagtgaaactgccaaaatcctcaagccaggaagtagaagccaaggagctgtcctttgttttggattacataaaccagtcacccaagtgcattgcctttggaaacgagggagtatatgttgctgcagtacgggaattttacttgtctgtttattttttcaaaaagaaaacaacatcaaggtttactttatcatcatcaagaaataagaagcatgctaaaaacaattttacatgtgtagcatgtcacccaacggaagactgcatcgcatctggtcacatggatggcaaaattcgtctttggaggaatttttatgatgataagaaatatacgtacaacatgtttacattgggaccatgatatggttatgga

SEQ ID NO: 358709 - DNA, 469 bp, Homo Sapiens
gatggggttacctctcaatacacccactgtaaagttgaaaaatcattaagtcgaaagtaagttagggattatctatactttttagggacagaagccagaaatgatacaagttatgagattgagcaactatgtggctaataaaaaggcaatctttatcattcctatttgaaatccagcattgatttctcaaatagttgaacagaatttaaatattagttttctcagctaacaaatcacaagcgaaaagaagcttcacttcctttttaacgaagacaaaagaagccagttagaaacttactacattgtgttagattttttaaaaagccacagttataccaaatgtatttactttgtgaagtatatccttcggaataaatgcattcctggaaaggagaaacagaagtcagtccttaattagctagttgaggtactcataaagaacaagaataagccaacacttgaaatgcag

SEQ ID NO: 358710 - DNA, 1192 bp, Homo Sapiens
gtgatgatcagacgtgtcattagaacatgagtcctctgcttctgattcaggcatacttttgggattcttccatctttaaaggaaaaaggaagccattcatctatatttagtaacccagtaatatctcacttagtttagggttagatctttagttaattcaaccttatagatcatacttatgaaggtgataactgacacgtgttccctgaattttaatttgataggcaatacatctacccactccattattttttaaaacttcatttaatagtttaaacaagattggttttgttttcaatttttattcactcttcatagaatcacaattacctttatatatcatatgttattggaagagattcctcagtaatctccaatctctcatagtgcctcacagggttggtcaatggcttttggaactggaaggaccttagaacttatctgttatgctcctgatagccaatagcagatagaagcttgcaatcaagagggtaggacatgtgttcttcaatggatatcaaaggaagaggttgcaaaccaaagccatttggcaagccctgtagcctgggccatttaagacaggggcggtctcagccaaattgcacccatttaactatcccaaagagccacagtgcctacaacccaggccctaagttgatgaagaaaaagtcaaggaaggaggtgatacaattggaaatattcccatcaaatggttaatcttatttagaaaatgggcatattagaaaaagtccttccaagatgattttggataataaaagttgtatttgtggaaattggtattatctctgttttatgcacttacatttatcccttacattttgtttttagtgaccctacatgacattaaatttaaagttattgttactcatattttaatcagtaagtcatttaagctatgacagagtaggaattgagaaattatttcatatgctacagtattgaaatgtggatgctgccttgttttataagaagatgatcaaggtttgtgtgcccattacctttcctctgcctgaaagacgtgtctcaagaaaaataaattctattttagatgcaggtactgcattttattctaagaattgatatcaattcaaaacatagaaaactgtaaaagataaatcaggagatggctgattcataatgggtaataaaataaatagcgactttcgagctg

SEQ ID NO: 358711 - DNA, 654 bp, Homo Sapiens
  misc_feature (457)..(457): n is a, c, g, or t
  misc_feature (465)..(465): n is a, c, g, or t
  misc_feature (482)..(482): n is a, c, g, or t
  misc_feature (594)..(594): n is a, c, g, or t
  misc_feature (621)..(621): n is a, c, g, or t
  misc_feature (640)..(640): n is a, c, g, or t
ctgggacacgagtcagcagcactggccttctttcccagcaagaaatcagccagtgtggctgctcactgtcatcttagggctggacttggatccccagggtttgcatttggtgaatcatgccactaaatgcctattacttcttaaaaatcagaattctctccccaatgataatacttggtataatatttggtggtcttttctaatagttaccttccaaatgagaaaaaaaagccaaagtaattttttttaagtttgattcatcttgcctgtgtttgttagggtggagttgagtccaaatgtgagaaaatgtatcacatattggcatatgggaagtaattcaggcattcttgatgtagtagagaaattttagtactaataatctcatttattttcttcaatatttcttgaaaagtgcttattgactgtgggccatatgaaaacctaaactttcagactntatacttncaaattataatattatntcaagtggtggaaaaaaagtttattaaaccagatgagcatcagcatttgatgacttatggacacttagtagctgcaccatcttgggcaagtacttaaccttttcaggtcccnacttttaccctctcgtaaatagggctngatatataccaactcacanaatagtattaggat

SEQ ID NO: 358712 - DNA, 878 bp, Homo Sapiens
  misc_feature (289)..(302): n is a, c, g, or t
acctagtgaatcaggattgtcctcaggtaaatgaaatcatgatacattattgcagtgaactcaagtgcaatactttgtaagacatataattcctatgattttcacatttttatatcttatatatgggaaaagccaaattaaattgaattcagattaattccagcattagactaaatgagcaaacttaagtaaatgtacaaactaggtaagtataaaaccacaggttaacaatattggagtacttttagaattacattaaaactgtcttaaatgtcctatcccaaatctnnnnnnnnnnnnnntggcaggctgagataatacagaattttaaaatgcactttgtaccagtgtctatatggaaagaagtagatgctgaatacctcaagatgccaagggaacaagcaacattgggaagttgtcacaacatgctcaaagacaaactacaattgtctgctagctatttcttcagaactggaactaatacgactatccttttctgttttatactttgattagaatgttatttcctcgcttacttaaaatgtacttcaactttttaacaactgatacaataacttcataaaagtataacactaggttgaaaccttaaggaaaaattgaaattgttaatgctttcgatcttttgggaggccagtacacagacaaataaatttcttctttttatgatacaaaatgactttgtattcaatcagaagcatatacttatgttcatttcgggtctgttataattctctcattgtaaccaaattattttaacaatcgtatagtataaaaagttacccatggctattaagtgaccaaaagcgtacttttattacaactccagttgttagatcgcttctcagaatgctaactgt

SEQ ID NO: 358713 - DNA, 1016 bp, Homo Sapiens
  misc_feature (481)..(709): n is a, c, g, or t
  misc_feature (777)..(777): n is a, c, g, or t
  misc_feature (791)..(791): n is a, c, g, or t
caaatggctattgagttggaagtattgtttttgatatgtaagagatattcagaatgctcacactgaaaatgcctcaactttttaaagtgtaagaaaccaccatgagtggtgtctagatttctaatgaagaatcatgatacagtttggattaagtatcttggactggttttaaacagtgctttgtaccggatctgctgaagcatctgtccagctggtatcctgtgaaagtttgttattttctgagtagacattcttatagagtattgtctttaaaatcagattgtctcttctatattgaaagcatttttatgttttctaatttaaaaattaatattttcttatagatattgtgcaataaagctgaagtagaatgtgtggtttttgcaaatgctttaacagctgataaaaattttacatttgtaaaattaatatattgtactggtacaaaatagttttaaattatattttaaaaagcttacannnnnnnnnnnnnnnnnnnnnnnnnnnnnnnnnnnnnnnnnnnnnnnnnnnnnnnnnnnnnnnnnnnnnnnnnnnnnnnnnnnnnnnnnnnnnnnnnnnnnnnnnnnnnnnnnnnnnnnnnnnnnnnnnnnnnnnnnnnnnnnnnnnnnnnnnnnnnnnnnnnnnnnnnnnnnnnnnnnnnnnnnnnnnnnnnnnnnnnnnnnnnnnnnnnnnnnnnnnnnnnnnnnnnagcgttatattttgtaaaatcccgtaaatcttgtaaatcactcattttgaccaatagccgaatcgcanaatcctataatcanagatgaccagataggttgaatgtgtccactggaccaggtcactataagacgtgactcacttaaagcggcttaagactaatcgaccctaaggaccccattaacttgcgggaagcgcaacgtgcagacgaggagaactacgtacgcctaggcctgaagttacgtaacttccttacacaaaccctcgtaagtctttaggtctaagggccttctggaattcctaactct

SEQ ID NO: 358714 - DNA, 806 bp, Homo Sapiens
  misc_feature (22)..(22): n is a, c, g, or t
ccagctggtaccggcccgggangtagggatggggaatctaccccaaccccaacgtcccccgccatcctaacacccacgtgccttcacacttaggcagctactactagaagcttactcatcagtggccttctagctgaagcccatcctgcacacttactggatgctttggactcaacaggacatatgtggccttgaagggaagacaaaactggatgttctttcttgttggatagaacctttgtatttgttctttaaaaacattttttttaatgttggtaacttttgcttcctctacctgaacaaagagatgaataattccatgggccagtatgccagtttgaattctcagtctcctagcatcttgtgagttgcatattaagattactggaatggttaagtcatggttctgagaaagaagctgtacgttttctttatgtttttatgaccaaagcagtttcttgtcaatacacggggttcagtatgacacagaatcatggacttaacccgtcatgttctggtttgagatttagtgacaaatagaggtgggaagcttataatctaattttaggaggaccaaattcagtggatgggcaactggaacattgattgtaaggccagtgaagttttcacccaactgggattttgatgggaaagaaggtttttgtgtttaaggacgccaagggcatttgcagaatccctctcagtggacagtatgcactcagctgaccactctctctagaaatagtcaagatatgaactaagaaatttaatgcaaatacatacattcctgaaaagacggggaatta

SEQ ID NO: 358715 - DNA, 436 bp, Homo Sapiens
aggattcagttgctcttgggtagttggattgatggcctcagataactaggtagctattagctagatttcaccctcagtttgttgccgtgtgggcctccctaaggtggcaatttacttcatcaaaaccagcaagggagagagttggctacaatctctagtaatgtagctacagaaatgacatccccttagcaatgagatattttattaattagaaagaaattactcaacaggaggggattacacaatgtagtgaataccaggaggctgagatcagaaggagctagtgtagaagctgcctaccacagtgagtagtattctattacatgaatataccagaatgtctgaatccacccaactgggcatagacgtttgtgttcattcaagatacagactattattattttaaaaataaaagttactatgaacatttaagtat

SEQ ID NO: 358716 - DNA, 379 bp, Homo Sapiens
  misc_feature (16)..(16): n is a, c, g, or t
ctagtgcgatccccgngctgcaggaattcggcacgaggttccttggtgcactgatgtggtctttgaaactcagaacaaatgttacctgggccgatgttacatgagtatttggccattaaaatcagataaagaggccaacctagcaagttactctcattgaagtgtggcttgtctgccatcctcattgggagcacgtagaacctccccaagctgagtgggcagggtccgtgtggctgtgtgaagggccccgtcgtcttgtgtagctgctcccgtgttgagagtatagcacgttgaaaacagccttggcaggaaccacgcttgctgttaaccagctcgtccactaaccagctgtgtataccctaggtcaggccagctgttt

SEQ ID NO: 358717 - DNA, 746 bp, Homo Sapiens
ccaataaacccattgtaagttgaaaacattgtaagtcaaaaatgcatttaatacacccaacttaccaaacatcatagcttagcgtagcctaccttaaacattctcagaacacattctaatgcatcatctattttataaaaaggtgttgaatatctgatgtaattattgaatactgaaggtgaaaaatagtagtgtatggataccattgtaatgttgagaaactgtaagtcacatcctcttaagtcaggaactatctgtataaggaaacaagatttccattttatcatttgaaatgtatttgactttgtttcactagttgcattatccccatggaaaacttcacattgagaacttaccattatatatttccataaaaatgcatgaaccatcccttagctaagtaaggattttgtaatgttctctcaataatgttgcttggcaaagttaatattttttgtatgctgatgaaaattagaaaagtccaatattgagcttgattgcaaacttagagcacccttaccttaaacaatattttctcctttaattattgattttgcaacacttttgggaaagttgggaatcttaaattaatggaataatctctaaaccagaataccagttcaacagccaaataattctggcctttcatgctgaaatttaaagcattaattttgcaacttttgttatactcaagtgtgtgacttcctggctggcacagggctcatgcctgcaatccagccttttgg

SEQ ID NO: 358718 - DNA, 592 bp, Homo Sapiens
  misc_feature (475)..(545): n is a, c, g, or t
gcacgaggaactagtctcgagttcttcttttttcttttctatgctagggacgttcaggtaatcaaattaaaggaaagctcactatggataaggttagttttgaaacatttcatacagaggttagttatgagacacatcttaagtgtttcaagaattcagactggcagaaaggtagaaggaacagcaaagaggtaagaatcaattgaatgtcccagacaataagaacatcacactgaggaacagtgggaggagactgaataggtgaaacgggtccacatcacaggagtcctggaagggcagggctgagtgggctcttctttgatgctatagacaacaccaccaaaggaaaggctcttgaggagggaaatgacaacataagagccctattttaaacaacttaatcttatcacagtataaaggatggagcagattagagataagacgaccaagaatagatacgctagcacaacagtcnnnnnnnnnnnnnnnnnnnnnnnnnnnnnnnnnnnnnnnnnnnnnnnnnnnnnnnnnnnnnnnnnnnnnnnctattaaacaccattttctggctttaaaacatagtaatataacgcct

SEQ ID NO: 358719 - DNA, 1045 bp, Homo Sapiens
aggagctctcatggtgtgtcaagatctctggttcgggggtaaaacgtatttgacggaaattcttgttcaaggaacttaatgggggggaaggcgtgtttccacagtcaatcggtgaactgataagcagctaacccgtgaaaatgtcatacttatggctccgcaagtatcagatgtgggcctcatattatacatagcctctgatctcacaactcattgccaaagtcagtatgtatgacccaaagccaatctccatcggacctacataattttagcaataagaactgtgttatagttccaagtatggctaacatctgtaactatttcagtgactttatctggttccaagaggctgtggccaatggcaagatgccatatcctggaaacatattacgacctcccatgtttgttacatgcatccagtttaccacactttacctgtcatcagttatagtaaaaaccagcatggtgttactcaactattgagaaattgtaagctattttttttgtcctgatgtctaaattgcagtgataagaataggttgatacatgtatcataatctaccttataattttcagatcactttcaaattgcccaaggaaatattgtgatcctaagaatattaagataattttaggttaatgaaatacccattttccttttattcatggtgctttgcttacccacattattttttggtgtattttttagtggttattttagaagttgaagtggctgaaattttgtctattgtcttagaattgattgccagaaattgccaagatgtaatatatcaaagtcagggatgaggagcaggaggactattcaagataaacttctgtaacctatgcatattttatgggggcagtattattacaaatggatctgaaatgtcagttctagtatttagagagacttctctaataataccgggtgatattatctttgagtaaatttgaatataaattgaaacataaaaatgagtattgtgaactttctcggaaatattcattaaaaccattgaaataaaaataaattcaagaaagt

SEQ ID NO: 358720 - DNA, 1069 bp, Homo Sapiens
  misc_feature (708)..(720): n is a, c, g, or t
ctcaagatggaaagtccagtccaaggtacactgttcatctttttcttcacattttgcacatccttcaaggggatctttaacctctttaacctttgtattgcacctcagataatgtgctttttagctcagtacactgaaaccatatgataacacaaattcacatataattgggggttagtcccatactctataacagacttagtcctgtcttttcattagccatgtaataatataactccatgttccatgcaactggatttttggaccctgttaatagcattaaggtagaggtttactctatcacctaacacctcaacactacctgtgggatgccttagttacccagcagcaggttaccaagggctgtctggaaagggagggacaaaaggacccagaagtagaagaatggggatggagtggtgagaattgaatggttaatgcactgccattcataattgccaattgaggacaacacaaatgggattggtactttatagtaataaatctgaccagcagagggagggatcaggcagcagtgtttagagcacaccacactggccactgtaaactgagaagctaagttaactggtattttatgattttgagtatagtctttttataagttgtatacactttacaatgtaaaagaaacaaactttgtataatagcaaatcgggaaggggactgcttaaaatgttaatgcagtgnnnnnnnnnnnnnctctgcataaatggcttgagcatactggcatttacacagaaatgatatatgctgcttttatcatataacaaatattttcccactattacagcctgagtaatacccgtattaaaagagcctcattttagaaagacatttaaaatttttggaacataccacatgtagaaaggttgaactggtttttcagctataatgcatatacaactatagtgtgtacgtataccacatatacatatactttgtatgaagatatgtgtaaaatgttttttactatgggatcatggattttaggaaacttggaaaagctgggccacgggtggcctcacgccctgttaatccccagccactt

SEQ ID NO: 358721 - DNA, 435 bp, Homo Sapiens
ccagaatccacccttcatgctgctgctaaacatcatcctttctaggttttacatgcatgatcattataggatctgatcccaaattatcttttcagtctctcctgctaccatattctgtatacatacactatgctctggccatactgatcagtcacaacacatactgtcaatgcttccacgccacttgagcacaatatgtcgtcagcctacaatgttcttcctgcaaccctcaatctaattctaaggtatccccatctcaccccataagccccaggcaaagttaggaacatcctcatcagtactcaagttgtactatttatatacctttttttggtatttaatccgctagattttcagcaaagaactggagtttattcatcttttaacatcaccctatactttgaactaccatcctcaagtaagtgctcaataaat

SEQ ID NO: 358722 - DNA, 649 bp, Homo Sapiens
  misc_feature (472)..(505): n is a, c, g, or t
  misc_feature (520)..(520): n is a, c, g, or t
ccagaatccacccttcatgctgctgctaaacatcatcctttctaggttttaaaaacatttgatagctttccactgacaatagtgaagatttcaatttctggatgccatgcatgatcattataggatctgatcccaaattatcttttcagtctctcctgctaccatattctgtatacatacactatgctctggccatactgatcagtcacaacacatactgtcaatgcttccacgccacttgagcacaatatgtcgtcagcctacaatgttcttcctgcaaccctcaatctaattctaaggtatccccatctcaccccataagccccaggcaaagttaggaacatcctcatcagtactcaagttgtactatttatatacctttttttggtatttaatccgctagattttcagcaaagaactggagtttattcatcttttaacatcaccctatactttgaactaccatcctcannnnnnnnnnnnnnnnnnnnnnnnnnnnnnnnnncaaacacactctttntaattcctacatcattataattaactgagaggttggagattttacaagggactctgtttatgtgtcaggcaagctaaagacttgaaaaattggaataaaacagaaggggtacagatatcttgaccaaca

SEQ ID NO: 358723 - DNA, 700 bp, Homo Sapiens
  misc_feature (110)..(162): n is a, c, g, or t
tcccagtcaccacgttgttaagcgccgggccagtgaatttgtaatcggctccgctatagggcaaattgggatacggggccccccctcgagtttgttggttgtaggcgttnnnnnnnnnnnnnnnnnnnnnnnnnnnnnnnnnnnnnnnnnnnnnnnnnnnnnttcttgattgacaaaaagcattcaacatgcaaataggtggtatatgttgatatcttggcctgactggctgctaatttctgaatcaatctgtttgtgcatttaagtcatttattctctatttcaaaaagattgaatctattaaagtcttaagatctgtcttccattataatggtgaaagattttgaccagataagggaaaagaaaacacaacagcttgattttgggaacacagatcttctcagagggggccactttacaaagagattggacaccaaaggcagaaaacctaaagattttgaagaaacagaaggattatgggcagttttaagggtccatttgaaaatggagattatgaaattatggacaataaaaattacaatgaagatacatatgtatcaatctggaatgttgctcatgatatgttggtaagtgaaaaaacaaatttaaaactgttatattctgttggagagtaaggcaggagaggtggcaactttagatatggtggtcacctcctcttggaggaggtgataactcaagc

SEQ ID NO: 358724 - DNA, 459 bp, Homo Sapiens
  misc_feature (410)..(410): n is a, c, g, or t
  misc_feature (433)..(433): n is a, c, g, or t
acagaaaggaatattacagtgtgaaagcatttatttatttgtttgacaacagctacaattgaaatacagcaattctgaaggtctttaaatgggttgcactttgccctgttaactcactatttcctgattggcaataattttacttggtaatgctctgtattatggtaaaagctaacaataataatttatcgagtatattctttgtagcaggcacagttatgagtgctatgtgaatacatttaatcttcacagcaactttgaagtagggtactattactgtggcatattttgaaggatggggaaaactgagggcagacagtttgcctctgggagccctcactctgaaaactctttatggatatatacccagaaactgtggacataggcccggggtgcccaattctgggccncttccacctgcttttggttaaantaaagttttttttgggattacaccca

SEQ ID NO: 358725 - DNA, 1044 bp, Homo Sapiens
ggcggacagagggctggaaacaagacgctccagaatcaggagcttcccctcaggaaatagcatcctgtgtccccgcactgcagttgtctggtctctccagcagtttggtacttccggacccttcctggaaggacacagttctgggatttcggaagctgacccccagagagctggatatgttcccagattacggctatggctggttccacacaagcctaattctggagggaaagaactatctacagtggctgactgaaaggttaactgagaggggagtgaagttcttccagcggaaagtggagtcttttgaggaggtggcaagagaaggcgcagacgtgattgtcaactgcactggggtatgggctggggcgctacaacgagaccccctgctgcagccaggccgggggcagatcatgaaggtggacgccccttggatgaagcacttcattctcacccatgacccagagagaggcatctacaattccccgtacatcatcccagggacccagacagttactcttggaggcatcttccagttgggaaactggagtgaactaaacaatatccaggaccacaacaccatttgggaaggctgctgcagactggagcccacactgaagaatgcaagaattattggtgaacgaactggcttccggccagtacgcccccagattcggctagaaagagaacagcttcgcactggaccttcaaacacagaggtcatccacaactatggccatggaggctacgggctcaccatccactggggatgtgccctggaggcagccaagctctttgggagaatcctggaagaaaagaaattgtccagaatgccaccatcccacctctgaagactccagtgactgctgcctccccccacaagaactcccttctcccctcagccaatgaatcaatgtgctccttcataagccattgcttctccctcacttctttcctcaaagaagcatgaggtgagagaaagcacaaagtcagtgcctggagaagggttcagcccaacatggggcccctctcatcactgaaatc

SEQ ID NO: 358726 - DNA, 800 bp, Homo Sapiens
tatggttgattctcattattcaaggtagttatgttctataaagtcactgcgaacactgaattagcaaatatagaacctaggggaaatacaaggctagatttctgcaagccactggtcacattttcatcaagcagtcaacatgtaaatttctgtcgtaaagacaccttatttaatataatcgattcattaacattgaagtcatgaccaacaacactgtaactcatgcctgaatgaagtttatctgacacataagcttcataaggcacacaacagcctttttacccttaggaacagctttttgcccttagcactatgcttgggggccattttaaacagtgaaatcaaaaaaagaacagaaatgcaaaaaccatggcattagcgtaaaaaggacacgtttatagtatgaaagctggaacatggccttgttcaacctcagctcagaatatgtgtacagcaagttttttgctgtaccacaaaattttaggttaggcaaattcacaaatacggaatccatgaataacgaggatcaactgtacttaactatattttaaagctgtgacatttatctacctggtttatggaatagaatttattgctgaatcatgctccagtatttgagtgatgttttaaatatcctatgtctgaaaataattcctcctaattgtgtggtaatttgcttttactgtttccacagtatttcaggtctttgctcattcactcagtaatactgagcacttaccatgtaccagaattttactaggcacaaccatgaataaaaatacaattctcttgaaaaaaaa

SEQ ID NO: 358727 - DNA, 454 bp, Homo Sapiens
  misc_feature (37)..(37): n is a, c, g, or t
ccaaaacccaggcataccgtaaaagggacacgtttanagtatgaaaagccgggaaacagggcccttgttccaaccctcagccccagaaatatgtgtaccagccaagttttttggctgtacccacaaaattttaggttaggcaaattcacaaatacggaatcccatgaataacgaggatcaactgtaccttaactatattttaaagcctgtgacatttatcctaccctggtttatggaatagaatttattgctgaatcatgctccagtatttgagtgatgttttaaatatcctatgtctgaaaataattcctcctaattgtgtggtaatttgcttttactgtttccacagtatttcaggtctttgctcattcactcagtaatactgagcacttaccatgtaccagaattttactaggcacaaccatgaataaaaatacaattctcttgcaccatt

SEQ ID NO: 358728 - DNA, 722 bp, Homo Sapiens
cacactgtcacaatttattgaaattttataaaaactcaggccaagtggaagaataaggtacaactcaagagtacaaagacaactccgtttccgttcagtacttttctcctcagcactggtggtaagaaagccccttgctctctagtagccaggcagcatggacttacagtcttaaaattgagattcatgttacctcatcttcttttttaaactgtacccaacttgtgagggtactctgtctaatgtatatttctagtgtttacagacagtaaatgtgtatatgtagtaactatttacagaacatgcatccttaaactgtgacttctcacctagtgcagaacttttaccaggctgtaaaagcaaaacctcgtatcagctctggaacaatacctgcagttattcttcagctgtttggacaacttagattgggtttataactattaggaatcactgcacagtttatttgggttgtgttttgtgtctgagtcccctccctcatcccttagggtccagaagagcaatggaggaagtgacagctaatgttgcagttcttattgtatggcataggactggcattatatagcagaaatcaactactgtacaatttcttggggttaaccatctttagttaaatggaattttaatttaaatgacgctttgctaattttaagtgttaagcattttgcattaaaatattcatataatattttggctcagttaaa

SEQ ID NO: 358729 - DNA, 440 bp, Homo Sapiens
agtaacctatttacaggaccatgcatcccttaaaactgtgacctcctcaccctagtgccagaacttttacccagcctggaaaagcaaaacctcgtatcagcctctggaacaatacctgcagttattccttcagctgtttggacaacttagattgggtttataactattaggaatcactgcacagtttatttgggttgtgttttgtgtcctgagtcccctccctcatcccttagggtccagaagagcaatggaggaagtgacagctaatgttgcagttcttattgtatggcataggactggcattatatagcagaaatcaactactgtacaatttcttggggttaaccatctttagttaaatggaattttaatttaaatgaagctttgctaattttaagtgttaagcattttgcattaaaatattcatataataaaaaaaa

SEQ ID NO: 358730 - DNA, 1517 bp, Homo Sapiens
agcagcacttaggctaggtcgaggctgggtggtgaattcggcacggaggccggatctgcgggagcagcggtcccggcttcagttctagcctacccggcagcctggacgggagcaaggcgagaggtgctgccgcctcccgtcgcccctgcgctcagaggtcccgaaccagcccagccgctgcctcttgccgctccgcctttggagtgaggagggcgcagcccgcgtcagaacttagagggccaggcagggtcgcgcgcatggcctgggcgggctcgcggcgggtcccagctgggacgcgcgcggcagccgagcgctgctgccggctctcgctcagcccgggcgcgcaaccggccccgcccccaggccctctgccaccgccgcgaccaatgaggtttctgacctcctgcagcctcctcttgcctcgggctgcccagatcttggcggctgaggctggcttaccttcgagccgttccttcatgggatttgctgctcccttcaccaacaagcgaaaggcttactcggagcgtagaatcatggggtactcaatgcaggagatgtatgaggtggtgtccaacgtccaggagtatcgtgagtttgtgccctggtgtaagaagtctctggtggtatccagccgtaagggtcatttgaaagcccagctggaggttggctttccacctgtcatggaacgttacacctctgcagtttccatggtcaaacctcacatggtcaaggctgtttgtactgatggcaagctcttcaaccacttagagactatttggcgattcagccctggtattcctgcctatcctcgaacctgcactgtggacttttcgatttcctttgaatttcgttctctgctgcactcccagctggccaccatgttttttgatgaggttgtcaaacagaatgttgctgcctttgagcgtcgggcagccaccaagtttggtccagaaacagccatcccccgtgaactgatgtccatgaggtgcaccagacttgagaaattgggttctatgctggctggaaatgttgggggaaagagaaggcaaaggatgtggaaatgagatgtgcttaggaaagggtcaggcccatcgtaggagcaccatatgcctgcagccttttcactacgaattagaataaggactatgtggttgtctctggaccttatcaagacaccttagtgtctgaccaggggacgatagtaacttttctaaggattgaataaattgagcttttcttctggcacagaggtactgagtggtaagtaacttttaccctgcctgagattcctcaggagaaaaggcaacctgcctccagcctgaaatacataaagcctcattttaagactgtaagtccatgctgcctggctactagagagcaaggggctttcttaccaccagtgctgaggagaaaagtactgaacggaaacggagttgtctttgtactcttgagttgtaccttattcttccacttggcctgagtttttataaaatttcaataaattgtgacagtgtgaa

SEQ ID NO: 358731 - DNA, 460 bp, Homo Sapiens
tactttcacaggccaccagagacttcttacaccaggcacaaactcacgatactcctggacgttggacaccacctcatacatctccttgcattgagtacctaggagaagaagaatcacaggccaaggagctgccagctgggtcaggttcctccttgctataggcccctaattcatacctttgcccactaaccacgcaccttcaggaactacagatcccaaataagcctggatgaataacttcccaaaagcaaacgtgtaaatccttatgatactgttaccttatattttgcagtttacagaatgcttttgcattcatggtttattttgattttaagagggaccatctagggagaacagaggctgtcagttttactggtgatcacacaaggatcagatcccagctcttaacaattttttaacaatgtggccttaggtaaattacctgtgtctccattttctc

SEQ ID NO: 358732 - DNA, 987 bp, Homo Sapiens
  misc_feature (231)..(252): n is a, c, g, or t
gaaagctcattcattttaatagttgagcacagttttaagaattccccgtaggaattatctcccaggtcccccgctagaattattcacatacaaagcctgcaagtattcaaatttcacaaacacaattgcaaaagcagaagaactaagaaaaaccttcatagtcttaagattaaaaacaatgcttcatcattcttagagtacctgttaataaatgctaaatactaagtgctnnnnnnnnnnnnnnnnnnnnnngctaggctggcagctggctgctggtggctggcagctggtggcttgagagaataaaaaaggaaacttttataatgacaagcactcttatattcattttttatctcataactggataacacagggcagatctctctactttcataacttagttggttttgaagatagaaaaccttggagaaacactctcggagcaacaaatgaagctggttttaattatgcacataggttagaaagggccaatattctcagactccttataactgaggtaccctctccagttcatactttggtgtaaagaattgaaacaataaacagagcctgactcatagtaataacacaataaatatctgttgaatagatgaattgatacctgaggtgcagtgtgaacaggctggacctaagtgtctctaagcagaaaccatcctggtacatttcagaaaggctatattcgcacagcaggccttatttgtcagacctaccctcagtgccctgaggattctgggagacgaaaggaatagtagtatgacaaagaacaactgagttcttatttagttcatcctagtcccttgaataatccccctcagcatcaaaatttgtgaccagattttaaaagattcaataccatagataatcaaaacaacatcaatatgtgtatacctccttcaattatattctatacatatcaaactttaagaaatctggggcagggaatgaccaatatgagaccgcgagggg

SEQ ID NO: 358733 - DNA, 636 bp, Homo Sapiens
  misc_feature (85)..(85): n is a, c, g, or t
  misc_feature (133)..(133): n is a, c, g, or t
ccaaacgggccagtacaaggtagtatgcataaagggacgcacaatgatgcattataaaaaatttgtcaccaatcactttccaatncaaaattataatgacaaatcagaaatgaggtagcctgaggcaatagcnatattcacgtttgcaagtgatggaccaccccaaagtggatcagctttagtagcctcatcgaataagaaaatgtacaggccaaaaataccaaccaccaaagaatggcatgtggatactacccttgagttccattcaatcttctttttgaagctgagactattgaaacctggagaaacttttgctgaaaaccagtaacttacaaagtagaaaagaagctgaaaggtgaaaaagctgatacaggtaacactgatgagcagttttgtgttgatctccatatttcttcaacctgtgccgggtcccggggcgagtcgcgcgcgggcggcggctgcgccgagccgggagagggcggcgggtgtctacaggagtctggtcatccgggccggcccgagggctggcgctggccagtgccgcccggtgagatgctcacgggagccagggaagccgcgggttccgggccgcttggaccgtgcagtcgcggaggctccagctaccgcggcgaccgt

SEQ ID NO: 358734 - DNA, 1364 bp, Homo Sapiens
actgctgctcggacccactttcagagtagaagctatcactgatggaatgaccaaaggatgcagcccaccaggctgagaaatataactagacactcctgctccaggagaggaagaggaagatggtgcagagagggagaaagccaatccagttgtactgctatgagatgtcttatctagtgagtgtgcgctaactaccacggtttcagctaaagcaggagtagaagtactgctgctaagctgaatggacagctgtgaagctgtgcttgggaatgaagtggtggtagaaactgatgttaatgtggctcccacagtagtgctgcctgctgcctgctgagatactacagctggaggcttaggacctggggtagcagtactgccccctgcagaggctgaagttgctgaaactgttactgaaggatacagtgctgtactagaaacaacgatctcagatgtggatgtggggacttgaagtgacggggatgtagtagatattgagacaactgcaggtattgtgatacttgaaactacgctggaaagtactggtgattcagacacaggtggtatggggagaccacctgaagttaccacacctgtgctggtggcaactccagcaatcccctcttcagtgggcactgtaacctcagactgaattactgatgtggaaatgtcattaggagggctgcttgttgcagggactggtgctgtggctgctgctgtggttgggactccagcaatgctacttaagaaaggaggtactactggaaatgttggtcctgtatgactaaagtttggaggtgctgtgttgggtccttctgtcatttgggcacgtctaagttcagaaaaggcctgttgtagactaagggatgatgcagagtgagacaagttcattccagggctctgagctgtagaggcagcaactgtatctgttatttcactggggaaaacttttgattctcgtaatcggctttctggcacaggactcactataaaccgccttcccgcagaatgaacaacttgagttaaagaactggtaggaatgcctatttgctgtggcatggaagacgcaggaattggttgtttgaactctccttccaatttctgagaacctgaaaagccatagtcatcctttccttgtagactctccaatccctgatcaccctctggttccacactgacatcctcactgagcatttcatcagctttttcaataatttctcgcacttgatccacaaacgactctctctctattgctagaataaagtcattgttcaccataattgttgctatctcctcggggttgtcaccatctaggtcaaatttgaatgtaaccattttcctattatgagtctctaattgacattcta

SEQ ID NO: 358735 - DNA, 235 bp, Homo Sapiens
cccccagagagaatatttatcaattaacttcctgatacacatctatgatactttcttcttcctatatgttttggttgacttctcttcgaatgcttcttcatctaagaattccatcatttctatggaaagaataaattctctaccatggtagatcaaactcttttttaaagagttcctatataccccacacccaataggggtacataagacccttcaatctttctaccacaggggt

SEQ ID NO: 358736 - DNA, 876 bp, Homo Sapiens
  misc_feature (13)..(13): n is a, c, g, or t
  misc_feature (39)..(39): n is a, c, g, or t
  misc_feature (42)..(42): n is a, c, g, or t
  misc_feature (97)..(97): n is a, c, g, or t
  misc_feature (100)..(100): n is a, c, g, or t
  misc_feature (117)..(117): n is a, c, g, or t
gaaaggtgatatnttagaggatagcccctcaatgtctantcntcaatttaatgcatattacaagtactgcttatttgttgcaaagaagggtcatttnttntctttcttccttctttntactttctcttttttctcgtgccgaattcggcacgaggtgatagttgccatggtgaccaatcaagatatgccagatgacctaagcaaatgtctgtatgcagctgacactgctattctccctcacagtcttgtcaagagccacagtagctatggcagacatttggttgatggtttcatcatttcctaatacgagagtctggcactatgttggagagaggaatcacttcctcagagataggttcctttcaactcacatgtcaacagttactgtacaaaaagctcagaatacagtaatgattagagcttgacccctgactttaggaacttagaaccaaagcccaaagtcccaggccaagggcagacattgtgagcagcagaagggtgttttttatggagagccccataaatggatgggtgtagaccttgaagtctgagatgggaaatataccagaatgctcaatgcatcagacatgaagccccacgggcttccatttgacatgctggcaatctgaaggacaaagggcatgggttatttgggccttttccccactccttcaatatggctgaaagtgccagtggggattacaacctaagaaaccctatgccccttcctgagggcttgattattgaatcctgatcttcctggaatctttcacttgagatgatcacctgcctaacatccaacatgttactatgctcttctttatgtacatgagttactggaaaccaacaataaaggagagtgagtcataaaaaaaa

SEQ ID NO: 358737 - DNA, 2285 bp, Homo Sapiens
  misc_feature (167)..(167): n is a, c, g, or t
  misc_feature (896)..(946): n is a, c, g, or t
  misc_feature (992)..(1034): n is a, c, g, or t
  misc_feature (1107)..(1107): n is a, c, g, or t
  misc_feature (1475)..(1475): n is a, c, g, or t
  misc_feature (2187)..(2187): n is a, c, g, or t
cgagacagtgacacacctctgtccctgatgtcggtcaaccacgaggagctggagaggtctccaagtggcttcagcatctcccaggacagagatgattatgtgttcggccccaatggggggtcgagctggatgagggagaagcgggtacctcgcccgagggtgaaaanggacacagacacggacccctttcaagcccagcggctcccatgccctctgtcgtccacaggggatgggatttctgattcagtatggaccccttccaataagcccatttaaaagaggtcactggctgacccctccttgtaatgtagacagactttgtatagttcacttactcttacacccgaagcttaccagcggggacaccaatggctgcatcaaatgcatgcgtgtgcgtggtggccccacccaggcaggggcttcccacagcctcttcctccccatgtcaccacaacaaagtgcttccttttcagcatggtttgcatgactttacactatataaatggttccgctaatctcttctaggatacacatttatctgctgttcttacttttaatcacgattggaccagtacagggagaaattactgatgagccatgctatttgtctgtttggttggctggtttgggttttggtttggtaagcagagaaagtagtttaagttatttctaggatcactgccctcttgtgtaaaacgctagagcaattaactgtttttgaaagcaaggaaataattttctcaacaaaaccacattgtgtatcagtggggctgcctactgagctaacattaggaaaggaatgagatagtcattgtgtctctaaaacaaagaatttaaacaaatatttaaggcaaaaccttttaaaagctctccaaaagacctcacttggcctgatnnnnnnnnnnnnnnnnnnnnnnnnnnnnnnnnnnnnnnnnnnnnnnnnnnncccaagtgtagcatttctgatgagttatgaattggcagggagaaannnnnnnnnnnnnnnnnnnnnnnnnnnnnnnnnnnnnnnnnnntagttaaaatagtttccaatttatgtagccaaggacaatggaatttatcagaagtgaagtgcccctctggagngagctgagttcagtgcctttaaaatgaatttccaactctcatttcttcccatgatactgaagtacaaaatatccatctaaaatagaaattaaagtcaagaaggcacacagaaattttctagtccaaggacttccttttataaatgaaggaatcttaggctcaggtaaagtgacatacccagagtcactcagttgtcccatagagaaccaggactcaaaagtcaggtctgcccactctccctgaccttgtttcccctcaccacaccattcttccatttatataatggcatcctagagattgtgtcaagatatatggactttgtgtcgcgtgggaaagcacccagtttatccagcaggaggggggatttnccactttttattggcaaaacatgcttgcttgatgcaatgcatttcagatctagaaaaaaataatgcaagcaagctacatttacagatgtgtaaacaggcaaaatttccagaaccgtccaattttacttttccaaatttatggaaccaacccagattttttaaatgaaaatactaaaaccatatgtaaccgtaagacaagctaaaatgtaagcagacagcctgggaagcactgccctactgtacaggtgtgatattaagcacaagccatcctctggcctcttatgagatgttgttattctctgaaaaactttgatggaaaaggtttctgttaggcttagactgaattagctaaatgaccatgccacagtattattgtatcactcttctcacacacctaggcactggttgtggatagttgccatggtgacaatcaagataatccagatgacctaaacaaatgtctgtatgcagctgacactgctattctccctcacagtcttgtcaagagccacagtagctatggcagacatttggttgatggtttcatcatttcctaatacgagagtctggcactatgttggagagaggaatcacttcctcagagataggttcctttcaactcacatgtcaacagttactgtacaaaaagctcagaatacagtaatgattagagcttgacccctgactttaggaacttagaaccaaagcccanagtcccaggccaagggcagacattgtgagcagcagaaaggtgttttttatgagagcccataaatggagggtgtagaccttgagtctgagatggaaata

SEQ ID NO: 358738 - DNA, 498 bp, Homo Sapiens
ctttttgcaagttctccatagaatttactaaataattctccaattttaaattcatccatgagtctagaacttctaaaagtctgaagtaacttaataagaaggtccagggctggaattttacatttagcagctctatcttttgtataaacactggtacaagtgttcttaatttcaacagagtaaggtgcgatcttctggcccattttttctaagaaaatacataaaaactttaggatttcttctctacattcacgaaattcaatactgttgagtgacttccggacaaatacaagcaaaccgaaatctctggaaaaaactaaagatgtctgtaatgccagcaccgcggggctgctgctcaggacgcattcctgccccaggccgcggatcagttgatgaccggccagggcagcaccgcagcggtccgcagcggacaaggtctcctgcagccgcagcagggagcaacgcacaccggctccggagcccgccatgccgccgagt

SEQ ID NO: 358739 - DNA, 1128 bp, Homo Sapiens
  misc_feature (105)..(105): n is a, c, g, or t
  misc_feature (111)..(111): n is a, c, g, or t
  misc_feature (221)..(221): n is a, c, g, or t
  misc_feature (325)..(325): n is a, c, g, or t
  misc_feature (362)..(362): n is a, c, g, or t
  misc_feature (435)..(435): n is a, c, g, or t
agtactatatgccggagagctcatggtccaatataagaaaagcgagtttgttctctcaaaagttagccccgtgggcattcttaattaagtccaattctaaacganagtttngagtagtcctgtttcgtgaaaaccggttccgtaacatggattcaagatcccagttggtctaagtcacacaataaagtgggtcatacttcaatcattccaagacttttccncaaagatagattacgctccagatctgtaagacttacaatgcagcaaggttcaaaaaacttcacgattcttgcagatagaagttaggaaagggtctgatcctgcnccacaattatattagaatgtggtcaaatactccttcngagcaagatattgtcgccaatgatgagtatatgccagtgatgtcaccatttctatcagggtgcttctgacaancacatcctcaccagtcagctctctcagaagctgggtaccaatccacgtgtggtacagtagtttaaagattcttggtgacaccggaagaaatctgctataagtagctcagaccaccctggtatcgaacaatgtcaatatgttttcatgacactttgtcaaatccatccagcagattgctttcaaataaagcctccagtccagcttgggttagtgatattcttgacagggatttgatagccgcttttgctacagatagattctctccaccaatgcaataaacaatttgttttagtaattcagcattatttagaatctcagtaacagcatcagaattttcaacaattcttccaatctgggaaagagtgaggatttttacagaatcatcagggtgaattagtcccctctgcaggtcaaccctgaggttccgggccacgtgaaccggttccatagcttggagcaatctctccagaatggatacacacaaagtagtcttttccctatggttctcgttaagcagggagaagagccagccgaggcgcagtctccagccagcttgtctggcgaagctcgcttgagcggcactgcctgcagcacggagtgaagcgcgcgtagctcctccagcggcgcttccagcctcgctacctctctcagcagcgccaaagcctgggctgccatcttgccccccgacccgct

SEQ ID NO: 358740 - DNA, 674 bp, Homo Sapiens
  misc_feature (53)..(53): n is a, c, g, or t
  misc_feature (191)..(191): n is a, c, g, or t
  misc_feature (331)..(331): n is a, c, g, or t
aaagaaaaaagaaatttcttaaaaagaccattaaataaataaaagctaaatanaactttctagtaaaatcaatgaaaatttataaatccaggaaactttataagagagaaaatgcctaagaaatgaaatgagatagggatttgatgaaggtttttatgacacctcacatattatcttatttaaaatattanagcagtggttctgaaagtgtgttccctgaaccaacattatcagttatcacctaggaatttgttaaaaatgcaaattcttgggcctgatcccagacctcctgaaatggaaactctgggagtagggacccagctatattttnacaagcccctcatccttgattcctgatacacactaaagtttgagaaccattgtattagggaataagcagcatggttttcactgataatacatcagataaaaggcttaaagtaatctagataataataatatcttccacatgtatacatatatatttacaagttaaaacagcatggaaaaaaatgcaacatacaatttaacttacttgccaaccacctaacaagaccctaatgaaagaaaagccataacttctacacattttgtagtaccacgaaaaatacaaatgaagtctgcattcaagatcaactattgtacaaaatataatacataaatataatatatat

SEQ ID NO: 358741 - DNA, 1691 bp, Homo Sapiens
  misc_feature (1580)..(1580): n is a, c, g, or t
gagagattgcagggtctggtgttaaagtgtctggctgaacaacagaagctacagcaagaaaacctccagatttttacccaactgcagaagttgaacaagaaattagaaggagggcagcaggtggggatgcattccaaaggaactcagacagcaaaggaagagatggaaatggatccaaagcctgacttagattcagattcctggtgcctcctgggaacagactcctgtagacccagcctctagtctcctgagcctatagagcccccaggagactgggacccaaagaacttcacagcacacttaccgaatgcagagagcagctttcctggctttgttcacttgcagggcattgccttttagataggatctaggagtgattttattgttttggagaatggaagggcccccatggccctggctttgtcatcagtgactgccatagcaacagcagctctgtacctcatctgttgatcccacctttgaagaggagacacagtgctcaccttaattgcgctggtagcagcttatatcccatgtatcattttcaccattgattggaagctgccttgggaattcagtaccaggcattacccctctgggtgggagagggagaagtgtaaagttggagtgggctggaatcaggtgtggcccgcccagtgtcctctgcagagtggtgaagtagtctggccctcttgggagccctgagtccaggaaaatatgtctgatggagtcaatctagggcttgtttcgaaaaagttcagttactctgtgcagctaaatgctttaggaggaaaggtaggcttaggttgcttttcctctgagggttgattgaaatttcttcagtgaggaatagagaaagggcaggaccctcatcatcacacagctggtgtttcaggctgtgaccaatgcagggtgggatttcctaactgtggatgaggggatgaggtgtctctgagggatgaggtgtctcagagaattgagtccatggggcagtcagaatagccttaagagaaaatcatgaaggagaagaggtcctcctttagctgcctctacttggtatcttagagagggcttagagggctctcagtcttctgcccatgaaaagacttctttgagcctctgccttcatggctcttagggttctgatcttgatatcagcagccccaaccactttctttctgaatgtctagtcagtatttttccccttttggtgttttatgaagccatgtggtaacgaatgaatctgtatcatttttcctacctgagtggcccaaagccagcaccaaaccctgggagtccctgaagcctaacagaacaggtagaacttgcaaaaggaatttggctgagagctcacttctaatcctgtactcactgtgtctttgtagatagaaacaagctagctttaccaaagagaaatagtgtcatagaagaacaaaacttcatatagaaagttctaggcaagtatttgatggtttccttaaggatgtgagctttgtatttccacctagccttgtaaaatgttcctgtggtattttgtgtcacacatcctacctttggatgagtctcacatccccaccttncctattaaacagctaaattaattttgtttcatcttccccaggaccaaaaatgtttggataatcttatccaacattgtggggagggtctttgtggcatggggaatttttgcc

SEQ ID NO: 358742 - DNA, 679 bp, Homo Sapiens
agtaatgaccacattcagaaagagttcaaaatggattaaaaatgaatatatggggaacaacataattatttccaacaacaatccagcgcaaacacgggacattgacacacccaaatcaagtgttgtcaaagatcaccttaatgtttatttaaggtcaacagctttggtacaaggaagatattgctagctaaccagctatcatgagtatggaatacgtattatttagatagctaaaaggttataaacaaaatggaggggtagggaggggaaagcactgtagcagattccactgaggtaccttagtttttatgtaaaggtctgtatactcatttaataatttacataacaattctttattctatatagtatatgaccatatagaaacgatgtattatgtattttattgttatggtccaagaaactggaaataaaagcaaaacgcttgtattcagataaagaactggaatgtactatgaaaccattaatataatgcaatattaaaatagaaaatttttgcatgtaacaaaggtagtcaacaagttctcagattgtatctgaagaggatgtgaaaattataacccataagacaaggaacgtaagcattattgaaggcattaacaaggctgtacctgcaaatcttgagcccactgatttatactttaccttcagagatgtatgc

SEQ ID NO: 358743 - DNA, 690 bp, Homo Sapiens
tgaatgactcacatagaggttgagccaatgactgtggcctcattagattacattgtagttaaacaaagcaatttctccagacttaaaacatgatgagttgagctctatcttcatgtactcatcctgaatccttatttttctaaaatagcaccctttgttaattatttttatggaaattattactctgtcataattaaatcatagctagtataactttacagataacctaaaaagaatagaaaagaagagagagtggctttgtccagtataaaaccatgtaaagtcatcatccaagtcatctggatgaatcttgaaacacatttagctgcccagttttacaaacctttaatatatcagtgctccagtatataacctcaaacaaatgtaaatagaacgaattattttcttgttttgaattgtcaatatattaaatgttgactctttgggagagttgttggcaagtttcaatggtgagaaacattattgtcaacttgaaatgtgttctgtaatggggacactacaaaaagctagctttccaatgtgtgcatagtattggcaatatgaatatatattatatataatctaatacttattataagctgctccctgtctatgtatttggaaaccttttcacaaagggaattgcctaacatgtggacttttacaataaaaatgctgcattctaaaaaa

SEQ ID NO: 358744 - DNA, 537 bp, Homo Sapiens
  misc_feature (116)..(166): n is a, c, g, or t
  misc_feature (239)..(261): n is a, c, g, or t
aaccctgataatttgtggtaggtttctttattttttgaatataaagtgacagaaataatttgccattagaaaagagaaagaatctttgactatttacagcttttatacatcacaannnnnnnnnnnnnnnnnnnnnnnnnnnnnnnnnnnnnnnnnnnnnnnnnnngttcctgcatcatttgaacaagtccaaactggaaatctatacagctcacaaaaaaagccctccacccaaaagnnnnnnnnnnnnnnnnnnnnnnnaatgagaaacaagataaatcaaaagaatgaaatcaacttatttcttttgtttaaaggtaagtcatttgcttatatatatacttgtaattatttttttcaagttcaaacaccaaaatccaagagagaaaggaaaaaataaaaagacccagtcatccgcccctccccccactccagaatctcaattgatccctgcatgtccaaaataagaaatagatatttacagaaaacagaagcaaaacaaataaacaaaaaaagaacggcacgagcctgcagccc

SEQ ID NO: 358745 - DNA, 697 bp, Homo Sapiens
  misc_feature (33)..(33): n is a, c, g, or t
  misc_feature (41)..(41): n is a, c, g, or t
  misc_feature (463)..(488): n is a, c, g, or t
atgtacaagggatggcaagtgaattttttattnttttcttntgtatatgaatgctcattgcagctttatatgcaatagctaaaatctggaaaccgctcagatgtccttcaagcaatgaatggctaaacacaccatagtgctgtattatggaataggactcagcaactactgatatacacagccacttggatgaggccccagagaattctattgagtgaacaaagccaatcataaaaggttacatactgtatgactccatttatattgcattcttaaaatgacaaaattatagagatggagaacagattagtggttgtcagaggtgagattgggggagaggcaggtgggtgtagctgtaaaaggttagtgcaaaggaaccttgtgatgaaactattctgtatcttaactgtggtggtggccacatgaatcaatgcatgtgacaaaattccatcaaattaaatgnnnnnnnnnnnnnnnnnnnnnnnnnnaatgagtgcatgtaaaactgacggcacctgtgtaaggactatggattgtatcactgatttcctggttgtaatgttgtgctatagtgacataagatgttacctttgggggaaactgggtgagggtatctctgcataagttcttaaaattgtgtgcttatctgtaattatctccaagcagaacatttaaaaaatcctgcagcccgggggat

SEQ ID NO: 358746 - DNA, 274 bp, Homo Sapiens
  misc_feature (38)..(38): n is a, c, g, or t
  misc_feature (136)..(156): n is a, c, g, or t
agtggaatggcggagacgaaacgaaggggaccgcgggngagaggatccctccctcgccaccaacagatgaaaaatagctcaaatatcttcaacatgcaagaagttgggggaagaaattaatctcttccagtcagcnnnnnnnnnnnnnnnnnnnnntttttttttacaaaatgttattccagactggatcattttggtgggcagaagaaacctggcagtgaattctaactaatctgcatgaaaagacaaatcacgatggttggggggaaaaatt

SEQ ID NO: 358747 - DNA, 668 bp, Homo Sapiens
ccagtttacatgctggattctgacccagataataatggattcataaatgaggattttattgcttggatgcgtactgcagcattacctacttttcgcaagttgtatcgtcttatagaaaggaaaagtgatttacatccaacattaccagctggccgatactctttgaatgtacacatacaattaccctgtacattattttgatggacgaaaacggatgatcttgagcactatttcatggatgggaggaaaaaatccatatttatggggcatagcttacatcgctgtaggatccatctccttccttctgggagttgtactgctagtaattaatcataaatatagaaacagtagtaatacagctgacattaccatttaattttatattatgaaagcaaatcatctgcatgtgcatcaaggccagatcctattcaacctagctttcgaatgctgatatctggctagtatgtcattttgaagttggccacataaacttatctaaaaacaaagcagtcttagtagtattgcttcttccctacggatgacttctaaaaatatatgacgggttaaaaaaatagctatttgatcatatcaacacgtaactgctgaaatggcattctatgtcagcttttatcggacaggccacatgatgctgagcctcttcatgtgat

SEQ ID NO: 358748 - DNA, 839 bp, Homo Sapiens
  misc_feature (27)..(27): n is a, c, g, or t
  misc_feature (93)..(93): n is a, c, g, or t
  misc_feature (148)..(148): n is a, c, g, or t
ccgctctagaactagtgcgatccccgngctgcaggaattcggcacgagccaaagcagctggcgccaaggctttggggcgtcctactgagctgngttcctgctccttcttgggctccatgaaggaagtaagaggctagttgagagcctnccttggcccctttccagtgcctccccgcctggcttcaaatttatgagcagttgccctcatcgtactttcttgttccagggtcagtggccctcttcctaaggaggcctcctgcttgccatgggccaaaaggcacggggtgggttttttctctccctaccctcaggattggacctcttggcttctgctggattggggatctgggaatagggactggagcaagtgtgcagatagcatgatgtctacactgccagagagaccgtgaggatgaaattaatagtggggcctttgtgagctagaggctgggagtgtctattccgggttttgttcttggaggactatgaaagtgaaggacaagacatgagcgatggagataagaaaagcccagcttgatgtgaatggacatcttgaccctccctggaatgacgccagctctgcccagagctgtcctcaaagcatccagtgaacactggaagaggcttctagaagggaagaaattgtccctctgaggccgccgtgggtgacctgcagagacttcctgcctggaactcatctgtgaactgggacagaagcagaggaggctgcctgctgtgatacccccttacctcccccagtgcctttttcagaatatctgcactgtcttctgatcctgttagtcactgtggttcatcaaataaaactgtttgtgcaaaaa

SEQ ID NO: 358749 - DNA, 472 bp, Homo Sapiens
  misc_feature (16)..(16): n is a, c, g, or t
  misc_feature (22)..(22): n is a, c, g, or t
tctatcccgggttttngttctnggaggactttgaaagtgaaggaccaggacatgaccgatggagataagaaaagcccagcttgatgtgaatggacatcttgaccctccctggaatgacgccagctctgggggcagagggaggaggagaggggaaggggctcctcacagcctagtctccccatcttaagatagcatctttcacagagtcacctcctctgcccagagctgtcctcaaagcatccagtgaacactggaagaggcttctagaagggaagaaattgtccctctgaggccgccgtgggtgacctgcagagacttcctgcctggaactcatctgtgaactgggacagaagcagaggaggctgcctgctgtgatacccccttacctcccccagtgccttcttcagaatatctgcactgtcttctgatcctgttagtcactgtggttcatcaaataaaactgtttgtgcaa

SEQ ID NO: 358750 - DNA, 902 bp, Homo Sapiens
  misc_feature (65)..(66): n is a, c, g, or t
  misc_feature (106)..(106): n is a, c, g, or t
  misc_feature (130)..(130): n is a, c, g, or t
  misc_feature (150)..(150): n is a, c, g, or t
  misc_feature (189)..(189): n is a, c, g, or t
  misc_feature (252)..(252): n is a, c, g, or t
attcatgcacgtttctctccactcagagcaaggatatatcatgcagcatcctctcctgtgactanngccagtgtgagcactgacctatccacatgcttctaagtcnggtgtatgctccacactacctgtntgtggttctcggtctagggnaacgaatgtattctaaacatagtaaggaagctagaaganagtgaatgcaggtcatgtgtatcactatatccatttggcaattatccagatgacaaagagcanattttttaatagcaaggttgtgattttgcctacggggtcctgcattctgccgtcttgtgctaacttctaagcagggctagtttgctggaatgctgacgaatccaaagacccacaggactgtctgagagttgtgctgtaacaaaaagagcccacttagaagtgcccctgcaccacctggtgccgaaggtgccagattacgtaagatttgcagagtgagcgaagattttatgcaataataaaactccaaatgagagctggcaaagagcttagccatcttctagaccacgcttctagccagaacaaaccctattctgaagaggccttggtgaatatccagagagggtgcatggcccatcctattaacaaggagcactcaagccccagcactgtccaccagtgaacagctcagattccttagaaagagctttctgttgagtaatatctggttctcacaattcgggcttgaattctttaattccagatctaagattctgcaaagctttgggaaacttctgagagctgctgctgggaaaactctggagacagttgttaccttcagaaagatgcgaagatttagacattcagaagacaaggatgggaaaagcccatctggcttgggcaaatccccgtgggaccgagcccgattccga

SEQ ID NO: 358751 - DNA, 549 bp, Homo Sapiens
  misc_feature (536)..(536): n is a, c, g, or t
gggtcgactctcagaggattacacggggatttgtgctgtaacaaaaagagcccacttagaagtgcccctgcaccacctggtgccgaaggtgccagattacgtaagatttgcagagtgagcgaagattttatgcaataataaaactccaaatgagagctggcaaagagcttagccatcttctagaccacgcttctagccagaacaaaccctattctgaagaggccttggtgaatatccagagagggtgcatggcccatcctattaacaaggagcactcaagccccaccactgtccaccagtgaacagctcagattccttagaaagagctttctgttgagtaatatctggttctcacaattcgggcttgaattctttaattccagatctaagattctgcaaagctttggaaacttctgagagctgctgcctggcaaacctctggagacagttgttaaacttcagaaagatgcagagattttagacattcagaagacaaggatggaaaagcaaatcttgactgcacaaaatcccggtgngtaccgagctcga

SEQ ID NO: 358752 - DNA, 421 bp, Homo Sapiens
atgagtaaaacaaattgcgttgtttaaaggattatagtgatgcattgtctgaagttagcacctcttggactgaatcgtttgtctagactacatgtattacaaagtctctttggcaagattgcagcaagatcatgtgcatacacagttctttttgtttttgtgtgtgtgtgctgtcgcttgtcgacaacagctttttgttttcctcaatgaggagtgttgctcatttgtgagccttcattaactcgaagtgaaatggttaaaaatatttatcctgttagaataggctgcatctttttaacaactcattaaaaaacaaaacaactctggcttttgagatgacttatactaatttacattgtttaccaagctgtagtgctttaagaacactacttaaaaagcaaaataaacttggtttacattt

SEQ ID NO: 358753 - DNA, 470 bp, Homo Sapiens
aattgcgttgtttaaaggattatagtgctgcattgtctgaagttagcacctcttggactgaatcgtttgtctagactacatgtattacaaagtctctttggcaagattgcagcaagatcatgtgcatatcatcccattgtaaagcgacttcaaaaatatgggaacacagttagttatttttacacagttctttttgtttttgtgtgtgtgtgctgtcgcttgtcgacaacagctttttgttttcctcaatgaggagtgttgctcatttgtgagccttcattaactcgaagtgaaatggttaaaaatatttatcctgttagaataggctgcatctttttaacaactcattaaaaaacaaaacaactctggcttttgagatgacttatactaatttacattgtttaccaagctgtagtgctttaagaacactacttaaaaagcaaaataaacttggtttacatttatttttc

SEQ ID NO: 358754 - DNA, 756 bp, Homo Sapiens
  misc_feature (320)..(469): n is a, c, g, or t
aaagcatgggaagttcgggcgcactgaaaggtttacgtcatgggtaaagggcaggatcgatctgaagatagagaggaccgtaaggtagagtaatgtaaagttaactgcaagtagccagtagatgtaccatttgatccagcaatcccaagactgggtatctacccaaagaaaggaagtcattattcaagagagatatttccaaagcaatgttaatagcagcataatttgcaactgcaaaaatatggacgcagccaaatggcccatcaatcgataagtggatagagaaaatataagtatatatataagagtattccatggannnnnnnnnnnnnnnnnnnnnnnnnnnnnnnnnnnnnnnnnnnnnnnnnnnnnnnnnnnnnnnnnnnnnnnnnnnnnnnnnnnnnnnnnnnnnnnnnnnnnnnnnnnnnnnnnnnnnnnnnnnnnnnnnnnnnnnnnnnnnnnnnnnnnntacatataccatggaataccatggaatactactcagccataaaaaggaatgaaataatgtcattcacagcaacctggatagatttggagaccattattctaagtgaagtaactcaggaatcgaaaaccaaacaccgtatgctctcactcataagtgggacctaagctatgaggatgcaaaggcataagaataatgcaatgggtgttgaggactcgggggaaaggataagaggggggtgagggataaatatacattgggtacagtgtacactgcttgggtggcacgag

SEQ ID NO: 358755 - DNA, 352 bp, Homo Sapiens
aatattaggcagggcgattgctgaactgccaataggtttacactctatttacaaacatgattttgttcacagagcatactagaagccagtttttgacttctgtcttcttcagatgtatcagaaaggtcaatggcatggctcatagaggaatgtcaaatagtgaccaactggaaaccatgaaaagttcaataggggtgggaagagggtgaaggataaaagactacaaattgggttcagtgtacactgctcaggtgatgggtgcaccaaaatctcacaaatcaccaccaaagaacttactcatgtaaccaaatagccacctgttctccaaaaacttatggaaataaaagaaaaa

SEQ ID NO: 358756 - DNA, 711 bp, Homo Sapiens
  misc_feature (51)..(71): n is a, c, g, or t
  misc_feature (411)..(439): n is a, c, g, or t
ggataaagaaaactgccgtgtaccctatacaatgtatgtgtaggtgtgccnnnnnnnnnnnnnnnnnnnnnactccagcctataaaaaggaatgaataatggcatttgcagcaacctggatggaattggagaccattattctaagtgaagtaactcaggaatggaaaaccaaacatcagtatgttctcactcataagtgggagctaagctatgaggatgcaaaggcataagaatgatacaatggactttggggacttgggagaaagaatgggaggtaggtgagggataaaagactacaaattgggttcagtgtatactgctcaggtgatggatgcaccaaaatctcacaaatcaccactgaagaacttactcatgtaaccaaataccacctgttccccaaaaccctattgnnnnnnnnnnnnnnnnnnnnnnnnnnnnngtttatactatcaaaagcaatctgcaaattaagtgcaatccctatcaatgacatgcttcacagaaatagaaaagaaaatccaaaaatttatatggaaccacaaaagacctaggatagccaaaacaatactgagcaaaaagaacaaagctggaagctacctgacttcatattatactacatagtagtcaaaacagtatggtattggcataaaaacagacacatagaccaacagaacagaatagagaacacagaaataaatccatgtatttaaa

SEQ ID NO: 358757 - DNA, 527 bp, Homo Sapiens
  misc_feature (46)..(46): n is a, c, g, or t
  misc_feature (443)..(473): n is a, c, g, or t
gcacatttcaccatttgccaaatttgtggaacccaacccccaattnccccatccattccaatgaatggattaaaggaaacattatatatatatgatggaatactacacagccacaaaaaggaatgaattaacaccattttccagtgacctgaatgagattggagactattattctaagtgaagtgactcaggaatggaaaaccaaacatcgtatgttctcactgatatgtgggggctaagctatgagaatgcaaaggcataagaatgataaaatggactttggggacttggggggaagagtgggagaggggcaagagataaaagactacaaatatggtgcagtttatacataggtgatggggtgcaccaaaatctcacagatcaccactaaagaatttactcatgtaaccaaataccaccggtaccccaacaacttatggacnnnnnnnnnnnnnnnnnnnnnnnnnnnnnnngggcataattgaattgtttgtaacacaaagaataaatgcttgaggtgatggata

SEQ ID NO: 358758 - DNA, 496 bp, Homo Sapiens
  misc_feature (92)..(226): n is a, c, g, or t
tcagcttactgccctctgtggtaccgggttcaagcgattctcctgcctcagacctcctgagacagctgggattacatggcgcccaccacgcnnnnnnnnnnnnnnnnnnnnnnnnnnnnnnnnnnnnnnnnnnnnnnnnnnnnnnnnnnnnnnnnnnnnnnnnnnnnnnnnnnnnnnnnnnnnnnnnnnnnnnnnnnnnnnnnnnnnnnnnnnnnnnnnnnnnnnnagcccggccacgttctgagttattgaggatccagaaacaaaaggctggaaagcgacacttctacaggtttactgatgagtccggagaaaatccaaaaacaaagccccactgagggtttgtgaatttggctgttctcagtggccaggcagagtctctgctccactcttctttcccagctagcagggaagtgaaggcaaagaactgtctcagaaacaagtctctaggaagtctgcttgaggtcctgaaaacctcgtgccgaattcctgcagc

SEQ ID NO: 358759 - DNA, 821 bp, Homo Sapiens
ggtgtccatgaatctgaaggtacagatgagggttggacctggagtctcaaatctcataatcaagcctccaaaatccaaacacattgtcagcatctgctttgaaggtaagcattgcaggtaggatgaggcaacccaaagatggcattgagaaagaggcagagcctcttggacactgtgcctggtgagtgtgggttggtgggggaaaggcaggtgatcattctgatacagggccttggggttaactagttttagttgtcctgtgacacttttgggaaagtcttcaaacctttgtgagatttaattccttatcaataaaatgtgggtaataaaaatatcaccccatagggttttttgtaaagatcaagtgaaactagctttgtaaactatcaactatcataaaaatataaagattcataattataagtttccaaggttggtcctatttctttaaaaattggtgcatacttccatttttttaaaggtgagtagatgtgaatgaaaattaaagtgcttattcagaaagcataaatggcttagccagaaattgggtttgacagtaaatgttgaacattatgccttgggaacttaagattctcagaatgctgcctcatccagccttgagtcctactttcttaaaacccaatcaatcccgttttcagtagattcctccacacacctcatgtccatttgctgtctggctcggctgaatcattgaaaggggtagtaggcactgaaatgaaagaaccatatgaatcttgtgaaacctgtaaagaaacaagtgcgagacagtgaacagtccggtgagtctgagaatgggcgaa

SEQ ID NO: 358760 - DNA, 1513 bp, Homo Sapiens
  misc_feature (912)..(1100): n is a, c, g, or t
  misc_feature (1124)..(1133): n is a, c, g, or t
  misc_feature (1162)..(1252): n is a, c, g, or t
  misc_feature (1316)..(1316): n is a, c, g, or t
  misc_feature (1346)..(1356): n is a, c, g, or t
gccgagcaggaggagctctacgtccgcgtgcagaacgggttccggaaggtccagctggaggcccggacaccactcccacgagggacggacaatgaagtggccgccttgcagccccccgtggtgcagctgcacgacagcaacccctacccgcggcgggagcacccccaccccaccgcgcggccctggcgggcagatgacatcctggccagcccccctcgcctgcccgagccccagccctaccccggagccccgcaccacagctcctacgtgcacctgcggccggcgcgacccacaagcccacccgcccacagccaccgcgacttccagccggtgctccacctggttgcgctcaacagccccctgtcaggcggcatgcggggcatccgcggggccgacttccagtgcttccagcaggcgcgggccgtggggctggcgggcaccttccgcgccttcctgtcctcgcgcctgcaggacctgtacagcatcgtgcgccgtgccgcccggcagccgtgcccatcgtcaacctcaggacgagtgctgtttcccaaagagcgtgtggcatggctcggaccccaacgggcgcaggctgaccgagagctactgtgagacgtggcggacggaggctccctcggccacgggccaggcctcctcgctgctggggggcaggctcctggggcagagtgccgcgagctgccatcacgcctacatcgtgctctgcattgagaacagcttcatgactgcctccaagtagccaccgcctggatgcagatggccggagaggaccggcggctcggaggaagcccccaccgtgggcagggagcagccggccagcccctggccccaggacctggctgccatactttcctgtatagttcacgtttcatgtaatcctcaagaaataaaaggaagccnnnnnnnnnnnnnnnnnnnnnnnnnnnnnnnnnnnnnnnnnnnnnnnnnnnnnnnnnnnnnnnnnnnnnnnnnnnnnnnnnnnnnnnnnnnnnnnnnnnnnnnnnnnnnnnnnnnnnnnnnnnnnnnnnnnnnnnnnnnnnnnnnnnnnnnnnnnnnnnnnnnnnnnnnnnnnnnnnnnnnnnnnnnnnaaagggggggggcccccgggggcnnnnnnnnnntttctaaaactttttttggggggcccggnnnnnnnnnnnnnnnnnnnnnnnnnnnnnnnnnnnnnnnnnnnnnnnnnnnnnnnnnnnnnnnnnnnnnnnnnnnnnnnnnnnnnnnnnnnggggggaaccgaggcctgggaaaaaaccgagggggggctcgggaggttcccggggctttacccnagggggaagaaggggggtcatataaaaaannnnnnnnnnngggcaaattttaaagagggggggaaaaactttaacaccccgcgcgcaggggaaccctccccccacgggggtaaaaatatctcacaaggcgccgagaggaaaccccccccgggccgcctgtcataaaaaaatctccccccgggaaaaagagggggggg

SEQ ID NO: 358761 - DNA, 1407 bp, Homo Sapiens
  misc_feature (1286)..(1286): n is a, c, g, or t
cactgatgcaggaactgtatagcacaccagcctccaggctggactccttcgtggctcagtggctgcagccccaccgggagtggaaggaagaggtgctagacgctgtgcggaccgtggaggagtttctgaggcaggagcatttccaggggaagcgtgggctggaccaggatgtgcgggtgctgaaggtagtcaaggtgggctccttcgggaatggcacggttctcaggagcaccagagaggtggagctggtggcgtttctgagctgtttccacagcttccaggaggcagccaagcatcacaaagatgttctgaggctgatatggaaaaccatgtggcaaagccaggacctgctggacctcgggctcgaggacctgaggatggagcagagagtccccgatgctctcgtcttcaccatccagaccagggggactgcggagcccatcacggtcaccattgtgcctgcctacagagccctggggccttctcttcccaactcccagccaccccctgaggtctatgtgagcctgatcaaggcctgcggtggtcctggaaatttctgcccatccttcagcgagctgcagagaaatttcgtgaaacatcggccaactaagctgaagagcctcctgcgcctggtgaaacactggtaccagcagtatgtgaaagccaggtcccccagagccaatctgccccctctctatgctcttgaacttctaaccatctatgcctgggaaatgggtactgaagaagacgagaatttcatgttggacgaaggcttcaccactgtgatggacctgctcctggagtatgaagtcatctgtatctactggaccaagtactacacactccacaatgcaatcattgaggattgtgtcagaaaacagctcaaaaaagagaggcccatcatcctggatccggccgaccccaccctcaacgtggcagaagggtacagatgggacatcgttgctcagagggcctcccagtgcctgaaacaggactgttgctatgacaacagggagaaccccatctccagctggaacgtgaagagggcacgagacatccacttgacagtggagcagaggggttacccagatttcaacctcatcgtgaacccttatgagcccataaggaaggttaaagagaaaatccggaggaccaggggctactctggcctgcagcgtctgtccttccaggttcctggcagtgagaggcagcttctcagcagcaggtgctccttagccaaatatgggatcttctcccacactcacatctatctgctggagaccatnccctccgagatccaggtcttcgtgaagaatcctgatggtgggagctacgcctatgcccatcaaccccaacagcttcatcctgggtctgaagcacaaaattgaagacagcaagggctttcta

SEQ ID NO: 358762 - DNA, 643 bp, Homo Sapiens
  misc_feature (55)..(55): n is a, c, g, or t
accatccagaccagggggactgcgagccccatcacggtcaccattgtgcctgccnacagagccctggggccttctcttcccaactccaagccaccccctgaggtctatgtgagcctgatcaaggcctgcggtggtcctggaaatttctgcccatccttcagcgagctgcagagaaatttcgtgaaacatcggccaactaagctgaagagcctcctgcgcctggtgaaacactggtaccagcaggcccatcatcctggatccggccgaccccaccctcaacgtggcagaagggtacagatgggacatcgttgctcagagggcctcccagtgcctgaaacaggactgttgctatgacaacagggagaaccccatctccagctggaacgtgaaggtaatggctcctctctgggctgtcaagggcttgaaggtcagaacgacagataaactactcagtatttactcattcagttctgtgttgatggagaacagaactttagagtcaccgtttaagggccagctgcaccacccatgggctccgtgaacttggacaaattctttggctctcagagccttgggtttcttaccttcaaattcttgttctcctttcctttctttttccccataatttactggagaatcagtt

SEQ ID NO: 358763 - DNA, 1416 bp, Homo Sapiens
  misc_feature (13)..(13): n is a, c, g, or t
  misc_feature (33)..(33): n is a, c, g, or t
  misc_feature (43)..(44): n is a, c, g, or t
  misc_feature (1077)..(1089): n is a, c, g, or t
  misc_feature (1324)..(1340): n is a, c, g, or t
ttaatgtaacccnagcatcttaaaatgagaatnattataatannatacatactatttacacagaacaagtttaaagctacctccacagttattggatcacatcatcaatcttgaagtcatcattaaaaatgaagcaaacacaacatatctatctgtacttgtgacatttagagcaaggaggcagaaagtgccaattctaggattccagacacaactactgcacatgcaggcatgtaaaccattctacaggaagaccactgagcctgttcttttatttaaatgcaaactggttgattcaattcagttactccttaagaaaggtactaaatatattctgtaaaaataaacttttaaaaaacaatcaaaggtgaatgtaatatcaatcaggtaagaaagacaaaagcataaaaaatatatattattccaaacaaaccccttaattttaacgaatgctaagaaactcagtttataaaaccagatggggtagcaaaagggattttaaaaaatataaaagccaaatcaaactcaaaccaaacaaacaaacctaagataatgtttcttgaagacagtggtattttgtttatcctatcattatcatgcaacagccaccatgagatctgtggctgatagagctattactgtgaagtagaatgttctttgacccacagtctaaaaagctacagtcattgatcagtttaagcatttggctttttggcttcaaacatcacattcattctgatactgcaatttaggtgtctctaaaaagcagcattatatccatatcagcagtttaaaatgtaaaataaattgcaagaaatcacactaacagaatatcctgctcctatgtctaatcctgtagctctaaaacttttggtctctggacccccttacacttacgctcttaacatttattgagaatctggatgccaaagtacttttgttcatgaggtttatatctatcaatattcaccatactaaaaaaacctgaaaatttttaaagtattaacttatttaaacatagtaaacccattacatgctaacacaaataacattttatgaaaaatggccatattttcnnnnnnnnnnnnngagatttgtgagaagatggcaatgttttacatttgcaacactttttttgagatagagtgaaaagacaatgtcttcacattataataaaaatattttgatctcatagtcccccctgaaaggctctcaaggaacccaggggtccattggccatactttgaaaactgctggtctaatctaaagcctgacattaaagacaaaaacatgtccacacaaaaggtgtcttaattttcatttnnnnnnnnnnnnnnnnnccccacacatacatacacagttcactggatcaaacacttctacctttagctttaaatagaagccaaagatatctcc

SEQ ID NO: 358764 - DNA, 588 bp, Homo Sapiens
tttacagaataaaacttcaaataaaaccaattcattatttgtccagaaggaagcttggctgagctggccttttaacataggaatgtatttcgttggaaacattctgaaaaatctcagagaactgaacccttacaaactttgttttccctcataaccaaagcttcaggttagaagtttagaaaaatagaatggttgggtacatgatctaaatgtttaatgctaaaggtatatcgtaagggtagtgtttgtttttgaacgataatttagaagttctcatagaaagcgtataacataggtcttcagaaactataaaagaattttcatatagtattaaaatccatagactaaaatctgagaattttttaacatatgcaagtcagccaaacataagctaccaaaataaagagcaatgtgttctggctgttttatacttcaacaattttttccctaagtggtaagcaattactttaaaacatatttttaaaaacatcggtatcgggagctgcggtggctccggccggttgtcctggcacacaaggaggcgaggctatgcgttcgaggccaacctaggcaaaattggaaaaaaaa

SEQ ID NO: 358765 - DNA, 1804 bp, Homo Sapiens
  misc_feature (475)..(475): n is a, c, g, or t
  misc_feature (1511)..(1511): n is a, c, g, or t
gggacatttcacaaatctacaatctgtgagtatcacatcctgtatagctgtaaacactggaataaggaagggctgatgactttcagaagatgaaggtaagtagaaaccgttgatgggactgagaaaccagagttaaaacctctttggagcttctgaggactcagctggaaccaacgggcacagttggcaacaccatcatgacatcacaacctgttcccaatgagaccatcatagtgctcccatcaaatgtcatcaacttctcccaagcagagaaacccgaacccaccaaccaggggcaggatagcctgaagaaacatctacacgcagaaatcaaagttattgggactatccagatcttgtgtggcatgatggtattgagcttggggatcattttggcatctgcttccttctctccaaattttacccaagtgacttctacactgttgaactctgcttacccattcataggaccctntttttttatcatctctggctctctatcaatcgccacagagaaaaggttgaccaagcttttggtgcatagcagcctggttggaagcattctgagtgctctgtctgccctggtgggtttcattatcctgtctgtcaaacaggccaccttaaatcctgcctcactgcagtgtgagttggacaaaaataatataccaaccaagaagttatgtttcttacttttatcatgattcactttataccacggactgctatacagccaaagccagtctggctggaactctctctctgatgctgatttgcactctgctggaattctgcctagctgtgctcactgctgtgctgcggtggaaacaggcttactctgacttccctgggagtgtacttttcctgcctcacagttacattggtaattctggcatgtcctcaaaaatgactcatgactgtggatatgaagaactattgacttcttaagaaaaaagggagaaatattaatcagaaagttgattcttatgataatatggaaaagttaaccattatagaaaagcaaagcttgagtttcctaaatgtaagcttttaaagtaatgaacattaaaaaaaaccattatttcactgtcatttaagatatgtgttcattggggatctcttgatttgcctgacactgacttcagcaaaagcacagggctgtaaattaccatttactagactagccaaatagtctgaatttccagaaaacaaggcagaatgatcattcccagaaacatttcccagaaaatgtttcccagaaaactagacagaatgatcattcaatggatcacagtgaagcaaaggacacaactttttattgtaccccttaattgtcaacaggagttaactgatttgttgtggtgctcagacttttttatacaggtgctagtgttttatcctatgtattttaactcattagtgcataaaggcaagccccatataatgaagtctcagggtatatgaaagtagctggcttcaaaataaaatttttgagtgcatactttaaaaaaganatgagaacggcagcaacacccgagcgagtgctcgtggggaggggtgcggccatctacgaacatgggcccaccaaacacatttctcctcttgccatccgctgccccacgtataaactcctccttcacccacccctccccctcctggagccgagggcattctattacatctcaccacctcctccctcctccgctctacacaccttcttcataaccacccgccacgcgtcaccgctcgtcctccacttcttgctgcgttgccttaggtcatctcagctactctttcccatgtacgt

SEQ ID NO: 358766 - DNA, 913 bp, Homo Sapiens
  misc_feature (427)..(435): n is a, c, g, or t
tacttcagaggtttataacctcaaagcagaagaagagcctcaacaacccgggacttataagttatttttatgttactagacttgcataaagattcttgttttccaactcttcattttgttgcaatgtgttattacaggatatatgaaccaattaaggtttttcactacagttcttgaataaaatttaaaaatcattttttattttaattaaaaatatttcccatttatagaatgcatatatttgcaatggacttccactttcatcaactttccatctcatcgctttaaacaggaacttgaacaagcactgttagtttagacctaaaggataggaaagcattaaataatactttggatctcctgaggaaaagataagtttgcttgcaatttacacattccatggggaaagaagagccatatttccttnnnnnnnnnttaataaagcttgttattgagaaaaattgtagtgaaaagccttaagtaccaaattttaaagcagcagtaacttaatttttatatcagtgtttttgttttgcacaaactaaatgcagtggtaggtgggtttatgagtatattaattgcctttatccatttgtgaagttaagttgatgagggcaaggtttttgtttgtttaatttgtatatgtctaaaggtatttggaactttttacaggaattaaacatatatgcaaatttgtatataaaaatagcatggccatcatttgaatgcttgtaaatgaaaggattatcttttttgagatctatatataaatagaaatagtttattacaattacacatcagttttgacacagtcatagcaacattaatattttcccatgatgcagatcctttttgtaatgggctttgtctttgagatctctgtaaagaaccctgtgaactaggaaacataact

SEQ ID NO: 358767 - DNA, 1366 bp, Homo Sapiens
  misc_feature (973)..(973): n is a, c, g, or t
  misc_feature (1311)..(1311): n is a, c, g, or t
gggggtccgccggatctccagcgctcagtccgcgccgcaggtggtgcttgtctgcagagtcatgacctctttccgcttggccctcatccagcttcagatttcttccatcaaatcagataacgtcactcgcgcttgtagcttcatccgggaggcagcaacgcaaggagccaaaatagtttctttgccggaatgctttaattctccatatggagcgaaatattttcctgaatatgcagagaaaattcctggtgaatccacacagaagctttctgaagtagcaaaggaatgcagcatatatctcattggaggctctatccctgaagaggatgctgggaaattatataacacctgtgctgtgtttgggcctgatggaactttactagcaaagtatagaaagatccatctgtttgacattgatgttcctggaaaaattacatttcaagaatctaaaacattgagtccgggtgatagtttctccacatttgatactccttactgcagagtgggtctgggcatctgctacgacatgcggtttgcagagcttgcacaaatctacgcacagagaggctgccagctgttggtatatccaggagcttttaatctgaccactggaccagcccattgggagttacttcagcgaagccgggctgttgataatcaggtgtatgtggccacagcctctcctgcccgggatgacaaagcctcctatgttgcctggggacacagcaccgtggtgaacccttggggggaggttctagccaaagctggcacagaagaagcaatcgtgtattcagacatagacctgaagaagctggctgaaatacgccagcaaatccccgtttttagacagaagcgatcagacctctatgctgtggagatgaaaaagccctaaagtttatgtttctaatgtgtcacagaataggacgatatgattctacaacataatcaactccctattaaattctttaatgcnacaaaaaccaacccccacaccccaaccaaaaacaaaaccacttcatacaacattccagctctcttcagtctatacccttttggggcccgttgatacgcgaatatatccggtttttattttgccccgccgccacccaaacccacatccccctgatccgcccgccgataagaatgggccgccttgcgccataatttaacactgggcacaccggacccctacaggcgcccacactctatgggctgcgtcgaacgagagggcagggagaatagatacgcgaacctacacaacacaaccgcgcgccttgcgtggtcgatttggtcatagagaaagggcggcgntataaacacccacaacccaacagctcctcccttatcggcgccgcgaaactacatc

SEQ ID NO: 358768 - DNA, 1130 bp, Homo Sapiens
  misc_feature (214)..(214): n is a, c, g, or t
agttcctgggataatcccaccaggtgggcaagcttttttggggcgtagatttgtgcaaagctttgcaaaaccgccatttcgtagacagatgccccaggacccactttgccagtaaagctgtttccaaaacggaaaatgcccaaatgaaaagtttacttccttccagcatggtgggacagggggaatcctcccatgacataatgatcccaaaacnttgacagggataaattaccacaggacctgaggacagagataatttacaagctcattcctacttggactttcatctcataaagacatcatttacatcagcggagtaaagatgagaaattcattctaattgaatgcttattatctagatgggaggtactcaactgtagcctaataggtatactctggaagccataacaggaagctacaatcaaatcaaagggcaaaatcgtgtcaaatccttagttctcaaataagcccgaactttccagatctgtgatgattctctgcctttctcacttatggtctttcagttaggttatgtgaagaaatcggagagagacaaaaaagaaataaatacctgattgtcttctactgagattgctaaagaggcaaacttatctggtacatacgagtatcaaatgtggagaaactatcacccggactcaatgttttagattcttgaaatgtaatttttccaggaacatcaatgtcaaacagatggatctttctatactttgctagtaaagttccatcaggcccaaacacagcacaggtgttatataatttcccagcatcctcttcagggatagagcctccaatgagatatatgctgcattcctttgctacttcagaaagcttctgtgtggattcaccaggaattttctctgcatattcaggaaaatatttcgctccatatggagaattaaagcattccggcaaagaaactattttggctccttgcgttgctgcctcccggatgaagctacaagcgcgagtgacgttatctgatttgatggaagaaatctgaagctggatgagggccaagcggaaagaggtcatgactctgcagacaagcaccacctgcggcgcggactgagcgctggagatccggcatcccgggaattccggaccggtcc

SEQ ID NO: 358769 - DNA, 473 bp, Homo Sapiens
tggaacaggagaaaattgttaagtgtcaatttgctgccccttttttctgtaagtctatcttctataaagtaatgtagtccctattatcatgatgctatttcactatataacattattttcaatgcctgcatagtaaacacattgtaggggtataggctgaatttacgtaaccagttactgatattagagatgcagagtttttctaattgttttactgacaacagcaacacagaaatctccaacctcacatgcctacatttccactattgacttggaataaattcttacaagtgaaatttagtcaacatatataactttcatgtgacagttggtaaatgttgctaaatcaattttcagaaagcatatgccaatattggttgtacatatttcctgaaatccttgtctgcactaagtagcaacataaatacttctgtggttacctgtgaggtttaacgcttttcaaatgattgttg

SEQ ID NO: 358770 - DNA, 607 bp, Homo Sapiens
  misc_feature (392)..(392): n is a, c, g, or t
  misc_feature (474)..(474): n is a, c, g, or t
  misc_feature (496)..(496): n is a, c, g, or t
  misc_feature (498)..(498): n is a, c, g, or t
  misc_feature (526)..(526): n is a, c, g, or t
  misc_feature (530)..(531): n is a, c, g, or t
  misc_feature (540)..(540): n is a, c, g, or t
  misc_feature (542)..(542): n is a, c, g, or t
  misc_feature (551)..(551): n is a, c, g, or t
  misc_feature (553)..(553): n is a, c, g, or t
caggaattcggcacgagcatctctccaactaaagtcctataacattccaacccattgccttgagttctccttggttgatctcctgggtgtcccaactctcagatagtcctgtcacactcatggggctttattgcctagtttacatgggggtgcttctttcctgcctgctgcttccctctttgtgggtgaagatcagttgctataatggcctggcctttcttcctcttcccctttcactcaattcttctctttcagcccccaggaagacgcagtagcttctctccttggtaaatttgggaaaaataaactggatgtactaaccagcctctctgaagactgctttaaatctttattctaatatgacaatatgttcagtcagctctcccagattntatataactgggagttgtctttttcagctcccctcagtgcctctctgctctgagttaacatctggtgctttcaaagcttacntgtcagatgccattcattcaananatactaatcagtgcacgtactgtcctgngttnngggaataanantgagaacanantgaccatggtctagccctcatgaagtcacactttcatttattatctgggctcat

SEQ ID NO: 358771 - DNA, 1425 bp, Homo Sapiens
  misc_feature (1306)..(1340): n is a, c, g, or t
gatcctccgggctgcaggaattcggcacgaggaaaagcaagggcagggttcagaaagactgaatgtaaagctgggctctgagtctgccaggcccttcgtgtgttgctctgcacattaattaaagggtctacgaggtcagcaaggacgcccaagaagactcagtcatgaaaggtgaactgctcctgttttccagtgtgattgtcctgctccaggtggtatgcagctgcccggacaagtgttactgtcagtcatctacaaattttgtagactgcagccagcagggtctggccgaaatcccttcccatttacctcctcagactcgaacgctgcatttacaagataatcagatacaccatcttcctgcttttgcatttaggtcagtgccatggctcatgaccttaaacttgtccaacaattccctttcaaatctggcccctggagctttccatgggcttcagcacttgcaggttttaaatctaacccagaattcactcctttccctggaaagcagacttttccattccctccctcagctgagggagcttgatttgtcatcaaacaacataagccaccttcccacatccttgggagagacttgggagaacctaactatacttgcggttcaacaaaaccagcttcagcagcttgatcgagcgctcctggaatccatgcccagtgtgaggcttttacttctcaaggacaacctctggaaatgcaattgccacttgctcggtcttaaactctggctggagaaatttgtctataaagggggactaacagacggcatcatctgtgaatcaccagacacctggaagggaaaggacctccttaggatccctcatgagctgtaccagccctgccctcttcctgctcctgatccagtgtcctcgcaggctcagtggcccggctctgcccacggtgtggtcctgaggcctcctgagaaccacaacgcgggggagcgagaactcttggagtgcgagctcaaacccaagccaaggccggccaacctgcgtcatgccattgccactgtcatcatcactggcgttgtgtgtgggattgtgtgtctcatgatgttggcagctgccatctatggctgcacctatgcggcaatcacagcccagtaccatgggggacccttggctcaaaccaatgatcctgggaaggtggaagaaaaagagcgatttgacagctcaccagcctgagagcttttgtctcaaataggattggtcattgcaggccagaagatagtgtctgagtagggctgatgtgtttcctgttagtctgattttgcttttgccaaaagacnnnnnnnnnnnnnnnnnnnnnnnnnnnnnnnnnnngatgtgtctgtaaaaaatatttctggggaggaatttatgttgcgatttttaaaatactataggtaaaataaagatgatacttgtg

SEQ ID NO: 358772 - DNA, 136 bp, Homo Sapiens
gctaggtgctgggaataccactgatgagacagacaaggtccctactcttgtggagtttacttctggtggaggagacagatgataagtaaacaaataaataatgtagtttgagatagtgattaagtgctatgaagtc
